United States Patent Application Publication US 2025/0084491 A1 - sequence listing, part 20

SEQ ID NO: 372389 - DNA, 75 bp, synthetic construct
  source 1..75: mol_type = other DNA
aaaagattataaattcatactgagagggggaagcggtgggctggctgttcaggtcggtggcgcgggatattatga

SEQ ID NO: 372390 - DNA, 75 bp, synthetic construct
  source 1..75: mol_type = other DNA
gcaacccgtaccggaggcacaatggggaaagccctttctgccagtgcccgtgttcttgaactgcctgtactggaa

SEQ ID NO: 372391 - DNA, 75 bp, synthetic construct
  source 1..75: mol_type = other DNA
caacctgatggcacagggctcacgaatatttttttagagcctcacacgtccagcgaaaacagcgagtattcaaaa

SEQ ID NO: 372392 - DNA, 75 bp, synthetic construct
  source 1..75: mol_type = other DNA
atgaaactgaaatatagtattagtgattatactgaggatgaatttctggagtttgtaaaaagaatatgtagtgct

SEQ ID NO: 372393 - DNA, 75 bp, synthetic construct
  source 1..75: mol_type = other DNA
gtgatgccggactgtgggggcgacgttcccgcctgcgattaagcggtaagccgctgctgctgaccgaactgtttt

SEQ ID NO: 372394 - DNA, 75 bp, synthetic construct
  source 1..75: mol_type = other DNA
agacaaaaacagcgtgatattaacgattgctacgattcagtattcccttcaactgacaatatccgggatcgacga

SEQ ID NO: 372395 - DNA, 75 bp, synthetic construct
  source 1..75: mol_type = other DNA
aaatagcgcagcaactggcactcgagttctaccgtattctgaaaacccaaaataaatcacagctaagaagcttgt

SEQ ID NO: 372396 - DNA, 75 bp, synthetic construct
  source 1..75: mol_type = other DNA
caactggcactcgagttctaccgtattctgaaaacccaaaataaatcacagctaagcagttggttcactcgagtc

SEQ ID NO: 372397 - DNA, 75 bp, synthetic construct
  source 1..75: mol_type = other DNA
gactgggacaaaatcaacctgctgaaaacctttggcccgatgggtggcctgctggtgacatatttgctgttgttt

SEQ ID NO: 372398 - DNA, 75 bp, synthetic construct
  source 1..75: mol_type = other DNA
ccaccggttactactgccgtcagacttccttcagtgtcccgggtaagccgctggttgatgccctggagaataacc

SEQ ID NO: 372399 - DNA, 75 bp, synthetic construct
  source 1..75: mol_type = other DNA
cagacttccttcagtgtcccgggtaagtcgctggttgataccctggagaataaccagggatgaagaaaattatgc

SEQ ID NO: 372400 - DNA, 75 bp, synthetic construct
  source 1..75: mol_type = other DNA
atgaccaattcagcacaccagcgactggatatggcgggaaatggtggcccgggggttacaggcagtgaaaccatc

SEQ ID NO: 372401 - DNA, 75 bp, synthetic construct
  source 1..75: mol_type = other DNA
gagagcaggagtacgggcgaccaccagttacagtaatacaggattccagttttgttctcccttataatttcaaag

SEQ ID NO: 372402 - DNA, 75 bp, synthetic construct
  source 1..75: mol_type = other DNA
gaaaaaatcaggaggatgaatattcccgtagaaaacaaaattaatatttaccctgacttatataaaaacatcgac

SEQ ID NO: 372403 - DNA, 75 bp, synthetic construct
  source 1..75: mol_type = other DNA
ttaatactttaacgtctttatcaaaggcagaaaataatcataactatcaaacggaaatgctacttcgctggaact

SEQ ID NO: 372404 - DNA, 75 bp, synthetic construct
  source 1..75: mol_type = other DNA
aattatccatctggaaggatcgccattaacccgcatcgacgggatgatgatcctcggcatgtttggcggctgctt

SEQ ID NO: 372405 - DNA, 75 bp, synthetic construct
  source 1..75: mol_type = other DNA
aaatcatcggcgtcctgctcgtgatcgggagtatctggctgggccaacgttccaaccgcactcctagggcgcgta

SEQ ID NO: 372406 - DNA, 75 bp, synthetic construct
  source 1..75: mol_type = other DNA
cactgatccaaactttgggcatgcagatttcttttctcctttggatgcactaaagtttattgaagctggcataca

SEQ ID NO: 372407 - DNA, 75 bp, synthetic construct
  source 1..75: mol_type = other DNA
gcctgccagtggaatcatggatttcgacctcggcatgagtgtggtcggagtcgtccagtatgcccgcctgctaca

SEQ ID NO: 372408 - DNA, 75 bp, synthetic construct
  source 1..75: mol_type = other DNA
cggtgcactacgcagtgatgcggatacttggcgtcttgctgcatatggtaccaccccgctcggaaacggctggca

SEQ ID NO: 372409 - DNA, 75 bp, synthetic construct
  source 1..75: mol_type = other DNA
cacggtgtgcatgtgttggccggacttcataatgacagtttctggggattacgtgagggaacggcgaaaatagca

SEQ ID NO: 372410 - DNA, 75 bp, synthetic construct
  source 1..75: mol_type = other DNA
ttgatgattttgccagcaatgacgctttcggcagcagtggtttcaatactggcggagagtggaattttggtgtcc

SEQ ID NO: 372411 - DNA, 75 bp, synthetic construct
  source 1..75: mol_type = other DNA
tatgttgacgaaaaactggatagcagcctgacctgggacacccgcttgtcctggacgccacaatttctgaaacaa

SEQ ID NO: 372412 - DNA, 75 bp, synthetic construct
  source 1..75: mol_type = other DNA
tactatggcgggaatattcttgatatgggattacgtgatatccgcaatagctggacggaatcggtatcaggtaat

SEQ ID NO: 372413 - DNA, 75 bp, synthetic construct
  source 1..75: mol_type = other DNA
gttaacatcgcatatcgatgagaataacaagagcgcatttaatcaaggttcttcaggaagtacttattactctcc

SEQ ID NO: 372414 - DNA, 75 bp, synthetic construct
  source 1..75: mol_type = other DNA
cctcttctgttcgtatcggcggcgaccgctttgacgaagccatcattaactacgttcgtcgtaactatggttctc

SEQ ID NO: 372415 - DNA, 75 bp, synthetic construct
  source 1..75: mol_type = other DNA
gttttaaaaatatgagtgatggaattaatgatttaataaccgaactgagcgggaataaaccgctggtcatccccg

SEQ ID NO: 372416 - DNA, 75 bp, synthetic construct
  source 1..75: mol_type = other DNA
atggcgctggttgttatcgacggtaaccagcgcgtctttcgcagttatggcgaaacgcgacctggtaataacgtt

SEQ ID NO: 372417 - DNA, 75 bp, synthetic construct
  source 1..75: mol_type = other DNA
ctcacctttgctccaactctaaaagctaacgatatcaataatttctttagccgtccggagcttcgcctgtttgcc

SEQ ID NO: 372418 - DNA, 75 bp, synthetic construct
  source 1..75: mol_type = other DNA
acacaacaacaaaatcagctaacaactcaagaagtagcacagagaacagttcagctcgaacagaaatccgcagaa

SEQ ID NO: 372419 - DNA, 75 bp, synthetic construct
  source 1..75: mol_type = other DNA
tatcaaacacgaaatcggttctgcttatccgggcgatgaagtccgtgaaatcgaagttcgtggccgtaacctggc

SEQ ID NO: 372420 - DNA, 75 bp, synthetic construct
  source 1..75: mol_type = other DNA
cgctttatgacagttttgtgccggttgaatttggtcgcttcaatggcggggtaattgatgcaaagatcaaacgct

SEQ ID NO: 372421 - DNA, 75 bp, synthetic construct
  source 1..75: mol_type = other DNA
atgtggctatggatataaaacaactttctgaagcgactatcggcaacatgatccaaattgccgggaagaaatttt

SEQ ID NO: 372422 - DNA, 75 bp, synthetic construct
  source 1..75: mol_type = other DNA
attggttcaatattatatctgacaacatattttctttaaaacttatgtgtcaccaaggtttggttcgcatcgatc

SEQ ID NO: 372423 - DNA, 75 bp, synthetic construct
  source 1..75: mol_type = other DNA
attctggttgaaggtaaaaaagttcaaaatagtgtgatgctgacgattgcaacagctcagtattctcttcagttg

SEQ ID NO: 372424 - DNA, 75 bp, synthetic construct
  source 1..75: mol_type = other DNA
tctggaataagcttctgccagaaaatgatgctggactgagcaccagaattcagcacaccaccaccgaccgtctgg

SEQ ID NO: 372425 - DNA, 75 bp, synthetic construct
  source 1..75: mol_type = other DNA
ggcaagaaaagcagatactttgtatcacctgacaccaaaaggtgatctacagataatatatcaggtagctacaaa

SEQ ID NO: 372426 - DNA, 75 bp, synthetic construct
  source 1..75: mol_type = other DNA
acagccgccggtaaagaccgactaatcggtaacgataaggacaataccttccatacaagctctggcggcggtaca

SEQ ID NO: 372427 - DNA, 75 bp, synthetic construct
  source 1..75: mol_type = other DNA
aaaaacgacattgcttataacttttatcttgcttctctgcgtcttgatttaaaagccgctaatcgtcaaccaaat

SEQ ID NO: 372428 - DNA, 75 bp, synthetic construct
  source 1..75: mol_type = other DNA
caaactgcatgaaggctgggaaaacgagctggtgattggcgtggacgacacgtttcctttttctctgcttgcgcc

SEQ ID NO: 372429 - DNA, 75 bp, synthetic construct
  source 1..75: mol_type = other DNA
tacacgctgtatatggcggatcgcattagctggcgtaatgtgtcgttaatgcccggcgtgcggtatgactatgat

SEQ ID NO: 372430 - DNA, 75 bp, synthetic construct
  source 1..75: mol_type = other DNA
gactaaaatgtctacaggcgcaagctgatttgttaaaagctcttaaagagaaacttccaacaacaggcgcaacct

SEQ ID NO: 372431 - DNA, 75 bp, synthetic construct
  source 1..75: mol_type = other DNA
tccacgagatttaaaaaatcagttgacgctgagactatctaataactctatctctcacgaaatccttcttccaga

SEQ ID NO: 372432 - DNA, 75 bp, synthetic construct
  source 1..75: mol_type = other DNA
gaaatagcatatccaataaaagtaatatatccagatataacacggaatcaaatattaaacaccttgaacatataa

SEQ ID NO: 372433 - DNA, 75 bp, synthetic construct
  source 1..75: mol_type = other DNA
aaggtggcgtgcgtatcagcagcaccgccgtgcgtcaggcgctggcggatgacaatctggctctggcagaaagtt

SEQ ID NO: 372434 - DNA, 75 bp, synthetic construct
  source 1..75: mol_type = other DNA
ttgatgtgctgtggggggaactggaatggtcttccccgacagatgacgatgagctgccggaagtcaccggacctg

SEQ ID NO: 372435 - DNA, 75 bp, synthetic construct
  source 1..75: mol_type = other DNA
tgcacactggagcactggtacgccgaacagggctgcaatttctgtggctggcagcgatatgagcgtggagagctt

SEQ ID NO: 372436 - DNA, 75 bp, synthetic construct
  source 1..75: mol_type = other DNA
cgccaaatgcgctggtcacaccagaagataccgctgatgttctgaatattttccgctgcttcggtgaggcggaag

SEQ ID NO: 372437 - DNA, 75 bp, synthetic construct
  source 1..75: mol_type = other DNA
caccgccctgcatgaccagttcggcatcaacgccgcagaatcggcgcaagaagtagcgcaaatcgccgacatcat

SEQ ID NO: 372438 - DNA, 75 bp, synthetic construct
  source 1..75: mol_type = other DNA
actggaagagaaaggcttccgtgccgcagtgatcgaagcgatgacgaagtgtatggaaaaatcagaaaaactcag

SEQ ID NO: 372439 - DNA, 75 bp, synthetic construct
  source 1..75: mol_type = other DNA
caatggctatccagcaggtcactgaatttgcaaaacagaaagttgatctggataaccgtaaaattattaaacact

SEQ ID NO: 372440 - DNA, 75 bp, synthetic construct
  source 1..75: mol_type = other DNA
tctggaagcaacaccagggatgctggtgcacattggcttgtcgctcttttcctatgccacgttgattatcgccgc

SEQ ID NO: 372441 - DNA, 75 bp, synthetic construct
  source 1..75: mol_type = other DNA
cgctggtctgccacgcaatcgctctggaagcccgcatcctgcccgacggtgatagcggacaaaacctcagcctgc

SEQ ID NO: 372442 - DNA, 75 bp, synthetic construct
  source 1..75: mol_type = other DNA
atggttctgcccacccgcctggatgttgaagtgaacggcttcaatggcggtgttctgaacggtgttccttctgca

SEQ ID NO: 372443 - DNA, 75 bp, synthetic construct
  source 1..75: mol_type = other DNA
cgggcgtgtagtccacggtgatgaattagggcgcactataggtttcccgacggcgaatgtaccgctacgccgtca

SEQ ID NO: 372444 - DNA, 75 bp, synthetic construct
  source 1..75: mol_type = other DNA
gatttccgctttggcgctggtcgtgaaggcgatttcttgttattacagaaagctggcatggaatacggcttcgat

SEQ ID NO: 372445 - DNA, 75 bp, synthetic construct
  source 1..75: mol_type = other DNA
gcaatcaggacgtgatggtcatgagcccggacagcgatttcttccgctacatgaagacgccgacttccgcaacgc

SEQ ID NO: 372446 - DNA, 75 bp, synthetic construct
  source 1..75: mol_type = other DNA
aaccgtgaacggattctggcaaaagctgtttcacaaggtctgaccgtcagcgacaacatgacagatgacgaagtg

SEQ ID NO: 372447 - DNA, 75 bp, synthetic construct
  source 1..75: mol_type = other DNA
catctggtacgcaacagtctcgaccacggaattgaactgccggaaaaacgcctcgccgcaggcaaaaacagcgtc

SEQ ID NO: 372448 - DNA, 75 bp, synthetic construct
  source 1..75: mol_type = other DNA
cgaactgttagccgatatggagcagcatctgcttaatttgcagccagaagcgccagatgccgaacagttgaatgc

SEQ ID NO: 372449 - DNA, 75 bp, synthetic construct
  source 1..75: mol_type = other DNA
tactggggcacccgtttgccatctccgggcgcgttgtccacggtgatgagttagggcgcactattggtttcccga

SEQ ID NO: 372450 - DNA, 75 bp, synthetic construct
  source 1..75: mol_type = other DNA
atggtgatgctttttgaacctcaaccactggaactgtttgctaccgataaagccccggcaagactgacccggctg

SEQ ID NO: 372451 - DNA, 75 bp, synthetic construct
  source 1..75: mol_type = other DNA
gccagaaaaacggctcgccgcaggtaaaaacagcgtcggaaatttaattctgtctgccgaacatcagggcggcaa

SEQ ID NO: 372452 - DNA, 75 bp, synthetic construct
  source 1..75: mol_type = other DNA
cgtgccggtatagccattaacggttctgccccagcggatattcgtgtgaaaaaccccgattttttaaacgcgttc

SEQ ID NO: 372453 - DNA, 75 bp, synthetic construct
  source 1..75: mol_type = other DNA
tccgccaacgtgcaactggttggctatgaaaagattggttcgggtctgattacggtgatggtccgcggtgatgtt

SEQ ID NO: 372454 - DNA, 75 bp, synthetic construct
  source 1..75: mol_type = other DNA
gaagcagcaacagtaatggcgaatagcattaatgcgcaaaataatcttgatatattattaggtgatctgaggtag

SEQ ID NO: 372455 - DNA, 75 bp, synthetic construct
  source 1..75: mol_type = other DNA
ctgccaggccttgcgtcaactggcattagaagcgaaaggcgaaacgccatccgcagtgacccgattaagtgtggt

SEQ ID NO: 372456 - DNA, 75 bp, synthetic construct
  source 1..75: mol_type = other DNA
gacgcttataaacagtcgcaagagccggatgccgccagcttcgattatatctgccaggccttgcgtcaactggca

SEQ ID NO: 372457 - DNA, 75 bp, synthetic construct
  source 1..75: mol_type = other DNA
accttgaaagtaactatcgcaaaattcctggaatatccgccgcaacaattcttggcgacggaagcgtagcactga

SEQ ID NO: 372458 - DNA, 75 bp, synthetic construct
  source 1..75: mol_type = other DNA
gacgccgcgtcgtctggtttaacgttgcgggtgcagtcattctgacactagcctacttcggcagccgaattgtcc

SEQ ID NO: 372459 - DNA, 75 bp, synthetic construct
  source 1..75: mol_type = other DNA
gcatcgttgatgtcggttatcggttactcgcttaacgacagtatcgtggtatcggaccgtattcgtgaaaacttc

SEQ ID NO: 372460 - DNA, 75 bp, synthetic construct
  source 1..75: mol_type = other DNA
aaattacgctcgaaaaaccggctgaaattgacgtaatgcgtgatgcattgcaaaaagccggttttgaagagccaa

SEQ ID NO: 372461 - DNA, 75 bp, synthetic construct
  source 1..75: mol_type = other DNA
aggctggaacccaccggttactactgccgtcagacttccttcagtgtcccgggtaagccgctggttgatgccctg

SEQ ID NO: 372462 - DNA, 75 bp, synthetic construct
  source 1..75: mol_type = other DNA
aaaatgcaatcattgcaggatgggtcaatgtaatcaccatggggcagggctggaaagaaactgttggatggaatg

SEQ ID NO: 372463 - DNA, 75 bp, synthetic construct
  source 1..75: mol_type = other DNA
tcattgcaggatgggtcaatgtaatcaccatggggcagggctggaaaggaactgttggatggaatgcagccggtg

SEQ ID NO: 372464 - DNA, 75 bp, synthetic construct
  source 1..75: mol_type = other DNA
tgtgttgaaggccgctaaggaagcaatcggcgaagtacttcctgctaatgcgacagagaaacaacgtcaggaata

SEQ ID NO: 372465 - DNA, 75 bp, synthetic construct
  source 1..75: mol_type = other DNA
tgttcaaagatgtttcaaaactaaaaacagaaaatcttccagaattattcttaacaaaaatagatactgatacgt

SEQ ID NO: 372466 - DNA, 75 bp, synthetic construct
  source 1..75: mol_type = other DNA
accctccagatatcaggtcctgacttgattcaaagaaagatgttgcaatttttcaggagtagaggggtgttaggt

SEQ ID NO: 372467 - DNA, 75 bp, synthetic construct
  source 1..75: mol_type = other DNA
caaaagcgaccatcaaatccccctgtcagataagttcctgaaaaggaaaaaacggtctcctgtagctgaagataa

SEQ ID NO: 372468 - DNA, 75 bp, synthetic construct
  source 1..75: mol_type = other DNA
gatttattagtctgatgtgtgaaaaagaaccggagctgaaaatagcgcagcaactggcactcgagttctaccgta

SEQ ID NO: 372469 - DNA, 75 bp, synthetic construct
  source 1..75: mol_type = other DNA
aacctgtcgcctttgagctgagtctgatttactgggccgggaacaatataaaggttcagctggaggatgagacac

SEQ ID NO: 372470 - DNA, 75 bp, synthetic construct
  source 1..75: mol_type = other DNA
ttctgcaacaactggaggatatttaccggctcactgatccaaattttgggcatgcagatttcctttcacctatag

SEQ ID NO: 372471 - DNA, 75 bp, synthetic construct
  source 1..75: mol_type = other DNA
gttaaagggcagttaggtatctccaaagaaatggtgccgagcaagattccgggggctgcaggtaatatgggggct

SEQ ID NO: 372472 - DNA, 75 bp, synthetic construct
  source 1..75: mol_type = other DNA
gtaggtggcccgaagtgggagcatttgccgccagaccaacaaccagaacgcggcgcgctgttacctctgcgtaaa

SEQ ID NO: 372473 - DNA, 75 bp, synthetic construct
  source 1..75: mol_type = other DNA
gcccgcatcgcgtttgaatctgctcgcaagcgtcgccacaaagtcacctcaatcgacaaagctaacgtgctgcaa

SEQ ID NO: 372474 - DNA, 75 bp, synthetic construct
  source 1..75: mol_type = other DNA
tattgccgggagacggtattggcccggaagtaatgaaccaggcgctgaaagtgttggacgccgtgcgcaaccgct

SEQ ID NO: 372475 - DNA, 75 bp, synthetic construct
  source 1..75: mol_type = other DNA
tggtataaggaagcagctgaacaagggcatgttcatgcacaatacacgttgggtttgatctacagaaacggcacg

SEQ ID NO: 372476 - DNA, 75 bp, synthetic construct
  source 1..75: mol_type = other DNA
atgaacaaaaaaatatattttatattcacaatatttatagttgcggcaatcacttgtattagccaacctaagaaa

SEQ ID NO: 372477 - DNA, 75 bp, synthetic construct
  source 1..75: mol_type = other DNA
tgatcactggctcgatggggatgttgccttccgccagcctgaacgagcaaggttttggactgtatgaaccggcgg

SEQ ID NO: 372478 - DNA, 75 bp, synthetic construct
  source 1..75: mol_type = other DNA
agttcaatgccgaccgctatttgttcgcggaaaacccggttgtacatctcgacacggtcaccagcaacagcaaat

SEQ ID NO: 372479 - DNA, 75 bp, synthetic construct
  source 1..75: mol_type = other DNA
cggtccgtttgagttgctccaggctcgccagctcatcgaaagtaatattgccgagttcgcggcaactcaggtaac

SEQ ID NO: 372480 - DNA, 75 bp, synthetic construct
  source 1..75: mol_type = other DNA
gtgtaaatcctctcgccaccctcccctgcattcagcaaaatcagactccacggacatgtaattttgataacgaac

SEQ ID NO: 372481 - DNA, 75 bp, synthetic construct
  source 1..75: mol_type = other DNA
gccttccgccagcctgaacgagcaaggttttggtctgtatgaaccggcaggcggctcggcaccagatatcgcagg

SEQ ID NO: 372482 - DNA, 75 bp, synthetic construct
  source 1..75: mol_type = other DNA
tttaacgaaaccagcgacgatttcgagttcaatgccgaccgctatctgttcgccgaaaacccggtagtgcatctc

SEQ ID NO: 372483 - DNA, 75 bp, synthetic construct
  source 1..75: mol_type = other DNA
cggtccgtttgagttgctccaggcacgccagctcatcgaaagcaatattgctgagtttgccgctacccaggtcac

SEQ ID NO: 372484 - DNA, 75 bp, synthetic construct
  source 1..75: mol_type = other DNA
aataatattattgggaaacctatccgtttcagaccattaacatttgagagtaattttacccatggacatatgcag

SEQ ID NO: 372485 - DNA, 75 bp, synthetic construct
  source 1..75: mol_type = other DNA
ttgccgtgaaaaagcatttcttggtacgcctgtaattttacaggatcgctgtgtcggggtgataagtttgattgc

SEQ ID NO: 372486 - DNA, 75 bp, synthetic construct
  source 1..75: mol_type = other DNA
gaaacatcggctgtagtaaaaaccgtgacgccagctacgccgcgtaaaatggccgtggcagatagcagcgagaac

SEQ ID NO: 372487 - DNA, 75 bp, synthetic construct
  source 1..75: mol_type = other DNA
gcaagttgctgatgaactgggaatcggcattgctacgctctatcgtaagattaaaaaatatgaattgttaagtgc

SEQ ID NO: 372488 - DNA, 75 bp, synthetic construct
  source 1..75: mol_type = other DNA
acgcctgtcattttacaggatcgttgtgttggggtgataagtttgattgccgttacccacgagcaacaagaacat

SEQ ID NO: 372489 - DNA, 75 bp, synthetic construct
  source 1..75: mol_type = other DNA
tttcgtgaagatcttttctatcgcttgaatgtcattccgttaactctgcccccgttgcgtgagcgtcaggaagat

SEQ ID NO: 372490 - DNA, 75 bp, synthetic construct
  source 1..75: mol_type = other DNA
ttcgattggcgatattatggtgccggttcacaccggcaacggtagcatcgatctgattatccccggcgtacataa

SEQ ID NO: 372491 - DNA, 75 bp, synthetic construct
  source 1..75: mol_type = other DNA
cgacgatatcttcttcaagtttgggttaaatctctctgacgaactgattccgcaagtgcaaaaagagttacataa

SEQ ID NO: 372492 - DNA, 75 bp, synthetic construct
  source 1..75: mol_type = other DNA
ggccatcggcgatatcatggtaccggtccataccggcaacggcagcatcgatctgattatccccggtgtacataa

SEQ ID NO: 372493 - DNA, 75 bp, synthetic construct
  source 1..75: mol_type = other DNA
gcagcgctcaggcggctcgtgaaattaaaagcctgattgaagactcggtggggaaagtggatgttggctctacgc

SEQ ID NO: 372494 - DNA, 75 bp, synthetic construct
  source 1..75: mol_type = other DNA
aattgacggcattgctttccagaccaatattctggctttgaacgcggcggttgaggctgcgcgcgcgggtgagca

SEQ ID NO: 372495 - DNA, 75 bp, synthetic construct
  source 1..75: mol_type = other DNA
gtggcagtgttccggattcagcaacagcagcaacagcagcgtgaagcatcggctgtggtaaaaaccgtgacgcca

SEQ ID NO: 372496 - DNA, 75 bp, synthetic construct
  source 1..75: mol_type = other DNA
gttacaggcgcatttcttcggtactttgaacgcaggtgaggtgttatgggagcgtatccgcaacctgttgaaaga

SEQ ID NO: 372497 - DNA, 75 bp, synthetic construct
  source 1..75: mol_type = other DNA
tgcgctggtccgtaatgcgctggcagaagcggtggtggcgcgtctggacacagactttgtggacccgaaaaaagc

SEQ ID NO: 372498 - DNA, 75 bp, synthetic construct
  source 1..75: mol_type = other DNA
cgaagtttgattttgaatccatcaccttcagtcatgcgaaggtgtcggccattgcggtactgacggaagagctga

SEQ ID NO: 372499 - DNA, 75 bp, synthetic construct
  source 1..75: mol_type = other DNA
tcgctggctgcggctaaaggcgtccgatctgaagccctggaagtggcccgtcgtcagtatccggatgacagtcgt

SEQ ID NO: 372500 - DNA, 75 bp, synthetic construct
  source 1..75: mol_type = other DNA
ctcctgttaggacatgctagcgaatgtcagatggacagtgctggccgcttactggtcgcacctgtcctgcggcaa

SEQ ID NO: 372501 - DNA, 75 bp, synthetic construct
  source 1..75: mol_type = other DNA
acagtgaaatcatgttgtatgccttctgcgccctgctggacgagagtgtgctgaaccgtgaaaaaacagacgatg

SEQ ID NO: 372502 - DNA, 75 bp, synthetic construct
  source 1..75: mol_type = other DNA
ctggaagagcaggccagccgcctgactgaagctgtggctgtatttcgtattcagcaagagcaacaacgtcagcgc

SEQ ID NO: 372503 - DNA, 75 bp, synthetic construct
  source 1..75: mol_type = other DNA
tgaagccctggaagtggcccgtcgtcagtatccggatgacagccgtctgcatcatgtcctgaaatcggcagtggg

SEQ ID NO: 372504 - DNA, 75 bp, synthetic construct
  source 1..75: mol_type = other DNA
agctgatactggtgaatgccccggatatttatctggcggatgatggaggcgtggcggtggatatgtcccgcgaag

SEQ ID NO: 372505 - DNA, 75 bp, synthetic construct
  source 1..75: mol_type = other DNA
ggtgagggtaaggcaaaacccctgacgaagtttgattttgaatccatcaccttcagtcatgcgaaggtgtcggcc

SEQ ID NO: 372506 - DNA, 75 bp, synthetic construct
  source 1..75: mol_type = other DNA
tacgagggcatttttatcgcaggtgatcatgttagttcgaaaagcaaaaaggccatcctttcggatggcctttcg

SEQ ID NO: 372507 - DNA, 75 bp, synthetic construct
  source 1..75: mol_type = other DNA
aatttttatggatcgtggggagatagtggaacaagctgcacctgatgaatttttgcgcatcctaaatcagagcgt

SEQ ID NO: 372508 - DNA, 75 bp, synthetic construct
  source 1..75: mol_type = other DNA
catttttatggatcgcggagagattgttgagcagggcgcgccggatgagttttttgcacatccgaaatcggaacg

SEQ ID NO: 372509 - DNA, 75 bp, synthetic construct
  source 1..75: mol_type = other DNA
aagcacaaggcattcgctttgtggtcgccagcgggaatcaatattatcagttgatctctttcttccctgaaattg

SEQ ID NO: 372510 - DNA, 75 bp, synthetic construct
  source 1..75: mol_type = other DNA
agatagcgcgtcgtaaccctggtgagccggaccgggaagtccgtttggcgtgcagggatatttttcgcagtagta

SEQ ID NO: 372511 - DNA, 75 bp, synthetic construct
  source 1..75: mol_type = other DNA
cttctggcgaagcaatacggcgtgacatggaatggacgtcgctacgatccgaaagactgggaaaagggcgatacg

SEQ ID NO: 372512 - DNA, 75 bp, synthetic construct
  source 1..75: mol_type = other DNA
gctggtttttttggtcttattggcatcctgttgcagcatgcctgcatcatggtctggcaatcaccactgtcgaac

SEQ ID NO: 372513 - DNA, 75 bp, synthetic construct
  source 1..75: mol_type = other DNA
catgttttattgcagtcagcgcaaatgcctgtttcaactgccgttgcgacagtcattaaaactaaacaggttgaa

SEQ ID NO: 372514 - DNA, 75 bp, synthetic construct
  source 1..75: mol_type = other DNA
catggaatggacgtcgctacgatccgaaagactgggaaaagggcgatacggtcaaccaatgcattagcgctgcaa

SEQ ID NO: 372515 - DNA, 75 bp, synthetic construct
  source 1..75: mol_type = other DNA
atgcttctggtcagcctggtggtgcgcgttcagataagctgctctatcaggcaaaacttgctctggatgaagatt

SEQ ID NO: 372516 - DNA, 75 bp, synthetic construct
  source 1..75: mol_type = other DNA
acgctatgaccaggatccggcaaaccagggcatcgttgatgcgctgaaagcagacaagaaagatccgtccgggcc

SEQ ID NO: 372517 - DNA, 75 bp, synthetic construct
  source 1..75: mol_type = other DNA
accacgcgcagtattcactggttccaggaacgtggatttaccccagtggatattgatttactgcccgagagcaaa

SEQ ID NO: 372518 - DNA, 75 bp, synthetic construct
  source 1..75: mol_type = other DNA
attatctcaatatcggaagattgccagctctcgtcgttctttgcttactggctggtttttttggtcttattggca

SEQ ID NO: 372519 - DNA, 75 bp, synthetic construct
  source 1..75: mol_type = other DNA
gagacaaagtgttaattatttgccgactttctgcaacgcgatatttggcggaaaacaatccctggccacaaatat

SEQ ID NO: 372520 - DNA, 75 bp, synthetic construct
  source 1..75: mol_type = other DNA
gtgtcggtaatgcgtcgctgtcgaacattgccggtgatgccgctgaaggcatgttggtcaccatgccaaaacgct

SEQ ID NO: 372521 - DNA, 75 bp, synthetic construct
  source 1..75: mol_type = other DNA
cagggcatcgttgatgcgctgaaagcagacaagaaagatccgtccgggccttatgtctggatcacctacgcggcg

SEQ ID NO: 372522 - DNA, 75 bp, synthetic construct
  source 1..75: mol_type = other DNA
ccggagttgatgtttcaggattatgaagggtttcccgggaatatggcctcagaatgccatatcaactgggcttat

SEQ ID NO: 372523 - DNA, 75 bp, synthetic construct
  source 1..75: mol_type = other DNA
ttgatagtttggcttcttatttctatgtagcagatgtattttgtattccatcaatagaaagaagtgaagcatttg

SEQ ID NO: 372524 - DNA, 75 bp, synthetic construct
  source 1..75: mol_type = other DNA
tcttgcgcgaaggtgagtttgccacttcattacaggcactgaaagagatcggaataaaagcaggcttttcagctt

SEQ ID NO: 372525 - DNA, 75 bp, synthetic construct
  source 1..75: mol_type = other DNA
cttgccaagccacgacttgattcgactggtacagggacgaattcagtgatcctcgatggatttgtagagcaggga

SEQ ID NO: 372526 - DNA, 75 bp, synthetic construct
  source 1..75: mol_type = other DNA
gaaattgaaccgccacaacccgcgccggatatgttaccccctgcaattcctgaacctgaaacattaggcgatagc

SEQ ID NO: 372527 - DNA, 75 bp, synthetic construct
  source 1..75: mol_type = other DNA
tgtcgcgatattttccgtagcactaagttaacgggcaaattaataccgttaattgaggaagtccttgccgcaggt

SEQ ID NO: 372528 - DNA, 75 bp, synthetic construct
  source 1..75: mol_type = other DNA
ggaattatcatggccattttactggctctggcaccggtgatgctggtacaggacaaaatgggcgtttttgctcga

SEQ ID NO: 372529 - DNA, 75 bp, synthetic construct
  source 1..75: mol_type = other DNA
cgttgcgatgaactggctcgtgccgcagcgatgaatcccacactggaagatacgggctatcaagtcgaagtttaa

SEQ ID NO: 372530 - DNA, 75 bp, synthetic construct
  source 1..75: mol_type = other DNA
ccgatggttcgtgtctgggcaatcctggacctgggggttacggcgctattttacgctatcgcggacgcgagaaaa

SEQ ID NO: 372531 - DNA, 75 bp, synthetic construct
  source 1..75: mol_type = other DNA
cgcagacaaaaaaccggtaaaaaatgtcgatctctggcaacgtctcgatgccgcgttgggtcagcatcaaatcaa

SEQ ID NO: 372532 - DNA, 75 bp, synthetic construct
  source 1..75: mol_type = other DNA
gagctggattgacaaaaaagtgttcgccaacgttaaagggatgaatgaacctgctgatggcgtaatgaatctcgt

SEQ ID NO: 372533 - DNA, 75 bp, synthetic construct
  source 1..75: mol_type = other DNA
gggctggattgacaaaaaagccttcgccagcgttaaaggaatgaatgattctgctgatggtgccatgaatcttgt

SEQ ID NO: 372534 - DNA, 75 bp, synthetic construct
  source 1..75: mol_type = other DNA
acctatcattcccggagcgcgtgatcatccgttcaaagtccacgaagtcattcctgaacttcacccggatatggt

SEQ ID NO: 372535 - DNA, 75 bp, synthetic construct
  source 1..75: mol_type = other DNA
ccccgcgcccggcgagccataactcaagccgcgcgatggtgtgggtgcgaaaaaatctgttctccagctggagca

SEQ ID NO: 372536 - DNA, 75 bp, synthetic construct
  source 1..75: mol_type = other DNA
accagtatcgacaaactgatccgcgcgctggttggcgtgatcctgtttcagtcagcatatgttgcggaagtcgtg

SEQ ID NO: 372537 - DNA, 75 bp, synthetic construct
  source 1..75: mol_type = other DNA
gttgccattgcgcgttcgctgtgtatgaagccgaaaattatgttgtttgatgagccaacgtcggcgctcgatccg

SEQ ID NO: 372538 - DNA, 75 bp, synthetic construct
  source 1..75: mol_type = other DNA
agttgatgctatcggcattatacaacttcttggaactattgatccttcaaattttagaattgattcaggaatcaa

SEQ ID NO: 372539 - DNA, 75 bp, synthetic construct
  source 1..75: mol_type = other DNA
gtatagatcgtttaaatctgattattgtttacattaccatttaggtgccccaataaataaaaacataaattcttt

SEQ ID NO: 372540 - DNA, 75 bp, synthetic construct
  source 1..75: mol_type = other DNA
atcttaccggttttgcagcggcgagctatcagcgcggcgttcgcttcattcaagtcccgacgacattgctgtcgc

SEQ ID NO: 372541 - DNA, 75 bp, synthetic construct
  source 1..75: mol_type = other DNA
aaaaacatgattggcgcgttctaccagccagcttcagtggtggtggatctcgactgtctgaaaacgcttcccccg

SEQ ID NO: 372542 - DNA, 75 bp, synthetic construct
  source 1..75: mol_type = other DNA
gcatatgctgcgtgataagaaagtccttgcgggagagatgcggttaattcttccgctggcaatcggtaagagcga

SEQ ID NO: 372543 - DNA, 75 bp, synthetic construct
  source 1..75: mol_type = other DNA
aagccgcgcgatggtgtgggtgcgaaaaaatctgttctccagctggagcaatagcctgctgactattggctgcat

SEQ ID NO: 372544 - DNA, 75 bp, synthetic construct
  source 1..75: mol_type = other DNA
ttccgctggcaattggtaagagtgaagttcgcggcggcgtatcgcacgaacttgttcttaacgctattaccgatt

SEQ ID NO: 372545 - DNA, 75 bp, synthetic construct
  source 1..75: mol_type = other DNA
cggtgtttttcaggcagtgctgggtgcggcgctgattgctacggcaatctggatgccgggaatcagtatcgcttt

SEQ ID NO: 372546 - DNA, 75 bp, synthetic construct
  source 1..75: mol_type = other DNA
gcgtctggcgggtgccaaaagtggcggtgtgtttcaggcggtgctgggtgcggcgctgattgcggtggcatggtg

SEQ ID NO: 372547 - DNA, 75 bp, synthetic construct
  source 1..75: mol_type = other DNA
gcctgttgggtggcattgctatcggtttgcctattgcctgggcactgttgttatgtggcgcagcgttaatgttct

SEQ ID NO: 372548 - DNA, 75 bp, synthetic construct
  source 1..75: mol_type = other DNA
gggcgtgatgcaggcgaaaatgaattatctgcccgtcttaatgagccgctggaaaatggtgccgtgattcacatc

SEQ ID NO: 372549 - DNA, 75 bp, synthetic construct
  source 1..75: mol_type = other DNA
gggcgctggtcacacagcttcccgcctttcgtcagaaactgaacgacggctggtatcaggtacgcatttccggac

SEQ ID NO: 372550 - DNA, 75 bp, synthetic construct
  source 1..75: mol_type = other DNA
ggagaagttggtgaaatattattaatagaaggacaacaatctattgttcttggccgtttaatagaggttaaatta

SEQ ID NO: 372551 - DNA, 75 bp, synthetic construct
  source 1..75: mol_type = other DNA
aggatgtcagcacgtccggattaacggcgcagttacatgaggctctgcctgacggcgctgtgattcatattgttc

SEQ ID NO: 372552 - DNA, 75 bp, synthetic construct
  source 1..75: mol_type = other DNA
gaaatgcgcgtggggtcacgggtgatttctcaggagatcagcacggcagatgaaggagatggtggtcaggttgtg

SEQ ID NO: 372553 - DNA, 75 bp, synthetic construct
  source 1..75: mol_type = other DNA
ggagaagtcggtgagattttattaattgaaggacaacaatctatcgttttaggcagactgattgaggtcaaatta

SEQ ID NO: 372554 - DNA, 75 bp, synthetic construct
  source 1..75: mol_type = other DNA
aaaacgggcttacccgtggtgaacaaatggaactggcacggattgcgctggcatcgctggaagcagagccagttg

SEQ ID NO: 372555 - DNA, 75 bp, synthetic construct
  source 1..75: mol_type = other DNA
aagaactaaagaaatattaccagacctggctgacaggttatacccggctggcagtctgcctgggaatgtgccatc

SEQ ID NO: 372556 - DNA, 75 bp, synthetic construct
  source 1..75: mol_type = other DNA
tcgtaccccagagtctgcaccggctgatttatggccctgacaaacggaccacgccgcctctggatgatgatctgg

SEQ ID NO: 372557 - DNA, 75 bp, synthetic construct
  source 1..75: mol_type = other DNA
atgcaaaaaatcgacctcggcaacaacgaatccctggtgtgcggcgtgttccccaaccaggatggaacgttcacc

SEQ ID NO: 372558 - DNA, 75 bp, synthetic construct
  source 1..75: mol_type = other DNA
gcggcggtgggttgttcgacctggtacaaaatatgtccccggaacaacagcaaattttgctgcgtgcgtctgccg

SEQ ID NO: 372559 - DNA, 75 bp, synthetic construct
  source 1..75: mol_type = other DNA
tagccacctatacggcaggcggcctaccgctgcagatccccgatgacgttagggataaagccgcattactgcatt

SEQ ID NO: 372560 - DNA, 75 bp, synthetic construct
  source 1..75: mol_type = other DNA
gcgattcttgccaggcctccaatcaggactctccgccgagcattccaaccgcacgtaagcggatgcaaatcaacg

SEQ ID NO: 372561 - DNA, 75 bp, synthetic construct
  source 1..75: mol_type = other DNA
tgccacacaacttgccatcaaactgaaagccgagaagatgattggtttttgctcttcacagggcgtcaccaatga

SEQ ID NO: 372562 - DNA, 75 bp, synthetic construct
  source 1..75: mol_type = other DNA
ttattgcccagccgctgggcgtagatgacggcgtagactactgccatagcggacgaattcggcggattgatgaag

SEQ ID NO: 372563 - DNA, 75 bp, synthetic construct
  source 1..75: mol_type = other DNA
aatgtgaacgtctgaggcagcgttctctggcaaataaactgatcagcctcttccgtcagtttggtggcacggagt

SEQ ID NO: 372564 - DNA, 75 bp, synthetic construct
  source 1..75: mol_type = other DNA
ggtacacccggattaccgcagttcttcccgtggtgaagtcctgctggagcgtatcgcagcccaggccaggcaaag

SEQ ID NO: 372565 - DNA, 75 bp, synthetic construct
  source 1..75: mol_type = other DNA
atcaacgtcgtcagtggtaattttattattgcccagccgctgggcgtcgatgacggcgtggattactgtcatagc

SEQ ID NO: 372566 - DNA, 75 bp, synthetic construct
  source 1..75: mol_type = other DNA
ctgttgcaggaactgttctctcgtgacggcattggtacgcagattgtgatggaaagcgcggagcaaatccgtcgc

SEQ ID NO: 372567 - DNA, 75 bp, synthetic construct
  source 1..75: mol_type = other DNA
cttcgtttgccgcattaaccccagaaattggcgctgtactggcgaacaccttgagcaacctgatttcagccgtat

SEQ ID NO: 372568 - DNA, 75 bp, synthetic construct
  source 1..75: mol_type = other DNA
ccatcggtcagctgattgcagttggcatcctggtcgcctgcggttcctcgatcctgattattcccggctttatcc

SEQ ID NO: 372569 - DNA, 75 bp, synthetic construct
  source 1..75: mol_type = other DNA
tccatcggtatcgcctttatggccgtcatcattgtaattgcactggcttatatgttcttcgctggccgcgcactg

SEQ ID NO: 372570 - DNA, 75 bp, synthetic construct
  source 1..75: mol_type = other DNA
ggaactctctgaagcatttaacggtatctcccagcgcctgatccctggtgcggttctggcgattgactgtgcggc

SEQ ID NO: 372571 - DNA, 75 bp, synthetic construct
  source 1..75: mol_type = other DNA
gctctactggggcattacctccaacatgatgtacaagccgactcaggaagtcaccgacggctgtggtttctccat

SEQ ID NO: 372572 - DNA, 75 bp, synthetic construct
  source 1..75: mol_type = other DNA
accggtggtggcgaaaatgtccgaagtctacggcattaacggcgcaatttccgatacttacgcttcgatgatggc

SEQ ID NO: 372573 - DNA, 75 bp, synthetic construct
  source 1..75: mol_type = other DNA
gcatggcggactggtcgattctggcaccgccgatgatgcagggcttcttctccgtcggtatcgcctttatggccg

SEQ ID NO: 372574 - DNA, 75 bp, synthetic construct
  source 1..75: mol_type = other DNA
atgctggaaggcattctcctgtctgaatgtgaacgtctgaggcagcgttctctggcaaataaactgatcagcctc

SEQ ID NO: 372575 - DNA, 75 bp, synthetic construct
  source 1..75: mol_type = other DNA
aacatctgctggttcatcatccgatgctggaaggcattctcctgtctgaatgtgaacgtctgaggcagcgttctc

SEQ ID NO: 372576 - DNA, 75 bp, synthetic construct
  source 1..75: mol_type = other DNA
agcggtagcgagttgcgtctgaagctggtctggctgtgctggtacgatttgatgctggggaacagtctggatgac

SEQ ID NO: 372577 - DNA, 75 bp, synthetic construct
  source 1..75: mol_type = other DNA
ggaaatcagaaaaagagctggaggaatggatcatcgaccgtcagaagcagaacgcagcactgacggatctgatgg

SEQ ID NO: 372578 - DNA, 75 bp, synthetic construct
  source 1..75: mol_type = other DNA
atttataccaatgcagaagaattagtcggcaaaccgttccgcgatctcggtgaagtcagtggcgattcttgccag

SEQ ID NO: 372579 - DNA, 75 bp, synthetic construct
  source 1..75: mol_type = other DNA
aatggtgaaaaaccggagattgccatcgttccccagagcctgcaccggctcatttacggtaatgacaaacgggcc

SEQ ID NO: 372580 - DNA, 75 bp, synthetic construct
  source 1..75: mol_type = other DNA
aatcacccaggaaggatatcgttatcttcgaacgttgctcccctctcggccagcggactatgaccagaagttttt

SEQ ID NO: 372581 - DNA, 75 bp, synthetic construct
  source 1..75: mol_type = other DNA
aaaacctgaagacctgccagcatacgatttgaatgttgcgacccgcaaaacattacgtttaaaaggtctgatata

SEQ ID NO: 372582 - DNA, 75 bp, synthetic construct
  source 1..75: mol_type = other DNA
ccttaattcaaaatgatggcgcttacctactgtgtaagatggctgacgatcgcggcgtgtttccgggacaatggg

SEQ ID NO: 372583 - DNA, 75 bp, synthetic construct
  source 1..75: mol_type = other DNA
tatgggctggaatttccctttatatgaacatgttacaacaggcccagtcgccgcattgcattatgatggtacgac

SEQ ID NO: 372584 - DNA, 75 bp, synthetic construct
  source 1..75: mol_type = other DNA
accgtaggcgctgatatgttgctcaatcaaaatattgctgcctatgctgcgctatctcaggcagaaaataccact

SEQ ID NO: 372585 - DNA, 75 bp, synthetic construct
  source 1..75: mol_type = other DNA
aatcaaaatattgccgcctacgctgcgttatctcaggcagaaaataccacgaacaataatgactatctgtatacg

SEQ ID NO: 372586 - DNA, 75 bp, synthetic construct
  source 1..75: mol_type = other DNA
attatggtgcagaccaccgccttgcaggtgagcgaccagaccattaacggtcgcgctacgctggacgacgcctgt

SEQ ID NO: 372587 - DNA, 75 bp, synthetic construct
  source 1..75: mol_type = other DNA
aatcgccgcagccgaccgccacggcggaaagcaataatgtggcggccagcgacacgacaagcagcagcgatagct

SEQ ID NO: 372588 - DNA, 75 bp, synthetic construct
  source 1..75: mol_type = other DNA
cggtgcttaacgttgccggtgtaggcgaagtgccgttcaccatgattagccagtttggcgtacccgatgccgaca

SEQ ID NO: 372589 - DNA, 75 bp, synthetic construct
  source 1..75: mol_type = other DNA
ggattacggcatcccgccgggtgattacgacgtttcggtggtgaccaacaccggggaagaagaggtaccgattga

SEQ ID NO: 372590 - DNA, 75 bp, synthetic construct
  source 1..75: mol_type = other DNA
caacgcggtgctgatgagcaacattcaggtgatggcgctcggcaacctggtgggcgacgacattatggtgcagac

SEQ ID NO: 372591 - DNA, 75 bp, synthetic construct
  source 1..75: mol_type = other DNA
cggtgctcaacgttgcaggcgtgggcgaagtaccgttcaccatgattagccagtttggcgtacccgatgccgaca

SEQ ID NO: 372592 - DNA, 75 bp, synthetic construct
  source 1..75: mol_type = other DNA
caataatattgccgaattcggctcttccctggagtcgtgttaatgatcataaaaaaaagcggtggtcgctggcag

SEQ ID NO: 372593 - DNA, 75 bp, synthetic construct
  source 1..75: mol_type = other DNA
ctagtggcagggccagcagacgccccgcagtccatccttaagaacaaccagtcatcactgaaaggggactttacc

SEQ ID NO: 372594 - DNA, 75 bp, synthetic construct
  source 1..75: mol_type = other DNA
tgggagaaggctctgcattacctgttggtgtgcctgttccatggccttcagccacaccgccaacaggctggctga

SEQ ID NO: 372595 - DNA, 75 bp, synthetic construct
  source 1..75: mol_type = other DNA
atgtatcccaaactggcaaaggcttatcccatcaataaattaccggatttacgcggtgagtttatccgtggttgg

SEQ ID NO: 372596 - DNA, 75 bp, synthetic construct
  source 1..75: mol_type = other DNA
aggagaagggaatgatataattgttactggtcaagattatgggcgtaatacatctttaggatatacagaccatgc

SEQ ID NO: 372597 - DNA, 75 bp, synthetic construct
  source 1..75: mol_type = other DNA
cgttcacctgtacagcgttgtgtgaatcatatttctgaaccggatacagaaattccgcctggtttcaggggataa

SEQ ID NO: 372598 - DNA, 75 bp, synthetic construct
  source 1..75: mol_type = other DNA
cgcgcaaggatatcgtttccgcgtgccatacgggacactactgtgtgtttcagataaaccgttacatggtgagat

SEQ ID NO: 372599 - DNA, 75 bp, synthetic construct
  source 1..75: mol_type = other DNA
atgatcttagcggccataataactaaactaacgcttgtagcgttagcatggtttcaaagcgggatttttgaagtt

SEQ ID NO: 372600 - DNA, 75 bp, synthetic construct
  source 1..75: mol_type = other DNA
atgaatagtcgagttgcttgtaccacgtttgacctccctattaatactaacttggataacaatcacacacttgta

SEQ ID NO: 372601 - DNA, 75 bp, synthetic construct
  source 1..75: mol_type = other DNA
cttcgataaacccggggaaagtgttttccgtatccctgtgtccaatacacaggcttacagacagtttgggaactc

SEQ ID NO: 372602 - DNA, 75 bp, synthetic construct
  source 1..75: mol_type = other DNA
ccagtgttgggtcatcgacgatgtgcgttatctgggcggcagtgtccatgcgacagcgggcacgctccgccagtc

SEQ ID NO: 372603 - DNA, 75 bp, synthetic construct
  source 1..75: mol_type = other DNA
ttagaaaatgacaaacacttctatcaagatgctaagtggggagaggacgagctaacagcgtcgatcaaaaatttc

SEQ ID NO: 372604 - DNA, 75 bp, synthetic construct
  source 1..75: mol_type = other DNA
cgttgcgccacgcaaaaaggcagacgacgttattcaggggattatcaaccagcttgaggctctgactactgctgc

SEQ ID NO: 372605 - DNA, 75 bp, synthetic construct
  source 1..75: mol_type = other DNA
tcccgctcgacggcagctctccggtgctcaacgttgcaggcgtgggcgaagtgccgttcaccatgattagccagt

SEQ ID NO: 372606 - DNA, 75 bp, synthetic construct
  source 1..75: mol_type = other DNA
tgagcacccttacgctccccgatttaaccccggagctttccctgtatgccgtcgggattttgctctcccgcgcca

SEQ ID NO: 372607 - DNA, 75 bp, synthetic construct
  source 1..75: mol_type = other DNA
atgcgctgttagttcgccagcaaattcagtcgttatgtgccgccgagccgctgctttcagcgttttcgctgctta

SEQ ID NO: 372608 - DNA, 75 bp, synthetic construct
  source 1..75: mol_type = other DNA
aacgatgtcagggcctttgatttacagctcacctaccgccctgtggaagataattccgcagagctttccgcgcgc

SEQ ID NO: 372609 - DNA, 75 bp, synthetic construct
  source 1..75: mol_type = other DNA
ttcgacagacctgtcccgatgattacgctctggcatatgttccgcaggaactggtgcagaatgacatcacatcag

SEQ ID NO: 372610 - DNA, 75 bp, synthetic construct
  source 1..75: mol_type = other DNA
gtaaaatgccgggcaagaatggcgatactctggcccgtttgacgacgctgccgcaggcgctggccgaccatgcgc

SEQ ID NO: 372611 - DNA, 75 bp, synthetic construct
  source 1..75: mol_type = other DNA
ttcgcctgagcctgatgctgacagagccagaaagctgcgaagcggtgctcaacgatgccagggcctttgatttac

SEQ ID NO: 372612 - DNA, 75 bp, synthetic construct
  source 1..75: mol_type = other DNA
ctgatggcgatgggcagtgagttgatcaacgcgggcggtccgggcatggggatccgcgttaagctcatcaacaac

SEQ ID NO: 372613 - DNA, 75 bp, synthetic construct
  source 1..75: mol_type = other DNA
gcttatcttccgatgcgctggtcattgatatgtcgaccatccacccactgcaaaccgataaattgattgctgata

SEQ ID NO: 372614 - DNA, 75 bp, synthetic construct
  source 1..75: mol_type = other DNA
gcaaatgccattaccggtactctgttactgctggctggcggcaccgctgaacaagttgaacgtgccacaccgatc

SEQ ID NO: 372615 - DNA, 75 bp, synthetic construct
  source 1..75: mol_type = other DNA
gattctaccggaaagcccacgcaaggcctcgctgccgttgcaggttaccttgctgacgctacatgacgccaacag

SEQ ID NO: 372616 - DNA, 75 bp, synthetic construct
  source 1..75: mol_type = other DNA
gccagaaagctgcgaagcggtgctcaacgatgccagggcctttgatttacagctcacctaccgcccggcggaaga

SEQ ID NO: 372617 - DNA, 75 bp, synthetic construct
  source 1..75: mol_type = other DNA
caaaggggcgactcccgctgctaacccagcgcaggccgctaaaggtgccgaatttatcattaccatgttgccgaa

SEQ ID NO: 372618 - DNA, 75 bp, synthetic construct
  source 1..75: mol_type = other DNA
tgtcctggacgatttttcagtcactttcccgggctattatctgtattatacctgtcgtctgaaatcctctgcggc

SEQ ID NO: 372619 - DNA, 75 bp, synthetic construct
  source 1..75: mol_type = other DNA
gttaaaccgctggaaaatacagatgagatagatgaagcgcatccttgctggctccacctcaattatgtgcaccat

SEQ ID NO: 372620 - DNA, 75 bp, synthetic construct
  source 1..75: mol_type = other DNA
gtggatgaatgatgatcaacgtcgtcgaatgcaggatattgccgatcgtctggggcgtgggttggacgaaatcga

SEQ ID NO: 372621 - DNA, 75 bp, synthetic construct
  source 1..75: mol_type = other DNA
tgcgatgcgttgaccgatcattccagcgaatttatcgagcagctgcacgataaaattatcgaccttgaagataat

SEQ ID NO: 372622 - DNA, 75 bp, synthetic construct
  source 1..75: mol_type = other DNA
tcggccgcatcagctgcaagggcaatgtttacgtgcgaacgctgctgatccacggcgcccgcgcggcgttgctgg

SEQ ID NO: 372623 - DNA, 75 bp, synthetic construct
  source 1..75: mol_type = other DNA
cgacgccatgctcgaagcgacgcgctgcaccgatattcatcccgtgccggtgaaaagccacgaccagcaacagct

SEQ ID NO: 372624 - DNA, 75 bp, synthetic construct
  source 1..75: mol_type = other DNA
ggcaatagagcagactttagaaaagcaatagggcattacgcgcgaaaagcgtctggagggagcagtagtgcagct

SEQ ID NO: 372625 - DNA, 75 bp, synthetic construct
  source 1..75: mol_type = other DNA
atttagatgcactgattaagcgtgctgatttaggtttaaagatccaagataactcttcatttgaaacgctaaaca

SEQ ID NO: 372626 - DNA, 75 bp, synthetic construct
  source 1..75: mol_type = other DNA
gcttaatagcctaagcaccgacgcgctgcgtgctggatggggtcaactatttggctccgacgcttcacaggagaa

SEQ ID NO: 372627 - DNA, 75 bp, synthetic construct
  source 1..75: mol_type = other DNA
ctggccttggtggggtattgaaaggagctgaaaacaccgcaagcgctgtgtcccgttcggccatgggtaagatag

SEQ ID NO: 372628 - DNA, 75 bp, synthetic construct
  source 1..75: mol_type = other DNA
actacgcagcacgctggatgaagtctttactctgctggcacattcttctcacgataaagggttggaactgaggta

SEQ ID NO: 372629 - DNA, 75 bp, synthetic construct
  source 1..75: mol_type = other DNA
aaacgagggataatgcacccagccctcaggcaaaaaatgcagaagttccggcgtcagcgcaggttaacaagcgtg

SEQ ID NO: 372630 - DNA, 75 bp, synthetic construct
  source 1..75: mol_type = other DNA
aacctgaagttgatcgccctattaaaactcttgatcttccattaggcggttctaggggggtcaggacagcgatcc

SEQ ID NO: 372631 - DNA, 75 bp, synthetic construct
  source 1..75: mol_type = other DNA
atgttaaatcataccacacacccgcaagggcgggactcgcacaacctgaataaatacatctggcgttttctggcc

SEQ ID NO: 372632 - DNA, 75 bp, synthetic construct
  source 1..75: mol_type = other DNA
ggaagcacgccagcaatctccggctggctgcgtgatggtattcgctgcccgtattcgtcagggggaaacctatgc

SEQ ID NO: 372633 - DNA, 75 bp, synthetic construct
  source 1..75: mol_type = other DNA
aagggcgggactcgcacaacctgaataaatatatctggcgttttatcgccctgagcacggcacaaccgcgcgtga

SEQ ID NO: 372634 - DNA, 75 bp, synthetic construct
  source 1..75: mol_type = other DNA
ggatggatatctttgatgtgcaaattctggcgcaaacgctggtcaacggtgcagacagtttctccctgctggcga

SEQ ID NO: 372635 - DNA, 75 bp, synthetic construct
  source 1..75: mol_type = other DNA
gtatcggagctattacaaccgttggttgattcgccccgcttattattcatcgtcattatgctcgctattatggtg

SEQ ID NO: 372636 - DNA, 75 bp, synthetic construct
  source 1..75: mol_type = other DNA
ggtaaaaggcgttgcgccttacgtcatggttttattcataaagttagcatggtggaattctgggccgtcgcggcc

SEQ ID NO: 372637 - DNA, 75 bp, synthetic construct
  source 1..75: mol_type = other DNA
ggaagcccgccagcaatccccggctggctgcgtgatggtgttcaccgcccgtatccgcaaggaggtgcgccatgc

SEQ ID NO: 372638 - DNA, 75 bp, synthetic construct
  source 1..75: mol_type = other DNA
tgatgctggacgactacaacaagccggtggacatgctcagcgagtcccgacgcaaaagcgcgaatacgctgctgg

SEQ ID NO: 372639 - DNA, 75 bp, synthetic construct
  source 1..75: mol_type = other DNA
ggaagcccgtcagcaatccccgactggctgcgtgatggtattcgccgcccgtattcgtcaggggtcacatcatgc

SEQ ID NO: 372640 - DNA, 75 bp, synthetic construct
  source 1..75: mol_type = other DNA
ggtaatcgatgaaaagacaaagcccgcaggtgctaccaacaccaacgggcttctaaccaccaacgatagcaagat

SEQ ID NO: 372641 - DNA, 75 bp, synthetic construct
  source 1..75: mol_type = other DNA
ggccaccagcgaacaggaagcacgcctgcaatccccggctggctgcgtgatggtattcgctgcccgtattcgtca

SEQ ID NO: 372642 - DNA, 75 bp, synthetic construct
  source 1..75: mol_type = other DNA
ggaagcccgccagcaatccccggccggctgcgtgatggtatttactgcccgtattcgtcaggaggtacgccatgt

SEQ ID NO: 372643 - DNA, 75 bp, synthetic construct
  source 1..75: mol_type = other DNA
agcccgtcgacaacatcaaggtgtcacgcggcgaggaaaacatcttcatctggtgtttctttttggccgtggtag

SEQ ID NO: 372644 - DNA, 75 bp, synthetic construct
  source 1..75: mol_type = other DNA
agcggcagttctgtgtactctaatttctcaaatggttctggaattaacagcaaagagtttggttatgataaatat

SEQ ID NO: 372645 - DNA, 75 bp, synthetic construct
  source 1..75: mol_type = other DNA
actggatcttctgtttcagcatgtcacgttatagccaacatctggaaaaacgttttaacaccgggcgtacaccgc

SEQ ID NO: 372646 - DNA, 75 bp, synthetic construct
  source 1..75: mol_type = other DNA
gaagaagaaaaaactttcactaaaggagacaaagtattaattatttgccgactttctgcaacgcgatatttggcg

SEQ ID NO: 372647 - DNA, 75 bp, synthetic construct
  source 1..75: mol_type = other DNA
gagacaaagtattaattatttgccgactttctgcaacgcgatatttggcgaaaaaaaaaccctggccccaaatac

SEQ ID NO: 372648 - DNA, 75 bp, synthetic construct
  source 1..75: mol_type = other DNA
atgatgccaggtcttggtgacgagacccacccagccaattccgcgcgtggcagaacatggatatttggcggggac

SEQ ID NO: 372649 - DNA, 75 bp, synthetic construct
  source 1..75: mol_type = other DNA
ctgaggtgattggcaatggctgggagggcattagcgatgaatacagcgacaatatgtacatctacgttaactcgg

SEQ ID NO: 372650 - DNA, 75 bp, synthetic construct
  source 1..75: mol_type = other DNA
atggctaaaccagcaaaacgaatcaagagtgccgcagcagcttatgttcctcaatcccgcgatgccgtggtgtgt

SEQ ID NO: 372651 - DNA, 75 bp, synthetic construct
  source 1..75: mol_type = other DNA
tctttctggtttgttgaagacaaacgacttgctgccgcgaaacgttttcagttaatccgcctgacacatatcgat

SEQ ID NO: 372652 - DNA, 75 bp, synthetic construct
  source 1..75: mol_type = other DNA
gttgatgtctcctggctcagcccacaaagcgaatatcgtcctaccgagtaccttcagcaatgggtttctttctgg

SEQ ID NO: 372653 - DNA, 75 bp, synthetic construct
  source 1..75: mol_type = other DNA
gctgcgcgtccattacatttccagtagccctaactacaatgatggtaaatcagttagttaccatgtgccgctgtg

SEQ ID NO: 372654 - DNA, 75 bp, synthetic construct
  source 1..75: mol_type = other DNA
tacagcctgctaagcaagtataacttcttcgaaggccaacttttttttgaagaagcaatatcgaaagttcattat

SEQ ID NO: 372655 - DNA, 75 bp, synthetic construct
  source 1..75: mol_type = other DNA
gttgccggaattacagttaaatcgggcattgaagatttttctattattccgtttgaacaggaagccggtatttaa

SEQ ID NO: 372656 - DNA, 75 bp, synthetic construct
  source 1..75: mol_type = other DNA
tcgatatgcttaaagaggatacaggcaccgttgaagcccaccttacgctcggaaacttgttccgttcgcgtggcg

SEQ ID NO: 372657 - DNA, 75 bp, synthetic construct
  source 1..75: mol_type = other DNA
tcgccaaaactggttaactttgtcctgacctgcgggaccatcggtactatgttgacctttgtggttaccggcccg

SEQ ID NO: 372658 - DNA, 75 bp, synthetic construct
  source 1..75: mol_type = other DNA
tgctggcggttgccggtttgatgttcagccacagcctggcgctgttctcggcggcgatgttcattctcggggtgg

SEQ ID NO: 372659 - DNA, 75 bp, synthetic construct
  source 1..75: mol_type = other DNA
atcttgaaacgggcaactggtatcccgaattgctggataatgtcgatcccagctttgtctgggcgaatgattcgt

SEQ ID NO: 372660 - DNA, 75 bp, synthetic construct
  source 1..75: mol_type = other DNA
gtggaagccacgcctatgagactcgactcaaagtcagtgagggatggcaaaatggatggtgggcaagcatggaaa

SEQ ID NO: 372661 - DNA, 75 bp, synthetic construct
  source 1..75: mol_type = other DNA
cacgctgaatgtgatgcaaaaaggcggcgggcagcctgccaggcccggatgttcatcagttacagcgaagtcagc

SEQ ID NO: 372662 - DNA, 75 bp, synthetic construct
  source 1..75: mol_type = other DNA
tgatgtatgtctttaacaccggaacaccagcgcatatggcgtggtctattcttgctctgggcttcttctccagcg

SEQ ID NO: 372663 - DNA, 75 bp, synthetic construct
  source 1..75: mol_type = other DNA
aataatttcaaatatgggaatcataaaaaaacagcaactgaaaatgcatttgttctgcaatataaaatgtcaccg

SEQ ID NO: 372664 - DNA, 75 bp, synthetic construct
  source 1..75: mol_type = other DNA
gcgtattattactgtgcttttcgtcaccattaatttctcaagctgcgacactggacgtacgtggtggatatcgta

SEQ ID NO: 372665 - DNA, 75 bp, synthetic construct
  source 1..75: mol_type = other DNA
atgaaaaaggctaaaatactttctggcgtattattactgtgcttttcgtcaccattaatttctcaagctgcgaca

SEQ ID NO: 372666 - DNA, 75 bp, synthetic construct
  source 1..75: mol_type = other DNA
aagcggatacagccgagttcatcacctggtgtacaagcgaaggcattggaatcaatgccgaaggtagaatgcagt

SEQ ID NO: 372667 - DNA, 75 bp, synthetic construct
  source 1..75: mol_type = other DNA
tcatgagctcaaaaatatttttactgatgctgatgtgctctccgacagttacaccgagtggaaacacgacgctga

SEQ ID NO: 372668 - DNA, 75 bp, synthetic construct
  source 1..75: mol_type = other DNA
attacttggataaacaaggggtgtataaggggaaagataataaacatgaaaatagttaccgtgtcggtgttctga

SEQ ID NO: 372669 - DNA, 75 bp, synthetic construct
  source 1..75: mol_type = other DNA
gcgctggagtcgggtcacggacacctacggtgttaagcaccagcgaaaagaacgtccctatgaagaaaaagaaag

SEQ ID NO: 372670 - DNA, 75 bp, synthetic construct
  source 1..75: mol_type = other DNA
cgaacctggtatttttgctgttcactgccggattgctggggctggcctggtggatccgcggacgcgaacaaaaag

SEQ ID NO: 372671 - DNA, 75 bp, synthetic construct
  source 1..75: mol_type = other DNA
ggtctggacacgccactggagcgtttactgttacaggcgttgcagggcggtggcggactggaaccggggctggcg

SEQ ID NO: 372672 - DNA, 75 bp, synthetic construct
  source 1..75: mol_type = other DNA
aatggcagagaataattcggtagtcgaagcaacgtggaacgatgtacaactggaagattctctgggaatggaagt

SEQ ID NO: 372673 - DNA, 75 bp, synthetic construct
  source 1..75: mol_type = other DNA
agtaagccgcgttaccgctgccagaagtgtggttttactgcatacacgctttactggcattgtccgtcctgccgt

SEQ ID NO: 372674 - DNA, 75 bp, synthetic construct
  source 1..75: mol_type = other DNA
gccaccagcgaacaggaagcgcgtcagcaatctcctgatggctgcgtgatggtattcgctgcccgtattcgctag

SEQ ID NO: 372675 - DNA, 75 bp, synthetic construct
  source 1..75: mol_type = other DNA
ttcacatcgtggccaccagcgaacaggaagcacgccagcaatccccggctggctgcgtgatggtattcgccgccc

SEQ ID NO: 372676 - DNA, 75 bp, synthetic construct
  source 1..75: mol_type = other DNA
tgcgtctggcgctcaacgtggcttcaacccgtatcattttgatggaaggtcatactggtgcggcggcggcgggga

SEQ ID NO: 372677 - DNA, 75 bp, synthetic construct
  source 1..75: mol_type = other DNA
gcctgcccgcaaacctgaaatcgacacaatggcagatccttgccggaccgattttgatcctgctgatcttgtcga

SEQ ID NO: 372678 - DNA, 75 bp, synthetic construct
  source 1..75: mol_type = other DNA
gcagttagtggtgttgtcgaatctggagctttctgataaccggcatattcgtatgacggcgacgattggcggtaa

SEQ ID NO: 372679 - DNA, 75 bp, synthetic construct
  source 1..75: mol_type = other DNA
cattaacgttgttggcggattgctggttggtgtgttgcaacatggcatgagcatgggtcatgcagcggaaagtta

SEQ ID NO: 372680 - DNA, 75 bp, synthetic construct
  source 1..75: mol_type = other DNA
tgtcgaagcgacgtggaacgatgtacaactggaagattctctgggaatggaagtgggttatcgactgatcccgat

SEQ ID NO: 372681 - DNA, 75 bp, synthetic construct
  source 1..75: mol_type = other DNA
ctcgcttcctgcgccgcagcttgccgcagttagtggtgctgtcgaatctggaactatctgataaccgacatatcc

SEQ ID NO: 372682 - DNA, 75 bp, synthetic construct
  source 1..75: mol_type = other DNA
actggccgggatgattaaacaggcctggtgcagtgccctggggggggatgccgggccttatgccacgttggcgca

SEQ ID NO: 372683 - DNA, 75 bp, synthetic construct
  source 1..75: mol_type = other DNA
agcgttaaaagcactgcgtgctgaaaacatctcgaccaaagtctttaatagtggattaggtatttccgtattccg

SEQ ID NO: 372684 - DNA, 75 bp, synthetic construct
  source 1..75: mol_type = other DNA
tgcgcgctaacgatcacgaaggcttaaaagcactggaaaacagtgtctggcacagaacgcgcaacacaaagactg

SEQ ID NO: 372685 - DNA, 75 bp, synthetic construct
  source 1..75: mol_type = other DNA
gctgaagcgtgctgactatctcgcgaaagagtacaccaaagtcaacggtaccggtgagcgcaattttggctgtag

SEQ ID NO: 372686 - DNA, 75 bp, synthetic construct
  source 1..75: mol_type = other DNA
ccggcgattaccgcgctccggggtcactggccgggatgattaaacaggcctggtgcagtgccctgggagtggatg

SEQ ID NO: 372687 - DNA, 75 bp, synthetic construct
  source 1..75: mol_type = other DNA
tccaggatgcgctggatcgtgctgtttatctcgcgaaagagtacaccaaagtcaacggcaccggtgagcgcaatt

SEQ ID NO: 372688 - DNA, 75 bp, synthetic construct
  source 1..75: mol_type = other DNA
cgaaggcaaatcacaaatcgctcacggcgaaaccgtgcgtgaaaccgccaatatgatctccttctgcgccgacgc

SEQ ID NO: 372689 - DNA, 75 bp, synthetic construct
  source 1..75: mol_type = other DNA
ttcatcaatgccctgaaagcccgaatcaacgcttaccagaagcgtaagcgccgtgaaggtaaacgcgttcatccc

SEQ ID NO: 372690 - DNA, 75 bp, synthetic construct
  source 1..75: mol_type = other DNA
aatattttccctttggcggtttgcaacgcgattttatgcgtattgctcagacagttgcggcccgagggcatcatg

SEQ ID NO: 372691 - DNA, 75 bp, synthetic construct
  source 1..75: mol_type = other DNA
cggtatggatgtcaccctggcccatccggaaggctacgacctgatcccggatgtcgttgaagtggcgaaaaacaa

SEQ ID NO: 372692 - DNA, 75 bp, synthetic construct
  source 1..75: mol_type = other DNA
cagcgtccggctttagtgaacctgcaatgcgatattgaccacccgactcagtcaatggctgacctggcatggtta

SEQ ID NO: 372693 - DNA, 75 bp, synthetic construct
  source 1..75: mol_type = other DNA
cagcgtccggctttagtgaacctgcaatgcgatatcgaccatccgactcagtcaatggctgacctggcatggttg

SEQ ID NO: 372694 - DNA, 75 bp, synthetic construct
  source 1..75: mol_type = other DNA
gtgagacggtgcggcacgcactgaatgttcatccccgcctgacggcattgcgggttgacctgcgtctcccggatg

SEQ ID NO: 372695 - DNA, 75 bp, synthetic construct
  source 1..75: mol_type = other DNA
aacggacgcagctgtgatatcccgcttcatcaatgccctgaaagcccgaatcgacgcttaccagaagcgtaagct

SEQ ID NO: 372696 - DNA, 75 bp, synthetic construct
  source 1..75: mol_type = other DNA
aacggacgcagctgtgatatcccgcttcatcaatgccctgaaagcccgaatcgacgcttaccagaatcgtaagcg

SEQ ID NO: 372697 - DNA, 75 bp, synthetic construct
  source 1..75: mol_type = other DNA
aacggacgcagctgtgatatcccgcttcatcaatgccctgaaagcccgaatccacgcttaccagaaccgtaagct

SEQ ID NO: 372698 - DNA, 75 bp, synthetic construct
  source 1..75: mol_type = other DNA
ggaattgcactctccaggtatttcaggcctgctcggaattaactcgcagggcaggtaaaacatcgacggttaatt

SEQ ID NO: 372699 - DNA, 75 bp, synthetic construct
  source 1..75: mol_type = other DNA
ttcagcaagtgctggaacgtgctgactatctggcgaaggagcataccaaagttcattgcaccggtgagcgcaact

SEQ ID NO: 372700 - DNA, 75 bp, synthetic construct
  source 1..75: mol_type = other DNA
caacggacgcagctgtgatatcccgcttcatcaatgccctgaaagcccgaatctacgcttaccagaagcgtaagc

SEQ ID NO: 372701 - DNA, 75 bp, synthetic construct
  source 1..75: mol_type = other DNA
tccggggtcactggccgggatgatttaacaggcctggtgcagtgccctgggggtggatgccgggccttatgccac

SEQ ID NO: 372702 - DNA, 75 bp, synthetic construct
  source 1..75: mol_type = other DNA
tccgggctcactggccggtatgattcaacaggcctggtgcagtgccctgggggtggatgccgggccttatgccac

SEQ ID NO: 372703 - DNA, 75 bp, synthetic construct
  source 1..75: mol_type = other DNA
tccgggttcactggccggcatgattcaacaggcctggtgcagtgccctgggggtggatgccgggccttatgccac

SEQ ID NO: 372704 - DNA, 75 bp, synthetic construct
  source 1..75: mol_type = other DNA
aacggacgcagctgtgatatcccgcttcatcaatgccctgaaagcccgaatccacgcttaccagaatcgtaagcc

SEQ ID NO: 372705 - DNA, 75 bp, synthetic construct
  source 1..75: mol_type = other DNA
aacggacgcagctgtgatatcccgcttcatcaatgccctgaaagcccgaatcaacgcttaccagaatcgtaagca

SEQ ID NO: 372706 - DNA, 75 bp, synthetic construct
  source 1..75: mol_type = other DNA
aacggacgcagctgtgatatcccgcttcatcaatgccctgaaagcccgaatcaacgcttaccagaaacgtaagct

SEQ ID NO: 372707 - DNA, 75 bp, synthetic construct
  source 1..75: mol_type = other DNA
atggcaagtcaacacattaatatccataacagcggtgtgatatcgggaaatgtcaccactgcaggtgatatgaac

SEQ ID NO: 372708 - DNA, 75 bp, synthetic construct
  source 1..75: mol_type = other DNA
tacagggtaagagcgttctttgatgaggtgacattagcttaccgttcactaaatgacactcagaaaaaaattgtt

SEQ ID NO: 372709 - DNA, 75 bp, synthetic construct
  source 1..75: mol_type = other DNA
ttaaaatctgccgatactcttcagaaggtcactcaggaactgaataaacaaatcaccgctaaaggtggctggaaa

SEQ ID NO: 372710 - DNA, 75 bp, synthetic construct
  source 1..75: mol_type = other DNA
tgctaaagccagaggtcatacatccaccagcattaatagtgacagagcagctagcagccttgataacctgtcttt

SEQ ID NO: 372711 - DNA, 75 bp, synthetic construct
  source 1..75: mol_type = other DNA
agcaatgctcagttagctatggctgtatcagagttaggaagaaaggtagatgccttaacagcagaaactaagaaa

SEQ ID NO: 372712 - DNA, 75 bp, synthetic construct
  source 1..75: mol_type = other DNA
agaagaaatacaggtgaccgagcagtaagagcggcttatcaagctaatatgtctaagttaaggggttttgaccct

SEQ ID NO: 372713 - DNA, 75 bp, synthetic construct
  source 1..75: mol_type = other DNA
taagtaaagtcggtagagttgtcctttatgctgagttggtaaactttgctcttgataatttaaaccctgaagcag

SEQ ID NO: 372714 - DNA, 75 bp, synthetic construct
  source 1..75: mol_type = other DNA
tgcagctaataaaattgctaacttccaagacccgatgaataaccttgtacataacgcacaatcaactccaccagc

SEQ ID NO: 372715 - DNA, 75 bp, synthetic construct
  source 1..75: mol_type = other DNA
tggtttacagcgtgcatcatcggaaagaagtattgatttcgtattcggtgaccaaagtacacaggttaaaaagtt

SEQ ID NO: 372716 - DNA, 75 bp, synthetic construct
  source 1..75: mol_type = other DNA
ccgttcactaaatgacactcagaaaaaaattgttgatggtttatctgatgggttaattgatggtttgaagatgct

SEQ ID NO: 372717 - DNA, 75 bp, synthetic construct
  source 1..75: mol_type = other DNA
atggaagttggccttcaacgtgcaagtgctgaacgttcaattgatttcgtattttctaaagatgcaaatcaagta

SEQ ID NO: 372718 - DNA, 75 bp, synthetic construct
  source 1..75: mol_type = other DNA
gtgacatggttaatagcaatgctcaacttgcaatgactattagtgaactatcacgcaaggttgatgctttaacag

SEQ ID NO: 372719 - DNA, 75 bp, synthetic construct
  source 1..75: mol_type = other DNA
tgctaaagctaaaggtcatacatccaccagcattaacggtgacagagcagctaatagtcttgatagtttgagttc

SEQ ID NO: 372720 - DNA, 75 bp, synthetic construct
  source 1..75: mol_type = other DNA
gacgcttaccagaaacgtaagcatcgggaaggtaaacgcgtgcatcccacaaccctgcattacgtctgggcccgg

SEQ ID NO: 372721 - DNA, 75 bp, synthetic construct
  source 1..75: mol_type = other DNA
actggccgggatgattaaacaggcctggtgcagtgccctgggagtggatgccggacgttatgacacgctggcaca

SEQ ID NO: 372722 - DNA, 75 bp, synthetic construct
  source 1..75: mol_type = other DNA
actggccgggatgattaaacaggcctggtgcagtgccctgggggtggatgccggatgttatgccacgctggtgca

SEQ ID NO: 372723 - DNA, 75 bp, synthetic construct
  source 1..75: mol_type = other DNA
ttcatcaatgccctgaaagcccgaatcgacgcttaccagaaacgtaagcatcgggaagataaacgcgtgcattcc

SEQ ID NO: 372724 - DNA, 75 bp, synthetic construct
  source 1..75: mol_type = other DNA
ccggtgattaccgcgctccggagtctctggccgggatgattaaacaggcgtggtgcagtgccctgggagtggatg

SEQ ID NO: 372725 - DNA, 75 bp, synthetic construct
  source 1..75: mol_type = other DNA
ttgatgaatctgatctgaccaatccgaaacagattaccggttcgcagacggtgagcggcacctggaaaaccaacc

SEQ ID NO: 372726 - DNA, 75 bp, synthetic construct
  source 1..75: mol_type = other DNA
gctggtttacgggatatgctgaagcgtgctgactatctcgcgaaagagtacaccaaagtcaacggtaccggtgag

SEQ ID NO: 372727 - DNA, 75 bp, synthetic construct
  source 1..75: mol_type = other DNA
aatccccgtggacgcgtgacgcgcgctttagcgctgacgtcgttgcgatcgcgccggacgtttctggacttatca

SEQ ID NO: 372728 - DNA, 75 bp, synthetic construct
  source 1..75: mol_type = other DNA
aacgtgttccggttcgtattcgtctcgacaaccagcaagagaacatctggcctgcgggcaccactgctacagtgg

SEQ ID NO: 372729 - DNA, 75 bp, synthetic construct
  source 1..75: mol_type = other DNA
ttctgcatcagttagcgaaagcgcaggcgacccgcgatctggcaaaactggatcttgaacgcacggtgatccgcg

SEQ ID NO: 372730 - DNA, 75 bp, synthetic construct
  source 1..75: mol_type = other DNA
cttcccgatggcggctctgcttggggcgttgcttggtcttgggatgctggcgcagcgcagcgaactggtggtgat

SEQ ID NO: 372731 - DNA, 75 bp, synthetic construct
  source 1..75: mol_type = other DNA
cagcaacaaggtactgaaaggtacggtcgatagcgttgctgccggggtaaccaacgccagcagtacgcgtgatga

SEQ ID NO: 372732 - DNA, 75 bp, synthetic construct
  source 1..75: mol_type = other DNA
tttcgcgcctgggtctattacactgaatctccgtggacgcgtgacgcgcgctttagcgccgatgtggtggcgatc

SEQ ID NO: 372733 - DNA, 75 bp, synthetic construct
  source 1..75: mol_type = other DNA
agccgggtttctacaaggtacacacggacaaatacatcggcggcggggttgttgactcccgcgcgataaaagtcc

SEQ ID NO: 372734 - DNA, 75 bp, synthetic construct
  source 1..75: mol_type = other DNA
gataaagacatttcccgccttgaagccattgcagacgaagagcgcagcaagccaggtaaagccagccagaccact

SEQ ID NO: 372735 - DNA, 75 bp, synthetic construct
  source 1..75: mol_type = other DNA
atcaccaaagacgaactacgctcttacattctgaccggggaaacccgcaacctgtccggcagtgtcccggctgat

SEQ ID NO: 372736 - DNA, 75 bp, synthetic construct
  source 1..75: mol_type = other DNA
tccgtaccccgtgcagagaagaacgacaaagagcgtgattttggtacgttgcaggtaattaaaccttccgaatct

SEQ ID NO: 372737 - DNA, 75 bp, synthetic construct
  source 1..75: mol_type = other DNA
ttcgcgccataccggcagtcaggcgtatgtccccttctccagctttcgtcaccggggcgggatgctgcgccacga

SEQ ID NO: 372738 - DNA, 75 bp, synthetic construct
  source 1..75: mol_type = other DNA
ttccacaggtggcgcaacggtggggcgtggcactgagggcaacaagcgaaccgaaacagaaaccccgaaagttga

SEQ ID NO: 372739 - DNA, 75 bp, synthetic construct
  source 1..75: mol_type = other DNA
attaaataatagcgcgagttatactaataacaacatagccccactaaattggagtgtagataaaaatcaagattt

SEQ ID NO: 372740 - DNA, 75 bp, synthetic construct
  source 1..75: mol_type = other DNA
ggttaatagctttgaatgaaactcatcgatgtttaaaccacatgggaagcatgtgcatttcaaatttttattaca

SEQ ID NO: 372741 - DNA, 75 bp, synthetic construct
  source 1..75: mol_type = other DNA
ttatcttgataatgcttatcagcttgcgccgcaggatgcacgtctgcttttcgaacgggatttgctggataagtt

SEQ ID NO: 372742 - DNA, 75 bp, synthetic construct
  source 1..75: mol_type = other DNA
tcacaccactggcgtgcgtacccgccctgacaacatcaccgagccgggtttctacaaggtgcataccgataaata

SEQ ID NO: 372743 - DNA, 75 bp, synthetic construct
  source 1..75: mol_type = other DNA
atggcgggacaacagcggttttggtgtccgaaatcgtacaattctgtacatctacgcaaggaaatgtacggaagt

SEQ ID NO: 372744 - DNA, 75 bp, synthetic construct
  source 1..75: mol_type = other DNA
ttttggtgtccgaaatcgtacaattctgaacatctacgcaagggaatgtacggaagtaagccaaatggttatcgg

SEQ ID NO: 372745 - DNA, 75 bp, synthetic construct
  source 1..75: mol_type = other DNA
tgggtggttaactccacgacggcggcaaaactccagaaggtgaagaacgcgaacggtgattacatctggcgcgac

SEQ ID NO: 372746 - DNA, 75 bp, synthetic construct
  source 1..75: mol_type = other DNA
tgagaaatgggtgacggatactgatgcacagcatagcgccgcagtagaagcagcagaagcacagcgccagtcact

SEQ ID NO: 372747 - DNA, 75 bp, synthetic construct
  source 1..75: mol_type = other DNA
tgagaaatgggtgacggatacagatgcacagcatagcgtcgcagtagaagcggcagaagcacagcgccagtcact

SEQ ID NO: 372748 - DNA, 75 bp, synthetic construct
  source 1..75: mol_type = other DNA
tgagaaatgggtgacggatacagatgcacagcatagcgacgcagtagaagctgcagaagcacagcgccagtcact

SEQ ID NO: 372749 - DNA, 75 bp, synthetic construct
  source 1..75: mol_type = other DNA
ccgcagaagcacagcgccagtcgctgattgatcctgcaatggcttccattagtctgattcaactgaaattgcagg

SEQ ID NO: 372750 - DNA, 75 bp, synthetic construct
  source 1..75: mol_type = other DNA
ctgcagaagcacagcgccagtcgctgattgattctgcaatggcttccattagtctgattcaactgaaattgcagg

SEQ ID NO: 372751 - DNA, 75 bp, synthetic construct
  source 1..75: mol_type = other DNA
cagcagaagcacagcgccagtcgctgattgatactgcaatggcttccattagtctgattcaactgaaattgcagg

SEQ ID NO: 372752 - DNA, 75 bp, synthetic construct
  source 1..75: mol_type = other DNA
atgcgtcccgcgactatcgccccattaccgccatacgataaatgggatggtgagaaatgggtgactgatactgaa

SEQ ID NO: 372753 - DNA, 75 bp, synthetic construct
  source 1..75: mol_type = other DNA
gccgctgctgtcacatcagctgcaggttgagcaggtgatgctcaaaggcgcggtggtacaattgacgccggaaac

SEQ ID NO: 372754 - DNA, 75 bp, synthetic construct
  source 1..75: mol_type = other DNA
gaaatttgcattacgtaaaaaataccgcaagaacgcggtatgggtggttaactccacgacggcggcaaaactcca

SEQ ID NO: 372755 - DNA, 75 bp, synthetic construct
  source 1..75: mol_type = other DNA
atgcgtcccgcgactatcgccccgttatcgccatacgataaatgggatggtgagaaatgggtgaccgatactgaa

SEQ ID NO: 372756 - DNA, 75 bp, synthetic construct
  source 1..75: mol_type = other DNA
atgcgtcccgcgactatcgcccccttaacgccatacgataaatgggatggtgagaaatgggtgactgatactgaa

SEQ ID NO: 372757 - DNA, 75 bp, synthetic construct
  source 1..75: mol_type = other DNA
atgcgtcccgcgactatcgcccctttagcgccatacgataaatgggatggtgagaaatgggtgaccgatactgaa

SEQ ID NO: 372758 - DNA, 75 bp, synthetic construct
  source 1..75: mol_type = other DNA
agtgggggctgtatgccatctctccgttgaacggataccgtctggcgatccgcgaaatcggcaaatgcaacgcgt

SEQ ID NO: 372759 - DNA, 75 bp, synthetic construct
  source 1..75: mol_type = other DNA
gcctatcgttttcatgattaccgcattgatgggctggacagcggattattgaacggttttatcaacgaattaggc

SEQ ID NO: 372760 - DNA, 75 bp, synthetic construct
  source 1..75: mol_type = other DNA
gaacggttttatcaacgaattaggctgggaagcgttactcaacacccgtggtacaacctggcgtaaactggacga

SEQ ID NO: 372761 - DNA, 75 bp, synthetic construct
  source 1..75: mol_type = other DNA
tacggatgcggctgtgatatcccgcttcatcaatgccctgaaagcccgaatcgatgcttaccagaagcgtaagcg

SEQ ID NO: 372762 - DNA, 75 bp, synthetic construct
  source 1..75: mol_type = other DNA
cgtccatcatcgaaccgggtctttacttcgcgatgaacaccccgcctgctggccttggcatcaccatgcctaatc

SEQ ID NO: 372763 - DNA, 75 bp, synthetic construct
  source 1..75: mol_type = other DNA
ggcctcggcatcaccatgcctaacctgcatgaaatgggtggcgagaacgcgccgatcatcatggcacagctgaaa

SEQ ID NO: 372764 - DNA, 75 bp, synthetic construct
  source 1..75: mol_type = other DNA
aaaacactatcatctgatgctgctggtcaaccgggatacctggtgtcgtgccggtgattaccggctccgggatca

SEQ ID NO: 372765 - DNA, 75 bp, synthetic construct
  source 1..75: mol_type = other DNA
tggtgcagtgccctgggagtggatgccggatgttatgacacgctggcacattttccggtcaggccggcggtgtgg

SEQ ID NO: 372766 - DNA, 75 bp, synthetic construct
  source 1..75: mol_type = other DNA
ttcagcaggtgctggaacgtgctgactatctggcgaaggaacataccaaagctcacggcaccggtgagcgcaatt

SEQ ID NO: 372767 - DNA, 75 bp, synthetic construct
  source 1..75: mol_type = other DNA
tgccacgctggtgcattttccggcctggccggcggtgtggctggaacgcgatgatgacactggctttcagcaggt

SEQ ID NO: 372768 - DNA, 75 bp, synthetic construct
  source 1..75: mol_type = other DNA
ccggctttcagcaagtgctggaacgtgctgactatctggcgaaggagcataccaaagctcactgcaccggtgagc

SEQ ID NO: 372769 - DNA, 75 bp, synthetic construct
  source 1..75: mol_type = other DNA
aagtgctggaacgtgctgactatctggcgaaggagcataccaaagttcactgcaccggtgagcgcaactttggct

SEQ ID NO: 372770 - DNA, 75 bp, synthetic construct
  source 1..75: mol_type = other DNA
tggtgcagtgccctgggggtggatgccggatgctatgccacgctggcgaattttccggcctggccggtggtgtgg

SEQ ID NO: 372771 - DNA, 75 bp, synthetic construct
  source 1..75: mol_type = other DNA
aaaccgacgcgcgtttcattggctacggcgcaatgctgatggagtccttcgtggcgattatggcgctggttgctg

SEQ ID NO: 372772 - DNA, 75 bp, synthetic construct
  source 1..75: mol_type = other DNA
tcagcagccacaacagccggttacacagcagccgcagtatcagcagccgcaacagccggttgtaccacagccgca

SEQ ID NO: 372773 - DNA, 75 bp, synthetic construct
  source 1..75: mol_type = other DNA
gcaaaccgagaaagaacggattattgaggctatggatataatccgcttcggcgagcgccttaaatcagctatgga

SEQ ID NO: 372774 - DNA, 75 bp, synthetic construct
  source 1..75: mol_type = other DNA
gttacgcagataaaaccgcaagcaagcaaaccgagaaagaacggattattgaggctatggatataatccgcttcg

SEQ ID NO: 372775 - DNA, 75 bp, synthetic construct
  source 1..75: mol_type = other DNA
ctggcgatgctggaatataaccgcgccgatttcccgcaagcggtggcgtatgccactcaggctctgaaacgcgca

SEQ ID NO: 372776 - DNA, 75 bp, synthetic construct
  source 1..75: mol_type = other DNA
taatcagtacgattctggcgatcagtacaacgatgatgaaatcgatgcgatgcagcaggatgaactggcacgtca

SEQ ID NO: 372777 - DNA, 75 bp, synthetic construct
  source 1..75: mol_type = other DNA
gctctactctgggccgaactccacgttgccggtacgtgtccatggtgcttttgttcgcgatcaggaagttcatgc

SEQ ID NO: 372778 - DNA, 75 bp, synthetic construct
  source 1..75: mol_type = other DNA
gctggtccgctggtggggccggttctcgccgcgcaaatgggctacctgccgggcacactgtggctgctggcaggc

SEQ ID NO: 372779 - DNA, 75 bp, synthetic construct
  source 1..75: mol_type = other DNA
gcacgcaggatcgctggcatctcggcgtgatggcaggctatgccaatcagcacagtaatactcagagtaatcatg

SEQ ID NO: 372780 - DNA, 75 bp, synthetic construct
  source 1..75: mol_type = other DNA
gacgccgcctgttgcctctgttgatgttccaccttcgcaacctacagtagcctggcagcctgtaccgggtccaca

SEQ ID NO: 372781 - DNA, 75 bp, synthetic construct
  source 1..75: mol_type = other DNA
atacccgttcacgcgacagcagcggtcagctcagtacccaggccaaccgttacgttgcccagctcggtggggact

SEQ ID NO: 372782 - DNA, 75 bp, synthetic construct
  source 1..75: mol_type = other DNA
ctgaaagacgttaccgcacacgcggcggcaactgtcagttcctggggcttcgtgatttcgccggaacagatcctg

SEQ ID NO: 372783 - DNA, 75 bp, synthetic construct
  source 1..75: mol_type = other DNA
gcgcacccaatacatctgggttaccgttatcccggcagtatggctgcttatctgcaccacctgggcgctgggcct

SEQ ID NO: 372784 - DNA, 75 bp, synthetic construct
  source 1..75: mol_type = other DNA
ttaacgctggctggtacgccagccgtaatgccgcgtttcagaacgcagtcagtaaggccagcggcgtgaagctgg

SEQ ID NO: 372785 - DNA, 75 bp, synthetic construct
  source 1..75: mol_type = other DNA
ttcaactggaaagcccgaaaatcacccgcaatctgactacggcctggtttgcgaagcgcgtagacgaacggcggg

SEQ ID NO: 372786 - DNA, 75 bp, synthetic construct
  source 1..75: mol_type = other DNA
ggggctggcaccgacgctggaaaacgtctgctcggtgctggcggtggcgcagcaggagtcaaattatcaggcaga

SEQ ID NO: 372787 - DNA, 75 bp, synthetic construct
  source 1..75: mol_type = other DNA
catcgctgaagatgttgaaggcgaagcactggcaactctggttgttaacaccatgcgtggcatcgtgaaagttgc

SEQ ID NO: 372788 - DNA, 75 bp, synthetic construct
  source 1..75: mol_type = other DNA
aatacggcaacatgatcgacatgggtatcctggatccaaccaaagtaactcgttctgctctgcagtacgcagctt

SEQ ID NO: 372789 - DNA, 75 bp, synthetic construct
  source 1..75: mol_type = other DNA
ccgatgcaggtcagtattgcttttgccgaacaacacaccaaaggctatccatggaaaatggacggcactgtgcgt

SEQ ID NO: 372790 - DNA, 75 bp, synthetic construct
  source 1..75: mol_type = other DNA
accctgaaggcacgggaacgtgtaatttctggggttttgtcagtgggccgggtgcagacacccacgctggcaatg

SEQ ID NO: 372791 - DNA, 75 bp, synthetic construct
  source 1..75: mol_type = other DNA
tgtcgggcgttcagatccgtccgtgcttccacaactggctgaactggaatcaggacgggtatcccgtatctggaa

SEQ ID NO: 372792 - DNA, 75 bp, synthetic construct
  source 1..75: mol_type = other DNA
ggagaaacagcatcagtggatcaggcacctggtgttatccggacgtaaccagacggttaatctgtcagtggaatc

SEQ ID NO: 372793 - DNA, 75 bp, synthetic construct
  source 1..75: mol_type = other DNA
acaagagctatcgctaacggtcgattccacattaattcattattagatggtcatagagattatatcaatggccgc

SEQ ID NO: 372794 - DNA, 75 bp, synthetic construct
  source 1..75: mol_type = other DNA
accatcaccagaaaataccaaccagaaatctccatcggttgactgcgaacaaatcctgaaagacttcagcgatta

SEQ ID NO: 372795 - DNA, 75 bp, synthetic construct
  source 1..75: mol_type = other DNA
tccctcagatcatcctcgctcttgccacccttataacggctgtcgccagactcgtgaaagagattaagaagaaat

SEQ ID NO: 372796 - DNA, 75 bp, synthetic construct
  source 1..75: mol_type = other DNA
tctccttactttatcaacaagccggaaactggcgcagtagaactggaaagcccgttcatcctgttggctgacaag

SEQ ID NO: 372797 - DNA, 75 bp, synthetic construct
  source 1..75: mol_type = other DNA
aaatcttccgtaagaagaatggaataaccgaacaacaatatttattgttgcaggtcggttcagacttcacgcgta

SEQ ID NO: 372798 - DNA, 75 bp, synthetic construct
  source 1..75: mol_type = other DNA
aatattttccatttggtgggctacagcgtgactttatgcgtattgcctcaacagttgccgcacggggccaccatg

SEQ ID NO: 372799 - DNA, 75 bp, synthetic construct
  source 1..75: mol_type = other DNA
ttgtcggctttaataagatgccggggctggatgtctattttgccgccgatgtctgttacgccgagaaagtggcac

SEQ ID NO: 372800 - DNA, 75 bp, synthetic construct
  source 1..75: mol_type = other DNA
tatcttctcaatgataattccatactttccagaattgcccttcttgaacttggtattatcggagaacagcagtga

SEQ ID NO: 372801 - DNA, 75 bp, synthetic construct
  source 1..75: mol_type = other DNA
cactgaacaacaaaacttattgctgcaggttggttcagattttggtcgtaaaggtgtggatcgctcaattgaagc

SEQ ID NO: 372802 - DNA, 75 bp, synthetic construct
  source 1..75: mol_type = other DNA
catcgctgaacctttctctcaggaacaattaaatgaagttttacgtaaagcgttaactcagtcgccattgcgaat

SEQ ID NO: 372803 - DNA, 75 bp, synthetic construct
  source 1..75: mol_type = other DNA
aaccgtactggctcaggctatcatcactgagggtctgaaagctgttgctgcgggcatgaacccgatggacctgaa

SEQ ID NO: 372804 - DNA, 75 bp, synthetic construct
  source 1..75: mol_type = other DNA
aaatcgaactggaagacaagttcgaaaatatgggggcgcagatggtaaaagaagttgcctctaaagcgaacgacg

SEQ ID NO: 372805 - DNA, 75 bp, synthetic construct
  source 1..75: mol_type = other DNA
acgcgtagcgaaactggcaggcggcgttgcagttatcaaagtaggtgctgctaccgaagttgaaatgaaagagaa

SEQ ID NO: 372806 - DNA, 75 bp, synthetic construct
  source 1..75: mol_type = other DNA
cagaacgttttcaaattcttcctcccggtatctacccggacagaaaatacagcgagcaaatcccaaacagtcgta

SEQ ID NO: 372807 - DNA, 75 bp, synthetic construct
  source 1..75: mol_type = other DNA
actcatatcccggatgacagaggaagagcgaagtagccttatcgaagcactcaaaacgtgttcaggtgtaaaaca

SEQ ID NO: 372808 - DNA, 75 bp, synthetic construct
  source 1..75: mol_type = other DNA
gctgaagatgttgaaggcgaagcactggcaactctggttgttaacaccatgcgtggcatcgtgaaagttgctgcg

SEQ ID NO: 372809 - DNA, 75 bp, synthetic construct
  source 1..75: mol_type = other DNA
cgcactttgtttccaaacccttctggcgggtgaccgcctcgttgcagcatcaggggatcatttttcaggctcact

SEQ ID NO: 372810 - DNA, 75 bp, synthetic construct
  source 1..75: mol_type = other DNA
tgaacgagtcggttaagtcagagcagtcaccgcgggtggtgctctgggaaattgacctgacggtgcagggtggtg

SEQ ID NO: 372811 - DNA, 75 bp, synthetic construct
  source 1..75: mol_type = other DNA
tctgtatatgataaaaatagcattattaaagtatcagacgacttggctttaaaaatactacaattatcctctgtt

SEQ ID NO: 372812 - DNA, 60 bp, synthetic construct
  source 1..60: mol_type = other DNA
atgcaggagatcaacgaagaaagcctgaatgagtcggttaaatcagagcagtcaccgcgg

SEQ ID NO: 372813 - DNA, 75 bp, synthetic construct
  source 1..75: mol_type = other DNA
caaaatgcctcccgcgatgcggtgataaaactccagcgtagtgagcgggggattgagtggggctgtatgccatct

SEQ ID NO: 372814 - DNA, 75 bp, synthetic construct
  source 1..75: mol_type = other DNA
gagacgtgactctgcctgtttctctcgaaggagacgaagtgactcgcggattacctcactctgtgtacgataatc

SEQ ID NO: 372815 - DNA, 75 bp, synthetic construct
  source 1..75: mol_type = other DNA
taaacgagtcggttaaatcagagcagtcaccgcgggtggtactctgggaaatagacctgacggtgcagggcggtg

SEQ ID NO: 372816 - DNA, 75 bp, synthetic construct
  source 1..75: mol_type = other DNA
cacgatctatccgtatatcaacgaaacgattatttccggtggcaccgcgcatgaaggcggggcggtccatgttat

SEQ ID NO: 372817 - DNA, 75 bp, synthetic construct
  source 1..75: mol_type = other DNA
ctgcaagtgccgctgcgtgacttgtggaatccggcaacctgtccggtcagtttcctgccttatctcgcctgggcg

SEQ ID NO: 372818 - DNA, 75 bp, synthetic construct
  source 1..75: mol_type = other DNA
tttcctgccttatctcgcctgggggttctctgtggatcgatgggacgagggctggacggaaagcgtcaaacgcca

SEQ ID NO: 372819 - DNA, 75 bp, synthetic construct
  source 1..75: mol_type = other DNA
ccggttccggagcctgacgtcagcatggcagtccggggactccgggcagaccttatcgcctgtggcctgttgtgg

SEQ ID NO: 372820 - DNA, 75 bp, synthetic construct
  source 1..75: mol_type = other DNA
agaaatcagcgttgctggaaaatatccgaaatttctttctgacgtttgtctggcttcccctgaatttttcccctt

SEQ ID NO: 372821 - DNA, 75 bp, synthetic construct
  source 1..75: mol_type = other DNA
acctatctggaacttgagcggctgataagcgatgccaaaccatgcagccgtcacatgatcggcatgtccatcaat

SEQ ID NO: 372822 - DNA, 75 bp, synthetic construct
  source 1..75: mol_type = other DNA
gataagagcctgaccgacaataacggcccgtatatcgaactgatgaccggtatttttgccgataactgtggggta

SEQ ID NO: 372823 - DNA, 75 bp, synthetic construct
  source 1..75: mol_type = other DNA
caggcggcccgggccgttcttcagttgtgtcagcagacaccgtcagcggtggtgcatgaggtgacccggaagcgt

SEQ ID NO: 372824 - DNA, 75 bp, synthetic construct
  source 1..75: mol_type = other DNA
cacgacgtatccccggacggactgtggctatctgcctgaatccatgcaacaggaaagccgggaggtgctggcggc

SEQ ID NO: 372825 - DNA, 75 bp, synthetic construct
  source 1..75: mol_type = other DNA
cgtcacaggcgcgggatattgcccgggtgctggggctcagcgggcggggagagggctgtattgaaggtgatactg

SEQ ID NO: 372826 - DNA, 75 bp, synthetic construct
  source 1..75: mol_type = other DNA
acgggcaggaaaccggaacggaaacattgccgcctcttcatgagggaggcgtctgtgcgatagcagaggcaaagg

SEQ ID NO: 372827 - DNA, 75 bp, synthetic construct
  source 1..75: mol_type = other DNA
taacctgttacccggcgagaaaacggcctccttatattctgcgggattgggacgtgcaagagcggactggcttat

SEQ ID NO: 372828 - DNA, 75 bp, synthetic construct
  source 1..75: mol_type = other DNA
tgattgcccgtgaattactggaggcctgtcattacaggaaaaagatacaacgtttatggctgtcagcgctggatg

SEQ ID NO: 372829 - DNA, 75 bp, synthetic construct
  source 1..75: mol_type = other DNA
atgaataagctggtttctgatggcagcgtcaaaaaaataaattatccggtgctgtatgaatccggaataacacct

SEQ ID NO: 372830 - DNA, 75 bp, synthetic construct
  source 1..75: mol_type = other DNA
ccgttatatgaagtcagtgcaccagaacctgatgcgggtgggaaacgcattgtggcatatgtttataaatcatca

SEQ ID NO: 372831 - DNA, 75 bp, synthetic construct
  source 1..75: mol_type = other DNA
cgtggatctccggtgggattgagtttaactggccgcaacaccatcgcccgaccacctttatgcccgttgatttca

SEQ ID NO: 372832 - DNA, 75 bp, synthetic construct
  source 1..75: mol_type = other DNA
cagttgttccgggccagagggaaagtcaatgttgtcacgggctggaaactgttatttcagaaggaccatcagaat

SEQ ID NO: 372833 - DNA, 75 bp, synthetic construct
  source 1..75: mol_type = other DNA
agtaatgagtccggcaatcagtttaatcatgccacaaggcgttatcgatgcgctccaaaagaacaccaaaaagga

SEQ ID NO: 372834 - DNA, 75 bp, synthetic construct
  source 1..75: mol_type = other DNA
tgtggcatatgtttataaatcatcacggagtacggtttttgaaaatcctgacattgtaaaaacctgtacggtcag

SEQ ID NO: 372835 - DNA, 75 bp, synthetic construct
  source 1..75: mol_type = other DNA
aggaattcaaaatcagaaaaattaagcgggatattgagcgcggttgtgataatgccgaaaaatacttctggcttt

SEQ ID NO: 372836 - DNA, 75 bp, synthetic construct
  source 1..75: mol_type = other DNA
atgatgacagaaaacaaaaataatcaggaattcaaaatcagaagaattaaacgggatattgagcgcagttgtgat

SEQ ID NO: 372837 - DNA, 75 bp, synthetic construct
  source 1..75: mol_type = other DNA
gggatattcctgttgaaacgccgtatgcgccgggagaacacattaagggagggcagcaataatgcttcgcattaa

SEQ ID NO: 372838 - DNA, 75 bp, synthetic construct
  source 1..75: mol_type = other DNA
aggacctgccgggccgacggggccgacgggaccgacggggccgcaggggaacaccggaccacgaggtttgcaggg

SEQ ID NO: 372839 - DNA, 75 bp, synthetic construct
  source 1..75: mol_type = other DNA
tcgtcaacccgtaatccagacagaaattaacgaaagttgtcttctttattatcgcatcgaaaaagaaatagccag

SEQ ID NO: 372840 - DNA, 75 bp, synthetic construct
  source 1..75: mol_type = other DNA
attttttctgtccccaatgtgcgaattcatattcgggaatatcatgatatttctgctgaaacgccgtatgcgccg

SEQ ID NO: 372841 - DNA, 75 bp, synthetic construct
  source 1..75: mol_type = other DNA
tttgcctatggtgccattaatgcccgagttaaagactggggaccctggcataatactgagcttcgtgatgagatt

SEQ ID NO: 372842 - DNA, 75 bp, synthetic construct
  source 1..75: mol_type = other DNA
gagttaaagactgggggccctggcataatactgagcttcgtgatgagattctgccgggcctggcatcggtactca

SEQ ID NO: 372843 - DNA, 75 bp, synthetic construct
  source 1..75: mol_type = other DNA
gcaaaaagttgggtgaatacattgaacaagacagccgtggcattttaatcaccaccatctttaaatttaaagata

SEQ ID NO: 372844 - DNA, 75 bp, synthetic construct
  source 1..75: mol_type = other DNA
tggcgcaaaccatcgcctcaatcggctacatcgtattgctgttcatgttctgtcatctgtttggcgtgctggggg

SEQ ID NO: 372845 - DNA, 75 bp, synthetic construct
  source 1..75: mol_type = other DNA
gcttttactgaccttggcccagtttggactagggaaagataaagagttgttccagaaggcgtatgggtatattga

SEQ ID NO: 372846 - DNA, 75 bp, synthetic construct
  source 1..75: mol_type = other DNA
atgaatctgtgcgtccggtggggcagacaggtgcgcttgtttgggctgcgctgggtcctgaaaccatcaaaatga

SEQ ID NO: 372847 - DNA, 75 bp, synthetic construct
  source 1..75: mol_type = other DNA
acttcgtctacattgagcgggttaaaggtgacgaagagttaggtggcatcagtatttatgcctttaacgagaatc

SEQ ID NO: 372848 - DNA, 75 bp, synthetic construct
  source 1..75: mol_type = other DNA
atgagcaaattcacagttgatagttttatcgttgagctaggcttcaatgaaaacgttattaagggactgcaaaga

SEQ ID NO: 372849 - DNA, 75 bp, synthetic construct
  source 1..75: mol_type = other DNA
gcgattcatctaaaccaaaccaaattaatgagggatgggctaagattggtggttctatcgctgactggtttaatg

SEQ ID NO: 372850 - DNA, 75 bp, synthetic construct
  source 1..75: mol_type = other DNA
agttgtcctttatgctgagttggtaaactttgctcttgataatttaaaccctgaagcggctaagaatccgaactt

SEQ ID NO: 372851 - DNA, 75 bp, synthetic construct
  source 1..75: mol_type = other DNA
atgagcaaattcacagttgatagttttatcgttgaattaagcttcaatgaaaacattattaagggcttgcaaaga

SEQ ID NO: 372852 - DNA, 75 bp, synthetic construct
  source 1..75: mol_type = other DNA
tggtgtcgattcattgactgatatttcttacaaggtgagaggtttctttgatgaggtgacattggcttaccgtgg

SEQ ID NO: 372853 - DNA, 75 bp, synthetic construct
  source 1..75: mol_type = other DNA
tgggtgatgtgaaaggttggtgtaataatgcagctacaaagattgctggtttccaagagccaatgaataactttg

SEQ ID NO: 372854 - DNA, 75 bp, synthetic construct
  source 1..75: mol_type = other DNA
tgctgctatgaatcttgctaacttccagcatccagaattaaacaacattaagcaagattcagcattaacgagtgc

SEQ ID NO: 372855 - DNA, 75 bp, synthetic construct
  source 1..75: mol_type = other DNA
atgatgttaaagggtggtttaatagtgctgctatgaatcttgctaacttccagcatccagaattaaacaacatta

SEQ ID NO: 372856 - DNA, 75 bp, synthetic construct
  source 1..75: mol_type = other DNA
aactagggaacctgaaaaactcttggaataccacgcttgatagtatttttagaggttctgaaaatggtcttcaag

SEQ ID NO: 372857 - DNA, 75 bp, synthetic construct
  source 1..75: mol_type = other DNA
taatgatggatgggctaagattggtagttctatcgctgactggtttaatggtgcggctaataaaattgctaactt

SEQ ID NO: 372858 - DNA, 75 bp, synthetic construct
  source 1..75: mol_type = other DNA
ttatcgttgagctgggcttcaatgagaatgttattaaaggtctgcaaagagttgaaaaggcagctttgcagtcag

SEQ ID NO: 372859 - DNA, 75 bp, synthetic construct
  source 1..75: mol_type = other DNA
gagcaatcacagcagcttactcagcgaatatgaccaagctgaaaggtcttaacccaattgtcgagaaatacatta

SEQ ID NO: 372860 - DNA, 75 bp, synthetic construct
  source 1..75: mol_type = other DNA
ccgcaatttgaagcagcaaaacaaatcgttgagcgtgttcgcagaggttatccaaagaaaggtctgatttggcat

SEQ ID NO: 372861 - DNA, 75 bp, synthetic construct
  source 1..75: mol_type = other DNA
gtctggatatcgaactggcggcaagcgacctggcaaagatactcgatgccaaatttgctgatatcgcccgtcgcg

SEQ ID NO: 372862 - DNA, 75 bp, synthetic construct
  source 1..75: mol_type = other DNA
tcaggtctacaaaacgctgcttgtcgcggtgaacggcgatatgaaacatctggcggtagccgttacgccagtcgc

SEQ ID NO: 372863 - DNA, 75 bp, synthetic construct
  source 1..75: mol_type = other DNA
tgcttaaacagttgaaactctatggaatgcgccaaagtgtgcaggacttagcactacaaaacgctccggcctggc

SEQ ID NO: 372864 - DNA, 75 bp, synthetic construct
  source 1..75: mol_type = other DNA
gctcgtcagaggataatagataaattagagccaaaagactcaaggacgtcaaacagtggcggggtaaactctgct

SEQ ID NO: 372865 - DNA, 75 bp, synthetic construct
  source 1..75: mol_type = other DNA
tgatcaggtcgctgctgatgaacctatatatgccaacattcaacatagtgcaggagatgctcttgatggcagagt

SEQ ID NO: 372866 - DNA, 75 bp, synthetic construct
  source 1..75: mol_type = other DNA
tactcatcatccttcacatctggctctgtagacagggtggtgctcacttctggagtgaatcatggttaaacatct

SEQ ID NO: 372867 - DNA, 75 bp, synthetic construct
  source 1..75: mol_type = other DNA
ggaaatatgagccttatcttctcaatgataattccatactttcccgaattgctcttcttgaacttggtattttcg

SEQ ID NO: 372868 - DNA, 75 bp, synthetic construct
  source 1..75: mol_type = other DNA
agggagaatggtgaccaatgaatatattgttgatattgccaaccgcgatggtcaattgcagttgaatgtgacgga

SEQ ID NO: 372869 - DNA, 75 bp, synthetic construct
  source 1..75: mol_type = other DNA
actttggtattgaaacaccctcagcgttagataactttactcaggccatccagtcacaaattttaggtgggctac

SEQ ID NO: 372870 - DNA, 75 bp, synthetic construct
  source 1..75: mol_type = other DNA
atggaaacgtcactaccaaacgttaatacatctgaagggtgttttaatattggtattctgctcagtaaccgggag

SEQ ID NO: 372871 - DNA, 75 bp, synthetic construct
  source 1..75: mol_type = other DNA
tttactgaggatgccattaatatgcggaaatatgagccttatctgctcaatgataattccatactttcccgaatt

SEQ ID NO: 372872 - DNA, 75 bp, synthetic construct
  source 1..75: mol_type = other DNA
tttactgaagatgccattaagatgagaaaatatgagccttatcttctcaatgataattccatactttccagaatt

SEQ ID NO: 372873 - DNA, 75 bp, synthetic construct
  source 1..75: mol_type = other DNA
atcccaatgtgagtgcttcaattcctcctgcaccgccgttgccttcgcaaaccgacggtgcaagaggttctcagg

SEQ ID NO: 372874 - DNA, 75 bp, synthetic construct
  source 1..75: mol_type = other DNA
tgacaccggaaccggatgatcctacaaccaccgatcctgatcaggccgcaaatgctgcagaaagtgcaacaaaag

SEQ ID NO: 372875 - DNA, 75 bp, synthetic construct
  source 1..75: mol_type = other DNA
cattaagtcctcaagaatggagcagcttgcaatctattgatactgagggtaaaaacagatttgtttttaccgggg

SEQ ID NO: 372876 - DNA, 75 bp, synthetic construct
  source 1..75: mol_type = other DNA
ggtcactcctgcatcagatatcgcagaagctcgtgcgaaaatactggccaaattagacccaaacaatcatggggg

SEQ ID NO: 372877 - DNA, 75 bp, synthetic construct
  source 1..75: mol_type = other DNA
tcgttaaaccctgatatcggcagacagcctgactatgccgatgaggtcatttacaaactgcgaggagtggtttta

SEQ ID NO: 372878 - DNA, 75 bp, synthetic construct
  source 1..75: mol_type = other DNA
taaataatcgaaccattaacaatcattatacaaagcaaaattctaatggtgatggtgatgcaggtgcctttatgg

SEQ ID NO: 372879 - DNA, 75 bp, synthetic construct
  source 1..75: mol_type = other DNA
ctggcaagcagcggcggattgcgtttaggtatgggaggattaacggggggtggcgagagcgcagtaagtactgcc

SEQ ID NO: 372880 - DNA, 75 bp, synthetic construct
  source 1..75: mol_type = other DNA
gcagcagaacgcaggcagcaaaggcagttacgcccagcagatcctcgtcttactcatggctcagggaaacgcaaa

SEQ ID NO: 372881 - DNA, 75 bp, synthetic construct
  source 1..75: mol_type = other DNA
ttaggaaaccctgggcgggaagtccagcatgcttatgcgcttctgtcgatgagcggtggattacagaatggtctt

SEQ ID NO: 372882 - DNA, 75 bp, synthetic construct
  source 1..75: mol_type = other DNA
tgaatgattcgcagataccgggtcgtaattctgaggtgcctgtgcagaatgagggaggggctagttctgttatat

SEQ ID NO: 372883 - DNA, 75 bp, synthetic construct
  source 1..75: mol_type = other DNA
atgtaaatagcaatcatttaattccccctgcgccgccactaccttcttcacaaacagacggcgcggtacggggag

SEQ ID NO: 372884 - DNA, 75 bp, synthetic construct
  source 1..75: mol_type = other DNA
ttcagtaccgattatttaatcgaccttgtcacacgctttattaactggcagatgattggggccattttgttttat

SEQ ID NO: 372885 - DNA, 75 bp, synthetic construct
  source 1..75: mol_type = other DNA
aaaaatccatctacattaatcgatgtaataacctacgcaaaaaaaaatagattgcatctttcgcaaaaattccat

SEQ ID NO: 372886 - DNA, 75 bp, synthetic construct
  source 1..75: mol_type = other DNA
tgggtcgctctggaacctctggttctcgataccgagacgaccggacttggtgaaagagaccaggtgatcgagctg

SEQ ID NO: 372887 - DNA, 75 bp, synthetic construct
  source 1..75: mol_type = other DNA
acccaggaacacgtctggccgcggctgaataaatctgatctaatcgccaccgcgcgtaaaacctgggatgaacgc

SEQ ID NO: 372888 - DNA, 75 bp, synthetic construct
  source 1..75: mol_type = other DNA
tctctgcatgagtacaagcgccagcatggtcactacccggcaagcgatatcctggcaaacgcacacatggcactt

SEQ ID NO: 372889 - DNA, 75 bp, synthetic construct
  source 1..75: mol_type = other DNA
acgcatttgatattgttatcagccgttattctgcccatcactggcatgatgttggtgcagcactgcgtgaagtga

SEQ ID NO: 372890 - DNA, 75 bp, synthetic construct
  source 1..75: mol_type = other DNA
atggcgggaaatggtggccagggggttacaggcagtgaaaccatcgtcagggatgctgttgccaaatggcataaa

SEQ ID NO: 372891 - DNA, 75 bp, synthetic construct
  source 1..75: mol_type = other DNA
ttctcctctgcaccagattacggccaaccgtggaaatagaccctcaggcaatgggtgttcatggcatcaccgaga

SEQ ID NO: 372892 - DNA, 75 bp, synthetic construct
  source 1..75: mol_type = other DNA
ggctgcaacgtttgcgttatctgctgctgctgtggggcgcagatcgtaacggtgctaatcccatgacgccggaag

SEQ ID NO: 372893 - DNA, 75 bp, synthetic construct
  source 1..75: mol_type = other DNA
tgaaaatcaccggcgatgatgaaattggcaaagctcagttggataacttcatcaacccgaaaaaaccgtacccgg

SEQ ID NO: 372894 - DNA, 75 bp, synthetic construct
  source 1..75: mol_type = other DNA
acgcgtaccgatcagtccgggcaagtcacggcgacaataaccagtacattggcagaaaccttaacggtcaatgtg

SEQ ID NO: 372895 - DNA, 75 bp, synthetic construct
  source 1..75: mol_type = other DNA
ttctccgcgatgcgtaactggatctcccatgaaaccgacatcatgcgtctgcgcaccctggtattccataccgtt

SEQ ID NO: 372896 - DNA, 75 bp, synthetic construct
  source 1..75: mol_type = other DNA
aaggtgacgaactgaatatgcagtcagctggtgtttattctcaaatgaagcgcctgtatacccttaccactaaag

SEQ ID NO: 372897 - DNA, 75 bp, synthetic construct
  source 1..75: mol_type = other DNA
gtttgatatccagaacttcgaaggccaggcctgcccgctgcgccagggctacaacaaactgctgattaaccgcaa

SEQ ID NO: 372898 - DNA, 75 bp, synthetic construct
  source 1..75: mol_type = other DNA
ggttacagacggtagaagcattacgcgatacctctcacgtacgaaactacgccagcggtgagtggttgacgttaa

SEQ ID NO: 372899 - DNA, 75 bp, synthetic construct
  source 1..75: mol_type = other DNA
tgcctttgcttttttatcccttctttttttggcagtaataataaaatatgatgtttccttgccgacaaaaaagtg

SEQ ID NO: 372900 - DNA, 75 bp, synthetic construct
  source 1..75: mol_type = other DNA
aatatgtctttgtatggattacacgctctacgacaccgcaagtcgaagcacaaagaaagcagatcaaactgttta

SEQ ID NO: 372901 - DNA, 75 bp, synthetic construct
  source 1..75: mol_type = other DNA
cgacgcatgtgggaggagatgctggacattcgttctgcggatcgcgcctacggtatggcacaccgcccgtcacag

SEQ ID NO: 372902 - DNA, 75 bp, synthetic construct
  source 1..75: mol_type = other DNA
ggcggcacatcgttagtttcactagtaccagtcagtgagttgtgggttgatgcaaattataaagaaaaccaaata

SEQ ID NO: 372903 - DNA, 75 bp, synthetic construct
  source 1..75: mol_type = other DNA
tgtcccggtacggattgcatttgacgacgcaaaggaattaaagcaacttcttcgcccgggactgtccgtcaccgt

SEQ ID NO: 372904 - DNA, 75 bp, synthetic construct
  source 1..75: mol_type = other DNA
aggcgaatgagataattgaaagcactgacaaaaatgaaatacgtgatgctgcgttgattgcagcagcacaaaaag

SEQ ID NO: 372905 - DNA, 75 bp, synthetic construct
  source 1..75: mol_type = other DNA
gcccacatgctggatgtcgtggcacaagctgccgaagcccggcaactgaaaaatatcaccacccgccagggttat

SEQ ID NO: 372906 - DNA, 75 bp, synthetic construct
  source 1..75: mol_type = other DNA
cagagcgcatcgacagaggtgagaacgtattttgccttgcagaatgatggctctttcaccagtgatatcatcatg

SEQ ID NO: 372907 - DNA, 75 bp, synthetic construct
  source 1..75: mol_type = other DNA
tgatacttctcacgtgcgcaactactccagtggcgaatggttggcgttagtcaatgaagccagtctggttgttga

SEQ ID NO: 372908 - DNA, 75 bp, synthetic construct
  source 1..75: mol_type = other DNA
actttctgctcgcccgctacgaacaggccgcctcccgtgctgacctgctggagcgccagcaggcagagctgaacg

SEQ ID NO: 372909 - DNA, 75 bp, synthetic construct
  source 1..75: mol_type = other DNA
gaagcggcaatggcgctgtcatcgtcaggcagtgaacaggtatggctgacactggaacgtctggcgtttgtggac

SEQ ID NO: 372910 - DNA, 75 bp, synthetic construct
  source 1..75: mol_type = other DNA
agcgtctggcagcgcggctggctgattatcctgatgccagtgtactggatatgggctgtggagccggtcatgcca

SEQ ID NO: 372911 - DNA, 75 bp, synthetic construct
  source 1..75: mol_type = other DNA
ccgtctccaacgggcaaaaccgcgttctgctggtcatggcgaccggaacagggaaaacctataccgcattccaga

SEQ ID NO: 372912 - DNA, 75 bp, synthetic construct
  source 1..75: mol_type = other DNA
gcggcaacccttttttaatcgaagaagggcaactggggtacatgactcctgctaacaaacttttccagcctcccc

SEQ ID NO: 372913 - DNA, 75 bp, synthetic construct
  source 1..75: mol_type = other DNA
ggatacatgactcctgccaataaactttttcagcctccccatttttttctaacaactcttgatcgccttgctgaa

SEQ ID NO: 372914 - DNA, 75 bp, synthetic construct
  source 1..75: mol_type = other DNA
cgtggggtattcatatgaatttaaaaattttcggcataattgtcctttctgctttgatgttcgttttaggttttt

SEQ ID NO: 372915 - DNA, 75 bp, synthetic construct
  source 1..75: mol_type = other DNA
ggagcaggaaggatgtcgaacccgggttactgttgtgcctccaggctttgatttccagaaattatacgttgattc

SEQ ID NO: 372916 - DNA, 75 bp, synthetic construct
  source 1..75: mol_type = other DNA
ttaacttggttggcttctgctgaaaaagtaccgattataacgcaggttgggatgttacgcccagaaaaagggcat

SEQ ID NO: 372917 - DNA, 75 bp, synthetic construct
  source 1..75: mol_type = other DNA
caaaagaaatcaaagcttggcttaacatagataactatcgcaagtttgaagatctctcattaatacacttctatc

SEQ ID NO: 372918 - DNA, 75 bp, synthetic construct
  source 1..75: mol_type = other DNA
acaaccaatgaaagagatccacaaaccggagcagggcggcaacatcgagcagtatgaaaaagacatggctgttat

SEQ ID NO: 372919 - DNA, 75 bp, synthetic construct
  source 1..75: mol_type = other DNA
aggcatatctaccatgagctatttcagcgatgctcacaactcgccaactgcacaggttgaccgcgatattcgtaa

SEQ ID NO: 372920 - DNA, 75 bp, synthetic construct
  source 1..75: mol_type = other DNA
agggagataaaatagagttcccgacgctgattagcgataaagataaaattgcgttaggtcttgaacttgccgcag

SEQ ID NO: 372921 - DNA, 75 bp, synthetic construct
  source 1..75: mol_type = other DNA
tgttggttggcagcagcagaaaatataccgcttatcgtacaggtaggaatgttgcgtcctgagaaaggacataag

SEQ ID NO: 372922 - DNA, 75 bp, synthetic construct
  source 1..75: mol_type = other DNA
ctttctcatcacagaaaagcatctcggctatctcacaagagaggatactctttaccagcccccgcacttcttttt

SEQ ID NO: 372923 - DNA, 75 bp, synthetic construct
  source 1..75: mol_type = other DNA
aaaatcaaaaagattctgttttccgctcggcacagccgatggcgtcgttgtatgagcaagctttgctggtgattg

SEQ ID NO: 372924 - DNA, 75 bp, synthetic construct
  source 1..75: mol_type = other DNA
aatgttgcgcccggaaaaagggcacgaatttatgttgaatttactgttccatttaaaaatgaatggacgacagtt

SEQ ID NO: 372925 - DNA, 75 bp, synthetic construct
  source 1..75: mol_type = other DNA
gccgggcgctggcagcaaagtattcgggagacacgccgctgatgctggttatctggtccccggaagagattcagg

SEQ ID NO: 372926 - DNA, 75 bp, synthetic construct
  source 1..75: mol_type = other DNA
tcggaatggcatcagacatcagtccgattagcagggcttttaagtatgcgcttgatggaatcaccaataaaaaac

SEQ ID NO: 372927 - DNA, 75 bp, synthetic construct
  source 1..75: mol_type = other DNA
gctccggtgattcatggtattgcccgtggaaccgcacaagtgagtgtaaaacagaacggatacgatgtttatcag

SEQ ID NO: 372928 - DNA, 75 bp, synthetic construct
  source 1..75: mol_type = other DNA
ttgaataaacatccgtttttgggtgtttttttaatctttttgggatttaaattcctatcgatcaaggctcaacag

SEQ ID NO: 372929 - DNA, 75 bp, synthetic construct
  source 1..75: mol_type = other DNA
ttgtcacatcaacgggccggcaagtccttactgacaacggacaacaaggtatgggcggcgtggcggaagcgattt

SEQ ID NO: 372930 - DNA, 75 bp, synthetic construct
  source 1..75: mol_type = other DNA
gacggcggctattctgagaacaccatccacacgatgaaggcagcgttccggatgaattacgcctcttacattgac

SEQ ID NO: 372931 - DNA, 75 bp, synthetic construct
  source 1..75: mol_type = other DNA
gatgctgcgtcccgaaaaaggacatgaatttatgctgcgtgtgttgcatcagctgaagagggaagggaaatcgtt

SEQ ID NO: 372932 - DNA, 75 bp, synthetic construct
  source 1..75: mol_type = other DNA
gtaacggttattccacctggtttcgactggcccgcattgtataatgaagccatgcaaccgttacccccgcatatc

SEQ ID NO: 372933 - DNA, 75 bp, synthetic construct
  source 1..75: mol_type = other DNA
taaaatagctgcggaagccagaaaaagagggaatgatgtcacttttattcctttcagaaacagtcttcaccttcc

SEQ ID NO: 372934 - DNA, 75 bp, synthetic construct
  source 1..75: mol_type = other DNA
gcacgcagggatcgctctatggtgaatgggggaacgttggagcgttttccagtaattcgcaatttacacaaggtg

SEQ ID NO: 372935 - DNA, 75 bp, synthetic construct
  source 1..75: mol_type = other DNA
taacttatccgacagtgcatacagtcgaatgagtggttacaccgattactttgtcattaaccgattgtccgattg

SEQ ID NO: 372936 - DNA, 75 bp, synthetic construct
  source 1..75: mol_type = other DNA
aggggaactgaaacctggcgcaaggctaccttccagccgaacctggtcgcaggaactgggcgtgtctcgctccac

SEQ ID NO: 372937 - DNA, 75 bp, synthetic construct
  source 1..75: mol_type = other DNA
gtctgaccatttagcgatgaacaacacggcgtggaaatacctcaataagcaagatcgcaataatctgtttttcgt

SEQ ID NO: 372938 - DNA, 75 bp, synthetic construct
  source 1..75: mol_type = other DNA
tgaaaaattcgggttatcagaactatttcgttcagggagctaacctgcgttttgcaggcaaagacgtattcctga

SEQ ID NO: 372939 - DNA, 75 bp, synthetic construct
  source 1..75: mol_type = other DNA
atctacggtgaaagtctcgagagaacctattttgacaacgacgcttttccagatctcactcccgaactgggcgca

SEQ ID NO: 372940 - DNA, 75 bp, synthetic construct
  source 1..75: mol_type = other DNA
cactgagcgattccccggaactggtgaacagcgaaccgtatgcaggcggttggatctttaaaatcaaagccagcg

SEQ ID NO: 372941 - DNA, 75 bp, synthetic construct
  source 1..75: mol_type = other DNA
aatatttagaattagacttctttcacctatccccgctctttcaactcattgtatggcttctttgttatcaccttc

SEQ ID NO: 372942 - DNA, 75 bp, synthetic construct
  source 1..75: mol_type = other DNA
aactgataagtgaaaatgagaaaccggcggaagtcacccgcgtgatggcaccgctgtccggtgaaattgtccctc

SEQ ID NO: 372943 - DNA, 75 bp, synthetic construct
  source 1..75: mol_type = other DNA
agctgggcgatgaagtaaaaatcgagtacaagcatccgctgccgaagaaatttgacctggtgattaccgccaaag

SEQ ID NO: 372944 - DNA, 75 bp, synthetic construct
  source 1..75: mol_type = other DNA
cgtcagataggtatcggcttattgaggattatctgtatttagacggagatacagtcaggtacaaaaaggactcgc

SEQ ID NO: 372945 - DNA, 75 bp, synthetic construct
  source 1..75: mol_type = other DNA
tcgtaccgatcgattacattatcggcggaccaaaaatggccgggcaaggctggcggatgctggtggagtgcctct

SEQ ID NO: 372946 - DNA, 75 bp, synthetic construct
  source 1..75: mol_type = other DNA
cgtactcgcgctgactgccgttttcagcgcactgggctggatactacgccgacgccgccatcatcctcaccattt

SEQ ID NO: 372947 - DNA, 75 bp, synthetic construct
  source 1..75: mol_type = other DNA
tgtcatccgtggcgacaaaccgcagcaagagacgctggcagtgaagcgcaacacgatggataacggcgctacggt

SEQ ID NO: 372948 - DNA, 75 bp, synthetic construct
  source 1..75: mol_type = other DNA
agtcattcagcgcggtaagttgcagccaggagaatatcgcgacgtttatcaacaaaatcaaagcgtcaccgtggt

SEQ ID NO: 372949 - DNA, 75 bp, synthetic construct
  source 1..75: mol_type = other DNA
ttaaagagcatcgtttcttcgcgatgatcatcaaaaaagagtacggcgggctggagttctcggcttatgcccagt

SEQ ID NO: 372950 - DNA, 75 bp, synthetic construct
  source 1..75: mol_type = other DNA
tgatgtgatcgacagccagagcgccagcaaactgatcccggcagcggttgaaggcggcctgcatcagattgaaac

SEQ ID NO: 372951 - DNA, 75 bp, synthetic construct
  source 1..75: mol_type = other DNA
aagtcacctttaaagaagataacagcttgccggtgcgtaagccgtctttcctgatcaccaacccaggttctaacc

SEQ ID NO: 372952 - DNA, 75 bp, synthetic construct
  source 1..75: mol_type = other DNA
aaatggcttaattctgcatcaattccagaaaaaacaagtattttggcacttagtgactggctttccgtgaagccg

SEQ ID NO: 372953 - DNA, 75 bp, synthetic construct
  source 1..75: mol_type = other DNA
gcacaaaactggtcaccggcgaccgcgtccgcaggctgaaacagcacgccggcttcgaactgaacaaaacgcact

SEQ ID NO: 372954 - DNA, 75 bp, synthetic construct
  source 1..75: mol_type = other DNA
ggcgtgatgcagcagaccagatccttgaagccaactttaaccgtcttaaccgtgactatcgcggcatgatgctgt

SEQ ID NO: 372955 - DNA, 75 bp, synthetic construct
  source 1..75: mol_type = other DNA
cggtggcaaaatcattccctataaaaaattgctcgacgatgcgataagtcaggcgcagcaccagccacgccatgt

SEQ ID NO: 372956 - DNA, 75 bp, synthetic construct
  source 1..75: mol_type = other DNA
atgaagccgacctgccgctggtgcactggggtgtacaggatgcgctgtatcaggcagaacaggcgatggacgatt

SEQ ID NO: 372957 - DNA, 75 bp, synthetic construct
  source 1..75: mol_type = other DNA
cgcgcggtttaaccagcagcacgccaaccggcgatgccactaaacgctactatcagcacctgaaccgcctgagcg

SEQ ID NO: 372958 - DNA, 75 bp, synthetic construct
  source 1..75: mol_type = other DNA
attctgacccgtagcatgatgattttcggtcagggggcgattcgttgccatccgtacgtgctggaagagatggaa

SEQ ID NO: 372959 - DNA, 75 bp, synthetic construct
  source 1..75: mol_type = other DNA
ctctttcgatcagggcctgacaaggtaagcattagaagctttaactcactggaatacccacaagaagaaaagaat

SEQ ID NO: 372960 - DNA, 75 bp, synthetic construct
  source 1..75: mol_type = other DNA
gtattacctgtgcgctgatcccaaccaccacgccgggcgtggaaattggtcgtcgccacttcccgctgaacgtgc

SEQ ID NO: 372961 - DNA, 75 bp, synthetic construct
  source 1..75: mol_type = other DNA
gtcgccacttcccgctgaacgtaccgttccagaacggaccgacgcgcggtaaagatgtgttcgtgccgatcgatt

SEQ ID NO: 372962 - DNA, 75 bp, synthetic construct
  source 1..75: mol_type = other DNA
gttaagtatcattgtacccaccgtgggcagcagtcgattattgatgcgatggatatcaccgggggtaaaggcatt

SEQ ID NO: 372963 - DNA, 75 bp, synthetic construct
  source 1..75: mol_type = other DNA
gtcagttacctgccgctctccctgtaaatgtgacgctgataaccgatcagcctgattctgaaatcagatctgctt

SEQ ID NO: 372964 - DNA, 75 bp, synthetic construct
  source 1..75: mol_type = other DNA
tggagtccttcgtggcgattatggcgctggttgctgcgtccatcatcgaaccgggtctttacttcgcgatgaaca

SEQ ID NO: 372965 - DNA, 75 bp, synthetic construct
  source 1..75: mol_type = other DNA
cttccacgcgctgatctcttccggtacgacgccgaaactgctggctaatgaaaccgacgcgcgtttcattggcta

SEQ ID NO: 372966 - DNA, 75 bp, synthetic construct
  source 1..75: mol_type = other DNA
agcgttatttccccaacgcgtcgttcctgacaatatcgaggttactcccgactcttccatggggtggttgatgag

SEQ ID NO: 372967 - DNA, 75 bp, synthetic construct
  source 1..75: mol_type = other DNA
gatctggtctgtcttggtaatgattctctcctgactttattctcatccggagaagaacattttatcagtactgtt

SEQ ID NO: 372968 - DNA, 75 bp, synthetic construct
  source 1..75: mol_type = other DNA
acttttccatggggtgggttgatgagcgtctgaaacaaccagtgctgactgtggatttgatactggtaatacagc

SEQ ID NO: 372969 - DNA, 75 bp, synthetic construct
  source 1..75: mol_type = other DNA
agatccaccgcctaccggtgatacaggcagtttgtgaaaagcgtctacgccgtcgtgatgcagcatcacagcttg

SEQ ID NO: 372970 - DNA, 75 bp, synthetic construct
  source 1..75: mol_type = other DNA
gtgttgctgagatccgcttaggtatgccctttaaatcggcgatacaagatgctggtgagcaaggctcctgttatc

SEQ ID NO: 372971 - DNA, 75 bp, synthetic construct
  source 1..75: mol_type = other DNA
gcctgtcatcatggcacaactgaaagacgttaccgcacacgcggcggcaactgtcagttcctggggcttcgtgat

SEQ ID NO: 372972 - DNA, 75 bp, synthetic construct
  source 1..75: mol_type = other DNA
gaaatttctgttgaatgtgatctgaacgcaaatatggcggggattgtaacagccacgttgttgcctgtttctacc

SEQ ID NO: 372973 - DNA, 75 bp, synthetic construct
  source 1..75: mol_type = other DNA
ccaaacgacgggcccaggccagagttcaggaacaactcaggatgattaatccggttctgataaatccggatgaat

SEQ ID NO: 372974 - DNA, 75 bp, synthetic construct
  source 1..75: mol_type = other DNA
taacgcgactgacagaattaccgccagcatacaacctgcaacgcagtgcgcagctgctgcagcaactgagtgtgc

SEQ ID NO: 372975 - DNA, 75 bp, synthetic construct
  source 1..75: mol_type = other DNA
gttcctcttcctgaactcggcagtagcgagttgcgtaagcttgcgcaggcgctggaaagtatgcgcgtgaagctg

SEQ ID NO: 372976 - DNA, 75 bp, synthetic construct
  source 1..75: mol_type = other DNA
gtacgtggagctaaaaaacctgccgccggaagagggacaacagttggggcatctggatttgttggtgcatatggg

SEQ ID NO: 372977 - DNA, 75 bp, synthetic construct
  source 1..75: mol_type = other DNA
caacagcgacgcccccggctggctgcgcgtcttctggtcggtggcgattggcctgctgacgctaggcatgctgat

SEQ ID NO: 372978 - DNA, 75 bp, synthetic construct
  source 1..75: mol_type = other DNA
ggaaaatcgtcaggaggtcgttctttctgcggttgatgtggcggcattatttctccgcgtcagcgaagcgcgcac

SEQ ID NO: 372979 - DNA, 75 bp, synthetic construct
  source 1..75: mol_type = other DNA
cgtgcagttggcagaaaaaaacatcactctacatgttatgcccactgaggttaatgttgctgctgaaccggcgtt

SEQ ID NO: 372980 - DNA, 75 bp, synthetic construct
  source 1..75: mol_type = other DNA
cattatttcgccgcgtcagcgaagcgcgcaccgtgcagttggcagaaaaaaacatcactctacatgttatgccca

SEQ ID NO: 372981 - DNA, 75 bp, synthetic construct
  source 1..75: mol_type = other DNA
ctcgatggcggtactgggcggcagcctgaaacgtcgtgaacgtatctcggcacgtctgggggatattttaagtca

SEQ ID NO: 372982 - DNA, 75 bp, synthetic construct
  source 1..75: mol_type = other DNA
tcggtcagggagcgattcgttgccatccgtatgtgctggaagagatggaagcggcgaaaaataatgacgttaacg

SEQ ID NO: 372983 - DNA, 75 bp, synthetic construct
  source 1..75: mol_type = other DNA
ttgaagcagcaaaacagggagggctgcgccatgttattgttgatgaagcgcatattgtcgccagctgggggaacg

SEQ ID NO: 372984 - DNA, 75 bp, synthetic construct
  source 1..75: mol_type = other DNA
taactatggcttgagcgtactgtttgatattcccgattcgatggcggcgaaagcggcactgatcgccttgtcggt

SEQ ID NO: 372985 - DNA, 75 bp, synthetic construct
  source 1..75: mol_type = other DNA
accagaaagcgcaggccggtgaacgtatgccatcctgcattaacatcatcagtggccccagttcaacagcggaca

SEQ ID NO: 372986 - DNA, 75 bp, synthetic construct
  source 1..75: mol_type = other DNA
ataaaaatcaataaagataatataaaaatacaggatctttcctccatggaggaagatacagttttcctcttatca

SEQ ID NO: 372987 - DNA, 75 bp, synthetic construct
  source 1..75: mol_type = other DNA
ccggcgagcagtacaaataccgcgactcacgcgaggcggtcgatcgcgctaatcgaattctggtgaataaccttc

SEQ ID NO: 372988 - DNA, 75 bp, synthetic construct
  source 1..75: mol_type = other DNA
atgcccgtaaaggcgatattggcgcgttcgattcgccgaaatttatcggcctgccggtaggcgaagtattgaaag

SEQ ID NO: 372989 - DNA, 75 bp, synthetic construct
  source 1..75: mol_type = other DNA
gtggctaaaatagccgccatttttcagctactggataagaatgtgaccgtatcttctcatcgacttgaactgtta

SEQ ID NO: 372990 - DNA, 75 bp, synthetic construct
  source 1..75: mol_type = other DNA
atctttataaccttgcgttcaagaattatttcccaactccatcagtaataatgaaaaggaatttggtttgcttta

SEQ ID NO: 372991 - DNA, 75 bp, synthetic construct
  source 1..75: mol_type = other DNA
agctgtgtcagagttaagtaaaaaagttaaaggaaaaacaggtagaaagttaataactgcttcctttgctttatc

SEQ ID NO: 372992 - DNA, 75 bp, synthetic construct
  source 1..75: mol_type = other DNA
tgattatgccggaattttctttactgaaaatggaggaacccttgatctaaatggttatgaccagatatttaagta

SEQ ID NO: 372993 - DNA, 75 bp, synthetic construct
  source 1..75: mol_type = other DNA
attttcgtggcggggttacgtctgaagacagtcatatcaatgtttcttcatcttcagtcctgttctcagatgcat

SEQ ID NO: 372994 - DNA, 75 bp, synthetic construct
  source 1..75: mol_type = other DNA
ttctcactcaacaatctgaatcttaataatgcggacttcagtctgtcccgtaatgcatttatgaacgggaatatc

SEQ ID NO: 372995 - DNA, 75 bp, synthetic construct
  source 1..75: mol_type = other DNA
tccgccaggggccggtagaatggctctggcgtcagctaaccctccgtgctgccggacctgcattgtctaaaacat

SEQ ID NO: 372996 - DNA, 75 bp, synthetic construct
  source 1..75: mol_type = other DNA
aaatcagtaccgcgtctggcccaatgaaatgccagcagatttgcacaaaattcgtccgcatcacccactaaaccg

SEQ ID NO: 372997 - DNA, 75 bp, synthetic construct
  source 1..75: mol_type = other DNA
gccgggggcgctgtttgtaccaaacagtctgttaaaccagttccgccgtgaagccgccgacatgctggatgctgc

SEQ ID NO: 372998 - DNA, 75 bp, synthetic construct
  source 1..75: mol_type = other DNA
cacgcttaacaccattttgcatgacgatgaactggaacctgcgcagcgactgattaccgacctttaccagacagg

SEQ ID NO: 372999 - DNA, 75 bp, synthetic construct
  source 1..75: mol_type = other DNA
tgttttttgccatatcttggtcttttattaaatttattcgtagattatgtgtggtttttatccggaagttataaa

SEQ ID NO: 373000 - DNA, 75 bp, synthetic construct
  source 1..75: mol_type = other DNA
atgcgagagctgaaaatgaaactctgcgtgctgatgttgccgctggtcgtaagcgcctgcgaatcaacgccaact

SEQ ID NO: 373001 - DNA, 75 bp, synthetic construct
  source 1..75: mol_type = other DNA
atcagatggtgaacatgcacccggatacgaaagcctgtcacccgttcgggcgaacggtgatggcctgggaggcag

SEQ ID NO: 373002 - DNA, 75 bp, synthetic construct
  source 1..75: mol_type = other DNA
ggaatagaaaaaaccattgattttatgaactgccctgtttttgatatgataaaagaagaaatgctgaacgggacg

SEQ ID NO: 373003 - DNA, 75 bp, synthetic construct
  source 1..75: mol_type = other DNA
cctgtttggctcctacgatgcgcagaccggtgttcgccatatcaaggaagtgtttatccttatccccaagaaaaa

SEQ ID NO: 373004 - DNA, 75 bp, synthetic construct
  source 1..75: mol_type = other DNA
ttggttactgggagccgatggcactgacggacgtcacacgctcaccgggatgcatggtgaacctgggcttcagtc

SEQ ID NO: 373005 - DNA, 75 bp, synthetic construct
  source 1..75: mol_type = other DNA
caggtgaacggggcgttctatcacgttcactggtacaaatacccgctgacgtactggcttaacatcatcacatcg

SEQ ID NO: 373006 - DNA, 75 bp, synthetic construct
  source 1..75: mol_type = other DNA
caccgatggtgttaggtcatgaagttatcggtaaagttattcatagcgactcatcaaaattacatgaagggcaaa

SEQ ID NO: 373007 - DNA, 75 bp, synthetic construct
  source 1..75: mol_type = other DNA
aaacgacgacatggatcactggaaagcggaaaaaggctatttcgatgtcagctttgaagtgtccggtcatccttc

SEQ ID NO: 373008 - DNA, 75 bp, synthetic construct
  source 1..75: mol_type = other DNA
cgttaccgagcagacgatagattggaataataatggaacattagtacaaataacccgaggtggaatttgcggttc

SEQ ID NO: 373009 - DNA, 75 bp, synthetic construct
  source 1..75: mol_type = other DNA
tttcaacaggaacaggatcaactgcgggaggaagcattaatgttaatggaaactccacaacaggttctgatgtat

SEQ ID NO: 373010 - DNA, 75 bp, synthetic construct
  source 1..75: mol_type = other DNA
atgaaaaaacttaataaaaagaaatggcgaacaaatgtctgtgtccgcattttcgaaataatcgttcccgcaaca

SEQ ID NO: 373011 - DNA, 75 bp, synthetic construct
  source 1..75: mol_type = other DNA
cagccacaatatcagcagccgcaacaaccggttgcgccacagcagcaatatcagcagccgcaacaaccggttgcg

SEQ ID NO: 373012 - DNA, 75 bp, synthetic construct
  source 1..75: mol_type = other DNA
tgttttatggcttctggccgcaattgagccgctttaagctgggcttgcgatcgcctgcgtcggacggatggcgct

SEQ ID NO: 373013 - DNA, 75 bp, synthetic construct
  source 1..75: mol_type = other DNA
gccccgctgaccaaagcgacggtggtgcctcacgatccgcagcctgtaattctcccggcccctgcgggtctgtca

SEQ ID NO: 373014 - DNA, 75 bp, synthetic construct
  source 1..75: mol_type = other DNA
ctgaccttaattctgcaacccacaggaaagtgcctgcaatggacagagcatcacagccagcgcgtaccgggctga

SEQ ID NO: 373015 - DNA, 75 bp, synthetic construct
  source 1..75: mol_type = other DNA
tccactggcgggtgctcagtcaccttggttctaactttttatcgatgatggataacgccgaaattctgcgcggca

SEQ ID NO: 373016 - DNA, 75 bp, synthetic construct
  source 1..75: mol_type = other DNA
gcccgcgcgtgattgtagaacgtaatttacctgccggaacttattcactccgacaagaacttatccgtacaggag

SEQ ID NO: 373017 - DNA, 75 bp, synthetic construct
  source 1..75: mol_type = other DNA
gaaaaactatctgaagcttaatgttaaagagaaaaatattcagattgcagaccaggtaattattgatgaaactgc

SEQ ID NO: 373018 - DNA, 75 bp, synthetic construct
  source 1..75: mol_type = other DNA
tatggccacgctggagcatcttctgagcctgccgtcggactttcagggcgcgtggttccttttaaacaccagctc

SEQ ID NO: 373019 - DNA, 75 bp, synthetic construct
  source 1..75: mol_type = other DNA
cggcagaagcacagcgccagtcgctgattgatgctgcaatggcttccattagtctgattcaactgaaattgcagg

SEQ ID NO: 373020 - DNA, 75 bp, synthetic construct
  source 1..75: mol_type = other DNA
cggcagaagcacagcgccagtcgctgattgatcctgcaatggcttccattagtctgattcaactgaaattccagg

SEQ ID NO: 373021 - DNA, 75 bp, synthetic construct
  source 1..75: mol_type = other DNA
cggcagaagcacagcgccagtcgctgattgatactgcaatggcttccattagtctgattcaactgaaattacagg

SEQ ID NO: 373022 - DNA, 75 bp, synthetic construct
  source 1..75: mol_type = other DNA
gaggacggttgtggcgcacgtcttcggtgaacgcactctggccacacaggagcgtcttctgagcctgctgtcggc

SEQ ID NO: 373023 - DNA, 75 bp, synthetic construct
  source 1..75: mol_type = other DNA
aatacaggaacgtcaggaaaatgaggctaacagcgatttatcattaggtacggattactacaggccaaataatgt

SEQ ID NO: 373024 - DNA, 75 bp, synthetic construct
  source 1..75: mol_type = other DNA
tgaaaaagatgcgttgcgatgcttaatgtctgaacaggatattcaggatgcagaacaaacggctgcaaattgcaa

SEQ ID NO: 373025 - DNA, 75 bp, synthetic construct
  source 1..75: mol_type = other DNA
ctgcataaaagacttttatttagccgcttcggtatcttcagtatatttcctatgctgttggttgtgctttatggc

SEQ ID NO: 373026 - DNA, 75 bp, synthetic construct
  source 1..75: mol_type = other DNA
tacacagcaggatgcctggagctgggcatttctggatcttattggtcaggctaaatttctcacgctttttgcgtt

SEQ ID NO: 373027 - DNA, 75 bp, synthetic construct
  source 1..75: mol_type = other DNA
tgaaattcctcacgctttttgcgttgctgtttggtgcggggctgcaaatgctgctgccgcgtggcagacgctgga

SEQ ID NO: 373028 - DNA, 75 bp, synthetic construct
  source 1..75: mol_type = other DNA
ctggtcatgaacggatcgggggtaaacccaggcggacttaagacgggggacggtacagttgtcctgaaccagcag

SEQ ID NO: 373029 - DNA, 75 bp, synthetic construct
  source 1..75: mol_type = other DNA
ttgttcgcggcgtcgccattctggggatcctgctattaaacatcagcgcctttgggttaccaaaggcggcttatc

SEQ ID NO: 373030 - DNA, 75 bp, synthetic construct
  source 1..75: mol_type = other DNA
tccgtcaggggccgatagaatggctctggcgtcagctcaccctccgtgctgcgggacctgcattgtccaaaacat

SEQ ID NO: 373031 - DNA, 75 bp, synthetic construct
  source 1..75: mol_type = other DNA
tccagtcgcggctaacgttattagttttgctgggctttattcacggattgttattctgggacggcgacattctgt

SEQ ID NO: 373032 - DNA, 75 bp, synthetic construct
  source 1..75: mol_type = other DNA
gttttcggtgaacgcactctggccacactggcgcgtcttctgagcctgctgtcggcctttgaggtcgtggtatga

SEQ ID NO: 373033 - DNA, 75 bp, synthetic construct
  source 1..75: mol_type = other DNA
gtaattacgtttacaggtaaagtcgtatcacaaacctgtaatgtaacgacaggatcaaatggtaactttactgtt

SEQ ID NO: 373034 - DNA, 75 bp, synthetic construct
  source 1..75: mol_type = other DNA
ctgtatcagctgaatctggaaaaacatggacaggcgctggcattataacagacaaaggggctgaagtgacctgga

SEQ ID NO: 373035 - DNA, 75 bp, synthetic construct
  source 1..75: mol_type = other DNA
ggaaccaaaagcaatgcttataaaaataccgagcgttacactgctttttatcggattggcagtggtactcagtac

SEQ ID NO: 373036 - DNA, 75 bp, synthetic construct
  source 1..75: mol_type = other DNA
gtccgtatcggccacatcatgggcgcaaaaactggtttctgggcattgggcgttttaccgctgatgagcaggagc

SEQ ID NO: 373037 - DNA, 75 bp, synthetic construct
  source 1..75: mol_type = other DNA
tttgtgagtttatcttctactacgtgaaggggcaggatttccgtcacgtcggtggtgatgagctggataaactgc

SEQ ID NO: 373038 - DNA, 75 bp, synthetic construct
  source 1..75: mol_type = other DNA
ggcctatcgccatgttgtgcggatgccggacggatcgctgctcaaccgttactgggacgatcgcgacacgccgcg

SEQ ID NO: 373039 - DNA, 75 bp, synthetic construct
  source 1..75: mol_type = other DNA
gttactgacacctggcgggattctggcaagcgagtacgaaaccggtgaacagtgggataaacccaacggctgggc

SEQ ID NO: 373040 - DNA, 75 bp, synthetic construct
  source 1..75: mol_type = other DNA
ctgcgaatactgacattcgtgtgggtgatgtgctggtgacctccggccttggcggtcgtttcccggaaggttatc

SEQ ID NO: 373041 - DNA, 75 bp, synthetic construct
  source 1..75: mol_type = other DNA
cagcgaatacggatattcgtgttggtgatgtgctggtgacttccggtctgggcggtcgtttcccggaaggctatc

SEQ ID NO: 373042 - DNA, 75 bp, synthetic construct
  source 1..75: mol_type = other DNA
tttaatgcagatgatgccgcaggtattgccttcgccagatgccatggggccgaagttacctgaaccggcaacggg

SEQ ID NO: 373043 - DNA, 75 bp, synthetic construct
  source 1..75: mol_type = other DNA
ccagcccgcaccgtgctgcgcgcgctggatattgtaaaacgcgattatgaaaagaaattaacgcgcgatgatgag

SEQ ID NO: 373044 - DNA, 75 bp, synthetic construct
  source 1..75: mol_type = other DNA
atgtcactggaaaatgcccctgacgatgtcaaactggctgtcgatttgattgtgctgctggaagaaaatcagatc

SEQ ID NO: 373045 - DNA, 75 bp, synthetic construct
  source 1..75: mol_type = other DNA
gaaggggcaggatttccgtcacgtcggtggtgacgagctcgataaactgctggcagaaaaagatagcgataaata

SEQ ID NO: 373046 - DNA, 75 bp, synthetic construct
  source 1..75: mol_type = other DNA
aatgattgaggggctgccagcctctgacgcactaacacctgctgaccgctatctcgaacttttcgaacatgtcca

SEQ ID NO: 373047 - DNA, 75 bp, synthetic construct
  source 1..75: mol_type = other DNA
cgtgattttgacttgcgccgattcgttgaaaatcacttctggttaccggaagtctactccagcgagtatgtatcg

SEQ ID NO: 373048 - DNA, 75 bp, synthetic construct
  source 1..75: mol_type = other DNA
aacccgcgagccgcaggatcacattccgtggtcttctctgctggcgctgccgcagtcgtatattgtccctggcgg

SEQ ID NO: 373049 - DNA, 75 bp, synthetic construct
  source 1..75: mol_type = other DNA
cggtgggctttcccatcagccgccggtgcccgaactggcgaaagccgatgcccatatgcgcgaccgtctgttggg

SEQ ID NO: 373050 - DNA, 75 bp, synthetic construct
  source 1..75: mol_type = other DNA
ttactccccggaattatttcttttatttatatttacaatagacagttagcaagagtagtttcgtttagctttagg

SEQ ID NO: 373051 - DNA, 75 bp, synthetic construct
  source 1..75: mol_type = other DNA
tattatagctattttatgtacgcaatttattgaaatgtttgagcgtgaatttaatgttataataatactattcct

SEQ ID NO: 373052 - DNA, 75 bp, synthetic construct
  source 1..75: mol_type = other DNA
attagggaaagaaaaattacttacaaaaatttatgttataggtgcactatgtcatgttggctactctattccttt

SEQ ID NO: 373053 - DNA, 75 bp, synthetic construct
  source 1..75: mol_type = other DNA
aaaatattcgcctgttgctttctggtcagcatttgcttaatcgcctatcaaatactcacggcattgatataaatc

SEQ ID NO: 373054 - DNA, 75 bp, synthetic construct
  source 1..75: mol_type = other DNA
tgaacataacggattgcgatggagcgcacgagatccccgtagagtagaaagcgtaacaggttcaattgctacagc

SEQ ID NO: 373055 - DNA, 75 bp, synthetic construct
  source 1..75: mol_type = other DNA
gcgtctgcgccgggattgccaactattttgatgtaccggtaaaactggtgcgtatcctggtggtgctgtcgattt

SEQ ID NO: 373056 - DNA, 75 bp, synthetic construct
  source 1..75: mol_type = other DNA
taaaactggtgcgtatcctggtggtgctgtcgattttcttcggtctggcgctgtttaccctggttgcttacatca

SEQ ID NO: 373057 - DNA, 75 bp, synthetic construct
  source 1..75: mol_type = other DNA
ctgtttactctggtggcctatatcattttgtcatttgcgcttgatccgatgccggacaatatgacgtttggtgag

SEQ ID NO: 373058 - DNA, 75 bp, synthetic construct
  source 1..75: mol_type = other DNA
tggatgaagtcgatcgtgaactggcggccagtgaaacgcgtttacgcgagatggaacgttatgtcacttccgata

SEQ ID NO: 373059 - DNA, 75 bp, synthetic construct
  source 1..75: mol_type = other DNA
cctggattcggtgatcaccgccgtcggcctttctcagcatatatttatcatgattgccgccgtaatgattgccgt

SEQ ID NO: 373060 - DNA, 75 bp, synthetic construct
  source 1..75: mol_type = other DNA
atggtaagccgatacgtacccgatatgggcgatctgatttgggttgattttgacccgacaaaaggtagcgagcaa

SEQ ID NO: 373061 - DNA, 75 bp, synthetic construct
  source 1..75: mol_type = other DNA
atgggaggcgttaatctgaataaaaaactgtggcgtataccgcagcagggcatggtgaaaggggtttgcgcgggt

SEQ ID NO: 373062 - DNA, 75 bp, synthetic construct
  source 1..75: mol_type = other DNA
atggacagtctcaatcttaataagcatatttccggccagttcaatgccgaactggaaagtatccgcacgcaggtg

SEQ ID NO: 373063 - DNA, 75 bp, synthetic construct
  source 1..75: mol_type = other DNA
ttgagtacaatgatgtattattcaatcgtacaaatagtcctgaacttgtcgggaaaacagccatatataaatcag

SEQ ID NO: 373064 - DNA, 75 bp, synthetic construct
  source 1..75: mol_type = other DNA
gccgcgttgctggagaaaatcaaagctgaacgcgcagccagcgggggtaaaaaagcctcgcgtaaaaaatcctga

SEQ ID NO: 373065 - DNA, 75 bp, synthetic construct
  source 1..75: mol_type = other DNA
gcagccgcaacaaccggttgcgccgcagcagcagtatcagcagccacaacagccagttgcgccacaaccgcagga

SEQ ID NO: 373066 - DNA, 75 bp, synthetic construct
  source 1..75: mol_type = other DNA
atcagaaggcgaagcaacaaaacaaacggctcaaccgttcacgggcagtttgtatgaggttttgagcagggataa

SEQ ID NO: 373067 - DNA, 75 bp, synthetic construct
  source 1..75: mol_type = other DNA
gagatgtatgtggtactttctgttgtaatgacaattcttttttttactaaaaaaaatagcacaggtagcggaaaa

SEQ ID NO: 373068 - DNA, 75 bp, synthetic construct
  source 1..75: mol_type = other DNA
tgctttaaatatgttgacgttattattcctagagattcacatttatggttaaaaaatggagacttccttattcaa

SEQ ID NO: 373069 - DNA, 75 bp, synthetic construct
  source 1..75: mol_type = other DNA
cagagccagcactgttcaccgctccgcttttcactgagcgctgtccggcaggttttccgtcacctgccgcggact

SEQ ID NO: 373070 - DNA, 75 bp, synthetic construct
  source 1..75: mol_type = other DNA
aattataaaatatatttaggagataatttaggaattgcaacggcacaaaatgttggcttgaggaaagctattgag

SEQ ID NO: 373071 - DNA, 75 bp, synthetic construct
  source 1..75: mol_type = other DNA
ttcgtgcttattcatcacgcagcaatttggaatggatacttgtcatctggagtatgggaagcaccttcatcaaat

SEQ ID NO: 373072 - DNA, 75 bp, synthetic construct
  source 1..75: mol_type = other DNA
ttacttgtggcaggagcgaccatttttatcgccgatcgcgtaatggtcaacgccagcaaacagctgacctggagc

SEQ ID NO: 373073 - DNA, 75 bp, synthetic construct
  source 1..75: mol_type = other DNA
tggcgagttcaccgtcaagcgtctgcagcttaagccccgtatagccctgctgccgatgaattccgcctcctcctc

SEQ ID NO: 373074 - DNA, 75 bp, synthetic construct
  source 1..75: mol_type = other DNA
atggataaagaaaatagtagtattcctgaaagatggttaatcgcgtctggtgttgcggttattttactgacctta

SEQ ID NO: 373075 - DNA, 75 bp, synthetic construct
  source 1..75: mol_type = other DNA
caggaaaccgtactcatgcctgagaccggtagcacctgtccggactgcggaagtgaaatgcgacatatccgcgac

SEQ ID NO: 373076 - DNA, 75 bp, synthetic construct
  source 1..75: mol_type = other DNA
aaccggtgctgcaggcggacgagacgccgctgcagatactggatacgcggaaagggaaagtccggaaagggtacc

SEQ ID NO: 373077 - DNA, 75 bp, synthetic construct
  source 1..75: mol_type = other DNA
gctatttttaccgctttaggattttggatatcctctaattggattccacgtctaagatttaatgttagtgatata

SEQ ID NO: 373078 - DNA, 75 bp, synthetic construct
  source 1..75: mol_type = other DNA
tcacggcgacaataacaggtacattggcagaagctctaattgtcaatgttcaggtccctggcacagtccacaaat

SEQ ID NO: 373079 - DNA, 75 bp, synthetic construct
  source 1..75: mol_type = other DNA
actctcattttaaaaaaatagcaatcatagaattgctctcatctttttctggttttgttgttgcattgctagtag

SEQ ID NO: 373080 - DNA, 75 bp, synthetic construct
  source 1..75: mol_type = other DNA
gcccggaaagaggcttacgatgttatcgcgttctcaccggatggaagtaaaagagtcttccagcgaatcgaatag

SEQ ID NO: 373081 - DNA, 75 bp, synthetic construct
  source 1..75: mol_type = other DNA
gctgcgctgggaaacgcccgttaactacagtatcgatgcccctctggttttcaccggcagtttccaccaggcgct

SEQ ID NO: 373082 - DNA, 75 bp, synthetic construct
  source 1..75: mol_type = other DNA
gagaaacattttgactgttatacggtgcgttatctgtacctgcttaacataatggcacttgagctaaagtcagat

SEQ ID NO: 373083 - DNA, 75 bp, synthetic construct
  source 1..75: mol_type = other DNA
agcaggttattgtacttgtctgtgcttgccctaatcattgcagcaggtatctggcttctcagatttctggatgat

SEQ ID NO: 373084 - DNA, 75 bp, synthetic construct
  source 1..75: mol_type = other DNA
gtgctctctttcatttttggtatatattattgcggtttttttactaataaatgtatttaaaaataatgtgaaatg

SEQ ID NO: 373085 - DNA, 75 bp, synthetic construct
  source 1..75: mol_type = other DNA
aatcaaaattctctactattgcgaaggttgaaatattttcatctgtaatttcattaattgtggcgatagttgctg

SEQ ID NO: 373086 - DNA, 75 bp, synthetic construct
  source 1..75: mol_type = other DNA
acacatcaattgcacaggtggtaaaaataatatgtcaattaactgctattctagtttttgcgaaactattaaccc

SEQ ID NO: 373087 - DNA, 75 bp, synthetic construct
  source 1..75: mol_type = other DNA
ggttatctccccggcagaaaccgaatgccccgtctgcagcggcaaactgaaaccgctgggagaaagcaatctctg

SEQ ID NO: 373088 - DNA, 75 bp, synthetic construct
  source 1..75: mol_type = other DNA
aaaagagaatatggctggcagagccgacccggttgagcgttcacgtctcagggctcccctgagaggtatcgtaaa

SEQ ID NO: 373089 - DNA, 75 bp, synthetic construct
  source 1..75: mol_type = other DNA
aaatatacgggtaaacacactgggaggggtggtttctgcaggacaggacataatggaaattattccgctggaaga

SEQ ID NO: 373090 - DNA, 75 bp, synthetic construct
  source 1..75: mol_type = other DNA
atgctgaagcagctgggcaatctgaatccgcagcagtttatgtccggcagccagggaggaggcaacgatggcaaa

SEQ ID NO: 373091 - DNA, 75 bp, synthetic construct
  source 1..75: mol_type = other DNA
gcgattggtggggcactgtatctgtctgatgtggacatgtccggtaacggtgaaaccgtggctgaacaggagcct

SEQ ID NO: 373092 - DNA, 75 bp, synthetic construct
  source 1..75: mol_type = other DNA
gtatttccagtactttatgcagtcacttcttttcaaaaatcaaattagaaggcaagcaacaggttcagcacagct

SEQ ID NO: 373093 - DNA, 75 bp, synthetic construct
  source 1..75: mol_type = other DNA
ttcaatattgcaacattgagcgtgcgtcaagattgctgggttgcgagattagcgatctgattaatttgggtgtta

SEQ ID NO: 373094 - DNA, 75 bp, synthetic construct
  source 1..75: mol_type = other DNA
aaaattttggagagtatgccctaagtggttttgaattaaccccgtgccatccagaaactgataatcccgccgtac

SEQ ID NO: 373095 - DNA, 75 bp, synthetic construct
  source 1..75: mol_type = other DNA
ttcaatactgcaatattgaacgtgcgtcgagattgctgggttgtgagattagcgacctgattaatttaggtgtta

SEQ ID NO: 373096 - DNA, 75 bp, synthetic construct
  source 1..75: mol_type = other DNA
gaagcgataggcagcctgattgtcactaaagagggtgatactctggattgccgtcagtggcagcgggtgattgct

SEQ ID NO: 373097 - DNA, 75 bp, synthetic construct
  source 1..75: mol_type = other DNA
gaatctgattcatccgaaagattacagttatttcaacacattaagtaccaagctcggctggtcaaaaaaattatt

SEQ ID NO: 373098 - DNA, 75 bp, synthetic construct
  source 1..75: mol_type = other DNA
ccctctctggatgcgattaccctggtgcccatgttcccgcatacgttgtcagcacgaccactggtcataaacagc

SEQ ID NO: 373099 - DNA, 75 bp, synthetic construct
  source 1..75: mol_type = other DNA
ggcatggggcgcgggatttgttgacggtatcggtcagggaatggagcgagcttcacagcctgctgtcgggctggg

SEQ ID NO: 373100 - DNA, 75 bp, synthetic construct
  source 1..75: mol_type = other DNA
ccttaaccaacaataatcctcagcaatttcgtaatgttgtctcattttccttctcgctggatatcgtcagtgggg

SEQ ID NO: 373101 - DNA, 75 bp, synthetic construct
  source 1..75: mol_type = other DNA
tgccggtaaagggatgacaccagcgatgtttggcgtactcgttgtcatacagtcctacgccaagtcgattagcga

SEQ ID NO: 373102 - DNA, 75 bp, synthetic construct
  source 1..75: mol_type = other DNA
ctggatgaccaaagcttttggctggcggcgctgtattgcacgctcattccttcaatggcttcctccacgccgacc

SEQ ID NO: 373103 - DNA, 75 bp, synthetic construct
  source 1..75: mol_type = other DNA
atgtttggcgtactggtaattgtgcaatcgtacgccaagtcgatcagcgattttattaagtttcagacatggcag

SEQ ID NO: 373104 - DNA, 75 bp, synthetic construct
  source 1..75: mol_type = other DNA
ttggcgggttttaacatcaaacattggtttgcagatggcgcatttcgcaccattattcgcaatagcgcctggtta

SEQ ID NO: 373105 - DNA, 75 bp, synthetic construct
  source 1..75: mol_type = other DNA
tcgttggtaagccgcttatttcgttggtattcggcgtgaagtatctcgaagcctatgacctgatccaggtaatgc

SEQ ID NO: 373106 - DNA, 75 bp, synthetic construct
  source 1..75: mol_type = other DNA
ttgcgatatccatgaagcgggtaatgactccaacttattgatagtgttttatgttcagataatgcccgatgactt

SEQ ID NO: 373107 - DNA, 75 bp, synthetic construct
  source 1..75: mol_type = other DNA
ggtaagagagagactttcattttcagggtttacaattcgaggtcgagtaataaatgagtcgactcttccagccta

SEQ ID NO: 373108 - DNA, 75 bp, synthetic construct
  source 1..75: mol_type = other DNA
gccatcagctgaaagtcatcttaacggctttaatactgaccagatgctgaagcagctgggcaacctgaatccgca

SEQ ID NO: 373109 - DNA, 75 bp, synthetic construct
  source 1..75: mol_type = other DNA
tcgctaattccgaccttaaaggcattttttcagcgccattccttgctttataacgcagccggagagaaatcctga

SEQ ID NO: 373110 - DNA, 75 bp, synthetic construct
  source 1..75: mol_type = other DNA
ttctcgtggcgcaaaccatcgcctcaatcggctacatcgtattgctgttcatgttctgtcatctgtttggcgtgc

SEQ ID NO: 373111 - DNA, 75 bp, synthetic construct
  source 1..75: mol_type = other DNA
tgttattgcctggtacgtgtcgaatctggttggcggcaccatgtactggtggtttgcagcgcgcgaattacgccg

SEQ ID NO: 373112 - DNA, 75 bp, synthetic construct
  source 1..75: mol_type = other DNA
cacgcttcccctatgaagaccggctggatctggtgttaaaaggcaccgccgatattccacgcctgaccgtgcatc

SEQ ID NO: 373113 - DNA, 75 bp, synthetic construct
  source 1..75: mol_type = other DNA
tacccaatgctggatatgattgcccgcagtatggagcgtttaggacgcaagtcagcaaaagagccgccgctgacc

SEQ ID NO: 373114 - DNA, 75 bp, synthetic construct
  source 1..75: mol_type = other DNA
tgcgcaggaagagttaggttatcagccgatcatcacgctaaatgaaggtattgagcaaactgccgcctggctgcg

SEQ ID NO: 373115 - DNA, 75 bp, synthetic construct
  source 1..75: mol_type = other DNA
ttattcatatctcttccccctccctgtacttcgattatcaccaccatcgcgatattaaagaagattttcgccctc

SEQ ID NO: 373116 - DNA, 75 bp, synthetic construct
  source 1..75: mol_type = other DNA
ggatatgatcgcccgcagcatggagcgtttaggtcgcaagtcagcaaaagagccgccgctgacccactacggcgt

SEQ ID NO: 373117 - DNA, 75 bp, synthetic construct
  source 1..75: mol_type = other DNA
tgaatttttatgccgaaaaggcatcagcgtaagagcgaccggtcgcaatgaagcgatgggtaaattgctggagaa

SEQ ID NO: 373118 - DNA, 75 bp, synthetic construct
  source 1..75: mol_type = other DNA
ccagcggcttaggtcgaaacgcggtagagtttttatgccagaaaggcatcagcgtgcgagcgaccggtcgcaatg

SEQ ID NO: 373119 - DNA, 75 bp, synthetic construct
  source 1..75: mol_type = other DNA
atgtcttttcaaatcgttaaaaaaaatggcttattaattttaagtatattatatcttgttggttgtggtacaggt

SEQ ID NO: 373120 - DNA, 75 bp, synthetic construct
  source 1..75: mol_type = other DNA
tttttctcccgactatctggcagatgccatgagatttaacccggtagccgacatggtatttaccggacaaaaaga

SEQ ID NO: 373121 - DNA, 75 bp, synthetic construct
  source 1..75: mol_type = other DNA
atatcgttacattacaacggattcttggacatgcgactatccagcaaacgatgacttatgcgcatttttcccccg

SEQ ID NO: 373122 - DNA, 75 bp, synthetic construct
  source 1..75: mol_type = other DNA
gaaagttaccatgaactactagcatctgaaggctatgatcttgacgaaatagaagatcttgctcaacctctttca

SEQ ID NO: 373123 - DNA, 75 bp, synthetic construct
  source 1..75: mol_type = other DNA
aatgggggatccccgatccaactgcgtaacccgaaaatttcttctaggttaccgcgcaaataaactcagtgcggg

SEQ ID NO: 373124 - DNA, 75 bp, synthetic construct
  source 1..75: mol_type = other DNA
ggttggttaggcatgatggatttttacatagtgattttttcattaggatgggttctttatcaagttaaatatagt

SEQ ID NO: 373125 - DNA, 75 bp, synthetic construct
  source 1..75: mol_type = other DNA
gctgtcgcctggggtgtacgtaactttattcatatctcttctccctccctgtacttcgattatcaccaccatcgc

SEQ ID NO: 373126 - DNA, 75 bp, synthetic construct
  source 1..75: mol_type = other DNA
ctgatgcttatctgcctgaacccgaagcccccggcgcgcgaaaaaagccagagtacaggaggacccgttctgatg

SEQ ID NO: 373127 - DNA, 75 bp, synthetic construct
  source 1..75: mol_type = other DNA
gcgacgcccgttcgttacgattcccgttcggtcagcaccggtattgccggacgcagtctgaccgctgacctgatt

SEQ ID NO: 373128 - DNA, 75 bp, synthetic construct
  source 1..75: mol_type = other DNA
ccagcctgatcacggtgaaacggtgattgaggtaatcaacaaaatactcggtcagcagcaggcactggcttacga

SEQ ID NO: 373129 - DNA, 75 bp, synthetic construct
  source 1..75: mol_type = other DNA
ggcaggaaaccgcgcagaccggggacgccatcacccattacatcaccattcgttaccgccgggggatcaccgctg

SEQ ID NO: 373130 - DNA, 75 bp, synthetic construct
  source 1..75: mol_type = other DNA
gctttctgctgctggagtgtacggagctgggcgaatttacgcagagtcacggaggcagcaatggcgactcccttt

SEQ ID NO: 373131 - DNA, 75 bp, synthetic construct
  source 1..75: mol_type = other DNA
atgaatgataaagtcacgctacgggtaaatggccgggagtggaatggctggatatcggtgcgcatcggtgccggt

SEQ ID NO: 373132 - DNA, 75 bp, synthetic construct
  source 1..75: mol_type = other DNA
tgattttggtgaggccaccattgccgcaatacgtcagaccattcaggacagtggcgtgacccgttatcgcccttt

SEQ ID NO: 373133 - DNA, 75 bp, synthetic construct
  source 1..75: mol_type = other DNA
aacagccgatctggttgactgctctgctttgccactccagcagagcggaaaaaacctgctcagaatagtcagtga

SEQ ID NO: 373134 - DNA, 75 bp, synthetic construct
  source 1..75: mol_type = other DNA
ttgctggaaaaaatgggcgcagagtttgttccggcggatctgaccgagctggtctcatcacaagctaaagtgatg

SEQ ID NO: 373135 - DNA, 75 bp, synthetic construct
  source 1..75: mol_type = other DNA
cagccgcgcattaaaaacggttcaaaagtggaggtgctgattggtgatgagctggtgatcaccggctgggtggag

SEQ ID NO: 373136 - DNA, 75 bp, synthetic construct
  source 1..75: mol_type = other DNA
aagtgctgctttataccgatggtcgcccggacaagccctatcacgggcagattggtttcgtttcgccgactgctg

SEQ ID NO: 373137 - DNA, 75 bp, synthetic construct
  source 1..75: mol_type = other DNA
attgaggtaatcaacaaaatactcggtcagcagcaggcgctggcttacgacgacccgcacggcaggctggtgatt

SEQ ID NO: 373138 - DNA, 75 bp, synthetic construct
  source 1..75: mol_type = other DNA
tcaaaaccaccactaacccaccagcgtttggctgtacctttgttgatctgacggtcgatattgcgctgtgcaaag

SEQ ID NO: 373139 - DNA, 75 bp, synthetic construct
  source 1..75: mol_type = other DNA
ccacggaaatcggccagggtgccgacaccgtgttctcgcaaatggtggcagaaaccgtgggggttccggtcagcg

SEQ ID NO: 373140 - DNA, 75 bp, synthetic construct
  source 1..75: mol_type = other DNA
atcgatgccgccgattaccaggtgcaggggcactatcagactcccgttattcaacattgtcatatggaaagcgtg

SEQ ID NO: 373141 - DNA, 75 bp, synthetic construct
  source 1..75: mol_type = other DNA
gtagtcccggagaaaagcccgtttgttgaactgttcgtgttggtgggtctgcctgctgccgcaagcgtgatcaac

SEQ ID NO: 373142 - DNA, 75 bp, synthetic construct
  source 1..75: mol_type = other DNA
tcttgcatctgtctgctcggcggcgtggtgatgttgtatgtgaatccaagcgtgattggcgcgttcacgatgatc

SEQ ID NO: 373143 - DNA, 75 bp, synthetic construct
  source 1..75: mol_type = other DNA
ttgaactgtttgtgctggtggggctgcctgcggcggcaagcgtgattaactttgtggtgctgacctctgcggctt

SEQ ID NO: 373144 - DNA, 75 bp, synthetic construct
  source 1..75: mol_type = other DNA
tgttttagctacacctctaacacctggcctgttggtgtagaaatcgctggcgcacgcctgttgatgaatcaggat

SEQ ID NO: 373145 - DNA, 75 bp, synthetic construct
  source 1..75: mol_type = other DNA
ctggcgcgatgcgcggttatggtgcaccgcaagtcgtttttgctgtcgaatcaatgctggatgacgccgctactg

SEQ ID NO: 373146 - DNA, 75 bp, synthetic construct
  source 1..75: mol_type = other DNA
caggtgaatcatgtatgcgcgtagatgccattgctaaggttaccgggcgggcacgatatacagatgattatgtta

SEQ ID NO: 373147 - DNA, 75 bp, synthetic construct
  source 1..75: mol_type = other DNA
ggcgatttttacctgggaagatgtacctgatatcccattcgctacggctgggcatgcctggacacttgatgaaaa

SEQ ID NO: 373148 - DNA, 75 bp, synthetic construct
  source 1..75: mol_type = other DNA
tcccatcgtcacggtaggctctcttgtaagagtgttaaacgcgcaaccgatgacccaggagcgacgtaaccagtt

SEQ ID NO: 373149 - DNA, 75 bp, synthetic construct
  source 1..75: mol_type = other DNA
cgcacgcctgttgatgaatcaggatggaaccatcaacgtgcaaagcggcgctacagaaatcggtcagggtgccga

SEQ ID NO: 373150 - DNA, 75 bp, synthetic construct
  source 1..75: mol_type = other DNA
ctcatacctggtgtatcgcaaacaacgtccgcacctgcatgagaaatctatctacaagatgccgcttggcaagtt

SEQ ID NO: 373151 - DNA, 75 bp, synthetic construct
  source 1..75: mol_type = other DNA
ggcgcatttgcctcacgccagagctatgttgccgcgcctgcgctgcgcagtgcggcactattattaaaagagaaa

SEQ ID NO: 373152 - DNA, 75 bp, synthetic construct
  source 1..75: mol_type = other DNA
cgctaaccgctgcgggtatggcgcaatcgcgcgtagagcttggctatagtgcttttttagggaagatggagctat

SEQ ID NO: 373153 - DNA, 75 bp, synthetic construct
  source 1..75: mol_type = other DNA
atgaatttagaatccattctgaaattccactttcccaaatcaccgcgattatcagacgaaagccggggcacatcc

SEQ ID NO: 373154 - DNA, 75 bp, synthetic construct
  source 1..75: mol_type = other DNA
tactgttgaacaggggctgagccgacaggcgctggctgcacaaaaagccgggatatcagtcggacagtataaggc

SEQ ID NO: 373155 - DNA, 75 bp, synthetic construct
  source 1..75: mol_type = other DNA
cggatctgttcattgcccctgttcccggatatgaccaccgccgatgccgaacgcgtcatcgcggcccttcaccaa

SEQ ID NO: 373156 - DNA, 75 bp, synthetic construct
  source 1..75: mol_type = other DNA
atgtcagactttttacctttttcgcgtccggcaataggcgcggaagaactcgctgcagttcaagaggttttcgaa

SEQ ID NO: 373157 - DNA, 75 bp, synthetic construct
  source 1..75: mol_type = other DNA
tccactttcctaaatcaccgcgattatctgacgaaagccggggcacgtccccggacgctcttaatacgacggatg

SEQ ID NO: 373158 - DNA, 75 bp, synthetic construct
  source 1..75: mol_type = other DNA
aagatgcagaaaaagcggcatgtgatttattcgatatgaccacagatatcatccaggagtaccggaacaaggagc

SEQ ID NO: 373159 - DNA, 75 bp, synthetic construct
  source 1..75: mol_type = other DNA
actgctggttactccgctgtggtttatcgcactagggctgggctggttgtttattagtaagaaacgtatagcgaa

SEQ ID NO: 373160 - DNA, 75 bp, synthetic construct
  source 1..75: mol_type = other DNA
caatgatcttattattcttgttgccgttttcgcgtttcgggattactgccagagtgcggcgaccgaaaaggtttg

SEQ ID NO: 373161 - DNA, 75 bp, synthetic construct
  source 1..75: mol_type = other DNA
gctatggcaaaagattacgaatacgtcatggagctggacgaggacaaacgcaatgatcttattattcttgttgcc

SEQ ID NO: 373162 - DNA, 75 bp, synthetic construct
  source 1..75: mol_type = other DNA
caatgaacttattattcttgttgccgttttcgcgtttcgggattattgccagagtgcggcgaccgaaaaagtttg

SEQ ID NO: 373163 - DNA, 75 bp, synthetic construct
  source 1..75: mol_type = other DNA
cagtcagtatccggggccggaggtcgcttcggccctggacccgcagggttacgctaccccggtagcgtatctcaa

SEQ ID NO: 373164 - DNA, 75 bp, synthetic construct
  source 1..75: mol_type = other DNA
tgagcagcagggaacacggccagtgctgattgtcacaccggcggcctttaatcgcgtgacccgcctgcctgttgt

SEQ ID NO: 373165 - DNA, 75 bp, synthetic construct
  source 1..75: mol_type = other DNA
atgggaccatgcaataaaatcgaaaattgagactctcgctaagcgtgaaactcaatatttagatgatgcggctaa

SEQ ID NO: 373166 - DNA, 75 bp, synthetic construct
  source 1..75: mol_type = other DNA
gacggcccaaatatcattgaacttaagtctcttaagcctgtgtctttgttggccgaaaagctttctgcttattca

SEQ ID NO: 373167 - DNA, 75 bp, synthetic construct
  source 1..75: mol_type = other DNA
tcaaaaatctggttctggttcacgccgcacgttatgccgccgacttaagctatttgccactgatgcaagaactgg

SEQ ID NO: 373168 - DNA, 75 bp, synthetic construct
  source 1..75: mol_type = other DNA
aagaaaacgcagacaacaccctcaatcgtttgaagatggcgggtcacacaaactgtattcggctcgccaccgggg

SEQ ID NO: 373169 - DNA, 75 bp, synthetic construct
  source 1..75: mol_type = other DNA
ttagttgaagttccgtggaatgagcaaacgccagaacagcgccagcaaacgctacaacgccagcgtcaggcgcag

SEQ ID NO: 373170 - DNA, 75 bp, synthetic construct
  source 1..75: mol_type = other DNA
ggaggttgttcggttaaagcaattaatacatgaagaaaaaaaacgtaatagagataaccacattcagcgagttct

SEQ ID NO: 373171 - DNA, 75 bp, synthetic construct
  source 1..75: mol_type = other DNA
tcttgagtcggcaaggggcgggtcggtacaaactaaacaaagcatcccttgaaaaaatgcctttgttactccctc

SEQ ID NO: 373172 - DNA, 75 bp, synthetic construct
  source 1..75: mol_type = other DNA
ccatgttggagaaaaaactcgcctgcctgaaagaagagaaaaaagccctgatgcagcagttattgaccgggaaac

SEQ ID NO: 373173 - DNA, 75 bp, synthetic construct
  source 1..75: mol_type = other DNA
ttgtaaaccgttcgttattccctatattaagtaaaaataaacacaagcatgctgaggtagaaaaaatatatttaa

SEQ ID NO: 373174 - DNA, 75 bp, synthetic construct
  source 1..75: mol_type = other DNA
cgatttactcgggccgtgggcaggatatttcaccggctggacttactggttctgctgggttgtaaccggtatggc

SEQ ID NO: 373175 - DNA, 75 bp, synthetic construct
  source 1..75: mol_type = other DNA
tggtgtgcacatagagaaaatgatttttaagttagatagttggtttaagtggccatttaatatccccccactgtc

SEQ ID NO: 373176 - DNA, 75 bp, synthetic construct
  source 1..75: mol_type = other DNA
gcggtgccattggtacggggttgtttatggggtctggcaaaacgattagccttgccgggccgtcgatcattttcg

SEQ ID NO: 373177 - DNA, 75 bp, synthetic construct
  source 1..75: mol_type = other DNA
ttcgtagctatgtggcgcgttggctgacggagttcgaagacgtacaggcctattgcaccgcactaccgcatcatg

SEQ ID NO: 373178 - DNA, 75 bp, synthetic construct
  source 1..75: mol_type = other DNA
ttcgtagctatgtagcacgctggctgacagagctcgaagatgtgcaagcctattgtaccgcgctaccgcatcatg

SEQ ID NO: 373179 - DNA, 75 bp, synthetic construct
  source 1..75: mol_type = other DNA
gctggcaatgtggcagcatctggaaaacgttaagcaacgtctgctggaattctcgaacgttgacgatatttattt

SEQ ID NO: 373180 - DNA, 75 bp, synthetic construct
  source 1..75: mol_type = other DNA
acaccggggtgggccgatgccggacaaaaaaccacgctgctgaaacttcgccaggtttatgcccgcgccagcgca

SEQ ID NO: 373181 - DNA, 75 bp, synthetic construct
  source 1..75: mol_type = other DNA
gaagatcgctacacggcagcggagtacttgcagaattacgccattgcgtacagtcagtatccggggccggaggtc

SEQ ID NO: 373182 - DNA, 75 bp, synthetic construct
  source 1..75: mol_type = other DNA
ctcagagcaaaagcaaagaactttaaattaggtatttgctcagaaagtttggtttatcataaaataggtgcaagt

SEQ ID NO: 373183 - DNA, 75 bp, synthetic construct
  source 1..75: mol_type = other DNA
tgaagtcagcgtttactataaccgggtgagtgatgccatcctctcgcacaatatcaatgccgataccgtgcagaa

SEQ ID NO: 373184 - DNA, 75 bp, synthetic construct
  source 1..75: mol_type = other DNA
ctgataatgtacaactcgctggcggatctgaaaaataaaagcggcagctacagccactattccgattacagcgat

SEQ ID NO: 373185 - DNA, 75 bp, synthetic construct
  source 1..75: mol_type = other DNA
tttatatgatcatcggttttatgctctttttcgtgatgcgggcaatgggggaattgctgctttcgaatctggaat

SEQ ID NO: 373186 - DNA, 75 bp, synthetic construct
  source 1..75: mol_type = other DNA
tcaaagggctggtggaagtgcgtcggggtgcaggtatctatgttcttgatagctcaggcagccacaacgcagaca

SEQ ID NO: 373187 - DNA, 75 bp, synthetic construct
  source 1..75: mol_type = other DNA
acgcaatttcactctataccgaatcattcggtgacccgaccgatgaaccaattattctgatcatgggggcgatgt

SEQ ID NO: 373188 - DNA, 75 bp, synthetic construct
  source 1..75: mol_type = other DNA
tcggtcaataacctgtttgatacccaatatgcctacagtgaagggtttattgaagaaggtcgcaatttctgggca

SEQ ID NO: 373189 - DNA, 75 bp, synthetic construct
  source 1..75: mol_type = other DNA
gctcggatggctttttattgctgtatcaatattaaccacatgtgcttgcgtatgttttcttcgtaagaataaaaa

SEQ ID NO: 373190 - DNA, 75 bp, synthetic construct
  source 1..75: mol_type = other DNA
ggataccggtcgtgtctctgtgcgtgacatccggcatgccggggaagaagatttcggtatgccgtggcctgaatt

SEQ ID NO: 373191 - DNA, 75 bp, synthetic construct
  source 1..75: mol_type = other DNA
gcgtgggtacgctttgccgatttcgccgaacaggacgcaccaacggaagtgtggggtaaccattttactgcgcgc

SEQ ID NO: 373192 - DNA, 75 bp, synthetic construct
  source 1..75: mol_type = other DNA
gcgaaagccatgctgattgaaggggcggatgccaatgcctctgtcaccggtaatgaatccacggtgccgatgcag

SEQ ID NO: 373193 - DNA, 75 bp, synthetic construct
  source 1..75: mol_type = other DNA
tcagcatgccaccacagagatgcaggtgacggcagcgcagatgcagaagcagtatgaggaaatccgtcgcgagct

SEQ ID NO: 373194 - DNA, 75 bp, synthetic construct
  source 1..75: mol_type = other DNA
gatgaccagcgtcgtattgaaaagctgggacaggacaatgctgccctggcagagcaggtgaaagccctgggtgca

SEQ ID NO: 373195 - DNA, 75 bp, synthetic construct
  source 1..75: mol_type = other DNA
tgagctgctcagcaaggggcaggcaggctatcagcaccagattgacaaactcagtcaggataatgcggcgctttc

SEQ ID NO: 373196 - DNA, 75 bp, synthetic construct
  source 1..75: mol_type = other DNA
tatccgagatgaacctgaagaaagccccaccggcaaaggctccaaaaggcgaacctgcgccggatatgaccgggg

SEQ ID NO: 373197 - DNA, 75 bp, synthetic construct
  source 1..75: mol_type = other DNA
gagttacaaggacgagtggggcgataaatataagtcagaagttgatgttaaaagtcatgacatcatgcttggtgt

SEQ ID NO: 373198 - DNA, 75 bp, synthetic construct
  source 1..75: mol_type = other DNA
ttcatcctgttaaatcgatgcgcggcattggtcttacacatgctctggcagatgtcagtggtctggccttcgatc

SEQ ID NO: 373199 - DNA, 75 bp, synthetic construct
  source 1..75: mol_type = other DNA
atgacgcaacgggatgttttgttggtctggaagcctggggggatgtgtccagtgagcgtgccattgtacgtaccg

SEQ ID NO: 373200 - DNA, 75 bp, synthetic construct
  source 1..75: mol_type = other DNA
agatgagctacatgcgtcagcagctttccgcccgcatgctcagtcgttaccaaaacaactatcacttcggaggga

SEQ ID NO: 373201 - DNA, 75 bp, synthetic construct
  source 1..75: mol_type = other DNA
aatcccgtcacggcgaccggtgagcctgtaccgcagacgccagcctcaccgcccggcccggaaggcgaaccacag

SEQ ID NO: 373202 - DNA, 75 bp, synthetic construct
  source 1..75: mol_type = other DNA
ctcctggactcgtcttggttttgccggtttaggcttcggacagaatggtaccatcgactacggtcgtaactacgg

SEQ ID NO: 373203 - DNA, 75 bp, synthetic construct
  source 1..75: mol_type = other DNA
cgcagcaaatgcggctgaaatttataataaagatggcaataaactggatttgtacggcaagatggttggtgagcg

SEQ ID NO: 373204 - DNA, 75 bp, synthetic construct
  source 1..75: mol_type = other DNA
accggtttcttccagctttgccgtgcgaaaacgcgccaatgacatcgcgctcaaatgcaaatactgtgaaaaaga

SEQ ID NO: 373205 - DNA, 75 bp, synthetic construct
  source 1..75: mol_type = other DNA
ctgccggtggtgcagacaacccagcaggtgttgatgataaagatctggttaaatacgccgatgttggcgcgactt

SEQ ID NO: 373206 - DNA, 75 bp, synthetic construct
  source 1..75: mol_type = other DNA
atgatgctaataatgtgtatttagcagctatgtacgctgaaactcgcaatatgaccccatatggtggtggcgagt

SEQ ID NO: 373207 - DNA, 75 bp, synthetic construct
  source 1..75: mol_type = other DNA
cgcttactctaattctgaccgttccaataaccaaacagttaaaggttatggtgatggtaatcataattatggtaa

SEQ ID NO: 373208 - DNA, 75 bp, synthetic construct
  source 1..75: mol_type = other DNA
accggactgacagcctgtccgtggatgatgtggcggccctgattgccgacagctgccacgtcaatgtccgtgtcc

SEQ ID NO: 373209 - DNA, 75 bp, synthetic construct
  source 1..75: mol_type = other DNA
aattcctatggagggggagaatacacagatgattgtaaaagtgtgttggaagcatcaaatcagattaaagatcca

SEQ ID NO: 373210 - DNA, 75 bp, synthetic construct
  source 1..75: mol_type = other DNA
gattgtggttgtcggtgcagcctccgcgattggtggggcactgtatctgtctgatgtggacatgtccggtaacgg

SEQ ID NO: 373211 - DNA, 75 bp, synthetic construct
  source 1..75: mol_type = other DNA
tcaccaccggtctgttcatgaccgtgctgccgtatatccgcgacaacggcaccatccagctgcagatgagcttca

SEQ ID NO: 373212 - DNA, 75 bp, synthetic construct
  source 1..75: mol_type = other DNA
tgtccaccggcggaaccctgtccggcctgcgctgggacggcagtctcagcggtttgctggatgacgtgacggcgc

SEQ ID NO: 373213 - DNA, 75 bp, synthetic construct
  source 1..75: mol_type = other DNA
acctcgtcctccggttcttccggcacctccggcagcagttcactgagcggcgaacagagcacctcccagcagacc

SEQ ID NO: 373214 - DNA, 75 bp, synthetic construct
  source 1..75: mol_type = other DNA
cctgtttgaatcactctgtatcgatcatttgcaacgctgcggggccagcaaaaaagccattacccgtgcgtttga

SEQ ID NO: 373215 - DNA, 75 bp, synthetic construct
  source 1..75: mol_type = other DNA
gggcaatgccggacctgatggcagacatgtacagccagaagggcgaccagctgcgtgccggggcaaacacggcct

SEQ ID NO: 373216 - DNA, 75 bp, synthetic construct
  source 1..75: mol_type = other DNA
ccgagctgcattttgctgaaaaataacggcctgcatatcgagctgcaaattgatgccaacgggcgaattggcaaa

SEQ ID NO: 373217 - DNA, 75 bp, synthetic construct
  source 1..75: mol_type = other DNA
cgttcacgatctggcgccagagaatcgtcagttgctggcagagcgcgatcgcattcaggcggggcttgatgagtg

SEQ ID NO: 373218 - DNA, 75 bp, synthetic construct
  source 1..75: mol_type = other DNA
gttgctggccgcctgaaagacacctttccaaacagcactcattacttccttgctgacaatgacatttataaagac

SEQ ID NO: 373219 - DNA, 75 bp, synthetic construct
  source 1..75: mol_type = other DNA
gtggccagcgcccctgcagctgctgaaccggaggaaaccgcgccggtggccagcgcccctgcagctgctgaaccg

SEQ ID NO: 373220 - DNA, 75 bp, synthetic construct
  source 1..75: mol_type = other DNA
caataacatcattatcgcttatgtttttggctttctggcggaatggcaaacagttttctcgatgcaggcacctat

SEQ ID NO: 373221 - DNA, 75 bp, synthetic construct
  source 1..75: mol_type = other DNA
gaatcactgccgctggaaaatggcagctatcaggatgtggtggcgtttagcgtggtcgacaaacaattacgtatc

SEQ ID NO: 373222 - DNA, 75 bp, synthetic construct
  source 1..75: mol_type = other DNA
aaagtgcagaaaaactcgcgcactggcagcgtctatattgtgaaaccgaaaatgcacggtccgcaggaagtggcg

SEQ ID NO: 373223 - DNA, 75 bp, synthetic construct
  source 1..75: mol_type = other DNA
tcattacaccgccgccgatggctctgaaatttctctgcacggacgctcgctgctgtttatccgcaacgtgggtca

SEQ ID NO: 373224 - DNA, 75 bp, synthetic construct
  source 1..75: mol_type = other DNA
gaaaccacgggcatcgacagcgaaatcaccagccaggcggggccgcaactggtggttccggcaatgaatgcccgc

SEQ ID NO: 373225 - DNA, 75 bp, synthetic construct
  source 1..75: mol_type = other DNA
cgctggagaatatggcgaaagtggttgatcagcaaaacgctggcgatccggcttatcgtccgatggcggggaatt

SEQ ID NO: 373226 - DNA, 75 bp, synthetic construct
  source 1..75: mol_type = other DNA
gttgggtggagcaggggattggttgttcaaaagtgccggatattcacaacgtggcgctgatggaagaccgcgcaa

SEQ ID NO: 373227 - DNA, 75 bp, synthetic construct
  source 1..75: mol_type = other DNA
caacggtactacagaatagtatgtactacttcctcgccaatgatcctagtaacatgatatttggcggtgctactg

SEQ ID NO: 373228 - DNA, 75 bp, synthetic construct
  source 1..75: mol_type = other DNA
ctggcaggacatcgaagagctgctggaagctggcattgatgttttcactaccgtcaacgttcagcatctggaaag

SEQ ID NO: 373229 - DNA, 75 bp, synthetic construct
  source 1..75: mol_type = other DNA
attgcttgaattactggaaaaacaatctggtctccatacgtctgtggattgcagtactcctgtcatcgggcatta

SEQ ID NO: 373230 - DNA, 75 bp, synthetic construct
  source 1..75: mol_type = other DNA
agaaaatacgactctggatgatattaataaggtgatttccagcgtaataccaggtgctttttcggttgaaaagaa

SEQ ID NO: 373231 - DNA, 75 bp, synthetic construct
  source 1..75: mol_type = other DNA
tgatctcgatgccgccctcgcccgccgtccggcactgatcttaatggacgaactggcgcacagtaatgcgccagg

SEQ ID NO: 373232 - DNA, 75 bp, synthetic construct
  source 1..75: mol_type = other DNA
gaagaacaggcgcggatggcaagcgaacgtgaacagatccgcaacgccctgctggcggcactttcgcatgattta

SEQ ID NO: 373233 - DNA, 75 bp, synthetic construct
  source 1..75: mol_type = other DNA
atctacaactggatgtctgggataacggccccggtcttccgccaggccaggagcagacgattttcgataagtttg

SEQ ID NO: 373234 - DNA, 75 bp, synthetic construct
  source 1..75: mol_type = other DNA
agatagtgaaatagatattaataatatacccgacgatgtactaggggtggtatacggcgtcgatcagcagctcga

SEQ ID NO: 373235 - DNA, 75 bp, synthetic construct
  source 1..75: mol_type = other DNA
atacctttgaccttgcatcattctataacaacgtcttaggactaccatatattgataaagagaataccgaccatg

SEQ ID NO: 373236 - DNA, 75 bp, synthetic construct
  source 1..75: mol_type = other DNA
ttgaaggcggtcgccgtcgtattcctgatgcagacactgcaaggctagaatgtcctaagtgtaataatgtaataa

SEQ ID NO: 373237 - DNA, 75 bp, synthetic construct
  source 1..75: mol_type = other DNA
acatggtattaatgactataatatcagttcatatttagatgccaaggaaacggtccgtaatgtcatgaatcgctt

SEQ ID NO: 373238 - DNA, 75 bp, synthetic construct
  source 1..75: mol_type = other DNA
tgtatcagataatgaaaatagtaaggaagtacagatacactttagccattcagtaccggatgattactttataca

SEQ ID NO: 373239 - DNA, 75 bp, synthetic construct
  source 1..75: mol_type = other DNA
tgatgcagacactgcaaggctagaatgtcctaagtgtagtaatgtaatcactgaagccgaacgtgtacgaatgat

SEQ ID NO: 373240 - DNA, 75 bp, synthetic construct
  source 1..75: mol_type = other DNA
gaatttagttttcctgaagtaacgatccctgatttttctccagtatccgctaaaggtgcaacaactgctattggt

SEQ ID NO: 373241 - DNA, 75 bp, synthetic construct
  source 1..75: mol_type = other DNA
agcgttatggtattgaattcaatggaaagaaacagataatcggttttcgggtcggatccggagcaaccggtgtta

SEQ ID NO: 373242 - DNA, 75 bp, synthetic construct
  source 1..75: mol_type = other DNA
caactgatgttggtaccattatcaccaatacttctgataaaacagcgaccctttctctacaaaacccttcccgtt

SEQ ID NO: 373243 - DNA, 75 bp, synthetic construct
  source 1..75: mol_type = other DNA
cgggcttggcgcgcgtgacgatgcgatgggaatgcagtatctgattcctggctggacgttcgataacaagcgccc

SEQ ID NO: 373244 - DNA, 75 bp, synthetic construct
  source 1..75: mol_type = other DNA
ttgttactgaaatgcaggtaattccggttgcgggtcacgacagtatgctgatgaacctgagtggcgcacacgcgc

SEQ ID NO: 373245 - DNA, 75 bp, synthetic construct
  source 1..75: mol_type = other DNA
cgataaagcggctgcagcgaaggcgaacagtttcatgaatgccggctacaaaaactttatgacggaagttaacaa

SEQ ID NO: 373246 - DNA, 75 bp, synthetic construct
  source 1..75: mol_type = other DNA
gtgcggaattcccagctcagacttcaggggcatgccacatcacatgcaatattccgcgaggggcctcggcactgc

SEQ ID NO: 373247 - DNA, 75 bp, synthetic construct
  source 1..75: mol_type = other DNA
acactcagacatggggacagtcagactaccattatgtagatcgcgtgaccaaaggcgactttgctgtccagcgtc

SEQ ID NO: 373248 - DNA, 75 bp, synthetic construct
  source 1..75: mol_type = other DNA
cgcttgatgccacgggcagtgactttgtcctgcgtactgacctgaaaaatgccgataaaatcagcgtgacgggga

SEQ ID NO: 373249 - DNA, 75 bp, synthetic construct
  source 1..75: mol_type = other DNA
aaactcagacatggggacagtcagactatcattatgttgatcgggtgaccaaaggtgactttgcggtccagcgtc

SEQ ID NO: 373250 - DNA, 75 bp, synthetic construct
  source 1..75: mol_type = other DNA
aaatgtcagcatgaataatggcctgtggcagctgaccggagattccggtatcaacagtctgacggcccgcaacag

SEQ ID NO: 373251 - DNA, 75 bp, synthetic construct
  source 1..75: mol_type = other DNA
acagcagcctgattattgacgggaatattgatacacacaatgatatcactgtgcgaaattcccaactcagactac

SEQ ID NO: 373252 - DNA, 75 bp, synthetic construct
  source 1..75: mol_type = other DNA
tacgctgcattgcagttacgaaggcactgttgcaaagttagcgatgaggcagccttttgtcttattcaaaggcct

SEQ ID NO: 373253 - DNA, 75 bp, synthetic construct
  source 1..75: mol_type = other DNA
ccgctttgtttcgtcttaataaagaaggctggctggatgtttcccgcatcgggcgacgcagtttctatagcctca

SEQ ID NO: 373254 - DNA, 75 bp, synthetic construct
  source 1..75: mol_type = other DNA
taacaacgtcgcgtatccgtgaaatgctgggcgggattagccgggtaacgtttctaaattggcgtaaaaaatggg

SEQ ID NO: 373255 - DNA, 75 bp, synthetic construct
  source 1..75: mol_type = other DNA
atcggtcagagaaattacaggccggcttaatgccatccagcattaatcgtgacttgtgcgttctgtctaccatgt

SEQ ID NO: 373256 - DNA, 75 bp, synthetic construct
  source 1..75: mol_type = other DNA
atgacgcaaaaatttatgcttgagtatcggtcagagaaattacaggccggcttaatgccatccagcattaatcgt

SEQ ID NO: 373257 - DNA, 75 bp, synthetic construct
  source 1..75: mol_type = other DNA
ggcgatggctgctcgatatcaggccccaaggggcgtacggcaaacggatacgtaaaatttttgtcaggaaaggga

SEQ ID NO: 373258 - DNA, 75 bp, synthetic construct
  source 1..75: mol_type = other DNA
atcaaagccggtgtgaatccggaaaataccctttcaaaaaaattacttatcaggattggcttcaatttttcgagc

SEQ ID NO: 373259 - DNA, 75 bp, synthetic construct
  source 1..75: mol_type = other DNA
cagcccgcagagtcgctctccagattaaccattccaatattatctctgccccggatgaattacgtgaacagctca

SEQ ID NO: 373260 - DNA, 75 bp, synthetic construct
  source 1..75: mol_type = other DNA
actgcgccagatcggatggagcgacgcaaacggggtaaaagtgacacgattgatgctgaatgtgccgctcacgcc

SEQ ID NO: 373261 - DNA, 75 bp, synthetic construct
  source 1..75: mol_type = other DNA
ttagtcgccctgccatctgccgtatgctgggaggaattagcaggggaacgttttattcatggcgtaagaaatggg

SEQ ID NO: 373262 - DNA, 75 bp, synthetic construct
  source 1..75: mol_type = other DNA
atggataaaaatgaagtaatccttcttagccgccctgccatctgccgtatgcttggaggaattagcaggggaacg

SEQ ID NO: 373263 - DNA, 75 bp, synthetic construct
  source 1..75: mol_type = other DNA
atggataaaaatgaagtaatccttcttagccgccctgccatctgccggatgctgggcggaattagcagggggacg

SEQ ID NO: 373264 - DNA, 75 bp, synthetic construct
  source 1..75: mol_type = other DNA
gacagtgatgcgttcagcgggaaaaccaaatccgtggggggcggtctgtatgcttcagcattgtttaactctggt

SEQ ID NO: 373265 - DNA, 75 bp, synthetic construct
  source 1..75: mol_type = other DNA
gaacagtcatttgcatctgatatacgcgataactggaaactactcggtgaacatgccactgactttgccgcagag

SEQ ID NO: 373266 - DNA, 75 bp, synthetic construct
  source 1..75: mol_type = other DNA
gcggagtgtgcatacacacttgaacatcatgatcacgcagtagccttcgccgctgagcttcgcaaaggaggcaac

SEQ ID NO: 373267 - DNA, 75 bp, synthetic construct
  source 1..75: mol_type = other DNA
accgatatgctgccagaatttggtggcgatacctatgctggcgctgacaacttcatgaacggtcgtgctaatggt

SEQ ID NO: 373268 - DNA, 75 bp, synthetic construct
  source 1..75: mol_type = other DNA
cgcgttgagcaagcggtgaatgatgctgcacatttcaccccttttcattgggttgatgctttgttaatgggcaaa

SEQ ID NO: 373269 - DNA, 75 bp, synthetic construct
  source 1..75: mol_type = other DNA
tcagtcagtatgggcagagctggaagggttatctcttctgttgtgccataaaccgctggcggacgtatttatcga

SEQ ID NO: 373270 - DNA, 75 bp, synthetic construct
  source 1..75: mol_type = other DNA
gctgggctgaagtctgaagctccacttggtgccatcgagaatggcagagcgtttgcagaccgtttagagaattac

SEQ ID NO: 373271 - DNA, 75 bp, synthetic construct
  source 1..75: mol_type = other DNA
tgggcgggcggcgccaactttactcatcatcaggatactaaccgcttgatccgcgcctggcaaaaaccagagctg

SEQ ID NO: 373272 - DNA, 75 bp, synthetic construct
  source 1..75: mol_type = other DNA
gaaaatggttggcacgacgaagcgtttctggcgcgttgcaccacaggttatgccgtcttcgcctcttatttgctg

SEQ ID NO: 373273 - DNA, 75 bp, synthetic construct
  source 1..75: mol_type = other DNA
ccgtgcctggcaaaaaccggagctggtggtgatctctgaatgcttctggacggcggcggcgaaacacgcggatat

SEQ ID NO: 373274 - DNA, 75 bp, synthetic construct
  source 1..75: mol_type = other DNA
gaaacagcagaagcatggaccgttggtgctaaatacgacgctaataacgtttacttagcagctatgtatgctgaa

SEQ ID NO: 373275 - DNA, 75 bp, synthetic construct
  source 1..75: mol_type = other DNA
gatggcgacatgtcatatgctcgtattggtttcaaaggcgaaacccaaatcgctgaccagtttacgggttacggt

SEQ ID NO: 373276 - DNA, 75 bp, synthetic construct
  source 1..75: mol_type = other DNA
cgggcgcggggtatacaagatggcgatacagttcgggtgtggaactcgcgcggacaaatccttgtcggagccgtc

SEQ ID NO: 373277 - DNA, 75 bp, synthetic construct
  source 1..75: mol_type = other DNA
cgaagaacaccacactttttccattgatcccaacaccgactggaatgcgattttttcgttatgccaggccatgag

SEQ ID NO: 373278 - DNA, 75 bp, synthetic construct
  source 1..75: mol_type = other DNA
tggcagctttgtcaacagcagcctgaccctcgaaaaaggagcaaaactaacggctcagggcggtattttcagcac

SEQ ID NO: 373279 - DNA, 75 bp, synthetic construct
  source 1..75: mol_type = other DNA
aacatcacgggagatggcttcggttttcggcaggatattaaagatggtgtatctgtttctcctgagagcagcagt

SEQ ID NO: 373280 - DNA, 75 bp, synthetic construct
  source 1..75: mol_type = other DNA
tgataaattcagattttatcgttggccgtaatgctattgttgttggtgatatttctgccaataattccactctgt

SEQ ID NO: 373281 - DNA, 75 bp, synthetic construct
  source 1..75: mol_type = other DNA
gacagtgatgcgttcagcgggaagacaaaatccgtggggggaggtctgtatgcttcagcactgtttaactccggt

SEQ ID NO: 373282 - DNA, 75 bp, synthetic construct
  source 1..75: mol_type = other DNA
aaaaaaacttcaaaaccatatgaaggattttatgcgaaacttacgattaataaagatgtctttattatagaagac

SEQ ID NO: 373283 - DNA, 75 bp, synthetic construct
  source 1..75: mol_type = other DNA
gccaccctgcgggtaaaagagcttaacgcaaataacgccacattcctgatgcataccaacaacagtcaggctgac

SEQ ID NO: 373284 - DNA, 75 bp, synthetic construct
  source 1..75: mol_type = other DNA
ccacttgaactttttttaacccgatatgatgtagttccgtcccaagaagataatgcattccctgggctcaaaagg

SEQ ID NO: 373285 - DNA, 75 bp, synthetic construct
  source 1..75: mol_type = other DNA
aagttctgcaaagacgctgcattcgatgccgattacgaagcagagctaggtatggagcgtggtggattcagtgat

SEQ ID NO: 373286 - DNA, 75 bp, synthetic construct
  source 1..75: mol_type = other DNA
caatctgagaaggaatttaatgacttttgtcgtgaggagtttagcgaatgggaagatgatgttactgaaactcca

SEQ ID NO: 373287 - DNA, 75 bp, synthetic construct
  source 1..75: mol_type = other DNA
agggcatcattatactgtcactggtaataataaaacattcaagggtgccgggctggatattggtgacaatactac

SEQ ID NO: 373288 - DNA, 75 bp, synthetic construct
  source 1..75: mol_type = other DNA
ttatacggaagattcacttatcgttgatgggaaaagtatcgcggtttacgccgaaaaagaggctaaaaatattcc

SEQ ID NO: 373289 - DNA, 75 bp, synthetic construct
  source 1..75: mol_type = other DNA
gcgttaccaccgccgccacagtttgaaccagcagactccagtttgtatgcaatgcaaattcagcgctatcaacag

SEQ ID NO: 373290 - DNA, 75 bp, synthetic construct
  source 1..75: mol_type = other DNA
atcttggcttcagctattacatgaccaacgcggtgaaggccgaaggcggcaccggcgatgcaatttctggtttcg

SEQ ID NO: 373291 - DNA, 75 bp, synthetic construct
  source 1..75: mol_type = other DNA
attctgcgcgaaggcacctgcgattatctcggctttagctactacatgaccaatgcggtgaaagccgaaggcggc

SEQ ID NO: 373292 - DNA, 75 bp, synthetic construct
  source 1..75: mol_type = other DNA
ccagaagccgctgtttattgtcgaaaacggttttggcgcttacgacaaagtggaagaagatggcagcatcaacga

SEQ ID NO: 373293 - DNA, 75 bp, synthetic construct
  source 1..75: mol_type = other DNA
atccgaaccatgaagccgttgatttttatggtcactacaaagaagacatcaagctatttgccgaaatgggcttca

SEQ ID NO: 373294 - DNA, 75 bp, synthetic construct
  source 1..75: mol_type = other DNA
tggaagaaaatggcagcatcaacgacgactaccgcattgattacctgcgagctcatattgaagagatgaaaaagg

SEQ ID NO: 373295 - DNA, 75 bp, synthetic construct
  source 1..75: mol_type = other DNA
ttcaacgaaattaacaaccagcgtaactggcgtgcaccgctgttcggttactgctgctccggcgtggtttatacc

SEQ ID NO: 373296 - DNA, 75 bp, synthetic construct
  source 1..75: mol_type = other DNA
atcttctcatcgtcttgaactgttaagcccggcacgcgatgccgccattgcccgcgaagctattttgcacggtgc

SEQ ID NO: 373297 - DNA, 75 bp, synthetic construct
  source 1..75: mol_type = other DNA
tagcgcctcctccacctcggtgaaatgctccgcttccctcaggaagaggctctgtatccgggattattgcaggtg

SEQ ID NO: 373298 - DNA, 75 bp, synthetic construct
  source 1..75: mol_type = other DNA
cacacaactaaattgcgtgctggaatccatgaaaaagaaaggctttcgggttaaacctgccagaaaagccagctc

SEQ ID NO: 373299 - DNA, 75 bp, synthetic construct
  source 1..75: mol_type = other DNA
tggagaaaaaatttgccggtatctcggcgaactcacccggcaggtactgcttcgcgtgacgcctgatgcgcttta

SEQ ID NO: 373300 - DNA, 75 bp, synthetic construct
  source 1..75: mol_type = other DNA
ggcgtgcgtattgctcaggccttgcagaaaggcgaccactgcattgtccacacctgtacccattctgcagcaagg

SEQ ID NO: 373301 - DNA, 75 bp, synthetic construct
  source 1..75: mol_type = other DNA
gtaatagcctgaaagatattgccgagttggtgccgtttgcccatcgttatggtgcaaaaattttcgtcacgctta

SEQ ID NO: 373302 - DNA, 75 bp, synthetic construct
  source 1..75: mol_type = other DNA
aacccggacgatgtgatgtttgcccaggagtcgatgcgcgaacgctacgtctttaccgatgtgcagttgcgtggc

SEQ ID NO: 373303 - DNA, 75 bp, synthetic construct
  source 1..75: mol_type = other DNA
tggccccggtcttccgccaggccaggagcagacgatatttgataagtttgctcgcgggaataaagagtcggcggt

SEQ ID NO: 373304 - DNA, 75 bp, synthetic construct
  source 1..75: mol_type = other DNA
gatttacgcacgccgcttacggtgctgtttggtcaggcagaaatcttaacgctcgatctggcaagcgaaggatcg

SEQ ID NO: 373305 - DNA, 75 bp, synthetic construct
  source 1..75: mol_type = other DNA
cgcacgccgctcacggtgctattcggtcaggcagaaatcttaacgctcgatctggcgagtgaaggttctccgcac

SEQ ID NO: 373306 - DNA, 75 bp, synthetic construct
  source 1..75: mol_type = other DNA
gaacaggcgcggatggcaagcgaacgtgaacagatccgcaacgccctgctggcggcgctttcgcatgatttacgc

SEQ ID NO: 373307 - DNA, 75 bp, synthetic construct
  source 1..75: mol_type = other DNA
ctggcattgatgttttcactaccgtcaacgttcaacatctggaaagcctgaatgatgtggtcagcggcgtcaccg

SEQ ID NO: 373308 - DNA, 75 bp, synthetic construct
  source 1..75: mol_type = other DNA
tgaagaaagagtggttaacgctggaagaagtcgtcggcagtgcgctgcaaatgctggagccaggtttatcgtcac

SEQ ID NO: 373309 - DNA, 75 bp, synthetic construct
  source 1..75: mol_type = other DNA
tcagctcaccgatgtgaaaaacgtgctgacgatccctctgtcagcgttaggcgatccggttggtgataatcgtta

SEQ ID NO: 373310 - DNA, 75 bp, synthetic construct
  source 1..75: mol_type = other DNA
gacgcactgcgaaaggttgacgtgggggcgcaggtcagcggtcagttgaaaacgctgtcggtagcgattggcgat

SEQ ID NO: 373311 - DNA, 75 bp, synthetic construct
  source 1..75: mol_type = other DNA
cgccggaaaaggttaacgatgccattttctactatgcccgttttgaagtgccaaaccccaatggtttgctgcggc

SEQ ID NO: 373312 - DNA, 75 bp, synthetic construct
  source 1..75: mol_type = other DNA
cgaagagaaagtctggcacacgcgcgacgcgatccttttatgcatcggccataacaccggcagcgaaaaactggt

SEQ ID NO: 373313 - DNA, 75 bp, synthetic construct
  source 1..75: mol_type = other DNA
atgaataacgaacccttacgtcccgaccccgatcgtctgctggaacaaactgccgcgccgcatcgggggaagctg

SEQ ID NO: 373314 - DNA, 75 bp, synthetic construct
  source 1..75: mol_type = other DNA
gctggtaaaagcgcaggtttctgaagcggatgtaatccacctgaagccggggcaaaaagcctggtttacggtgct

SEQ ID NO: 373315 - DNA, 75 bp, synthetic construct
  source 1..75: mol_type = other DNA
ccgcagtccaggaaaatccgtgcgctatggcttgaaatggctgctgccggcattgttcgtgaccgttcagaaaat

SEQ ID NO: 373316 - DNA, 75 bp, synthetic construct
  source 1..75: mol_type = other DNA
tggcgatgaaagcgattttgatcccctttttttctcttttgcttccgttaactccgctacctgcatttgctcagg

SEQ ID NO: 373317 - DNA, 75 bp, synthetic construct
  source 1..75: mol_type = other DNA
tttctcttctgcttccgttaacaccactacctgcatacgctcagagtgagccggaactgaaattggagagagtgg

SEQ ID NO: 373318 - DNA, 75 bp, synthetic construct
  source 1..75: mol_type = other DNA
aacgcacgccagaggttgcccgcagccgcgccaccccgttgttggatttgatcatgacagcgttgacgccccatc

SEQ ID NO: 373319 - DNA, 75 bp, synthetic construct
  source 1..75: mol_type = other DNA
agcgtttcttctcgcctctcggttgatcctcaggccaaagatatcagtcatttgctggcttttacttgtcaacca

SEQ ID NO: 373320 - DNA, 75 bp, synthetic construct
  source 1..75: mol_type = other DNA
gtgagctgatctcttatctcggacattaccaacgccaacgcctggtggctgacggtttgctggcaaaaaatggtt

SEQ ID NO: 373321 - DNA, 75 bp, synthetic construct
  source 1..75: mol_type = other DNA
actccgctacctgcatttgctcagggggcgccggaactgaagctggaaagtgtggtgattgtcagccgtcatggt

SEQ ID NO: 373322 - DNA, 75 bp, synthetic construct
  source 1..75: mol_type = other DNA
tcgaaatcccgtctgaaatctatgctcagtgggatgcgaaagaagcaggccaggcgaaagaatccgcatggaacg

SEQ ID NO: 373323 - DNA, 75 bp, synthetic construct
  source 1..75: mol_type = other DNA
atgtgcttgcaattccaccaaaagagattagtaatgataaaaccagttcgaaaccttctgatttacaatttgcaa

SEQ ID NO: 373324 - DNA, 75 bp, synthetic construct
  source 1..75: mol_type = other DNA
tatctattctcttattttcacatatttcgctagctgatgctggcggtatttatcttgataccaccagagttatat

SEQ ID NO: 373325 - DNA, 75 bp, synthetic construct
  source 1..75: mol_type = other DNA
acgctgccgggtcaaccggataacaccccgccgggtggtgaactggtatttgaacgctggcggcggctaagtgat

SEQ ID NO: 373326 - DNA, 75 bp, synthetic construct
  source 1..75: mol_type = other DNA
ggtacccacgactcccacggtgcgccgctgggcgacgctgaaattgccctgacccgcgaacagctgggctggaaa

SEQ ID NO: 373327 - DNA, 75 bp, synthetic construct
  source 1..75: mol_type = other DNA
acccgccgtatgaaaggcgaaatgccgtctgacttcgacgcgaaagcgaaagagttcattgctaaactgcaggct

SEQ ID NO: 373328 - DNA, 75 bp, synthetic construct
  source 1..75: mol_type = other DNA
gaactgaacgaataccagcaaaacgttcagcgcagcctcgatatccaacagcgtagcgttcaacaattagcgaac

SEQ ID NO: 373329 - DNA, 75 bp, synthetic construct
  source 1..75: mol_type = other DNA
ctatgatttttgcttcaggctcagtaatggctgctgatggtggtcaaatcgactttaacggccttgtacagtctg

SEQ ID NO: 373330 - DNA, 75 bp, synthetic construct
  source 1..75: mol_type = other DNA
caaatgttactgataactttgctgaagtaagcgctgctgctgttggtttactgccgaaagagttcatgatttctg

SEQ ID NO: 373331 - DNA, 75 bp, synthetic construct
  source 1..75: mol_type = other DNA
aaaacaaatctggcgctgctgaaatcaaacaaatccatatgaacaattcttctgaagtccaggaattaacattgg

SEQ ID NO: 373332 - DNA, 75 bp, synthetic construct
  source 1..75: mol_type = other DNA
ttattcatatcgctaaaaataaacttcaactggatgaggatacttatcgccagatgttacaggggctaacaggga

SEQ ID NO: 373333 - DNA, 75 bp, synthetic construct
  source 1..75: mol_type = other DNA
attagctttgcaaatgccagcggcactctgaacaataatatgaacgtcactgttaacggtcttgcgccggcagaa

SEQ ID NO: 373334 - DNA, 75 bp, synthetic construct
  source 1..75: mol_type = other DNA
attagctttgcaaataccagcggtactctgaacaacaatatgaacgtcactgttaacggtcttgcaccggcagaa

SEQ ID NO: 373335 - DNA, 75 bp, synthetic construct
  source 1..75: mol_type = other DNA
cagattgcacaatttactgccgcagacgcgctggcagccgatcgccagttattttcatctccagcggatatcacg

SEQ ID NO: 373336 - DNA, 75 bp, synthetic construct
  source 1..75: mol_type = other DNA
cctaaggatcaagtgaatttgtggctgcaaattcataccggttcattgcaggaagaggacaacgagcgcggcgtg

SEQ ID NO: 373337 - DNA, 75 bp, synthetic construct
  source 1..75: mol_type = other DNA
atgagacacctctgttacttactgacgttagtggcaactctgttgttccccggaaaactgtttgctgccttaccg

SEQ ID NO: 373338 - DNA, 75 bp, synthetic construct
  source 1..75: mol_type = other DNA
caatgcttttaatgaaaacagaaagaaatttcatattagaaaagggacaaactacagtttctattgagaaagata

SEQ ID NO: 373339 - DNA, 75 bp, synthetic construct
  source 1..75: mol_type = other DNA
tggcaaaagatctacgcattaatattcgtgaacaggcatctggggcatacagcgtttcttctcgcctctcggttg

SEQ ID NO: 373340 - DNA, 75 bp, synthetic construct
  source 1..75: mol_type = other DNA
cactctattatcgcctgccaatggtacaagtgaacgatgagcaaagctttatcgaacaagctgaatggagcatgt

SEQ ID NO: 373341 - DNA, 75 bp, synthetic construct
  source 1..75: mol_type = other DNA
aaggtatttctgttcgccataatcctgagttcacaatgatggaactctacatggcatatgcggattaccatgatt

SEQ ID NO: 373342 - DNA, 75 bp, synthetic construct
  source 1..75: mol_type = other DNA
tggtctgggtattggtatcgaccgaatgattatgctgtttacaaacagtcatactattcgcgacgttattctctt

SEQ ID NO: 373343 - DNA, 75 bp, synthetic construct
  source 1..75: mol_type = other DNA
tttgtgtgtcatgtctggtgctgagcgcctgttctgttgatgaaattgctgcggttaacaagcaaatcagtgatg

SEQ ID NO: 373344 - DNA, 75 bp, synthetic construct
  source 1..75: mol_type = other DNA
gagtggtggaacatcgacaccgcaccgggcaccttcacgctggatattggcgtggaagaccagggcatcactgaa

SEQ ID NO: 373345 - DNA, 75 bp, synthetic construct
  source 1..75: mol_type = other DNA
cgcccggaaccttccgccttgatatcggcgtactggaaagcggcatcacggaggagatgtatctggaaatggaac

SEQ ID NO: 373346 - DNA, 75 bp, synthetic construct
  source 1..75: mol_type = other DNA
accactaaagtcacttatggcgagcatgtgtttgatttcggcaaaccgtttgaaaaactcaccatgcgcgaagca

SEQ ID NO: 373347 - DNA, 75 bp, synthetic construct
  source 1..75: mol_type = other DNA
gccgacaatgtgtcgtctgcaagacatgcgcatgatgtgctgggtaatgactccaacttattgatagtgttttat

SEQ ID NO: 373348 - DNA, 75 bp, synthetic construct
  source 1..75: mol_type = other DNA
acggccacggatattatcgatataatcctgagaatcgaacattaccggccgcagaaccatgacaactggtatggt

SEQ ID NO: 373349 - DNA, 75 bp, synthetic construct
  source 1..75: mol_type = other DNA
aatgataaaaacattggcatttttaaaatggctgtaaaaagacttacgggaacctacacgtctgtcaaaaggagc

SEQ ID NO: 373350 - DNA, 75 bp, synthetic construct
  source 1..75: mol_type = other DNA
gccaccgctttagagtttttccagtatcggttttccgattcatttggtggcaacccaccgttatattcgtgcggc

SEQ ID NO: 373351 - DNA, 75 bp, synthetic construct
  source 1..75: mol_type = other DNA
gggatctggatgatattacttttgatttctttggtgaggcttacgatgcgcttaacgataaaaatattagcgtct

SEQ ID NO: 373352 - DNA, 75 bp, synthetic construct
  source 1..75: mol_type = other DNA
atgaaactggcgcgtgagttcggtcgcccggactggcgtgccatgcttgctggcatgtcctcaacggaatacggc

SEQ ID NO: 373353 - DNA, 75 bp, synthetic construct
  source 1..75: mol_type = other DNA
aacgctctgcttgcgctcgatcccttagataatcacccgacaaaaatccccactcttccggccttttatcagcca

SEQ ID NO: 373354 - DNA, 75 bp, synthetic construct
  source 1..75: mol_type = other DNA
aaccgctgaaattggttactggctggacgaatcctgtcagggactggggattatgtctcaggcattgcaggcgtt

SEQ ID NO: 373355 - DNA, 75 bp, synthetic construct
  source 1..75: mol_type = other DNA
cagttaatctgtaaaaataaaacctggttacagcagtcgctaaactggccgcagtttgttcagagtgaagaggac

SEQ ID NO: 373356 - DNA, 75 bp, synthetic construct
  source 1..75: mol_type = other DNA
ggacgttccgtctggatattggcgtgcaggaccagggcataacagaagaaacctatctggagctggagcgcctga

SEQ ID NO: 373357 - DNA, 75 bp, synthetic construct
  source 1..75: mol_type = other DNA
cgttgtgcaggacgctttttatatccatcagcacaaggggacaaccagcgccgtgcggcgcgtggtggagccgtt

SEQ ID NO: 373358 - DNA, 75 bp, synthetic construct
  source 1..75: mol_type = other DNA
caacgccactggagcgccgactggcgcaaacctgcagcgggattactgatctgcaggtgccgctgcgtgacttgt

SEQ ID NO: 373359 - DNA, 75 bp, synthetic construct
  source 1..75: mol_type = other DNA
gtctgcatgttttgaacaatttgaaaagctctattctattagtggtatatgtgaacaattaatatttacttcaca

SEQ ID NO: 373360 - DNA, 75 bp, synthetic construct
  source 1..75: mol_type = other DNA
aacaaaccatggaatattaattcttcatttaaaagaacctccagtgacagaccttctccacatattgttccttta

SEQ ID NO: 373361 - DNA, 75 bp, synthetic construct
  source 1..75: mol_type = other DNA
attttaaaacatacaacggaaatcattacataccgttatcttctggaagtcagttttgtggaattgttggtaaca

SEQ ID NO: 373362 - DNA, 75 bp, synthetic construct
  source 1..75: mol_type = other DNA
acgcgaaaaacggtgcaggggaatgtgatgctgcatcaacgcggctatgccaaaatgtttatgatttttaaagaa

SEQ ID NO: 373363 - DNA, 75 bp, synthetic construct
  source 1..75: mol_type = other DNA
tggagaaagtcgcacaaaccggtgactgtgcacaggtggcccggcagatgcttgatgcgccctcgaatgccgccg

SEQ ID NO: 373364 - DNA, 75 bp, synthetic construct
  source 1..75: mol_type = other DNA
ttaaaacagattcaactcatcattttgaattatatgatcttgccagttatagagaagaagtcaggaagaaagtaa

SEQ ID NO: 373365 - DNA, 75 bp, synthetic construct
  source 1..75: mol_type = other DNA
cagagaaccaaaccagcagcttaaaacccgatataacggacataaagcgttcaacgaccagatccgcgccgattg

SEQ ID NO: 373366 - DNA, 75 bp, synthetic construct
  source 1..75: mol_type = other DNA
attgaaccatattctgcaagcttgtacagatattttgcaaaaaacttttctacaattgataaatatattggaaaa

SEQ ID NO: 373367 - DNA, 75 bp, synthetic construct
  source 1..75: mol_type = other DNA
tcattggttcactttgatgagataaaaaacctctggattccagtaaaagaaaaaaagttttctattaattctgat

SEQ ID NO: 373368 - DNA, 75 bp, synthetic construct
  source 1..75: mol_type = other DNA
ggctctggcgacggcggtcgtaacgcgccgaaacgcgcgaaatcctcgccaaaaccggtaaatcgcaaaaccaac

SEQ ID NO: 373369 - DNA, 75 bp, synthetic construct
  source 1..75: mol_type = other DNA
tcgagccgcagtattaagtccgatcccgcgtttattgccatgcgcgaatatgttttaagccgcgtatttgagcga

SEQ ID NO: 373370 - DNA, 75 bp, synthetic construct
  source 1..75: mol_type = other DNA
cccgtgcgcagcatcaaatccgatccgctgtttatcgaacagcgtgaatacgtcttaagccgcgtgtttgaacaa

SEQ ID NO: 373371 - DNA, 75 bp, synthetic construct
  source 1..75: mol_type = other DNA
tcattgatgactatttaataaactataaggggaatatgtcttattttattgtttcacaaaattcggaacagtaca

SEQ ID NO: 373372 - DNA, 75 bp, synthetic construct
  source 1..75: mol_type = other DNA
atggtcgctgtactaagtcaattcttattcggcaataaattttttattctgactggattttccattgttgcaatg

SEQ ID NO: 373373 - DNA, 75 bp, synthetic construct
  source 1..75: mol_type = other DNA
caggcgtcgggaagacctgggcgatgctggcagaagcccagcgactgcgggcgcaagggctggatattgtggttg

SEQ ID NO: 373374 - DNA, 75 bp, synthetic construct
  source 1..75: mol_type = other DNA
gctgttctgccgctaaaacgccaggcgtaccgtgggcggcatatcagcgagtttgatctcgatgccgccctcgcc

SEQ ID NO: 373375 - DNA, 75 bp, synthetic construct
  source 1..75: mol_type = other DNA
cattgctgtcattaattttgtccgaaattctggtgctgcgtttgtcatcggcagttgcggaagtggcgcaggtat

SEQ ID NO: 373376 - DNA, 75 bp, synthetic construct
  source 1..75: mol_type = other DNA
aatcacttgaattacatgctgttgcggaaagtcatgtcacacctctttatcagttaatctgtaaaaatagaacct

SEQ ID NO: 373377 - DNA, 75 bp, synthetic construct
  source 1..75: mol_type = other DNA
tattcgaagacttccgggacgacagcgttctggaatatcttcacgattatcaggaaaaatatgtttacccggcgc

SEQ ID NO: 373378 - DNA, 75 bp, synthetic construct
  source 1..75: mol_type = other DNA
gctcgccgctttgttgcgggagagtcgagccgcagcatcaagtccgatccacaattcatcgccatgcgcgaatat

SEQ ID NO: 373379 - DNA, 75 bp, synthetic construct
  source 1..75: mol_type = other DNA
ggaaaacagatagccctggcgatgtatctgcagctgaaggaaagcgatatccctgaaggtgtggaatttgccaat

SEQ ID NO: 373380 - DNA, 75 bp, synthetic construct
  source 1..75: mol_type = other DNA
taaaccgttgtacatggatttaattgcccgcacgaaggcggcccttgaaaagaatccgaaaaacgtcctgctggc

SEQ ID NO: 373381 - DNA, 75 bp, synthetic construct
  source 1..75: mol_type = other DNA
ggggatgtcaccacgcctgtcgtggtgacaccggaggaaggcggtgcggtggtgagcgatccgacccgtgagcct

SEQ ID NO: 373382 - DNA, 75 bp, synthetic construct
  source 1..75: mol_type = other DNA
gtctggagcgcctggaaagctggcagcacgtcacttttatggcctgcttatgcgaacgtatgtaccctaattacg

SEQ ID NO: 373383 - DNA, 75 bp, synthetic construct
  source 1..75: mol_type = other DNA
ctgacgatgcaaacctggcaagtaaggagtcagaacatgacagcacgcagagagaaacgccagcggcggttgaag

SEQ ID NO: 373384 - DNA, 75 bp, synthetic construct
  source 1..75: mol_type = other DNA
tttaaatatgaaggacaggagaacacgcttattctgacggatgcgtcgaatacagccacgtatgaaacgtggatt

SEQ ID NO: 373385 - DNA, 75 bp, synthetic construct
  source 1..75: mol_type = other DNA
aactaaatgagaaaaatctattaaaacaaccattattcatagcatctattatcgtaccgttaaaaatgtttattt

SEQ ID NO: 373386 - DNA, 75 bp, synthetic construct
  source 1..75: mol_type = other DNA
tgagagaaagaaatatctttctctgtacccaacagtaatggacactttgagtgtattaaaaagtaaagggtgtta

SEQ ID NO: 373387 - DNA, 75 bp, synthetic construct
  source 1..75: mol_type = other DNA
attcggcctgcaactggcaggtgtagagaaaatgcagcgactggaaatcgcgcaccagatgctgaaaaaagtggg

SEQ ID NO: 373388 - DNA, 75 bp, synthetic construct
  source 1..75: mol_type = other DNA
ttgggattgactataaataccaagaacatctatttctaataatttttgagaatcccaaacataatatagaatcaa

SEQ ID NO: 373389 - DNA, 75 bp, synthetic construct
  source 1..75: mol_type = other DNA
aaaaaaaacaaaacacctttataacaaaataaacaaaagccttacatcaaaaaatactactcatgatatccaatt

SEQ ID NO: 373390 - DNA, 75 bp, synthetic construct
  source 1..75: mol_type = other DNA
ggtaacgtcatccctgattatgccctatattttgaaaatctgtttacacacattctccctatctcaaatgaaatg

SEQ ID NO: 373391 - DNA, 75 bp, synthetic construct
  source 1..75: mol_type = other DNA
aacagtgctattgtcgaaaaatcaacagatgtctgtggctatatacaggatgcaatacgtataggcatggaagcg

SEQ ID NO: 373392 - DNA, 75 bp, synthetic construct
  source 1..75: mol_type = other DNA
gtcgctgtgatgttccaccgttgaagcgtaaaccgtttgataagtggatgattgataattttctggggatgattg

SEQ ID NO: 373393 - DNA, 75 bp, synthetic construct
  source 1..75: mol_type = other DNA
atcattcctacagacccgctaccgctaaatgatggaacatcaatctttgaaattgctgataaaaaactactggat

SEQ ID NO: 373394 - DNA, 75 bp, synthetic construct
  source 1..75: mol_type = other DNA
acactataaagcacaaaatcatattgagaatcatattcaggattgtgaattactaggcctaatggatgtaaacaa

SEQ ID NO: 373395 - DNA, 75 bp, synthetic construct
  source 1..75: mol_type = other DNA
tcaatactcacacagcccaacattcagaagaatggttaactattccatagataacctatcgaatgctgatattaa

SEQ ID NO: 373396 - DNA, 75 bp, synthetic construct
  source 1..75: mol_type = other DNA
acatgaatatagaatatatgaagcacttgcacgagatataattgtgcaccctcaaccttatcatttagattacaa

SEQ ID NO: 373397 - DNA, 75 bp, synthetic construct
  source 1..75: mol_type = other DNA
accgtttgaccgatggatgattgataattttctggggatgattgacgttgttagtgacggggaaactgagaggcg

SEQ ID NO: 373398 - DNA, 75 bp, synthetic construct
  source 1..75: mol_type = other DNA
gcaacagtgccagaagctattcagcaacgagctgccgccatgcctgataacgttgcaacgtgagaagcgaacgta

SEQ ID NO: 373399 - DNA, 75 bp, synthetic construct
  source 1..75: mol_type = other DNA
cgccgtacaatcctggcgaacggctgccgccggagcgtgagatcgcagaaatgctcgacgtcacgcgtactgtgg

SEQ ID NO: 373400 - DNA, 75 bp, synthetic construct
  source 1..75: mol_type = other DNA
ctgtccaaacatctggaatccctgacattagatgaagggtttgtgacggttaaattacagaatggcactaaaata

SEQ ID NO: 373401 - DNA, 75 bp, synthetic construct
  source 1..75: mol_type = other DNA
actgacaaggaactaccccaacttaaagatattgaccttatgactaaagcgggtcgtgtcgagtgtcagttgatt

SEQ ID NO: 373402 - DNA, 75 bp, synthetic construct
  source 1..75: mol_type = other DNA
ccttatctacacaaaggatgctttagccgatgaccttggcataagcatcatccagcgtgtcaaagcctacatagc

SEQ ID NO: 373403 - DNA, 75 bp, synthetic construct
  source 1..75: mol_type = other DNA
gtttcccttagccgtgaagagtgtttcctcgcaacccgtacccgccacgcttttactattgacgggcaaatgggc

SEQ ID NO: 373404 - DNA, 75 bp, synthetic construct
  source 1..75: mol_type = other DNA
tgaaatatcttacaagaggcagcaacagtgaaagtggttggattattcctaaaaatgctcccatcgagccagtag

SEQ ID NO: 373405 - DNA, 75 bp, synthetic construct
  source 1..75: mol_type = other DNA
tccgataatagaaaatccattttctttagagatttcataaaagataaccgagagcatgagttcaatatttataaa

SEQ ID NO: 373406 - DNA, 75 bp, synthetic construct
  source 1..75: mol_type = other DNA
tatttttaaggaattaaatccactggcaatggcccatcctttaaagtcatttcagtatgcatctgtagggacgga

SEQ ID NO: 373407 - DNA, 75 bp, synthetic construct
  source 1..75: mol_type = other DNA
aattttagtggtgccaatcttaacaatgcgtcgtttaaaggatcttcatatatacaaaactctccaattttgaaa

SEQ ID NO: 373408 - DNA, 75 bp, synthetic construct
  source 1..75: mol_type = other DNA
ttgattgaagaaattaaaaagagacatctcgcaacaatgaacagcgatctcagtttcgatgctctatctgcaggt

SEQ ID NO: 373409 - DNA, 75 bp, synthetic construct
  source 1..75: mol_type = other DNA
atgtgctcaacgcaaacgtcaatgttgatgtcgtatctaagttagcaagcctcctttcaacatcggttacaaaat

SEQ ID NO: 373410 - DNA, 75 bp, synthetic construct
  source 1..75: mol_type = other DNA
gcccggctgctcacccataatgaaaaaggcaaaactcgcctctccagcgtactgatgcgcaacgaactgtttaaa

SEQ ID NO: 373411 - DNA, 75 bp, synthetic construct
  source 1..75: mol_type = other DNA
gggaaaaacgccgtgcagaatgccagaaccagcaaggcaatttgcgccgcggcgttggcgtcgcctgttttagct

SEQ ID NO: 373412 - DNA, 75 bp, synthetic construct
  source 1..75: mol_type = other DNA
gtgaaccgcgacggaacattgaaaggttatagtctggatgttctgtctaacaccggcgcttatgtatctcacggg

SEQ ID NO: 373413 - DNA, 75 bp, synthetic construct
  source 1..75: mol_type = other DNA
gatggaggtcaggaatttatctatggttttaacaaagttattcaagaagggctgggggggctaatagagttaagt

SEQ ID NO: 373414 - DNA, 75 bp, synthetic construct
  source 1..75: mol_type = other DNA
acattcaattggttatccataacttatcaaaaaatggaggggataagattctctgttcttctaacggttctaaat

SEQ ID NO: 373415 - DNA, 75 bp, synthetic construct
  source 1..75: mol_type = other DNA
cttgcacgagatataattgtgcaccctcaaccttatcatttagattacaaagaacctgagcaaggagaattacta

SEQ ID NO: 373416 - DNA, 75 bp, synthetic construct
  source 1..75: mol_type = other DNA
aatgtgaaacagcgtctgctggagttttccaacgttgacgatatttattttgatggctatctattcgattcctgg

SEQ ID NO: 373417 - DNA, 75 bp, synthetic construct
  source 1..75: mol_type = other DNA
gaaaatcgccatcggtattttgttgtttatttttatagcattacagcgtggattaacggtgctgtgggagaatcg

SEQ ID NO: 373418 - DNA, 75 bp, synthetic construct
  source 1..75: mol_type = other DNA
ttacagcgtggattaacggtgctgtgggagaatcgtcagagttcgccagtgacaagagtcaatattgcgcagcga

SEQ ID NO: 373419 - DNA, 75 bp, synthetic construct
  source 1..75: mol_type = other DNA
ggcattccgggaactggaaggtgacctgggctacggcatgttgctctcccgctatgcgccggatatgaatcatgt

SEQ ID NO: 373420 - DNA, 75 bp, synthetic construct
  source 1..75: mol_type = other DNA
ctggacaggcggcgcatggtatacaggcaagaagattgaaacccatctcgaagacatggtcgcgcaggcgaacgc

SEQ ID NO: 373421 - DNA, 75 bp, synthetic construct
  source 1..75: mol_type = other DNA
atggctacagtcctcccccctgactatgatttactgtgcgttcccttcagtgctgccacggaattcaccgatctg

SEQ ID NO: 373422 - DNA, 75 bp, synthetic construct
  source 1..75: mol_type = other DNA
ctcttgtcattgaagagtcccaaaaagattccggggaagttatccaactttttcccacgctaagacagaccattc

SEQ ID NO: 373423 - DNA, 75 bp, synthetic construct
  source 1..75: mol_type = other DNA
aacgccgccggaaaactgacctttaatattgacgggctggcaaagatgatcactccccttcgcgacgcctgccac

SEQ ID NO: 373424 - DNA, 75 bp, synthetic construct
  source 1..75: mol_type = other DNA
tgcaggcgatctcatcttctctatggttctgatttgcggcctgtataccctgttcctggtggcagaaatgttctt

SEQ ID NO: 373425 - DNA, 75 bp, synthetic construct
  source 1..75: mol_type = other DNA
ggcaaaaagcctggtttacggtgcttggcgatccactgacgcgctacgaggggcaaatcaaggatgtgctaccga

SEQ ID NO: 373426 - DNA, 75 bp, synthetic construct
  source 1..75: mol_type = other DNA
actgctatgaccgcctgctggcaccgctgtccccgtcagggtttgacggggcgctggtcaaagccggttttgtgg

SEQ ID NO: 373427 - DNA, 75 bp, synthetic construct
  source 1..75: mol_type = other DNA
ggcggggctggtacagcttgcgcagcagcagtaccggatgttgttcaggatgggattgcagatgatggtggcaga

SEQ ID NO: 373428 - DNA, 75 bp, synthetic construct
  source 1..75: mol_type = other DNA
gccactggtttgtgcgcgagaacggcaccctgctggagtccagccgggggttatccggtatcgatgaaattaagc

SEQ ID NO: 373429 - DNA, 75 bp, synthetic construct
  source 1..75: mol_type = other DNA
gcgtcattgttgcgctcggcgtagtctggacaggcggcgcgtggtacacaggcaagaaactggaaacgcatctcg

SEQ ID NO: 373430 - DNA, 75 bp, synthetic construct
  source 1..75: mol_type = other DNA
ggtcagcggtcagttgaaaacgctgtcggtggcgattggcaaagtaaaaaaagaccagcttttaggggttattga

SEQ ID NO: 373431 - DNA, 75 bp, synthetic construct
  source 1..75: mol_type = other DNA
gactgcgcaagtgcatattcagctcaccgatgtgaaaaatgtgctgacgatccctctgtcggcgttaggcgatcc

SEQ ID NO: 373432 - DNA, 75 bp, synthetic construct
  source 1..75: mol_type = other DNA
acggagatggctgtgaaacaggcgcaaatcaagcgcaatcaggcttctctcgatacggctaaaaccaatctcgat

SEQ ID NO: 373433 - DNA, 75 bp, synthetic construct
  source 1..75: mol_type = other DNA
tgcgccaggcattgcaactggaagagcgtgaactggcttccagcgcgccgggcagcagcgaaagcggtgacatgc

SEQ ID NO: 373434 - DNA, 75 bp, synthetic construct
  source 1..75: mol_type = other DNA
taccgaactactacgaagccgctatagatgcttcaacgttcaataaagctcaagagattcttggtaagaaccgta

SEQ ID NO: 373435 - DNA, 75 bp, synthetic construct
  source 1..75: mol_type = other DNA
gaggccggacagggcgcttatgatgcacaggtcaggaacgatgagcaggatgttattctggtcgatcacgaagaa

SEQ ID NO: 373436 - DNA, 75 bp, synthetic construct
  source 1..75: mol_type = other DNA
gacttacttcagacgtggtatatcaaccgtttcctgaaattccgcgaaggggcttttacagacccggattcctat

SEQ ID NO: 373437 - DNA, 75 bp, synthetic construct
  source 1..75: mol_type = other DNA
gaaaacagccactgcaacacaatcgctggcatcccccctcaatgtaacaacatcctattcggtcggcggcaccaa

SEQ ID NO: 373438 - DNA, 75 bp, synthetic construct
  source 1..75: mol_type = other DNA
aatacaaccagaaagtgcagttgacctttaataatctgaaaaccgacggttccagcacgctggcaagttttggtg

SEQ ID NO: 373439 - DNA, 75 bp, synthetic construct
  source 1..75: mol_type = other DNA
gaaaaccgtaaccgaattgcagtctcttgagtcaccgctggatgtaaaaacatcatattcagttgatggaattca

SEQ ID NO: 373440 - DNA, 75 bp, synthetic construct
  source 1..75: mol_type = other DNA
atgaccaagttctggggcaagttgtttggtatcaactttgctctgggtgtggctaccggtctgaccatggagttc

SEQ ID NO: 373441 - DNA, 75 bp, synthetic construct
  source 1..75: mol_type = other DNA
ctcgcatcttatttatgatgtgatcccggatggagataaaactgttgttcagcctgatattttaattcttgaagg

SEQ ID NO: 373442 - DNA, 75 bp, synthetic construct
  source 1..75: mol_type = other DNA
cggcgcatcggttgccgaagtcacccaggataacagcgacgaatatggtgtttcgcaaatctttatcgccattga

SEQ ID NO: 373443 - DNA, 75 bp, synthetic construct
  source 1..75: mol_type = other DNA
aagcagccttcaatcgggtattactttctcgcggcgttgatagtgaaaccgctgatgcctgtgcagaaatgtttg

SEQ ID NO: 373444 - DNA, 75 bp, synthetic construct
  source 1..75: mol_type = other DNA
cattttggtggcgatagtatcgccaacaaactgcgcggacacggtaaattgtatcgggccattttgctcgatgtt

SEQ ID NO: 373445 - DNA, 75 bp, synthetic construct
  source 1..75: mol_type = other DNA
tgatcgtcgccattccttccacgccgatcaccatggtcgatatgtcgatgtcgatgttttcctacggcatgttag

SEQ ID NO: 373446 - DNA, 75 bp, synthetic construct
  source 1..75: mol_type = other DNA
atgatggatcgcgccattgaactggctgccgatcacggtattggtctggtggcactacgtaatgccaaccactgg

SEQ ID NO: 373447 - DNA, 75 bp, synthetic construct
  source 1..75: mol_type = other DNA
ttctcatggcgttaaccgtttcccccgtttcattcagcaactggaaaacggcgatatcattcctgacgcccaacc

SEQ ID NO: 373448 - DNA, 75 bp, synthetic construct
  source 1..75: mol_type = other DNA
tcactgattcacaccagtggaacacgttgctaagtttgcataacgcgcaattttatttactacaacgcacgccgg

SEQ ID NO: 373449 - DNA, 75 bp, synthetic construct
  source 1..75: mol_type = other DNA
cagttcgggactaactggtcttattattcccactatgtaggggatatcttcggtgcgccgctggcaatcgaaggt

SEQ ID NO: 373450 - DNA, 75 bp, synthetic construct
  source 1..75: mol_type = other DNA
cagcatcagtttctgcgtggcttatagcagcagcagatattccagcacaattaacagaactactggcgccggtta

SEQ ID NO: 373451 - DNA, 75 bp, synthetic construct
  source 1..75: mol_type = other DNA
tccgtttgcgcaaacttaccgccaccgataatcctgctattgccagtgtcatccgccaggtgtccgcagagtacg

SEQ ID NO: 373452 - DNA, 75 bp, synthetic construct
  source 1..75: mol_type = other DNA
ctggaaacgaccgcttttttgaaagaagcgattggtttgtatgaacatttaggttttctaacatatcgactatgc

SEQ ID NO: 373453 - DNA, 75 bp, synthetic construct
  source 1..75: mol_type = other DNA
gacatttgcgaactgcaaaagatgtattttcttccggctattcgcggtaaagggctggcgaaaaaactggcctta

SEQ ID NO: 373454 - DNA, 75 bp, synthetic construct
  source 1..75: mol_type = other DNA
tttcgcaaatctttatcgccatcgaagtggataaattgatcgacggccccacccgcgatgcaaagctgcaacgca

SEQ ID NO: 373455 - DNA, 75 bp, synthetic construct
  source 1..75: mol_type = other DNA
gaactgatcttcatcgcgaccggttcggaagttgaactggcggttgctgcctacgaaaaactgactgccgaaggc

SEQ ID NO: 373456 - DNA, 75 bp, synthetic construct
  source 1..75: mol_type = other DNA
tcgaaatcccgtctgaaatctatgctcagtgggatgcgaaagaagcaggccaggcgaaagaatctgcatggaatg

SEQ ID NO: 373457 - DNA, 75 bp, synthetic construct
  source 1..75: mol_type = other DNA
aggttgcccgcagccgcgccaccccattattagatttgatcaagacagcgttgacgccccatccactgcaaaaac

SEQ ID NO: 373458 - DNA, 75 bp, synthetic construct
  source 1..75: mol_type = other DNA
atgttagatatgaaaagcggaaacatatcgatgaaagcgatcttaatcccatttttatctcttctgattccgtta

SEQ ID NO: 373459 - DNA, 75 bp, synthetic construct
  source 1..75: mol_type = other DNA
ccggagctgaagctggaaagtgtggtgattgtcagtcgtcatggtgtgcgtgctccaaccaaggccacgcaactg

SEQ ID NO: 373460 - DNA, 75 bp, synthetic construct
  source 1..75: mol_type = other DNA
aatccggcgaaaatcgccagccgtaaagcgtcgcagaatgctatcgaagcgttcggcccgctgttgccggaattc

SEQ ID NO: 373461 - DNA, 75 bp, synthetic construct
  source 1..75: mol_type = other DNA
ttaatgtgtctgccgaggttgccgggtctgtggcactgttatctgctgattctaatcatttgtcagatatgcagt

SEQ ID NO: 373462 - DNA, 75 bp, synthetic construct
  source 1..75: mol_type = other DNA
tgatgccaatgacgaatatatgatgatctatggtgtctgtgggaagttcccaacagagaatactaattttgctct

SEQ ID NO: 373463 - DNA, 75 bp, synthetic construct
  source 1..75: mol_type = other DNA
tagatagatttgcagaaaaaattggtattggatctatttcatttaatgaaaatagattgtgttcttttgctattg

SEQ ID NO: 373464 - DNA, 75 bp, synthetic construct
  source 1..75: mol_type = other DNA
tgttcgttggcaggttttacgcaaatcgtgaatgaagcacgcataccagcgtgcgctctccatcaagacaaataa

SEQ ID NO: 373465 - DNA, 75 bp, synthetic construct
  source 1..75: mol_type = other DNA
ctggcaggatgtgaagagcgaaacgcgcagggcatgtgttcgttggcaggttttacgcaaatcgtgaatgaagca

SEQ ID NO: 373466 - DNA, 75 bp, synthetic construct
  source 1..75: mol_type = other DNA
accatcgcagcattttgctgcagctcaattcaataatggtgaaactcagccgatggatctcatcataaaacagac

SEQ ID NO: 373467 - DNA, 75 bp, synthetic construct
  source 1..75: mol_type = other DNA
agtcagaaaactacattgcgagagagactgaaaaagactcgtgaaggattttgggcattattacttcctgttatt

SEQ ID NO: 373468 - DNA, 75 bp, synthetic construct
  source 1..75: mol_type = other DNA
gtgccacccgggataatcttgagcgtctgcgcgggcatctgcagaagcaactggggcaggtgacgcgtatctgtt

SEQ ID NO: 373469 - DNA, 75 bp, synthetic construct
  source 1..75: mol_type = other DNA
cagaatatatccggtcgttattataatactatgacagactggtggtctaagtatcctccgggcgatatgagagat

SEQ ID NO: 373470 - DNA, 75 bp, synthetic construct
  source 1..75: mol_type = other DNA
tatgcgacattgtcgttgagtaatgctttcagtattcctccatatcttgaaagttcttatgttcaggaatggctt

SEQ ID NO: 373471 - DNA, 75 bp, synthetic construct
  source 1..75: mol_type = other DNA
tgcgttacgtgcggcaattattgaagaaaacttgctgcttgatgaacgtctggcggtcggtggcgcgtcgatggg

SEQ ID NO: 373472 - DNA, 75 bp, synthetic construct
  source 1..75: mol_type = other DNA
cgcgatgacggcactgggaattaccgctcgccaccccacggtgaaatgtaccgccagcatgatgggatcgggcta

SEQ ID NO: 373473 - DNA, 75 bp, synthetic construct
  source 1..75: mol_type = other DNA
cccttgatcaggcagcttccggtgatgctccaatcaaatggaaatcaaacctgccggttactgttacctacatgt

SEQ ID NO: 373474 - DNA, 75 bp, synthetic construct
  source 1..75: mol_type = other DNA
cctgaaaaacacatctttcaagaattctgttctggaggagtgtgatttatctttctctgatttgacaaatagcac

SEQ ID NO: 373475 - DNA, 75 bp, synthetic construct
  source 1..75: mol_type = other DNA
tatgttaagatgtctttggctgattcatttagtattcatccttatttgaacaacgcaaatatacagcaatggctc

SEQ ID NO: 373476 - DNA, 75 bp, synthetic construct
  source 1..75: mol_type = other DNA
aacgggtgaagagtctgctgaagaattgaattactctggatgtgacttgtcaggtctaagtcttgtagggctgaa

SEQ ID NO: 373477 - DNA, 75 bp, synthetic construct
  source 1..75: mol_type = other DNA
ttccagatacttctgtcatgcgaacaattaattcagttgattcaaaatataacgatgaaaaagttcgatctgtgg

SEQ ID NO: 373478 - DNA, 75 bp, synthetic construct
  source 1..75: mol_type = other DNA
tggaaggggcgaaacacccgcaagggccaacgccaattgagcggctgaaacaggaatacgaacgccggaaggcag

SEQ ID NO: 373479 - DNA, 75 bp, synthetic construct
  source 1..75: mol_type = other DNA
ttttttttgtttaaagatggagagatccagaatactaacgattatacacttgggaaattattttcacagtcattt

SEQ ID NO: 373480 - DNA, 75 bp, synthetic construct
  source 1..75: mol_type = other DNA
gggctttgagcatatcgactatgcgcttggctgcacgggtcatgtcgattgtgaagtacggatgctacgcaaact

SEQ ID NO: 373481 - DNA, 75 bp, synthetic construct
  source 1..75: mol_type = other DNA
cctaaagatttatccaacgttaaagacaaaattttactgcatacagaaagaaaaataacaaaagcaggattgggc

SEQ ID NO: 373482 - DNA, 75 bp, synthetic construct
  source 1..75: mol_type = other DNA
cagtaagtgttttacctgttgagaatgcttgtaatattagtaagctcatcgaattgcaggaagagaaagtattca

SEQ ID NO: 373483 - DNA, 75 bp, synthetic construct
  source 1..75: mol_type = other DNA
cttgaaaatatccgtgacacccttctccccaaactcctttcgggcgaaatcaccctgccggaagcagagcaggcg

SEQ ID NO: 373484 - DNA, 75 bp, synthetic construct
  source 1..75: mol_type = other DNA
gttgagcaggttgcttctctgcgcgtgaccccgaacatgtctacatggcgtccgtgtgaccaggttgaatccgct

SEQ ID NO: 373485 - DNA, 75 bp, synthetic construct
  source 1..75: mol_type = other DNA
ggcttcctgccgtacacctccaccttcctgatgttcgtagaatacgcacgtaatgcggtacgtatggctgcgctg

SEQ ID NO: 373486 - DNA, 75 bp, synthetic construct
  source 1..75: mol_type = other DNA
gcgactattgccacacgccttcggcagaattacccgcctattattatattcctggcgcgggtgatgctgccaact

SEQ ID NO: 373487 - DNA, 75 bp, synthetic construct
  source 1..75: mol_type = other DNA
tctcacggctatcgcgccgctggttccggcagccacgctgcattacttgcagaatctgcttgaacactcccgtca

SEQ ID NO: 373488 - DNA, 75 bp, synthetic construct
  source 1..75: mol_type = other DNA
atctctctgtctagcattgagcgttctatagagagcttagaggataaggttgatcgtataaagaatgaggatatt

SEQ ID NO: 373489 - DNA, 75 bp, synthetic construct
  source 1..75: mol_type = other DNA
gaaggtatcgtcacaaaaatcttcactgacgccaatggtacgcagcatattggccttcatccgatcccggatcgt

SEQ ID NO: 373490 - DNA, 75 bp, synthetic construct
  source 1..75: mol_type = other DNA
catgacaatgatttgagcgttgacacaacagtcgaagtatttattaccgtaacccgcaatgaaaagcttatcgct

SEQ ID NO: 373491 - DNA, 75 bp, synthetic construct
  source 1..75: mol_type = other DNA
cctatgaagaccggctggatctggtgttaaaaggcaccgccgatattccacgcctgactgtgcatcgcggctccg

SEQ ID NO: 373492 - DNA, 75 bp, synthetic construct
  source 1..75: mol_type = other DNA
ccggcagccacgctgcattacttgcagaatctgcttgaacactcccgccaggacgcggcagctcgtcaaaagacc

SEQ ID NO: 373493 - DNA, 75 bp, synthetic construct
  source 1..75: mol_type = other DNA
ttaaataaggcacgccaattttggcgtgttttttttcgccgatttctgtgcaatcataattttattagtcgggaa

SEQ ID NO: 373494 - DNA, 75 bp, synthetic construct
  source 1..75: mol_type = other DNA
gccacgctgacagaacgggagattgccgaagcggaacaggtaacaaccatcaacgttaaaaccggagaggtggaa

SEQ ID NO: 373495 - DNA, 75 bp, synthetic construct
  source 1..75: mol_type = other DNA
gtgaaaaatttcgacattggtggcatcaagtttgaccttgctactgtcgcagcggttgaatcctgtaatcctgaa

SEQ ID NO: 373496 - DNA, 75 bp, synthetic construct
  source 1..75: mol_type = other DNA
atgtgcatacatcaaaatcacttaacaaacatgccgaccgaaaacatgaatcaggggcgacaaatgaccaaaatg

SEQ ID NO: 373497 - DNA, 75 bp, synthetic construct
  source 1..75: mol_type = other DNA
aacatataaagccacattaccgcgcccttgatatggctgaacactggctaagggtggcgattaaggcaatagatc

SEQ ID NO: 373498 - DNA, 75 bp, synthetic construct
  source 1..75: mol_type = other DNA
ctgaccgaacgggagattgccgaagcggaggaagtgacaaccatcaatattaagtccggagagcaggcagcatga

SEQ ID NO: 373499 - DNA, 75 bp, synthetic construct
  source 1..75: mol_type = other DNA
cacagcaaaaatataaagcgttagacatgacagagctttccctaaaggtggcaatcaaagttatagaccgccaca

SEQ ID NO: 373500 - DNA, 75 bp, synthetic construct
  source 1..75: mol_type = other DNA
gaaaaaataccgggtattactgaaccggacagacacgggcaacgcgccggatattgtctggcctgaatccccttc

SEQ ID NO: 373501 - DNA, 75 bp, synthetic construct
  source 1..75: mol_type = other DNA
cctgaaggacacgtggctatctttgatgaggatgaaaacacctggcacctcatggaagatcaccggggtaaaacc

SEQ ID NO: 373502 - DNA, 75 bp, synthetic construct
  source 1..75: mol_type = other DNA
cgaaaaagcggccagagaatttggcgtgacgcagagaacatggcacgcctgggaaaatgcggaacaggtggatgt

SEQ ID NO: 373503 - DNA, 75 bp, synthetic construct
  source 1..75: mol_type = other DNA
gctcagcctggtgctggatgaacatcgtgaagacgccagttgcctcccctgccacttcaacccgatggaacgcca

SEQ ID NO: 373504 - DNA, 75 bp, synthetic construct
  source 1..75: mol_type = other DNA
ctgaaatctctattcaccagttggtggtcgggaaacctgcaaacgatggcaatattcctgctcagtgtgaactgc

SEQ ID NO: 373505 - DNA, 75 bp, synthetic construct
  source 1..75: mol_type = other DNA
ctgcttttattgcggccatacagcaaaacccgaagggctatctctgtctgcatacagacaagttcatcgctgaac

SEQ ID NO: 373506 - DNA, 75 bp, synthetic construct
  source 1..75: mol_type = other DNA
cgctgacagaacgggagattgccgaagcggaacaggtaacaaccatcaacgttaaaaccggagaggtggaatcat

SEQ ID NO: 373507 - DNA, 75 bp, synthetic construct
  source 1..75: mol_type = other DNA
caaaaaaaccacaggtgcggatatcaagacagcgactgacttttgatgagtggacgatgatttataacgcagcgg

SEQ ID NO: 373508 - DNA, 75 bp, synthetic construct
  source 1..75: mol_type = other DNA
aagaggtcatgacccgcacggccaaaatcacaaacaacggcaaaccatcgctggcagaggacagcggtaccgcgc

SEQ ID NO: 373509 - DNA, 75 bp, synthetic construct
  source 1..75: mol_type = other DNA
ggggcaacgacgacgctgacattcagcacagtaccggaagatgcttctgataaaacggtgagtgtggcgtcatca

SEQ ID NO: 373510 - DNA, 75 bp, synthetic construct
  source 1..75: mol_type = other DNA
tggacatgcccgtctcggtgatccgcgtcgtacacgacgccttgtgtcactggcctcttctctcgctcagcatgc

SEQ ID NO: 373511 - DNA, 75 bp, synthetic construct
  source 1..75: mol_type = other DNA
aggcgtgaagcagggcagtgtcagcattgtgggcatgaccgctgacggcgattttgtggcagtggctacggtggc

SEQ ID NO: 373512 - DNA, 75 bp, synthetic construct
  source 1..75: mol_type = other DNA
tgttaccggactgacggtgcaccggcatctgtcagtgtcaaagcgggagcaaccaccacacactgacctttacag

SEQ ID NO: 373513 - DNA, 75 bp, synthetic construct
  source 1..75: mol_type = other DNA
catgacagagcacgccttaaaggtggcaatcagaacgatagaccgccatgccggagaaggatacgcgaaagcaca

SEQ ID NO: 373514 - DNA, 75 bp, synthetic construct
  source 1..75: mol_type = other DNA
gtgggaaaccatgaaaagtgggtagaaaaagtgggcacaggtgggcgcatgaccagaaaaaccagagataagaca

SEQ ID NO: 373515 - DNA, 75 bp, synthetic construct
  source 1..75: mol_type = other DNA
ctgacagaacgggagattgccgaagcggaacaggtaacaaccatcaacgttaaaaccggagagcagacagcatga

SEQ ID NO: 373516 - DNA, 75 bp, synthetic construct
  source 1..75: mol_type = other DNA
gcagctgtggagatcattcgtgtagcagggattaaaggacttatgcctacaattgtcagtaaagataaggcatta

SEQ ID NO: 373517 - DNA, 75 bp, synthetic construct
  source 1..75: mol_type = other DNA
gtttatcggctggcttattatcatcgtctttaactgccaggcgggtacgccaggcgaaaaccgctttggaccaga

SEQ ID NO: 373518 - DNA, 75 bp, synthetic construct
  source 1..75: mol_type = other DNA
atcagaagaaaccacataaccgcgccattgagtttacagagcacttgctgagggtggcgataaaaatcatcgacc

SEQ ID NO: 373519 - DNA, 75 bp, synthetic construct
  source 1..75: mol_type = other DNA
acgctgtatcaatactttggtcagcatggggataaagtggtgcagccgctggtgcaaaagctggataagcagcag

SEQ ID NO: 373520 - DNA, 75 bp, synthetic construct
  source 1..75: mol_type = other DNA
ttccagatgagtgacggcacaaccatcggctatcacatcggtgttgcctacaaagttgatccatccaaagttacc

SEQ ID NO: 373521 - DNA, 75 bp, synthetic construct
  source 1..75: mol_type = other DNA
aatgaagacctacgatgagccgttcagcttccagatgagtgacggcacaaccatcggctatcacatcggcgtggc

SEQ ID NO: 373522 - DNA, 75 bp, synthetic construct
  source 1..75: mol_type = other DNA
agccacgctggaagcagaaattgctcgcctgcgtgaggttcatagccaaaaactgagtaaagaagcacagaagct

SEQ ID NO: 373523 - DNA, 75 bp, synthetic construct
  source 1..75: mol_type = other DNA
gcgaacccggcgagctgtcagctttttgggcaaaaattggatcgcctgcgcaaccataccgccgcgcaattgatt

SEQ ID NO: 373524 - DNA, 75 bp, synthetic construct
  source 1..75: mol_type = other DNA
ctgtttcagcgattgtttcgccagtatggtcgccagttaaatatcgtgcttgccctgttgctggtctattgcgcg

SEQ ID NO: 373525 - DNA, 75 bp, synthetic construct
  source 1..75: mol_type = other DNA
cggaattcaaccgtcgttatcccaaaattcagttttcactttccaccggcccttccggcactatgctggatggtg

SEQ ID NO: 373526 - DNA, 75 bp, synthetic construct
  source 1..75: mol_type = other DNA
gtttacgcggcgaagctctgcgccagaaccctggcgtcatggagctggaagccatcaacaagtggaacggtacac

SEQ ID NO: 373527 - DNA, 75 bp, synthetic construct
  source 1..75: mol_type = other DNA
tcccggcgttatggagctggaagcaatcaacaaatggaacggcacgctgccgcaatacatgaccagcaacaccgc

SEQ ID NO: 373528 - DNA, 75 bp, synthetic construct
  source 1..75: mol_type = other DNA
gtgtttcagacctaccgcaaaggcgtggatgacattaccgacactgacctgcgccagaagatcgccgatgcactc

SEQ ID NO: 373529 - DNA, 75 bp, synthetic construct
  source 1..75: mol_type = other DNA
aactcagtaaggaagcacagaagctgatgaagatgccgttccagcgcgcgattaccaaaaaagaacaagccgata

SEQ ID NO: 373530 - DNA, 75 bp, synthetic construct
  source 1..75: mol_type = other DNA
ctgtcgctggttgaagccgcagacaaatatgctgaactggaaaaagagaaagccactctggaagcagaaattgct

SEQ ID NO: 373531 - DNA, 75 bp, synthetic construct
  source 1..75: mol_type = other DNA
tggctcggcgctgacgggcaaactggtcactatgtttgattatcgggtgatcctcgcgctgttgacgttgggcgt

SEQ ID NO: 373532 - DNA, 75 bp, synthetic construct
  source 1..75: mol_type = other DNA
gctctaccgcctgctttcgcagccgagccgcattaagcgtcagcttcgtttgctgcgttatttacgctggcacta

SEQ ID NO: 373533 - DNA, 75 bp, synthetic construct
  source 1..75: mol_type = other DNA
ggcgagctggcaaccagtatcaacaccattgcccgtgatgcgcatatggaagcgaatctggagatggagattgtt

SEQ ID NO: 373534 - DNA, 75 bp, synthetic construct
  source 1..75: mol_type = other DNA
ctcgatgacttgcgtcacctggagtcagtggtgaccaataagatcagcgaaattgaggcggatctggaaaagctg

SEQ ID NO: 373535 - DNA, 75 bp, synthetic construct
  source 1..75: mol_type = other DNA
cgccaagagcgtgaagtttaaatatccgcgtcagcgtaaaacggtcgtcgctgatggtgtgggtcagggttataa

SEQ ID NO: 373536 - DNA, 75 bp, synthetic construct
  source 1..75: mol_type = other DNA
gggaaaatgcggaacaggtggatgtcaccgtctggaggaccacccaggcactttcagtccgtgacctgctgcctc

SEQ ID NO: 373537 - DNA, 75 bp, synthetic construct
  source 1..75: mol_type = other DNA
acatgcaggggatgcgtaaggcagatatcatcagacgactggaaaatgaactgggggaaacggcagaggatgtgt

SEQ ID NO: 373538 - DNA, 75 bp, synthetic construct
  source 1..75: mol_type = other DNA
acatgcaggggatgcgcaaggcagatatcatcaggcgtctggaaaatgaactgggggaaacagcagggaatgtgt

SEQ ID NO: 373539 - DNA, 75 bp, synthetic construct
  source 1..75: mol_type = other DNA
gcaaaaagtgatggatttaaactcatctcgggtcaatcgggcacaactggtggagtcgattaatatggcaaaact

SEQ ID NO: 373540 - DNA, 75 bp, synthetic construct
  source 1..75: mol_type = other DNA
tgtggcaaaacgattacagcaattcgctgctggcgtaccgtcaggcgctgcgactgcgcggtgagaacgctgaac

SEQ ID NO: 373541 - DNA, 75 bp, synthetic construct
  source 1..75: mol_type = other DNA
acgagcaaaaaatttctggcgaatgcctcccgttaaaaaaagtatcgctgtacctgaataacgaaataccggctg

SEQ ID NO: 373542 - DNA, 75 bp, synthetic construct
  source 1..75: mol_type = other DNA
gagacgcagtttgtcgccattattgggcagttttatcaccctgatgaaaaaagcgacagctggcgtctggtgatc

SEQ ID NO: 373543 - DNA, 75 bp, synthetic construct
  source 1..75: mol_type = other DNA
cagcgaaataacggccagcaacaaagacagcaatctcagcagcaggggaatcacagcgaaccacctatggatttt

SEQ ID NO: 373544 - DNA, 75 bp, synthetic construct
  source 1..75: mol_type = other DNA
gcgcgatccgctacatcagtttgccagccagcaaaccccggaagcgcagcttcaggcattacaggataaaatccg

SEQ ID NO: 373545 - DNA, 75 bp, synthetic construct
  source 1..75: mol_type = other DNA
gtatcaggcactggcggggcaggcggaaattgagctggcttttcatacacccgaaacggtcagcagctggagatc

SEQ ID NO: 373546 - DNA, 75 bp, synthetic construct
  source 1..75: mol_type = other DNA
ccactgggtaaagtcagtaaaaatgctttttcaggtgtaggtagtctggcgtcaccacagcagttcagtattaaa

SEQ ID NO: 373547 - DNA, 75 bp, synthetic construct
  source 1..75: mol_type = other DNA
gaaatagacctggcttttcataccccggaaacggtcagcagctggagcgcacgctggtcgggtactgaactgcgc

SEQ ID NO: 373548 - DNA, 75 bp, synthetic construct
  source 1..75: mol_type = other DNA
cgcgcctactggcatgaatggcttaactggccgtcgatatttgccaataccggtttctttcgcccggatgaagcg

SEQ ID NO: 373549 - DNA, 75 bp, synthetic construct
  source 1..75: mol_type = other DNA
ttgtgcatggatcctattgccatgctgttcgacgaaccaacgtcggcgctggatccggagatgatcaacgaagtg

SEQ ID NO: 373550 - DNA, 75 bp, synthetic construct
  source 1..75: mol_type = other DNA
cagtacgacctggaggaaatgttctggcgctggagcgagcgttttccgtcgctggcaccaatggaacgctggatg

SEQ ID NO: 373551 - DNA, 75 bp, synthetic construct
  source 1..75: mol_type = other DNA
gggcaacttgaaaggaagtttaataagacctttgacaagattgaacagagagcaagaaacacaagagcatttcag

SEQ ID NO: 373552 - DNA, 75 bp, synthetic construct
  source 1..75: mol_type = other DNA
gacacttggaaacgaagcttttaatcgtgagttagcaaaattaaatcagtctcttcgtgaaacactttctaagtt

SEQ ID NO: 373553 - DNA, 75 bp, synthetic construct
  source 1..75: mol_type = other DNA
ttagggctatttccacgcttggaaatgtagcaaatacagcagcaggaagaatcaattcacgttccggtagtgttg

SEQ ID NO: 373554 - DNA, 75 bp, synthetic construct
  source 1..75: mol_type = other DNA
cactcgtgcgcacgcggaagtatccgttggcaaagccacagacgcgcgtaacgaggtaaaaaatgccaaagaatc

SEQ ID NO: 373555 - DNA, 75 bp, synthetic construct
  source 1..75: mol_type = other DNA
caacttgacagcaatctgacaagttctttagggcaacttgaaaggaagtttaataagacctttgacaagattgag

SEQ ID NO: 373556 - DNA, 75 bp, synthetic construct
  source 1..75: mol_type = other DNA
ttctgattgagttaagttttaactctcagaaagttttaaaaggtctggaaaaagccgagaaacaaacgatgcaga

SEQ ID NO: 373557 - DNA, 75 bp, synthetic construct
  source 1..75: mol_type = other DNA
aggggaagggcgctattcggaattgctggcgataaatctgcttgagcaattgttactgcggcgcatggaagcgat

SEQ ID NO: 373558 - DNA, 75 bp, synthetic construct
  source 1..75: mol_type = other DNA
aaagcgctggcacatttcatggatgttccggtagcgatcgcaccgactattgcctctaccgacgcaccgtgcagc

SEQ ID NO: 373559 - DNA, 75 bp, synthetic construct
  source 1..75: mol_type = other DNA
agtgtggcgcaattctcggtatcggtggcggaaaaaccctcgatacagccaaagcactggcacatttcatgggtg

SEQ ID NO: 373560 - DNA, 75 bp, synthetic construct
  source 1..75: mol_type = other DNA
agctttaaagatgccggactggcggtagaaatcgcgccgtttggcggcgaatgttcgcaaaatgaaattgatcgt

SEQ ID NO: 373561 - DNA, 75 bp, synthetic construct
  source 1..75: mol_type = other DNA
ttcctgttgcagttgccccaaccattgcctcaaccgacgcgccttgcagcgccctttctgttatctacactgatg

SEQ ID NO: 373562 - DNA, 75 bp, synthetic construct
  source 1..75: mol_type = other DNA
tcactattatcacggtgaaaaagtggcatttggtacactgacgcagctggtactggaaaactcgccggttgagga

SEQ ID NO: 373563 - DNA, 75 bp, synthetic construct
  source 1..75: mol_type = other DNA
gcggcagcgcacgcggtgcataatggcctgactgccattcctgatgcccatcactattatcacggtgaaaaagtg

SEQ ID NO: 373564 - DNA, 75 bp, synthetic construct
  source 1..75: mol_type = other DNA
ttcgatgatactctgctccgaagcaacagcaatcagctaatgaaagttgtggacggtattaatcattcaggactc

SEQ ID NO: 373565 - DNA, 75 bp, synthetic construct
  source 1..75: mol_type = other DNA
cgctggtggtgctgggcgtgtgcggcaaatggatgattatccagttgcatgacctgtgcattcacctgtttaccc

SEQ ID NO: 373566 - DNA, 75 bp, synthetic construct
  source 1..75: mol_type = other DNA
gacgcagattaacgaacagaccctgagctttttgccgaggctgattgtcacgctggtggtgctgggcgtgtgcgg

SEQ ID NO: 373567 - DNA, 75 bp, synthetic construct
  source 1..75: mol_type = other DNA
atcaaacgcctgcgcccgctggtggaggatgcaataaataaaggcattctggatgttgatcctgatctggttaac

SEQ ID NO: 373568 - DNA, 75 bp, synthetic construct
  source 1..75: mol_type = other DNA
aaacatcgctacttcccgtgacgttaactccggagccggataataaaatcccggcaccagtgcagatacctgaac

SEQ ID NO: 373569 - DNA, 75 bp, synthetic construct
  source 1..75: mol_type = other DNA
catctttaccttcaaaggcaccaaatcgggtaactgggatgtgaagacgctggataaacaggtggatgtaactcc

SEQ ID NO: 373570 - DNA, 75 bp, synthetic construct
  source 1..75: mol_type = other DNA
gagaagttggctcagttgaatgcttcagtccgagaagcaattgctaaagccagaggccatacatccaccagcaaa

SEQ ID NO: 373571 - DNA, 75 bp, synthetic construct
  source 1..75: mol_type = other DNA
tactatttaatgtttttgataaggtaactagacagttatttattttacaatttaaatcattgtttatatacagag

SEQ ID NO: 373572 - DNA, 75 bp, synthetic construct
  source 1..75: mol_type = other DNA
aaacatgcggctttcgccgatgaggatgaagtcaggtttgtactgagttgtgcacctgatgatgaaaaaattaaa

SEQ ID NO: 373573 - DNA, 75 bp, synthetic construct
  source 1..75: mol_type = other DNA
aatcgtctggaaacagtagtggcactgcaaaatgaaacagcccgcgaggagtacatccgccgcaggctggggtta

SEQ ID NO: 373574 - DNA, 75 bp, synthetic construct
  source 1..75: mol_type = other DNA
tatcattgaacttgtactgaaaaacataaaaccggatgatgcggatgagcgtatttactggaagttaaaaatgac

SEQ ID NO: 373575 - DNA, 75 bp, synthetic construct
  source 1..75: mol_type = other DNA
cttgaatgatgggcttctttcaggcgtcatatatgatattttggtaactcgtgagatgaagaaatactctatcaa

SEQ ID NO: 373576 - DNA, 75 bp, synthetic construct
  source 1..75: mol_type = other DNA
acttgttatgagaaatctaaagcaagataaaaatcaagatcctatttattggaagttaaagttcacagtgatttg

SEQ ID NO: 373577 - DNA, 75 bp, synthetic construct
  source 1..75: mol_type = other DNA
aagaatctgcccgcagaaaaaaaagccggatttctggcaactctgattgcaatgaaattaggcggtgaaatctga

SEQ ID NO: 373578 - DNA, 75 bp, synthetic construct
  source 1..75: mol_type = other DNA
gttaaaacgcttaacgaaggcgtcaaaaaaatgtgcctggtgcataccggaaagaatctgcccgcagaaaaaaaa

SEQ ID NO: 373579 - DNA, 75 bp, synthetic construct
  source 1..75: mol_type = other DNA
aaaaaatgtgcctggtgcatatcggaaagaatctgcccacagaaaaaaaagccgaatttctggcaactctaattg

SEQ ID NO: 373580 - DNA, 75 bp, synthetic construct
  source 1..75: mol_type = other DNA
aaatcaccatcgcggccgatggtaccatttcggcgctcaatccgggcgacccggcaaataccgtcgcgccagtcg

SEQ ID NO: 373581 - DNA, 75 bp, synthetic construct
  source 1..75: mol_type = other DNA
ggcgtctgaagctggtgaaagccacgggcagcgaagtgcagcgcggtgacgacggcatttttcgtttaagcgcag

SEQ ID NO: 373582 - DNA, 75 bp, synthetic construct
  source 1..75: mol_type = other DNA
tgggcgctgccagccagacgttgaatcaacaggcggtgactgccagtaatctggccaatgcctccacgcccggtt

SEQ ID NO: 373583 - DNA, 75 bp, synthetic construct
  source 1..75: mol_type = other DNA
tcaattggtgaggatttttacattaaaaatcacaagactcttgaaactcaaatgaaatttcatcaagtgattgaa

SEQ ID NO: 373584 - DNA, 75 bp, synthetic construct
  source 1..75: mol_type = other DNA
tgactgctatcacaagattaggtcaggttgccaatacaacagcagacaccgtgaataaaaagaatgggaagccat

SEQ ID NO: 373585 - DNA, 75 bp, synthetic construct
  source 1..75: mol_type = other DNA
tcgcaatatgttcgaacgcggcagcgcgcagattatgccgttctttaaaacgctgctggtggagctcgcgccagt

SEQ ID NO: 373586 - DNA, 75 bp, synthetic construct
  source 1..75: mol_type = other DNA
gatagagattcgtccttggcgtggcttctcaaggaacgtcataacgcacccgcactttggagattatccggttga

SEQ ID NO: 373587 - DNA, 75 bp, synthetic construct
  source 1..75: mol_type = other DNA
ttgccagaagtcttgggatgactacggaagaattagacaaggccatgaaagacggtaaggttctttctaaagatg

SEQ ID NO: 373588 - DNA, 75 bp, synthetic construct
  source 1..75: mol_type = other DNA
gcactgacagcattatcacagatggctggtaagggtcaggttatggctgaagagcttaaggggcaactggctgaa

SEQ ID NO: 373589 - DNA, 75 bp, synthetic construct
  source 1..75: mol_type = other DNA
tggtgaagttgccattaaaccagatgaaaccagctttatgacctttagcagtaatatctacgaccaatatgcaga

SEQ ID NO: 373590 - DNA, 75 bp, synthetic construct
  source 1..75: mol_type = other DNA
atttacggtgttaccctgttcgaacatgatagtaaatctatccttaacctctttgataagaagggttatccggta

SEQ ID NO: 373591 - DNA, 75 bp, synthetic construct
  source 1..75: mol_type = other DNA
cagaacaaatctggggctgggagatgtggcaacccaggatctgagtacgctcgatgcccgttacctgctgacgac

SEQ ID NO: 373592 - DNA, 75 bp, synthetic construct
  source 1..75: mol_type = other DNA
atgtaaaacaacactcattcctctcaactgtcatgatagttagcgatgatggtacgaaactgatagttaagacaa

SEQ ID NO: 373593 - DNA, 75 bp, synthetic construct
  source 1..75: mol_type = other DNA
ggcatccatgctgctcggctttctcatccgtccaacgattcagccacaaggggcaagccgccagcaggagagcac

SEQ ID NO: 373594 - DNA, 75 bp, synthetic construct
  source 1..75: mol_type = other DNA
tggccgccatgcgctacattgccgctcgtcagggaagcgaggttatccgtttacaggcggtttattctgccgtcg

SEQ ID NO: 373595 - DNA, 75 bp, synthetic construct
  source 1..75: mol_type = other DNA
gctgttgacgttgggcgtggcatccatgctgctcggctttctcatccgtccgacgattcagccacaaggggcaag

SEQ ID NO: 373596 - DNA, 75 bp, synthetic construct
  source 1..75: mol_type = other DNA
tgttgtttgaattaatactcaacggacaaaaagctgcggtagataaattacgctacacgtcggagaagacgccta

SEQ ID NO: 373597 - DNA, 75 bp, synthetic construct
  source 1..75: mol_type = other DNA
tagcaattacaacgaggcaatgatggtgcgaattgccgatgttggcaacggtaactacagctacattgataccct

SEQ ID NO: 373598 - DNA, 75 bp, synthetic construct
  source 1..75: mol_type = other DNA
caacatttgcaagagcggctaaagcaaaagctacacatatcgcaaatccaggaaccgctcgctaccagcagttcg

SEQ ID NO: 373599 - DNA, 75 bp, synthetic construct
  source 1..75: mol_type = other DNA
cgggtataccgcaaactgactcaccagcacttacattagtagaaataatcatgaagaacaatccagttttattgt

SEQ ID NO: 373600 - DNA, 75 bp, synthetic construct
  source 1..75: mol_type = other DNA
attgttaccattaaacaaagaccggagaacattttaccccagcacatacctcaatgagagatggtgtgtaatggg

SEQ ID NO: 373601 - DNA, 75 bp, synthetic construct
  source 1..75: mol_type = other DNA
caagtatctttgatcagactcaaatccaatctctgcacggcgtatcgcgtgagtgcatacaactcgcccaaatgc

SEQ ID NO: 373602 - DNA, 75 bp, synthetic construct
  source 1..75: mol_type = other DNA
gtcaatgacttaatgacagaaggtgcagcttacgtcactgtaacggaatcatccctgtatgagcgagtttgcctg

SEQ ID NO: 373603 - DNA, 75 bp, synthetic construct
  source 1..75: mol_type = other DNA
atgctttttacactgaaaaaagtgattggcaatatgttgctgccacttccgctgatgttgttgattattggcgct

SEQ ID NO: 373604 - DNA, 75 bp, synthetic construct
  source 1..75: mol_type = other DNA
aagctcctatccaacatggagtaatacacaaaaagtcgactatatcgtagtactcggaggtggttatacctggaa

SEQ ID NO: 373605 - DNA, 75 bp, synthetic construct
  source 1..75: mol_type = other DNA
gaatatcgtcagattggttatgaaaagcgccaactgcaggcagaagatttcaataacgacaatgttgatgctggc

SEQ ID NO: 373606 - DNA, 75 bp, synthetic construct
  source 1..75: mol_type = other DNA
gggaagatccacagggttacagggcggaatttattcgcctgattgaactggcggatggtgtgactgacatcagtc

SEQ ID NO: 373607 - DNA, 75 bp, synthetic construct
  source 1..75: mol_type = other DNA
tactggaatgaaaaaacggaattcctgattgagagttggttgacgttccctgcatatccttatagctggtttaaa

SEQ ID NO: 373608 - DNA, 75 bp, synthetic construct
  source 1..75: mol_type = other DNA
acaggcggatcggtgactggcgcttgctggccgtggagtatgatcatgataactgcctggacgaagacgaaaccg

SEQ ID NO: 373609 - DNA, 75 bp, synthetic construct
  source 1..75: mol_type = other DNA
ttgacgatgttccggtgacctgtatcgatatggccatgccggtggtcattattcctgctgaatatcttggaaaaa

SEQ ID NO: 373610 - DNA, 75 bp, synthetic construct
  source 1..75: mol_type = other DNA
gaagatcaaacgcagcgcgataaaatattgatggcaattatgggttccggtaatgatctggaaattgacggtatt

SEQ ID NO: 373611 - DNA, 75 bp, synthetic construct
  source 1..75: mol_type = other DNA
cgatccgcgtgctgatgtcgattatctgtttgctcaagttatcgtccatgagcaacgtgtcgataccacgcctaa

SEQ ID NO: 373612 - DNA, 75 bp, synthetic construct
  source 1..75: mol_type = other DNA
caacaaacaaaaccacccccgcaaatctttactacgcgtacacggataacggcaacataaccggcgatgcaatgc

SEQ ID NO: 373613 - DNA, 75 bp, synthetic construct
  source 1..75: mol_type = other DNA
ttcatataacccgtaccacaaacaactggatattattgtcgatccccgccttgatgaagtcagtgataagcaatg

SEQ ID NO: 373614 - DNA, 75 bp, synthetic construct
  source 1..75: mol_type = other DNA
agggatgaaaacggtgaggtgctgaatattgtgccaaaattccttcttgttccagcggctctggaagacagagcg

SEQ ID NO: 373615 - DNA, 75 bp, synthetic construct
  source 1..75: mol_type = other DNA
catttactgatattgcgttgttctggagctggttagaccgtgatggagagattaactggaaatcaggaagttttt

SEQ ID NO: 373616 - DNA, 75 bp, synthetic construct
  source 1..75: mol_type = other DNA
cacagagacattattattccggtgacggctgaatcatgccggaacgcagccgcagaggtgcaaactttgaagccc

SEQ ID NO: 373617 - DNA, 75 bp, synthetic construct
  source 1..75: mol_type = other DNA
gagttgaaaccgccaccggtgagctggcgaaaacgcagcgccgcagcctggcggatacccttcagcagtccggcg

SEQ ID NO: 373618 - DNA, 75 bp, synthetic construct
  source 1..75: mol_type = other DNA
ctggtaaagcaatgggattaggggatgttagtaataaggtcattcctaagcctgtagttatttcgcctgcgcaaa

SEQ ID NO: 373619 - DNA, 75 bp, synthetic construct
  source 1..75: mol_type = other DNA
ggcgtgccgggaacagccgcaccagtagcgctcacttttctgaatgccgcagggaccaaaacgggaaaagttttt

SEQ ID NO: 373620 - DNA, 75 bp, synthetic construct
  source 1..75: mol_type = other DNA
gtacaggtgggattgatgggctgtatctgcgacgctgaagccctgatgaaggaaaaagcagtcagtgaactcagt

SEQ ID NO: 373621 - DNA, 75 bp, synthetic construct
  source 1..75: mol_type = other DNA
ttttgacgatccggagtcgctggggtttgccagtagtgggatccgtattgaaggaagtaacccgtcattatttgt

SEQ ID NO: 373622 - DNA, 75 bp, synthetic construct
  source 1..75: mol_type = other DNA
cacgctgcaagccgcgacgttttatacccacaccaaagacatgcagctttactctggcccggtcgggatgcagac

SEQ ID NO: 373623 - DNA, 75 bp, synthetic construct
  source 1..75: mol_type = other DNA
cacaatatcacggcagcatgctcggcaacccgtttggcgaccagggtaagagcaatgacgatcaggtgctcgggc

SEQ ID NO: 373624 - DNA, 75 bp, synthetic construct
  source 1..75: mol_type = other DNA
gtttaataaaaagagagctacaaattaaaggctataaacaattattgttcaaaagtgttaactgcccatccggcc

SEQ ID NO: 373625 - DNA, 75 bp, synthetic construct
  source 1..75: mol_type = other DNA
tcgatcaggcgtttctggcagggcttggcaattatttgcgggtggagatcctctggcaggttgggttgactggaa

SEQ ID NO: 373626 - DNA, 75 bp, synthetic construct
  source 1..75: mol_type = other DNA
cgcagaccacgcgggtgctgcgggtaaaactgcaaacggctgacaaaaccattctgctttatagcgcctcggata

SEQ ID NO: 373627 - DNA, 75 bp, synthetic construct
  source 1..75: mol_type = other DNA
gatcaaaggcaaaccactaactgatgtctggtttgccttcccgcagttaaaaacttatcaatcacaacttatcgg

SEQ ID NO: 373628 - DNA, 75 bp, synthetic construct
  source 1..75: mol_type = other DNA
cgctgaaatgggatgaaagccagcttcttaatacgctgaaaatttattacaacgcgacggcgccgctgatgggca

SEQ ID NO: 373629 - DNA, 75 bp, synthetic construct
  source 1..75: mol_type = other DNA
gaatgcctggcccggttaacatcttcctggtggtactgctggcggcgtatttgtcgctgtataccggactgtttg

SEQ ID NO: 373630 - DNA, 75 bp, synthetic construct
  source 1..75: mol_type = other DNA
ccgaccaccggactcacaccatacgcacgtaccggcaactggccgctgtgggtgctgacggcactgtttggtttt

SEQ ID NO: 373631 - DNA, 75 bp, synthetic construct
  source 1..75: mol_type = other DNA
tgcctggttctggttgccggacttgccagcgtaaaggccgctgaccactttttttatcggattggccagcgcatg

SEQ ID NO: 373632 - DNA, 75 bp, synthetic construct
  source 1..75: mol_type = other DNA
cgatcacccgattgctcaagatgtaatcatgcgtaccagagaaacaggaaattttacctacgcagacctaaatca

SEQ ID NO: 373633 - DNA, 75 bp, synthetic construct
  source 1..75: mol_type = other DNA
aacgcaacggcaccgctgatgggcaagtcatcgctgattatctggccggagtcggcgataaccgacctggaaatt

SEQ ID NO: 373634 - DNA, 75 bp, synthetic construct
  source 1..75: mol_type = other DNA
cgcggtaaagcattgttgactcatttttccgatggcttaacgctctatagccacaaccagctttacggcgtctgg

SEQ ID NO: 373635 - DNA, 75 bp, synthetic construct
  source 1..75: mol_type = other DNA
aaagtgacgattagtattggcgctgttgtgactcaggaaaatgcgttaaacccgaatgagatctatcgactggct

SEQ ID NO: 373636 - DNA, 75 bp, synthetic construct
  source 1..75: mol_type = other DNA
tggggggggtggtagttgctcacatgctaagtagtcattatgagaactacagtttacacattgctgagttaacaa

SEQ ID NO: 373637 - DNA, 75 bp, synthetic construct
  source 1..75: mol_type = other DNA
aggatgcctggcaaaatgcggcgtttgaagggattagtatggattgcctggggctggcctcggtgcaggcgacca

SEQ ID NO: 373638 - DNA, 75 bp, synthetic construct
  source 1..75: mol_type = other DNA
ttgaattaaaagacgatgagcaaatcgatatcaaaaaagagctgtatcaaattaaagactatattgccattgagc

SEQ ID NO: 373639 - DNA, 75 bp, synthetic construct
  source 1..75: mol_type = other DNA
ttacgacctgatcagccgcgatgcgtttccgaagcagatcccgcttggcggtaaaaatgtcgcctgggcacagtc

SEQ ID NO: 373640 - DNA, 75 bp, synthetic construct
  source 1..75: mol_type = other DNA
ttgaggaggttgttccacgatcaacctatctaatggttatgattgctttattttttatcgataccgttgcattta

SEQ ID NO: 373641 - DNA, 75 bp, synthetic construct
  source 1..75: mol_type = other DNA
gcggtcgcattaataatccgggaagcggttgaagaggctggcctggaggatatcgatacatccgttaatgccgat

SEQ ID NO: 373642 - DNA, 75 bp, synthetic construct
  source 1..75: mol_type = other DNA
atgcttgtcgctggatgcgcagcggcgtaaaacgcccgctcaggaaagcgactatacccattatgctttcagcgt

SEQ ID NO: 373643 - DNA, 75 bp, synthetic construct
  source 1..75: mol_type = other DNA
acggcgaacagtgtgaacggtgcggcagtgctattgagaaaacgatgctctcatcgcgcccattttattggtgcc

SEQ ID NO: 373644 - DNA, 75 bp, synthetic construct
  source 1..75: mol_type = other DNA
gttgctcaatattcatgccggagcacgcttgccgctattaagtgcggtgcgtgaagagcgcctgctgggcgtaaa

SEQ ID NO: 373645 - DNA, 75 bp, synthetic construct
  source 1..75: mol_type = other DNA
aaaacttgcacaggccgacaagcacaccaatgccggaatgctgcgcgaacgatttaattattactgcgagaaagt

SEQ ID NO: 373646 - DNA, 75 bp, synthetic construct
  source 1..75: mol_type = other DNA
tgctggtggattgcctgcaacctctcaacagtgggccacaggcatttaatgatatgcgtctggcactgacgcagc

SEQ ID NO: 373647 - DNA, 75 bp, synthetic construct
  source 1..75: mol_type = other DNA
atcaaggagtggcaaaaggctacccccattttgcgtcaggattggctgcagcaggtagagcattgggtcactgaa

SEQ ID NO: 373648 - DNA, 75 bp, synthetic construct
  source 1..75: mol_type = other DNA
gttttctgcacgcatggtggaaaggctctatctcggcgaacatgccgggaacgttttcccgtcggaggacaatac

SEQ ID NO: 373649 - DNA, 75 bp, synthetic construct
  source 1..75: mol_type = other DNA
gatgctcggacccaagcgttcggtatacttcgtaagcagatgcaatatcgtcttcatccaggctacataattgaa

SEQ ID NO: 373650 - DNA, 75 bp, synthetic construct
  source 1..75: mol_type = other DNA
ttctatctcgacaaagcgtgcgtggtttcccgcgatccgctcgacccggataacttcggcaagcagaacgtcggc

SEQ ID NO: 373651 - DNA, 75 bp, synthetic construct
  source 1..75: mol_type = other DNA
agcccggcggggatcaccgacaagctgattatcgacgccaccacgcctgtcgccccggacaaccgtggtcactac

SEQ ID NO: 373652 - DNA, 75 bp, synthetic construct
  source 1..75: mol_type = other DNA
aagcggatgcccgaagactagcgcttgatatgctgccgctctataaaaccaaaccggcgtttgcacatcacgaaa

SEQ ID NO: 373653 - DNA, 75 bp, synthetic construct
  source 1..75: mol_type = other DNA
tgatgtgtggtgccgttcagcgtggtacccgctggtatcacccgagaatgggcctgtttcaggctactggctggc

SEQ ID NO: 373654 - DNA, 75 bp, synthetic construct
  source 1..75: mol_type = other DNA
agccgttcgtcagcagaaacggatcactcaggtggaagaaaaagtcagccacgttgctgaaacagtcgagcaaat

SEQ ID NO: 373655 - DNA, 75 bp, synthetic construct
  source 1..75: mol_type = other DNA
atgatgaacaccgcaatttttaacgacaaagcatccatgaccagtattgagatagctgagctggtgggaagccga

SEQ ID NO: 373656 - DNA, 75 bp, synthetic construct
  source 1..75: mol_type = other DNA
aaaagaccctctcattgcctgctaatcaacccattgctttgacgaagttgagtttaaatatttccccggacgatc

SEQ ID NO: 373657 - DNA, 75 bp, synthetic construct
  source 1..75: mol_type = other DNA
aaatggttgccgcgatggctcttgaagccgttcgccaacagaaacggatcactcaggtggaagaaaaagtcatcc

SEQ ID NO: 373658 - DNA, 75 bp, synthetic construct
  source 1..75: mol_type = other DNA
atgccgcaatctggtgaacgcctatcagattcctacagacacccatgagttcatgacgccggacggattgttgtc

SEQ ID NO: 373659 - DNA, 75 bp, synthetic construct
  source 1..75: mol_type = other DNA
atgattaaaacaacgttactattttttgctactgcgctgtgtgaaattattggatgctttctgccctggttgtgg

SEQ ID NO: 373660 - DNA, 75 bp, synthetic construct
  source 1..75: mol_type = other DNA
gcgatcaacaaatggaacggcacgttaccgcagtatatgaccagtaataccgctgttccgtttgttccggtgaaa

SEQ ID NO: 373661 - DNA, 75 bp, synthetic construct
  source 1..75: mol_type = other DNA
ggtaacgtagggatcaaagtaaataagctgggggatgataaaggtatcggtgaagtagttggcgttggtcgctac

SEQ ID NO: 373662 - DNA, 75 bp, synthetic construct
  source 1..75: mol_type = other DNA
ttgcatccggcggcgagtgggcgggtttatgctgcttatggcggtgtttacgtctgcacggcgcttttatggctg

SEQ ID NO: 373663 - DNA, 75 bp, synthetic construct
  source 1..75: mol_type = other DNA
acaggctggaataccgaggtttacatcttcccgaccttcaaacaaatgaagacctacgatgagccgttcagcttt

SEQ ID NO: 373664 - DNA, 75 bp, synthetic construct
  source 1..75: mol_type = other DNA
aaacaacgacatcgactaaacgccataatcttacgcgtatcgcaatgtattgctcaattatgtatagcggcgcta

SEQ ID NO: 373665 - DNA, 75 bp, synthetic construct
  source 1..75: mol_type = other DNA
ttaatgccaaagtcacggcgaaccagaaaaccctgcaacgcgagcaggaagtaaaacagcgcgaagcggaagcca

SEQ ID NO: 373666 - DNA, 75 bp, synthetic construct
  source 1..75: mol_type = other DNA
cggaagtgcaggcggtaaacgccatgtacacccatggcctgctggcgattatctccaccaaaaaacgctacggcg

SEQ ID NO: 373667 - DNA, 75 bp, synthetic construct
  source 1..75: mol_type = other DNA
cgtaaacgcgaaatcgaagggccgttcggtgagtttaccgggcactactccggcgggcgtaacatgaccgtggtg

SEQ ID NO: 373668 - DNA, 75 bp, synthetic construct
  source 1..75: mol_type = other DNA
ctctgtcggtgtaatgcatttatcgtatgagattttgaaaaatataaatttgaatgcattaatttatgaccgaaa

SEQ ID NO: 373669 - DNA, 75 bp, synthetic construct
  source 1..75: mol_type = other DNA
ctttatgactggacgggggcgttgattgcgctttgcggcatgttgatcattgttgcgggctgggggcgcacgtag

SEQ ID NO: 373670 - DNA, 75 bp, synthetic construct
  source 1..75: mol_type = other DNA
ttgcatccagcagcaagtgggcgagtttatgcagcatatggaggtgtttatgtctgtacggcgctcctgtggctg

SEQ ID NO: 373671 - DNA, 75 bp, synthetic construct
  source 1..75: mol_type = other DNA
gtggtttcccgcgatccgctcgccccagataacttcggcaagcagaacgtcggcatctaccgcatggaagtgaag

SEQ ID NO: 373672 - DNA, 75 bp, synthetic construct
  source 1..75: mol_type = other DNA
taccgtcagctggtggcgaaaacgggtatgtcagatgcgaaatgccgcaatctggtgaacgcctatcaaattcca

SEQ ID NO: 373673 - DNA, 75 bp, synthetic construct
  source 1..75: mol_type = other DNA
caatcctggccctggcgctttccgcaggactggcacaggcagatgacgccgccccggcagcgggcagtacgctgg

SEQ ID NO: 373674 - DNA, 75 bp, synthetic construct
  source 1..75: mol_type = other DNA
ttccgccgaaaaacctgaacatgaatttcgaactgtcagacgaaatgaaagcactgttcaaagaaccgaatgaca

SEQ ID NO: 373675 - DNA, 75 bp, synthetic construct
  source 1..75: mol_type = other DNA
gttttgctcaacaaactgaatgaagagcaaaaaatgaatatgcgcatcatcagcgccaaagatcacggtgactct

SEQ ID NO: 373676 - DNA, 75 bp, synthetic construct
  source 1..75: mol_type = other DNA
gtgcctttctcttattacgacaaccagcaaaaagtggtgggttactctcaggattattccaacgccattgtcgag

SEQ ID NO: 373677 - DNA, 75 bp, synthetic construct
  source 1..75: mol_type = other DNA
ctactgcaaaacggcacattcgactttgagtgtggttctaccactaacaaccttgagcgccagaaacaagccgct

SEQ ID NO: 373678 - DNA, 75 bp, synthetic construct
  source 1..75: mol_type = other DNA
gccccggcagcgggcagtacgctggacaaaatcgccaaaaacggtgtgattgtcgtcggtcaccgtgaatcttca

SEQ ID NO: 373679 - DNA, 75 bp, synthetic construct
  source 1..75: mol_type = other DNA
cggaggacatgcgcacctatgccgacctgctcgataaagttgaggcggttctgttacccgcttatgcacagaaaa

SEQ ID NO: 373680 - DNA, 75 bp, synthetic construct
  source 1..75: mol_type = other DNA
aacgattggtgacctggtctacaaggtgctgacggataacccgaaactgtccgacggtaaggcgctgttccatgc

SEQ ID NO: 373681 - DNA, 75 bp, synthetic construct
  source 1..75: mol_type = other DNA
tatcttgaggagcaggtgggctttactgttgatggtgtcgcctggaaggtgcgcatagatgcaggtgtcgcggcc

SEQ ID NO: 373682 - DNA, 75 bp, synthetic construct
  source 1..75: mol_type = other DNA
agcaaaaagtggtgggttactcgcaggattactccaacgccattgttgaagcagtgaaaaagaaactcaacaaac

SEQ ID NO: 373683 - DNA, 75 bp, synthetic construct
  source 1..75: mol_type = other DNA
tggaatcgcaactgtagattcaattggtcaacgcaacagttatgtgaaaacatggggttgcggaggttttttgaa

SEQ ID NO: 373684 - DNA, 75 bp, synthetic construct
  source 1..75: mol_type = other DNA
attgctggaacagcgcatcagtgaactggaaacacgctgcaccccgacagcagaaactcaatctccaccagctat

SEQ ID NO: 373685 - DNA, 75 bp, synthetic construct
  source 1..75: mol_type = other DNA
taacgtctgaacataatctggctgacttttgctgttccgatcacgggatgaatgaatggctaaaaaagaaagcgt

SEQ ID NO: 373686 - DNA, 75 bp, synthetic construct
  source 1..75: mol_type = other DNA
tagttttagcgccgcggcacaggagctgcatcgcgttccttctgcggtcagctataccgtgcgtcagctggaaga

SEQ ID NO: 373687 - DNA, 75 bp, synthetic construct
  source 1..75: mol_type = other DNA
ctgtattaccctgaaaaatctactacaactgcatatcaagacccccccggcagacgaggaaaatactatccttct

SEQ ID NO: 373688 - DNA, 75 bp, synthetic construct
  source 1..75: mol_type = other DNA
agctgttcgccaacaaagacgtcttgagcaggtggaagagaaagtcacctacgttactgaaaccgtcgagaaaat

SEQ ID NO: 373689 - DNA, 75 bp, synthetic construct
  source 1..75: mol_type = other DNA
agaacaggttcgcaagcctatgacagagattgaaatggtcgctgcgttagcaatggaggccgttcgccagcagaa

SEQ ID NO: 373690 - DNA, 75 bp, synthetic construct
  source 1..75: mol_type = other DNA
aagacttgtagtgcctgactgggagtcctcagcaacgtgtatttccgctggattgtgtattggcatggtgccgac

SEQ ID NO: 373691 - DNA, 75 bp, synthetic construct
  source 1..75: mol_type = other DNA
tggttgatgcggtagcgcgtaatggcagttttagtgctgcggctcaggagttgcatcgcgttccttcagcggtca

SEQ ID NO: 373692 - DNA, 75 bp, synthetic construct
  source 1..75: mol_type = other DNA
gaatgccggtctgcgtgctgatatcgatgagcgagtggccaccgtttcgaaaaagctaaccggcagaacaatccg

SEQ ID NO: 373693 - DNA, 75 bp, synthetic construct
  source 1..75: mol_type = other DNA
ttaaacttagaactcgccaaaaaaccaccagaatgtttagaatacatcctagttcatgagttagttcacctactt

SEQ ID NO: 373694 - DNA, 75 bp, synthetic construct
  source 1..75: mol_type = other DNA
agaaggctggtatggatccgacagcagcaagcacaatttcaggctcagccgcgccagagtgaacgagaaatgtgt

SEQ ID NO: 373695 - DNA, 75 bp, synthetic construct
  source 1..75: mol_type = other DNA
gtctggttacatgcaggagctgatagaagaaggaagcgcacaagttgtcgagatggagcccggctccgccgtaat

SEQ ID NO: 373696 - DNA, 75 bp, synthetic construct
  source 1..75: mol_type = other DNA
ggcgtggacgtgattggtcaggtgcaggtcggcatcaccaccattaccgaagtggtgcaggtcaaaagaatgcag

SEQ ID NO: 373697 - DNA, 75 bp, synthetic construct
  source 1..75: mol_type = other DNA
accgataccgggcgcgcctggcttggaaaagcgttaccgacacgaaaaagcgatccgcgtaaagagctgctggaa

SEQ ID NO: 373698 - DNA, 75 bp, synthetic construct
  source 1..75: mol_type = other DNA
tgatcggctggtcgttaatgactggcatcgtgttcggtttgtgtctttctaccgccagtaccgtggtactgctgc

SEQ ID NO: 373699 - DNA, 75 bp, synthetic construct
  source 1..75: mol_type = other DNA
tgggcgagcgtgaaatcgcccgtactatgctggaactgctggaaacgccaccggcgggggaagtggggacggggg

SEQ ID NO: 373700 - DNA, 75 bp, synthetic construct
  source 1..75: mol_type = other DNA
gctgcccgcagtagcaggaatgatggaacagggcgatgtgggctttgccactcttgcagtcgatatggggatcac

SEQ ID NO: 373701 - DNA, 75 bp, synthetic construct
  source 1..75: mol_type = other DNA
gtaattgcggaattataacattccataaagcacataattatggagctgttttacaggcatatgcgttaatgacaa

SEQ ID NO: 373702 - DNA, 75 bp, synthetic construct
  source 1..75: mol_type = other DNA
ttgtccgggaatccagtggctggaaactgaatgcgataggcgagccttccacctccgattcgttcgtaagccatc

SEQ ID NO: 373703 - DNA, 75 bp, synthetic construct
  source 1..75: mol_type = other DNA
atccgggcagtagatgcccgtaatattgaaatggcacgattcgatctttctggcggacccgccttcgctagccag

SEQ ID NO: 373704 - DNA, 75 bp, synthetic construct
  source 1..75: mol_type = other DNA
tcgtacccagatgtctgcggcgcatactcctgagcaaattacgcgtgcggtagaagcgttcacgcgtattggtaa

SEQ ID NO: 373705 - DNA, 75 bp, synthetic construct
  source 1..75: mol_type = other DNA
cgtctgtgggcgaacgcgcgccagttccgtgagcaaatgtcggcggcgggctttaccctggcgggagccgatcat

SEQ ID NO: 373706 - DNA, 75 bp, synthetic construct
  source 1..75: mol_type = other DNA
tgaaccacgcgtctattattgatggtgtgcgtctgtgcaaagccaaacgttatcgctatgccaacaacaatatgc

SEQ ID NO: 373707 - DNA, 75 bp, synthetic construct
  source 1..75: mol_type = other DNA
ggcgcgaatcaggtagtgatgggtgaacgtgaaattgcccgtactatgctggaactgctggaaacgccaccggcg

SEQ ID NO: 373708 - DNA, 75 bp, synthetic construct
  source 1..75: mol_type = other DNA
ctgctgggtatggcgctctccgccgtgctgggctggtcgttaatgaccggtatcgtgttcggtttatgtctttcc

SEQ ID NO: 373709 - DNA, 75 bp, synthetic construct
  source 1..75: mol_type = other DNA
ccaccgcgcggcgcatgatacgctgccattgcgcgatgcgtttgcggtgctatttttcgtctccgttgggatgct

SEQ ID NO: 373710 - DNA, 75 bp, synthetic construct
  source 1..75: mol_type = other DNA
tgagcggtattctctgctcagcgtggttagtgaaacgctttgggacgcgtaatgtcatccttgtcacgatgtcct

SEQ ID NO: 373711 - DNA, 75 bp, synthetic construct
  source 1..75: mol_type = other DNA
actgttgccgggtcatcactgtctgcatgctgcctttcgaatggtactcccctgattgcgtccggtaatgtgggg

SEQ ID NO: 373712 - DNA, 75 bp, synthetic construct
  source 1..75: mol_type = other DNA
attatcacattggctatgactcaggtgcagaatcgcaatacgaaagcgatgtagaggctatccgcgccgctggaa

SEQ ID NO: 373713 - DNA, 75 bp, synthetic construct
  source 1..75: mol_type = other DNA
ctggcctgctggaagtggtatgggccgttggcctgaaatatacccacggttttagtcgtttgacgccaagtgtta

SEQ ID NO: 373714 - DNA, 75 bp, synthetic construct
  source 1..75: mol_type = other DNA
cgattgctcgtttgtatgatgctgaagatggcacccaacacttcacccattttgccgacggcaaatgcgtgctga

SEQ ID NO: 373715 - DNA, 75 bp, synthetic construct
  source 1..75: mol_type = other DNA
ccggcagcggtcgtaaaactcggttccacagaacaagtatcccgtgtgctgaattttatgaatgcgcacaaaatt

SEQ ID NO: 373716 - DNA, 75 bp, synthetic construct
  source 1..75: mol_type = other DNA
gaacggcaccaacatgtacttcgtctacgactacaacgtcgttgactgtaagccggaagaggaaatcgacaagta

SEQ ID NO: 373717 - DNA, 75 bp, synthetic construct
  source 1..75: mol_type = other DNA
agcattgtcaaaccgttatcaagtggattgatagaaaatcagaaagaaaaggaatttgttcaaacaaatatggtt

SEQ ID NO: 373718 - DNA, 75 bp, synthetic construct
  source 1..75: mol_type = other DNA
aacccgttggtcaatattcatctgcaaggacgtttcgatacctatccaaaacgtcgcggcatcacgcgcgttaaa

SEQ ID NO: 373719 - DNA, 75 bp, synthetic construct
  source 1..75: mol_type = other DNA
actggttacccttattaatggttgatggtcacggttttagccccacttccggctcactgatttatgccggtttta

SEQ ID NO: 373720 - DNA, 75 bp, synthetic construct
  source 1..75: mol_type = other DNA
tgggttatgaggatgggcgtgacaaaacgataattgcagtaatgaaagctatcagagccgctggaattaaagaga

SEQ ID NO: 373721 - DNA, 75 bp, synthetic construct
  source 1..75: mol_type = other DNA
ctattgaactggatattgactggcccgaatcgaatgacgacttttggaaagatggtgaagaaggtgcttatgcga

SEQ ID NO: 373722 - DNA, 75 bp, synthetic construct
  source 1..75: mol_type = other DNA
taaaaataaaattgactggagaaaagacaataacgaaatattctattcaacaataaaaatgcctgatactataaa

SEQ ID NO: 373723 - DNA, 75 bp, synthetic construct
  source 1..75: mol_type = other DNA
cagagctgattgcggcggcaaaggcgggaatggactctcatggttttgggatggcttcggtgcgctttatctgcg

SEQ ID NO: 373724 - DNA, 75 bp, synthetic construct
  source 1..75: mol_type = other DNA
aggagctgacggtgtatacgctgaataatgagctggaaaatctgctgaccaacgtggtgaatcaggcgcaacagg

SEQ ID NO: 373725 - DNA, 75 bp, synthetic construct
  source 1..75: mol_type = other DNA
gccggtcacctggatccagcccgcgcagaaagcgaaggcgctgaatatggggtatcaggtgatcgacagcgccag

SEQ ID NO: 373726 - DNA, 75 bp, synthetic construct
  source 1..75: mol_type = other DNA
aaagtgatgctcgacagcgtgccggtcgatccgaatatgctcaaccagttccagagtacgatgccgcaggtgaag

SEQ ID NO: 373727 - DNA, 75 bp, synthetic construct
  source 1..75: mol_type = other DNA
aagctggttgcgctggtcgataaagcgcagggtaacccactcacccagcgtattcgcggcgtgcggcaagtgata

SEQ ID NO: 373728 - DNA, 75 bp, synthetic construct
  source 1..75: mol_type = other DNA
aacggcgatatcgcccatgacgtgcgccaccagctgctggcaagcccgtcggtgctctacaccgctaccgggatc

SEQ ID NO: 373729 - DNA, 75 bp, synthetic construct
  source 1..75: mol_type = other DNA
cgtaattgccacccatgtaaacaagattgtgcgcagctatattcctgatttgtttaactatgatgacattacgca

SEQ ID NO: 373730 - DNA, 75 bp, synthetic construct
  source 1..75: mol_type = other DNA
atggcggaatggggagccatgatcgccgacggtatgcaggtcatttttgatcaatggtggattgccgccgctccc

SEQ ID NO: 373731 - DNA, 75 bp, synthetic construct
  source 1..75: mol_type = other DNA
tgctggctggtcatattttgccattgtgcctgccatctgccattgtccgtctggcgctggatttagcgggtatca

SEQ ID NO: 373732 - DNA, 75 bp, synthetic construct
  source 1..75: mol_type = other DNA
gtttcgtccgcagaaggttctttggaaagggattttttgcccattgcttgctgatcttgttctcattgtagggct

SEQ ID NO: 373733 - DNA, 75 bp, synthetic construct
  source 1..75: mol_type = other DNA
agttccagagcacgatgccgcaggtgaaggagcagatgaaagctgcagggaaagacccggtgttgttggtgccgc

SEQ ID NO: 373734 - DNA, 75 bp, synthetic construct
  source 1..75: mol_type = other DNA
agcatactttactggagatactaaaactgcagcgttgaaggtttcgttttttggccccttctatggtggctataa

SEQ ID NO: 373735 - DNA, 75 bp, synthetic construct
  source 1..75: mol_type = other DNA
cagtgattatcttgctgctgcagagatgatgggcatccgcggctggcgtctgcttattggtcatattttgccatt

SEQ ID NO: 373736 - DNA, 75 bp, synthetic construct
  source 1..75: mol_type = other DNA
agatcatatcctgctggcggccgatgtgcgcctggcgctgcggcgcagtatcacccatccgttcgttcgcaagca

SEQ ID NO: 373737 - DNA, 75 bp, synthetic construct
  source 1..75: mol_type = other DNA
gctctttcccttcggctgggcaaaattgctgtggcgtttgaaagtcagcggtgtgcgaactgcgcgagtgccgct

SEQ ID NO: 373738 - DNA, 75 bp, synthetic construct
  source 1..75: mol_type = other DNA
actatagactttattcttgatttcacgaataagacaacagaacattttgctcaatctcgcttaggtaaaagtgaa

SEQ ID NO: 373739 - DNA, 75 bp, synthetic construct
  source 1..75: mol_type = other DNA
ttaaagctaaatttaatgaaaaccctcaagctaattttgagtggttttgctacttgttgttctgccaagagttcg

SEQ ID NO: 373740 - DNA, 75 bp, synthetic construct
  source 1..75: mol_type = other DNA
ggcggaagggttgtttaaagaagagcgcattataacgtctgcgcagcaagcagatatcactgtggctgatggaag

SEQ ID NO: 373741 - DNA, 75 bp, synthetic construct
  source 1..75: mol_type = other DNA
tgtcggtgaaaatggtcgtggttcccatgaatactgcgatgtgatgggccgggtcgatattatcaccggcacgct

SEQ ID NO: 373742 - DNA, 75 bp, synthetic construct
  source 1..75: mol_type = other DNA
aataattaagccaacatcaacgatttcctacgttgctgttaatccattaaacaacaaagaaagcgattatgaagt

SEQ ID NO: 373743 - DNA, 75 bp, synthetic construct
  source 1..75: mol_type = other DNA
gataaagaaaccctaaatcgtgagtttaaaaggctggatcgctgtatcaaggcactagggaagcaagaaggtaaa

SEQ ID NO: 373744 - DNA, 75 bp, synthetic construct
  source 1..75: mol_type = other DNA
tgcatttattgaagtgatgaagcaactggaacgtccagtttctatgaagttgacaaccatcaataatatgaactc

SEQ ID NO: 373745 - DNA, 75 bp, synthetic construct
  source 1..75: mol_type = other DNA
agtgtgccggaggtgctgacagcactgaagaatctaaaatacagatgtcgattgatgctgttctgaagcataaaa

SEQ ID NO: 373746 - DNA, 75 bp, synthetic construct
  source 1..75: mol_type = other DNA
ggcattggaaaaaatttttcttgagaattttaaaaatgcagactcgaaagtgttggaaagttggcttctcttttt

SEQ ID NO: 373747 - DNA, 75 bp, synthetic construct
  source 1..75: mol_type = other DNA
atagagttcaaagacagaagtattgaaattgacagacgacattgtatagaacttctacatgagaatctagttcag

SEQ ID NO: 373748 - DNA, 75 bp, synthetic construct
  source 1..75: mol_type = other DNA
cactaatatagattcgtggcttacgctgtttcctgcgtataccgatgtgatttaccgataccctaaatcgactga

SEQ ID NO: 373749 - DNA, 75 bp, synthetic construct
  source 1..75: mol_type = other DNA
ggcgcaaattcagcgcgatcaggttgaagactatgcccgccgtaaaggtatgagcgtctccgatgttgagcgctg

SEQ ID NO: 373750 - DNA, 75 bp, synthetic construct
  source 1..75: mol_type = other DNA
gcgcgacgacctcaaaagcgcacacggcggtgaaaatagagcagaactacagcggcccgacggtgtatgtgcaga

SEQ ID NO: 373751 - DNA, 75 bp, synthetic construct
  source 1..75: mol_type = other DNA
ggtggtcaaatcggcgcgcgtcatgaaacaggcggtggcctatctcgaaccgtttattgaagccagcaaagagca

SEQ ID NO: 373752 - DNA, 75 bp, synthetic construct
  source 1..75: mol_type = other DNA
gagtatctccatgagcgtgtgcgtaaagtctactggggctatgcgccgaacgagaacctcagcaacgaagagctg

SEQ ID NO: 373753 - DNA, 75 bp, synthetic construct
  source 1..75: mol_type = other DNA
ttatgatctccggcaccatcaccgacgcctccgggcgcacgctctccgggcagaccaccgaagcgttttacaact

SEQ ID NO: 373754 - DNA, 75 bp, synthetic construct
  source 1..75: mol_type = other DNA
cattgcgccacgccgacgcgctgacttttggcctgaactgtgcgctggggccagatgaactgcgccagtatgtgc

SEQ ID NO: 373755 - DNA, 75 bp, synthetic construct
  source 1..75: mol_type = other DNA
cgccagagaagtgaatgctgatctgattggcctctcgggtctgatcacgccgtcgctggacgagatggttaacgt

SEQ ID NO: 373756 - DNA, 75 bp, synthetic construct
  source 1..75: mol_type = other DNA
gcggaaatcaactttgcggcggcgaaactggcgcgcgcctgtgctgatgagtggaccgcgcgcacgccggagaaa

SEQ ID NO: 373757 - DNA, 75 bp, synthetic construct
  source 1..75: mol_type = other DNA
tgccagcggaaaaaatcctccgcactgccaaagaggtgaatgctgatttgattggtctttcggggctgatcacgc

SEQ ID NO: 373758 - DNA, 75 bp, synthetic construct
  source 1..75: mol_type = other DNA
ggatgtgatcctcaaccgtcgcgacgatggcaccgagcgtttactggagcttgccgagaaatatcgcggcagcaa

SEQ ID NO: 373759 - DNA, 75 bp, synthetic construct
  source 1..75: mol_type = other DNA
aggccgattttcgcggcgagcgttttgccgactggccgtgcgatctcaaaggcaacaacgacctgctggtgctca

SEQ ID NO: 373760 - DNA, 75 bp, synthetic construct
  source 1..75: mol_type = other DNA
ggctaaggagatggagcgtcaaggcttcaccattccactcctgattggcggcgcgactacttcgaaagcgcacac

SEQ ID NO: 373761 - DNA, 75 bp, synthetic construct
  source 1..75: mol_type = other DNA
caaagcgctggtggaaggtggtgcggatctgatcctgattgaaaccgttttcgacacccttaacgccaaagcggc

SEQ ID NO: 373762 - DNA, 75 bp, synthetic construct
  source 1..75: mol_type = other DNA
cgatgacggtgttgtgtccaggatagatatagatatacagcgaaccggtatcaatgaactgggaaacagcattgt

SEQ ID NO: 373763 - DNA, 75 bp, synthetic construct
  source 1..75: mol_type = other DNA
cgtcccgatgggatggtggggggatacctggcctgaggtacagaatgaccgttacggctcccgactgtggctgct

SEQ ID NO: 373764 - DNA, 75 bp, synthetic construct
  source 1..75: mol_type = other DNA
ttttgcagcatcaggagatgttattggtactgggaatcagaatgtcacgggctctcttaatagctctacctgtgc

SEQ ID NO: 373765 - DNA, 75 bp, synthetic construct
  source 1..75: mol_type = other DNA
attcgatacctgcaacactgcacaatcggggagttatgccaacgtgtgcaaacagcaggttatcaataaagcaat

SEQ ID NO: 373766 - DNA, 75 bp, synthetic construct
  source 1..75: mol_type = other DNA
tccggcggttcctccgggcagttcgatgcgttgtacgagaagtataaaattttcgacacctgcaacactgcgcaa

SEQ ID NO: 373767 - DNA, 75 bp, synthetic construct
  source 1..75: mol_type = other DNA
ctctggcgtcgtgatggaccagtaatgatttcttttgatgatctgtggagtgcgataacgcatggcggacagtga

SEQ ID NO: 373768 - DNA, 75 bp, synthetic construct
  source 1..75: mol_type = other DNA
acaaacctgctttaatgcggcgagtgcaagatatttatcgatgaatgaattactggcagcgttagccgtagctgc

SEQ ID NO: 373769 - DNA, 75 bp, synthetic construct
  source 1..75: mol_type = other DNA
cgccggagtggctatcaactggcgctggcaacctcttcatcttaccaggtgatcgatgctgtactgacaaaactc

SEQ ID NO: 373770 - DNA, 75 bp, synthetic construct
  source 1..75: mol_type = other DNA
gcggcatccggtcgtcaggcccgactccgacaggcagttgctggcgcacccgccagtctccgccgaacccgctgg

SEQ ID NO: 373771 - DNA, 75 bp, synthetic construct
  source 1..75: mol_type = other DNA
atgaagaagatcgcaatgattattgcaatgctaacggcctctgcatcaagttttgcagcatcaggagatgttatt

SEQ ID NO: 373772 - DNA, 75 bp, synthetic construct
  source 1..75: mol_type = other DNA
gatgtgacgttaccagcagttactactgctgattatcaagctgcaactcaatttggcgttattggtaattcatct

SEQ ID NO: 373773 - DNA, 75 bp, synthetic construct
  source 1..75: mol_type = other DNA
cggttgttgtagccgaggattttcaacagccgtgctttaactctgcggtagccaggtatgcatcacttgagcagt

SEQ ID NO: 373774 - DNA, 75 bp, synthetic construct
  source 1..75: mol_type = other DNA
gtgagcagcaaagtggaacaactgcgtgcgcagttaaatgtacgtattctggtgctggatggcggtatgggcact

SEQ ID NO: 373775 - DNA, 75 bp, synthetic construct
  source 1..75: mol_type = other DNA
gtgatgactgtcagtgcgagcgtattgattccgggtcaagatatttacccaattagcgccaaagtcttccgttcg

SEQ ID NO: 373776 - DNA, 75 bp, synthetic construct
  source 1..75: mol_type = other DNA
gtgcgtaaccagttacgtctgaatggtgtcgagttgcttgataaagaaaccacgcgtaaggacgttccatccttg

SEQ ID NO: 373777 - DNA, 75 bp, synthetic construct
  source 1..75: mol_type = other DNA
tgaaggacggtacggggaaaccggtaccggagtgcaccatagagctgaaagccgtgagaaccagtgagacggtgg

SEQ ID NO: 373778 - DNA, 75 bp, synthetic construct
  source 1..75: mol_type = other DNA
tgatgaagccggaaataacgtggttaacctgctggcaaaactgaccagtaaggatattgaaacagcggctgcggg

SEQ ID NO: 373779 - DNA, 75 bp, synthetic construct
  source 1..75: mol_type = other DNA
attgatctacctggtacgttgacccgagctatggaaaacggcattgatccgatagaagcattttcacgcctcact

SEQ ID NO: 373780 - DNA, 75 bp, synthetic construct
  source 1..75: mol_type = other DNA
agaaatcaaatgagttatgaacgtcagctcagcatgatggcgaacacggcgttcagtgatggtggtctggaaggc

SEQ ID NO: 373781 - DNA, 75 bp, synthetic construct
  source 1..75: mol_type = other DNA
ctatcagagctgctggaattaaagagaagaatttcgatgaagcaaatatacatgcttcgcaacgaagcaatcaga

SEQ ID NO: 373782 - DNA, 75 bp, synthetic construct
  source 1..75: mol_type = other DNA
ttcccgcacgccgacgacatcaccatgctgggcggtcactcctctcatagctatcagaacggcaccaacatgtac

SEQ ID NO: 373783 - DNA, 75 bp, synthetic construct
  source 1..75: mol_type = other DNA
ccacaatccgctcaacaaaatcatctgcgaagaaaccattcgcctcggcggttcgatggtgcaccaccacggtat

SEQ ID NO: 373784 - DNA, 75 bp, synthetic construct
  source 1..75: mol_type = other DNA
atgctggcaatgtcgtgaccagtgatatcgcttatgcctttggcacgccgccaagcgacgccgaagcgattaaag

SEQ ID NO: 373785 - DNA, 75 bp, synthetic construct
  source 1..75: mol_type = other DNA
ggcagaattgatggcagattgccagatctcttcggtatatctggcgctttctggtaagcacatcagctgccagaa

SEQ ID NO: 373786 - DNA, 75 bp, synthetic construct
  source 1..75: mol_type = other DNA
acgaagagatattgcagttgcaggaaaagcttcgccaacaaggtgtgaaacatcacctggcggcgggcatcgtat

SEQ ID NO: 373787 - DNA, 75 bp, synthetic construct
  source 1..75: mol_type = other DNA
cagacggctgtttacgattcgatggcaaaactccttgaaggctttggtgtcgggaaactggttgcagaccaacag

SEQ ID NO: 373788 - DNA, 75 bp, synthetic construct
  source 1..75: mol_type = other DNA
atgcgtttacctatcttcctcgatacagaccccggcattgacgatgccgttgccattgccgccgcgatttttacc

SEQ ID NO: 373789 - DNA, 75 bp, synthetic construct
  source 1..75: mol_type = other DNA
tattcgccgtctggtgatcatgggcggttctgccggtcgcggcaactgcacaccaaacgccgagtttaatatcgc

SEQ ID NO: 373790 - DNA, 75 bp, synthetic construct
  source 1..75: mol_type = other DNA
ggtcgttgatattgacggttgcctgggtaaacctgccaatgtacaggtggcgctggatctggatgtgaaaggttt

SEQ ID NO: 373791 - DNA, 75 bp, synthetic construct
  source 1..75: mol_type = other DNA
cctttgacgaacagggacaggccgatacccgcgcacggaaaatcgagatttgccgtcgggcgtacaaaatcctca

SEQ ID NO: 373792 - DNA, 75 bp, synthetic construct
  source 1..75: mol_type = other DNA
gatccgcgcaaagccgccgtcgaagccgctattgcccgtgccaaagcgcgcaagctggaacagcaacagactaac

SEQ ID NO: 373793 - DNA, 75 bp, synthetic construct
  source 1..75: mol_type = other DNA
agaagaacaggttgatccgcgcaaagcggcagttgccgcggctattgcccgcgttcaggccaaaaaagccgccca

SEQ ID NO: 373794 - DNA, 75 bp, synthetic construct
  source 1..75: mol_type = other DNA
ttgatccgcgcaaagcggcagttgctgcggctattgcccgcgttcaggccaaaaaagccgctcagcaaaaggttg

SEQ ID NO: 373795 - DNA, 75 bp, synthetic construct
  source 1..75: mol_type = other DNA
caggctaatgcggaaccagaagaacaggttgatccacgcaaagccgccgtcgaagcggctattgcccgtgccaaa

SEQ ID NO: 373796 - DNA, 75 bp, synthetic construct
  source 1..75: mol_type = other DNA
cgcaccctgccggaaggtcagcgcgcgggtgatgtggattttaaattcatatccggcctcaatgactttaaaacc

SEQ ID NO: 373797 - DNA, 75 bp, synthetic construct
  source 1..75: mol_type = other DNA
caactgctgcatttctggaatgtggatattccgctcgcccagggcgctgctgtaccgctggtacgcgcgccgcgt

SEQ ID NO: 373798 - DNA, 75 bp, synthetic construct
  source 1..75: mol_type = other DNA
tcatgtgcggtttggatgtcaccaatcaggcaatattaactcctgactatctctctacactgccgcagttaaacc

SEQ ID NO: 373799 - DNA, 75 bp, synthetic construct
  source 1..75: mol_type = other DNA
actaccgtagcggcagtatgcaaagcggtctgcgaatgcacgatctctgcgccatcgcctggctggtgcgcccgg

SEQ ID NO: 373800 - DNA, 75 bp, synthetic construct
  source 1..75: mol_type = other DNA
atgaatggcttaactggccgtcaatatttgccaatacgggtttctttcgcccggatgaagcgcaccagccgcatt

SEQ ID NO: 373801 - DNA, 75 bp, synthetic construct
  source 1..75: mol_type = other DNA
tttccaccactgttttcatcaacgtgacctattggctggaagtattgctctcttttctggttccctcatcttccg

SEQ ID NO: 373802 - DNA, 75 bp, synthetic construct
  source 1..75: mol_type = other DNA
atgagcaatcccagcggcgtaacattatggcagcagcctgtagagtttgaaccgccacgcgtggcgattgtggta

SEQ ID NO: 373803 - DNA, 75 bp, synthetic construct
  source 1..75: mol_type = other DNA
caccagccgcatttcagcgatctgttcgggcaaatcattaatgccggacaaggggaagggcgctattcggaatta

SEQ ID NO: 373804 - DNA, 75 bp, synthetic construct
  source 1..75: mol_type = other DNA
ccgggagaaattcatcactacggtcgtcatccggaggctcgtgaatggtatcaccagtgggtttactttcgtccg

SEQ ID NO: 373805 - DNA, 75 bp, synthetic construct
  source 1..75: mol_type = other DNA
atggctgaagcgcaaaatgatcccctgctgccgggttactcgtttaacgcccatctggtggcgggtttaacgccg

SEQ ID NO: 373806 - DNA, 75 bp, synthetic construct
  source 1..75: mol_type = other DNA
tgggcgtgaagaggataaatttaattgctatggcattccggtggtgaaaggtccggtgcttggtttgccacttgt

SEQ ID NO: 373807 - DNA, 75 bp, synthetic construct
  source 1..75: mol_type = other DNA
tgctatggtattccggttgtgaaaggtccggtacttggtttgcctctggtcgaggaaaaatgtctggcgtggatg

SEQ ID NO: 373808 - DNA, 75 bp, synthetic construct
  source 1..75: mol_type = other DNA
gccgctggcagtttgatgatgacaaactcaatacactacatcatttaggtgctggcacgtttgttaccagcggca

SEQ ID NO: 373809 - DNA, 75 bp, synthetic construct
  source 1..75: mol_type = other DNA
atgtctaaaggttttgtattgcttggtgataataccacacatggtggtaaagttatttctgcatcttcaaccatg

SEQ ID NO: 373810 - DNA, 75 bp, synthetic construct
  source 1..75: mol_type = other DNA
ttatgtcagggcgataaagttcgtaaatatggcgcaggcattggctctgccagtcaggctatccctattggcgag

SEQ ID NO: 373811 - DNA, 75 bp, synthetic construct
  source 1..75: mol_type = other DNA
catgtgcattcccataacctcaccagcaatgtcattgctatctttcatcatgatgatgccggatatcagtcagag

SEQ ID NO: 373812 - DNA, 75 bp, synthetic construct
  source 1..75: mol_type = other DNA
acatcccaaccatacggggcgactggcatttctgatcacctctgatgaagaagccagtgcccacaacggtacggt

SEQ ID NO: 373813 - DNA, 75 bp, synthetic construct
  source 1..75: mol_type = other DNA
ggcgtttaaacactgggatttagctgtgaatgcctttgagcacctctctaagcgtgtagagatgctctgtaagcg

SEQ ID NO: 373814 - DNA, 75 bp, synthetic construct
  source 1..75: mol_type = other DNA
tccgtgtctccgtaccgacgatggacgcggcagaagcgttcaaactcatcaaacagcaggttaacgtaccgctgg

SEQ ID NO: 373815 - DNA, 75 bp, synthetic construct
  source 1..75: mol_type = other DNA
acgtctttctggcggtagagtcttatcgtctgctggcaaagcagatcgatcagccgctgcatcttgggatcaccg

SEQ ID NO: 373816 - DNA, 75 bp, synthetic construct
  source 1..75: mol_type = other DNA
tcgaagacctaaaggaatattccatatcgaaggggtatatccttgagttccaccgatacaagaaggtttttacgc

SEQ ID NO: 373817 - DNA, 75 bp, synthetic construct
  source 1..75: mol_type = other DNA
caaaaagaaatacaggaaaagttcagagagcagaacgaaaagttgagagaactactaaacaaaaaacccacctga

SEQ ID NO: 373818 - DNA, 75 bp, synthetic construct
  source 1..75: mol_type = other DNA
tagaagatattgaatcggacgttcgctatgtaggggatggccttgttgaactcgcacaacgcttaggcgctgcta

SEQ ID NO: 373819 - DNA, 75 bp, synthetic construct
  source 1..75: mol_type = other DNA
tttgtacagtttaacttccgctttagcaccgaacttactgatgagatgatcaaagcacaggtgcttgccctgctt

SEQ ID NO: 373820 - DNA, 75 bp, synthetic construct
  source 1..75: mol_type = other DNA
cgccgtgaacggctggattactgcctggttggcgaaccgtcgagtatcgaagtggtcggtgatgtagtgaaaaat

SEQ ID NO: 373821 - DNA, 75 bp, synthetic construct
  source 1..75: mol_type = other DNA
attcgggcgcggcgcagcagatatgaaaggttcactggcggcgatggtcgtggcggcagagcgctttgtcgcaca

SEQ ID NO: 373822 - DNA, 75 bp, synthetic construct
  source 1..75: mol_type = other DNA
cggacggtaagttagttgtggttgatggttgtggctgtgaatgtggttgtaaagttatagcaggaatgcccgata

SEQ ID NO: 373823 - DNA, 75 bp, synthetic construct
  source 1..75: mol_type = other DNA
cctttaacggtcgtgctgttgtcgtcgatggttgcaaatgcctgtgcggttgtaaggttatttcgagtgctaaga

SEQ ID NO: 373824 - DNA, 75 bp, synthetic construct
  source 1..75: mol_type = other DNA
caaagcgcaggtgcttgccctgcttgaaaaacatcaactgcgttatacggtggattggtggctttccgggcagcc

SEQ ID NO: 373825 - DNA, 75 bp, synthetic construct
  source 1..75: mol_type = other DNA
tccctccacaacttcttactggtccggcactggctgcggggatcggtttttgcaccacgatgggcgctttctgct

SEQ ID NO: 373826 - DNA, 75 bp, synthetic construct
  source 1..75: mol_type = other DNA
ggaactctcaggcttaaaggtaaactgacgccggcgttattacagacacttatccgcgaaataaaagggagcagg

SEQ ID NO: 373827 - DNA, 75 bp, synthetic construct
  source 1..75: mol_type = other DNA
cattttttctctggtgaggcgatttcaccaggtattcactgactggcctctttccggggaatattcctgcgtgca

SEQ ID NO: 373828 - DNA, 75 bp, synthetic construct
  source 1..75: mol_type = other DNA
gcaccgttcatcggcaccgacgcatttcaggaggttgatgtcctgggattgtcgttagcctgtaccaaacacagc

SEQ ID NO: 373829 - DNA, 75 bp, synthetic construct
  source 1..75: mol_type = other DNA
tctatattatttgtcttaaagcggtcagtgggcttgggtattttatctttgtatatgctattttttctgctttag

SEQ ID NO: 373830 - DNA, 75 bp, synthetic construct
  source 1..75: mol_type = other DNA
cagaaaatacgacaggttaaaaaatgacagctataaaaggaaagcggaaaccgcaacgcaatgtactctaccttc

SEQ ID NO: 373831 - DNA, 75 bp, synthetic construct
  source 1..75: mol_type = other DNA
aacactctggcatgagtgggtccagttcaggcaggcattgcgaaaaccaattcgaacggagcagggcgctaacgg

SEQ ID NO: 373832 - DNA, 75 bp, synthetic construct
  source 1..75: mol_type = other DNA
atgttgttcccgcccttcgggcgggggcggcggcgcttttcagttatgaggggggtacagtgctgtgtttgtgtg

SEQ ID NO: 373833 - DNA, 75 bp, synthetic construct
  source 1..75: mol_type = other DNA
aatacaccgtccgacagtctgtgctgtgagctggttctgccggccggaactctcaggctgaaaggtaaactgacg

SEQ ID NO: 373834 - DNA, 75 bp, synthetic construct
  source 1..75: mol_type = other DNA
tcactgtcgtacccgcgcatttctgcgcagaccggtgtcagcaaaaccgccattttttctctggtgaggcgattt

SEQ ID NO: 373835 - DNA, 75 bp, synthetic construct
  source 1..75: mol_type = other DNA
tgaatttctcgctgccacaaaaatgcctgccacctgcacgctgaaagggctgggcgcagttgaagcagattatcc

SEQ ID NO: 373836 - DNA, 75 bp, synthetic construct
  source 1..75: mol_type = other DNA
gtgctaccggcagaactggtgtgtgcatcgccacatctggccctggcgcaaccaacctgatcaccggtctggcag

SEQ ID NO: 373837 - DNA, 75 bp, synthetic construct
  source 1..75: mol_type = other DNA
aagatatccagttagccagcggcgatctggaaccgtggttcaccaccgttgaaaacgaagtgactttcccacatg

SEQ ID NO: 373838 - DNA, 75 bp, synthetic construct
  source 1..75: mol_type = other DNA
tggttgagtatgcgtggaaaaaatggctggcggatgaaaacttcgcgcatcaggaagtttcctctatgcaaaaac

SEQ ID NO: 373839 - DNA, 75 bp, synthetic construct
  source 1..75: mol_type = other DNA
ttacccaatccaccgtgtattcattgatggcggtgttattggtggcctttctggagtcgctggcgctggtcggtt

SEQ ID NO: 373840 - DNA, 75 bp, synthetic construct
  source 1..75: mol_type = other DNA
gagtttaaatggttgctgctggcgacggcggtatttttgtgggttgggggctggctgtgctggcggttatggcgc

SEQ ID NO: 373841 - DNA, 75 bp, synthetic construct
  source 1..75: mol_type = other DNA
cattgcatcgctggtcatttctgaagaaaaacaaagcactacttgataaaactgaacatgcgttgcatcaacaca

SEQ ID NO: 373842 - DNA, 75 bp, synthetic construct
  source 1..75: mol_type = other DNA
cctttattgatcgggtaaatgttggctttgccaaagatgcaatgaaactggatattggattatcagagtcggcat

SEQ ID NO: 373843 - DNA, 75 bp, synthetic construct
  source 1..75: mol_type = other DNA
atggctaatataacccaatacgataatccgctgttgaattccgcaattcaaaaatcgtggaaacgtttagtaccc

SEQ ID NO: 373844 - DNA, 75 bp, synthetic construct
  source 1..75: mol_type = other DNA
ggtggatggcggagatctcaacggtatttctggccagcgcaattatcatcggcctgatcgcccgcatgagcgaag

SEQ ID NO: 373845 - DNA, 75 bp, synthetic construct
  source 1..75: mol_type = other DNA
ttcgccgaaagatgctttctttgatgatccgaaatcggagcgtgcaaaagacttcctcgcgaaaatactgcatta

SEQ ID NO: 373846 - DNA, 75 bp, synthetic construct
  source 1..75: mol_type = other DNA
gaccgactgctcaaccgaagtgaaaaaaggtgaagtagtggtggtttgtgggccgtcaggctccggcaaatcaac

SEQ ID NO: 373847 - DNA, 75 bp, synthetic construct
  source 1..75: mol_type = other DNA
agtgtgggttttaacagccatattggcagctcaggcgagcgtgcacgcgtggcagtggcgggtaactcgactcga

SEQ ID NO: 373848 - DNA, 75 bp, synthetic construct
  source 1..75: mol_type = other DNA
ggcaattcttagcgcggtactggatctggatatcgaagggatcgtcctgaagcaaggcgcgcctacggatctgcc

SEQ ID NO: 373849 - DNA, 75 bp, synthetic construct
  source 1..75: mol_type = other DNA
aatgcgatgttctgagccgacagggaaatgcaaaaatcacctttattgaatgcaagggttataagccctattcga

SEQ ID NO: 373850 - DNA, 75 bp, synthetic construct
  source 1..75: mol_type = other DNA
acgaaggaatgaccatgatggtggtgacccacgaaatgggctttgcccgtgatggtggtgacccacgaaatgggc

SEQ ID NO: 373851 - DNA, 75 bp, synthetic construct
  source 1..75: mol_type = other DNA
cgcgtgacctgtacgccgcgctcggtgaagagctggaaaacggcgcgtgggccgtgcgtctttactacaaaccat

SEQ ID NO: 373852 - DNA, 75 bp, synthetic construct
  source 1..75: mol_type = other DNA
atgccgtggctggtggggactgcgctgatgcactcactggcggtcactgaacaacgcgccagcttcaaagcgtgg

SEQ ID NO: 373853 - DNA, 75 bp, synthetic construct
  source 1..75: mol_type = other DNA
gtccctggacgctggcggcgtggatcttcctgacgcttggcatcgtacttggttctgcgtgggcttattacgaac

SEQ ID NO: 373854 - DNA, 75 bp, synthetic construct
  source 1..75: mol_type = other DNA
ctggcgataatggggatggtcagtgtcggctttttgctgttcattctctttacctctaacccgttctcacgcacg

SEQ ID NO: 373855 - DNA, 75 bp, synthetic construct
  source 1..75: mol_type = other DNA
gggctgctgtgcctgtttgatcctcgctatcgcaagcgcgtgaacccgcaaaaaactgcgccggaggctgtatga

SEQ ID NO: 373856 - DNA, 75 bp, synthetic construct
  source 1..75: mol_type = other DNA
tttcgattggcgaaccgttcttcaacaccatgtttacctggctgatggtgccgtttgcgctgttgcttggcgtcg

SEQ ID NO: 373857 - DNA, 75 bp, synthetic construct
  source 1..75: mol_type = other DNA
gcgctggggctggcaatgggcgtcagtacgctggctctgacattatggtatcgtgtacctgttctcaccgcatga

SEQ ID NO: 373858 - DNA, 75 bp, synthetic construct
  source 1..75: mol_type = other DNA
ccacgctaccggcggggtttctggcggtattaattggctacgccagttcagcggcaataatctggcaagcagcga

SEQ ID NO: 373859 - DNA, 75 bp, synthetic construct
  source 1..75: mol_type = other DNA
ctgtcgtgaacggagccagcggagctgtctccgccctggcgggcttccatccctgacgcaaaaccccgggtttgc

SEQ ID NO: 373860 - DNA, 75 bp, synthetic construct
  source 1..75: mol_type = other DNA
tgattttataaataaatatattgtatgtacgccattgaataaagacactaaatgtttcgatattatctttcttgg

SEQ ID NO: 373861 - DNA, 75 bp, synthetic construct
  source 1..75: mol_type = other DNA
attgatgcggatatttttatttctttaatcagaaactggtcgaaagtaaggcctttttgtggctggttgcattga

SEQ ID NO: 373862 - DNA, 75 bp, synthetic construct
  source 1..75: mol_type = other DNA
tggctctgacattatggtatcgtgtacctgttctcaccgcatggtcaacgcctggtgcggctttgttggtcaccg

SEQ ID NO: 373863 - DNA, 75 bp, synthetic construct
  source 1..75: mol_type = other DNA
acagcgcgccagttttaaagcatggacgctattacttgctatttgtgctttctcactgtgtttgctggggacttt

SEQ ID NO: 373864 - DNA, 75 bp, synthetic construct
  source 1..75: mol_type = other DNA
accaggggatccagctcgcgcaattagcagagggggcgtagtaatccttgtatatcggagtgaagagaaaaatga

SEQ ID NO: 373865 - DNA, 75 bp, synthetic construct
  source 1..75: mol_type = other DNA
atggcaactgactcacaactaaccatagaaacggccctgaatgtcggcctggcgctccttggttatttttacatc

SEQ ID NO: 373866 - DNA, 75 bp, synthetic construct
  source 1..75: mol_type = other DNA
accaggggatccagctcgcgcaatcagcagagggggtgtagtaatccttgtatatcggagtgaagagaaaaatga

SEQ ID NO: 373867 - DNA, 75 bp, synthetic construct
  source 1..75: mol_type = other DNA
gtgcagtgggttgatccacaattgattgtacttggtggcattatgccaaagcccattctcaatcgtctggttgaa

SEQ ID NO: 373868 - DNA, 75 bp, synthetic construct
  source 1..75: mol_type = other DNA
agtttgccggggctggtgcacgcgcgggactgccgcaaagtgtgcgcgtatctggtgaacagccgctactacccg

SEQ ID NO: 373869 - DNA, 75 bp, synthetic construct
  source 1..75: mol_type = other DNA
gcgaagagaaacgtttcaccgacaatttcagcgtaaacccgctgcaactgcccggcgagcgcacgattctgtgta

SEQ ID NO: 373870 - DNA, 75 bp, synthetic construct
  source 1..75: mol_type = other DNA
tcgcaatgcgccacgggttttatacagatcataacacgctaattgacgccgaactggtgacgactctttacgaag

SEQ ID NO: 373871 - DNA, 75 bp, synthetic construct
  source 1..75: mol_type = other DNA
cggaaaatggctggtgaaatagctttcgcaatgcgccacgggttttatacagatcataacacgctaattgacgcc

SEQ ID NO: 373872 - DNA, 75 bp, synthetic construct
  source 1..75: mol_type = other DNA
gcgttagtagcgttgatggcacatacagccgcgttattgaagatgtaaatagcgggcgtttttatgaactggcgt

SEQ ID NO: 373873 - DNA, 75 bp, synthetic construct
  source 1..75: mol_type = other DNA
gaactctatcgcggcggtggaagagggctgcgaccgaatcgacgccagcctcgcgggaatgggcgcgggcgcagg

SEQ ID NO: 373874 - DNA, 75 bp, synthetic construct
  source 1..75: mol_type = other DNA
gcacgccattcgtcatcagtattcgccggaaaatgtccgccagattgccaaagcactggatgatgctcgcgtgga

SEQ ID NO: 373875 - DNA, 75 bp, synthetic construct
  source 1..75: mol_type = other DNA
ggtttacaaggttccagcttcaactacggctttggtgcacacagcgacctggagtggattgaagcggcggcggac

SEQ ID NO: 373876 - DNA, 75 bp, synthetic construct
  source 1..75: mol_type = other DNA
ccgggcgtccccctggcggggcgggctgtcgtgaacggagccagcggagctgtctccgccctggcgggcttccat

SEQ ID NO: 373877 - DNA, 75 bp, synthetic construct
  source 1..75: mol_type = other DNA
tctcaattcccaaggaacaaatgcaaccaacactggcatcgctccagcttgaatcactcaaccccaaatggtccc

SEQ ID NO: 373878 - DNA, 75 bp, synthetic construct
  source 1..75: mol_type = other DNA
actttattacccaatccaccgtgtactcattgatggcggtgttattggtggcttttctggagtcgctggcgctgg

SEQ ID NO: 373879 - DNA, 75 bp, synthetic construct
  source 1..75: mol_type = other DNA
gccatcggcgtggtggcgctggtggtgttaatttgccacccccttgtgccggtgtatatcgatattttgcgtaaa

SEQ ID NO: 373880 - DNA, 75 bp, synthetic construct
  source 1..75: mol_type = other DNA
gatgttgatgataccgtttatgagcaggcatacaggaacactggtgaggatgctttcggtattctggaacgtatc

SEQ ID NO: 373881 - DNA, 75 bp, synthetic construct
  source 1..75: mol_type = other DNA
ctgccggactggttgcccgggcagacggcatgtggagtggtgatcttctgcgggtatatcgctaccggataagta

SEQ ID NO: 373882 - DNA, 75 bp, synthetic construct
  source 1..75: mol_type = other DNA
tgctgtttccccggagggcattatgcactctgatgagagcggggctgatcaaaatcacacagacgatggtgagca

SEQ ID NO: 373883 - DNA, 75 bp, synthetic construct
  source 1..75: mol_type = other DNA
accgggtatccgcagtttgaagaatatctgacaggtaagagcgataatactccgaagagcgcggcctgggcggcg

SEQ ID NO: 373884 - DNA, 75 bp, synthetic construct
  source 1..75: mol_type = other DNA
agccataagattgcagagttcgctgccggtgagattggtgagaaagagcacctgaaagccagcgagcagtattcc

SEQ ID NO: 373885 - DNA, 75 bp, synthetic construct
  source 1..75: mol_type = other DNA
gcagatgcagcgtcgtgaagaggtgaacattaatgtgcaccgggagcgcggggaggatgttgagccgggagatga

SEQ ID NO: 373886 - DNA, 75 bp, synthetic construct
  source 1..75: mol_type = other DNA
gcattccggtggtgaaaggtccggtgcttggtttgccacttgttgaagagaaatgcctggcgtggatggagtgcc

SEQ ID NO: 373887 - DNA, 75 bp, synthetic construct
  source 1..75: mol_type = other DNA
atggacaatagcaccatttctctacaggagttgctcgactgcatttccaggcttcgggatgatgtaaatgccctt

SEQ ID NO: 373888 - DNA, 75 bp, synthetic construct
  source 1..75: mol_type = other DNA
gttgcacaacactgatgctacggatgatgttaaagcggtccgtgtgcggaaatgcctgcatgtgatggggtattg

SEQ ID NO: 373889 - DNA, 75 bp, synthetic construct
  source 1..75: mol_type = other DNA
tgctgcttcccgggagggcattatgcctggtgatgagagcgggcctgagcaaaatcacacaaacgatggtgagca

SEQ ID NO: 373890 - DNA, 75 bp, synthetic construct
  source 1..75: mol_type = other DNA
ccgcctgtcagtccgtgcgcccccccctggcatgctggcgcctgccggaagggaagcgggccacgctggcgcgtc

SEQ ID NO: 373891 - DNA, 75 bp, synthetic construct
  source 1..75: mol_type = other DNA
gccggaagggaagcgggccacgctggcgcgtcgcccgttacccttcccgtttgtgatgtgtccggaatgtttttt

SEQ ID NO: 373892 - DNA, 75 bp, synthetic construct
  source 1..75: mol_type = other DNA
gtgccacacacccgtatgagtccctgtcgccgggggctgagacagccacaacctgccgcactgactgtccagggt

SEQ ID NO: 373893 - DNA, 75 bp, synthetic construct
  source 1..75: mol_type = other DNA
tgccggaagggaagcgggccacgctggcgcgtcgcccgttacccttcccgtttgtgatgtgtccggaatgttttt

SEQ ID NO: 373894 - DNA, 75 bp, synthetic construct
  source 1..75: mol_type = other DNA
acgcgtcgcccattacccttcccgtttgtgatgtgtccggaatgtttttttctgatgctatttttctgtggttac

SEQ ID NO: 373895 - DNA, 75 bp, synthetic construct
  source 1..75: mol_type = other DNA
gcccgttacccttcctgatgttatgcttctgtggttactgtgcttattactgttactgttgttcttcttcctgtt

SEQ ID NO: 373896 - DNA, 75 bp, synthetic construct
  source 1..75: mol_type = other DNA
agacggaggaaaccgcagagcgaacgccagcggaggttcttcctgcgcttgttctggctgcgtcatggtacgacg

SEQ ID NO: 373897 - DNA, 75 bp, synthetic construct
  source 1..75: mol_type = other DNA
gaccgtttctcactccagcactgaaggccgtatgtgccgggtttcatttcagtttgttgagagcggggaactgtc

SEQ ID NO: 373898 - DNA, 75 bp, synthetic construct
  source 1..75: mol_type = other DNA
cacccacgcgggaaaatctcaccatcatacgcgaatcgctgaacgcggcgattgaacaggagctcaggcgtacgg

SEQ ID NO: 373899 - DNA, 75 bp, synthetic construct
  source 1..75: mol_type = other DNA
atggatttatcctcatttcccacccgaccttcattactttcgtcgtcttcaggctggcgtgacagacttcaggag

SEQ ID NO: 373900 - DNA, 75 bp, synthetic construct
  source 1..75: mol_type = other DNA
atgacgtggaaagacaagcttcaggatgcgtcatttcgcagcgtgccgtttaaggttgaagaagaaagtgcggga

SEQ ID NO: 373901 - DNA, 75 bp, synthetic construct
  source 1..75: mol_type = other DNA
gacgcaaaaccccgggcttgcagcgaccgttccggtcgcgccgcctctgtcgcgccatggcctgcgctcctggca

SEQ ID NO: 373902 - DNA, 75 bp, synthetic construct
  source 1..75: mol_type = other DNA
ccacattcagccccgctatggcacgccggtataccatccggccgccacacagcacgcattcgagcgggtcacgac

SEQ ID NO: 373903 - DNA, 75 bp, synthetic construct
  source 1..75: mol_type = other DNA
tctcgacgggattgggaaaggcatagagaaagcctcctccacaaccgtgggggtgggagcgactgccagtatgag

SEQ ID NO: 373904 - DNA, 75 bp, synthetic construct
  source 1..75: mol_type = other DNA
tacctgtggcgttgaactctttaagcaatataggaactgtagcaggtgtccctgaatgtaatggacaatatgata

SEQ ID NO: 373905 - DNA, 75 bp, synthetic construct
  source 1..75: mol_type = other DNA
tcgtctgcagttgcagggacgatggtggtggacggcggtgggttacagaaagagggtgatgcggtttccggcggc

SEQ ID NO: 373906 - DNA, 75 bp, synthetic construct
  source 1..75: mol_type = other DNA
accatcggtgagaagccttttttaatatcgtattgtgttcctccaggcggcgaacctgcttttccagttcgcgga

SEQ ID NO: 373907 - DNA, 75 bp, synthetic construct
  source 1..75: mol_type = other DNA
tgggttggcaaatgtttgtggtgttcagcgtttgcgaatcaaggaaattaccgatgagtgggctcaatctgttga

SEQ ID NO: 373908 - DNA, 75 bp, synthetic construct
  source 1..75: mol_type = other DNA
gcgtatctggtcggtaaacgcgtgggctttggcaaagaggcgtttaaaccgcacaacctgccgatggtctttacc

SEQ ID NO: 373909 - DNA, 75 bp, synthetic construct
  source 1..75: mol_type = other DNA
tcatgaaatattttttcctgaatcatcaacggcaatggcgttaattttggcaatgggaacctacggtgcaggtta

SEQ ID NO: 373910 - DNA, 75 bp, synthetic construct
  source 1..75: mol_type = other DNA
tggtagcatgttccagagcaaatccttctggctggcaacagggctgcgttttggtcaggcgggtaactccgggtt

SEQ ID NO: 373911 - DNA, 75 bp, synthetic construct
  source 1..75: mol_type = other DNA
gtgggcgcacgccgtatgtcaccgttctgctcccctctggtggaaggaccaatggttgaggccctgccgtaccag

SEQ ID NO: 373912 - DNA, 75 bp, synthetic construct
  source 1..75: mol_type = other DNA
gccgcgggtgccactaatacccagccctctgatgatattgaaatctggcagacgcttttcctgaaagaatccggt

SEQ ID NO: 373913 - DNA, 75 bp, synthetic construct
  source 1..75: mol_type = other DNA
tcggcgtggtagctggtctggcgggcttgtggggcgttaccatgctcaaacgcttgctgcgggtggatgatccct

SEQ ID NO: 373914 - DNA, 75 bp, synthetic construct
  source 1..75: mol_type = other DNA
gtgttattgggcggacttagcgttgcctatgccattgtccatatgttgccaaccgatttgttgctgaatatgggg

SEQ ID NO: 373915 - DNA, 75 bp, synthetic construct
  source 1..75: mol_type = other DNA
gccagcaggaagtcacggctctgcgcacttatctgcaaattcgtataggtctgcatgcggcgtttaatgcctgtg

SEQ ID NO: 373916 - DNA, 75 bp, synthetic construct
  source 1..75: mol_type = other DNA
cctgtatgctgacctgcgtgatcgtcgctaacccgaatgtcggttcgtcgtaccagaagatggtgctgcgttttg

SEQ ID NO: 373917 - DNA, 75 bp, synthetic construct
  source 1..75: mol_type = other DNA
caccgctacccgaaacgcggattgaaagagaggcgctggcgctgcaaaaactgaatgtcttttgtctcgcggacg

SEQ ID NO: 373918 - DNA, 75 bp, synthetic construct
  source 1..75: mol_type = other DNA
ttggcttgatgaacagctacgttaacgcactgggcctgaaaaatacccacttccagacggtacatggtctggatg

SEQ ID NO: 373919 - DNA, 75 bp, synthetic construct
  source 1..75: mol_type = other DNA
agcccgtctgctgaaaggggatggcgtcttaatcttcaatcatgatcctgttctggcgagcgcgatggatgaagt

SEQ ID NO: 373920 - DNA, 75 bp, synthetic construct
  source 1..75: mol_type = other DNA
ttgatgtagagcagcaaatgaacgcttatatacttggtagttattatgctgcaaataaaaaattcccggataaaa

SEQ ID NO: 373921 - DNA, 75 bp, synthetic construct
  source 1..75: mol_type = other DNA
gagcaggtcagtttgccgacgccctggagaaatacgctgccggtgtggctaccgcactcagtcattctcctcaaa

SEQ ID NO: 373922 - DNA, 75 bp, synthetic construct
  source 1..75: mol_type = other DNA
gatgatgccattagccacctgacggacagcctcgcaccgctacccgaaacgcggattgaaagagaggcgctggcg

SEQ ID NO: 373923 - DNA, 75 bp, synthetic construct
  source 1..75: mol_type = other DNA
ggcgaactcaaagcgcatggtggcaaagctgcgtggcaacggtaacctacatttactcgacgctgaatcgctacg

SEQ ID NO: 373924 - DNA, 75 bp, synthetic construct
  source 1..75: mol_type = other DNA
ggagcgtcaactggacagcgaagaacgcgcattactgattgaacgttcgcaaacggttattcgtcagggccgcga

SEQ ID NO: 373925 - DNA, 75 bp, synthetic construct
  source 1..75: mol_type = other DNA
cgttctcctcaaataacgcttgaagaaacacccgcctcgcaggccatcctgcccaccttattaaaacaggagcaa

SEQ ID NO: 373926 - DNA, 75 bp, synthetic construct
  source 1..75: mol_type = other DNA
gccattaccgaaggtcagtgctggcaaagcgactggcggatcagtgaaagtgaagcgatggcggcacgggaatgt

SEQ ID NO: 373927 - DNA, 75 bp, synthetic construct
  source 1..75: mol_type = other DNA
tattgtcggagcatttattttcggcaaaatgggcgacagaatagggcgtaaaaaagtgctctttattaccatcac

SEQ ID NO: 373928 - DNA, 75 bp, synthetic construct
  source 1..75: mol_type = other DNA
ccagataagtggcattctggattaaaagcccgagttgagtgggaggttgatccaaatacagctcctctgcctcca

SEQ ID NO: 373929 - DNA, 75 bp, synthetic construct
  source 1..75: mol_type = other DNA
tcatttcatttgaaagtaaaaagaaaaataaagaaattcttgatgcattttttgaaataataaatactgatatag

SEQ ID NO: 373930 - DNA, 75 bp, synthetic construct
  source 1..75: mol_type = other DNA
tagaatcgagcatcgccgccaatgatcaggttgattctatctgcattgaattaacaacatttaatcaagataatg

SEQ ID NO: 373931 - DNA, 75 bp, synthetic construct
  source 1..75: mol_type = other DNA
aaatgttcggctgtaaaaaccgctttacccggatggccatttctaaagaaattggtggtcttatcgcttccggtt

SEQ ID NO: 373932 - DNA, 75 bp, synthetic construct
  source 1..75: mol_type = other DNA
tccgataaaattggtcgccggatcccgtatattattatgaatacctcgcgattgtgctggcatggccaatgcttt

SEQ ID NO: 373933 - DNA, 75 bp, synthetic construct
  source 1..75: mol_type = other DNA
ctgcagttgaccagactgcatctaactcctccgtcaacgtgactcaggttggctttggtaacaacgcgaccgctc

SEQ ID NO: 373934 - DNA, 75 bp, synthetic construct
  source 1..75: mol_type = other DNA
tgacggcggtcccggcgcggatcacgccggcgccctccggtgaacggctgaatattgagaccttcccgcccgtcc

SEQ ID NO: 373935 - DNA, 75 bp, synthetic construct
  source 1..75: mol_type = other DNA
ttttaccatcaccgaatgcgaggaatcgacaccagcaacggtatctgtgcccgtagagaaaaccgaaagccagcg

SEQ ID NO: 373936 - DNA, 75 bp, synthetic construct
  source 1..75: mol_type = other DNA
cgtaggcttgactgatctcgtgaccggagacgacggcagcagtatggccgctggttttatgcagtgggagaacgc

SEQ ID NO: 373937 - DNA, 75 bp, synthetic construct
  source 1..75: mol_type = other DNA
atccggaatgcagcgccattatgcgcattattgactgaaagggggcaggaacaatgcaacagatttcctttctgc

SEQ ID NO: 373938 - DNA, 75 bp, synthetic construct
  source 1..75: mol_type = other DNA
aagttatccgggctggagcgtgagatctttatggttttatatctcgacagccagttatgcctgcttgagcatgaa

SEQ ID NO: 373939 - DNA, 75 bp, synthetic construct
  source 1..75: mol_type = other DNA
atgatgcaaccgcgcacaggcagtcaaataatgagcggtgataaaaaaagcattttaagtagtaattctggtcta

SEQ ID NO: 373940 - DNA, 75 bp, synthetic construct
  source 1..75: mol_type = other DNA
gccctggaaaacattaccatgggagagatgttcggctgtaaaaaccgctttacccgaatggcaatatctaaagaa

SEQ ID NO: 373941 - DNA, 75 bp, synthetic construct
  source 1..75: mol_type = other DNA
tacgcgcagccctttaccgtcgtgctgtcgcctgtgcctggctgaccgtgtgcgaacgtcagcaccgctacccgc

SEQ ID NO: 373942 - DNA, 75 bp, synthetic construct
  source 1..75: mol_type = other DNA
cattcattgatggacggaaagctacgctacagtattgttttcactttggcgacggttggcattatgtttggtgcg

SEQ ID NO: 373943 - DNA, 75 bp, synthetic construct
  source 1..75: mol_type = other DNA
aaagtttgcatctggagttaagcgaagacgtgttggcagaaattgaagcggtgcatcaggtttacacttatccgg

SEQ ID NO: 373944 - DNA, 75 bp, synthetic construct
  source 1..75: mol_type = other DNA
gaccgcagaggaagcgctgacacgggcgacactgttccggcctgcgtctgtacttgtgacagtcgaagcgcagag

SEQ ID NO: 373945 - DNA, 75 bp, synthetic construct
  source 1..75: mol_type = other DNA
tacccgcaggaagccattaccgggcatgaactgggcgctgattatgacgttaccgcagaggaagcgctgacgagg

SEQ ID NO: 373946 - DNA, 75 bp, synthetic construct
  source 1..75: mol_type = other DNA
gactgactttgtaccaccgccgacactgcaaccaacgtttaacccgttgacggataacgttgtctcgctcgacct

SEQ ID NO: 373947 - DNA, 75 bp, synthetic construct
  source 1..75: mol_type = other DNA
catgagttctcgtatgttattggaatggcgagagacgttttaatcaatcacacacgagatgttgatattaatgag

SEQ ID NO: 373948 - DNA, 75 bp, synthetic construct
  source 1..75: mol_type = other DNA
cgcctggccggtgaatgtcgggccactaaacccgcacctttacacgcctaaccagatgttcgcccagagcatggt

SEQ ID NO: 373949 - DNA, 75 bp, synthetic construct
  source 1..75: mol_type = other DNA
acccgcgcggtagcgtttgaaactggcgatatcgacctgctgtacggaaacgaagggttattaccgctcgatacc

SEQ ID NO: 373950 - DNA, 75 bp, synthetic construct
  source 1..75: mol_type = other DNA
gccagataaattatatgattcagttggtggtaactttgatgttgaaaagtggcagtgggtgaataatggaaaatc

SEQ ID NO: 373951 - DNA, 75 bp, synthetic construct
  source 1..75: mol_type = other DNA
gccagacggaccaacaaatctttctgcatggataaggcttaagaataaagaattgccgccttctgttcatctgta

SEQ ID NO: 373952 - DNA, 75 bp, synthetic construct
  source 1..75: mol_type = other DNA
cgttccgcttgaaggagagttaatcggcaaacaagagaagagcaccaacgagctttccgcaaaagaaacagacag

SEQ ID NO: 373953 - DNA, 75 bp, synthetic construct
  source 1..75: mol_type = other DNA
gctctttacatggtaaaccatattccggcccgcaagaagtatcggatgctgacggcctcagtgcgcgtatttctc

SEQ ID NO: 373954 - DNA, 75 bp, synthetic construct
  source 1..75: mol_type = other DNA
taagatttggcttgctattgaaagaagccgtgcgtctacgtcaaataagctacttcatcagatgcttatgatgtg

SEQ ID NO: 373955 - DNA, 75 bp, synthetic construct
  source 1..75: mol_type = other DNA
gcatgaagccgaattctctcgctttctgacatcgaagacaggtgatagcgaaaaagcagcagacccggagaagac

SEQ ID NO: 373956 - DNA, 75 bp, synthetic construct
  source 1..75: mol_type = other DNA
gttgtgataaagacaggttgaaaaatatttatattcgtctggtttcagaactcacacagatgagtgaagaaacta

SEQ ID NO: 373957 - DNA, 75 bp, synthetic construct
  source 1..75: mol_type = other DNA
atatgcgaagaagtcgcggcagtgatcgagcgcgaagggcatcatacttcagcagaagatttgcgtgattacgtg

SEQ ID NO: 373958 - DNA, 75 bp, synthetic construct
  source 1..75: mol_type = other DNA
ctggtgcgatgcgtggttatggccgccacaagtcgtatttgccgttgagtctatgcttgatgacgccgcgacagc

SEQ ID NO: 373959 - DNA, 75 bp, synthetic construct
  source 1..75: mol_type = other DNA
cctgtctggtttttgccttatctttccggcgagcgcacgccgcacaataatccacaggcaaagggcgttttcttc

SEQ ID NO: 373960 - DNA, 75 bp, synthetic construct
  source 1..75: mol_type = other DNA
gttggcatttaatgtcggtgatgctgagtgcggcgtcgtgtctggactgggcgacgaaattaaccggtctgagcg

SEQ ID NO: 373961 - DNA, 75 bp, synthetic construct
  source 1..75: mol_type = other DNA
gcattatacgaaggcagcgaaattactggtgctttgctacctgaagttgcgaaagcgtggggtatggcggcggtg

SEQ ID NO: 373962 - DNA, 75 bp, synthetic construct
  source 1..75: mol_type = other DNA
atgagtgatgtaaaggcattcaacaattgcatgagtgtgttctggcgacagcatgaagccgaattctctcgcttt

SEQ ID NO: 373963 - DNA, 75 bp, synthetic construct
  source 1..75: mol_type = other DNA
aagcgtattgcattaacagcgttacagagcgaagagccggttggtattgacctgctggaagaaatggcgaagtaa

SEQ ID NO: 373964 - DNA, 75 bp, synthetic construct
  source 1..75: mol_type = other DNA
cacaggcggcgatgtggggcctgcattgggcgcagcgaggctggctcagattgcgatgaatccagataaatcact

SEQ ID NO: 373965 - DNA, 75 bp, synthetic construct
  source 1..75: mol_type = other DNA
caacggtgccggtgtttctgacttggcctctgttgtcacgggtgttggtgctgatctggatgctttccgtgagtg

SEQ ID NO: 373966 - DNA, 75 bp, synthetic construct
  source 1..75: mol_type = other DNA
ggtactggaaggaatcttatcaaaaagaatatgattttatatatggacattacagacaacggactgatgatgaaa

SEQ ID NO: 373967 - DNA, 75 bp, synthetic construct
  source 1..75: mol_type = other DNA
tgaaaagcatcctgacttgttttatcagatggtaacttctttcaggtctgagttatctgaatactcatctcagtg

SEQ ID NO: 373968 - DNA, 75 bp, synthetic construct
  source 1..75: mol_type = other DNA
catattgctaaaaagatgttgccttatcttcctgataatgcgggtattcttttagttccctgcagtcgtggtgga

SEQ ID NO: 373969 - DNA, 75 bp, synthetic construct
  source 1..75: mol_type = other DNA
agaaggttttaaagaaggttttaaagaaggttttaaagaaggttttaaagaaggttttaaagaaggttttaagaa

SEQ ID NO: 373970 - DNA, 75 bp, synthetic construct
  source 1..75: mol_type = other DNA
ggagtatggcaaagcccggtgccggaggaattgtaccgacgcttaattccgcaagcgccaatgattgggcactaa

SEQ ID NO: 373971 - DNA, 75 bp, synthetic construct
  source 1..75: mol_type = other DNA
tcatcaaatcgcccgacgcatttcagctcatgggcgcgtcgtggcattattcccgatcgtatggcaacggctatt

SEQ ID NO: 373972 - DNA, 75 bp, synthetic construct
  source 1..75: mol_type = other DNA
tctcgctcatgaacttagaacgccaattaatgcattactgggtcagaatcaggttacgctcagtcaaaccagaag

SEQ ID NO: 373973 - DNA, 75 bp, synthetic construct
  source 1..75: mol_type = other DNA
atttaattctccctgtgatatttagtagagaaaagccaactgatgtattatcagctcactttattaatgagtata

SEQ ID NO: 373974 - DNA, 75 bp, synthetic construct
  source 1..75: mol_type = other DNA
aatgaatttatcgggcttaagaattcacatttagttagctatattacccggcaagataaaaatgcaatggataaa

SEQ ID NO: 373975 - DNA, 75 bp, synthetic construct
  source 1..75: mol_type = other DNA
cacgcagaaatcgactttgaaaataggtacatggattgccaaaagtggccctttgcctacggcagaatttgataa

SEQ ID NO: 373976 - DNA, 75 bp, synthetic construct
  source 1..75: mol_type = other DNA
ttcgaattttgtgacgatggttatgcaccgccagagccttatagccagcattcaaggcatcgtctgattaagcta

SEQ ID NO: 373977 - DNA, 75 bp, synthetic construct
  source 1..75: mol_type = other DNA
ttaatagcattataatttgcattgtcgccattgtactttgctcagtattaagtccgctgttaatcagaacgggat

SEQ ID NO: 373978 - DNA, 75 bp, synthetic construct
  source 1..75: mol_type = other DNA
caacgagcaaggtgaagtggtcgcttcgcaaacggaaaaactaaccgtttcgcgtccgcatccactctggtcgga

SEQ ID NO: 373979 - DNA, 75 bp, synthetic construct
  source 1..75: mol_type = other DNA
atgagcaccatcctgaaatgggcgggtaataaaaccgccattatgtccgaactgaaaaaacatcttcctgctggc

SEQ ID NO: 373980 - DNA, 75 bp, synthetic construct
  source 1..75: mol_type = other DNA
cagaactgctgcgtgtgaccgctgaagcaatccagaacgaagcgcaggagatccactaccccagctatcttgttg

SEQ ID NO: 373981 - DNA, 75 bp, synthetic construct
  source 1..75: mol_type = other DNA
atgcgtaatattgaaaccctcacgactaaaatcggaccggatgacgcagggcttaatattttactgacagaggct

SEQ ID NO: 373982 - DNA, 75 bp, synthetic construct
  source 1..75: mol_type = other DNA
cacctggcatccgttcttgaacatcgagcatctgaaggacatccggtcattgtttctaacagtgacacgtctttg

SEQ ID NO: 373983 - DNA, 75 bp, synthetic construct
  source 1..75: mol_type = other DNA
atgagcaccatcctgaaatgggcgggtaataaaaccgccgttatgtccgaactgaaaaaataccttcctgctggc

SEQ ID NO: 373984 - DNA, 75 bp, synthetic construct
  source 1..75: mol_type = other DNA
cagcatcggcgtagcagctggtgagagtaaatctgcagcagaaatcatcgctgtttctggggtgcgctgctgggt

SEQ ID NO: 373985 - DNA, 75 bp, synthetic construct
  source 1..75: mol_type = other DNA
gggaaggatttagggtttgaagttattaagattgccgtgccggatggcgaaaaaacattgaacgctatcgacagc

SEQ ID NO: 373986 - DNA, 75 bp, synthetic construct
  source 1..75: mol_type = other DNA
ttggcttgatgaacagctacgttaacgcactgggcctgaaaaacactcacttccagaccgtgcacggtctcgacg

SEQ ID NO: 373987 - DNA, 75 bp, synthetic construct
  source 1..75: mol_type = other DNA
cgaaaccgttaacccactgaaagtaggtaaagagttcgcctctgaaccggtttggtttggtgattctgatcgcgc

SEQ ID NO: 373988 - DNA, 75 bp, synthetic construct
  source 1..75: mol_type = other DNA
tctataaaaaggttgctgctgattgtgagtcgtttatatctcgtgccagagctttatttgaggaagcaaacaggg

SEQ ID NO: 373989 - DNA, 75 bp, synthetic construct
  source 1..75: mol_type = other DNA
tctgcgccagctttgatgaaactctggcgatgttgaaggcgggagatgtggtgtattgcgatccgccatatgacg

SEQ ID NO: 373990 - DNA, 75 bp, synthetic construct
  source 1..75: mol_type = other DNA
tcgcggctggttgaacctttcgcgggttcctgtgctgtgatgatggcgacagactatcctcattatcttgtcgcg

SEQ ID NO: 373991 - DNA, 75 bp, synthetic construct
  source 1..75: mol_type = other DNA
atgagcgctaccggctcacaaaagcgcaggcagatgcgcaggaactgaaaaatgcccgtgaagaaggaatggttc

SEQ ID NO: 373992 - DNA, 75 bp, synthetic construct
  source 1..75: mol_type = other DNA
ctggtgctttgttacctgaagttgcgaaagcgtggggtatggcgacggtgccagttgtcgcaggcggtggcgaca

SEQ ID NO: 373993 - DNA, 75 bp, synthetic construct
  source 1..75: mol_type = other DNA
gttttatcggctacggtggaatgttaatggaatccttcgtggcgattatggcgctggtttccgcctgtatcatcg

SEQ ID NO: 373994 - DNA, 75 bp, synthetic construct
  source 1..75: mol_type = other DNA
tcggaaaagaatatgattatagtcattcgaagttgctttccaggtattacggtagaatattcggtaggaaattaa

SEQ ID NO: 373995 - DNA, 75 bp, synthetic construct
  source 1..75: mol_type = other DNA
catcgggcgtaaaagttattttgctcaacgagcaaggtgaagtggtcgcttcgcaaacggaaaaactaaccgttt

SEQ ID NO: 373996 - DNA, 75 bp, synthetic construct
  source 1..75: mol_type = other DNA
tcagcggtcagcagctcgattaccgtacggggggggatgtggggccagcactgggcgcagcaaggctggcgcaga

SEQ ID NO: 373997 - DNA, 75 bp, synthetic construct
  source 1..75: mol_type = other DNA
ggtttgactcatcaacatggccccaatgaactggcgcgagcagtgctggaaggcgtgggttatgcgctggcagat

SEQ ID NO: 373998 - DNA, 75 bp, synthetic construct
  source 1..75: mol_type = other DNA
gatttacaacccggcaccattgactatgagcgctaccgactcacaaaagcacaggctgatgcacaggaactgaaa

SEQ ID NO: 373999 - DNA, 75 bp, synthetic construct
  source 1..75: mol_type = other DNA
tctgcaacgtgtggcacaggagatttcggggatacttgtgcgtgtgccgttgacattacagcgtaaatacggggt

SEQ ID NO: 374000 - DNA, 75 bp, synthetic construct
  source 1..75: mol_type = other DNA
tattattgattatttcattatcttgttcggcggactggaatgtcagagggatgagtaatactataacatcgataa

SEQ ID NO: 374001 - DNA, 75 bp, synthetic construct
  source 1..75: mol_type = other DNA
gttgaaataccatggggggctaatttatttgatgatattcactttgctaataaaaatataattcaaaagaatagt

SEQ ID NO: 374002 - DNA, 75 bp, synthetic construct
  source 1..75: mol_type = other DNA
ttacagattagattttgataaattagttgaaataccatggggggctaatttatttgatgatattcactttgctaa

SEQ ID NO: 374003 - DNA, 75 bp, synthetic construct
  source 1..75: mol_type = other DNA
cggcacatacagaacgggcgaataactataatttcaggacaatttttacgagcacattatatggtacggcgtcat

SEQ ID NO: 374004 - DNA, 75 bp, synthetic construct
  source 1..75: mol_type = other DNA
gccagtcagggaaacctgctggggccgattctgttctttgccgtttacctgcttatctttttcttgcgcgtcggc

SEQ ID NO: 374005 - DNA, 75 bp, synthetic construct
  source 1..75: mol_type = other DNA
ggtactgacaatgaccgcaggttcagacacattccctacattagcaatgtcctgcgatttctttattgataaaca

SEQ ID NO: 374006 - DNA, 75 bp, synthetic construct
  source 1..75: mol_type = other DNA
aggcactctgcggcgcaccatcatggacagatgtggcgcggcaactgcgtcatgctatcggggaccgaccagtaa

SEQ ID NO: 374007 - DNA, 75 bp, synthetic construct
  source 1..75: mol_type = other DNA
ggctttgattactcactggttaatacggcgggctttgttaccgacgccacgctagataacgctaaagaacgcccg

SEQ ID NO: 374008 - DNA, 75 bp, synthetic construct
  source 1..75: mol_type = other DNA
ctcggcacagtggagtgagctgccaaactgtcgatgactgggtagccggtggggcggaagtagttatgtcccgta

SEQ ID NO: 374009 - DNA, 75 bp, synthetic construct
  source 1..75: mol_type = other DNA
aaccaccctggtcgccgggattgtgttgatcaaatcaggtactcgtaaagcgcgtaaacctgaactggaggtgaa

SEQ ID NO: 374010 - DNA, 75 bp, synthetic construct
  source 1..75: mol_type = other DNA
tggaaaaagagattaaactgaacattgaagctaaccacgcgacgctggcaggtcactctttccatcatgaaatag

SEQ ID NO: 374011 - DNA, 75 bp, synthetic construct
  source 1..75: mol_type = other DNA
ttacgattttaaccgggtcggattacttatcagagaactggaagacacaatcacagtagaagaagcaaaaatttc

SEQ ID NO: 374012 - DNA, 75 bp, synthetic construct
  source 1..75: mol_type = other DNA
actggaattccggtgtattggcagcccctgataatcacctgacccacgaagagcgctctgctttgcagaaactct

SEQ ID NO: 374013 - DNA, 75 bp, synthetic construct
  source 1..75: mol_type = other DNA
gctggctgcaggatattatggggccaccaaccgctatggcacgatttcactggccagtgctgccagccaggccgg

SEQ ID NO: 374014 - DNA, 75 bp, synthetic construct
  source 1..75: mol_type = other DNA
acgtcgtcagagcactgataaatacgatctgttctacggtcatattggggcgatggatacgatggcgctgtcact

SEQ ID NO: 374015 - DNA, 75 bp, synthetic construct
  source 1..75: mol_type = other DNA
ggtcactctttccaccatgaaattgccaccgccattgcgcttggtctgttcggctcagtcgatgctaaccgcggc

SEQ ID NO: 374016 - DNA, 75 bp, synthetic construct
  source 1..75: mol_type = other DNA
ggctttgattactcactggttaatacggcggggttttttaccgacgctactctgggtaatgcgaaggagcgtccc

SEQ ID NO: 374017 - DNA, 75 bp, synthetic construct
  source 1..75: mol_type = other DNA
ggtttttcaatcgcatcctgggccattattatccagcggacccgtattcttaacgcagcggcgcgcgaagccgaa

SEQ ID NO: 374018 - DNA, 75 bp, synthetic construct
  source 1..75: mol_type = other DNA
gctgttactacaaataatgcagaattatcctcaactataaaagctttgcgaaattatgggtcacataagaaatat

SEQ ID NO: 374019 - DNA, 75 bp, synthetic construct
  source 1..75: mol_type = other DNA
acgttattaataaggatgagctggatgatgtactggccagttcggttgtgaaatttgatgatttttcatcccaga

SEQ ID NO: 374020 - DNA, 75 bp, synthetic construct
  source 1..75: mol_type = other DNA
aactgggggcatgctgccggtttcagtttttatcccgggaaaaatttaggcgccttaggggatgcgggagcaatt

SEQ ID NO: 374021 - DNA, 75 bp, synthetic construct
  source 1..75: mol_type = other DNA
atctctcccaatagatccaacaatgaccgattgtgatattgaatatgtaataaaagttgtaaatggctttgtcgg

SEQ ID NO: 374022 - DNA, 75 bp, synthetic construct
  source 1..75: mol_type = other DNA
ctgctattccggcggtaatggcctacaaccgcctcaaccagcgcgtaaacaaactggaactgaattacgacaact

SEQ ID NO: 374023 - DNA, 75 bp, synthetic construct
  source 1..75: mol_type = other DNA
aatattgccaatcctagtgacataccatatttggtcgcaaagtatggtaaagagaaattctttattaatatagaa

SEQ ID NO: 374024 - DNA, 75 bp, synthetic construct
  source 1..75: mol_type = other DNA
gttaagaaacttatccttgataaggagaaattctataatgactcacagaataaaataataaaaaaaatatggcat

SEQ ID NO: 374025 - DNA, 75 bp, synthetic construct
  source 1..75: mol_type = other DNA
gaaactgatggattacgtggtcgcaaggataatctttgggaaggcggcatccgtgttccggcgattattaaatac

SEQ ID NO: 374026 - DNA, 75 bp, synthetic construct
  source 1..75: mol_type = other DNA
caccctgaaaagcgcctactatcctttcctgcaagaactggccctgccgcgtcctttccgctttattgccccgtc

SEQ ID NO: 374027 - DNA, 75 bp, synthetic construct
  source 1..75: mol_type = other DNA
aaaagccggcgattaaaaagatcacttttaacgtcatcccggacccgaccacccgcgcagtagcgtttgaaactg

SEQ ID NO: 374028 - DNA, 75 bp, synthetic construct
  source 1..75: mol_type = other DNA
atgtggctgcttttgccagaaggatttctggaagagcatttaattcttaatacacagcgctatgcccatcatgat

SEQ ID NO: 374029 - DNA, 75 bp, synthetic construct
  source 1..75: mol_type = other DNA
aatcacctgacccacgaagagcgctctgctttgcagaaactctggggcggtttggagacaggagatgccatttaa

SEQ ID NO: 374030 - DNA, 75 bp, synthetic construct
  source 1..75: mol_type = other DNA
cacttccgcttagcccgcagtggatcctccgccagtgtaaagaggtcgcctccctgtgtgatggcgacaccttct

SEQ ID NO: 374031 - DNA, 75 bp, synthetic construct
  source 1..75: mol_type = other DNA
ggcaaattcaccatctgggcagtagacgatgtgactgacgcactgccgttattattaaatctggtgtgggatggc

SEQ ID NO: 374032 - DNA, 75 bp, synthetic construct
  source 1..75: mol_type = other DNA
tttccagtaacgccctctggcaaaagtgtgtccttgcaactctgtatcgggctgcagccacacatcctgaaatta

SEQ ID NO: 374033 - DNA, 75 bp, synthetic construct
  source 1..75: mol_type = other DNA
taacaagggaagactcactcgtggctgcaaccctgcttactcaaaatctattcacacatggttacgttttgggga

SEQ ID NO: 374034 - DNA, 75 bp, synthetic construct
  source 1..75: mol_type = other DNA
ggtggttctcagaaatctgattgagcaggcgtggggaaaagtattgggtgaagataactccattacacatctggt

SEQ ID NO: 374035 - DNA, 75 bp, synthetic construct
  source 1..75: mol_type = other DNA
ttactttcattgagtaggatttcagatcttaaaaatgttaaagcgtattccgttcgaggagtaacacatggtgtg

SEQ ID NO: 374036 - DNA, 75 bp, synthetic construct
  source 1..75: mol_type = other DNA
aagaccttttttaacaaataaatcagaaatggtcatagaagcgaaaaagattttaactcatttcgatgaaaatat

SEQ ID NO: 374037 - DNA, 75 bp, synthetic construct
  source 1..75: mol_type = other DNA
taggtgaaagcctgaaagttaatagcacctctatgctaaaagcgcggttgcgtaaagcgtatatccccgctaaat

SEQ ID NO: 374038 - DNA, 75 bp, synthetic construct
  source 1..75: mol_type = other DNA
aacatgttttgcacgctatgacgcgttttcagtctcccacatggcacaaggccatcattattgccctggaaaaag

SEQ ID NO: 374039 - DNA, 75 bp, synthetic construct
  source 1..75: mol_type = other DNA
taccaggcgcatttcgcccaggggatcaccataataaaatgctgaggcctggcctttgcgtagtgcacgcatcac

SEQ ID NO: 374040 - DNA, 75 bp, synthetic construct
  source 1..75: mol_type = other DNA
agcaactaacttacctgttgaaattcgaacacccaaacaacttgttaatatcggcactgttgcaaagttagcgat

SEQ ID NO: 374041 - DNA, 75 bp, synthetic construct
  source 1..75: mol_type = other DNA
aagtagaggctgatctttcctacttacttacaaggttttggtttgtaaaatggaaccagcttaacaatctaagcc

SEQ ID NO: 374042 - DNA, 75 bp, synthetic construct
  source 1..75: mol_type = other DNA
tgctgccagtaatattgttctaccggggaatacgacttctgatttgaacagtaaaaacgaaaagtctgataaaag

SEQ ID NO: 374043 - DNA, 75 bp, synthetic construct
  source 1..75: mol_type = other DNA
gtaaaaaagcggtagttgttatgtgcgccgatcacggcgtctgggatgaaggtgtcactatttccccgaaagcgg

SEQ ID NO: 374044 - DNA, 75 bp, synthetic construct
  source 1..75: mol_type = other DNA
ttggccgtgttggcgggcttaaccgtgctggttcgtcgcaacactaaaaacgaccatcacgacggaggagatgat

SEQ ID NO: 374045 - DNA, 75 bp, synthetic construct
  source 1..75: mol_type = other DNA
acaaactctgccgaaatgacgaagggcggcaaagccgtaacgaacagggtaaggctaccgtcacttataccaata

SEQ ID NO: 374046 - DNA, 75 bp, synthetic construct
  source 1..75: mol_type = other DNA
ggagctggcaaaaaacggtgtcacgctgtttggtgtaggtgaactggggatggcaaacacgacaccggcagcggc

SEQ ID NO: 374047 - DNA, 75 bp, synthetic construct
  source 1..75: mol_type = other DNA
atgtttacggggattgtacagggcaccgcaaaactggtgtcgattgacgagaaaccaaattttcgcacacatgtg

SEQ ID NO: 374048 - DNA, 75 bp, synthetic construct
  source 1..75: mol_type = other DNA
ttgatccacaaactcaggcagtggtagatacggtagaacgtgtgctggcggcacgagaaaatgccatgaatcaac

SEQ ID NO: 374049 - DNA, 75 bp, synthetic construct
  source 1..75: mol_type = other DNA
tctggttgttcttcagatatcaaaaaatgagatcacaggtaatggcgtcgatagcgcaacgctaactgcaacggt

SEQ ID NO: 374050 - DNA, 75 bp, synthetic construct
  source 1..75: mol_type = other DNA
ggtcatattatgaccaccgctgaagtagcgaaaatattaacctctgaaaataatcgccagatctggtttaaagtg

SEQ ID NO: 374051 - DNA, 75 bp, synthetic construct
  source 1..75: mol_type = other DNA
tcagttttgatctgatgaaagagacgttacgcattactaatcttggcgatttacaggttggggattgggtaaacg

SEQ ID NO: 374052 - DNA, 75 bp, synthetic construct
  source 1..75: mol_type = other DNA
ggtcatcagcatcctgatcgtctttatcgtgctattggcggttcataaaggtcacgcgccgatccgcagcgtcag

SEQ ID NO: 374053 - DNA, 75 bp, synthetic construct
  source 1..75: mol_type = other DNA
ctggaagatatcgtcagtggttattccaatgtgttgatttccctggcagatagccacggtaaaacggtgtatcac

SEQ ID NO: 374054 - DNA, 75 bp, synthetic construct
  source 1..75: mol_type = other DNA
agatgcgcgggggacaaggtttgtgattatgctgccggagagagtgattattaagttcaaattcagggcgtggtg

SEQ ID NO: 374055 - DNA, 75 bp, synthetic construct
  source 1..75: mol_type = other DNA
gtgtgggcattttgcggtgattggcgtgctggcaagcggcgtgcttaatgcattattcattaccggatttccccc

SEQ ID NO: 374056 - DNA, 75 bp, synthetic construct
  source 1..75: mol_type = other DNA
actaaactcgaatgggcgataggtgcggtagtgctggtgattatcagcctgcttgcgactctcgaacctttttga

SEQ ID NO: 374057 - DNA, 75 bp, synthetic construct
  source 1..75: mol_type = other DNA
ccaatgtgttgatttccctggcagatagtcagggtaaaacggtgtatcactcccccggtgcgcccgatatccgcg

SEQ ID NO: 374058 - DNA, 75 bp, synthetic construct
  source 1..75: mol_type = other DNA
tatccacgcagcctgggcggttgattatccgctcccaccaaccggaagccgactggttgggcaaaatcaaaccta

SEQ ID NO: 374059 - DNA, 75 bp, synthetic construct
  source 1..75: mol_type = other DNA
tggaaacgcgggttgggcagaaaatccctaaccctacctggacaccgaccgctggtattcggcagcgttcgctgg

SEQ ID NO: 374060 - DNA, 75 bp, synthetic construct
  source 1..75: mol_type = other DNA
gaacgttaagcagtggcccggtaaggcagcgattggcaggctgaaaggagaagggctaactcaatacaatctgtg

SEQ ID NO: 374061 - DNA, 75 bp, synthetic construct
  source 1..75: mol_type = other DNA
ctgttattacctgatgcaccgcgtcaggggattatcgttaaccttgcagagctgcgcctttattattatccgccg

SEQ ID NO: 374062 - DNA, 75 bp, synthetic construct
  source 1..75: mol_type = other DNA
aggtaagtaatatgccaacggtagaatctgcgcaaaatggtgaaccagagcagggtaatttgttacgtgcgacgc

SEQ ID NO: 374063 - DNA, 75 bp, synthetic construct
  source 1..75: mol_type = other DNA
aaccttgcagagctgcgcctttataattatccgccgggagaaaatatcgtgcaggtttatccgataggtattggt

SEQ ID NO: 374064 - DNA, 75 bp, synthetic construct
  source 1..75: mol_type = other DNA
atgctggcgtttacctggatcgcgctgcgatttatccatttcacctcgttgatgctggtctttggctttgcaatg

SEQ ID NO: 374065 - DNA, 75 bp, synthetic construct
  source 1..75: mol_type = other DNA
atgttaacgttaaatcagatatcttatcgctggcctggcgcgggaaaatcgacgctgttacgagtaatggcaggt

SEQ ID NO: 374066 - DNA, 75 bp, synthetic construct
  source 1..75: mol_type = other DNA
cggaaatttccggtgccggtacgatgctggcggaatatgcgccaaaaggtaagcgcggaattatctcctcatttg

SEQ ID NO: 374067 - DNA, 75 bp, synthetic construct
  source 1..75: mol_type = other DNA
tttaatctctgcgctgaaaatgccagaagtgaaagaccgtgatttaagtgcgctggaagacgccgcagaagatca

SEQ ID NO: 374068 - DNA, 75 bp, synthetic construct
  source 1..75: mol_type = other DNA
ttttaccatcaccgaatgtgatgaatcgactgcggtaacgacgtccgttcccgccagcgtgccagccgataaaac

SEQ ID NO: 374069 - DNA, 75 bp, synthetic construct
  source 1..75: mol_type = other DNA
cgaaagccagcgtatccgcgaaaccatcatcgcccagctaccggaaggccagtttaccgaaagcctggtcgcgca

SEQ ID NO: 374070 - DNA, 75 bp, synthetic construct
  source 1..75: mol_type = other DNA
aagttaacgaagctatccctatgcctctcggtcacggagcgctggaaatcggcgaacgccgcaaactgggtcata

SEQ ID NO: 374071 - DNA, 75 bp, synthetic construct
  source 1..75: mol_type = other DNA
acagaaaaatatggtatttcacggagacagtatttctacgttaaatcattgattaataaagacaattcaaaataa

SEQ ID NO: 374072 - DNA, 75 bp, synthetic construct
  source 1..75: mol_type = other DNA
aattagcctcaagattcgatatctggactgaagtacgagaagataatggtgatttcgagtttgtcaggggttttg

SEQ ID NO: 374073 - DNA, 75 bp, synthetic construct
  source 1..75: mol_type = other DNA
gcttacatcgctaccagcatggtcaatctgcgcctggcgcaggaacgttatccggacgttcagttccaccagacc

SEQ ID NO: 374074 - DNA, 75 bp, synthetic construct
  source 1..75: mol_type = other DNA
tgtggcacgtattgtcggagcatttattttcggcaaaatgggcgacagaatagggcgtaaaaaagtgctctttat

SEQ ID NO: 374075 - DNA, 75 bp, synthetic construct
  source 1..75: mol_type = other DNA
atgaagccaggatttttctcttatgtaaaaacattactgattataatatttcttgccttagttgccattcctgag

SEQ ID NO: 374076 - DNA, 75 bp, synthetic construct
  source 1..75: mol_type = other DNA
cgttaaaagcacgctacatcaaaatgggtagcgtcaaaagtggtcgggttaattctgttgccaccttcgaagtgt

SEQ ID NO: 374077 - DNA, 75 bp, synthetic construct
  source 1..75: mol_type = other DNA
gcccattgcgcccgaacacttaccgcgattgtttgaccgtttctaccgcgttgatccttcccgccagcgaaaagg

SEQ ID NO: 374078 - DNA, 75 bp, synthetic construct
  source 1..75: mol_type = other DNA
agctatcttgccgctaatggtatacaaacattagaacattatcctgtgccaccacataagcaattggcatataaa

SEQ ID NO: 374079 - DNA, 75 bp, synthetic construct
  source 1..75: mol_type = other DNA
actggcagggatgagtctgggatttttgattgtcatgctgctgtgtgcaggcatttcgtattcactggcagtgat

SEQ ID NO: 374080 - DNA, 75 bp, synthetic construct
  source 1..75: mol_type = other DNA
gctgggcgctggcggggcatctgtttcagcgattgtttcgccagtatggtcgccagggtgatgctgccaacttac

SEQ ID NO: 374081 - DNA, 75 bp, synthetic construct
  source 1..75: mol_type = other DNA
aaaaaacagatattgaaaaacagatgtatggtaagtttttaaaatataaaactgatattgataatgattctctaa

SEQ ID NO: 374082 - DNA, 75 bp, synthetic construct
  source 1..75: mol_type = other DNA
accgtactttcgatggtgaatcgctggttcctgttcttgagcaaaaagcattgaaacgcgaaaagccattaattt

SEQ ID NO: 374083 - DNA, 75 bp, synthetic construct
  source 1..75: mol_type = other DNA
caattgctcgcgattattgtaataatattaaaaataaatatgtattgttaccctgctcatccgtcccggaagagc

SEQ ID NO: 374084 - DNA, 75 bp, synthetic construct
  source 1..75: mol_type = other DNA
aagcacactattggtgttgctaacggtttagatgcacttatacttgttcttcgagcctggaaggaaatggggaaa

SEQ ID NO: 374085 - DNA, 75 bp, synthetic construct
  source 1..75: mol_type = other DNA
tatcaaaaaaataccgttgtgggattgtaaatgaattaattactctacctgttgtattaaatgaagaaggacatg

SEQ ID NO: 374086 - DNA, 75 bp, synthetic construct
  source 1..75: mol_type = other DNA
catttttcaaaaaatgaaatacaaactatgatacattatccgatacctccgcataaacaattagcatatactgct

SEQ ID NO: 374087 - DNA, 75 bp, synthetic construct
  source 1..75: mol_type = other DNA
gtgacaccgaccctattaagtgctttctggacctacaccctgattacagccctcacgcctggaccgaacaatatt

SEQ ID NO: 374088 - DNA, 75 bp, synthetic construct
  source 1..75: mol_type = other DNA
cgccagtatggtcgccagttaaatatcgtgctcgcgctgctgctgatctattgcgcggtacgcattttctattaa

SEQ ID NO: 374089 - DNA, 75 bp, synthetic construct
  source 1..75: mol_type = other DNA
tacacttgtatggacaaatatctccaatggcagaaataatggagattgcctcagagtttaatttattagttttag

SEQ ID NO: 374090 - DNA, 75 bp, synthetic construct
  source 1..75: mol_type = other DNA
tgcatctatatggtaatatttctccaatggatgatattatggctttggcatcaaaatataaattactggttcttg

SEQ ID NO: 374091 - DNA, 75 bp, synthetic construct
  source 1..75: mol_type = other DNA
ccggcgcgattctgcattcagtgcggactggtaaaacctgacgcgctggtggaaatcgccacaattgcgcatatc

SEQ ID NO: 374092 - DNA, 75 bp, synthetic construct
  source 1..75: mol_type = other DNA
gcccattgcgcccgagcacttaccgcgattgtttgaccgtttctaccgcgttgacccctcccgccagcgaaaagg

SEQ ID NO: 374093 - DNA, 75 bp, synthetic construct
  source 1..75: mol_type = other DNA
ttgacccctcccgtcagcgaaaaggtgaaggtagcggtattggcctggcgatagtgaaatcgattgttgtcgcac

SEQ ID NO: 374094 - DNA, 75 bp, synthetic construct
  source 1..75: mol_type = other DNA
ctacattgcgctttcgatcgattttcatcttcattacataaatgatttgatgaataaacttgtaatgaccgcatc

SEQ ID NO: 374095 - DNA, 75 bp, synthetic construct
  source 1..75: mol_type = other DNA
atagtgaaatcgattgttgtcgcgcataaaggcacagttgcggtaacgtcagatgtgcgggggacaaggtttgtt

SEQ ID NO: 374096 - DNA, 75 bp, synthetic construct
  source 1..75: mol_type = other DNA
aggcagataataatcagctgatacctgacagggtcatgtttgacctcagagcggaagtcatgaaagtcttcgagt

SEQ ID NO: 374097 - DNA, 75 bp, synthetic construct
  source 1..75: mol_type = other DNA
tgcgctgaaaaagaacctgattgcgattgccgtcgtgataagcctgttgattgttctgatcattcgaatcgctgt

SEQ ID NO: 374098 - DNA, 75 bp, synthetic construct
  source 1..75: mol_type = other DNA
ccaacagtaaatctcaatggtagtgcatgttttttgcaatctccttctgacgctatttttttgtcgccatctgtc

SEQ ID NO: 374099 - DNA, 75 bp, synthetic construct
  source 1..75: mol_type = other DNA
atagtgaaatcgattgttgtcgcgcataaaggcacggttgcagtaacgtcagatgctcgggggacaaggtttgtt

SEQ ID NO: 374100 - DNA, 75 bp, synthetic construct
  source 1..75: mol_type = other DNA
tacggcatttaatgccacgcctgttcctgacaccacacctccggctctggtgttcgtcgacggacaaattcgcga

SEQ ID NO: 374101 - DNA, 75 bp, synthetic construct
  source 1..75: mol_type = other DNA
tttgcttccattgagcaaaatatttcgtaatgttaaattactttctgtatcaaaaggaattgcagatgagttact

SEQ ID NO: 374102 - DNA, 75 bp, synthetic construct
  source 1..75: mol_type = other DNA
ttgaagcaagcaacttcattgcaacaattgaagagcgtcaggggctgaaagtttcctgcccggaagaaattgctt

SEQ ID NO: 374103 - DNA, 75 bp, synthetic construct
  source 1..75: mol_type = other DNA
ggacacatcaaagcctgattgaggcaagcaacttcattgctacaattgaagaacgtcaggggttgaaagtttcct

SEQ ID NO: 374104 - DNA, 75 bp, synthetic construct
  source 1..75: mol_type = other DNA
atcggtgaagagtttatcggtggtgatgattgtgctttggttcttggtgataatatcttctacggccacgatctg

SEQ ID NO: 374105 - DNA, 75 bp, synthetic construct
  source 1..75: mol_type = other DNA
ttgaagcaagtaacttcattgcaacaattgaagagcgacaaggtttaaaggtatcttgcccggaagaaattgctt

SEQ ID NO: 374106 - DNA, 75 bp, synthetic construct
  source 1..75: mol_type = other DNA
gtttattatcggtgaagagtttatcggtggtgatgattgtgctttggttcttggtgataatatcttctacggtca

SEQ ID NO: 374107 - DNA, 75 bp, synthetic construct
  source 1..75: mol_type = other DNA
accgcaaagggtttattgatgccgagcaggttaaaaagttggctgaaccgctgaagaaaaatgcttatggtcagt

SEQ ID NO: 374108 - DNA, 75 bp, synthetic construct
  source 1..75: mol_type = other DNA
gattacatttcagtgataaagcagactgagcagaaagtgcctgatgtggtttttacttatcgccctaaataccgc

SEQ ID NO: 374109 - DNA, 75 bp, synthetic construct
  source 1..75: mol_type = other DNA
tggacaatgcgcctttacctcaggttatcagcatggtctggcaacgggtttttaatcgcccttatcagttgtcgc

SEQ ID NO: 374110 - DNA, 75 bp, synthetic construct
  source 1..75: mol_type = other DNA
cgtcatatgcagagcaaaaaaaagcttatatattaatgactgtcattgtaatgcctttggttttatttgtatatt

SEQ ID NO: 374111 - DNA, 75 bp, synthetic construct
  source 1..75: mol_type = other DNA
aacaagggcgtttatctgttgccatgatggggcgtggttatgcgtggttagacacggggacacatcagagcctga

SEQ ID NO: 374112 - DNA, 75 bp, synthetic construct
  source 1..75: mol_type = other DNA
agcgtgagttatttatcggcaatgcttaactctgtggtttcttccggggctttcagtaatcatattcagtccgtc

SEQ ID NO: 374113 - DNA, 75 bp, synthetic construct
  source 1..75: mol_type = other DNA
ttccgagtggtcccgcatccccccgggggaaagagctgggtcgaatgtaacagtgactactattactctgataaa

SEQ ID NO: 374114 - DNA, 75 bp, synthetic construct
  source 1..75: mol_type = other DNA
gggttgtcgctcacatccggaaattccggtgaatgatgaacaatccctggtgatggagtcatcacttctggctgc

SEQ ID NO: 374115 - DNA, 75 bp, synthetic construct
  source 1..75: mol_type = other DNA
ccttggcctcgatgtggctcaacgagaactgatctacgaggttcatcagatcagtgattgggtgtttactatcga

SEQ ID NO: 374116 - DNA, 75 bp, synthetic construct
  source 1..75: mol_type = other DNA
atcaactggcaatcatctgttttccaagctgaacttggccaagcatgcgctgaatgaattccatgcaaattccaa

SEQ ID NO: 374117 - DNA, 75 bp, synthetic construct
  source 1..75: mol_type = other DNA
gccgagtacccggatattgaggttaagccgattgctttttctgccgctgaacttaaggcagcacactggaaattc

SEQ ID NO: 374118 - DNA, 75 bp, synthetic construct
  source 1..75: mol_type = other DNA
tgcgcttgtttgatcccttcttccaggtcggaacgggcgtacagcgtaacttccaggggaccggtctgggtctgg

SEQ ID NO: 374119 - DNA, 75 bp, synthetic construct
  source 1..75: mol_type = other DNA
atcgccgaaaatcgcttatcggcagaaaacggtgtgctttccccgcgtggacgagaaacgcaggcggatgtgcct

SEQ ID NO: 374120 - DNA, 75 bp, synthetic construct
  source 1..75: mol_type = other DNA
ttgaaataccttgcttcttttcgtacaaccctgaaagcctcgcgctacatgttcagagcattggcgttagtgctc

SEQ ID NO: 374121 - DNA, 75 bp, synthetic construct
  source 1..75: mol_type = other DNA
atgcttgaagatactactattcataatgcaatagctgataaagcgttatcaagttactttcgtagttcaggtaat

SEQ ID NO: 374122 - DNA, 75 bp, synthetic construct
  source 1..75: mol_type = other DNA
tctctaaaaaaatgtcgaaaactgacattggcaaacactttggcattagctcccaggccgtaggcaagtggttca

SEQ ID NO: 374123 - DNA, 75 bp, synthetic construct
  source 1..75: mol_type = other DNA
aacagatggactaccttgtgaaaataagtgtatgtcgaatgaatcactggcggtgaacaatgatattcactcctg

SEQ ID NO: 374124 - DNA, 75 bp, synthetic construct
  source 1..75: mol_type = other DNA
atatggttgaggagcttaacgcactcaaaactgaggccgttaatgaagaacttaacgggtccaaatttgggctcg

SEQ ID NO: 374125 - DNA, 75 bp, synthetic construct
  source 1..75: mol_type = other DNA
agatgctggacctgtcactgcaaaaactggaagaggcttcgctgtcggcgcaatcctccacccaggaagaggcgc

SEQ ID NO: 374126 - DNA, 75 bp, synthetic construct
  source 1..75: mol_type = other DNA
aagttactttcgcagttcgggtaatttgttagaagaagagtcagctgtgttagggcaggctgtcaccaatttaat

SEQ ID NO: 374127 - DNA, 75 bp, synthetic construct
  source 1..75: mol_type = other DNA
tagaaatggcgaaaaatcttaagccttctgcacgtggcgagctggaaattacagatattaaccgtatctatatgg

SEQ ID NO: 374128 - DNA, 75 bp, synthetic construct
  source 1..75: mol_type = other DNA
gcgatgctgccagatattactgttctgaaagatactgtcattaaaggtattgatctgcctcgtctattgcagacg

SEQ ID NO: 374129 - DNA, 75 bp, synthetic construct
  source 1..75: mol_type = other DNA
atggcccgccaggtacaggtaaaacatatcgtactattgagcttgctgtacaaatttgtgatccgatcgcttact

SEQ ID NO: 374130 - DNA, 75 bp, synthetic construct
  source 1..75: mol_type = other DNA
atatgcgaggatgccgcctttggtcatgctggtgcgcaggaaatgttggatagcgcacttactcgcctacaagaa

SEQ ID NO: 374131 - DNA, 75 bp, synthetic construct
  source 1..75: mol_type = other DNA
ctacacgtgataccaatgggaaacaaagtattattcaggcacaagataatcctgatgttggtattatgattatgg

SEQ ID NO: 374132 - DNA, 75 bp, synthetic construct
  source 1..75: mol_type = other DNA
gagggtacgagttttactgttaatatgccggatgtgtgggccagtgaattgagccgggctggtgccggagcgaag

SEQ ID NO: 374133 - DNA, 75 bp, synthetic construct
  source 1..75: mol_type = other DNA
tttaataaaaatgagttttacttattacttattacttattacttatttattgtttttgtgttgtggttggttttt

SEQ ID NO: 374134 - DNA, 75 bp, synthetic construct
  source 1..75: mol_type = other DNA
ccaatcgatgttggcgggatattactgggtaatggaatatacaccagacaaagggcttcatattcattttgtcgg

SEQ ID NO: 374135 - DNA, 75 bp, synthetic construct
  source 1..75: mol_type = other DNA
atgtataatgctaatcccaattacgagatgaatttcatgattctgaaagatgtgaatgaacacatggaaggtctg

SEQ ID NO: 374136 - DNA, 75 bp, synthetic construct
  source 1..75: mol_type = other DNA
tgtgaatgaacacatggaaggtctgtttcaacgtttttctaaactgttacctttcagaattgattttgcctacag

SEQ ID NO: 374137 - DNA, 75 bp, synthetic construct
  source 1..75: mol_type = other DNA
aagacttgtcgtgcctgactgggaatcatcggcaacctgtatctcggcaggattatgcatagggatggtgccaac

SEQ ID NO: 374138 - DNA, 75 bp, synthetic construct
  source 1..75: mol_type = other DNA
cgacgtcaccgtgatgtggaactgaccgctgccggggcgtggtttctcaaagaaggacgctctgttgtcaaaaaa

SEQ ID NO: 374139 - DNA, 75 bp, synthetic construct
  source 1..75: mol_type = other DNA
tgccgggctaaagacaaatacccggtgcgtatcgatcacgtgattcactatagtgataagtccgcggtagacgac

SEQ ID NO: 374140 - DNA, 75 bp, synthetic construct
  source 1..75: mol_type = other DNA
tgattatgaaatttattttacagctacatctggtatagatccgtcaggtgcatctggtgatcatcagagcaacga

SEQ ID NO: 374141 - DNA, 75 bp, synthetic construct
  source 1..75: mol_type = other DNA
ttatcctgtgactatggcagtcagtaaacagctgttacctatttatgataaaccgatgatctattacccgctttc

SEQ ID NO: 374142 - DNA, 75 bp, synthetic construct
  source 1..75: mol_type = other DNA
gttcaagaaagtttatttgtgaaaattacaatattaataatggatatttgacggtaagcttgaatagagtgaata

SEQ ID NO: 374143 - DNA, 75 bp, synthetic construct
  source 1..75: mol_type = other DNA
atgagtaattcctgtcgtcctgaaaagcctacccccatctatattggctgtgatgttttaactcaaggttgtatg

SEQ ID NO: 374144 - DNA, 75 bp, synthetic construct
  source 1..75: mol_type = other DNA
cgagtccggatggcctggcacaagcgtttatcattggtgaagactttattggtggcgatgattgtgcactcgtgc

SEQ ID NO: 374145 - DNA, 75 bp, synthetic construct
  source 1..75: mol_type = other DNA
gcaagtaaaagtgttagcacaacctctgaaaaaaaatgcttatggtaagtacctattaaaaatgattgaaggtta

SEQ ID NO: 374146 - DNA, 75 bp, synthetic construct
  source 1..75: mol_type = other DNA
accgatattaaccgtatttatatggaacaggggcgtttatctgttgccatgatgggccgtggttatgcatggctg

SEQ ID NO: 374147 - DNA, 75 bp, synthetic construct
  source 1..75: mol_type = other DNA
atgtttcattaagtaacgtattattggtgtcattatatgtcagccagatccctaccgaacatggtcctatccctg

SEQ ID NO: 374148 - DNA, 75 bp, synthetic construct
  source 1..75: mol_type = other DNA
tatttggttgatggctgttcaagaaagttcatttgtgaaagctataatattaataatggatatttaacagtaagc

SEQ ID NO: 374149 - DNA, 75 bp, synthetic construct
  source 1..75: mol_type = other DNA
gccaccgtcgaactctctccagttgctggacgaaacgttctcggtatccgggacggaatcatcagcgaccagaca

SEQ ID NO: 374150 - DNA, 75 bp, synthetic construct
  source 1..75: mol_type = other DNA
agttcatctgtgaaaactataatattaataatgggtatttaactgtaagcttaaatcgagtaagtaaaattcatc

SEQ ID NO: 374151 - DNA, 75 bp, synthetic construct
  source 1..75: mol_type = other DNA
atgaactatgcgcatcatgctgaaaagaacacatctccttctcttggttgtgagtatctaactcccggttgtatg

SEQ ID NO: 374152 - DNA, 75 bp, synthetic construct
  source 1..75: mol_type = other DNA
aaaaaaatcatctctgatgtctctctgaataatgtacttttagtttcattgtatgccagtcagcggcaaacggaa

SEQ ID NO: 374153 - DNA, 75 bp, synthetic construct
  source 1..75: mol_type = other DNA
attggcgcactgagcaaatacgaattttacgcgccgtcacatcccgatctctctgaggtggaaacgtcttacgtt

SEQ ID NO: 374154 - DNA, 75 bp, synthetic construct
  source 1..75: mol_type = other DNA
ctgacaatccagtttaaccttgcgggtgttaacgctgagatcatgaccgccgacactccagtggatgaacgccag

SEQ ID NO: 374155 - DNA, 75 bp, synthetic construct
  source 1..75: mol_type = other DNA
cgtcagcggacgcagagaactatagaaaaattgcaggcaacgattcctctgtctcaggaacgaggtgagcgaagc

SEQ ID NO: 374156 - DNA, 75 bp, synthetic construct
  source 1..75: mol_type = other DNA
aaagcggcggggaaagatccggtgctgctggtgccgccgcaactgcgccccttgctggcgcgctacgcaaggttg

SEQ ID NO: 374157 - DNA, 75 bp, synthetic construct
  source 1..75: mol_type = other DNA
ccttccctgctgctctccaccgcggcggcgattatcgtcacccgcgtcagcgataacggtgatatcgcccatgac

SEQ ID NO: 374158 - DNA, 75 bp, synthetic construct
  source 1..75: mol_type = other DNA
ggtgaatcaggcgcaacaggccggcaaagtgatgcttgatagcgtgccggtggacccgaatatgctcaaccagtt

SEQ ID NO: 374159 - DNA, 75 bp, synthetic construct
  source 1..75: mol_type = other DNA
atcgcccatgacgtgcgccaccagttgctggcaagcccgtcggtgctctacaccgccaccgggattatgttcgtg

SEQ ID NO: 374160 - DNA, 75 bp, synthetic construct
  source 1..75: mol_type = other DNA
gcgtctgcgtcctatcctgatgacctctctcgcctttattctcggcgtattaccgctagctatcagtaacggtgc

SEQ ID NO: 374161 - DNA, 75 bp, synthetic construct
  source 1..75: mol_type = other DNA
aacgttatcgctcgcatcaacggaaaaccggcggcaggtctgggtattaagctggcaaccggtgcgaacgctctc

SEQ ID NO: 374162 - DNA, 75 bp, synthetic construct
  source 1..75: mol_type = other DNA
aggcttcagtaatgcgccgctgcaaacctcagttgaagtgtacaacttcatcaagtcaaagaccattgcctatgc

SEQ ID NO: 374163 - DNA, 75 bp, synthetic construct
  source 1..75: mol_type = other DNA
acctgagcgccgacgccgccttccagcagtatgtgctgatgaccatcggcgacgggctggtggcgcaaatccctt

SEQ ID NO: 374164 - DNA, 75 bp, synthetic construct
  source 1..75: mol_type = other DNA
gcaaggttgtttgcgccagggctacatgtgctgtcgtataacgaagtgccggacgagctggagttgaagataatg

SEQ ID NO: 374165 - DNA, 75 bp, synthetic construct
  source 1..75: mol_type = other DNA
taccggctggcggatgagcaagcgcccgcaagcggcggaggcggaagagaaaagcctcgaaacgctaacccgtac

SEQ ID NO: 374166 - DNA, 75 bp, synthetic construct
  source 1..75: mol_type = other DNA
acctcgcttacatcgctaccagcatggtcaacctgcgcctggcgcaggaacgttatcccgacgttcagttccacc

SEQ ID NO: 374167 - DNA, 75 bp, synthetic construct
  source 1..75: mol_type = other DNA
aagctgtttaaaggcgtttaccacctttataaagatgaaacctatctctatcagagcggtaaaggccacaccatt

SEQ ID NO: 374168 - DNA, 75 bp, synthetic construct
  source 1..75: mol_type = other DNA
ctgcacaaccacggcactattcagatcggcgacacctttacccagggtgagatgatgaagttcaccggtattccg

SEQ ID NO: 374169 - DNA, 75 bp, synthetic construct
  source 1..75: mol_type = other DNA
gtctcgttgctgatgcaaaaccggcgagtcgccatctgacgggactggctatcagtttaagtacaaccggcaaca

SEQ ID NO: 374170 - DNA, 75 bp, synthetic construct
  source 1..75: mol_type = other DNA
aaatcactccggtattcttcggtactgcgctgggtaacttcggcgtcgatcatatgctggatggcctggtggagt

SEQ ID NO: 374171 - DNA, 75 bp, synthetic construct
  source 1..75: mol_type = other DNA
agggctgaataacccggatctcgacgctgcggttggtgaagatctggcacagcagctgcgtgacgaactggagct

SEQ ID NO: 374172 - DNA, 75 bp, synthetic construct
  source 1..75: mol_type = other DNA
cttagaaaacgaggttgattatcttaatgagttaaaaagaatttctagaataaattctttggatgataagactct

SEQ ID NO: 374173 - DNA, 75 bp, synthetic construct
  source 1..75: mol_type = other DNA
gtgtaccagtccaacgtcaacgtctacgcctccttattacaggcgcagccagtaaaagtgtacgtgaccggattt

SEQ ID NO: 374174 - DNA, 75 bp, synthetic construct
  source 1..75: mol_type = other DNA
atggtttgtcagcagataagaaaataccattttaaacaaagcgtaagttgtatttctctactgagtgttattgtt

SEQ ID NO: 374175 - DNA, 75 bp, synthetic construct
  source 1..75: mol_type = other DNA
tcgcgcctgaagagcgaatacaacgtcgaagcggtgtatgagtcagtcaacgtcaccaccgcccgctgggtagaa

SEQ ID NO: 374176 - DNA, 75 bp, synthetic construct
  source 1..75: mol_type = other DNA
ctacatttgacgttttgaggaaaatgaagccaattcgtcaaattgaagcagtcggtacaatgattaattttgata

SEQ ID NO: 374177 - DNA, 75 bp, synthetic construct
  source 1..75: mol_type = other DNA
atcaattgaaaaacttagtgctgctttgggcatatctgttgatgccataaaagataaagctaatgtgatgaacgg

SEQ ID NO: 374178 - DNA, 75 bp, synthetic construct
  source 1..75: mol_type = other DNA
cggggcaggaagtggcgcgcagaacgcggtgggaattggcgtgatgggggggatgatctccgcaacattgctggc

SEQ ID NO: 374179 - DNA, 75 bp, synthetic construct
  source 1..75: mol_type = other DNA
agagcttaacggggccaaaactgagcactgctcaactttgagcagcgagcttaacgggtccaaatttgggctcgt

SEQ ID NO: 374180 - DNA, 75 bp, synthetic construct
  source 1..75: mol_type = other DNA
acgccagtttatctggcgaaccggttgcaggcgcttttgggtgtcgagcagaccatccggatggagaactttttc

SEQ ID NO: 374181 - DNA, 75 bp, synthetic construct
  source 1..75: mol_type = other DNA
caacatatgaaggtcaggaaccgtcacctgaggatgtgttgattactgatgagccgctgagtgaaaaatggcagg

SEQ ID NO: 374182 - DNA, 75 bp, synthetic construct
  source 1..75: mol_type = other DNA
actaccggcccgcatggatgcgtcaatctgccagcacgtcacggcgccgcgcatggaaaactcgcgcaagcctga

SEQ ID NO: 374183 - DNA, 75 bp, synthetic construct
  source 1..75: mol_type = other DNA
tcattcagaaacagtaaactatgaaggtattgatagcaaagctggagtacaggcgaagacggatgagaaaacgtg

SEQ ID NO: 374184 - DNA, 75 bp, synthetic construct
  source 1..75: mol_type = other DNA
cgcagaccacgcgagtactgcgggtaaaactgcaaacggctgacaaaaccattctgctttatagcgcctcggata

SEQ ID NO: 374185 - DNA, 75 bp, synthetic construct
  source 1..75: mol_type = other DNA
tggtggtgcgtaaacagcttggcctgtactgctttattgaaccggatgtgccagtggccttaaacggcgatccga

SEQ ID NO: 374186 - DNA, 75 bp, synthetic construct
  source 1..75: mol_type = other DNA
ataatttctctgccgcttatgatctcaaccgcgtgttttttatcggcagcgataatctttgcatggcgaactttg

SEQ ID NO: 374187 - DNA, 75 bp, synthetic construct
  source 1..75: mol_type = other DNA
atagaaattgaaagcgatgatcctgccaacgttctgccgttgacggacaaagactccaccagcaatgacgacatg

SEQ ID NO: 374188 - DNA, 75 bp, synthetic construct
  source 1..75: mol_type = other DNA
cgcggatgtatgagcggcgtattttcattccggcggaaagcgacgcccagcgtctggaggagcatgagcagttta

SEQ ID NO: 374189 - DNA, 75 bp, synthetic construct
  source 1..75: mol_type = other DNA
atctcggtagattcagaaccgggaatgggcagccagtttaccgtgcgtattccgttgtacggcgctcagtacccg

SEQ ID NO: 374190 - DNA, 75 bp, synthetic construct
  source 1..75: mol_type = other DNA
gcgtggtttatgcgctactggcgcgataatttctctgcagcttacgatctcaaccgcgtatttttgatcggcagc

SEQ ID NO: 374191 - DNA, 75 bp, synthetic construct
  source 1..75: mol_type = other DNA
gactggcatacgccatatgtggatgatgctgaccttattcgcaatgccgggcgcgaagaatggctggcatcgtta

SEQ ID NO: 374192 - DNA, 75 bp, synthetic construct
  source 1..75: mol_type = other DNA
aaacagtgcggaagcggtaatccatcgtgccaaaatggaattgggcaagatccgcgacggttttgtcattccatt

SEQ ID NO: 374193 - DNA, 75 bp, synthetic construct
  source 1..75: mol_type = other DNA
tagcgttaaccactacaccaacagcgtcggcaaaatcctcggttccacaggacgatatttactgatctatgcgct

SEQ ID NO: 374194 - DNA, 75 bp, synthetic construct
  source 1..75: mol_type = other DNA
tggttatgactggacgggtatgtcatatcaggaacgcttatcgggaaaccaggctcccgctctggtagcaatttc

SEQ ID NO: 374195 - DNA, 75 bp, synthetic construct
  source 1..75: mol_type = other DNA
acgttgataaactttatgtccgcagtaacagcggtgaaatggtgccattctccacctttactacttctcattggg

SEQ ID NO: 374196 - DNA, 75 bp, synthetic construct
  source 1..75: mol_type = other DNA
ggtgacggattactacctgcacaatgaaaaagcaaacgttgaaagtgtctttacggttaacgggtttagcttcag

SEQ ID NO: 374197 - DNA, 75 bp, synthetic construct
  source 1..75: mol_type = other DNA
ggacgatatttactgatctatgcgctgattgttgctggaatggtggtgttgtttttacgtcttccgtcttccttc

SEQ ID NO: 374198 - DNA, 75 bp, synthetic construct
  source 1..75: mol_type = other DNA
ttgatgacaacctgtttgccgctgagcttgcagtcatcgaagacaacagcttcaacattcaccgccaagccaacc

SEQ ID NO: 374199 - DNA, 75 bp, synthetic construct
  source 1..75: mol_type = other DNA
tgctgctcaggtcccacatcttgagcccattctttccgctctctggctacgttccctatcattggagaatcatgc

SEQ ID NO: 374200 - DNA, 75 bp, synthetic construct
  source 1..75: mol_type = other DNA
aaatggaggatgaggccaaattagttgcccgtatgttcaactcaatggctggcctaaatggtgtcgcttcatcga

SEQ ID NO: 374201 - DNA, 75 bp, synthetic construct
  source 1..75: mol_type = other DNA
gccttcgttagcctgaaaccgtgggaaaagcgtggtggcgatgaaaacagcgcggaagcagttatccaccgcgcc

SEQ ID NO: 374202 - DNA, 75 bp, synthetic construct
  source 1..75: mol_type = other DNA
ctgcgcgtaaacagtgacggctcggtggtacgcctgaaagatgtcgcacgggttgaacttggcggtgaaaactat

SEQ ID NO: 374203 - DNA, 75 bp, synthetic construct
  source 1..75: mol_type = other DNA
atggcaaacttttttattcgacgaccgatatttgcatgggtgctggccattattctgatgatggcgggcgcactg

SEQ ID NO: 374204 - DNA, 75 bp, synthetic construct
  source 1..75: mol_type = other DNA
gcgcggcgtgaagtatttgctgttgagtttttttctctatatcgcgttattgatgcccgctcaggcgattcacta

SEQ ID NO: 374205 - DNA, 75 bp, synthetic construct
  source 1..75: mol_type = other DNA
gcgattcactattttatgctatcgccctacagcgtggtgatggacgttaaaatgctcgatttctttcgccatatg

SEQ ID NO: 374206 - DNA, 75 bp, synthetic construct
  source 1..75: mol_type = other DNA
gtgggttatcgctcgattgataccgccgcggcctataagaacgaagaaggtgtcggcaaagccctgaaaaatgcc

SEQ ID NO: 374207 - DNA, 75 bp, synthetic construct
  source 1..75: mol_type = other DNA
acggttttgatacagccattgcccgggctgatgaaacgatacgcgggcatatgggaacgtcagccaccattacat

SEQ ID NO: 374208 - DNA, 75 bp, synthetic construct
  source 1..75: mol_type = other DNA
tgaaatatagctttgaaacaggccagctaccttccgtccatgccgccgcgatgctgttgctggtcgcttttatca

SEQ ID NO: 374209 - DNA, 75 bp, synthetic construct
  source 1..75: mol_type = other DNA
tggtattgggtgcgctattacgaaacggcaggtagtacgccttttatcgcaaggccaggtggtattgaaggctgg

SEQ ID NO: 374210 - DNA, 75 bp, synthetic construct
  source 1..75: mol_type = other DNA
ggatctgttgcaaaccaaagagttaccgaaaggcgtcgatcgtctggtgacggcaatgaacaactcttccagcct

SEQ ID NO: 374211 - DNA, 75 bp, synthetic construct
  source 1..75: mol_type = other DNA
tcctcgctggatgcaggaacgctcctggtttggctatacggaagggttccgcgaactggtgctgaagaaaaatct

SEQ ID NO: 374212 - DNA, 75 bp, synthetic construct
  source 1..75: mol_type = other DNA
ggtttcgccggatgatggcggaagctgtcatctctggcttgggcgtggcgtgccgcctgccgttaaccgtcgccg

SEQ ID NO: 374213 - DNA, 75 bp, synthetic construct
  source 1..75: mol_type = other DNA
tcgctcgattgataccgccgcggcctacaagaacgaagaaggtgtcggcaaagccctgaaaaatgcctcagtcaa

SEQ ID NO: 374214 - DNA, 75 bp, synthetic construct
  source 1..75: mol_type = other DNA
acgccggatgatggcggaagctgtcatctctggcttgggcgggggggaccccctgccgttaaccgtcgccgctga

SEQ ID NO: 374215 - DNA, 75 bp, synthetic construct
  source 1..75: mol_type = other DNA
tgatgtgatgaaagagctgaagtacatagctgaaaatcgcttatcggcagaaaacggtgtgctttccccgcgtgg

SEQ ID NO: 374216 - DNA, 75 bp, synthetic construct
  source 1..75: mol_type = other DNA
tgtttctccggatgacgggggcagctgttatatctggctcaaccgtgggcaaccacccgcagttaaccggcgacg

SEQ ID NO: 374217 - DNA, 75 bp, synthetic construct
  source 1..75: mol_type = other DNA
gatgtcattctggttaagaagctcgaccgtcttggccgcgacactgccgatatgatccaactgataaaggaattt

SEQ ID NO: 374218 - DNA, 75 bp, synthetic construct
  source 1..75: mol_type = other DNA
agtttatcaccaccgactatttgcaacagtgccgccgatatgatccaactgataaaggaatttgacgctcagggc

SEQ ID NO: 374219 - DNA, 75 bp, synthetic construct
  source 1..75: mol_type = other DNA
gcaacagtgccatatggggcaaatggtggtcaccatcctgtcggctgtggcacaggctgaacgccggaggatcct

SEQ ID NO: 374220 - DNA, 75 bp, synthetic construct
  source 1..75: mol_type = other DNA
acaatggactggcatctgaaaggagcggggctgacgccttattcgcgaatgggcgatggacgggcggtattacgc

SEQ ID NO: 374221 - DNA, 75 bp, synthetic construct
  source 1..75: mol_type = other DNA
caattctatcagcagtggcacaagcagaacgtactcgcatctttgaacgaacaaatgaaggaagaattgaggcca

SEQ ID NO: 374222 - DNA, 75 bp, synthetic construct
  source 1..75: mol_type = other DNA
ggtgatatggggcaaatggtggtcaccatcctgtcggctgtggcacaggctgaacgccggaggatcctagagcgc

SEQ ID NO: 374223 - DNA, 75 bp, synthetic construct
  source 1..75: mol_type = other DNA
cgaaaaagaaacggcttgtaagggaaactggcatgatggtaatttccctcgtgaagagtttcctgttactaacat

SEQ ID NO: 374224 - DNA, 75 bp, synthetic construct
  source 1..75: mol_type = other DNA
tatgtttcagtcaatgatgttgctaaagcatgtgtgtggctagctgaaaaacaaaacaccaacaaagaaatatat

SEQ ID NO: 374225 - DNA, 75 bp, synthetic construct
  source 1..75: mol_type = other DNA
gatgttcatgagattgagtctaatcttttggtatatcttgagtctcaacctggtgttaagcgtatacgtcacctt

SEQ ID NO: 374226 - DNA, 75 bp, synthetic construct
  source 1..75: mol_type = other DNA
ctaactttgcaacagtgcccaacagatcgggaagggctggatttgctgaggatgaaggtggaggaaggtgatgtc

SEQ ID NO: 374227 - DNA, 75 bp, synthetic construct
  source 1..75: mol_type = other DNA
attctgacgatctggatgccctgatggatgctgatgcgttggtcattacgcttccggcgcgacgcagcggtcctg

SEQ ID NO: 374228 - DNA, 75 bp, synthetic construct
  source 1..75: mol_type = other DNA
tgttattggcgctatcactctgttgttacaggcacctaaaggcggacacatctataatatatgtgcgccagctca

SEQ ID NO: 374229 - DNA, 75 bp, synthetic construct
  source 1..75: mol_type = other DNA
caaaccttcgagagctataaagtcttttgtgcctggtcgattttttcgctatgggcatttttcggctggtacacc

SEQ ID NO: 374230 - DNA, 75 bp, synthetic construct
  source 1..75: mol_type = other DNA
aagtaacagagtttcactgtcatccggcaaatacctttgatgcgattgcgcgcgttaaaacgatgctgccaggca

SEQ ID NO: 374231 - DNA, 75 bp, synthetic construct
  source 1..75: mol_type = other DNA
taaaacggtaaccagtattctgatggcatgggtgtttaccttaccggcggcaatttttctgtctggtagtctgta

SEQ ID NO: 374232 - DNA, 75 bp, synthetic construct
  source 1..75: mol_type = other DNA
gaagggaaaactggcagggaaaaagctaatgatccccaatacaacaagctgctgaatgagtggaatgctgataac

SEQ ID NO: 374233 - DNA, 75 bp, synthetic construct
  source 1..75: mol_type = other DNA
tgggtacctggtactttggtttgcctgcatccagctctcatacgctgattggcgcaatcatcggtattggtttaa

SEQ ID NO: 374234 - DNA, 75 bp, synthetic construct
  source 1..75: mol_type = other DNA
tgaactgggtgtagatgcaggttataccttcacctacagcgaagaccaggctctgactccgtacttcaaactggc

SEQ ID NO: 374235 - DNA, 75 bp, synthetic construct
  source 1..75: mol_type = other DNA
cattatgctgtgcatttctgatacctccgcgaagctggcgaaactgccagacgtcagtaaagaagaccagaacct

SEQ ID NO: 374236 - DNA, 75 bp, synthetic construct
  source 1..75: mol_type = other DNA
accagtatggtggcgacgatggctgcagcagaaagcggttggggaacgtcgaagctggcgcgtagcaacaacaac

SEQ ID NO: 374237 - DNA, 75 bp, synthetic construct
  source 1..75: mol_type = other DNA
atgacgcttgcagaacgtcttatacagaaaggtttcgacgagggttttaaagaaggttttaaacaaggttttaaa

SEQ ID NO: 374238 - DNA, 75 bp, synthetic construct
  source 1..75: mol_type = other DNA
atgagaaccgcaaagcccggcaaaatcccgggcttttttgccagcaggagcagagaaaacagtatgacgcttgca

SEQ ID NO: 374239 - DNA, 75 bp, synthetic construct
  source 1..75: mol_type = other DNA
gctttaatgtcgataagtttgtcgcgaaaattgaggaagttgcaaaggccgtgtgggggattgaaaaaacaagaa

SEQ ID NO: 374240 - DNA, 75 bp, synthetic construct
  source 1..75: mol_type = other DNA
ggcgttgtaccaatgcgccgggtaaagtgaaggggtactctcagttcagttctgtaaaagaatcggtgagcgcct

SEQ ID NO: 374241 - DNA, 75 bp, synthetic construct
  source 1..75: mol_type = other DNA
cggcagaaagcggttggggtacgtcaaaactggcgcgtagcaacaacaacctgttcggcatgaaatgcatgaaag

SEQ ID NO: 374242 - DNA, 75 bp, synthetic construct
  source 1..75: mol_type = other DNA
atggtcagaaaggcattggtctggttatgttggtattgattggcgtcgcgccagcaggcttcgtggtgaacatga

SEQ ID NO: 374243 - DNA, 75 bp, synthetic construct
  source 1..75: mol_type = other DNA
tgcagtgacttcaaacggtgcaactccaacacttggagccaacaacactgagtttcctgaagtttcaataatgag

SEQ ID NO: 374244 - DNA, 75 bp, synthetic construct
  source 1..75: mol_type = other DNA
aaccaaatctgattaaaccagaattaagaccattcagaccattgccaattccacctcatgacaaacctgatggaa

SEQ ID NO: 374245 - DNA, 75 bp, synthetic construct
  source 1..75: mol_type = other DNA
acttatacatcactgaatattgcagatgtccgaccaattataatctgcccatactgtggaaataagacgaatctt

SEQ ID NO: 374246 - DNA, 75 bp, synthetic construct
  source 1..75: mol_type = other DNA
tcgccggatgatggcggaagctgtcatctctggcttgggcgtggcgtgccgcctgccgttaaccgtcgtcgctga

SEQ ID NO: 374247 - DNA, 75 bp, synthetic construct
  source 1..75: mol_type = other DNA
aatttgcaacaaataaaattgaaaccatcatcgacaaaatacctaatagaatactgactgaaaaagattattacc

SEQ ID NO: 374248 - DNA, 75 bp, synthetic construct
  source 1..75: mol_type = other DNA
atatctgactttgatatttatccaaaagttgttgccatgaagatgacaaacattagcaaagttgcaagattaata

SEQ ID NO: 374249 - DNA, 75 bp, synthetic construct
  source 1..75: mol_type = other DNA
atgtcgtgccgatcctgtcggcaacggccacagccggggggatttttatggcgctgatgcgcaaaacctttgtcc

SEQ ID NO: 374250 - DNA, 75 bp, synthetic construct
  source 1..75: mol_type = other DNA
cctgcaacgcgatgacatcatcatgtatcgccagacaggtgagttgaaatacggccttaattatccggatgcgaa

SEQ ID NO: 374251 - DNA, 75 bp, synthetic construct
  source 1..75: mol_type = other DNA
ttacgcggtgaatttattcgtggctgggatgacggacgtggtgtggatgccgggcgacaattattatcttcacag

SEQ ID NO: 374252 - DNA, 75 bp, synthetic construct
  source 1..75: mol_type = other DNA
caaaccgaaacctattgagcaggcactggcggaaggaaagagcctggatgattttttgatccccgacgaaaaata

SEQ ID NO: 374253 - DNA, 75 bp, synthetic construct
  source 1..75: mol_type = other DNA
aaggctgaacgtgagcagcgggaagcgcgtaagcgcgaactgcttgctttaatcaccagtgaagggttctctgtc

SEQ ID NO: 374254 - DNA, 75 bp, synthetic construct
  source 1..75: mol_type = other DNA
ggtgcatatggaaaagcggaaaatcaaagaaatttattttgaccctgaatataaaatgcagtgtgtgaacgggag

SEQ ID NO: 374255 - DNA, 75 bp, synthetic construct
  source 1..75: mol_type = other DNA
cgtaagcccttgccttcacctcttccccgtgctgaaaaggttatcccgccagctgaggaacgttgtcctgactgt

SEQ ID NO: 374256 - DNA, 75 bp, synthetic construct
  source 1..75: mol_type = other DNA
tcattaatgcctttgaataatgataatcatataaatattccgtctcctcagattgttattgaaggtaacacggtt

SEQ ID NO: 374257 - DNA, 75 bp, synthetic construct
  source 1..75: mol_type = other DNA
ggtgctgacctatgtgaatgattatggtgcgcgtttgccgctgttcttccgctgtacgggaaatacctgtcaggt

SEQ ID NO: 374258 - DNA, 75 bp, synthetic construct
  source 1..75: mol_type = other DNA
gccgaattgcatgggggaagtgctacatatcactatttaaataagcataatgtgttccgtattacgttaccgcaa

SEQ ID NO: 374259 - DNA, 75 bp, synthetic construct
  source 1..75: mol_type = other DNA
accggatgatggatgttagtcaggatatcttgatcattcatggtgatagcatcaataaaattgttaaccggacaa

SEQ ID NO: 374260 - DNA, 75 bp, synthetic construct
  source 1..75: mol_type = other DNA
tgcgagagatcaaaaagttgagtggcgtaacggaagcgctgaattataacgatagccgagtgccggttgaggtta

SEQ ID NO: 374261 - DNA, 75 bp, synthetic construct
  source 1..75: mol_type = other DNA
atgactaaacatctctctgccaaaacattaacagcggtactgtcgttactggcagcaacggtaagttattctacc

SEQ ID NO: 374262 - DNA, 75 bp, synthetic construct
  source 1..75: mol_type = other DNA
ctgcctgccgaccgcgagagcgtgttctatttcaacgtgcgtgagatcccgccgaaatcgaacaaacctaacacg

SEQ ID NO: 374263 - DNA, 75 bp, synthetic construct
  source 1..75: mol_type = other DNA
tggcgttagaggacgacctcgacgtggcgcagtgcaatgctgactggtgttttcgtgaaacgggagaaacctggc

SEQ ID NO: 374264 - DNA, 75 bp, synthetic construct
  source 1..75: mol_type = other DNA
ggagtttaccgtcaataacccgacgccgtacttcgtggttatcagtaacgccagtgcgcagaaaaatggcaatcc

SEQ ID NO: 374265 - DNA, 75 bp, synthetic construct
  source 1..75: mol_type = other DNA
taaatcaatcagcgtcacgctgcgcaataacgacccgaaaatgccgtatctggcacaaagctggatggaagacga

SEQ ID NO: 374266 - DNA, 75 bp, synthetic construct
  source 1..75: mol_type = other DNA
tcagtaatgccagcacacagaaaaatggcaatccggcagccggtttctcgccaatagtgatgtcgccgaaaacct

SEQ ID NO: 374267 - DNA, 75 bp, synthetic construct
  source 1..75: mol_type = other DNA
ccggacgaatgtcagtgatgatatgttaaataacatacctacgactgaggcaatcagtgcagctggcatttacag

SEQ ID NO: 374268 - DNA, 75 bp, synthetic construct
  source 1..75: mol_type = other DNA
tcctgtaagcacagtatgtgtatggaaatataccgcttacttagtgaaacccaaacgatgctggcaggatattac

SEQ ID NO: 374269 - DNA, 75 bp, synthetic construct
  source 1..75: mol_type = other DNA
ttacgttacgcccttagctatctggctaaacaggatcagaaagaacacggtattattctgggccgtagcaggctt

SEQ ID NO: 374270 - DNA, 75 bp, synthetic construct
  source 1..75: mol_type = other DNA
acgacttacgttacgcccttagctatctggctaaacaggatcagaaagaacacggtattattctgggccgtagca

SEQ ID NO: 374271 - DNA, 75 bp, synthetic construct
  source 1..75: mol_type = other DNA
tgacaatcgacactaacggtcagatggtcatgaagagcaaacaacagttgaaagaagattttggtatctcggcaa

SEQ ID NO: 374272 - DNA, 75 bp, synthetic construct
  source 1..75: mol_type = other DNA
aagtaacagaaaatccttcttcactatggacagtgaggatatggatgcccgcattgctgaatacgggcgtttttt

SEQ ID NO: 374273 - DNA, 75 bp, synthetic construct
  source 1..75: mol_type = other DNA
gtttagatgaagtgcactttaaaggcactatcttgcctattgagcagacattctggcgtgaattcggttgtattc

SEQ ID NO: 374274 - DNA, 75 bp, synthetic construct
  source 1..75: mol_type = other DNA
ggtaacggaagcattaaattataacgacacccgagagcctgttgaggttatcgcactaccgagtgaattaaaacc

SEQ ID NO: 374275 - DNA, 75 bp, synthetic construct
  source 1..75: mol_type = other DNA
ttgatatcgccagccctggaacgaaaattaatgagcctgaaaaactcttccgtagattttggcggggagataatt

SEQ ID NO: 374276 - DNA, 75 bp, synthetic construct
  source 1..75: mol_type = other DNA
agtccgattttaattaaaacgggattgcgggacataaaaaagttgtgcggtgtaactgaaaacatgaattataac

SEQ ID NO: 374277 - DNA, 75 bp, synthetic construct
  source 1..75: mol_type = other DNA
atgtataatgctaaccccaattacgaaatgaatttcacgattctgaaagatgtgaatgaacacatggaaggtctg

SEQ ID NO: 374278 - DNA, 75 bp, synthetic construct
  source 1..75: mol_type = other DNA
aattggcttcagccagacataacatgcttgaacagtataaaattaatagcattataatttgcattgtcgccatta

SEQ ID NO: 374279 - DNA, 75 bp, synthetic construct
  source 1..75: mol_type = other DNA
agcgccttagccaatttgctgacgatctcgctcatgaacttagaacgccaattaatgcattactgggtcagaatc

SEQ ID NO: 374280 - DNA, 75 bp, synthetic construct
  source 1..75: mol_type = other DNA
ccgcaggtcatgctggtcccggaaattttcggcaatgagccaggcgtgctggcaggccgtctgtgtaacagcgct

SEQ ID NO: 374281 - DNA, 75 bp, synthetic construct
  source 1..75: mol_type = other DNA
tgcaaacgcgcatcaagctgttctggcgaccaaaggcgctggagaagattgacatgagaaaaccgtggcagttta

SEQ ID NO: 374282 - DNA, 75 bp, synthetic construct
  source 1..75: mol_type = other DNA
ggcgtctgacgcaggaaacagcacgcaacggcgatgtcacccgctacagttatgataatccgcacagtgaattac

SEQ ID NO: 374283 - DNA, 75 bp, synthetic construct
  source 1..75: mol_type = other DNA
ctatttgcaacagtgccatatggggcaaatggtggtcaccatcctgtcggctgtggcacaggctgaacgccggag

SEQ ID NO: 374284 - DNA, 75 bp, synthetic construct
  source 1..75: mol_type = other DNA
aagaagaacaaaaagacgggctgtgtgcctacggttgcaatgaagttcctgaacggcctgctgcagggcgtcctc

SEQ ID NO: 374285 - DNA, 75 bp, synthetic construct
  source 1..75: mol_type = other DNA
tggtcgtcagcacggcgctggcggcactgctttccaccgtcagcctggcggcgcacgcctcggtcaccccggacc

SEQ ID NO: 374286 - DNA, 75 bp, synthetic construct
  source 1..75: mol_type = other DNA
gcgtgagatcccgccaaagtccgggaaagccaacaccctgcaaattgcgctgcaaacccgcatcaagctgttctg

SEQ ID NO: 374287 - DNA, 75 bp, synthetic construct
  source 1..75: mol_type = other DNA
cgctcaatgcggcgctggatatctatcaacaggttttgttgacacattatgggcaacgaatgcggcagaaactgg

SEQ ID NO: 374288 - DNA, 75 bp, synthetic construct
  source 1..75: mol_type = other DNA
ggcgtgatgaattacctgcaacttatacatcactttcccccacgcctttaaataatgcccggctgatctggtata

SEQ ID NO: 374289 - DNA, 75 bp, synthetic construct
  source 1..75: mol_type = other DNA
acaatcaacctgctgtcgcgttgtggaatttacagcgtctggcgcagacattgtcaccatttgttgccgtagatg

SEQ ID NO: 374290 - DNA, 75 bp, synthetic construct
  source 1..75: mol_type = other DNA
agtctgatggcgcgagagcgcagcgattatacccgcacattccgcatgctgagtctgaccgagcagcacagcacg

SEQ ID NO: 374291 - DNA, 75 bp, synthetic construct
  source 1..75: mol_type = other DNA
tcaacaagttttgttaagccattatgggcaacgtatgcgccagaagctggggttcatgacggcacaaaaagagga

SEQ ID NO: 374292 - DNA, 75 bp, synthetic construct
  source 1..75: mol_type = other DNA
attatacccgcacattccgcatgctgagtctgaccgagcagcacagcgcggcgtcaccgctacgtgatgagttta

SEQ ID NO: 374293 - DNA, 75 bp, synthetic construct
  source 1..75: mol_type = other DNA
cgaggtgtcctgcattatctggcgaaagaagagcaaaaagacggactgtgcgcatacggttgcagtgaagttcct

SEQ ID NO: 374294 - DNA, 75 bp, synthetic construct
  source 1..75: mol_type = other DNA
atgtggggaaaacgctggcggtgaatgcccagagtgattttgattcgctgctgggcgaggaagccagtccgctga

SEQ ID NO: 374295 - DNA, 75 bp, synthetic construct
  source 1..75: mol_type = other DNA
gccacacttcaggcactggaagcgcagcgttttagtgtaccgatgtggtacccggattatgacggcttttactgg

SEQ ID NO: 374296 - DNA, 75 bp, synthetic construct
  source 1..75: mol_type = other DNA
taatcctgaatacgccataccacaaaaagtgacgattagtattggcgctgttgtaacgcagaaaaatgagttaaa

SEQ ID NO: 374297 - DNA, 75 bp, synthetic construct
  source 1..75: mol_type = other DNA
ctgggcagtaatgaatgtgcactgaaaaactgcgtacaggccgccctcctcaatgccggacagaatgcatttttt

SEQ ID NO: 374298 - DNA, 75 bp, synthetic construct
  source 1..75: mol_type = other DNA
cgttaaggccgcacaggtctcctgttcggtggaaggtgtggtgctgtctgatgatgtggccgcgaaagcgcagat

SEQ ID NO: 374299 - DNA, 75 bp, synthetic construct
  source 1..75: mol_type = other DNA
catgcaggacggcgtggcagcacctggcgtgatggtggttccccgcttatggggaaatgagcccggcgtactggc

SEQ ID NO: 374300 - DNA, 75 bp, synthetic construct
  source 1..75: mol_type = other DNA
atcaacaaactgccggccgaccgcgagagcgtgttctatttcaacgtgcgcgaaattccgccgaaatcaaataaa

SEQ ID NO: 374301 - DNA, 75 bp, synthetic construct
  source 1..75: mol_type = other DNA
gccggcgggattcacaccgctgatgatggagccgaaaacctccgcaccgctgaatgcgaagatggacagcgtgcc

SEQ ID NO: 374302 - DNA, 75 bp, synthetic construct
  source 1..75: mol_type = other DNA
cgacaagtccatcagcgtcacgctgcgcaacaacgatcccaaactgccttatctggcgcagagctggatagagga

SEQ ID NO: 374303 - DNA, 75 bp, synthetic construct
  source 1..75: mol_type = other DNA
ctgaaggctcaatcagcatcagcccaaaaaacgtcttattgtgtcatgattatggatatcgatcacttcaaaaaa

SEQ ID NO: 374304 - DNA, 75 bp, synthetic construct
  source 1..75: mol_type = other DNA
ataaagttagtgaaaacaataagcaacgcagttttttttcaaaaaaaatgactttttgcataagcctgattttta

SEQ ID NO: 374305 - DNA, 75 bp, synthetic construct
  source 1..75: mol_type = other DNA
cggaatgctggcggtctattacgcataacagcggttcggcgcactgctgtacatatcagccgcattatacataca

SEQ ID NO: 374306 - DNA, 75 bp, synthetic construct
  source 1..75: mol_type = other DNA
atgtttcaattgataagctaacaactaatgaggcattcgacattaaagaaaaatttattctctgtccagctatga

SEQ ID NO: 374307 - DNA, 75 bp, synthetic construct
  source 1..75: mol_type = other DNA
agttgaaggcagcagcaaagcggctgcatacgctacaggctggaacgcctgccgcgcagccatgcttcgtaatga

SEQ ID NO: 374308 - DNA, 75 bp, synthetic construct
  source 1..75: mol_type = other DNA
gaaaaacacagaacgatcaggatatatgcgccctggcaaaagagtatgagatcgccatgctgttggtgactaaag

SEQ ID NO: 374309 - DNA, 75 bp, synthetic construct
  source 1..75: mol_type = other DNA
atgaacgatgtgcaaaatcgacgaatactggcattgctcaatatgctgtactatgccttaggaaaccgaacaact

SEQ ID NO: 374310 - DNA, 75 bp, synthetic construct
  source 1..75: mol_type = other DNA
tactgaactgatattatttattgaagatgttgacgctgagaatcatgaagcatatcagagacatttgaatgagat

SEQ ID NO: 374311 - DNA, 75 bp, synthetic construct
  source 1..75: mol_type = other DNA
ctggaggaacaacttgaagctctcaccaacaaaaaatcagagctcgatgcggcccttggtaaggcagaaaactcg

SEQ ID NO: 374312 - DNA, 75 bp, synthetic construct
  source 1..75: mol_type = other DNA
gatggtcgtgagtataacgctcacaatgaattttctggtggagggggaggaattccactctacgccacccctcag

SEQ ID NO: 374313 - DNA, 75 bp, synthetic construct
  source 1..75: mol_type = other DNA
tttacgatgactcgctacctgaaaaagggcgcggtaacgttcgttggcgtacgctcatcgagcaaatgctgagtc

SEQ ID NO: 374314 - DNA, 75 bp, synthetic construct
  source 1..75: mol_type = other DNA
tcaggcagtggcgacggcgatcgatacccaccttgtgtcgaatgacttcagcacgttgaggccacaaatcagcga

SEQ ID NO: 374315 - DNA, 75 bp, synthetic construct
  source 1..75: mol_type = other DNA
accattttgctggaatgtctgtgaattgtgtcgatagcacgggggcgggagatgcgggtgatgctgccaacttac

SEQ ID NO: 374316 - DNA, 75 bp, synthetic construct
  source 1..75: mol_type = other DNA
aagagtatgagatcgccatgctgttggtgactaaaggtgcagaaggtgtggtggtctgttatcgaggacaagttc

SEQ ID NO: 374317 - DNA, 75 bp, synthetic construct
  source 1..75: mol_type = other DNA
cggaacaagtgggtttataggtcgggtgggggatgatccttttggtgcgttaatgcaaagaacgctgctaactga

SEQ ID NO: 374318 - DNA, 75 bp, synthetic construct
  source 1..75: mol_type = other DNA
attttttataccctggcaggcgaagtgacgctgtatctgaacggtgagccttacacgctaggctcgggggatgtg

SEQ ID NO: 374319 - DNA, 75 bp, synthetic construct
  source 1..75: mol_type = other DNA
agtttgaatgcgtatcgctcattgagatggtgcgctcttatcaggaagaagccgcatctctcaaagcaaaaattg

SEQ ID NO: 374320 - DNA, 75 bp, synthetic construct
  source 1..75: mol_type = other DNA
tttatcatgtttcccatttttaaaagaggctgtattaataggtcgaaatggagttgataatttgtttaatcacag

SEQ ID NO: 374321 - DNA, 75 bp, synthetic construct
  source 1..75: mol_type = other DNA
tgacgtatatcaatccgtctcacgggcgttttcatcgtctggataaaatgttgtcctttgatgatgagcagcagg

SEQ ID NO: 374322 - DNA, 75 bp, synthetic construct
  source 1..75: mol_type = other DNA
ggttagcggttgccattgcgctagcggcttgcgcagataaaaacgcggatatccagacgccagcgcctgctgcaa

SEQ ID NO: 374323 - DNA, 75 bp, synthetic construct
  source 1..75: mol_type = other DNA
tttgtttctgaaggctcagctgagtggcggcgcaaagtgggaattttttgccattacattgcagaaaatacaggg

SEQ ID NO: 374324 - DNA, 75 bp, synthetic construct
  source 1..75: mol_type = other DNA
aatgcagacgcagcaaatccagcaaaaagggatgctgaaccagcaactgaaaacgcaaacgcagctgcaacagca

SEQ ID NO: 374325 - DNA, 75 bp, synthetic construct
  source 1..75: mol_type = other DNA
gagcgttatggtgttgatcaccgctcgccgtttaatcttactccgctgatgtcagcagcccgggcaggtaacatc

SEQ ID NO: 374326 - DNA, 75 bp, synthetic construct
  source 1..75: mol_type = other DNA
ccagtttttgctttgtggtgatgccagccagattgttcatcccagctttttctcatggagttcacttaagagcct

SEQ ID NO: 374327 - DNA, 75 bp, synthetic construct
  source 1..75: mol_type = other DNA
tttcagtgcgttcagcgactggctgccccgcaacagggctatcgccgcactgggggctgcccataccctgtatga

SEQ ID NO: 374328 - DNA, 75 bp, synthetic construct
  source 1..75: mol_type = other DNA
gctgataactttgttcaggctgatgttcgtaaaattgataccaatctttaccgtgcacggctcagtatccgggat

SEQ ID NO: 374329 - DNA, 75 bp, synthetic construct
  source 1..75: mol_type = other DNA
acccgttatgggagctgcttgcgctcacgcatcaggaagagcaactggagctgaaggaagagatttccagccgtg

SEQ ID NO: 374330 - DNA, 75 bp, synthetic construct
  source 1..75: mol_type = other DNA
agagttccggggtgtgattggtgcggctgcgtccggcaacggaccgctgtcccgggaggcgtatctgtcgctggg

SEQ ID NO: 374331 - DNA, 75 bp, synthetic construct
  source 1..75: mol_type = other DNA
ctctgacgaatctgctgtcgacatttatgatgcgctaccctggcgcactgctggcgcgttaccaccgcagtgatt

SEQ ID NO: 374332 - DNA, 75 bp, synthetic construct
  source 1..75: mol_type = other DNA
gaagaatctggcagaattgaaacgatcttttcttgatcctgcattaaagcagataaacgagaaaacccccttgtt

SEQ ID NO: 374333 - DNA, 75 bp, synthetic construct
  source 1..75: mol_type = other DNA
ggtaatgagttttctctggagcaataccagtttcggtatacatcgtttcaaggtgaaattagatactgcgtattg

SEQ ID NO: 374334 - DNA, 75 bp, synthetic construct
  source 1..75: mol_type = other DNA
atgatcaataaaatcgcgatatcaattaaggcgtatcacgttcgtaccggcgagcagcgtagtgaaatgccggac

SEQ ID NO: 374335 - DNA, 75 bp, synthetic construct
  source 1..75: mol_type = other DNA
actgggacgacgaaccgcagccgtttattggcgggctgatttctgagcaggccgcacagcaggtggttactgcct

SEQ ID NO: 374336 - DNA, 75 bp, synthetic construct
  source 1..75: mol_type = other DNA
cgtcattctctgtagcagtaaaacttcagcggaaatgctgtacttgcaaaaatgttggggctacaaggcttaccg

SEQ ID NO: 374337 - DNA, 75 bp, synthetic construct
  source 1..75: mol_type = other DNA
tgtgttttgactttgttactgttggttttacttatatttatggcagcaaaaggactgcgttatcaggccttgatg

SEQ ID NO: 374338 - DNA, 75 bp, synthetic construct
  source 1..75: mol_type = other DNA
gccgtgaaaccggaaaaataattgcttcggttaaaggtcagcgagctgccgcagttcatcttgttaaagctattc

SEQ ID NO: 374339 - DNA, 75 bp, synthetic construct
  source 1..75: mol_type = other DNA
tcaagatataatttgggtattatggtaatccccgcgcacctaattataaaaaaaggtgaggaaattcaattccct

SEQ ID NO: 374340 - DNA, 75 bp, synthetic construct
  source 1..75: mol_type = other DNA
caatagttggtattgtttccattggtatttttaatggtactttatatagtctggtaatgagttttctctggagca

SEQ ID NO: 374341 - DNA, 75 bp, synthetic construct
  source 1..75: mol_type = other DNA
attttaatggccgttgggatggggactgttttctttatctcgacaaagatgctacctgccaatagttcaagtagt

SEQ ID NO: 374342 - DNA, 75 bp, synthetic construct
  source 1..75: mol_type = other DNA
tcatggtacaggtgagagatattttcttatttgtgtggtgaatgtgttgttaacgattataacgctaggtatcta

SEQ ID NO: 374343 - DNA, 75 bp, synthetic construct
  source 1..75: mol_type = other DNA
gaggcacgggcggggattgttaactggaacaaaccgcttaccggtgctgccagtaccgcgccattcggcggcatt

SEQ ID NO: 374344 - DNA, 75 bp, synthetic construct
  source 1..75: mol_type = other DNA
tcccgtgcgtgcctgtggcgaagcctccttttcgtcaacaacgctatatgaatatttagccccactttgtgagca

SEQ ID NO: 374345 - DNA, 75 bp, synthetic construct
  source 1..75: mol_type = other DNA
cagcggttaatgatcgcctgtgatttctggccgcagcttgagcaagagatgaaaacgctggcagcagcacagcag

SEQ ID NO: 374346 - DNA, 75 bp, synthetic construct
  source 1..75: mol_type = other DNA
ttcaggaagagcatcaggttcgtgtagtgatgattaacggcgaaccgtggtttgttgcatctgatgtgtgtatgg

SEQ ID NO: 374347 - DNA, 75 bp, synthetic construct
  source 1..75: mol_type = other DNA
tatgatgcgctatccggggtcgctgctggcacgttatcaccgtagcgattttgccgtgctgttgccacaccggac

SEQ ID NO: 374348 - DNA, 75 bp, synthetic construct
  source 1..75: mol_type = other DNA
acgctgcttcgtgaaattcagaacgcacgcgaacaacacagccgtcttgatacgctgatccgctcttatgccgcc

SEQ ID NO: 374349 - DNA, 75 bp, synthetic construct
  source 1..75: mol_type = other DNA
ttccgttgataaagcatccggggatgtcgttgcgtctggtttatcaggatccgatgggcaactatttccattctt

SEQ ID NO: 374350 - DNA, 75 bp, synthetic construct
  source 1..75: mol_type = other DNA
gccgcgcagcaggtggtgacggcctggcagcaactggaagcgatgggtggacgcccctgcttgcgccgcgcttat

SEQ ID NO: 374351 - DNA, 75 bp, synthetic construct
  source 1..75: mol_type = other DNA
ggcgttatgacaccttcgatgaggcgattaagatggcgaacaacactcgctttggcctctcttgtgggctggttt

SEQ ID NO: 374352 - DNA, 75 bp, synthetic construct
  source 1..75: mol_type = other DNA
ttcggactctcttgcggtctggtttcccccgagcgggaaaagttcgatcaactgttgctggaggcgcgggcgggg

SEQ ID NO: 374353 - DNA, 75 bp, synthetic construct
  source 1..75: mol_type = other DNA
aattcgaatggcgaataacacccgctttggcctctcttgtgggctggtttcaccgaaacgggaaaagttcgagca

SEQ ID NO: 374354 - DNA, 75 bp, synthetic construct
  source 1..75: mol_type = other DNA
gcgaaccctgcttgcgccacgtttactgcgcgcaggaacatcgttgctgacgccggggatcattgaaatgtcagg

SEQ ID NO: 374355 - DNA, 75 bp, synthetic construct
  source 1..75: mol_type = other DNA
tcaaggcatatcacgtgcgtacgggcgagcagcgcagcgaaatgccagatggggcggcgagcttgcgccatcgcc

SEQ ID NO: 374356 - DNA, 75 bp, synthetic construct
  source 1..75: mol_type = other DNA
taacaaacgatatgaataggtctggtttattatcaagtgagtcagcgaaaggcttttttagcaaaattacgccac

SEQ ID NO: 374357 - DNA, 75 bp, synthetic construct
  source 1..75: mol_type = other DNA
ttcggcctattacatggcgaagcacattatccatttgatcaatgacgtagcgaaagtgatcaacaacgatccgca

SEQ ID NO: 374358 - DNA, 75 bp, synthetic construct
  source 1..75: mol_type = other DNA
cctgaaaaccttgcaggagcagtatccgaacgataccgacctgctgggacgggcgtcgatcattgatgaatcgaa

SEQ ID NO: 374359 - DNA, 75 bp, synthetic construct
  source 1..75: mol_type = other DNA
gctgcggcgtaggtcgggtgctggtggagcatgcgctctcgatggcaccggaactgacaaccaacgttaatgagc

SEQ ID NO: 374360 - DNA, 75 bp, synthetic construct
  source 1..75: mol_type = other DNA
agtatcgggccgagctggaagagctggtgcgttcctttctgccggaagcaccgttgtgggtcgcggttaatgaac

SEQ ID NO: 374361 - DNA, 75 bp, synthetic construct
  source 1..75: mol_type = other DNA
gagttgcacaacgaaatgcctgcgttacgcgcagcctttgaacaacgcggtgtccgatgctggtcagccagcggc

SEQ ID NO: 374362 - DNA, 75 bp, synthetic construct
  source 1..75: mol_type = other DNA
aacctggccggttgatatgctgggtaaaattctgccgcgtcacctgcagatcatctttgaaatcaacgactattt

SEQ ID NO: 374363 - DNA, 75 bp, synthetic construct
  source 1..75: mol_type = other DNA
tgccaccaggtatgcgggttacggaaacacgctccagtggcattgatataaatcacgatgttggctatacccgat

SEQ ID NO: 374364 - DNA, 75 bp, synthetic construct
  source 1..75: mol_type = other DNA
tgtgaattcgcctccgggtatgcgggttatggaaacgcgatccagcggttttgatgtcagccatgatgttggcta

SEQ ID NO: 374365 - DNA, 75 bp, synthetic construct
  source 1..75: mol_type = other DNA
agaaactcgccaggtttactacctgtcgatggagtttttgattggccgtactctctccaacgccatgctgtcgtt

SEQ ID NO: 374366 - DNA, 75 bp, synthetic construct
  source 1..75: mol_type = other DNA
cgatgctgaacattgccaatatgggctacttctcttctgaccgtacgatcaaagagtacgccgatcatatctggc

SEQ ID NO: 374367 - DNA, 75 bp, synthetic construct
  source 1..75: mol_type = other DNA
gcactggaagcgatggggttaaatctcgaagagctgattgatgaagaaaatgacccgggcctcggtaacggtggc

SEQ ID NO: 374368 - DNA, 75 bp, synthetic construct
  source 1..75: mol_type = other DNA
cctgaaaaaatacattgccgaacttgagtcacaggttggcaccactccacgacgccggggaccggcaggatttta

SEQ ID NO: 374369 - DNA, 75 bp, synthetic construct
  source 1..75: mol_type = other DNA
attcaaccgggtacttcaggtgatgaacaaaacctatggcagaacctggctcgaatcaaatgcccgtaacggcag

SEQ ID NO: 374370 - DNA, 75 bp, synthetic construct
  source 1..75: mol_type = other DNA
gaaactgcatatgcaggcgaggtataaggccacacattatcccgtcgccgggggaaaggcaaatggacaggtatg

SEQ ID NO: 374371 - DNA, 75 bp, synthetic construct
  source 1..75: mol_type = other DNA
agcccatagcagcgtttattgctcaattctcgaagctcttgagcaaggtgcaagtggtgtgaaaacaggctgttg

SEQ ID NO: 374372 - DNA, 75 bp, synthetic construct
  source 1..75: mol_type = other DNA
atgtatctactgataccatttatatcggacttgaggatgtagaagcaggatcagggcagtacaagccaacgaatg

SEQ ID NO: 374373 - DNA, 75 bp, synthetic construct
  source 1..75: mol_type = other DNA
caagccaccatcgcggccaccctcgaccgcgaaaccgcccgtattgatgcgcttgtcgagaagaaaacccgcttt

SEQ ID NO: 374374 - DNA, 75 bp, synthetic construct
  source 1..75: mol_type = other DNA
tcggagcttctgtataacccggaatatgcccggcagtgcgatgcctttgcggataaagtggaaaaggaatggcgc

SEQ ID NO: 374375 - DNA, 75 bp, synthetic construct
  source 1..75: mol_type = other DNA
cagcggttgatgatttcctgtgacttctggcctcagcttgaacaagagatgaaaacgctggcagcagaacagcaa

SEQ ID NO: 374376 - DNA, 75 bp, synthetic construct
  source 1..75: mol_type = other DNA
tgaatataacggtgggttacctcaaaacgaatcggaaaatcgatactggaaaaactctaactcggtggccagttt

SEQ ID NO: 374377 - DNA, 75 bp, synthetic construct
  source 1..75: mol_type = other DNA
atgatggatcatgaagtacgtaccgaaggtggttttcgtctttataccgaaagcgatctccgacgtttgaaattt

SEQ ID NO: 374378 - DNA, 75 bp, synthetic construct
  source 1..75: mol_type = other DNA
cagcgcttaatgatcacctgtgacttctggtgccagcttgagcaagagatgaaaattctggcggcagagcagcag

SEQ ID NO: 374379 - DNA, 75 bp, synthetic construct
  source 1..75: mol_type = other DNA
tacttccggaagagataaaagagaaagtaaaagagtttgatagtcttgtctacattagtgcttgccgattaggtg

SEQ ID NO: 374380 - DNA, 75 bp, synthetic construct
  source 1..75: mol_type = other DNA
attttttgccgttggcggattatggtggctggtggcggtcatcggtaaaatgccgcaagcgttggggaaactctg

SEQ ID NO: 374381 - DNA, 75 bp, synthetic construct
  source 1..75: mol_type = other DNA
actcaaagtatcgctggcaatcacgctctatttttggttattttttatacaaaataacattattcaggtatcaaa

SEQ ID NO: 374382 - DNA, 75 bp, synthetic construct
  source 1..75: mol_type = other DNA
cctgtgggaggcaatgacggggaccgcaactaacggccttgcggctattggcggcgcattttctggtgacgctaa

SEQ ID NO: 374383 - DNA, 75 bp, synthetic construct
  source 1..75: mol_type = other DNA
gagatcaaggtatcatttataaatatgccatcaggtatgcgggttacggaaacacgctccagtggcattgatata

SEQ ID NO: 374384 - DNA, 75 bp, synthetic construct
  source 1..75: mol_type = other DNA
gagatcaaggtttcatttatgaatatgccaccaggtatgcgggttacggaaacacgttccagtggcattgatatt

SEQ ID NO: 374385 - DNA, 75 bp, synthetic construct
  source 1..75: mol_type = other DNA
aacgcctccgatgccacaggcccgaatcccttcatgattaacaaagcttctgcgccaaaagttgatggtgagatc

SEQ ID NO: 374386 - DNA, 75 bp, synthetic construct
  source 1..75: mol_type = other DNA
atgaagtctgaaggtttaacgccagagcaactggcggagatcgagctttactatccgttacgtgaacgttattca

SEQ ID NO: 374387 - DNA, 75 bp, synthetic construct
  source 1..75: mol_type = other DNA
ttcgctttgacgatgcgcgataccggagatgatccattttttgattccgttgcttctgcttgcgcggatgcagct

SEQ ID NO: 374388 - DNA, 75 bp, synthetic construct
  source 1..75: mol_type = other DNA
cgaaggtaaacagtcaccgttcagttttgttctgccgtttaacccggcggatgtgcagccgaaagcacgtattct

SEQ ID NO: 374389 - DNA, 75 bp, synthetic construct
  source 1..75: mol_type = other DNA
cagaagacatgatggggctgttcgacactatccagaaggcgttttatctgggcgttgacgataccaacatgttgt

SEQ ID NO: 374390 - DNA, 75 bp, synthetic construct
  source 1..75: mol_type = other DNA
ggtgtcgatgacaccaacatgttgtcgtttttcaccaaaaccagctcagttctgaagatggttaataaggacgga

SEQ ID NO: 374391 - DNA, 75 bp, synthetic construct
  source 1..75: mol_type = other DNA
ctgtacagcttaaaaaaacacctgaagcagcggcagaattcgccgcaaaaatgcaggacgcaactgggaccgcat

SEQ ID NO: 374392 - DNA, 75 bp, synthetic construct
  source 1..75: mol_type = other DNA
tggcaaacggcgaagcgccgacgctgaccaccgcccacagcgaacaacagccgtcgccgcacgttttcagcctgc

SEQ ID NO: 374393 - DNA, 75 bp, synthetic construct
  source 1..75: mol_type = other DNA
tctttgagcttccattacctacatcttttttaagaactcagcgagcagtaagagaactgcacattactttagcgt

SEQ ID NO: 374394 - DNA, 75 bp, synthetic construct
  source 1..75: mol_type = other DNA
tggcgctgtatgcgttgatgcaatttgcctgcgcacctgtgctgggcgcgctgtcggatcgtttcgggcggcggc

SEQ ID NO: 374395 - DNA, 75 bp, synthetic construct
  source 1..75: mol_type = other DNA
tgtacttcaatatgctttgtgatcagggatgccggattgcacctgattacattgcctccacgttcagttacctgg

SEQ ID NO: 374396 - DNA, 75 bp, synthetic construct
  source 1..75: mol_type = other DNA
aacaaatttgttggcacatgtagctaaaaaatgtggttttgccgatcgctctagatatgagttaaacgtgattcg

SEQ ID NO: 374397 - DNA, 75 bp, synthetic construct
  source 1..75: mol_type = other DNA
tcattttcggcgaggatcgctttcactgggacgcgaccacgatcggcatttcgcttgccgcatttggcattctgc

SEQ ID NO: 374398 - DNA, 75 bp, synthetic construct
  source 1..75: mol_type = other DNA
gaatagagttcgtcagtcaagaagataaaacaatatgtattgcctttgctgatgaacgaggaatcgctctttttg

SEQ ID NO: 374399 - DNA, 75 bp, synthetic construct
  source 1..75: mol_type = other DNA
agtggtacgcgccgcaaaggtaatgcacggcaaaacctcacccattacgcataacggcgaaggcgtatttcaggg

SEQ ID NO: 374400 - DNA, 75 bp, synthetic construct
  source 1..75: mol_type = other DNA
tggcgcgtcaggggctggcgaagtttgaagaagatagcggcgcacaaccggacgacatcacccgcacgccgccgg

SEQ ID NO: 374401 - DNA, 75 bp, synthetic construct
  source 1..75: mol_type = other DNA
tggcaaacggcgaaacgccaacgctgaccaccgctgacagcgaacagcaaccgtcgccacacgtcttcagcctgc

SEQ ID NO: 374402 - DNA, 75 bp, synthetic construct
  source 1..75: mol_type = other DNA
atgtacgagcgttatgcaggtttaatttttgatatggatggcactatcctggataccgagcctacgcaccgtaaa

SEQ ID NO: 374403 - DNA, 75 bp, synthetic construct
  source 1..75: mol_type = other DNA
tatggcagagcagggaaaggaattgccgggctatgtgcaacgggaatttgaagaatttctccaatgcgggcggct

SEQ ID NO: 374404 - DNA, 75 bp, synthetic construct
  source 1..75: mol_type = other DNA
agtgggatctggaaggggtgcagttccatccggaaagtattctcagcgaacaagggcatcaactgttggctaatt

SEQ ID NO: 374405 - DNA, 75 bp, synthetic construct
  source 1..75: mol_type = other DNA
gaattcaataaataaaataatcactggaaatgatgagtatgctgaaaaacgtaaccaaataaatctcataataaa

SEQ ID NO: 374406 - DNA, 75 bp, synthetic construct
  source 1..75: mol_type = other DNA
ctggaatccattgtccttgaacatggcggcgattcgctggggatcgtcggttcatcactggggggatattacgcc

SEQ ID NO: 374407 - DNA, 75 bp, synthetic construct
  source 1..75: mol_type = other DNA
tgcccgcagtggtggtaaacccggcggtacgcccgtttgaactgctgacggactatctcggtcagaacgagaacc

SEQ ID NO: 374408 - DNA, 75 bp, synthetic construct
  source 1..75: mol_type = other DNA
cgcatttcactccaggaagtggaacaacgtctgctggcgctggacggcattcgcgaggcggcggctgttcccgtt

SEQ ID NO: 374409 - DNA, 75 bp, synthetic construct
  source 1..75: mol_type = other DNA
agaggactttcagactccgaaataagtgagattactggatattcatcgaactgggtgagcagtattaatatgctt

SEQ ID NO: 374410 - DNA, 75 bp, synthetic construct
  source 1..75: mol_type = other DNA
ataaaggtgcaaaagcagccggattttattatcacaaaccatcaaaaaggatgactgcagaggagttgattgagc

SEQ ID NO: 374411 - DNA, 75 bp, synthetic construct
  source 1..75: mol_type = other DNA
gccaggtcctgtgttgaagtcgccagattaccgaaagacgtgctgatagaaattgaagccattgcggttatcaaa

SEQ ID NO: 374412 - DNA, 75 bp, synthetic construct
  source 1..75: mol_type = other DNA
gatcttggacacatatgcgagatctttataaaagaaaaactttataaacttattgatgataatatatctctagat

SEQ ID NO: 374413 - DNA, 75 bp, synthetic construct
  source 1..75: mol_type = other DNA
ggcagcgtcggtgtgttctggcgcaataacgaaacgccttcttatgctttaagtcagtttctgcacttttttaca

SEQ ID NO: 374414 - DNA, 75 bp, synthetic construct
  source 1..75: mol_type = other DNA
gcggttctctcgtttggctccacgactcatgagccgggaaagcctgtattactcacccgtaatcaggatattaac

SEQ ID NO: 374415 - DNA, 75 bp, synthetic construct
  source 1..75: mol_type = other DNA
ttatgcaggcctttcggcctcctatacgccgatgcgcggatttgtcgaaatcatttttaacatcaatgtgacaat

SEQ ID NO: 374416 - DNA, 75 bp, synthetic construct
  source 1..75: mol_type = other DNA
atgatcattgatactaaacatgcccccaaagctatcggtccctatgtacaggcagtatccgctggtaatttattg

SEQ ID NO: 374417 - DNA, 75 bp, synthetic construct
  source 1..75: mol_type = other DNA
cgaccatttacgcgaccagccaggcaatcgctgggcactttgttttgaaaacagctatctttttattgtagcgtt

SEQ ID NO: 374418 - DNA, 75 bp, synthetic construct
  source 1..75: mol_type = other DNA
ccacacggtgtatgtaatgctgttctgctgccacacgttcaggtattcaatagcaaagtcgctgcagcacgtctg

SEQ ID NO: 374419 - DNA, 75 bp, synthetic construct
  source 1..75: mol_type = other DNA
ggcttatctgagcagatgtctggcatcaatacatccgactatcgccaaaaacatttatgaaacagaaaatctcag

SEQ ID NO: 374420 - DNA, 75 bp, synthetic construct
  source 1..75: mol_type = other DNA
ctccaatcgtggttcgcagtactgcacacacgattaccgggctatacaggagcggtttggtctgaaaacatccat

SEQ ID NO: 374421 - DNA, 75 bp, synthetic construct
  source 1..75: mol_type = other DNA
atgctgtcgcgtcggggtcatcggttaagtcgttttcgtaaaaataaacgccgcctgcgcgagcgtttgcgtcag

SEQ ID NO: 374422 - DNA, 75 bp, synthetic construct
  source 1..75: mol_type = other DNA
aactgaaatcatggctggttcgccgattcgtagtcgcgatatcagtctgggtgatgacccgggtattaatggaca

SEQ ID NO: 374423 - DNA, 75 bp, synthetic construct
  source 1..75: mol_type = other DNA
tgaacgcgtcgaactctcgtcgctatcaactgcagatgagcgatggtcgcccgttacatgtgatttctggcgatc

SEQ ID NO: 374424 - DNA, 75 bp, synthetic construct
  source 1..75: mol_type = other DNA
cagcttgaccgtgctggcagagatgcagcagcagggactggtaaaacatatcggtttgagcaatgtcacgccgac

SEQ ID NO: 374425 - DNA, 75 bp, synthetic construct
  source 1..75: mol_type = other DNA
ttatggtgcgatgcagctggcagggcctggtgttttcggtccgccgaaagatcgccatgttgctattaccgtgct

SEQ ID NO: 374426 - DNA, 75 bp, synthetic construct
  source 1..75: mol_type = other DNA
ccagatgacgaccagcacgatagcctttgatgatattgcttctgacgcgtttattgaacttttcacatcgggttc

SEQ ID NO: 374427 - DNA, 75 bp, synthetic construct
  source 1..75: mol_type = other DNA
ccggcagagctgcaaaaagcggtacacgataatctacgtaatctcggcctggacgtactggatgtggttaacctg

SEQ ID NO: 374428 - DNA, 75 bp, synthetic construct
  source 1..75: mol_type = other DNA
ggcacggcgagtggcgaaggcggggtacgtcgccctggcgccagacggtttaagctccgtgggtggatatccggg

SEQ ID NO: 374429 - DNA, 75 bp, synthetic construct
  source 1..75: mol_type = other DNA
aggctattctctgtcgttcatcgcggcatgcgggggcggcgtgggctggctgctggtcatgaccgcaggaggcgg

SEQ ID NO: 374430 - DNA, 75 bp, synthetic construct
  source 1..75: mol_type = other DNA
atggcaaactgggcgcagaaactaaagcttcatcacctgcaaatgctggtggcgctgggtgaacagggcaatctg

SEQ ID NO: 374431 - DNA, 75 bp, synthetic construct
  source 1..75: mol_type = other DNA
ttggtctgatgcagctatggcacttgtctattgttccctcgctggcggcgtattagttggcggcaactgggcact

SEQ ID NO: 374432 - DNA, 75 bp, synthetic construct
  source 1..75: mol_type = other DNA
ttgtgttacctgatctataacatcatcatggcattcatggagaagaaaagctggtctgatgttggaatggcgctt

SEQ ID NO: 374433 - DNA, 69 bp, synthetic construct
  source 1..69: mol_type = other DNA
atgcgcaagcttatcgtgcctacacattatctcaacacacgtaggccggataagatgcgccagcatcgc

SEQ ID NO: 374434 - DNA, 75 bp, synthetic construct
  source 1..75: mol_type = other DNA
ggtaaaaaatcatgggctgactttgccagcggtgacagcggtgacctgctggatctctgggtgttggttcgtaac

SEQ ID NO: 374435 - DNA, 75 bp, synthetic construct
  source 1..75: mol_type = other DNA
ttcggacgtgcatcgcctctctggaactgaagccagggaaaatgttggcccgcctgacgcggcagactatctgta

SEQ ID NO: 374436 - DNA, 75 bp, synthetic construct
  source 1..75: mol_type = other DNA
tgctggttcaaagcctggtggaagcctgctccgggaccagcacccaggtttacgccaccggcgtgcgttcgcgaa

SEQ ID NO: 374437 - DNA, 75 bp, synthetic construct
  source 1..75: mol_type = other DNA
atgtgtatccaccttaacttaatgatttttaccaaaatcattaggggattcatcagagctgcgcgttcgtttgcc

SEQ ID NO: 374438 - DNA, 75 bp, synthetic construct
  source 1..75: mol_type = other DNA
cccctggctatttcttcgacgtacaaaaccgcctgaagaaattcgttgaaggcgggcagttggggatcttccgca

SEQ ID NO: 374439 - DNA, 75 bp, synthetic construct
  source 1..75: mol_type = other DNA
ggttggttgctgaaggtaagcgagaggatgctcagcattactggttaacatctcttcatggtatggccttaaaag

SEQ ID NO: 374440 - DNA, 75 bp, synthetic construct
  source 1..75: mol_type = other DNA
gcacgtgagcagattgctcatcatctgggtcaccctgtgaaactggaaattgaaccgggtcgcttcctggtggcg

SEQ ID NO: 374441 - DNA, 75 bp, synthetic construct
  source 1..75: mol_type = other DNA
attggcggatgcggcgtaaacgccttatccgccctacgcgttaaagagccggtttgtagatactgttatggcctg

SEQ ID NO: 374442 - DNA, 75 bp, synthetic construct
  source 1..75: mol_type = other DNA
ggtatgggctatgccatcggtgctagcgtgacttctggttctccggttgtcgccattgaaggtgatagtgctttt

SEQ ID NO: 374443 - DNA, 75 bp, synthetic construct
  source 1..75: mol_type = other DNA
atgggcttcgctgaacaacaactttaagttccgtgccggtgaactgaccctcgttaatggcgttaatgggcatgg

SEQ ID NO: 374444 - DNA, 75 bp, synthetic construct
  source 1..75: mol_type = other DNA
gatttatgccccggaaacaacggcttcctccacgccagaagcggtagtgcctcccctgcccgacctgcctgagat

SEQ ID NO: 374445 - DNA, 75 bp, synthetic construct
  source 1..75: mol_type = other DNA
atgttttccttcatggaaggttgctcttcaaagaaaaataaagtacaacgaaagtatattgagtgaatcatgtgt

SEQ ID NO: 374446 - DNA, 75 bp, synthetic construct
  source 1..75: mol_type = other DNA
gcagaggatttttttaattcatttcctgacatgggtcggaatcacgccgaagaaaaattacaagaagcgatagat

SEQ ID NO: 374447 - DNA, 75 bp, synthetic construct
  source 1..75: mol_type = other DNA
tttgtcgcccgtgctgagcatccactggcgaaatacgccaccctcagctggaatgatcttgctaactggcggtgg

SEQ ID NO: 374448 - DNA, 75 bp, synthetic construct
  source 1..75: mol_type = other DNA
gatcgcaacatgaactggcgcgctttaaacaaggcgggctggtcggcagtctgaaaataggttgttctcctgtcg

SEQ ID NO: 374449 - DNA, 75 bp, synthetic construct
  source 1..75: mol_type = other DNA
tgatgcagcgcgagaaagagggactaaccctttcctatatcaaaaatgtcatctggcaggcggagcggggactgg

SEQ ID NO: 374450 - DNA, 75 bp, synthetic construct
  source 1..75: mol_type = other DNA
gcagtactggggaacgtattatcgccctcgatgattttaaatcatcactgatgcttgatggtaaatataaagatt

SEQ ID NO: 374451 - DNA, 75 bp, synthetic construct
  source 1..75: mol_type = other DNA
acgacaatgtaggccgtgaagctgcaaaagaaatcgccagacgtcttggggaacatcgttgccgcatggttgaac

SEQ ID NO: 374452 - DNA, 75 bp, synthetic construct
  source 1..75: mol_type = other DNA
gaccgcctttgggtattcaaacttaccggaactgccaaagcagaccggcttcttgagatttttgcctatgcccgg

SEQ ID NO: 374453 - DNA, 75 bp, synthetic construct
  source 1..75: mol_type = other DNA
ttacccgtcaggcaacgtgctgcaagatgccgccagtgctggaaattgactctgcatttaaattttatgacgaaa

SEQ ID NO: 374454 - DNA, 75 bp, synthetic construct
  source 1..75: mol_type = other DNA
aagaaaaaccaaccgggaaaatggacgtaaaaggctctggagcgataacagacctgacagacaacctttttatca

SEQ ID NO: 374455 - DNA, 75 bp, synthetic construct
  source 1..75: mol_type = other DNA
cctctcttgccttcacccattaaagagatttctccggttcctgaaaatgctgagcccggttttattccgggcgcg

SEQ ID NO: 374456 - DNA, 75 bp, synthetic construct
  source 1..75: mol_type = other DNA
gtctggttgatggcctgaactttgctgttcagtaccagggtaaaaacggtagcccgtctggcgaaggtatgactg

SEQ ID NO: 374457 - DNA, 75 bp, synthetic construct
  source 1..75: mol_type = other DNA
tctattacttacaattatgaaggctttggtatcggtgctgcagtttccagctccaaacgtactgatgatcagaac

SEQ ID NO: 374458 - DNA, 75 bp, synthetic construct
  source 1..75: mol_type = other DNA
gcgtccgtctgtagcatacctgcagtctaaaggtaaaaacctgggtaccatcgctggtcgtaactacgacgacga

SEQ ID NO: 374459 - DNA, 75 bp, synthetic construct
  source 1..75: mol_type = other DNA
atgagcagcaatacatttactctcggtacaaaatccgttaaccgtcttggttatggcgcgatgcaactggcaggt

SEQ ID NO: 374460 - DNA, 75 bp, synthetic construct
  source 1..75: mol_type = other DNA
caccggcgttaaagtttacttctgcgatcctcagagtccttggcagcggggaacaaatgagaacacaaatgggct

SEQ ID NO: 374461 - DNA, 75 bp, synthetic construct
  source 1..75: mol_type = other DNA
taaaatctcaaacttaccaaaatattgaggtcatcctggttgatgatggaagtacgacggaagagtctgatcgtt

SEQ ID NO: 374462 - DNA, 75 bp, synthetic construct
  source 1..75: mol_type = other DNA
ggaaggtgctgaagcctgcattaacgccatccgtgaactgggaagaaagtggatatcccggcaggcctacgcgac

SEQ ID NO: 374463 - DNA, 75 bp, synthetic construct
  source 1..75: mol_type = other DNA
ggaaggtgctgaagcctgcattaacgccatccgtgaactggcgaagaaagtggatatcccggcaggcctacgcga

SEQ ID NO: 374464 - DNA, 75 bp, synthetic construct
  source 1..75: mol_type = other DNA
cgccgatcactgacgcttgtgcactgaaagccgtgaccatgattgccgaaaacctgccgttagccgttgaagatg

SEQ ID NO: 374465 - DNA, 75 bp, synthetic construct
  source 1..75: mol_type = other DNA
tatctccggcggggagttacttcatcgaacatagcaaaaatattctccgcgatctggatgcattaaagcgcaaca

SEQ ID NO: 374466 - DNA, 75 bp, synthetic construct
  source 1..75: mol_type = other DNA
accgcagctgccgatgatcgccatcaataccactgcgggtacagcatcagaaatgactcgtttctgcatcatcac

SEQ ID NO: 374467 - DNA, 75 bp, synthetic construct
  source 1..75: mol_type = other DNA
cttccgttaatgtcattggtgctgattcattagacagtgcgatgaatatgatggcggaatatggttttcgccgta

SEQ ID NO: 374468 - DNA, 75 bp, synthetic construct
  source 1..75: mol_type = other DNA
aatcatattgataccagcgacttttatggtccgcacgtcaccaatcagattatccgcgaagcgctttatccttac

SEQ ID NO: 374469 - DNA, 75 bp, synthetic construct
  source 1..75: mol_type = other DNA
ctttgagcaacgaggcgtcccgtgctggtcagccagcggcaacgaagccgatgacttagccgccacgctggcggt

SEQ ID NO: 374470 - DNA, 75 bp, synthetic construct
  source 1..75: mol_type = other DNA
ctgccattggcctctgtggggtatggccccgcgacgtttcagatgacctacattccgggtacctacaacaatggc

SEQ ID NO: 374471 - DNA, 75 bp, synthetic construct
  source 1..75: mol_type = other DNA
tatattttctcttttcttattaattgtaaataaaaatcataattataataaaaatgtcattatattaattcttgg

SEQ ID NO: 374472 - DNA, 75 bp, synthetic construct
  source 1..75: mol_type = other DNA
ttatgatctttccgctgtcgacgggtttgtgttgccgaaatttaccctcagttcgttagctgaatggtgggatat

SEQ ID NO: 374473 - DNA, 75 bp, synthetic construct
  source 1..75: mol_type = other DNA
ttgggaaaacggccattcacccgggtcagatagaggtcattcaaaacgcgctgatggtcactcagggtgagcatt

SEQ ID NO: 374474 - DNA, 75 bp, synthetic construct
  source 1..75: mol_type = other DNA
gagtttcagagtctggaagggatatatgagaatctggatgcggttgccgaaaagtggcgcaaaaaattagaaacc

SEQ ID NO: 374475 - DNA, 75 bp, synthetic construct
  source 1..75: mol_type = other DNA
tcagagtccttggcagcggggaacaaatgagaatacaaatgggctaattcggcagtactttcctaaaaagacatg

SEQ ID NO: 374476 - DNA, 75 bp, synthetic construct
  source 1..75: mol_type = other DNA
gccgaaatcgtctgtgtgcagaacgaatacaacattgctcatcgtgctgatgacgcaatgattgaagctttggct

SEQ ID NO: 374477 - DNA, 75 bp, synthetic construct
  source 1..75: mol_type = other DNA
accgaaatcgtctgtgtgcagaacgaatacaacattgctcatcgtgctgatgacgcaatgattgatgctttggcc

SEQ ID NO: 374478 - DNA, 75 bp, synthetic construct
  source 1..75: mol_type = other DNA
atttaatactactaattttggagaagatccttttcctgatgttaatttatataataatatgaaatcaagtttttt

SEQ ID NO: 374479 - DNA, 75 bp, synthetic construct
  source 1..75: mol_type = other DNA
tcagttacaccctgaagaaagcggaagaaaccctgggcgttgaactgttcattcgtaagggacgatatattgaat

SEQ ID NO: 374480 - DNA, 75 bp, synthetic construct
  source 1..75: mol_type = other DNA
ctctatgaggcgctgcgttctcaagggcaccaggatcttgcagagaaagtcgaaccatacctccagcagggggtg

SEQ ID NO: 374481 - DNA, 75 bp, synthetic construct
  source 1..75: mol_type = other DNA
tcacccggttgatggcacgttgctttgcgagttcaaggaagaacacagccacgccaccgatcatctgatctatct

SEQ ID NO: 374482 - DNA, 75 bp, synthetic construct
  source 1..75: mol_type = other DNA
cggaagccttacacgcatctcgcgttgatatctggactgacgtccctggcatctacacgaccgatccgcgcgtgg

SEQ ID NO: 374483 - DNA, 75 bp, synthetic construct
  source 1..75: mol_type = other DNA
gatctcggtttgcctgacgaggacggtctgtcactgattcgccgctggcgtagcaatgatgtttcactgccgatt

SEQ ID NO: 374484 - DNA, 75 bp, synthetic construct
  source 1..75: mol_type = other DNA
gtcatggaacaagtgtataacctgggccactctaccattatgcagtcagcatggaagcgcgggcagaaagtgacc

SEQ ID NO: 374485 - DNA, 75 bp, synthetic construct
  source 1..75: mol_type = other DNA
gatttgttacggcgcatccagccataacctgtgcttcctggtgcccggcgaagatgccgagcaggtggtgcaaaa

SEQ ID NO: 374486 - DNA, 75 bp, synthetic construct
  source 1..75: mol_type = other DNA
ggcataatatttcggtggatttaattactacgtccgaagtgagcgtggcattaactcttgatacgactggttcaa

SEQ ID NO: 374487 - DNA, 75 bp, synthetic construct
  source 1..75: mol_type = other DNA
cggaggctttacacgcatctcgtgttgatatctggaccgacgtcccgggcatctacaccaccgatccacgcgtag

SEQ ID NO: 374488 - DNA, 75 bp, synthetic construct
  source 1..75: mol_type = other DNA
accctgaactggtgcaagcgttttataacgctcgtcgccgacagttacagcagccagaaatacagcctaacgccg

SEQ ID NO: 374489 - DNA, 75 bp, synthetic construct
  source 1..75: mol_type = other DNA
gggttgaagatgtggcaacgccggaaggtttcgatcgcgatcctgaactggtgcaagcgttttataacgcccgtc

SEQ ID NO: 374490 - DNA, 75 bp, synthetic construct
  source 1..75: mol_type = other DNA
tgctgccagtttccggctccgctgcgcccgcacgtggtgtggtttggcgaaatgccgcttggcatggatgaaatt

SEQ ID NO: 374491 - DNA, 75 bp, synthetic construct
  source 1..75: mol_type = other DNA
gctggtggaagaggatcccgggttttttgagaaactggcacaagcgcaaaaaccgcactttctatggattggatg

SEQ ID NO: 374492 - DNA, 75 bp, synthetic construct
  source 1..75: mol_type = other DNA
taaagtcagagaaataattaaacgcaatccgacgctcccggcatggaaactgacaggccagctaaacccggtgat

SEQ ID NO: 374493 - DNA, 75 bp, synthetic construct
  source 1..75: mol_type = other DNA
ttaataaaaatgatattacaatagaattaagagatttcttaataaaaaataaactacaaagaggttatgcatcat

SEQ ID NO: 374494 - DNA, 75 bp, synthetic construct
  source 1..75: mol_type = other DNA
gcactggccctgcgccgtaaacaaacgctattaactttgcatagcctgaatatgctgcattcccgtggttttctc

SEQ ID NO: 374495 - DNA, 75 bp, synthetic construct
  source 1..75: mol_type = other DNA
ttggagccaggaccgctattgctgtgttatgccgtcaggaaatggttgtgcttaaacagagaatgccgggcagca

SEQ ID NO: 374496 - DNA, 75 bp, synthetic construct
  source 1..75: mol_type = other DNA
ggaaatatgatccatttctataagaatatctgtatttcgggggggtttcttgcccttgttgtatcagggcccgga

SEQ ID NO: 374497 - DNA, 75 bp, synthetic construct
  source 1..75: mol_type = other DNA
gaacttgatatttatacgctgccaaattcactatgggaagcggttgttaaagaaaaagaaaaaagaataaattta

SEQ ID NO: 374498 - DNA, 75 bp, synthetic construct
  source 1..75: mol_type = other DNA
aatactatcatccagacattggtggcgtagaaactgttgtacaacagcatgctcaattattgaaggatgaatata

SEQ ID NO: 374499 - DNA, 75 bp, synthetic construct
  source 1..75: mol_type = other DNA
aactgaaatcatggccggttcgccgattcgcagtcgcgatatcagtctgggtgatgacccgggtattaatggaca

SEQ ID NO: 374500 - DNA, 75 bp, synthetic construct
  source 1..75: mol_type = other DNA
cagcaagtcgctgcctatccccaaccattatggtgtggatgattttccggtcattatccaggataaacggctgga

SEQ ID NO: 374501 - DNA, 75 bp, synthetic construct
  source 1..75: mol_type = other DNA
caccgatgattatttacctgcaacgatagagtctttgactgctccatttttaattattaaacatgatgcagttta

SEQ ID NO: 374502 - DNA, 75 bp, synthetic construct
  source 1..75: mol_type = other DNA
ttaaaaagttataaagcaggctcaataaatgcttctaaaatagaatctgcattggagtcattagcaaaaactatt

SEQ ID NO: 374503 - DNA, 75 bp, synthetic construct
  source 1..75: mol_type = other DNA
cattatggtgtggatgattttccggtcattattcaggataaacggctggataactttggtacgccagaatataac

SEQ ID NO: 374504 - DNA, 75 bp, synthetic construct
  source 1..75: mol_type = other DNA
tcaactgcagatgagcgatggtcgtccgttgcacgtgatttctggcgatcagggattcctgcctgctcctgtatc

SEQ ID NO: 374505 - DNA, 75 bp, synthetic construct
  source 1..75: mol_type = other DNA
ggatgtggctggtggaagatgaagtcagcaagtcgctgccaatccctaatcattatggagtggatgattttccgg

SEQ ID NO: 374506 - DNA, 75 bp, synthetic construct
  source 1..75: mol_type = other DNA
ctggcccgctgatgggcggtccggcacggatgatgtcgccaaacgctgactgggcacccgtattacccattcgcc

SEQ ID NO: 374507 - DNA, 75 bp, synthetic construct
  source 1..75: mol_type = other DNA
ctttgaagcgccttacccgccgctggcgaacggtggtttcatttgctacggcgagtatccaaacattcagcacaa

SEQ ID NO: 374508 - DNA, 75 bp, synthetic construct
  source 1..75: mol_type = other DNA
gccgcagcttcctcggcgtgtgggaaaatgaaaacggcgagcagatccacgatggtcgtaacaacctcggcgtga

SEQ ID NO: 374509 - DNA, 75 bp, synthetic construct
  source 1..75: mol_type = other DNA
gtgttcccgaaactggtgtttgcgattcgcgatggcctgaaccataaaaaaggcgatccgaactacgacatcaaa

SEQ ID NO: 374510 - DNA, 75 bp, synthetic construct
  source 1..75: mol_type = other DNA
tattgcgattgttgagcgtctgcgtcaggcggtggatcagtggaaagaagaaacgggttatggtttcagtctcta

SEQ ID NO: 374511 - DNA, 75 bp, synthetic construct
  source 1..75: mol_type = other DNA
atgatgctgattattgcgccactgttgccgctattgtcagcgagcagatgcagggccgcagccaggtagatatca

SEQ ID NO: 374512 - DNA, 75 bp, synthetic construct
  source 1..75: mol_type = other DNA
acaacgagcagcttcgcgcgaaaggtatcgccattgttgaacgtctgcgtcaggcagtggatcagtggaaagaag

SEQ ID NO: 374513 - DNA, 75 bp, synthetic construct
  source 1..75: mol_type = other DNA
agcagaatttcggcgcgtggcggcggggatggaagctgatgctgcagctatatgtgaggcaatcagtagtcgctg

SEQ ID NO: 374514 - DNA, 75 bp, synthetic construct
  source 1..75: mol_type = other DNA
gacggaaacgcaaagccgaacatttagccggacggattgctgctgttcatgctttacgggaatttggctttaagt

SEQ ID NO: 374515 - DNA, 75 bp, synthetic construct
  source 1..75: mol_type = other DNA
gatgtgtgaaaaagaaccggagctgaaaatagcgcagcaactggcactcgagttctaccgtattctgaaaaccca

SEQ ID NO: 374516 - DNA, 75 bp, synthetic construct
  source 1..75: mol_type = other DNA
cgtgcagctaaagcagcggaagtcgatgatgccgattattgcgccactgttgccgcggttgtcagcgagcagatg

SEQ ID NO: 374517 - DNA, 75 bp, synthetic construct
  source 1..75: mol_type = other DNA
ccggttactactgccgcaagacttccttcagtgttccgggtaagccgcgggttgatgccctggagaataatcagg

SEQ ID NO: 374518 - DNA, 75 bp, synthetic construct
  source 1..75: mol_type = other DNA
cgttacaaaatttacaacgtcaactgggattaatagctggaggtgaggctggaaaacgggctgcaacggcagcgg

SEQ ID NO: 374519 - DNA, 75 bp, synthetic construct
  source 1..75: mol_type = other DNA
aaagaacctgagctgaaaatagcgcagcaactggcactcgagttctaccgtattctgaaacccaaaataaatcac

SEQ ID NO: 374520 - DNA, 75 bp, synthetic construct
  source 1..75: mol_type = other DNA
aaaccaacgtgcgagatttagttgattttcaatcaagtatcagccatgtaaaactctttgaacggtcccgaataa

SEQ ID NO: 374521 - DNA, 75 bp, synthetic construct
  source 1..75: mol_type = other DNA
tatacctctgatacgtcttgttgccagcgagttgtcaccaaagaaaccacctgagccagaactgtctgagcctgc

SEQ ID NO: 374522 - DNA, 75 bp, synthetic construct
  source 1..75: mol_type = other DNA
ccgggtaagccgctggttgatgccctggagaataaccaaggatgaagaaaattatgcttcccgatttgttagtct

SEQ ID NO: 374523 - DNA, 75 bp, synthetic construct
  source 1..75: mol_type = other DNA
ctcggcgtttccgggccgctggcgggagtgctggcgacctcgtttggctactcttcggtatttcttgctggggcg

SEQ ID NO: 374524 - DNA, 75 bp, synthetic construct
  source 1..75: mol_type = other DNA
ggttttgccgtcctggcacttacgacaatgatactgccgttgctggcgtgggcctgcaatggcacggtgcgcaaa

SEQ ID NO: 374525 - DNA, 75 bp, synthetic construct
  source 1..75: mol_type = other DNA
tttggcggcgtaaaagtggcgattgtctctctgctggtggaaacggtaggcctgttgctgctctggcaggcgccg

SEQ ID NO: 374526 - DNA, 75 bp, synthetic construct
  source 1..75: mol_type = other DNA
ttaggaaaaatagttttaaaaccaaagacatgtctgacaatcacacagtatgtgttttcctgagcgcactcgcag

SEQ ID NO: 374527 - DNA, 75 bp, synthetic construct
  source 1..75: mol_type = other DNA
gactctgttcatagttgtcgtcggcaccggatacagcatctaccctgctcagggcagacgctatggcttgtattt

SEQ ID NO: 374528 - DNA, 75 bp, synthetic construct
  source 1..75: mol_type = other DNA
tgccgagtcgtgtgttcccttcggtggttcatatctgcagtcttcacaggcgttacaaaatttacagcgtcaact

SEQ ID NO: 374529 - DNA, 75 bp, synthetic construct
  source 1..75: mol_type = other DNA
gcgacagcagcacgtgaaggtgcacctcaggccagacaggtggccgatcgatggcatctgctaaaaaatattggc

SEQ ID NO: 374530 - DNA, 75 bp, synthetic construct
  source 1..75: mol_type = other DNA
ggctccgttgcagtgctgatactctccttcgcagggttatcaataccccggagacgaaacagtcaggcgcgcctc

SEQ ID NO: 374531 - DNA, 75 bp, synthetic construct
  source 1..75: mol_type = other DNA
tccgtccgccactggtactgccgtaacccggcttgttcacgtaaaatttttgccgggtcgcttgctcccttcgcc

SEQ ID NO: 374532 - DNA, 75 bp, synthetic construct
  source 1..75: mol_type = other DNA
gatgctgaaacgccagatgtatggtcgagcaggatttgaactactcaggcagagggtaatgagtccactggcatg

SEQ ID NO: 374533 - DNA, 75 bp, synthetic construct
  source 1..75: mol_type = other DNA
atcaaaaatccggcatacccggctcaggagagtctgttaatacacttatatattagagtaaatgacaaaatccag

SEQ ID NO: 374534 - DNA, 75 bp, synthetic construct
  source 1..75: mol_type = other DNA
taagctgtacggtcagctggtttctcaaaccaaaggtctgattgagcgtaccgacccaatgactcttgccatgtc

SEQ ID NO: 374535 - DNA, 75 bp, synthetic construct
  source 1..75: mol_type = other DNA
gtttataccttctctgaaaaaagtgaatatgatgatgaattatccgaaattgattggatcgtaaaaaacaaaaaa

SEQ ID NO: 374536 - DNA, 75 bp, synthetic construct
  source 1..75: mol_type = other DNA
tggaccagctgacggttatcgaacttgaccgtgatctggcagcgcgcctgcaaacgcatccattcttaggcccga

SEQ ID NO: 374537 - DNA, 75 bp, synthetic construct
  source 1..75: mol_type = other DNA
gatcgacccggcgatgcgagcggaaaatatctctgtcgcgcaatattgccagatggcgaactatctggcggagaa

SEQ ID NO: 374538 - DNA, 75 bp, synthetic construct
  source 1..75: mol_type = other DNA
ctggcctcggatgtgctggagcgtctcaaacgctggcaccgtcgcaagatgctggatgtgctggggatgtcagcg

SEQ ID NO: 374539 - DNA, 75 bp, synthetic construct
  source 1..75: mol_type = other DNA
cctgattgataagagcgatttcacgaaagcatctggcgttgctaccgatgatatcgttgctgtaggattggttta

SEQ ID NO: 374540 - DNA, 75 bp, synthetic construct
  source 1..75: mol_type = other DNA
acgcaccggacggtgaacggcgacccggcagagcagtggcagtatgatgagcacgggtggttaaccaccctcagc

SEQ ID NO: 374541 - DNA, 75 bp, synthetic construct
  source 1..75: mol_type = other DNA
tatttttccaatatctacttccaatcctattcagcgtattccgatgctgtaaaaataatatctgtgtctgttgtt

SEQ ID NO: 374542 - DNA, 75 bp, synthetic construct
  source 1..75: mol_type = other DNA
cttgcaaaagcgctatctaagaaaataagtcagctcgcagggttaggttctgataatgaagatttaatgttcact

SEQ ID NO: 374543 - DNA, 75 bp, synthetic construct
  source 1..75: mol_type = other DNA
caacgtaggagatgttttacctgaagaaccttatgctacgatggaaataaagggaagggatctggttacaggaat

SEQ ID NO: 374544 - DNA, 75 bp, synthetic construct
  source 1..75: mol_type = other DNA
gcaccacaggtgttgcaacctatcgtaacaacgacttctttggtctggttgatggtctgaactttgctgctcagt

SEQ ID NO: 374545 - DNA, 75 bp, synthetic construct
  source 1..75: mol_type = other DNA
gtgttttcggcaacctgccgtataacatctccacgccgttgatgttccatctgtttagctatactgatgccattg

SEQ ID NO: 374546 - DNA, 75 bp, synthetic construct
  source 1..75: mol_type = other DNA
gcaacggcagcgggtctccgttgcagtgctgatactcttcttcgcagggttatcaataccccggagacgaaacag

SEQ ID NO: 374547 - DNA, 75 bp, synthetic construct
  source 1..75: mol_type = other DNA
agttgtcgtcggcgccggatacagcatctaccctgctgagggcatacgctatggcttgtattttccgtccgccac

SEQ ID NO: 374548 - DNA, 75 bp, synthetic construct
  source 1..75: mol_type = other DNA
agttgtcgtcggcgccggatacagcatctaccctgcttagggcaaacgctatggcttgtattttccgtccgccac

SEQ ID NO: 374549 - DNA, 75 bp, synthetic construct
  source 1..75: mol_type = other DNA
gggattaatcgccggaggtgaggccgggaaacgggcagcaacggcagtgggtctccgttgcagtgctgatactct

SEQ ID NO: 374550 - DNA, 75 bp, synthetic construct
  source 1..75: mol_type = other DNA
gagtggttaaaagagcaacgagaaagtgggaattataacgccagccggataatggcgggaaatggtggtccgggg

SEQ ID NO: 374551 - DNA, 75 bp, synthetic construct
  source 1..75: mol_type = other DNA
cagcagaacttcggtgcgtggctgcggggatggaagctgatgctgcggctatatgtgaggcaatcagcagtcgct

SEQ ID NO: 374552 - DNA, 75 bp, synthetic construct
  source 1..75: mol_type = other DNA
tgtgaaacttaacgaggcgatcacagctgccgatgtaacgatgcgtaccgatgaaatcaagcgagaactcatgaa

SEQ ID NO: 374553 - DNA, 75 bp, synthetic construct
  source 1..75: mol_type = other DNA
cgtgaaacttaacgaggcgatcactgctgccgacgtcacgatgcgtaccgatgaaatcaaacgcgagttgatgaa

SEQ ID NO: 374554 - DNA, 75 bp, synthetic construct
  source 1..75: mol_type = other DNA
aagccgcactatgtcactggaagacgaatacttcgagcttctggaaatgatgaagtttatccctcgtttcgagaa

SEQ ID NO: 374555 - DNA, 75 bp, synthetic construct
  source 1..75: mol_type = other DNA
gattgatctgggcgaaacacctgagcagatcctcagcaagctggatgacgatcgtatcaaagaagatgatgttcg

SEQ ID NO: 374556 - DNA, 75 bp, synthetic construct
  source 1..75: mol_type = other DNA
cgacactttcgcagcagagaaaaatcagcaggtgttttatatcggcaccaatcagccggaagtcctgactgaaat

SEQ ID NO: 374557 - DNA, 75 bp, synthetic construct
  source 1..75: mol_type = other DNA
ataaagcctttttgaatgaacttgcccgactggtgggttcttcacacctgctcaccgatcccgcaaaaacggccc

SEQ ID NO: 374558 - DNA, 75 bp, synthetic construct
  source 1..75: mol_type = other DNA
tccgatggggaaaagcagcagctttctaacgaccaaatcgatttataccgttatcgtgctgatcagatccgccag

SEQ ID NO: 374559 - DNA, 75 bp, synthetic construct
  source 1..75: mol_type = other DNA
tgctagggacaggctcaaagcgagcggagcaatatgcaacgcgtagtaagctggtaagtaattattttgaccgtt

SEQ ID NO: 374560 - DNA, 75 bp, synthetic construct
  source 1..75: mol_type = other DNA
agaacaggctggtcgtggtctggtaaacataccatttgacgtattgcagggtggcgcaagtctgattaatgcaat

SEQ ID NO: 374561 - DNA, 75 bp, synthetic construct
  source 1..75: mol_type = other DNA
ggcggcgctggtcagcccgtttggcacgttctccgtgacggcggcatacgcgttctgccgtttggtgcgtcagac

SEQ ID NO: 374562 - DNA, 75 bp, synthetic construct
  source 1..75: mol_type = other DNA
aaaaattatattttgctgaatggtggttttttctgtagcgaccgtttgctgaagccattttatgcaccggtgagc

SEQ ID NO: 374563 - DNA, 75 bp, synthetic construct
  source 1..75: mol_type = other DNA
ccgtggcgcaatggcgataccactacccgtgaataccgctggcagggcgataacctcacgcttatcaatatcaac

SEQ ID NO: 374564 - DNA, 75 bp, synthetic construct
  source 1..75: mol_type = other DNA
tgcctccctgaatgaccgttattctgcccgttcattctgtgatgcggtcagccgtgccgcctgctggcagaaagc

SEQ ID NO: 374565 - DNA, 75 bp, synthetic construct
  source 1..75: mol_type = other DNA
ttcctgatttactgcaatccccatgagagcgcaacggtgctggccattttccgtgaagaggccatgcgcgatgag

SEQ ID NO: 374566 - DNA, 75 bp, synthetic construct
  source 1..75: mol_type = other DNA
gtgggcatttgggcttaacgccgcagtcggtgaatattttcggcggttataaagtgcaagggcgcggcgatgcag

SEQ ID NO: 374567 - DNA, 75 bp, synthetic construct
  source 1..75: mol_type = other DNA
aagctggaacgccagcctatgaaagagcgctgaataacgccgcaaatgccatcagaccaatacttgccaatgatg

SEQ ID NO: 374568 - DNA, 75 bp, synthetic construct
  source 1..75: mol_type = other DNA
gtcctgaacttataaataccgttgtattaagcagaaaaccatctgacgtgaaacgaatctggagcgcactggatg

SEQ ID NO: 374569 - DNA, 75 bp, synthetic construct
  source 1..75: mol_type = other DNA
gccacatcagaatcgatgggcgtgacaccaatgacatctgatgttatcccgccgaaaaatgctttcactcgcggc

SEQ ID NO: 374570 - DNA, 75 bp, synthetic construct
  source 1..75: mol_type = other DNA
ttccggggctgcgcactgttgaaccgcacgcggacggtacagcgcactggaatttcttggtgtactgtaatccgg

SEQ ID NO: 374571 - DNA, 75 bp, synthetic construct
  source 1..75: mol_type = other DNA
cggctataaatataattaccgcaatatgacggtggatttatttggtcgggtcgataatttattcgacaaagaata

SEQ ID NO: 374572 - DNA, 75 bp, synthetic construct
  source 1..75: mol_type = other DNA
cgggagcaatgggtgacggcacacaggctggcgatgtcgattacaccgtttcgaccacacgttttacgacccacg

SEQ ID NO: 374573 - DNA, 75 bp, synthetic construct
  source 1..75: mol_type = other DNA
atccgcgggattcgcctgtatgtggacggcattcccgccaccatgcccgacgggcaaggacaaacgtctaatatc

SEQ ID NO: 374574 - DNA, 75 bp, synthetic construct
  source 1..75: mol_type = other DNA
gccggagagcgagaaacgacccagtaccagtcaatcccgatggcaccacaacttaacccgtcacacgcgggtggc

SEQ ID NO: 374575 - DNA, 75 bp, synthetic construct
  source 1..75: mol_type = other DNA
gttaatgaatcgaatggtcgatattacgagcctgcgcctgggcggaattatggtgtaggcgtaaatctcgcatgg

SEQ ID NO: 374576 - DNA, 75 bp, synthetic construct
  source 1..75: mol_type = other DNA
cggtgatgccagttatcacaaatggcttcctgcgggatcgttgaaatacgccataaccgatgcctggaacgtcta

SEQ ID NO: 374577 - DNA, 75 bp, synthetic construct
  source 1..75: mol_type = other DNA
actggtttcacagtttggctcgttttcctttaccgtggcgcacgctttctgccgtctggtttatcagcttggtgt

SEQ ID NO: 374578 - DNA, 75 bp, synthetic construct
  source 1..75: mol_type = other DNA
gccgtgccgcctgctggcagaaagcaacgcgccttcgcctgttccagttctttggcgttccctccgttacggctt

SEQ ID NO: 374579 - DNA, 75 bp, synthetic construct
  source 1..75: mol_type = other DNA
cacgcaggttgaccgtgtgatttacggaattaactgcacggatttatctctcgctgacaggggcagggctgccgg

SEQ ID NO: 374580 - DNA, 75 bp, synthetic construct
  source 1..75: mol_type = other DNA
agaacagtacgacacgcgaaaaaccatcaagcaaactcaggctgggttgcgctatgagcgtagcctgagcgcgca

SEQ ID NO: 374581 - DNA, 75 bp, synthetic construct
  source 1..75: mol_type = other DNA
atttttatgccgtttccggttttgattttctgccgtgcctgaaagcatacatgacacgttacggcatttccggtc

SEQ ID NO: 374582 - DNA, 75 bp, synthetic construct
  source 1..75: mol_type = other DNA
caccttctcaatgtaatggcgtattttcagtccatatccggctttgatttcgcgcccgtttatgcaacttatcat

SEQ ID NO: 374583 - DNA, 75 bp, synthetic construct
  source 1..75: mol_type = other DNA
tgctaacatggtcaaaattgaaggcggtgagtggctggtagaaaccgtacaaatgctgaccgaacgtgccgttcc

SEQ ID NO: 374584 - DNA, 75 bp, synthetic construct
  source 1..75: mol_type = other DNA
gtattgcactgttcatgcaggcgatggaatgcctggcgacagcgcgcaggattctgctcgatgcttccggtgaca

SEQ ID NO: 374585 - DNA, 75 bp, synthetic construct
  source 1..75: mol_type = other DNA
cacgtaacgaataaggatcgtgaaggtatatgccaccaactagccaatacaaacttgattaattggtgcaatcca

SEQ ID NO: 374586 - DNA, 75 bp, synthetic construct
  source 1..75: mol_type = other DNA
gcggcgattttgcccgtctccgcaccgttcaaatttgctctgttggtcgtcggacgtttgattcttggctttggt

SEQ ID NO: 374587 - DNA, 75 bp, synthetic construct
  source 1..75: mol_type = other DNA
gccagaataactatctgaatggcctgaagttgcaggtggatttgcccctatatttccagacatctgttatcactt

SEQ ID NO: 374588 - DNA, 75 bp, synthetic construct
  source 1..75: mol_type = other DNA
gaaatcaccctggacaatgtactggcaacattccgccatcttaataccagcaagatgcagacgtttcaagatgca

SEQ ID NO: 374589 - DNA, 75 bp, synthetic construct
  source 1..75: mol_type = other DNA
gggaccgtacacattgtctttaagcgttctgaccttgttgaaaaactgaatgatattattgcacggcattatcca

SEQ ID NO: 374590 - DNA, 75 bp, synthetic construct
  source 1..75: mol_type = other DNA
ggttttgctgcactggcgcttaccacaatggcattgccgttactggcgtgggcctgtaacggtaccgtgcgtaaa

SEQ ID NO: 374591 - DNA, 75 bp, synthetic construct
  source 1..75: mol_type = other DNA
ggcctgtaacggcacagtgcgcaaagtaccagccctggcgggagaacgtccatctctgtggagcgttgtcggact

SEQ ID NO: 374592 - DNA, 75 bp, synthetic construct
  source 1..75: mol_type = other DNA
gcggcgcatttgtcgtgatgcgcgtcatgtttggctggatgccggaccgttttggcggtgtgaaagtggcgattg

SEQ ID NO: 374593 - DNA, 75 bp, synthetic construct
  source 1..75: mol_type = other DNA
ggcgcatgggtagcattagctggcgcggcgttaaccggagcaggatgttcgcttatctttccggcattgggtgtg

SEQ ID NO: 374594 - DNA, 75 bp, synthetic construct
  source 1..75: mol_type = other DNA
ggcctgtaacggcacagtgcgcaaagtaccggccctggcgggagaacgtccatctctgtggagcgttgtcgggct

SEQ ID NO: 374595 - DNA, 75 bp, synthetic construct
  source 1..75: mol_type = other DNA
cttccgcatcgcttttgcggtttttctcacctacatgaccgtagggttgccgttgccggttatcccgctgtttgt

SEQ ID NO: 374596 - DNA, 75 bp, synthetic construct
  source 1..75: mol_type = other DNA
tctctgttggtacgcgtggcgcatccaacacctatgaccacctgatcatttgcggcagaaggccaaagccagaat

SEQ ID NO: 374597 - DNA, 75 bp, synthetic construct
  source 1..75: mol_type = other DNA
gattaatgcaatcagtcaggggcttggtggccccaaggttttggatgatgtctatcgtccagtcgatcgaccgac

SEQ ID NO: 374598 - DNA, 75 bp, synthetic construct
  source 1..75: mol_type = other DNA
taacaggcttgggaaagtggcaaataaggatttgattcgcgggctatccgatttgcgagaagaacttgctaaacc

SEQ ID NO: 374599 - DNA, 75 bp, synthetic construct
  source 1..75: mol_type = other DNA
gtttcggtgcaatcatgcgcttgtatgagtccaaagcagcaaggaatgctctcttacgtctggcaaacaccaaag

SEQ ID NO: 374600 - DNA, 75 bp, synthetic construct
  source 1..75: mol_type = other DNA
ggtgggcgactcgctgggcatgacggttcaggggcacgactccaccctgccagttaccgttgctgatatcgccta

SEQ ID NO: 374601 - DNA, 75 bp, synthetic construct
  source 1..75: mol_type = other DNA
atgaaaccgaccactattgcttcactacagaaatataagcaggaaaaaaaacgcttcgccaccatcaccgcctat

SEQ ID NO: 374602 - DNA, 75 bp, synthetic construct
  source 1..75: mol_type = other DNA
tgcaaaaatgtaaacaggaaaaaaaacgcttcgccaccatcactgcttacgattatagctttgcaaaattgtttg

SEQ ID NO: 374603 - DNA, 75 bp, synthetic construct
  source 1..75: mol_type = other DNA
ggtgttgtcgaaggtcatgtaaatcgcctgaagatgttgaaacgccagatgtatggtcgagccggatttgaacta

SEQ ID NO: 374604 - DNA, 75 bp, synthetic construct
  source 1..75: mol_type = other DNA
gatttaaccttaccgggaatggatggtcgcgatattttgcgcgaatggcgggataaaggtcagcgtgagccagta

SEQ ID NO: 374605 - DNA, 75 bp, synthetic construct
  source 1..75: mol_type = other DNA
gctgcatcagccgaagtcggtaaaagaagcgcttgctacacgccgggtgtctctgttggtacgcgtggcgcatcc

SEQ ID NO: 374606 - DNA, 75 bp, synthetic construct
  source 1..75: mol_type = other DNA
acgtattgcagggtggtgcaagtctgattaatgcaatcagtcaggggcttggtgggccaaaagtattggatgatg

SEQ ID NO: 374607 - DNA, 75 bp, synthetic construct
  source 1..75: mol_type = other DNA
aaatggcttcctggctggttgagtggaaaactcaccggaaatgcagtggcttaaagatgctccgtcacagccatt

SEQ ID NO: 374608 - DNA, 75 bp, synthetic construct
  source 1..75: mol_type = other DNA
ggaatgcctggcgacagcgcgcaggattctgcttgatgcgtcaggtgatatttttctttacggttttgaagactg

SEQ ID NO: 374609 - DNA, 75 bp, synthetic construct
  source 1..75: mol_type = other DNA
ttgcccgccgccattgaaaaggcgctcgattttctgcgcgctaccgatttcaacgccctggagccgggcgttgtc

SEQ ID NO: 374610 - DNA, 75 bp, synthetic construct
  source 1..75: mol_type = other DNA
aaatgataccgggcagctacgcaattttctttccgcaggatgttcaccgaccaggttgtattatgcaaacagcct

SEQ ID NO: 374611 - DNA, 75 bp, synthetic construct
  source 1..75: mol_type = other DNA
tattgaaaaggcgctcgattttctgcgcgccactgatttcaacgccctggagccgggcgttgtcgaaatcgacgg

SEQ ID NO: 374612 - DNA, 75 bp, synthetic construct
  source 1..75: mol_type = other DNA
tgggttgtcctggatgatgggtggctggtggatctgaggctacgcatgtggctgggcgatcacgacaacattcct

SEQ ID NO: 374613 - DNA, 75 bp, synthetic construct
  source 1..75: mol_type = other DNA
ggcagtaagccacctactcaatgaagcgggtgtacctcatgactgcatgtatggctttgtgcgaaacgaacagac

SEQ ID NO: 374614 - DNA, 75 bp, synthetic construct
  source 1..75: mol_type = other DNA
gtgcatcgtcggtatatcgatattcagtttctggcgtggggtgaagagaaaatcggcattgctattgatacggga

SEQ ID NO: 374615 - DNA, 75 bp, synthetic construct
  source 1..75: mol_type = other DNA
cattgtggttttatgatgaaactcgcaaagaagaatatcacaacggtattggatggccagatgatgctatcgaaa

SEQ ID NO: 374616 - DNA, 75 bp, synthetic construct
  source 1..75: mol_type = other DNA
ataaaaatgcgtttttccctgtggagcttaaaatcgcttatcaggaatccgacgaatggcccggtgatggaatcg

SEQ ID NO: 374617 - DNA, 75 bp, synthetic construct
  source 1..75: mol_type = other DNA
tattgattaaccaggccaacgaatacatgaacagtaaacaatggcccggtaaagccgctattggtcgtctgaaag

SEQ ID NO: 374618 - DNA, 75 bp, synthetic construct
  source 1..75: mol_type = other DNA
atgaaaaaattgaaaacaaaaaacttgaaggaaagtgagtttataagacatattgaaaacaattctgttgtctca

SEQ ID NO: 374619 - DNA, 75 bp, synthetic construct
  source 1..75: mol_type = other DNA
gaacagtaaacaatggcccggtaaagccgctattggtcgtctgaaaggcgaggatctggcgcaatataatctgtg

SEQ ID NO: 374620 - DNA, 75 bp, synthetic construct
  source 1..75: mol_type = other DNA
atattaggtgccacctctcaggggagacctgcatggatattaatatctccgccagataaaaaaatggttatggat

SEQ ID NO: 374621 - DNA, 75 bp, synthetic construct
  source 1..75: mol_type = other DNA
ccccgttcaaaaccataaagggatgagactgggcaaagccgtcctggacatcatgaccgacggaaaaatttcaca

SEQ ID NO: 374622 - DNA, 75 bp, synthetic construct
  source 1..75: mol_type = other DNA
ttatatcttcaacggtttgctgtcttcaatttcggataacgtctttgtagggacgatttatatcaatgaagcaaa

SEQ ID NO: 374623 - DNA, 75 bp, synthetic construct
  source 1..75: mol_type = other DNA
ttggtttttatggcatttatcaccgcgtagcttcttcacgcaccgaagataccgacctgcaagacgacagccata

SEQ ID NO: 374624 - DNA, 75 bp, synthetic construct
  source 1..75: mol_type = other DNA
ctgcatgggcgatttgcgatgtgttttattccggtgattctgaggtttactctgaaatattaccggtactcactg

SEQ ID NO: 374625 - DNA, 75 bp, synthetic construct
  source 1..75: mol_type = other DNA
tgcttctggccttgatgagacattcgcgcgctccgaccttatcgcttactcggccttactggcctggctcatctt

SEQ ID NO: 374626 - DNA, 75 bp, synthetic construct
  source 1..75: mol_type = other DNA
tggtcaccgcgctggcgttgcatctggcggaagtcggcctgattggtttgtctgtcattattctgactacatcac

SEQ ID NO: 374627 - DNA, 75 bp, synthetic construct
  source 1..75: mol_type = other DNA
attattgcgaaagctgctggctggcattttggcgatttcttcctgcgcatgtcaccggtaaccgtcccggttctg

SEQ ID NO: 374628 - DNA, 75 bp, synthetic construct
  source 1..75: mol_type = other DNA
atggaaaagaccacaacgcaggagttattagcgcaggctgaaaaaatctgcgcgcagcgtaatgtgcgcctgacc

SEQ ID NO: 374629 - DNA, 75 bp, synthetic construct
  source 1..75: mol_type = other DNA
cccgcaaaattctctcgctgactcgaaagcctaaatcacgcgtagaaagcgctctgaacccgattgatttaacgg

SEQ ID NO: 374630 - DNA, 75 bp, synthetic construct
  source 1..75: mol_type = other DNA
gcggaaaacaaaaacgagctggtggtgaagccagcggccaagcaaatgacggaatggcaccgggagctggaagcc

SEQ ID NO: 374631 - DNA, 75 bp, synthetic construct
  source 1..75: mol_type = other DNA
tctgaccgtattaaaaaggtatggtcacataaacgacaacagtttgaacaggatggaacaaagataaccggtaat

SEQ ID NO: 374632 - DNA, 75 bp, synthetic construct
  source 1..75: mol_type = other DNA
tcatcagattttagtagtaagttacgtgagctgatcgaaaattatgatgagctcagccctgtattgatttgcaat

SEQ ID NO: 374633 - DNA, 75 bp, synthetic construct
  source 1..75: mol_type = other DNA
gcaagccacgcagtgaaatgggtgtgacttgttcaggccgccagaaaatgaaattaggcagcaaaccacttattt

SEQ ID NO: 374634 - DNA, 75 bp, synthetic construct
  source 1..75: mol_type = other DNA
ccggttttgacagagcaaccacctttatcaaaagaaaaccttattgcattggcagagttgaaaagtaagcgactc

SEQ ID NO: 374635 - DNA, 75 bp, synthetic construct
  source 1..75: mol_type = other DNA
tgtttgatatagcagtcaaactcagtggtcggctggtaagtacggcgctcaatggacgccagcgtcttacagccg

SEQ ID NO: 374636 - DNA, 75 bp, synthetic construct
  source 1..75: mol_type = other DNA
aacaaactcacaacgcgccatcttcaggaaaagcgatcttgaatttgttcaccaaatagtcggaacgatcaaatc

SEQ ID NO: 374637 - DNA, 75 bp, synthetic construct
  source 1..75: mol_type = other DNA
attggcacaactgaaagtgggcctgatgaagagtggaagccgggacaggttccaaatactgagcgattcctgcca

SEQ ID NO: 374638 - DNA, 75 bp, synthetic construct
  source 1..75: mol_type = other DNA
gaaaaaatcatgctggcaaacaatatgtgccacaacgtcacccgcgtagagcctctccgccacaacgaaacggaa

SEQ ID NO: 374639 - DNA, 75 bp, synthetic construct
  source 1..75: mol_type = other DNA
atgtcaaagccaaaatacccttttgaaaagcgcctagaagtcgtgaatcactacttcactactgatgatggttac

SEQ ID NO: 374640 - DNA, 75 bp, synthetic construct
  source 1..75: mol_type = other DNA
tttttggtttgcctgccaccgtttacccattggcgaaaacgatggatgagcttccgtgcggcatacagatcattt

SEQ ID NO: 374641 - DNA, 75 bp, synthetic construct
  source 1..75: mol_type = other DNA
aggattttacttgaggtgttaactgtttctgcttttattcagtttcttgcgttaataacacctctttttttcagg

SEQ ID NO: 374642 - DNA, 75 bp, synthetic construct
  source 1..75: mol_type = other DNA
tatttgatatgttatcaatttatattatttacaaactaattgtttcaaataatacatggctgattatgcggaaat

SEQ ID NO: 374643 - DNA, 75 bp, synthetic construct
  source 1..75: mol_type = other DNA
tcagagatggcagggtgctgctcaacagaatttttggttctgagggctgaaaaaacagaacccagatggctgcaa

SEQ ID NO: 374644 - DNA, 75 bp, synthetic construct
  source 1..75: mol_type = other DNA
ttaacctttttggcacgctcgcggagtacgaaagagcacttatcacagaacgcgttaatgctggtctggctgctg

SEQ ID NO: 374645 - DNA, 75 bp, synthetic construct
  source 1..75: mol_type = other DNA
tctcatcacttacgcctcacagaagagatgaaggggacgctaaacgaaacaattcgccaactggaggctatgcat

SEQ ID NO: 374646 - DNA, 75 bp, synthetic construct
  source 1..75: mol_type = other DNA
gggatggcgctgtcgcataaactggcggggcgcaagaatcgggttttttgtattgtcggcgatggcgaacttaat

SEQ ID NO: 374647 - DNA, 75 bp, synthetic construct
  source 1..75: mol_type = other DNA
ctgaaaaggccccaaagatagtgcgccccgatactcgccgctggctgttgttcctggcatttatcatgctggggg

SEQ ID NO: 374648 - DNA, 75 bp, synthetic construct
  source 1..75: mol_type = other DNA
aggccagctatatgtacagcgataaccattatctggcggagatggcaaccatcctcggtaagccagaagaggcca

SEQ ID NO: 374649 - DNA, 75 bp, synthetic construct
  source 1..75: mol_type = other DNA
gtttatggctgaaccgccacaaggaaaagtccgtattgccggagaggatggactacctacgtgggcagatattcc

SEQ ID NO: 374650 - DNA, 75 bp, synthetic construct
  source 1..75: mol_type = other DNA
acaggggcatggcactgccgttgccagtattgcgctgtatggtgatgttgaggcttgtaaccagagcaatttctg

SEQ ID NO: 374651 - DNA, 75 bp, synthetic construct
  source 1..75: mol_type = other DNA
aagtaaatcaaaatattatcagtgagtttatggctgaaccgccacaaggaaaaatccgtattgccggagatgatg

SEQ ID NO: 374652 - DNA, 75 bp, synthetic construct
  source 1..75: mol_type = other DNA
gaataacagacaatggcctggtaaagcggctattggtcgtctgaaagatgacgaactggagcaatataatttgtg

SEQ ID NO: 374653 - DNA, 75 bp, synthetic construct
  source 1..75: mol_type = other DNA
cgaagaattaatctcaatcgctgaatcaaataaacagcgattagttaatcaggccaacgaatacatgaacagtaa

SEQ ID NO: 374654 - DNA, 75 bp, synthetic construct
  source 1..75: mol_type = other DNA
aatgaatattcctcgggtgaaagagtttggcgtgcccagcacaggtggtaacacttgtgtagcaaactttgtcca

SEQ ID NO: 374655 - DNA, 75 bp, synthetic construct
  source 1..75: mol_type = other DNA
gtgggcagagtactcagatcccaaatcacgttggacagctcgtaaagggctgttttggggcgcggcagaaggcgg

SEQ ID NO: 374656 - DNA, 75 bp, synthetic construct
  source 1..75: mol_type = other DNA
tattaagggtcaatctcacgacaggaaatattacccgcgaagattccagtaagtttaaaaattttgtcggtggta

SEQ ID NO: 374657 - DNA, 75 bp, synthetic construct
  source 1..75: mol_type = other DNA
tttgtggctggattatctggatgcactggagctggttgatacctccagtgcaccagatattgaatggcctacgcc

SEQ ID NO: 374658 - DNA, 75 bp, synthetic construct
  source 1..75: mol_type = other DNA
ccctgtggatatgattgataaatataaatcagagggatgggatttatcagacgctaaggaagtaaatcaaaatat

SEQ ID NO: 374659 - DNA, 75 bp, synthetic construct
  source 1..75: mol_type = other DNA
acaaagttagcctggaaaaagccgatttcttatggggaaaagggacgcgcgcaacgacggaagaaatttgtcgct

SEQ ID NO: 374660 - DNA, 75 bp, synthetic construct
  source 1..75: mol_type = other DNA
ctatgtacagtctgtcatagctaatatgtcagcaaagtcattggttgttttttgtttctatatattaggatataa

SEQ ID NO: 374661 - DNA, 75 bp, synthetic construct
  source 1..75: mol_type = other DNA
ttcgatttgttcaggaataaatgtattaagacaggtgtaatgcacgaaatattaaacattttgaatgaatatatg

SEQ ID NO: 374662 - DNA, 75 bp, synthetic construct
  source 1..75: mol_type = other DNA
tgcctggcgtcgtttggttatcacggtaacgtgccaagcctgatgaagtattacggcaaagatccgaaaaccatc

SEQ ID NO: 374663 - DNA, 75 bp, synthetic construct
  source 1..75: mol_type = other DNA
cgtcccgtgcccagccttccgtgccggtgaatgtggcagagccgctgcgcggggattaccgccgggagcagcgat

SEQ ID NO: 374664 - DNA, 75 bp, synthetic construct
  source 1..75: mol_type = other DNA
agccagcggggattgttcaccgtggtgaatttgtcttcacgaaggaggcaaccagccggattggtgtcggcaacc

SEQ ID NO: 374665 - DNA, 75 bp, synthetic construct
  source 1..75: mol_type = other DNA
ccgagccgctcaacgcgcaggtcatgaggatattagtgagctattgggctgcactgtatgcggctatgcgggcga

SEQ ID NO: 374666 - DNA, 75 bp, synthetic construct
  source 1..75: mol_type = other DNA
gcgcgataaatgcactctatcttgtgcgataaatggcatccacgcggcgtttcattatttgaaaaagaattacat

SEQ ID NO: 374667 - DNA, 75 bp, synthetic construct
  source 1..75: mol_type = other DNA
caacctagattcgctttcgcatttctggagcgcacagaaaatgacagcacctgcatcggatggaccagagatcgt

SEQ ID NO: 374668 - DNA, 75 bp, synthetic construct
  source 1..75: mol_type = other DNA
atgacctcgggaaaaaagcggcagcggactttatgcaacagcaggcccgtgatggtggtcggttaagtggagcat

SEQ ID NO: 374669 - DNA, 75 bp, synthetic construct
  source 1..75: mol_type = other DNA
ttcgtgttgctgataccaatagcctcaatattagtgactgttctaatggggagagtatttgaaccgttagttgaa

SEQ ID NO: 374670 - DNA, 75 bp, synthetic construct
  source 1..75: mol_type = other DNA
gaaacaggtttgcttaacctgaaagggaaaaatgctattggaaaaggtcaggagtatacgcagcagtttgatgct

SEQ ID NO: 374671 - DNA, 75 bp, synthetic construct
  source 1..75: mol_type = other DNA
cgtagcctggaccttctgctggtcgtgttctcaaactttgcggtagcgagttcgttccttggcgtaacgctgggt

SEQ ID NO: 374672 - DNA, 75 bp, synthetic construct
  source 1..75: mol_type = other DNA
atatgagctgatcatagctcactttgttattggtatctcattacgcactattgccaagaagagaagatgttcaga

SEQ ID NO: 374673 - DNA, 75 bp, synthetic construct
  source 1..75: mol_type = other DNA
tagcgttgcaggatgcaatgagctttaatctctccataagccggcaaggaagcaacggcgatgacagctgctcag

SEQ ID NO: 374674 - DNA, 75 bp, synthetic construct
  source 1..75: mol_type = other DNA
ggcttttgccacatggcaaaaagtcacgtctccagtgtgatgatgatgaaggcatcatgatagacggttgtgtgg

SEQ ID NO: 374675 - DNA, 75 bp, synthetic construct
  source 1..75: mol_type = other DNA
agatggcacgattagaaaggaattacaaactgcaattggttttgtagagggtattacgagcgttattgcatgtaa

SEQ ID NO: 374676 - DNA, 75 bp, synthetic construct
  source 1..75: mol_type = other DNA
atatgagctaatcattgctcactttgttatcggtatctcattacgcactattgcgaagaagagaaaatgctctga

SEQ ID NO: 374677 - DNA, 75 bp, synthetic construct
  source 1..75: mol_type = other DNA
atgcgtgatatgtatgaagtaatggatcgttggggagcttgggctgcttcagacaatagcggagttgactggcaa

SEQ ID NO: 374678 - DNA, 75 bp, synthetic construct
  source 1..75: mol_type = other DNA
gcaaaggctggaacgtggtcaacggcatttccattgcctttgtgctctatatcctgacttacgcttatatttctg

SEQ ID NO: 374679 - DNA, 75 bp, synthetic construct
  source 1..75: mol_type = other DNA
ggtgattatcggcggcaccattattggcgcagggatgttctccttgcccgtggtcatgtccggggcgtggttttt

SEQ ID NO: 374680 - DNA, 75 bp, synthetic construct
  source 1..75: mol_type = other DNA
ccagtggttcgattcttcatcacactttctcggagatgtcgctcaacgtcccggcacgggcggcaggttttggtt

SEQ ID NO: 374681 - DNA, 75 bp, synthetic construct
  source 1..75: mol_type = other DNA
gcgtgtttactcactctccctttaaagtacggttaatgctgctttctatgttgtgcgatatggtcaacaacaagc

SEQ ID NO: 374682 - DNA, 75 bp, synthetic construct
  source 1..75: mol_type = other DNA
cggaaagcaatgcgtcttatgcaccgtatctgttgatgaccctgccgttctgtctggcctcatttggttatcacg

SEQ ID NO: 374683 - DNA, 75 bp, synthetic construct
  source 1..75: mol_type = other DNA
ccgcgcatcgcgtaaacgctttggcagcccgaaattccgcgtctggggcggcaagccgatgattgcgctgattct

SEQ ID NO: 374684 - DNA, 75 bp, synthetic construct
  source 1..75: mol_type = other DNA
catcgaacatggtgtgcaagcgccgctaatgcgctgtcgctggacacttttatcaggcaactacaacatgtcaat

SEQ ID NO: 374685 - DNA, 75 bp, synthetic construct
  source 1..75: mol_type = other DNA
aaaaagccagatgcggcgctatgcctcaagattgaacgtgtacgccgcaatgctcggaagggacgctataagttg

SEQ ID NO: 374686 - DNA, 75 bp, synthetic construct
  source 1..75: mol_type = other DNA
atgcagaatcattacaatgaccttaagccaattgccgaaattatgtacccaaatccagctgtagaggaattaaaa

SEQ ID NO: 374687 - DNA, 75 bp, synthetic construct
  source 1..75: mol_type = other DNA
cgtcgcacattgctaaaccttgaggctcgtggagagttccccgaacgcgtacaggttacggaagggcgtaaggcc

SEQ ID NO: 374688 - DNA, 75 bp, synthetic construct
  source 1..75: mol_type = other DNA
aaaaaaccatatcagtctcccgtgagaggattcatttttttaggtatcatcgcgatcgcgatttataaaggatgt

SEQ ID NO: 374689 - DNA, 75 bp, synthetic construct
  source 1..75: mol_type = other DNA
aattaaaaagggcatctcctgtcaatttgccaccagccagtaccacgccattcacagcaatccaggtgtgtaaag

SEQ ID NO: 374690 - DNA, 75 bp, synthetic construct
  source 1..75: mol_type = other DNA
tacccacaccggaaaaacctgatgcggcgttatgcctcaagattgaacgcgccaggcgtaatgccctgaaagggc

SEQ ID NO: 374691 - DNA, 75 bp, synthetic construct
  source 1..75: mol_type = other DNA
taacagtaaaagtggcaaaattattgagccgcgttcagcgcacaacagagcattagtgctggctgagttaccaca

SEQ ID NO: 374692 - DNA, 75 bp, synthetic construct
  source 1..75: mol_type = other DNA
taaggcagaaaaaattgctgaagcggaatcacagcaggatgaatctcgtaaaacgaaggtaaccttcacaagcgc

SEQ ID NO: 374693 - DNA, 75 bp, synthetic construct
  source 1..75: mol_type = other DNA
ctgaccatggccctgttttacggtcagacaatatctgttcgctacatcatccggcagtttgacgtatctccccgg

SEQ ID NO: 374694 - DNA, 75 bp, synthetic construct
  source 1..75: mol_type = other DNA
aaaggtaagggagtcagattgatttctgcgccagaagatagtttgaaagatctccaaagacgaatagccgatctt

SEQ ID NO: 374695 - DNA, 75 bp, synthetic construct
  source 1..75: mol_type = other DNA
tctgggggaactgcagatctgaaaaaatttgtagagcgttataaaaataattatgcttcttattatggttctgtt

SEQ ID NO: 374696 - DNA, 75 bp, synthetic construct
  source 1..75: mol_type = other DNA
aaaaattgtccaaatgatgttgatactattcgtaaggcaaggtatacccacatatttgacaatctctatttgtta

SEQ ID NO: 374697 - DNA, 75 bp, synthetic construct
  source 1..75: mol_type = other DNA
ttcgagatgacgaactcacagtgaaagagttacacgcggactctgacgatgtaacgtacaaattttcaaagaaag

SEQ ID NO: 374698 - DNA, 75 bp, synthetic construct
  source 1..75: mol_type = other DNA
ctactcatcaccggtaccaatctgcgtgaaagccagcaggcgcaaaagctggcgcgtcagtattcgtcctgttga

SEQ ID NO: 374699 - DNA, 75 bp, synthetic construct
  source 1..75: mol_type = other DNA
gggcgtatcagaggaaatatctatatgttacatgatgagccggtgaatgcatttgatgcagagacattagatcca

SEQ ID NO: 374700 - DNA, 75 bp, synthetic construct
  source 1..75: mol_type = other DNA
acttacaactccagttagccacaccccacagcgataaagcctcgcgggaaacggtcagcagggcactgttaatgc

SEQ ID NO: 374701 - DNA, 75 bp, synthetic construct
  source 1..75: mol_type = other DNA
ctccaggcgctcagcgcaccgacaaacaccctcacgctggtgatcgtccccactgtcgccctcgcgattgagcag

SEQ ID NO: 374702 - DNA, 75 bp, synthetic construct
  source 1..75: mol_type = other DNA
actgattacatagtcactggtgctggagggtataacggcggcaatgtaattctgtcgaaggcgttggctaacggt

SEQ ID NO: 374703 - DNA, 75 bp, synthetic construct
  source 1..75: mol_type = other DNA
cggttctgaaaccgaaccaggtcaaaaatcacaaagttcggaatccgaacttggcgttctaaaaggggatatttt

SEQ ID NO: 374704 - DNA, 75 bp, synthetic construct
  source 1..75: mol_type = other DNA
tataacggcatgggaagtgttcttttgccttgggggatgtctgccgaacaatttgataaacaagttgatcaggca

SEQ ID NO: 374705 - DNA, 75 bp, synthetic construct
  source 1..75: mol_type = other DNA
gggagggaaatctacgctataccgagtttcgcaacacgcagatcgcagggcagtacataggatcgtttcgcaaca

SEQ ID NO: 374706 - DNA, 75 bp, synthetic construct
  source 1..75: mol_type = other DNA
gttcacattacaagggcgtatctctgaaaccgtattgaagctcaatcctgatatgattaagaatgctggaattaa

SEQ ID NO: 374707 - DNA, 75 bp, synthetic construct
  source 1..75: mol_type = other DNA
tcttctccacggcggcgtaaaacatgtggcgataaaacgcgcccagcgtggggccagctattacaagcttaaaaa

SEQ ID NO: 374708 - DNA, 75 bp, synthetic construct
  source 1..75: mol_type = other DNA
cgcactcgccgtaatgcagcaaggcccgatggaagggatatcctcactggctgacattgaagactttttgcaacg

SEQ ID NO: 374709 - DNA, 75 bp, synthetic construct
  source 1..75: mol_type = other DNA
actttccagcagatcgaagattatggctccgctcatggctggagttctgaacagattcaggccaaaaagattgag

SEQ ID NO: 374710 - DNA, 75 bp, synthetic construct
  source 1..75: mol_type = other DNA
caatatgatcgtgctggcgcgtgaagggctggattcgtttgtctcacgcgtggtctttttatcgtggtcttcggc

SEQ ID NO: 374711 - DNA, 75 bp, synthetic construct
  source 1..75: mol_type = other DNA
cctacgcaaacgcactaccgatgtaccgcgccgcccattgtttaccatgaaccgcgtggagaccaatctcacatg

SEQ ID NO: 374712 - DNA, 75 bp, synthetic construct
  source 1..75: mol_type = other DNA
cagtgttcactggaagaagcactgaaagcacggcaagatcagcaacgttatttcgaacaattagcgtggcggctg

SEQ ID NO: 374713 - DNA, 75 bp, synthetic construct
  source 1..75: mol_type = other DNA
gtgctggcagtacagatgccagataactggctggagccgacccatgtgctcatgcgcgaagttgcctgggaacaa

SEQ ID NO: 374714 - DNA, 75 bp, synthetic construct
  source 1..75: mol_type = other DNA
acgctgctgatggggggcttatggggtatttcctggggatgtgcaatgtggtttatgtactgggggccgtcagga

SEQ ID NO: 374715 - DNA, 75 bp, synthetic construct
  source 1..75: mol_type = other DNA
tatggggcatttcctggggatgtgcaatgtggtttatctactgggggccgtcaggaatggtagcaggtgaggcca

SEQ ID NO: 374716 - DNA, 75 bp, synthetic construct
  source 1..75: mol_type = other DNA
tgactgaaatggcgaaagcaattccgctgcgtcgcctcgctgatccgctggaagtaggcgagctggcagcctttc

SEQ ID NO: 374717 - DNA, 75 bp, synthetic construct
  source 1..75: mol_type = other DNA
ggcggaaagcatcgcgcgtcagtcaaacccggaggatccggaatcggtgctgactgaaatggcgaaagcaatccc

SEQ ID NO: 374718 - DNA, 75 bp, synthetic construct
  source 1..75: mol_type = other DNA
ttgtcgtctgggcagtttcctcgatatgagcgatgaagatcgcgatttccatattgatatcaatataaaaggcgt

SEQ ID NO: 374719 - DNA, 75 bp, synthetic construct
  source 1..75: mol_type = other DNA
taaccaggaacctacgtgcgcccgcaccgacaccctcacaccttcgaactactgttgccattaaggggtcgtttc

SEQ ID NO: 374720 - DNA, 75 bp, synthetic construct
  source 1..75: mol_type = other DNA
atgccgtataaaacgaaaagcgatctgccggaaagcgtaaagcacgtgctaccgtctcatgctcaggatatctat

SEQ ID NO: 374721 - DNA, 75 bp, synthetic construct
  source 1..75: mol_type = other DNA
cgtaaaaccggtcgcttagttaaagctattcgtgcggtgttgccttgcaagtggtccgtggattgcatattgtcc

SEQ ID NO: 374722 - DNA, 75 bp, synthetic construct
  source 1..75: mol_type = other DNA
atcgttactcaatccgcatggcgggctggcggtgcaaatgccggacaactggctggagccgacgcatgtgttaat

SEQ ID NO: 374723 - DNA, 75 bp, synthetic construct
  source 1..75: mol_type = other DNA
tcagattgaataatattcatcttgataactctaacattgcctggaaattgcgcggaatccaaatttcagcaggga

SEQ ID NO: 374724 - DNA, 75 bp, synthetic construct
  source 1..75: mol_type = other DNA
cgccacggtagcgatatatggatgtgataactttgttattgacaatatagaaatgaccaatagtgccggaatgtt

SEQ ID NO: 374725 - DNA, 75 bp, synthetic construct
  source 1..75: mol_type = other DNA
accatgtcatcgagcgcatcaactgtactaacggcaaaatcaactggggcattggcataggccttgcgggaagca

SEQ ID NO: 374726 - DNA, 75 bp, synthetic construct
  source 1..75: mol_type = other DNA
gctacattgataacggttacaacaccggcctttataccaactggaagtttgatatgtggctggaaaattcaccag

SEQ ID NO: 374727 - DNA, 75 bp, synthetic construct
  source 1..75: mol_type = other DNA
gagcgtgaagcggatgcttttgcttctgcatttctaatgcctcaggaaaacgtgatggccgttaagatggtggtc

SEQ ID NO: 374728 - DNA, 75 bp, synthetic construct
  source 1..75: mol_type = other DNA
gcggcaattggtgctggtgctttaggagttatacttagcgattattttaatgctcgttttactctcccttcgcct

SEQ ID NO: 374729 - DNA, 75 bp, synthetic construct
  source 1..75: mol_type = other DNA
ctaacttcgacaaatatgctggccaggacatcgtttccaacgcatcctgcaccaccaactgcctggctccgctgg

SEQ ID NO: 374730 - DNA, 75 bp, synthetic construct
  source 1..75: mol_type = other DNA
aacactccgatgttcgttaaaggcgctaacttcgacaaatatgctggccaggacatcgtttccaacgcatcctgc

SEQ ID NO: 374731 - DNA, 75 bp, synthetic construct
  source 1..75: mol_type = other DNA
ggtattggcattgggcttgcgggcagcacctacgataacaattacccggagcaccaggcggtgaaaaactttgtc

SEQ ID NO: 374732 - DNA, 75 bp, synthetic construct
  source 1..75: mol_type = other DNA
acctttttatgcgaaatatcaatgtgatgcaggaatcctctgttggacccgcattgagcatgaacttcgacatgc

SEQ ID NO: 374733 - DNA, 75 bp, synthetic construct
  source 1..75: mol_type = other DNA
atgccatttaaaaaactctcccgacgcacgttcctgacggcaagctcggtgcttgccttcctccatacccctttc

SEQ ID NO: 374734 - DNA, 75 bp, synthetic construct
  source 1..75: mol_type = other DNA
tattgccgaagaacggatgatcgccccgcaactgccaaagtgcattcttcatgaacttaccgagcgcccgcaccc

SEQ ID NO: 374735 - DNA, 75 bp, synthetic construct
  source 1..75: mol_type = other DNA
acagataaaaccagttctttttacacatggcttggggaatcgaaaaaattcgaaggccattggaccaacaataca

SEQ ID NO: 374736 - DNA, 75 bp, synthetic construct
  source 1..75: mol_type = other DNA
ctgttgtcagaaagtggctacgagggagaagtggttctgctcaatggcagcaatagcgatgcggtgtcgaagaag

SEQ ID NO: 374737 - DNA, 75 bp, synthetic construct
  source 1..75: mol_type = other DNA
ttctggcctcatcgtctacagcgatccagggaacgctggaaacgatgatccaccgtcttgaaagtaaaatgccgg

SEQ ID NO: 374738 - DNA, 75 bp, synthetic construct
  source 1..75: mol_type = other DNA
tcgcttttactcaattattatgaaaattaatcttccgttcatacactggtcacggattagcaatgataagcgcct

SEQ ID NO: 374739 - DNA, 75 bp, synthetic construct
  source 1..75: mol_type = other DNA
aattctggcctcatcgtctacagcgatccagggaacgctggaaacgatgatccaccgtcttgaaagtaaaatgcc

SEQ ID NO: 374740 - DNA, 75 bp, synthetic construct
  source 1..75: mol_type = other DNA
agaatattgacgatgcagaactggcattattaagagttcgtctgaataaaatctgcaaccgcacgcttcgccgac

SEQ ID NO: 374741 - DNA, 75 bp, synthetic construct
  source 1..75: mol_type = other DNA
gataacgaactttattacaatgaagaagtagaaaaacttgaacgctggtcagaagatcgacgtatcgcgctggac

SEQ ID NO: 374742 - DNA, 75 bp, synthetic construct
  source 1..75: mol_type = other DNA
tttgcactggccgcaaaggagcatcagagattaatgacgattgctgataccatacctcactacgatctggtgatt

SEQ ID NO: 374743 - DNA, 75 bp, synthetic construct
  source 1..75: mol_type = other DNA
agcatgtcgatcgccagacggtgaacagtgttttttccactgcgtataatgattatctgattaatgcatggatgg

SEQ ID NO: 374744 - DNA, 75 bp, synthetic construct
  source 1..75: mol_type = other DNA
attaaggcaatgaaatcgcttacgctgcgttttattctggcctttccgttcacattactgaccgcggcagatatc

SEQ ID NO: 374745 - DNA, 75 bp, synthetic construct
  source 1..75: mol_type = other DNA
ctggagtatgacccgacaaaagaacatgcctattttcatggtggaataaaacccagccagcaggcttatcatgtt

SEQ ID NO: 374746 - DNA, 75 bp, synthetic construct
  source 1..75: mol_type = other DNA
aactgattgttctgcatctgacgggcagccatgagccagtctgcagtaactggcccagagataaagccgtgttta

SEQ ID NO: 374747 - DNA, 75 bp, synthetic construct
  source 1..75: mol_type = other DNA
attaaagcaatgaaatcgattacgttgcgtttgattcttgccttcccgttcacattactgactgctgcagatatc

SEQ ID NO: 374748 - DNA, 75 bp, synthetic construct
  source 1..75: mol_type = other DNA
tcaaatgatcaaagagggatgtggtaatccatttgacattgaaaacgcgactggggaggctgcgatatgtatttg

SEQ ID NO: 374749 - DNA, 75 bp, synthetic construct
  source 1..75: mol_type = other DNA
aaattatcggctgggcatttgcggcaggggctgtggatggtatcggcagcggtgtggccaaaattggccaggaaa

SEQ ID NO: 374750 - DNA, 75 bp, synthetic construct
  source 1..75: mol_type = other DNA
tggttcttctgttcctccgccgacggcgttttaccagccgggaggcggtggtgaggcgaataatctggcacctgt

SEQ ID NO: 374751 - DNA, 75 bp, synthetic construct
  source 1..75: mol_type = other DNA
gtccggtctgttactgcgcacacagccagcctgtgtcagaaaatctgctggagcaggatttttacgccagtggcc

SEQ ID NO: 374752 - DNA, 75 bp, synthetic construct
  source 1..75: mol_type = other DNA
agctcttcaacttgcagaagaatttagtaatgtacgcttcttattagtcggtcgtggcttgaccacccagaataa

SEQ ID NO: 374753 - DNA, 75 bp, synthetic construct
  source 1..75: mol_type = other DNA
ttacccaggcctttgaaacttacgttgaacgtgaaaaacgtaaagcggttgcaacactatgtgctcaagaaaatc

SEQ ID NO: 374754 - DNA, 75 bp, synthetic construct
  source 1..75: mol_type = other DNA
cccctggtgcgggcgcagtggcttctgtctctggcagtacggtgatgaacggcgcgctgggtggcggggcgtctc

SEQ ID NO: 374755 - DNA, 75 bp, synthetic construct
  source 1..75: mol_type = other DNA
ttgtactttggggactgggtgcctcgttgggcttcccgctgaccatttctgccgccagcgataccggcccgatgc

SEQ ID NO: 374756 - DNA, 75 bp, synthetic construct
  source 1..75: mol_type = other DNA
agcgcatggggcgctggggtgtctgttgtgctttggggattgggcgcttctctgggcttcccactaaccatttct

SEQ ID NO: 374757 - DNA, 75 bp, synthetic construct
  source 1..75: mol_type = other DNA
acgaccctcgcacagttaaacgattatcaggaaaatctgctgctgctagcggaaatgtttctaagtgacaatagc

SEQ ID NO: 374758 - DNA, 75 bp, synthetic construct
  source 1..75: mol_type = other DNA
agttgggtgttatataagctctctttgtttttttgtatattatcaatatttttatgtgataattggcagctttcc

SEQ ID NO: 374759 - DNA, 75 bp, synthetic construct
  source 1..75: mol_type = other DNA
ttatgacgatgattctagtgatgggggtatcgttgggacacttagccttaaattttcttatctagcgcgttttta

SEQ ID NO: 374760 - DNA, 75 bp, synthetic construct
  source 1..75: mol_type = other DNA
atggcgtcctgggcaacccgtacacctgctatccgcgacattctttctgtctcgatcgctgaaatgggtggagtc

SEQ ID NO: 374761 - DNA, 75 bp, synthetic construct
  source 1..75: mol_type = other DNA
aggaaacgttcattgagccgcaggctgaactggtttacggcgccgtgtccgggaaaacattccgctggaaagacg

SEQ ID NO: 374762 - DNA, 75 bp, synthetic construct
  source 1..75: mol_type = other DNA
tcagtgttgaagggaaatctgctgccgcaggaacatcctcctatacagggcatatcactctggagcaaaaatcag

SEQ ID NO: 374763 - DNA, 75 bp, synthetic construct
  source 1..75: mol_type = other DNA
gtgggaaaaccttattatactcactataacggtatgaagatgatttcagcaaacccgggaaatacctttgataaa

SEQ ID NO: 374764 - DNA, 75 bp, synthetic construct
  source 1..75: mol_type = other DNA
gctgaacgtgatccggctaacctgaaatgggacgacgttggtgttgacgttgtcgctgaagcaactggtctgttc

SEQ ID NO: 374765 - DNA, 75 bp, synthetic construct
  source 1..75: mol_type = other DNA
cccttgagttcctcaaaaaacggaggaagggtaacagcatccagtggaaagatttttgattccggccatggacca

SEQ ID NO: 374766 - DNA, 75 bp, synthetic construct
  source 1..75: mol_type = other DNA
cttttactggatcttaaggctcaggatacaaatgtcagtgttccgattggcagtatatccccctttggcggtacc

SEQ ID NO: 374767 - DNA, 75 bp, synthetic construct
  source 1..75: mol_type = other DNA
gtcaggcagtaataatagcgtcctggttgactttttaaacaaaccagccagtgaaatgagcgtgacgttaattac

SEQ ID NO: 374768 - DNA, 75 bp, synthetic construct
  source 1..75: mol_type = other DNA
agggatataacgctgttttgagaggcagtattacgggggcacagagtacggtaaatatgatcaatgctctgtggt

SEQ ID NO: 374769 - DNA, 75 bp, synthetic construct
  source 1..75: mol_type = other DNA
catctgtccagaaacggcaagatgcagggagatattaacgccacgaatggaagtacagtcattctgggaagtagc

SEQ ID NO: 374770 - DNA, 75 bp, synthetic construct
  source 1..75: mol_type = other DNA
gcgataccgcgtgtgggtcaggaagtgatagtggacttcctgaacggggacccggaccagccggtggtcatgggg

SEQ ID NO: 374771 - DNA, 75 bp, synthetic construct
  source 1..75: mol_type = other DNA
tccttctcaggtaaggactggaaagtgacagcccgtgccggtctgggctaccagttcgacctgctggctaacggc

SEQ ID NO: 374772 - DNA, 75 bp, synthetic construct
  source 1..75: mol_type = other DNA
cccggatcagcactctggaaaatcaggtaagcgaactggttgcacttgtccggcagttaacaggaagcgaacatt

SEQ ID NO: 374773 - DNA, 75 bp, synthetic construct
  source 1..75: mol_type = other DNA
cctgaccgttcgtctggaaaaagcggcaacttacgagcagattaaagctgccgttaaagccgctgctgaaggcaa

SEQ ID NO: 374774 - DNA, 75 bp, synthetic construct
  source 1..75: mol_type = other DNA
tatacatcgctgatgagtggctcaagtctacccgtgagaatttcccagagatgacttcatgggaggcagacgatg

SEQ ID NO: 374775 - DNA, 75 bp, synthetic construct
  source 1..75: mol_type = other DNA
gctggcgcattaatgtctctcgcgccagccaagcagaaatcattcttgctactgtaagggggatcgttcgagggg

SEQ ID NO: 374776 - DNA, 75 bp, synthetic construct
  source 1..75: mol_type = other DNA
ccatatgcgcggtgaagtggcagcgactgatgatgacgagttactgagcaacaagctaaagcaaattagagaaat

SEQ ID NO: 374777 - DNA, 75 bp, synthetic construct
  source 1..75: mol_type = other DNA
attcaagcagaagtggggaatgtggataagaaagtgcttaataaagtacaaagtggcatcttgtacgagctacta

SEQ ID NO: 374778 - DNA, 75 bp, synthetic construct
  source 1..75: mol_type = other DNA
ggacaacgtccgctttggactggagtttgagaaatccgcctttggtaagtacaacgttgataatgctgtcaacgc

SEQ ID NO: 374779 - DNA, 75 bp, synthetic construct
  source 1..75: mol_type = other DNA
cagccggaagcgtatattgtcggcgaacattttggcgatgcacggcaatggttacaggccgatgtggaagatgcc

SEQ ID NO: 374780 - DNA, 75 bp, synthetic construct
  source 1..75: mol_type = other DNA
gctggcgcattaatgtctctcgcgccagccaagcagaagtcattcttgctactgtaaggggaatcgttcgagggg

SEQ ID NO: 374781 - DNA, 75 bp, synthetic construct
  source 1..75: mol_type = other DNA
gctctgatgtgccagtactgggcagtgttacggtgaataacaatacgacaacgcaatccgttgaatatcgttcca

SEQ ID NO: 374782 - DNA, 75 bp, synthetic construct
  source 1..75: mol_type = other DNA
accgcgggtgggccaggaggtgattgttgatttcctgaacggggacccggaccagccgctggtcatgggcaggac

SEQ ID NO: 374783 - DNA, 75 bp, synthetic construct
  source 1..75: mol_type = other DNA
cagtcaagcagaagtcattcttgccactgtaaggggcatcgttcgaggggtttttattgctgataaatggctcaa

SEQ ID NO: 374784 - DNA, 75 bp, synthetic construct
  source 1..75: mol_type = other DNA
ctatggttttgaaggtcgagaagctccacctgaaatagcaaacctttatcttgggaaaaaaataccagatgaatt

SEQ ID NO: 374785 - DNA, 75 bp, synthetic construct
  source 1..75: mol_type = other DNA
gttgccagttttgcatcggcgttttcaggatcatcaatatctatgatatttccatattttcctgtaataacggca

SEQ ID NO: 374786 - DNA, 75 bp, synthetic construct
  source 1..75: mol_type = other DNA
aaagcgagttcatattccccgtttttctccgatctgaacaacagcagtgtctggcagaatgtcggaaaagatcgt

SEQ ID NO: 374787 - DNA, 75 bp, synthetic construct
  source 1..75: mol_type = other DNA
gcactctgtaaaagagctgctctctatcggtatccagcctgatatcctgatttgtcgttcagatcgcgccgtacc

SEQ ID NO: 374788 - DNA, 75 bp, synthetic construct
  source 1..75: mol_type = other DNA
tgggcgcaaccgtacaggttatcccgcacattactaacgctattaaagaacgcgttcttgccggcggtgaaggcc

SEQ ID NO: 374789 - DNA, 75 bp, synthetic construct
  source 1..75: mol_type = other DNA
gcagccattcttgaagcccgtggcctcaatgtgaccatcatgaaactggatccttacatcaacgtcgatccaggt

SEQ ID NO: 374790 - DNA, 75 bp, synthetic construct
  source 1..75: mol_type = other DNA
aggtgccggggggaagaaaggtcatctttgatggtagcgtgaacctgccggaaggtaccctgagtcaggacagtg

SEQ ID NO: 374791 - DNA, 75 bp, synthetic construct
  source 1..75: mol_type = other DNA
ggttcttgatgttcccatgcttgatttttccagtctttctcgtgatggtcatacaacattgattcatcctggtta

SEQ ID NO: 374792 - DNA, 75 bp, synthetic construct
  source 1..75: mol_type = other DNA
tattgcaatggcggcaaaggtatggatgagcacgactggcgttttgtagaagccgagggggccacaaacatcccc

SEQ ID NO: 374793 - DNA, 75 bp, synthetic construct
  source 1..75: mol_type = other DNA
aggtaatttcattgcgttttacgccgtatttatggggttgttcctgacggcgggtctgggaagtggctctacttt

SEQ ID NO: 374794 - DNA, 75 bp, synthetic construct
  source 1..75: mol_type = other DNA
ctgttattttgggacctattgttattaacaatggagctatagttgcagcaaattctgtagttctaaaagatgtcg

SEQ ID NO: 374795 - DNA, 75 bp, synthetic construct
  source 1..75: mol_type = other DNA
gactgatatctctggcgaagtggggcagatggataagaccacagtcaaattttcgattccaatggataacgccat

SEQ ID NO: 374796 - DNA, 75 bp, synthetic construct
  source 1..75: mol_type = other DNA
taaaggcattgccgcagcctccctcgccgccattcttgaagcccgtggcctcaatgtgaccatcatgaaactgga

SEQ ID NO: 374797 - DNA, 75 bp, synthetic construct
  source 1..75: mol_type = other DNA
tcacgccatctactgggccggactgttgccaaccaaagccaagacgatccctaacccatttatcaggagctatct

SEQ ID NO: 374798 - DNA, 75 bp, synthetic construct
  source 1..75: mol_type = other DNA
gaaatctctggatatcagtcagttgtttacttcttgcattctgtgtctggatgttatttagcgcagtcaccgtta

SEQ ID NO: 374799 - DNA, 75 bp, synthetic construct
  source 1..75: mol_type = other DNA
ccgaaatcaatgattgaacggccgaaaaaaggattctctataccgctatcatcgtggttgcgcggacctttgcgt

SEQ ID NO: 374800 - DNA, 75 bp, synthetic construct
  source 1..75: mol_type = other DNA
atgcaggacgatttcgatgcccccgtagactttgtttccggactgggccccctgaactggacatacgacaaaaca

SEQ ID NO: 374801 - DNA, 75 bp, synthetic construct
  source 1..75: mol_type = other DNA
gagcatatctatactatcgcgcgcagttaaattttataggtggtctgggagttattgttctggcggttgcagttt

SEQ ID NO: 374802 - DNA, 75 bp, synthetic construct
  source 1..75: mol_type = other DNA
tgggatatgatttccttacatcatttgcgacagtcgctgcatgcattaataatatggggctgggttttggggcta

SEQ ID NO: 374803 - DNA, 75 bp, synthetic construct
  source 1..75: mol_type = other DNA
acatgatcttccgtatctttaaactgccaatggtacgtaaagatgacatcacttctgatgacatctatgcagttg

SEQ ID NO: 374804 - DNA, 75 bp, synthetic construct
  source 1..75: mol_type = other DNA
ctgcctgttaatcttcacaccgctagtgtggttcttcaacggactggcaaatattatcttccgcatctttaaact

SEQ ID NO: 374805 - DNA, 75 bp, synthetic construct
  source 1..75: mol_type = other DNA
ccgttgtgcaaattggtctgaacgcggtcgccattcttggtggtatcgtgggtgatgcggcgttttctccggcgt

SEQ ID NO: 374806 - DNA, 75 bp, synthetic construct
  source 1..75: mol_type = other DNA
ggtaaggggaatgtcagtctgcagaatggcctgtggcggatgagtggagactctgctgtaaacagtcttgtggcc

SEQ ID NO: 374807 - DNA, 75 bp, synthetic construct
  source 1..75: mol_type = other DNA
gtgatatcgcaggctggcattgttcgttcagatatcgcctatcagatttatcgggattttgctgaaaataaagga

SEQ ID NO: 374808 - DNA, 75 bp, synthetic construct
  source 1..75: mol_type = other DNA
agcgcccctgtatccctgacccagaaagactgggaaaaccgcgagttcacactgaaaacgctgtcgctgaaaaat

SEQ ID NO: 374809 - DNA, 75 bp, synthetic construct
  source 1..75: mol_type = other DNA
cagcggacgcccgacagtggttctcggggatgcccgtcaggttaatccagataacatctcctggggttatcgcgg

SEQ ID NO: 374810 - DNA, 75 bp, synthetic construct
  source 1..75: mol_type = other DNA
gttgacaccagtggtggcagtacgcaatggattctggatggtttcaggacggaagccgataaagcggccgcagcg

SEQ ID NO: 374811 - DNA, 75 bp, synthetic construct
  source 1..75: mol_type = other DNA
ggtgaataagcttgataccacaggcagtgactttgtcctgcgtactgacctgaaagacgctgataaaatccgcgt

SEQ ID NO: 374812 - DNA, 75 bp, synthetic construct
  source 1..75: mol_type = other DNA
gcagtgtgctaaccattccactgcaagcattactgccagatgcgcctcgcgaaggcattgtgattaaccttgcag

SEQ ID NO: 374813 - DNA, 75 bp, synthetic construct
  source 1..75: mol_type = other DNA
gcaccaaagtgaatattatcaatacgccaataaaagtatcggcggaaccaaacggcgcacgcctggtagaagtgc

SEQ ID NO: 374814 - DNA, 75 bp, synthetic construct
  source 1..75: mol_type = other DNA
aacccgacctggacgcctaccgcaaacatccgcgcccgttataaagcccagggcatcgaacttccagcagtggtt

SEQ ID NO: 374815 - DNA, 75 bp, synthetic construct
  source 1..75: mol_type = other DNA
gggctgcttatgaagctgagagccagaacccgcaatccggttaccagattatccggcatcatggtgatggcactg

SEQ ID NO: 374816 - DNA, 75 bp, synthetic construct
  source 1..75: mol_type = other DNA
ttaatggtaaatcgggggcgtttctgcgcccccatctgcaacatttacaaattctttgcacttccctgcactatc

SEQ ID NO: 374817 - DNA, 75 bp, synthetic construct
  source 1..75: mol_type = other DNA
cgaagtgatgcagcgcgtaatggacgtgcgttccggaatgccggttgatgtgcgccgtcatcaagtgaatcaaca

SEQ ID NO: 374818 - DNA, 75 bp, synthetic construct
  source 1..75: mol_type = other DNA
agagcggatatcgaatggatttgcccctatatttccagacatctgttatcacttaacccattacaagcccgctgc

SEQ ID NO: 374819 - DNA, 75 bp, synthetic construct
  source 1..75: mol_type = other DNA
aagcgaagagcaactcatcaatgagcgtgacaatgctgagtctgctttatctgatatgtattttgcagcaaccgg

SEQ ID NO: 374820 - DNA, 75 bp, synthetic construct
  source 1..75: mol_type = other DNA
gtgagcaaaattaactatcaggcgctgcgcgagatagcaaaacaggcaacacaaggcgaatgggtcgcatttatt

SEQ ID NO: 374821 - DNA, 75 bp, synthetic construct
  source 1..75: mol_type = other DNA
ggctggcgtgccgaccagcaggtgatcgaagcaaaagaagcgttccatttgcgctacaacagcgattgtcgtggg

SEQ ID NO: 374822 - DNA, 75 bp, synthetic construct
  source 1..75: mol_type = other DNA
cacgaagtcggcctgcacgcctgggatcaccacgcctggcaagcccatagcggtaactgggatcggcaaacgatg

SEQ ID NO: 374823 - DNA, 75 bp, synthetic construct
  source 1..75: mol_type = other DNA
ttttcacgatgattaccaaacggtaatggcatacaaagtttctgaagtcatcgatgcaatcctcgctactggcat

SEQ ID NO: 374824 - DNA, 75 bp, synthetic construct
  source 1..75: mol_type = other DNA
atcaggtacagatttaccaactaactggatgaacaggcctgattggggaggtcaggccgttcacttactgctgac

SEQ ID NO: 374825 - DNA, 75 bp, synthetic construct
  source 1..75: mol_type = other DNA
cttactactgccaatacatggactcaggcacaaacttttaatggtggtattaatggaaatttgacggtaaacgga

SEQ ID NO: 374826 - DNA, 75 bp, synthetic construct
  source 1..75: mol_type = other DNA
atggcaacaagatagaaccgtgcgcggctttggcacaatcgctggagtatgacgctgaatacacgacgcgaaaag

SEQ ID NO: 374827 - DNA, 75 bp, synthetic construct
  source 1..75: mol_type = other DNA
atggcaacaagatagaaccgtgcgcggcgttgacgcaatccctggaacatgacgctgaatacacgacgcgaaaag

SEQ ID NO: 374828 - DNA, 75 bp, synthetic construct
  source 1..75: mol_type = other DNA
gtttaattacatactgcaaaccggcgacgcggtacgttttaacgattttatcgatggtgtggccgaacgttcacc

SEQ ID NO: 374829 - DNA, 75 bp, synthetic construct
  source 1..75: mol_type = other DNA
atgcaaaatcaccttgatgctggatacaaaacgttgccgatggtggtgctattgttgttttaccacggtattgaa

SEQ ID NO: 374830 - DNA, 75 bp, synthetic construct
  source 1..75: mol_type = other DNA
tcttacgcgctaccatcagatgctggaagagcagtatccactgcaagagaacggagagatactgctggcatttcc

SEQ ID NO: 374831 - DNA, 75 bp, synthetic construct
  source 1..75: mol_type = other DNA
gtgagtgagtcaaaatgccaaattaatggcaacaagatagaaccgtgcgcggcgttggcacaatccctggagcat

SEQ ID NO: 374832 - DNA, 75 bp, synthetic construct
  source 1..75: mol_type = other DNA
tgcggcagctgctgccgttggtggcacactgaatcccattcagaccaaacaaggtatccggcattttctaccgct

SEQ ID NO: 374833 - DNA, 75 bp, synthetic construct
  source 1..75: mol_type = other DNA
ttatccggcatcatggtgatggcactgaagaagtggtgtttgattctcgtgtatcaggtacagatttaccaacta

SEQ ID NO: 374834 - DNA, 75 bp, synthetic construct
  source 1..75: mol_type = other DNA
tcttcaaataattaatgaattagccgacagactaacaacattaggatgtaaggtggattttaatgttgttaaaga

SEQ ID NO: 374835 - DNA, 75 bp, synthetic construct
  source 1..75: mol_type = other DNA
tttctaaatcaccaattcgagtttcattttgcccgttctgtggtgaaagtctgaaaacatggaaaaaggaggcag

SEQ ID NO: 374836 - DNA, 75 bp, synthetic construct
  source 1..75: mol_type = other DNA
tttctaaattaccagtgcgggtttcattttgtccgttctgtggtgaaagtctgaaaacgtgggagaacagaaatg

SEQ ID NO: 374837 - DNA, 75 bp, synthetic construct
  source 1..75: mol_type = other DNA
ctgacgataaaaggccagccgcaaaaagggtgggccgtccgcatggttatacagaagaaaaagcgttagaaatat

SEQ ID NO: 374838 - DNA, 75 bp, synthetic construct
  source 1..75: mol_type = other DNA
cagcagggcaaaaacagtattgagttagggatgatactgggcgcgcgtgaattgctttgcgccgctggcattctg

SEQ ID NO: 374839 - DNA, 75 bp, synthetic construct
  source 1..75: mol_type = other DNA
accagcgagtgtcagcttgcaccatttttcgataatggtacgagcttatgctacgaacgctttccggaacatgtt

SEQ ID NO: 374840 - DNA, 75 bp, synthetic construct
  source 1..75: mol_type = other DNA
aagaactcaattcgtggcacatacaaccatgcgcaatatctggatggaaggcgggagatgcttcaatggtatgcc

SEQ ID NO: 374841 - DNA, 75 bp, synthetic construct
  source 1..75: mol_type = other DNA
ttgccgcaggcgtaaaatttggcaggaagaagcatccacgaacgcctacagcgttggagcttatatcacagggag

SEQ ID NO: 374842 - DNA, 75 bp, synthetic construct
  source 1..75: mol_type = other DNA
gcgggagtgagggatgatcgagtgtttactgacatgatgtcgggagcaactgatgagcgcgaagggctacagcga

SEQ ID NO: 374843 - DNA, 75 bp, synthetic construct
  source 1..75: mol_type = other DNA
atgattaaaaaatcagtattaattttctttcttgatgttaatgatagatgttgttttgccacattgttcaatatc

SEQ ID NO: 374844 - DNA, 75 bp, synthetic construct
  source 1..75: mol_type = other DNA
cgatgccgctggtggacaatcaactggatctcgccgctttctggcagcagtggctgaactggcaggcaccggtta

SEQ ID NO: 374845 - DNA, 75 bp, synthetic construct
  source 1..75: mol_type = other DNA
ttgatgaactgtacaacaaatacaagattttcgataactgcaatgctgaacaatcaaaaagttatgccaatacat

SEQ ID NO: 374846 - DNA, 75 bp, synthetic construct
  source 1..75: mol_type = other DNA
atgatctgtaaaaacatgaaaggcgtgtcagcagttcgcgccgccagcgtgctggcatcgtgtaaatttagccat

SEQ ID NO: 374847 - DNA, 75 bp, synthetic construct
  source 1..75: mol_type = other DNA
cgcaatcttaaaaacccagatcaaaataggaatctccgtagaacaacaagagaaactgtctgcaaaatccaaatt

SEQ ID NO: 374848 - DNA, 75 bp, synthetic construct
  source 1..75: mol_type = other DNA
gaattttatatggctattttcttgagcaactgttttctgtagcgactggtcgtctcgataaacttctctcagtag

SEQ ID NO: 374849 - DNA, 75 bp, synthetic construct
  source 1..75: mol_type = other DNA
aaaattctggaaaaaacggatgatcatatttggtcatcacttaaagatattgcgatcttaaaaacacagatcaaa

SEQ ID NO: 374850 - DNA, 75 bp, synthetic construct
  source 1..75: mol_type = other DNA
agagtggttatggaaaaaacaggcatttcgcgggccacttactttcggttaaaaaaatacattaaaaatcagcaa

SEQ ID NO: 374851 - DNA, 75 bp, synthetic construct
  source 1..75: mol_type = other DNA
ttactggattgacgcagcatcgtctctgcgcatgaaagatgacgccatcatcatccttgaccctgttaatcaggg

SEQ ID NO: 374852 - DNA, 75 bp, synthetic construct
  source 1..75: mol_type = other DNA
agtaccagtcacatggacgaccataaaatccatctgggataaaggtattgcgtattttgcagcagaaccgccgca

SEQ ID NO: 374853 - DNA, 75 bp, synthetic construct
  source 1..75: mol_type = other DNA
agcaaaacaacctgggcggatgcaccggcacgcgagtttgtgtttgtcgaaaacaactcagacgacaactttttc

SEQ ID NO: 374854 - DNA, 75 bp, synthetic construct
  source 1..75: mol_type = other DNA
atggcccgcacgaaaaaggcaaaggctgacgataaaaagccggaagccaaaaaggtgggccgtccgcatggctat

SEQ ID NO: 374855 - DNA, 75 bp, synthetic construct
  source 1..75: mol_type = other DNA
ggtatgcctacccgttcaacaatcctgaaatggtttagagacgtgccggaattctcggacatgtacatgcgcgcg

SEQ ID NO: 374856 - DNA, 75 bp, synthetic construct
  source 1..75: mol_type = other DNA
gaaagcggatggcaaggttactggattgacgcagcatcgtctctgcgcatgaaagatgacgccatcatcattctt

SEQ ID NO: 374857 - DNA, 75 bp, synthetic construct
  source 1..75: mol_type = other DNA
gtcggtgatgttcctgtactggcctgtggcgcttcctttatatgtcgattatatcggtggcgcaggtaaaaggag

SEQ ID NO: 374858 - DNA, 75 bp, synthetic construct
  source 1..75: mol_type = other DNA
tcccgcaggtagcgttaaccgccagcgtgatggatgcgatgctggaactcagccgcaccggtctggggctggtgg

SEQ ID NO: 374859 - DNA, 75 bp, synthetic construct
  source 1..75: mol_type = other DNA
ttccgcgcctggaagacaaatcaattaccttgctggcaatgaccggcaaaccgacctcaccgctggggttagcgg

SEQ ID NO: 374860 - DNA, 75 bp, synthetic construct
  source 1..75: mol_type = other DNA
taatcgcggatggaagtaagcgtattgctgaactggagaaaagcgaagagcaactcatcagcgagcgtgatcatg

SEQ ID NO: 374861 - DNA, 75 bp, synthetic construct
  source 1..75: mol_type = other DNA
gcaatgacatagccagacttgcattgactatgcacggtcacagctatttcttctcactccgccgccatctcaaca

SEQ ID NO: 374862 - DNA, 75 bp, synthetic construct
  source 1..75: mol_type = other DNA
aagaatgggggaatttcataatttacatcttgaaatgataactatattcggtttgttattttatttgttattttt

SEQ ID NO: 374863 - DNA, 75 bp, synthetic construct
  source 1..75: mol_type = other DNA
atgacacgaaaactgaggtatgtgggcatgggttcagaacgatggcgcgtggtgcattgggggagtcagggctat

SEQ ID NO: 374864 - DNA, 75 bp, synthetic construct
  source 1..75: mol_type = other DNA
gtacgtgctgcttatattcacacctctgaacatttggatgaacgtcgattgatggttcaatggtgggctgattat

SEQ ID NO: 374865 - DNA, 75 bp, synthetic construct
  source 1..75: mol_type = other DNA
aacaacgcactcagggcattggcattctcgaccgacaaatcgcccgtgattatagccctgtagggccgctgatcc

SEQ ID NO: 374866 - DNA, 75 bp, synthetic construct
  source 1..75: mol_type = other DNA
ggggcaatctgcccgctattaagctggggacagcccgggtcagactggcccggcgtggtggaaaactgcagtacc

SEQ ID NO: 374867 - DNA, 75 bp, synthetic construct
  source 1..75: mol_type = other DNA
attagtttccctggtatgtgccttactgacatacggcatactcagactggtcggatgggccgttaacggattcat

SEQ ID NO: 374868 - DNA, 75 bp, synthetic construct
  source 1..75: mol_type = other DNA
gcatgggttcagaacgatggcgcgtggtgcattgggggagtcagggctatggagcgatgatgcgatcgagcgcca

SEQ ID NO: 374869 - DNA, 75 bp, synthetic construct
  source 1..75: mol_type = other DNA
tatgccgtacagaacgattacatcgactcaaatcccgccagcgatatggccggggcgctatcgacaaccaaagcg

SEQ ID NO: 374870 - DNA, 75 bp, synthetic construct
  source 1..75: mol_type = other DNA
gcgaatatgctgcaagtgctgcatatggggctgcatgtttgtcagttgatgggctacgggcaaattaacgatggc

SEQ ID NO: 374871 - DNA, 75 bp, synthetic construct
  source 1..75: mol_type = other DNA
aaatcagcgccattgatgcgcaatccggcgtgatgcccataactgaaaacagcctggatgccgaacaaggtttag

SEQ ID NO: 374872 - DNA, 75 bp, synthetic construct
  source 1..75: mol_type = other DNA
atgaatgggaatcgagaactgatttttgtaggcgatcacgatccgcgtaagccgatgagtgagaatacggttaac

SEQ ID NO: 374873 - DNA, 75 bp, synthetic construct
  source 1..75: mol_type = other DNA
gccttgagtggtaaaggtgaggttatatttcccagcgatcatgatcctaaaaaagtaatgagtgaaaatacagta

SEQ ID NO: 374874 - DNA, 75 bp, synthetic construct
  source 1..75: mol_type = other DNA
gatgattcaatggtgggcggattacatcgagtttaataaaaaccattctgttaccccgtacgattatgcaaagat

SEQ ID NO: 374875 - DNA, 75 bp, synthetic construct
  source 1..75: mol_type = other DNA
atgaaaggtcttgaaaacgccatccgtaatctggacatccttgatacccgtatggtgccacaggccagcgcatgg

SEQ ID NO: 374876 - DNA, 75 bp, synthetic construct
  source 1..75: mol_type = other DNA
gggtaccgcacaggtcagactggcccgctcccggcatggcagcaactcacgtcatcgtggcagcgtactgaaagt

SEQ ID NO: 374877 - DNA, 75 bp, synthetic construct
  source 1..75: mol_type = other DNA
gtaatctggacatccttgatacccgtatggtgccacaggccagcgcatgggcgatgaaccgtgtggcggcaaagg

SEQ ID NO: 374878 - DNA, 75 bp, synthetic construct
  source 1..75: mol_type = other DNA
cgctggcgaatgccgcatggatttgggtaccgctactggcgattgccacgatcgccgcctggtcagggatgaatg

SEQ ID NO: 374879 - DNA, 75 bp, synthetic construct
  source 1..75: mol_type = other DNA
cagagattaatgacgattgctgataccatacctcactacgagctgatgattacagacaataatattgatgaattt

SEQ ID NO: 374880 - DNA, 75 bp, synthetic construct
  source 1..75: mol_type = other DNA
taaataataaagatttcgatattgaagcgatcgcatcgggtctgacattgcttgcattagaggcacaggagaaat

SEQ ID NO: 374881 - DNA, 75 bp, synthetic construct
  source 1..75: mol_type = other DNA
ggtagaccaacaaacaccattgggcgtattggaacatcttctcgtcaggcacccaatgtcggcaccacgaatggc

SEQ ID NO: 374882 - DNA, 75 bp, synthetic construct
  source 1..75: mol_type = other DNA
aaatcgttaccccattgatgtggtgaaaatcccgctgtccggaccgctgacacaggcatttgaagatgcccgcga

SEQ ID NO: 374883 - DNA, 75 bp, synthetic construct
  source 1..75: mol_type = other DNA
ttcaccggacaggcgttctgttggctattttggtgttgatgttgagctttggtttctttttattaacaggtgctg

SEQ ID NO: 374884 - DNA, 75 bp, synthetic construct
  source 1..75: mol_type = other DNA
aaccaggtgaaggggagccccctgaaactggtgcgtgagcgtgtcagggtacttaaagccagcccggacggaaaa

SEQ ID NO: 374885 - DNA, 75 bp, synthetic construct
  source 1..75: mol_type = other DNA
gcttaccaaccaacagcgaattattatttttggcggcggcctgccagttatttttaatgagcaggtaattggcgc

SEQ ID NO: 374886 - DNA, 75 bp, synthetic construct
  source 1..75: mol_type = other DNA
cagaccgaaaaaaaatcgtctacctgtggaggttgtgaaaatcccgctggccggagcgctgacacaggcatttga

SEQ ID NO: 374887 - DNA, 75 bp, synthetic construct
  source 1..75: mol_type = other DNA
ccgcgaccgcatcattgctgcggaaatgccgaaacagctggggtatgccctgaaacaacaactgaggttacatct

SEQ ID NO: 374888 - DNA, 75 bp, synthetic construct
  source 1..75: mol_type = other DNA
aaatgtccggtattaactttgtcgccaacccgctggtcaatattcatctgcaaggacgtttcgatacgtatccaa

SEQ ID NO: 374889 - DNA, 75 bp, synthetic construct
  source 1..75: mol_type = other DNA
caaatccctacatgggtttatgagaaaggttttatttttgattacaaccgtatttcacatgccagtaactggcat

SEQ ID NO: 374890 - DNA, 75 bp, synthetic construct
  source 1..75: mol_type = other DNA
gctaacatgaaagaaatgttacctcataacactttttatcgccatagaagagaattgctttcgttcggtatcgat

SEQ ID NO: 374891 - DNA, 75 bp, synthetic construct
  source 1..75: mol_type = other DNA
cgttcgcagggttctgacggtaatgggaaagccactcatttatacgttgatggtaacccgtcaaagtggttgcag

SEQ ID NO: 374892 - DNA, 75 bp, synthetic construct
  source 1..75: mol_type = other DNA
aagatgaggactcctcatctcgttcctttgtcgcgacaagctctcgctatcttggaaaagatcaaaagcatgaat

SEQ ID NO: 374893 - DNA, 75 bp, synthetic construct
  source 1..75: mol_type = other DNA
gtaggcgcttatggcagggaaataaaaggggtattcctgaagaatgccaggagattaaacattctgaatatgtgg

SEQ ID NO: 374894 - DNA, 75 bp, synthetic construct
  source 1..75: mol_type = other DNA
gtaggtgcttatggcagggaaataaacgggcgtattcctgaagaatgtcaggaaattaaacattctgaatatgtg

SEQ ID NO: 374895 - DNA, 75 bp, synthetic construct
  source 1..75: mol_type = other DNA
gtagcaaatatgcagtcatacgtcgtgatgacctgtcaattatagtcgaaatggattacttccctgaaaccaaaa

SEQ ID NO: 374896 - DNA, 75 bp, synthetic construct
  source 1..75: mol_type = other DNA
gaggctgaggcctggaaaatccagattcgtggtggagcggcgacagaatcagactgggtacgtgcaggtggtcgt

SEQ ID NO: 374897 - DNA, 75 bp, synthetic construct
  source 1..75: mol_type = other DNA
cgttgatttctggtgagggtggtttacgtgctgattgtgccgattatttattctttgccgtatatgcaattgcgt

SEQ ID NO: 374898 - DNA, 75 bp, synthetic construct
  source 1..75: mol_type = other DNA
aaagctcatctggttcattcatctcctggcagttccttgtctggcaggtgatgttcgttataggtgttgttgcag

SEQ ID NO: 374899 - DNA, 75 bp, synthetic construct
  source 1..75: mol_type = other DNA
ccataatggcaaaataataacctattataattataaaccaaatgataaactttacgattctgtgcttagtttata

SEQ ID NO: 374900 - DNA, 75 bp, synthetic construct
  source 1..75: mol_type = other DNA
ataataacgttatgcattgccagtataatgacaaaattataacctattataattataaatcaaattataaatttt

SEQ ID NO: 374901 - DNA, 75 bp, synthetic construct
  source 1..75: mol_type = other DNA
gaaattatcgctcgtgaatggcatgccagtaataagcgctggagtgaagaccatagagcgcgcgttcttcgctat

SEQ ID NO: 374902 - DNA, 75 bp, synthetic construct
  source 1..75: mol_type = other DNA
gccggtggtggagaaggacagaccgcgatcaaaatggccgaacgagggcatcaggtcattttatgcgatctctcc

SEQ ID NO: 374903 - DNA, 75 bp, synthetic construct
  source 1..75: mol_type = other DNA
ttcggtgtgcagaatgaccttcttgagtcaaatcctgccagtgatatggctggagcgcttttaagcgttaaggcg

SEQ ID NO: 374904 - DNA, 75 bp, synthetic construct
  source 1..75: mol_type = other DNA
taggtcaaattgacgctaggacgttgagaaccagccagcttctcaatccgatcaaagctgtcgatacggcaggta

SEQ ID NO: 374905 - DNA, 75 bp, synthetic construct
  source 1..75: mol_type = other DNA
tggaaatgattgtctggtcggtggcttccgcggtgccgcagcgtgcggttaaaaccattaagcgaattaacgatt

SEQ ID NO: 374906 - DNA, 75 bp, synthetic construct
  source 1..75: mol_type = other DNA
atccacgcgacccggcacaggtttacctgtggctagaagaagctggctgggaaattacgggtaagacaggcgttc

SEQ ID NO: 374907 - DNA, 75 bp, synthetic construct
  source 1..75: mol_type = other DNA
gcgtgtttcatgattatctgcgtgaaaagcaccagcagcgcgactgctacgaagcattacttgaattagaaacgc

SEQ ID NO: 374908 - DNA, 75 bp, synthetic construct
  source 1..75: mol_type = other DNA
tcttgctgcatatcgtggccgtgtaatgacgcggatcgcggttgagctttccttactaacttttgtgcgttccag

SEQ ID NO: 374909 - DNA, 75 bp, synthetic construct
  source 1..75: mol_type = other DNA
aaacgaccaaaaggccagcgccgtcgctatccagtcggcgcgggcggtggcgatgccgggcattccggagatggg

SEQ ID NO: 374910 - DNA, 75 bp, synthetic construct
  source 1..75: mol_type = other DNA
atttccagacatctgttatcacttaatccattacaagcccgctgccgcagatattcccgtggcgagcgataaccc

SEQ ID NO: 374911 - DNA, 75 bp, synthetic construct
  source 1..75: mol_type = other DNA
ccatcgagcgcgtgttcttcgctatttagagctttatatctttccttatattggttcgtctgatatccgacagct

SEQ ID NO: 374912 - DNA, 75 bp, synthetic construct
  source 1..75: mol_type = other DNA
caaagttatgagtgagaacacagtaaatagcgccttgcgtgcgatggggtatgacacgaaaactgaggtctgtgg

SEQ ID NO: 374913 - DNA, 75 bp, synthetic construct
  source 1..75: mol_type = other DNA
aagccgagcagaaagaagctcaggctgagaattcgggcgcatacactttcgaaacaattgctcgtgaatggcatg

SEQ ID NO: 374914 - DNA, 75 bp, synthetic construct
  source 1..75: mol_type = other DNA
ctgcgtattgcacgatctaaatcttgccgcgcgttatgcagaccgtgttgtattaatgcaaaaaggaaaggttat

SEQ ID NO: 374915 - DNA, 75 bp, synthetic construct
  source 1..75: mol_type = other DNA
atgatcagcgcccagaatctggtttatagccttcatgggcgacgcctgactgataatgtctcgctgacttttccc

SEQ ID NO: 374916 - DNA, 75 bp, synthetic construct
  source 1..75: mol_type = other DNA
catgaaaatagcggtgcagtgcttaacgaaaaactgataaatcaccaactcgatatggcggtgatttatgagcat

SEQ ID NO: 374917 - DNA, 75 bp, synthetic construct
  source 1..75: mol_type = other DNA
gacggacaaacgctggagttaaccggtactgaatttaccctgctctatttgctggcgcagcatctgggccaggta

SEQ ID NO: 374918 - DNA, 75 bp, synthetic construct
  source 1..75: mol_type = other DNA
ttgacccagcaaacactgacaatgctctatggcgcggatattacggtattaagcgattccgccaatgattcgccg

SEQ ID NO: 374919 - DNA, 75 bp, synthetic construct
  source 1..75: mol_type = other DNA
tatttcttgatgaaccaacttcggcgctggatattcaccatcagcagcacttgtttcgtttattacgccagttag

SEQ ID NO: 374920 - DNA, 75 bp, synthetic construct
  source 1..75: mol_type = other DNA
cggtgacggttcgcgccagcccagtcaggaagagttgtctatcgcacgttaccagggggaatatgttgctggtct

SEQ ID NO: 374921 - DNA, 75 bp, synthetic construct
  source 1..75: mol_type = other DNA
cggcggtcaggaacagactatcacttcaacctggacgacccttgcacatcacggcatggtgattgtccccattgg

SEQ ID NO: 374922 - DNA, 75 bp, synthetic construct
  source 1..75: mol_type = other DNA
ttgtcgttaagcgtgtaccggagaccatgcagccgcaattattcgaaaaagcaggcggtaaaacgcaaactgcgc

SEQ ID NO: 374923 - DNA, 75 bp, synthetic construct
  source 1..75: mol_type = other DNA
ttatcgccacaggcgcaggcagtgaaagatctattattgtcagtgattagttctccagccatggaaaaaagacaa

SEQ ID NO: 374924 - DNA, 75 bp, synthetic construct
  source 1..75: mol_type = other DNA
cgcgcgttcgttatgtggcgcagtaaacgggtggatgtcacgcattaccacaccttccatgagtctctctttgtc

SEQ ID NO: 374925 - DNA, 75 bp, synthetic construct
  source 1..75: mol_type = other DNA
attccatgtacggacatattgaaacgatggcacgcgcagttgctgagggtgcaagcaaagtggatggcgcagaag

SEQ ID NO: 374926 - DNA, 75 bp, synthetic construct
  source 1..75: mol_type = other DNA
tgtgcctgcgtgatgcatggtcacgggaagcatattttgaagcagcaaacgccgctgtggctggcgcagcatccg

SEQ ID NO: 374927 - DNA, 75 bp, synthetic construct
  source 1..75: mol_type = other DNA
taccagcatattgctgaccagtgcgagattagcaaacgttctgtgatgaatcatattgcggccctttgtgagtcc

SEQ ID NO: 374928 - DNA, 75 bp, synthetic construct
  source 1..75: mol_type = other DNA
taagaatcaacctgattatcttacttttttaagagcaatggatggattcgaagttaatggattacgattatttag

SEQ ID NO: 374929 - DNA, 75 bp, synthetic construct
  source 1..75: mol_type = other DNA
gtatctgaaagagtgcccatattgtggtgagagcaagtgtaatctctgcgatatgggcgacgacactgcatgtat

SEQ ID NO: 374930 - DNA, 75 bp, synthetic construct
  source 1..75: mol_type = other DNA
ggagaagacaggactttctgaagataagttaattgaactaatggatcaggaaacttggctaaatgcagaagaagc

SEQ ID NO: 374931 - DNA, 75 bp, synthetic construct
  source 1..75: mol_type = other DNA
acccattattggcgtgcattattccggccgcggggcaaaaatgcgaatgccgcatatcgtccccctctcagaaca

SEQ ID NO: 374932 - DNA, 75 bp, synthetic construct
  source 1..75: mol_type = other DNA
tcttgggattatgacaataagattgcatgatgagactctctgtgaacttgaacgtatcatcaatagttctacttc

SEQ ID NO: 374933 - DNA, 75 bp, synthetic construct
  source 1..75: mol_type = other DNA
cggacgaatttcagccattattgaataccgaaggtccggtcaaatatgttcgcccggatgtcagccattttgaag

SEQ ID NO: 374934 - DNA, 75 bp, synthetic construct
  source 1..75: mol_type = other DNA
catgtcatggcgtttcaccaggcaccgaaagagtatggtggcgacgcggcgttgctggtgttgattgaagtggaa

SEQ ID NO: 374935 - DNA, 75 bp, synthetic construct
  source 1..75: mol_type = other DNA
tgatggcatttcaccaggcaccgaaagagtacggcggtgatgcggctttgttggtgttgattgaagtggaagagt

SEQ ID NO: 374936 - DNA, 75 bp, synthetic construct
  source 1..75: mol_type = other DNA
atccgatacaacggcagcttacgcaagtcagggataccgcacagggagccgccaccgcctggttggcctccccgg

SEQ ID NO: 374937 - DNA, 75 bp, synthetic construct
  source 1..75: mol_type = other DNA
ggcgacacggtaaaaggttttgttgccggtgccgcctgtactgccgttatcgcatctgcactctggtggtggcag

SEQ ID NO: 374938 - DNA, 75 bp, synthetic construct
  source 1..75: mol_type = other DNA
caaaagagtacggcggcgacgcggcgttattggtattgattgaagtggaagagtggctgccgccagaacttccct

SEQ ID NO: 374939 - DNA, 75 bp, synthetic construct
  source 1..75: mol_type = other DNA
gtttgtcgcaacagctggtggtctgcgtctctgaacatctgttgttacggcatgaatgcagattactaaatcacc

SEQ ID NO: 374940 - DNA, 75 bp, synthetic construct
  source 1..75: mol_type = other DNA
gcagttgcccatgaatttatgaataacggtcagtctggcccacatcaggccatggccgaagcgcatcgtcgcatg

SEQ ID NO: 374941 - DNA, 75 bp, synthetic construct
  source 1..75: mol_type = other DNA
caaccggacctttgctggtcgccggatcgccaatttgttcgcagatggcaacggactcgccctgattcaccagtt

SEQ ID NO: 374942 - DNA, 75 bp, synthetic construct
  source 1..75: mol_type = other DNA
tcagatatggatatgcatagagaaaatatagttaagttttctttgttcggattaaaacacagagatcctgttatc

SEQ ID NO: 374943 - DNA, 75 bp, synthetic construct
  source 1..75: mol_type = other DNA
gctggaacagcaacaggctaatgcggaaccagaagaacaggtcgatccgcgcaaagccgccgtcgaagccgctat

SEQ ID NO: 374944 - DNA, 75 bp, synthetic construct
  source 1..75: mol_type = other DNA
gcaaagccgccgtcgaagcggctattgcccgtgccaaagcacgcaagctggaacagcaacaggctaatgcagagc

SEQ ID NO: 374945 - DNA, 75 bp, synthetic construct
  source 1..75: mol_type = other DNA
gctaatgcggagccagaagaacagattgatccgcgcaaagctgccgtcgaagcggctattgcacgcgccaaagcg

SEQ ID NO: 374946 - DNA, 75 bp, synthetic construct
  source 1..75: mol_type = other DNA
actccagaagaagattaacaagaatgttgatagacctactcgatggactcagcaagctgtaggtaataccaacta

SEQ ID NO: 374947 - DNA, 75 bp, synthetic construct
  source 1..75: mol_type = other DNA
aagcggcgaacaggccgctactgtgcgttttacgctggctgacggcgtgtggtgggagcgcatcatagaccgacc

SEQ ID NO: 374948 - DNA, 75 bp, synthetic construct
  source 1..75: mol_type = other DNA
atgataacgccacatatgaccccgtttttaaaggggctgtcgtgattgcgcagaatgccacggtaaacgcctcat

SEQ ID NO: 374949 - DNA, 75 bp, synthetic construct
  source 1..75: mol_type = other DNA
ttcagcgtgccggactccatctgcagtgaatccgcctccggagttgcagctgaaagtcgccgtgcagcagcgtct

SEQ ID NO: 374950 - DNA, 75 bp, synthetic construct
  source 1..75: mol_type = other DNA
gcccgaaactgaaagaagataagaacgagaaagaagaatattatggttccgaagatggtaaatcctacatcaaat

SEQ ID NO: 374951 - DNA, 75 bp, synthetic construct
  source 1..75: mol_type = other DNA
gatggtggcaaaatcaataagctagttccaatcgctaacggcaaggtcttagacgcccacgggaacattaaggcc

SEQ ID NO: 374952 - DNA, 75 bp, synthetic construct
  source 1..75: mol_type = other DNA
gcggcagttgctgcggctattgcccgcgttcaggccaaaaaagccgctcagccagcaaaaggttgtaaacgagga

SEQ ID NO: 374953 - DNA, 75 bp, synthetic construct
  source 1..75: mol_type = other DNA
gctaatgctgatgtgggattggttggcgctgaactggttgcggaatacaaaatgactgaaggtgtaacaggggga

SEQ ID NO: 374954 - DNA, 75 bp, synthetic construct
  source 1..75: mol_type = other DNA
gctaatgctgatgtgggattggttggagctgaactagtggcagaatataaaatgactgaaggagaagaaggggga

SEQ ID NO: 374955 - DNA, 75 bp, synthetic construct
  source 1..75: mol_type = other DNA
tcaccgggattttatttggctggttacccgcacgaaatgcggcacgactggatccagtagatgctctggcacgag

SEQ ID NO: 374956 - DNA, 75 bp, synthetic construct
  source 1..75: mol_type = other DNA
gaagttccgtaaatgggatgaaatggacgttttactctggaagttaggaaaaaatgattcgcgtcgccgttcagg

SEQ ID NO: 374957 - DNA, 75 bp, synthetic construct
  source 1..75: mol_type = other DNA
ggtgccgtgcattgagcgtaatgccattgcctctgtgaaggcgattaacgccgcacggatggctctgcgccgcac

SEQ ID NO: 374958 - DNA, 75 bp, synthetic construct
  source 1..75: mol_type = other DNA
cctgatgctgaagtggaattgcttggggctaaactggttgcggaatataaaatgactgaaggagaagaaggggga

SEQ ID NO: 374959 - DNA, 75 bp, synthetic construct
  source 1..75: mol_type = other DNA
tgattttatccacccgaacagcggcagcctacttaaacagattgaggcaaaaaccgccgccagattaaaacaatg

SEQ ID NO: 374960 - DNA, 75 bp, synthetic construct
  source 1..75: mol_type = other DNA
actggggcctgatgcgtcttaatgatgtcgaataccatgaatctattgatgagatgaaacacgcagataaatata

SEQ ID NO: 374961 - DNA, 75 bp, synthetic construct
  source 1..75: mol_type = other DNA
agccgcgatatgatgatcgaaattcttgctgatgaagaaggccatattgactggctagaaactgaacttgatctc

SEQ ID NO: 374962 - DNA, 75 bp, synthetic construct
  source 1..75: mol_type = other DNA
cagctacaccctggtcaacaacgacacgggcgaaaaacaggaaggcaccttcatgccgatggttgccagcgatgg

SEQ ID NO: 374963 - DNA, 75 bp, synthetic construct
  source 1..75: mol_type = other DNA
atgcgttggcaagggcgacgtgaaagtgacaatgttgaagacaggcgcaacagctccggcggtccgtcaatgggc

SEQ ID NO: 374964 - DNA, 75 bp, synthetic construct
  source 1..75: mol_type = other DNA
tgaagtcggtcatcatgtgcagaaactgttaggcatcgagccgaaagttcgtcaactgcaacaaaacgcgacgca

SEQ ID NO: 374965 - DNA, 75 bp, synthetic construct
  source 1..75: mol_type = other DNA
cagcccgtactggcggcccgatgcgccggaccaggcctgtcacgatttgcactttcgtctgcgcgggccggtgat

SEQ ID NO: 374966 - DNA, 75 bp, synthetic construct
  source 1..75: mol_type = other DNA
ttgccaaactatctaaactggttgatgcaaaacacgctacccggtcaggtgctgctccagtcatggcttacccgc

SEQ ID NO: 374967 - DNA, 75 bp, synthetic construct
  source 1..75: mol_type = other DNA
cacaggttctggaaacggtccgggcgttcattgaaaaacgcaatgaagaaatgaagcgccaggtggtgctgaatg

SEQ ID NO: 374968 - DNA, 75 bp, synthetic construct
  source 1..75: mol_type = other DNA
gccggcctgaagctctccgattatgggtctctggactacgggcgtaattatggtgttgtctatgacgtcacctcc

SEQ ID NO: 374969 - DNA, 75 bp, synthetic construct
  source 1..75: mol_type = other DNA
tgctgggctaaaatacgatgctaacaatatttacctggcaaccatgtattcagaaacgcgtaatatgaccccgtt

SEQ ID NO: 374970 - DNA, 75 bp, synthetic construct
  source 1..75: mol_type = other DNA
gatctgaaaaccatcaaccagacagtggacctgaaatccgggcagacagtcattatcagtggcttccagcagtca

SEQ ID NO: 374971 - DNA, 75 bp, synthetic construct
  source 1..75: mol_type = other DNA
atgactgacttctccaacaagattgtctcttattccataaatgataacaccaatagctatgtaaacagcggaaag

SEQ ID NO: 374972 - DNA, 75 bp, synthetic construct
  source 1..75: mol_type = other DNA
cagtaatttctttttgttatgcgtatgcaggaggtaacgaaatattaacttttcataatgtcgatggacgattga

SEQ ID NO: 374973 - DNA, 75 bp, synthetic construct
  source 1..75: mol_type = other DNA
caactgctgcatttctggaatgcggagattccgctcgcccagggagccgctgtgccgctggtacgcgcaccgcgc

SEQ ID NO: 374974 - DNA, 75 bp, synthetic construct
  source 1..75: mol_type = other DNA
tcaatgagtctctccgacaaaccggttattgagaattatgagagcggtggaagtaaagcccagttgccgaatgtg

SEQ ID NO: 374975 - DNA, 75 bp, synthetic construct
  source 1..75: mol_type = other DNA
caggaagcagggttgcacatgataaagctgttggctggaactggaatagcggcgtttatgatgcagatatcagtg

SEQ ID NO: 374976 - DNA, 75 bp, synthetic construct
  source 1..75: mol_type = other DNA
ggtaaggatacggtagcgcagactgatttaacgtcagtcggtcgcgatattctggctaaaacaagcacactggcc

SEQ ID NO: 374977 - DNA, 75 bp, synthetic construct
  source 1..75: mol_type = other DNA
acggcagaacggtaatggtgttggtggctcaattacctacgaatatgacggtttcagtattggtggtgcggtgtc

SEQ ID NO: 374978 - DNA, 75 bp, synthetic construct
  source 1..75: mol_type = other DNA
aacaagcaaacgctgatgaccttgcagaaggaggaactgctaagagaaagtgtttctggggtgagtagtaacgac

SEQ ID NO: 374979 - DNA, 75 bp, synthetic construct
  source 1..75: mol_type = other DNA
gattatgcagtcatcatgaaaaggttaagttatctggctaaagagtacagcaaagactattcggatggtaaacgt

SEQ ID NO: 374980 - DNA, 75 bp, synthetic construct
  source 1..75: mol_type = other DNA
tcctggcgctatgtgaaaggaaaaattgaattccactggcttgacacccgtacattcccggtcacctacatggac

SEQ ID NO: 374981 - DNA, 75 bp, synthetic construct
  source 1..75: mol_type = other DNA
taccatcgtcgtagccgacggtgcttttgattcgctcacttctcacatggagtctgaaaagcggagtggcaatcc

SEQ ID NO: 374982 - DNA, 75 bp, synthetic construct
  source 1..75: mol_type = other DNA
gtagtcttgatgagctgaaagcgagtgtggctgaactggaagaagaacgcgctgaaaatccaaatgcggagtcga

SEQ ID NO: 374983 - DNA, 75 bp, synthetic construct
  source 1..75: mol_type = other DNA
agccacgcaccaagactgttttggagcaactccagcgtaaagaagagaatcggagaaagcatgaagagcaacgct

SEQ ID NO: 374984 - DNA, 75 bp, synthetic construct
  source 1..75: mol_type = other DNA
acaaaagcacggtcactatcactacggagccagtgaggtaccgccgcccagcggactggggcgtcctcgcacggt

SEQ ID NO: 374985 - DNA, 75 bp, synthetic construct
  source 1..75: mol_type = other DNA
ccgagcgagaggtgcgcatgctggttgaacgcaccctgcagcacacagatctggctgggtatttctgggtactcg

SEQ ID NO: 374986 - DNA, 75 bp, synthetic construct
  source 1..75: mol_type = other DNA
ggctaccacaatcgctgtgatcccaagaaatgctacgaagccgatatcacccatcccgtcaattacgatgatgct

SEQ ID NO: 374987 - DNA, 75 bp, synthetic construct
  source 1..75: mol_type = other DNA
cgattacgacgccattatttttggtacacctacccgctttggcaacatgtccggtcaaatgcgtaccttcctcga

SEQ ID NO: 374988 - DNA, 75 bp, synthetic construct
  source 1..75: mol_type = other DNA
cgacaaataacgggcgtggtgcattacgacaaaacggtaatggtgttggtggctcaattacctacgattatgacg

SEQ ID NO: 374989 - DNA, 75 bp, synthetic construct
  source 1..75: mol_type = other DNA
tatggtcactgggagtaccagatccaggcaaacacgccggaaaatgaaaaccatgcctggacccgtctggctttc

SEQ ID NO: 374990 - DNA, 75 bp, synthetic construct
  source 1..75: mol_type = other DNA
atgaccgttgcatcaacaatagggctggatgaaacacagtatgctacagatgattgtcttgaagaaattataaat

SEQ ID NO: 374991 - DNA, 75 bp, synthetic construct
  source 1..75: mol_type = other DNA
gaagacgaagccgcaaaattcacctcggtgattctggcaaccacggaagacacctggggacaacagttcgagaag

SEQ ID NO: 374992 - DNA, 75 bp, synthetic construct
  source 1..75: mol_type = other DNA
atgcgttggcaagggcgacgtgaaagtgacaatgtcgaagacaggcgtaacagctccggcggtccgtcaatgggc

SEQ ID NO: 374993 - DNA, 75 bp, synthetic construct
  source 1..75: mol_type = other DNA
caccgcttagcgcgattctgctgtatatcgcccaaagcgggaacatgtggctgggcggcggcacgctttatctct

SEQ ID NO: 374994 - DNA, 75 bp, synthetic construct
  source 1..75: mol_type = other DNA
atgaatcttgtgacactcaaaacgtgggggaaactcagatatccggataatccaccatcaatatcaacgctgaga

SEQ ID NO: 374995 - DNA, 75 bp, synthetic construct
  source 1..75: mol_type = other DNA
aggccatgcgcattgatatgggtaatatcggtttgttactggcaatgcttggacattttgatatttcgttacggt

SEQ ID NO: 374996 - DNA, 75 bp, synthetic construct
  source 1..75: mol_type = other DNA
tcagaaaatgaggaatatgacgaaaaggctatgcgcattgacatggggaatattggcttgttactggcaatgctt

SEQ ID NO: 374997 - DNA, 75 bp, synthetic construct
  source 1..75: mol_type = other DNA
atgctgacgaaatatgcccttgtggcagtcatagtgctgtgttttacggttctgggatttacgcttctggtcggc

SEQ ID NO: 374998 - DNA, 75 bp, synthetic construct
  source 1..75: mol_type = other DNA
gactcgttgtgtgagttgagtatcagagaacgtggtatggagtttaaggctgttctcgcttacgaatcgaagaag

SEQ ID NO: 374999 - DNA, 75 bp, synthetic construct
  source 1..75: mol_type = other DNA
tagtcttacagaacagttcgaagatttgaaaaccgcaattttaacttcaattggctctagtaacgagagagaagt

SEQ ID NO: 375000 - DNA, 75 bp, synthetic construct
  source 1..75: mol_type = other DNA
cgacccgcaggtgcaaaaagcgttagcagacacggtattacttcaggccaacgtcactgccaacgacgcacaaga

SEQ ID NO: 375001 - DNA, 75 bp, synthetic construct
  source 1..75: mol_type = other DNA
atgctgacgaaatatgcccttgtggcagtcatagtgctgtgtttcacggtgctgggatttacgcttctggtcggg

SEQ ID NO: 375002 - DNA, 75 bp, synthetic construct
  source 1..75: mol_type = other DNA
atgctgacgaaatatgcccttgtggcagtcatagtgctgtgttttacggtcctgggatttacgcttctggtcggt

SEQ ID NO: 375003 - DNA, 75 bp, synthetic construct
  source 1..75: mol_type = other DNA
ttgccgaaggcatcacctggatgaatggtctggaaattaccgacggcacaggacaactctatctcacgggcctgt

SEQ ID NO: 375004 - DNA, 75 bp, synthetic construct
  source 1..75: mol_type = other DNA
agaatgaaacacagtatgctacagatgattgccttgaagaaattataattaacaccagagcagtaagacaagact

SEQ ID NO: 375005 - DNA, 75 bp, synthetic construct
  source 1..75: mol_type = other DNA
caggctaatgcaaatgcaaaattatccagccaacttcagtatatattagcaacgtcacgattcgcacattatctg

SEQ ID NO: 375006 - DNA, 75 bp, synthetic construct
  source 1..75: mol_type = other DNA
atgtgggattgactttgccacagtctctggggcgtattccatatggcatgaagactatacctgccgaaacgttta

SEQ ID NO: 375007 - DNA, 75 bp, synthetic construct
  source 1..75: mol_type = other DNA
tcatttggcgaattaccctatccacgtgatctggcgaaattatttgaaacaaccgattatgctaggtggcgtagc

SEQ ID NO: 375008 - DNA, 75 bp, synthetic construct
  source 1..75: mol_type = other DNA
tcgagaggttctttattaattgacagtgatttaattggtagtattgaaaagagaattgctgatattgataagcta

SEQ ID NO: 375009 - DNA, 75 bp, synthetic construct
  source 1..75: mol_type = other DNA
atagtgaaacacagtatgctacagatgattgtcttgaggaaatcataaaaaatacaagagctgtcagacaagatt

SEQ ID NO: 375010 - DNA, 75 bp, synthetic construct
  source 1..75: mol_type = other DNA
ttttacgtcttttatcccacacacctttatctgattctggctttacagctttaccttgctacaaagggctatctg

SEQ ID NO: 375011 - DNA, 75 bp, synthetic construct
  source 1..75: mol_type = other DNA
gcctcttttttgctttgttctggcgtataatcttgcaaggccagattcatacacctatagcgtatattcaaaagt

SEQ ID NO: 375012 - DNA, 75 bp, synthetic construct
  source 1..75: mol_type = other DNA
tattttacgccttttatccggtacacctttatctgatactggccctgagaacttatctgtctaatcagggctatc

SEQ ID NO: 375013 - DNA, 75 bp, synthetic construct
  source 1..75: mol_type = other DNA
agcggaagcaggaccacttctacaacgcctttccgactgccccctgaagctgccggacaacttaccccagagcat

SEQ ID NO: 375014 - DNA, 75 bp, synthetic construct
  source 1..75: mol_type = other DNA
aaccatggtataaaatatttagagccaaaaactttgaacattatttttataattcaccgtggaaatatcataaaa

SEQ ID NO: 375015 - DNA, 75 bp, synthetic construct
  source 1..75: mol_type = other DNA
tatattatataactgataaatttgacattaatccggatacattagttcttggtattcctttatcaacatgtttac

SEQ ID NO: 375016 - DNA, 75 bp, synthetic construct
  source 1..75: mol_type = other DNA
atgagcaacggtaaactggatattaagattgatttgaaggcgtataacaccacgctgggtaaactgattcgttcc

SEQ ID NO: 375017 - DNA, 75 bp, synthetic construct
  source 1..75: mol_type = other DNA
tccttcagcttgtgcaggacgacatcgacgagctggagaacaccgcaaaccgctattttgcgcgtgtgattgact

SEQ ID NO: 375018 - DNA, 75 bp, synthetic construct
  source 1..75: mol_type = other DNA
gaacctgtattttaaacagtacaaaaacggcagcgtcagcacccgctttgtgaaaaagcgcaacagtaattttgt

SEQ ID NO: 375019 - DNA, 75 bp, synthetic construct
  source 1..75: mol_type = other DNA
tctgggccgtcgcggccaggacgatgccattatggaagaacatcagatccagcctatcgatatggtggttgttaa

SEQ ID NO: 375020 - DNA, 75 bp, synthetic construct
  source 1..75: mol_type = other DNA
tgcgctccgccgccaagaaccataaagatgtcgcaatcgtggtgaagagcagcgactatgacgccattattaaag

SEQ ID NO: 375021 - DNA, 75 bp, synthetic construct
  source 1..75: mol_type = other DNA
atgccaaaaacaatatgaccatcggcattggcgcgggccagatgagccgcgtgtactccgcgaaaatcgccggta

SEQ ID NO: 375022 - DNA, 75 bp, synthetic construct
  source 1..75: mol_type = other DNA
gctttccggacagggaacattttggccgtagcgccatgcaattgccgccggaaaccgtttacgcccaaacgctgt

SEQ ID NO: 375023 - DNA, 75 bp, synthetic construct
  source 1..75: mol_type = other DNA
tccgtggtttggcgtgtggattttgcatggcaactacagcagtagcttgttgctcgacactgtcccgctgaccga

SEQ ID NO: 375024 - DNA, 75 bp, synthetic construct
  source 1..75: mol_type = other DNA
cctaaagaaaaaatgataagaaatcgattccaaacaggtgataatccatatttcatggtgacgcctatgcttgat

SEQ ID NO: 375025 - DNA, 75 bp, synthetic construct
  source 1..75: mol_type = other DNA
ccgctgccatgggggatgccgtcgaagaaaacttcgcgcaacaggggcggcctgcgtggatgggctggagcccgg

SEQ ID NO: 375026 - DNA, 75 bp, synthetic construct
  source 1..75: mol_type = other DNA
aaccgcacggcatgttgtacaaccaggcggcgaaagaagcacaactggcagacgccatcgccagagcggtatacg

SEQ ID NO: 375027 - DNA, 75 bp, synthetic construct
  source 1..75: mol_type = other DNA
cgagttgattcgcgcaggcgcgcgatatggtctgacaacgcgtgaggaagtgtttgccgatcgcggatacctggc

SEQ ID NO: 375028 - DNA, 75 bp, synthetic construct
  source 1..75: mol_type = other DNA
tatcacggcgagagtaaagaagcggctggccgcttcccgcgcacacttaacctgaacttcattaagaagcaggat

SEQ ID NO: 375029 - DNA, 75 bp, synthetic construct
  source 1..75: mol_type = other DNA
gcgcggatacggcgcgggcaatgacgttacggctgccggtgtctttgccgatctgctacgcaccctctcatggaa

SEQ ID NO: 375030 - DNA, 75 bp, synthetic construct
  source 1..75: mol_type = other DNA
tgccgctctggcccgcgccaatatcaacattgtcgccattgcccaagggtcttctgaacgttcaatttctgtcgt

SEQ ID NO: 375031 - DNA, 75 bp, synthetic construct
  source 1..75: mol_type = other DNA
gttcagcgtttcaggtccaggaatgaaagggatggtcggcatggcggcgcgcgtctttgcggcgatgtcacgcgc

SEQ ID NO: 375032 - DNA, 75 bp, synthetic construct
  source 1..75: mol_type = other DNA
tttgcaaaagggaatcagcgatattgaaagtcgtctgacggggaataatttagcaacgataacaccgaccgatca

SEQ ID NO: 375033 - DNA, 75 bp, synthetic construct
  source 1..75: mol_type = other DNA
ctgacgcaaaaaagccacgcacaactggtcgtgttagtggtagaaacaacaggcgatgaaaccatcgagcaatat

SEQ ID NO: 375034 - DNA, 75 bp, synthetic construct
  source 1..75: mol_type = other DNA
tcgacaacgtgattttacgccgttcatatgaacggcaggagatcccctgcccgtggcgttacaccaatgatcgtg

SEQ ID NO: 375035 - DNA, 75 bp, synthetic construct
  source 1..75: mol_type = other DNA
aacagaatgtgcgtgtcctgacctgtggccagtgggcacagcgtgttgccggtctggatttcaaacgcgttaacg

SEQ ID NO: 375036 - DNA, 75 bp, synthetic construct
  source 1..75: mol_type = other DNA
atgcgggcgaaaaataaggatgccccgttaggggcgttagctgagtttttcgcgaaaaattcagctaacgctctc

SEQ ID NO: 375037 - DNA, 75 bp, synthetic construct
  source 1..75: mol_type = other DNA
ctactttggtagcatggttccggcttatcacggtgaaagtaaagaagccgccggccgcttcccgcgcacgctgaa

SEQ ID NO: 375038 - DNA, 75 bp, synthetic construct
  source 1..75: mol_type = other DNA
gcgggcaatgacgttacagctgccggtgtctttgccgatctgctacgtaccctctcatggaagttaggagtctga

SEQ ID NO: 375039 - DNA, 75 bp, synthetic construct
  source 1..75: mol_type = other DNA
gctcgcgcaggacatcattaaagctcaaaaaggtgaaattgagcagatgaataaatggcttgatagtcaaaagta

SEQ ID NO: 375040 - DNA, 75 bp, synthetic construct
  source 1..75: mol_type = other DNA
agcagggattatatgtcggtatatggttatcccgtgccaaccacaccgtggctgaatacggctcccggtttattt

SEQ ID NO: 375041 - DNA, 75 bp, synthetic construct
  source 1..75: mol_type = other DNA
aagcaggtgatgtagcagctagccttctcccgccggctgggcaaactgctagtggtgtttataaagcagcaagcg

SEQ ID NO: 375042 - DNA, 75 bp, synthetic construct
  source 1..75: mol_type = other DNA
ctatccagaaccgtctggattccgcggttaccaacctgaacaacaccactaccaacctgtctgaagcgcagtccc

SEQ ID NO: 375043 - DNA, 75 bp, synthetic construct
  source 1..75: mol_type = other DNA
ccgcggtcaccaacctgaacaacaccactaccaacctgtctgaagcgcagtcccgtattcaggacgccgactatg

SEQ ID NO: 375044 - DNA, 75 bp, synthetic construct
  source 1..75: mol_type = other DNA
atactaaaactacagcaaatactgcagcaaaaggatctgatattcttgcggcgcttaagactggcgataaaatta

SEQ ID NO: 375045 - DNA, 75 bp, synthetic construct
  source 1..75: mol_type = other DNA
agtcccgtattcaggacgccgactatgcgaccgaagtgtccaacatgtcgaaagcgcagatcatccagcaggccg

SEQ ID NO: 375046 - DNA, 75 bp, synthetic construct
  source 1..75: mol_type = other DNA
aattttactactgacgctgaaactaaagctgcaaccaccgccgatccactgaaagctctggacgaagcgatcagc

SEQ ID NO: 375047 - DNA, 75 bp, synthetic construct
  source 1..75: mol_type = other DNA
ttaatgccacaattgcaaatggttttggatcgccaacagctacagattatacatacaacagcgctacaggtgatt

SEQ ID NO: 375048 - DNA, 75 bp, synthetic construct
  source 1..75: mol_type = other DNA
aacatacagttgcgcagatttgtgtgttgatggggatatcgaggccaacgctgtacaaatacatagagtcagcca

SEQ ID NO: 375049 - DNA, 75 bp, synthetic construct
  source 1..75: mol_type = other DNA
cggatgttgccgccgctacccgcgacgctggcgcggccgccgcagccgttcagggcgctgacgcccggttacgcg

SEQ ID NO: 375050 - DNA, 75 bp, synthetic construct
  source 1..75: mol_type = other DNA
cattcgatgaaaagcgccaattcgtcttgcaagaaagcctgtacggctacgatatcgatgccactatggtgcgct

SEQ ID NO: 375051 - DNA, 75 bp, synthetic construct
  source 1..75: mol_type = other DNA
tgctaaagccgcgaccatccaaactgataaaggaacattcaccagtgacggtacagcgtttgatggtgcatcaat

SEQ ID NO: 375052 - DNA, 75 bp, synthetic construct
  source 1..75: mol_type = other DNA
atggcttttgctggtatgtcagaagctgaggcattaaaaaccatctcttattacagtatgggctcgttggtctgt

SEQ ID NO: 375053 - DNA, 75 bp, synthetic construct
  source 1..75: mol_type = other DNA
atggtccggcccatctgggctaatgtatttaactctgcactggcaacaataacagcagccattatctacctgtac

SEQ ID NO: 375054 - DNA, 75 bp, synthetic construct
  source 1..75: mol_type = other DNA
aactggtgcaacgaacaagcatacttcaacaattagtattggtgctgcagaatataaatttgaagatgcagcaac

SEQ ID NO: 375055 - DNA, 75 bp, synthetic construct
  source 1..75: mol_type = other DNA
ctggtggtacaagttcaacagttagttataaatacgacgcagatgcaggtaacttcagttataacaatactgcaa

SEQ ID NO: 375056 - DNA, 75 bp, synthetic construct
  source 1..75: mol_type = other DNA
tcaaagctgctgcggacgttactgatggtgctggtgtcatcgctgctgctggtgtaacttatacagccactgttt

SEQ ID NO: 375057 - DNA, 75 bp, synthetic construct
  source 1..75: mol_type = other DNA
aacggtaaaggttctgtagcgaatacagctgcgacaagcgacgatttaaaactggctggtttcactaagggcacc

SEQ ID NO: 375058 - DNA, 75 bp, synthetic construct
  source 1..75: mol_type = other DNA
ccgtgagctgacggttcaggcttctaccgggactaactctgattcggatctggactccattcaggacgaaatcaa

SEQ ID NO: 375059 - DNA, 75 bp, synthetic construct
  source 1..75: mol_type = other DNA
cagaaagcatatttaactagtgatggtaacttaactacaaacgatgctggtggtgcgactgcggctacgcttgat

SEQ ID NO: 375060 - DNA, 75 bp, synthetic construct
  source 1..75: mol_type = other DNA
tgttgctggtgacaccgctgcacaggctgatacagcagcagatactgcagaagctaccgctactactactgcagt

SEQ ID NO: 375061 - DNA, 75 bp, synthetic construct
  source 1..75: mol_type = other DNA
taaagatggcaaacaagtttatgtgagtgctgcggatggttcacttacgaccagcagtgatactcaattcaagat

SEQ ID NO: 375062 - DNA, 75 bp, synthetic construct
  source 1..75: mol_type = other DNA
cctatgatgacgctactaatggtgttactggagcgactcagaacggtcagctgatcaaagtaacttctgacgcca

SEQ ID NO: 375063 - DNA, 75 bp, synthetic construct
  source 1..75: mol_type = other DNA
gtcgtcagtggcaacagcacctggactaaatctactgttactacctttaatgcagcaacagctaccgacgtgctg

SEQ ID NO: 375064 - DNA, 75 bp, synthetic construct
  source 1..75: mol_type = other DNA
aacaagtgggtgatgaacacatcggcgttattccggaagattgttactacaaagatcaaagccatctgtcgatgg

SEQ ID NO: 375065 - DNA, 75 bp, synthetic construct
  source 1..75: mol_type = other DNA
aagaacgcgttaagaccaactacgaccatcccagcgcgatggatcacagcctgctgcttgagcatttacaagcat

SEQ ID NO: 375066 - DNA, 75 bp, synthetic construct
  source 1..75: mol_type = other DNA
atcgtgccgcgcggcgggaaaaaccgcatcgcgatcgatatattgaaagcgaaaataagtcagttctttgaataa

SEQ ID NO: 375067 - DNA, 75 bp, synthetic construct
  source 1..75: mol_type = other DNA
acattagcgacttatcatgagcaacatcgcgatgaacctgggcctgggcgcgaacgtctgcgacgtatggcgttg

SEQ ID NO: 375068 - DNA, 75 bp, synthetic construct
  source 1..75: mol_type = other DNA
cctgacggagattatccagtgacggtagtcgaggctaagggcttttttaacctcgcatccgcgcctgcggtaaca

SEQ ID NO: 375069 - DNA, 75 bp, synthetic construct
  source 1..75: mol_type = other DNA
tttctcaaactcatatccgcgcctgcggtaacacaggatcagccattcggcctgttcttcagtgcatgggggatg

SEQ ID NO: 375070 - DNA, 75 bp, synthetic construct
  source 1..75: mol_type = other DNA
cgcactgaccgttcatctggagcgcggtgcggttaaccttgccgatttcgcctgggcgcgtcagctcaatggtga

SEQ ID NO: 375071 - DNA, 75 bp, synthetic construct
  source 1..75: mol_type = other DNA
ctgaccggtaacccgatgctgacagtggcgctgaccaaagccgatcgcgtggacgaagcgcgtgttgatgaggtt

SEQ ID NO: 375072 - DNA, 75 bp, synthetic construct
  source 1..75: mol_type = other DNA
gcggcatgaccatcgatctcggctatgcctactggccgcagccggatggccgtgtgcctggttttatcgacgtac

SEQ ID NO: 375073 - DNA, 75 bp, synthetic construct
  source 1..75: mol_type = other DNA
tccatgatccatcatgacataattgaaaaaggcatttcatcaaaaataataatcctcacccataatctttatttc

SEQ ID NO: 375074 - DNA, 75 bp, synthetic construct
  source 1..75: mol_type = other DNA
tagcggttacctatggtcttgatgttgatgacgaattagccattattatcccttttaataatcccagtaacatat

SEQ ID NO: 375075 - DNA, 75 bp, synthetic construct
  source 1..75: mol_type = other DNA
tcagctttttagaataacaaaaaacctatatagctctttttctaacatcagcagagatagtttacaaaatgaata

SEQ ID NO: 375076 - DNA, 75 bp, synthetic construct
  source 1..75: mol_type = other DNA
gggacacaatagatgataattttattaaagccattgaatctatctttgatgaaacatactcaagaaaagtagatc

SEQ ID NO: 375077 - DNA, 75 bp, synthetic construct
  source 1..75: mol_type = other DNA
ttccgtgccttttacagatatataaacagaggctctcactccgacgcaataaacataacagatatgggcgatatt

SEQ ID NO: 375078 - DNA, 75 bp, synthetic construct
  source 1..75: mol_type = other DNA
gcataaattccatatggaataagaccaaagacataagaagttcagaattaaaacaattaatgaaaggtcaaatag

SEQ ID NO: 375079 - DNA, 75 bp, synthetic construct
  source 1..75: mol_type = other DNA
ctgtttggtgacgagccgtggtgggtgcgtgacctggcaaaagagacgggaaccgacgagcaggcaatgcgcctg

SEQ ID NO: 375080 - DNA, 75 bp, synthetic construct
  source 1..75: mol_type = other DNA
ctccggtatggtgtttgtccgcaatgtggaaagaaagagttgtttaccagccttgaaaggccgtacatcgtacac

SEQ ID NO: 375081 - DNA, 75 bp, synthetic construct
  source 1..75: mol_type = other DNA
tcaggtatccgggttcacactgctggccaccatgcgtgaaaaagaaatcatgaaggtgttcggtcagggctacga

SEQ ID NO: 375082 - DNA, 75 bp, synthetic construct
  source 1..75: mol_type = other DNA
ctcaccagctccgccgagttcaaaaagcgtctgctgcacatcgccaaaggggcggtgtacacaggcagcaccaaa

SEQ ID NO: 375083 - DNA, 75 bp, synthetic construct
  source 1..75: mol_type = other DNA
ttattaaccgtctcatccgtgattacaattttaaagaagaaaataattatcttcgctatggtgtttgtccgcaat

SEQ ID NO: 375084 - DNA, 75 bp, synthetic construct
  source 1..75: mol_type = other DNA
atcggcgttcgtggtgttaaggccaacaataacaacacctatgatccggattttaagggcgctatcgtgattgcg

SEQ ID NO: 375085 - DNA, 75 bp, synthetic construct
  source 1..75: mol_type = other DNA
atctctggctggcttttggtgaaaagggaattattaccctggctttctggttgggctccctgttcagcgaacaaa

SEQ ID NO: 375086 - DNA, 75 bp, synthetic construct
  source 1..75: mol_type = other DNA
ttgttcgccgtctcattaatgattttgaatttaaagagaaagataaatatttacagcagggtgtttgccctgctt

SEQ ID NO: 375087 - DNA, 75 bp, synthetic construct
  source 1..75: mol_type = other DNA
gtatggcgttgccaatggaagatgaagcgctggtactgttgctgattgaaaagatgcgcgaaagcggcgacatcc

SEQ ID NO: 375088 - DNA, 75 bp, synthetic construct
  source 1..75: mol_type = other DNA
cgcgtacccggattcattgatgttcccggccatgaaaaatttctctccaacatgctggcaggggttggcggtatc

SEQ ID NO: 375089 - DNA, 75 bp, synthetic construct
  source 1..75: mol_type = other DNA
attaaaaattatcgctactatggcgatctccttctggcaaaaagcccgactgagaaagcgctgctcatgcatcag

SEQ ID NO: 375090 - DNA, 75 bp, synthetic construct
  source 1..75: mol_type = other DNA
cgcccgtaatgaactggaaacacaccctgatattcgtcatatccgtgtagcgaaaaaccatgctcaattagcggg

SEQ ID NO: 375091 - DNA, 75 bp, synthetic construct
  source 1..75: mol_type = other DNA
tctggacggcatttggtgaaaaaggatatgtggcgttggcgttctggctgggttcgttatttgctgaacagatac

SEQ ID NO: 375092 - DNA, 75 bp, synthetic construct
  source 1..75: mol_type = other DNA
aggaatctcttctaaaagacataaaacaatataactctagaattaatgaccttaatgaaaaggtaaaacaattta

SEQ ID NO: 375093 - DNA, 75 bp, synthetic construct
  source 1..75: mol_type = other DNA
ggctgattcagctttacgatcttctcgcccagatccagcaaaaagcctttgatgtgttaagtgacgatgacgccc

SEQ ID NO: 375094 - DNA, 75 bp, synthetic construct
  source 1..75: mol_type = other DNA
cgtaggcatgatgccttacgacgccgatgcgaaagatgcaccgcaaaacgccattatcggcggggccagcctgtg

SEQ ID NO: 375095 - DNA, 75 bp, synthetic construct
  source 1..75: mol_type = other DNA
atcaaagggctggcgatgagcggctttggcccagtaacgcagatttatatcggcggcaaaaacaaacgggtcatg

SEQ ID NO: 375096 - DNA, 75 bp, synthetic construct
  source 1..75: mol_type = other DNA
atgccatttaaaaaactctcccgacgcactttcctgacggtaagctcggcgcttgccttccttcatacgcctttc

SEQ ID NO: 375097 - DNA, 75 bp, synthetic construct
  source 1..75: mol_type = other DNA
cggtaaatgaagccgcatctcttaagcaagggcaaaatgtcacggcttactttaacgccgacagtgtgattatcg

SEQ ID NO: 375098 - DNA, 75 bp, synthetic construct
  source 1..75: mol_type = other DNA
ctgccagcactgacaataccagcggcgaagctgttacaggtgtcagccgtgactgcgatgaacaaagtgactctc

SEQ ID NO: 375099 - DNA, 75 bp, synthetic construct
  source 1..75: mol_type = other DNA
ccttattacaggcggttcgcgctgaattcccggaggtcgttatctatcttcatgaaaatagtggtgcagtgctta

SEQ ID NO: 375100 - DNA, 75 bp, synthetic construct
  source 1..75: mol_type = other DNA
tttacaaaaggggatcaacgatattgaaagtcgcctgacggggaataattcagcaacgataacaccgaccgatca

SEQ ID NO: 375101 - DNA, 75 bp, synthetic construct
  source 1..75: mol_type = other DNA
cagaaccagcaagaaacagaacagaacggtcagaaagcggaacaaaacagcccaaatgcgttacaaaacgagcca

SEQ ID NO: 375102 - DNA, 75 bp, synthetic construct
  source 1..75: mol_type = other DNA
gtgaacgccataatgccctgcacgatgcgcgttaccaggcaaaatacgtttcagttatctggcaaaaactgttcc

SEQ ID NO: 375103 - DNA, 75 bp, synthetic construct
  source 1..75: mol_type = other DNA
atgccaatggcaataatgaaacaggcgagacagcaaatctcttaattaaggtgaacggtcatcgtgaaatcacat

SEQ ID NO: 375104 - DNA, 75 bp, synthetic construct
  source 1..75: mol_type = other DNA
atcaaagggctgacgatgagcggctttggcccggtaacgcagatttatatcggcggcaaaaacaaacgggtcatg

SEQ ID NO: 375105 - DNA, 75 bp, synthetic construct
  source 1..75: mol_type = other DNA
gtctggatacatctggcttgatgattttggaagtagtaatgcaacaatgtctgcagttatcaagagaccttatca

SEQ ID NO: 375106 - DNA, 75 bp, synthetic construct
  source 1..75: mol_type = other DNA
ttgtctggatacatctggcttgatgattttggaagtaataatgcaacaatgtctgcagttatcaagagaccttat

SEQ ID NO: 375107 - DNA, 75 bp, synthetic construct
  source 1..75: mol_type = other DNA
attggcataggactggcaggaagtacttacgataataactacccggaagaccagtcggttaaaaactttgtcgtg

SEQ ID NO: 375108 - DNA, 75 bp, synthetic construct
  source 1..75: mol_type = other DNA
aagaatctcttctaaaagacataaaacaatataacgttagaattaatacacttaatgaaaaggtaaaacaattta

SEQ ID NO: 375109 - DNA, 75 bp, synthetic construct
  source 1..75: mol_type = other DNA
atggaacttaaattaaagaatataaccagctataagaaagatagcttcacgactcttaatctctcaaaaaaaatt

SEQ ID NO: 375110 - DNA, 75 bp, synthetic construct
  source 1..75: mol_type = other DNA
tcaataattcaccatgaaataatcaacaataacaaagcagtaaagaaaacattaatactcacacataacctttat

SEQ ID NO: 375111 - DNA, 75 bp, synthetic construct
  source 1..75: mol_type = other DNA
tgacaatatcaacaccggcatctttatccctcccggtaaaacgttacacatccttggaagcctgcgcggcaacgg

SEQ ID NO: 375112 - DNA, 75 bp, synthetic construct
  source 1..75: mol_type = other DNA
cgcaacctgaccatcgataacctcactgtcagccacgctaattacgccatcttacgccagggatttcataaccag

SEQ ID NO: 375113 - DNA, 75 bp, synthetic construct
  source 1..75: mol_type = other DNA
gcaccttcctgacggcaagctcggcgcttgccttcctccatacccctttcgctcgcgcgcttcccgcccgacaaa

SEQ ID NO: 375114 - DNA, 75 bp, synthetic construct
  source 1..75: mol_type = other DNA
gtaaagacgttcgtggcacatttatggcaaagaacgagaccttactgtcactggcaaatgttcattcggtgaatg

SEQ ID NO: 375115 - DNA, 75 bp, synthetic construct
  source 1..75: mol_type = other DNA
cgccattgaatggaacgtggcaattaacgacagtgatattttgatctccgaccacatcatcgagcgcatcaactg

SEQ ID NO: 375116 - DNA, 75 bp, synthetic construct
  source 1..75: mol_type = other DNA
taccaacggcaaaatcaactggggcatcggcataggccttgcgggaagcacttatgataacaactacccggaaga

SEQ ID NO: 375117 - DNA, 75 bp, synthetic construct
  source 1..75: mol_type = other DNA
aaaacacatgctgaatttacgctgcagaaatcgcgctggcgccctcttgtcagcaccgaaggagagaaaaatgat

SEQ ID NO: 375118 - DNA, 75 bp, synthetic construct
  source 1..75: mol_type = other DNA
atctattggtgtgctaaacgcattgttttataattacgttgtcgttactgaagcggatgcagatagggcatttta

SEQ ID NO: 375119 - DNA, 75 bp, synthetic construct
  source 1..75: mol_type = other DNA
agccatctgaaggtgatgtttgggattttattgggaatataaagcactggttggttaaccctgaaaggaagggta

SEQ ID NO: 375120 - DNA, 75 bp, synthetic construct
  source 1..75: mol_type = other DNA
gttaattttgaaatggcaactgatgaggatgtctcgatgctatcttcctggaaaaaataccgggtattagtgagt

SEQ ID NO: 375121 - DNA, 75 bp, synthetic construct
  source 1..75: mol_type = other DNA
ggtctggcaggcgaagaatggctgaaagccttcccgctgcaggctttccagtacggtgatggtgggaatgtacgc

SEQ ID NO: 375122 - DNA, 75 bp, synthetic construct
  source 1..75: mol_type = other DNA
cggcccgccgcagacgcagcatatgtttggtatattcccggcggctctggtcgcgcacacgggtctggcaggcga

SEQ ID NO: 375123 - DNA, 75 bp, synthetic construct
  source 1..75: mol_type = other DNA
gtatggaaaaaaccaatgcttggagctttttttccagaaatgaagcatgaaactttaggtttggaaagacaaaag

SEQ ID NO: 375124 - DNA, 75 bp, synthetic construct
  source 1..75: mol_type = other DNA
atccattcggtctgacggtggatgctgtgatggaggagtaccgccgctggcgcaatgagtcctggcgatacgacg

SEQ ID NO: 375125 - DNA, 75 bp, synthetic construct
  source 1..75: mol_type = other DNA
tcttgagatgcgttcaaaggggattgagcgccagatgaccgaaagggagttaaaacgacttgcagaacggcaact

SEQ ID NO: 375126 - DNA, 75 bp, synthetic construct
  source 1..75: mol_type = other DNA
ggaaggggcgaaacacccgaaagggccaacgccaattgaattactgaaacaggaatacgagcgccggaaggcggc

SEQ ID NO: 375127 - DNA, 75 bp, synthetic construct
  source 1..75: mol_type = other DNA
cacggaccataaaaatttataatctgttggccggaaccaatgaatttattggtgaaggtgatgcatatattccac

SEQ ID NO: 375128 - DNA, 75 bp, synthetic construct
  source 1..75: mol_type = other DNA
gacagatgaacttcagggttccatgcaggctctgggggtgaaaagcagcattgagcgccgctccttgcagaacgc

SEQ ID NO: 375129 - DNA, 75 bp, synthetic construct
  source 1..75: mol_type = other DNA
atgtcgatgcctgcaacgtcaactaaaaccacaaagcttgcgacgtcattaatcgatgagtacgccctgctgggc

SEQ ID NO: 375130 - DNA, 75 bp, synthetic construct
  source 1..75: mol_type = other DNA
ccgtcaattatggcgatacgttgatatttttacgccaggggaaagtggtgcgtgtgttgaatgaggggagcattg

SEQ ID NO: 375131 - DNA, 75 bp, synthetic construct
  source 1..75: mol_type = other DNA
ggggtacgcgctctctttcgcaatgggaattgtcgataccacgccgattattaatgctcactggtttgcgctgcc

SEQ ID NO: 375132 - DNA, 75 bp, synthetic construct
  source 1..75: mol_type = other DNA
tacagtacctgggttatcggcggcgcggcgattctcgctatcctgctttcctgtgtaggtaaactggctgccgct

SEQ ID NO: 375133 - DNA, 75 bp, synthetic construct
  source 1..75: mol_type = other DNA
tgggggtagagataacgatattaatgttacaactcaaacgcaaagaactacggggcagaatacttggtacgaaac

SEQ ID NO: 375134 - DNA, 75 bp, synthetic construct
  source 1..75: mol_type = other DNA
aggatggggcctttccggcacccatcaaactcggccgcagctcccgctggctgaaaagtgaagtggaagcctggc

SEQ ID NO: 375135 - DNA, 75 bp, synthetic construct
  source 1..75: mol_type = other DNA
caaactggggcgtagctcccgctggttgcaaagcgaagtggaagcctggctacagcaacgcattgcgaagtcacg

SEQ ID NO: 375136 - DNA, 75 bp, synthetic construct
  source 1..75: mol_type = other DNA
ggattatgtgcaggcctgggcgtggttcgataccgcatcgaccaatgatatgaatctttttggtacagaaaaccg

SEQ ID NO: 375137 - DNA, 75 bp, synthetic construct
  source 1..75: mol_type = other DNA
agcccacaattgaagatgttgatttcaagcatttgatctgcgtcgcaggaggaatcatcgaggatctaaaaggcc

SEQ ID NO: 375138 - DNA, 75 bp, synthetic construct
  source 1..75: mol_type = other DNA
agagtggcctgcactggctccagcgtcgggcacaaacactattaaacaatggaggcatccgaacctccgccgatc

SEQ ID NO: 375139 - DNA, 75 bp, synthetic construct
  source 1..75: mol_type = other DNA
aggatggtgcctttccggcccccatcaaactcggccgcagctcccgatggctgaaaagtgaagtggaagcctggt

SEQ ID NO: 375140 - DNA, 75 bp, synthetic construct
  source 1..75: mol_type = other DNA
agagcaaggtcgtggcagcggccagcaaagtatgggagatgcatattttgaaggcgatggcataacgcgggatta

SEQ ID NO: 375141 - DNA, 75 bp, synthetic construct
  source 1..75: mol_type = other DNA
gcaagattatgctcaggcggttatctggtacaaaaaagcggcactgaaggggcttccacaggcgcagcagaatct

SEQ ID NO: 375142 - DNA, 75 bp, synthetic construct
  source 1..75: mol_type = other DNA
tggcctgacggtggatgccgtgatggaggagtaccgtcgctggaggaatgaatcctggcggtacgacgggagtga

SEQ ID NO: 375143 - DNA, 75 bp, synthetic construct
  source 1..75: mol_type = other DNA
cccattagcggaaaatgtcacctggttgtcgccggaaggggaatatcagaagtggaacggtacagcctgggtgaa

SEQ ID NO: 375144 - DNA, 75 bp, synthetic construct
  source 1..75: mol_type = other DNA
tacatgacatcaaccatatcagcaaaagtgatacgggtattatttttgccgctatttctttgttctctctgttat

SEQ ID NO: 375145 - DNA, 75 bp, synthetic construct
  source 1..75: mol_type = other DNA
gaaaaagtatcgggtattgctgaaccgtgttgatacgtcaactgcacctgatattgagtggcctacgaaccctgt

SEQ ID NO: 375146 - DNA, 75 bp, synthetic construct
  source 1..75: mol_type = other DNA
aaaagtatcgggtgttgctgaaccgtgttgatacatcaactgcacctgatattgagtggcctacgaaccctgtca

SEQ ID NO: 375147 - DNA, 75 bp, synthetic construct
  source 1..75: mol_type = other DNA
aggaggtttcgatgctatcttcctggaaaaaataccgggtattagtgagtcggattgatataaatacagccccgg

SEQ ID NO: 375148 - DNA, 75 bp, synthetic construct
  source 1..75: mol_type = other DNA
gtggaacggcacagcctgggtgaaagatgcagaagcagaaaaactgttccggatccgagaggcggaagaaaaaaa

SEQ ID NO: 375149 - DNA, 75 bp, synthetic construct
  source 1..75: mol_type = other DNA
ccgggcgggtgaaacatggcctccggacctggctgagtttgtggcgctgatttcggagagcggggcaaatccatt

SEQ ID NO: 375150 - DNA, 75 bp, synthetic construct
  source 1..75: mol_type = other DNA
tttcggagagtggggcaaatccatttggtcttacggtggatgccgtgatggaagagtaccggcgctggcgcaatg

SEQ ID NO: 375151 - DNA, 75 bp, synthetic construct
  source 1..75: mol_type = other DNA
tgtggcgctgatttcggaaagcggggccaatccatttggtctgacggtggatgctgtgatggaggagtaccgccg

SEQ ID NO: 375152 - DNA, 75 bp, synthetic construct
  source 1..75: mol_type = other DNA
gtagatttggagattgcaacggaggaagaagcatcgttgctgactgcatggaagaagtatagagttttattgaac

SEQ ID NO: 375153 - DNA, 75 bp, synthetic construct
  source 1..75: mol_type = other DNA
atatctggctcactttaattaccctcacctttctggaaattattctcggggtggataatattatttttctttcac

SEQ ID NO: 375154 - DNA, 75 bp, synthetic construct
  source 1..75: mol_type = other DNA
cctgcctggaaagaatattgcactattgccgcattcgctgtcagcgttatcggcatgatgctaatgaacattctg

SEQ ID NO: 375155 - DNA, 75 bp, synthetic construct
  source 1..75: mol_type = other DNA
agggatcggcatgatcggcgcaggaattgttcacccgccgttcacttgttttgaaaaggcgatcctcaactggcg

SEQ ID NO: 375156 - DNA, 75 bp, synthetic construct
  source 1..75: mol_type = other DNA
ccgccgctgttggaatcattgataaagctgtagggattgcaaagaaactagctgatgatggcggggagcttgata

SEQ ID NO: 375157 - DNA, 75 bp, synthetic construct
  source 1..75: mol_type = other DNA
gacgacccaaattcttcaatctaaagggcaggattcccggtatgagattggcatgaatggaaatgcttttgacca

SEQ ID NO: 375158 - DNA, 75 bp, synthetic construct
  source 1..75: mol_type = other DNA
tggtgcgtggcgtttacgcgacaataccacctggagttataacagtagcgacagatcatcaggtagcaaaataaa

SEQ ID NO: 375159 - DNA, 75 bp, synthetic construct
  source 1..75: mol_type = other DNA
cctgcccgatttacgcgcggcgatggcctggctaccaccacgagaacgcgggacgctggcgcatcaggtgcttga

SEQ ID NO: 375160 - DNA, 75 bp, synthetic construct
  source 1..75: mol_type = other DNA
acccattgatgaactccatcagcaaggcgctgggctacgcacactatctcaacaatccgtggttccagctctacc

SEQ ID NO: 375161 - DNA, 75 bp, synthetic construct
  source 1..75: mol_type = other DNA
aaatcgaaggagaatacccgcagtttggtaacaacgatccgcgtgtagatgacctggctgttgacctggtagaac

SEQ ID NO: 375162 - DNA, 75 bp, synthetic construct
  source 1..75: mol_type = other DNA
gatcaccttctcgccgtgccacgaacacgactgtgtgggatcgatggcgggtgttacctcggcctcgatgtttat

SEQ ID NO: 375163 - DNA, 75 bp, synthetic construct
  source 1..75: mol_type = other DNA
cggctgagctggcggcttccggggagatcaccttctcgccgtgccacgagcacgactgtgtgggatcgatggcgg

SEQ ID NO: 375164 - DNA, 75 bp, synthetic construct
  source 1..75: mol_type = other DNA
ttgattgaggccgcctgctttggtgcaacactccaggaagccgcacgccataaattagaagccgatatgctggac

SEQ ID NO: 375165 - DNA, 75 bp, synthetic construct
  source 1..75: mol_type = other DNA
aaagacacatgcaacagtttgctgtcacgaggggtcaaaacgcttggtactgtagtgtctgcaaattgagtgttc

SEQ ID NO: 375166 - DNA, 75 bp, synthetic construct
  source 1..75: mol_type = other DNA
cgaagctggtctttcctgatgggacaggattagacaacttattacgaataaataagttcgctgaattaaataaat

SEQ ID NO: 375167 - DNA, 75 bp, synthetic construct
  source 1..75: mol_type = other DNA
cggagttggtgtttcctgatggggagacgttgcgtgaaatactcacttcgctagcagtactacaacctgccggtg

SEQ ID NO: 375168 - DNA, 75 bp, synthetic construct
  source 1..75: mol_type = other DNA
cgtattgagttacaacaaggtcgcgtccgtaaagcggaacgctggggaccgcgcacgctggatctcgacatcatg

SEQ ID NO: 375169 - DNA, 75 bp, synthetic construct
  source 1..75: mol_type = other DNA
atttcaccggtattgttactgttgccgttagggtatgaagtcgcgctgggcggctttattatgtgcggcgtgctg

SEQ ID NO: 375170 - DNA, 75 bp, synthetic construct
  source 1..75: mol_type = other DNA
cggagctggtttttcctgatggggagacgttggcgacaaggctcaccaatttgaacgccttatgcccacaacgct

SEQ ID NO: 375171 - DNA, 75 bp, synthetic construct
  source 1..75: mol_type = other DNA
gcgtacgctcgatctcgacattatgctgtttggtgatgcagtgataaataccgaacgcctgactgttccgcatta

SEQ ID NO: 375172 - DNA, 75 bp, synthetic construct
  source 1..75: mol_type = other DNA
tgttcctgatcacaatacccagccgctggagacttttgccgcacaatacgggcaagggttaagtaatatgctgga

SEQ ID NO: 375173 - DNA, 75 bp, synthetic construct
  source 1..75: mol_type = other DNA
ccattccgcagcaactgattttgcccgccactgttcgtaaagggattgttgttaacgtcgctgagatgcgtcttt

SEQ ID NO: 375174 - DNA, 75 bp, synthetic construct
  source 1..75: mol_type = other DNA
tgttcctgatcacaatactcagccgctggagacttttgccgcacaatacgggcaagggttaagtaacatgctgga

SEQ ID NO: 375175 - DNA, 75 bp, synthetic construct
  source 1..75: mol_type = other DNA
cgggcgtttatcaacgggcaagaagttgatgtaaatcgtgcaaatgctgcgttgcaacgtcgatcgggaatgcct

SEQ ID NO: 375176 - DNA, 75 bp, synthetic construct
  source 1..75: mol_type = other DNA
gttcattggttctactttttgtcagtcataatagcctggcggtaacttatccattacctcctgagggcagtcgtt

SEQ ID NO: 375177 - DNA, 75 bp, synthetic construct
  source 1..75: mol_type = other DNA
aatcccatggggctgtacgcgatttatattggcaggttgtatgccatccacggtaccaatgccaattttggtatt

SEQ ID NO: 375178 - DNA, 75 bp, synthetic construct
  source 1..75: mol_type = other DNA
tccgttgctaaactgccatttgcttacgctaaagatggtatctcctacaccttctctatcgttccgaacgcactg

SEQ ID NO: 375179 - DNA, 75 bp, synthetic construct
  source 1..75: mol_type = other DNA
caaaatgggccgcagctcccgctggctgaaaagtgaagtggaagcctggctgcaggcgcgtattgcacagtcccg

SEQ ID NO: 375180 - DNA, 75 bp, synthetic construct
  source 1..75: mol_type = other DNA
actcggattgaccgggatggcgacactgttggcggcgaccacgcacgcgccgattatgtcgacgttgatgatatg

SEQ ID NO: 375181 - DNA, 75 bp, synthetic construct
  source 1..75: mol_type = other DNA
atgcaacatctacatgtctacccggatctgcgcaccatgttccgccgcctgcttatcgcaatggtcgtaggcatt

SEQ ID NO: 375182 - DNA, 75 bp, synthetic construct
  source 1..75: mol_type = other DNA
atgaaagataaaaagagaaaaacgggaatagaaccgaaggtattctttccgccgttaataatcgttggcatactt

SEQ ID NO: 375183 - DNA, 75 bp, synthetic construct
  source 1..75: mol_type = other DNA
agtgattcgccccagctcgacactggtgccgctggtaggtgaaaaacacgccaaagggttgttcggcactatcgt

SEQ ID NO: 375184 - DNA, 75 bp, synthetic construct
  source 1..75: mol_type = other DNA
atttacgctatccagatgagtatcttcctcgcccgcatctcccgtggtcgtaccgtgcgtgaactgtgcttcggc

SEQ ID NO: 375185 - DNA, 75 bp, synthetic construct
  source 1..75: mol_type = other DNA
ttgcttacctggtggcgctgaaataccagcttttccgtaacctcgcattatggcagcaggcgctggtcgtcatgt

SEQ ID NO: 375186 - DNA, 75 bp, synthetic construct
  source 1..75: mol_type = other DNA
cttgttgtattggatcctggccttgccccatcgcgtaaatgtgggcacaggttttgtgatgggtgccatactgga

SEQ ID NO: 375187 - DNA, 75 bp, synthetic construct
  source 1..75: mol_type = other DNA
gtggcgagctatcgtagccagggacgctgggtaatctggctctctttcctcattgcgctgttgctgcaaatcatg

SEQ ID NO: 375188 - DNA, 75 bp, synthetic construct
  source 1..75: mol_type = other DNA
aggatggtgcctttcctgcccccatcaaactgggccgtagctcccgatggctgaaaagtgaagtggaagcctggt

SEQ ID NO: 375189 - DNA, 75 bp, synthetic construct
  source 1..75: mol_type = other DNA
ctggagacttttgccgcacaatacgggcaagggttaagtaacatgctggaagcgaatccgggcgctgatgttttc

SEQ ID NO: 375190 - DNA, 75 bp, synthetic construct
  source 1..75: mol_type = other DNA
gggacgcgtgtgcaaattatcgaccagccagtaaaatacaccactgaaccagatggctcgaactggctggaagtt

SEQ ID NO: 375191 - DNA, 75 bp, synthetic construct
  source 1..75: mol_type = other DNA
tgctcttacaccctggcgatgtccacctgtcgtgaagtgcgcgacggcgaagaaccaccgctgctggtgcgcatt

SEQ ID NO: 375192 - DNA, 75 bp, synthetic construct
  source 1..75: mol_type = other DNA
gaatgtgttcatgagttaatggctgttgagatagccaggttatcacggcataacaataccatgagtatttttaag

SEQ ID NO: 375193 - DNA, 75 bp, synthetic construct
  source 1..75: mol_type = other DNA
gctaccagcctgaacgcgcctgagatagctccggcagtcgctgccactgatgtacagagacaacaggcagactta

SEQ ID NO: 375194 - DNA, 75 bp, synthetic construct
  source 1..75: mol_type = other DNA
tgggcagcgaagatgacgcagtgcgggcgcaggggctggagattatgcgcaaagctatccagttcgcccaggatg

SEQ ID NO: 375195 - DNA, 75 bp, synthetic construct
  source 1..75: mol_type = other DNA
cttcctgcgtactccggaatacgatgaactgttctctggcgacccgatctgggcaaccgaatctatcggtggtat

SEQ ID NO: 375196 - DNA, 75 bp, synthetic construct
  source 1..75: mol_type = other DNA
ccagaaactttgccagtgacgatgccattgggatttataacaactaacaaagagtcagttaaaattattggatcg

SEQ ID NO: 375197 - DNA, 75 bp, synthetic construct
  source 1..75: mol_type = other DNA
cgtccgatttatctcaagcctgagcgattttcttaacaggtcggctacgaaggataagcggctgtataaaccggt

SEQ ID NO: 375198 - DNA, 75 bp, synthetic construct
  source 1..75: mol_type = other DNA
ccgtttatcgatagcatacattcctgtcaccgataacgacaacgaaacgctgtatcacttttttcgccagtcatg

SEQ ID NO: 375199 - DNA, 75 bp, synthetic construct
  source 1..75: mol_type = other DNA
tggcaaaaggctttccgcccatttgcgtcagcgcctgcccggaacatgcattgatctttggtcgcgaagatagcc

SEQ ID NO: 375200 - DNA, 75 bp, synthetic construct
  source 1..75: mol_type = other DNA
ccgcataccctgcaactggacgctatcatcattacctgctggattatcctcaacgccatttgcgtcgcctgcggt

SEQ ID NO: 375201 - DNA, 75 bp, synthetic construct
  source 1..75: mol_type = other DNA
atgaaagcgttgtgtcaggagtaccgcaatggcgccaggcgcaatgagcagagaaatggagagaatgatacctac

SEQ ID NO: 375202 - DNA, 75 bp, synthetic construct
  source 1..75: mol_type = other DNA
caggtctcgtattcccggataaccacacgcttgcccggttactgactgatgcacaatttccgcgcccttctcttt

SEQ ID NO: 375203 - DNA, 75 bp, synthetic construct
  source 1..75: mol_type = other DNA
atggctaccccagtttcactgatggatgaccagatggtcgacatggcatttatcactcaactgaccggcctgaca

SEQ ID NO: 375204 - DNA, 75 bp, synthetic construct
  source 1..75: mol_type = other DNA
gactggacgctacgttcgcagcattaaaagagtctctggtgcaactggaacaggaacgtaaaggtaaaacgccat

SEQ ID NO: 375205 - DNA, 75 bp, synthetic construct
  source 1..75: mol_type = other DNA
caatcgagatctactcggtatgttttttctatcattaaaagaagatagcgtacttttgaatattgcattccctgc

SEQ ID NO: 375206 - DNA, 75 bp, synthetic construct
  source 1..75: mol_type = other DNA
ggatactggagtgtgcacctcaatctgaggtcctgtttttttattgttatttattcaataatgaatcttcaaaaa

SEQ ID NO: 375207 - DNA, 75 bp, synthetic construct
  source 1..75: mol_type = other DNA
accagtgaaattacgtatgatttggcatctggtagagcggattattacttctggaaggatgaagcgtcggcagga

SEQ ID NO: 375208 - DNA, 75 bp, synthetic construct
  source 1..75: mol_type = other DNA
gcatgagaaggcaaataacggtcagtcatccgttatccatcagcagcaggctgaaaaacaccgcagtcagagcgt

SEQ ID NO: 375209 - DNA, 75 bp, synthetic construct
  source 1..75: mol_type = other DNA
ggatgctgatgatatttcacatcccctacgattagaaaagcaactaaattttctactagaaaatccagatatagc

SEQ ID NO: 375210 - DNA, 75 bp, synthetic construct
  source 1..75: mol_type = other DNA
ttctggtgtctcctgacagcaacatcacgctgtcgcagggagagctgccggtgaccggaacgataacctgggcaa

SEQ ID NO: 375211 - DNA, 75 bp, synthetic construct
  source 1..75: mol_type = other DNA
attgagcccgccaccggcggcgccaacattgaaagtgaagaggatttccgattacgtggtctgctggcgtatcag

SEQ ID NO: 375212 - DNA, 75 bp, synthetic construct
  source 1..75: mol_type = other DNA
taaagcctcattagagacggcgctaacggcgggtttgtggaatgccggctcgctcaacggcctgacatgggcgaa

SEQ ID NO: 375213 - DNA, 75 bp, synthetic construct
  source 1..75: mol_type = other DNA
taatgtgatgaagcctattagtgctcatcgtgaatatgtttttccgagtcggaatgacccaaagaaaccaatgaa

SEQ ID NO: 375214 - DNA, 75 bp, synthetic construct
  source 1..75: mol_type = other DNA
tggtccgtgtacttgacaggatcgcggcaaaccgcggttatccggtcatgctacgcatggataatggtccggaat

SEQ ID NO: 375215 - DNA, 75 bp, synthetic construct
  source 1..75: mol_type = other DNA
gtgcgtaatccctcgccactggctacgccagaagcgctgaaccagagctggtctgtcgattttatgcatgatgcg

SEQ ID NO: 375216 - DNA, 75 bp, synthetic construct
  source 1..75: mol_type = other DNA
gttcgtatcctgacctccaacaaacctgtacagctaatggaaatatatcgacagtacaaatctatttaactgaac

SEQ ID NO: 375217 - DNA, 75 bp, synthetic construct
  source 1..75: mol_type = other DNA
gaagcagcgtttgagaaggcccgcgccaagggtgatgaggcgggcatgaagtctgccgatcaccaccaggatgag

SEQ ID NO: 375218 - DNA, 75 bp, synthetic construct
  source 1..75: mol_type = other DNA
gcgagtacggctttattcattcactggtggccttctccggcaagatgaccggtaagcaggtgatgcaccaggatg

SEQ ID NO: 375219 - DNA, 75 bp, synthetic construct
  source 1..75: mol_type = other DNA
ccgagcgggcggtgtaccccgaagacctagaaagctggatcaaaaccagcggccagcaggaaaaatgggacaagc

SEQ ID NO: 375220 - DNA, 75 bp, synthetic construct
  source 1..75: mol_type = other DNA
gctttcgttaatcagatttcagctattaccggtgaaagcgatgtcgtcatggctcaggtggaaagcaacacccgt

SEQ ID NO: 375221 - DNA, 75 bp, synthetic construct
  source 1..75: mol_type = other DNA
cggtattgcaaccagcaggtgcaggcggtggtggcgcggcaggcgacaagccgaaattcgtcaaagagattatcg

SEQ ID NO: 375222 - DNA, 75 bp, synthetic construct
  source 1..75: mol_type = other DNA
cgccaagctgctgcaaaagcgccttcagcacgaagcaccggaaaccgtggacttgacaggcctggtgcttactgg

SEQ ID NO: 375223 - DNA, 75 bp, synthetic construct
  source 1..75: mol_type = other DNA
ccttgatcggtcatggtgagaaagcgttaccggcctggtttgcttcgctgggtgatttccatacttcgcagtatc

SEQ ID NO: 375224 - DNA, 75 bp, synthetic construct
  source 1..75: mol_type = other DNA
gtttacagtccggcattgatgccgtgcttcatgtactggattgggtgccggttcgtcttgcgggtgtggtatatg

SEQ ID NO: 375225 - DNA, 75 bp, synthetic construct
  source 1..75: mol_type = other DNA
cggcgtccctgcaggctgcgatgaacgtgaatacttgcgggaactgcaaaatgcactgctgtggattaactttcg

SEQ ID NO: 375226 - DNA, 75 bp, synthetic construct
  source 1..75: mol_type = other DNA
cgggtaaagtgcgtctccattatcatgcatatctgacagccgcttcacgtaacgataaccatgcccgttccacga

SEQ ID NO: 375227 - DNA, 75 bp, synthetic construct
  source 1..75: mol_type = other DNA
cacgttaggtatgaccattattgcgatgggggtgacttttttgctgttgcgcgcgttgcatgggttattgttcaa

SEQ ID NO: 375228 - DNA, 75 bp, synthetic construct
  source 1..75: mol_type = other DNA
cttgcgtgcatggcaatactggctggcgcgataccagacgccgcatcatcgtttacagtccggcattgatgccgt

SEQ ID NO: 375229 - DNA, 75 bp, synthetic construct
  source 1..75: mol_type = other DNA
gcactgggcgtcagcgtcgaacgctcgcgtctgttaatgatgctggtcgccgtaatacttaccgcagctgccact

SEQ ID NO: 375230 - DNA, 75 bp, synthetic construct
  source 1..75: mol_type = other DNA
ataagattgccgaattccagcggaacatgccgcagggatacgacatcgcttacccgaaagacagcactgaattta

SEQ ID NO: 375231 - DNA, 75 bp, synthetic construct
  source 1..75: mol_type = other DNA
gaccattaaaatttcagccacttatactggtgcttctgccgaaacgctggagaacagcgtgactcaggtcatcga

SEQ ID NO: 375232 - DNA, 75 bp, synthetic construct
  source 1..75: mol_type = other DNA
aaagggcgtatcgatgtcttatttagtgaaggtatagctgacagaggtttaaaaaatacgggtggagtgttaatc

SEQ ID NO: 375233 - DNA, 75 bp, synthetic construct
  source 1..75: mol_type = other DNA
tcgaacacgcaacaattgacggcaacagttcgtgctcagtcacgcttgcaaaccgttgagcaatttaaaaatatt

SEQ ID NO: 375234 - DNA, 75 bp, synthetic construct
  source 1..75: mol_type = other DNA
ttggcgcatttaaccgtttctaccgtcgtattgaagtacgctatcaacatggcgtgctttatgttctgcagcgtg

SEQ ID NO: 375235 - DNA, 75 bp, synthetic construct
  source 1..75: mol_type = other DNA
cgtgcggcattacgcgcggcgcagactcgtttacgcccaatcatcatgacctcgctggcgtttattgcgggggta

SEQ ID NO: 375236 - DNA, 75 bp, synthetic construct
  source 1..75: mol_type = other DNA
tcgcccgcttgcaacgcaaagctgagcttaacccacagcgtgccgaaagtttctatggaggcggtgcggaaggct

SEQ ID NO: 375237 - DNA, 75 bp, synthetic construct
  source 1..75: mol_type = other DNA
catcgctaacgcccgtgaagccggttttgatctggtggagcttcactccgctcacggttacttactgcatcagtt

SEQ ID NO: 375238 - DNA, 75 bp, synthetic construct
  source 1..75: mol_type = other DNA
atgtcatctgaaaaactgtattccccactgaaagtgggcgcaatcacggcggcaaaccgtatttttatggcaccg

SEQ ID NO: 375239 - DNA, 75 bp, synthetic construct
  source 1..75: mol_type = other DNA
gtgaactatctcatctcctggtacgagctccaggtgccggagctacgcacgcttgcgatccagcggaaccgcgcg

SEQ ID NO: 375240 - DNA, 75 bp, synthetic construct
  source 1..75: mol_type = other DNA
atgtcatctgaaaaactgtattccccactgaaagtgggcgcgatcacggcggcaaaccgtatttttatggcgccg

SEQ ID NO: 375241 - DNA, 75 bp, synthetic construct
  source 1..75: mol_type = other DNA
cactgaaagtgggcgcaatcacggcggcaaaccgtatctttatggctcctctgacgcgcctgcgtagcattgaac

SEQ ID NO: 375242 - DNA, 75 bp, synthetic construct
  source 1..75: mol_type = other DNA
tctgccgtatttctgccaatggcgttctttgggggatctacgggggtaatttatcgtcagttttcgataaccatt

SEQ ID NO: 375243 - DNA, 75 bp, synthetic construct
  source 1..75: mol_type = other DNA
aatttagcgtgatggataaacaggccgggtattacatggggaaactatcggtaatttttactccatctctaccaa

SEQ ID NO: 375244 - DNA, 75 bp, synthetic construct
  source 1..75: mol_type = other DNA
ttaacgtgacggcaaaacaggcgggatattatatgggtaaattgtcggtcatctttaccccgtcattaccgacga

SEQ ID NO: 375245 - DNA, 75 bp, synthetic construct
  source 1..75: mol_type = other DNA
tattatgtctaataactggcatcaatgttacgcaagcggcgaaaaatgtcactgctgaagtgacctacaacttag

SEQ ID NO: 375246 - DNA, 75 bp, synthetic construct
  source 1..75: mol_type = other DNA
ggctgctcgcctggcgtaacggcatcgacacctttcggttgattattatcggcatcggcgttcgcgccatgctgg

SEQ ID NO: 375247 - DNA, 75 bp, synthetic construct
  source 1..75: mol_type = other DNA
tgctggtaaggcggatgcgcttgctggagatgggcgatgacaccgcctgcgcactgggcgtcagcgtcgaacgct

SEQ ID NO: 375248 - DNA, 75 bp, synthetic construct
  source 1..75: mol_type = other DNA
ctgtccgctgcgaccggcggagccgatattgaaacggaagaggattttcgcagtcgtggcttgctggcatggcag

SEQ ID NO: 375249 - DNA, 75 bp, synthetic construct
  source 1..75: mol_type = other DNA
aacgtagtggtatgcgctggccacttaagctcaaaggatttaaagaagcttatgtcatgaatcaagtacctgggt

SEQ ID NO: 375250 - DNA, 75 bp, synthetic construct
  source 1..75: mol_type = other DNA
cacattatgctgataagaagtttcttacgctttaccttgagcaggcagaaatgaagaagttgccgattggcggcg

SEQ ID NO: 375251 - DNA, 75 bp, synthetic construct
  source 1..75: mol_type = other DNA
attattggcggtacgctgaccgctacattactggccatcttcttcgttcctctgttttttgtgctggttaaacgt

SEQ ID NO: 375252 - DNA, 75 bp, synthetic construct
  source 1..75: mol_type = other DNA
aaaacttaaaggatacatatctgcacgaacatcgagagtcggttcagattgtgaagggtatgccaaacaactccc

SEQ ID NO: 375253 - DNA, 75 bp, synthetic construct
  source 1..75: mol_type = other DNA
gtgacttctctatctatcgtcagggaggaaccaccaccgacgagggagaacgcattgattaccgggtcaaaatgt

SEQ ID NO: 375254 - DNA, 75 bp, synthetic construct
  source 1..75: mol_type = other DNA
atcctgctgataaaaagtttcttacactttaccttgaacaggcagaaatgaagaagctgccaattggtggtgtct

SEQ ID NO: 375255 - DNA, 75 bp, synthetic construct
  source 1..75: mol_type = other DNA
caactccggattcctgttgctggccgaccactataacttcctgccacgggcatgccgtccacgcagggccagaac

SEQ ID NO: 375256 - DNA, 75 bp, synthetic construct
  source 1..75: mol_type = other DNA
tcagattggttgctctgaacggacggtcagacgctacctcaaataccctgaaccgccagccagaaaaacccgcca

SEQ ID NO: 375257 - DNA, 75 bp, synthetic construct
  source 1..75: mol_type = other DNA
gaataacaacgggaaagtcgtgttcaactccggattcctgttgctggctgaccactataacttcctgccacgggc

SEQ ID NO: 375258 - DNA, 75 bp, synthetic construct
  source 1..75: mol_type = other DNA
agcgttaccaggggcttgcccagagtgataaaaaactggcggattatctgctgctacaacctgatacggcgcgcc

SEQ ID NO: 375259 - DNA, 75 bp, synthetic construct
  source 1..75: mol_type = other DNA
catgtcttcgccgcaccaaaacaggatgctgagcatacctgcgaatcactggttcgcgccttccgctacttcggt

SEQ ID NO: 375260 - DNA, 75 bp, synthetic construct
  source 1..75: mol_type = other DNA
agacagtgccggagcatcacgccccgctctggcagcaggtcagtcaggtggaacatcgaccactgagtgcctatg

SEQ ID NO: 375261 - DNA, 75 bp, synthetic construct
  source 1..75: mol_type = other DNA
cactcatgtcaatcaacaactggagcaatggatagccgatgtggctgacaaacgggagcttcgccagttcaaaga

SEQ ID NO: 375262 - DNA, 75 bp, synthetic construct
  source 1..75: mol_type = other DNA
gaccactataacttcctgccacgggcatgccgtccacgcagggccagaacaaaaggtaaggttgagcggatggtg

SEQ ID NO: 375263 - DNA, 75 bp, synthetic construct
  source 1..75: mol_type = other DNA
gtctggctggcagacagtgccggagcatcacgccacgctctggcagcaggtcagtcaggtggaacatcggccact

SEQ ID NO: 375264 - DNA, 75 bp, synthetic construct
  source 1..75: mol_type = other DNA
tgataaagcaaatgcgccagcagggcgcgtacatcgtcgatattgcgactcagattggttgctctgaacggacgg

SEQ ID NO: 375265 - DNA, 75 bp, synthetic construct
  source 1..75: mol_type = other DNA
cccgcacctggcttgaacataataaagggttttgtaacagccgtcaggtgcacaaaaccatcgtcagcgacaaag

SEQ ID NO: 375266 - DNA, 75 bp, synthetic construct
  source 1..75: mol_type = other DNA
ccgccatgtgtcctgggacagctatatcgaggttggtggtaatcgttacagcgttcccgaagcgctgtgtggtca

SEQ ID NO: 375267 - DNA, 75 bp, synthetic construct
  source 1..75: mol_type = other DNA
attaccggaaaacgtcacctggttgtcgccggatggggagtttcagaagtggaacggcacagcctgggtgaaaga

SEQ ID NO: 375268 - DNA, 75 bp, synthetic construct
  source 1..75: mol_type = other DNA
ccggctggcttcgtggctgtttttaacagtgaggatacatcatggcatctcgttgaagaccacagggaaaaaacg

SEQ ID NO: 375269 - DNA, 75 bp, synthetic construct
  source 1..75: mol_type = other DNA
gcagatctggaaattgcaacggaggaagaaatctcgttgctggaagcatggaaaaagtatcgggtgttgctgaac

SEQ ID NO: 375270 - DNA, 75 bp, synthetic construct
  source 1..75: mol_type = other DNA
tgctgggtctggtggcgctgggcttcaccttaatttccgtgttcacgcttagcgctgagagatcccctcataatt

SEQ ID NO: 375271 - DNA, 75 bp, synthetic construct
  source 1..75: mol_type = other DNA
actatcagtaagttggagtcattacccgccgttttgctctttttcgccaaaacggatgcaccctcttccgccacg

SEQ ID NO: 375272 - DNA, 75 bp, synthetic construct
  source 1..75: mol_type = other DNA
gcatatagcgccacttcaggatgctgtagatctggagatcgcaacggaggaagaaatctcgttgctggaagcatg

SEQ ID NO: 375273 - DNA, 75 bp, synthetic construct
  source 1..75: mol_type = other DNA
ctgatgcaggtagccagtgagcatatagcgccacttcaggatgctgtagatctggagatcgcaacggaggaagaa

SEQ ID NO: 375274 - DNA, 75 bp, synthetic construct
  source 1..75: mol_type = other DNA
gctggccggaactaatgagtttattggtgaaggtgacgcatatattccacctcatacagggctgccagctaattc

SEQ ID NO: 375275 - DNA, 75 bp, synthetic construct
  source 1..75: mol_type = other DNA
aagaaatctcgttgctggaagcatggaaaaagtatcgggtattgctgaaccgtgttgatacgtcaactgcacagg

SEQ ID NO: 375276 - DNA, 75 bp, synthetic construct
  source 1..75: mol_type = other DNA
caaatcaaaaacgctggtgtaacgcagcacaccactgaacagtgtttcgtcctgaccaaacatgctcatgaggac

SEQ ID NO: 375277 - DNA, 75 bp, synthetic construct
  source 1..75: mol_type = other DNA
aaaatgaataagcgcaagcccggggaggaactcgttcatctctggcaagcgcagaagacgcaatccggtgttcgt

SEQ ID NO: 375278 - DNA, 75 bp, synthetic construct
  source 1..75: mol_type = other DNA
tagcaaatgctactgatggaaatgattttgatttgcggcaggtgcgaaaaaagcggatgacaatctatttctgta

SEQ ID NO: 375279 - DNA, 75 bp, synthetic construct
  source 1..75: mol_type = other DNA
ttgcgacaattaatgatattcgtgagtctaacagtttcacgcttgacggtgacgaaaaagacgggattatcgttg

SEQ ID NO: 375280 - DNA, 75 bp, synthetic construct
  source 1..75: mol_type = other DNA
gacgccagctgcgttggcggagattcaagagctagtatcggctgcgaaaaatgctgcagcagcagcagacgccag

SEQ ID NO: 375281 - DNA, 75 bp, synthetic construct
  source 1..75: mol_type = other DNA
cggtagcgccggcaatataaagatagagataggagatgctgatgtttcatcagtaacatatggtcccaacacaat

SEQ ID NO: 375282 - DNA, 75 bp, synthetic construct
  source 1..75: mol_type = other DNA
aaagaggatcgtctgcccgttgacccaaaaaccaagcgtaaagagccgctgttaacctttaaacgcggtgcagtg

SEQ ID NO: 375283 - DNA, 75 bp, synthetic construct
  source 1..75: mol_type = other DNA
acgatatagcgggaatagaatctattttggattcatcaataaaattaaaggatcaacaccgagaatagccattgc

SEQ ID NO: 375284 - DNA, 75 bp, synthetic construct
  source 1..75: mol_type = other DNA
cggctggcagaccgtgccggagcatcacgccccactctggcagcaggtcagtcaggtggaacacaggccgttgaa

SEQ ID NO: 375285 - DNA, 75 bp, synthetic construct
  source 1..75: mol_type = other DNA
gataccagctccagcacgactggggcgaagttgaggtggaggttgccgggcaacggtgcaaagttaactttgcgg

SEQ ID NO: 375286 - DNA, 75 bp, synthetic construct
  source 1..75: mol_type = other DNA
ctggctggcagacagtgccggagcatcactccccgctctggcagcaggtcagtcaggtggaacatcgaccactga

SEQ ID NO: 375287 - DNA, 75 bp, synthetic construct
  source 1..75: mol_type = other DNA
agagtcgttcgtgcgcgacggcgcggcactgaaggaaacctacgatcttcaggccggttctatcaccacacaacc

SEQ ID NO: 375288 - DNA, 75 bp, synthetic construct
  source 1..75: mol_type = other DNA
ataacttcctgccacgggcatgccgtccacgcagggccagaacaaaaggtaaggttgagcggatggtgaaatacc

SEQ ID NO: 375289 - DNA, 75 bp, synthetic construct
  source 1..75: mol_type = other DNA
tagccgatgtggctgacaaacgggaacttcgccagttcaaagaaacgccggaacagcgctttgcgctggagcagg

SEQ ID NO: 375290 - DNA, 75 bp, synthetic construct
  source 1..75: mol_type = other DNA
cagaagtggaacggcacatcctgggtgaaagatgcagaagcagaaaaactgtttcggataagggaggcggaagaa

SEQ ID NO: 375291 - DNA, 75 bp, synthetic construct
  source 1..75: mol_type = other DNA
gatgctgaacatacctatgagtcactggtccgcgcctttcgctacttcggcggcagcgtgaaaaccgtgctggtc

SEQ ID NO: 375292 - DNA, 75 bp, synthetic construct
  source 1..75: mol_type = other DNA
acctctacgccagcaccaaaagagacggcgactacggctccagtacagacggcatccccggcgcaaaccacggca

SEQ ID NO: 375293 - DNA, 75 bp, synthetic construct
  source 1..75: mol_type = other DNA
cgggaaccacgtctgcggaaaatactcagcaggatgtttctctgccaccgatctcttctacgccgactcaagggc

SEQ ID NO: 375294 - DNA, 75 bp, synthetic construct
  source 1..75: mol_type = other DNA
gttgcagtttacgtcccgtgatttgacggtgattagagcggagtttgatcgcattcaggaggcagctaatgttct

SEQ ID NO: 375295 - DNA, 75 bp, synthetic construct
  source 1..75: mol_type = other DNA
tactggtgaaaatgttcgtgtttattataaagaaaatgtttggcgtgatgctaatttcacgtcagcgttttcagg

SEQ ID NO: 375296 - DNA, 75 bp, synthetic construct
  source 1..75: mol_type = other DNA
tgacgccgcaggatattgtcaatttcgatgtgcgcccgtggtttgaaaaaatggcgctcacccaacatctcaccc

SEQ ID NO: 375297 - DNA, 75 bp, synthetic construct
  source 1..75: mol_type = other DNA
ccagcaccagaacaggagccggagccagaagaagcgggtgaatcagcaagtgaagctgatcaggaggcagataaa

SEQ ID NO: 375298 - DNA, 75 bp, synthetic construct
  source 1..75: mol_type = other DNA
ggacgtatataacgcccttcaaaatcattcaaacgaagtaacgccagagcctgaattagcacctgtagttgagcc

SEQ ID NO: 375299 - DNA, 75 bp, synthetic construct
  source 1..75: mol_type = other DNA
caaacgtggcgtatccacttggtgatggggagaaccttttcattatggacgtgtataacgcccttcaaaatcatt

SEQ ID NO: 375300 - DNA, 75 bp, synthetic construct
  source 1..75: mol_type = other DNA
gtgccacctgtctggcttggagagcaacaacttgccgaactggacaacctgcaaatcgtaccggacggacgctat

SEQ ID NO: 375301 - DNA, 75 bp, synthetic construct
  source 1..75: mol_type = other DNA
ataaacgccgactctgacacagtgcattattacaacagtgttgtatgggttcccgtacaggataaagagctacag

SEQ ID NO: 375302 - DNA, 75 bp, synthetic construct
  source 1..75: mol_type = other DNA
aggatgcaagggaacgcgcattagtggttggcttttcactgattattctgccggatatgacccgctacgcgggtg

SEQ ID NO: 375303 - DNA, 75 bp, synthetic construct
  source 1..75: mol_type = other DNA
acgcagtatgtctgcatttgcgctcctctcagcggcatttgaacaaccgcggtgcacagcaaaaactggctgaag

SEQ ID NO: 375304 - DNA, 75 bp, synthetic construct
  source 1..75: mol_type = other DNA
catgtcggcgtgaacggcagaacggtgcgccgctgggtgaacggagaaagtgacatcgcgtattccgtctggtgc

SEQ ID NO: 375305 - DNA, 75 bp, synthetic construct
  source 1..75: mol_type = other DNA
ggcggcccctgacgtcagatgagaaacagcaggtacacaaggagggccagagctacagcaggacgcaggaaagtg

SEQ ID NO: 375306 - DNA, 75 bp, synthetic construct
  source 1..75: mol_type = other DNA
agggatggcgaacgagctggttgcgtccagcatggtaaaacatattgatggctatgtagatctgtttggaagtga

SEQ ID NO: 375307 - DNA, 75 bp, synthetic construct
  source 1..75: mol_type = other DNA
cgcagcaggtgatcggcccgatgtttgccggttataagccggaagattctggattggatattggcgacagtgcca

SEQ ID NO: 375308 - DNA, 75 bp, synthetic construct
  source 1..75: mol_type = other DNA
tcgactggacgccgccggggcagggcaatatgcaggtggtgcaggcgctggacaacattgccgattccccgctgg

SEQ ID NO: 375309 - DNA, 75 bp, synthetic construct
  source 1..75: mol_type = other DNA
gcaaaccatctgcataagcaggtatcacgattccaccttgccgataagaacgcgcacaagcgcgccgacgatttg

SEQ ID NO: 375310 - DNA, 75 bp, synthetic construct
  source 1..75: mol_type = other DNA
gaaattatcctgatcgatgaggcggcttttaccaagtcgcctgaaatgctgaaggaaatctggccgaagtcgatt

SEQ ID NO: 375311 - DNA, 75 bp, synthetic construct
  source 1..75: mol_type = other DNA
atggcaacagtagctcgaaggtgtgagggtgtcggtgcgggcgcacgtaggtcccaggttcttcacgccggaccg

SEQ ID NO: 375312 - DNA, 75 bp, synthetic construct
  source 1..75: mol_type = other DNA
taaagatgcgggcgtcggcatgattggcgcgggcattgtgcatccaccttttgcctgcttcgagaaagccattct

SEQ ID NO: 375313 - DNA, 75 bp, synthetic construct
  source 1..75: mol_type = other DNA
ttatctggcaatagcctttaaaaaatggggcgtcgcctgggaggccgttggtgcatacaatgccggattcaggaa

SEQ ID NO: 375314 - DNA, 75 bp, synthetic construct
  source 1..75: mol_type = other DNA
ttatctggcaatagcatttaaaaaatggggcgtcccctgggaggccgttggtgcatacaatgcaggattcaggaa

SEQ ID NO: 375315 - DNA, 75 bp, synthetic construct
  source 1..75: mol_type = other DNA
aaaaattctatttacgtcacccctgatgaaatttctataagtatagacggcgataacttaaagttgccatattag

SEQ ID NO: 375316 - DNA, 75 bp, synthetic construct
  source 1..75: mol_type = other DNA
taccctgagatgtgccaggccgttttcgctgtcatggataccgccgttaagggcggtactgatcacgacggcacg

SEQ ID NO: 375317 - DNA, 75 bp, synthetic construct
  source 1..75: mol_type = other DNA
tatttacaaagccagttcacaagtctgaaaacaatgctggaaacaggaattccaaccatcagaaacaaaaatgca

SEQ ID NO: 375318 - DNA, 75 bp, synthetic construct
  source 1..75: mol_type = other DNA
cgttgcgaaaaaccattatgaattcaaagacataacaagtcaaagtcctggagatgcagttattgaactaaatga

SEQ ID NO: 375319 - DNA, 75 bp, synthetic construct
  source 1..75: mol_type = other DNA
accattgagggctctacagctttggcttctggcgagaagagctacaccacggaggctggcatcaaagcgctacgc

SEQ ID NO: 375320 - DNA, 75 bp, synthetic construct
  source 1..75: mol_type = other DNA
gtcggctggaaaggattaatttccgacccggatttaaacggcagctatcgggtaaatcacggcctcgaactggcg

SEQ ID NO: 375321 - DNA, 75 bp, synthetic construct
  source 1..75: mol_type = other DNA
agaagtttgtgaggatatttgtcagcaaatccgcaatggctctacggcgattgctggaattatggcggaaagttt

SEQ ID NO: 375322 - DNA, 75 bp, synthetic construct
  source 1..75: mol_type = other DNA
gctaccggaaaagatcgcggctgaaatccctgtcattatccgccgcttgctggcgaactttgccgaccctgaaaa

SEQ ID NO: 375323 - DNA, 75 bp, synthetic construct
  source 1..75: mol_type = other DNA
aaaattttattccggtaccttactggcaactgtatctctggctggagaaggacaatgtgcgttttcgtacctcct

SEQ ID NO: 375324 - DNA, 75 bp, synthetic construct
  source 1..75: mol_type = other DNA
gcgcgccgttctcctccgggaaagtggcctccgtggtggacaccctgaagctgattattccgcagcaggaagccc

SEQ ID NO: 375325 - DNA, 75 bp, synthetic construct
  source 1..75: mol_type = other DNA
gatgcagaagttcagcgacccgatgctcgcccggtcactgcttcagtcccagcagaactcagacgaggcactgaa

SEQ ID NO: 375326 - DNA, 75 bp, synthetic construct
  source 1..75: mol_type = other DNA
gtgccaacctgcaacactggcacccgcaacacggcaagttgtatatcgaatccccccgctttaacagccgcatta

SEQ ID NO: 375327 - DNA, 75 bp, synthetic construct
  source 1..75: mol_type = other DNA
gccttgctatgaccgcgatacggcccaggcgctggttaatgtcggcgcacaaatagccgccatgacgccgggcga

SEQ ID NO: 375328 - DNA, 75 bp, synthetic construct
  source 1..75: mol_type = other DNA
ccttcgtaaacggtttactgcatattgatttaattcgtaatgagcctgaacccatcgcagcgcagcgtatcgcta

SEQ ID NO: 375329 - DNA, 75 bp, synthetic construct
  source 1..75: mol_type = other DNA
agcggtgggatatcacgtcgtcgggtaatattcaatttttcggaagttgtaccggagaacgaacgtgaccctatg

SEQ ID NO: 375330 - DNA, 75 bp, synthetic construct
  source 1..75: mol_type = other DNA
tccggtttccggcaaagaaaaaaacagaagacagcgcgacaccactggcacttaaccagatgggagcaagccagc

SEQ ID NO: 375331 - DNA, 75 bp, synthetic construct
  source 1..75: mol_type = other DNA
gtcattatcctcgtgagcgatttttacgaaggggggtcatcatcattgctgacgcatcaggtgaaaaagtgtgtc

SEQ ID NO: 375332 - DNA, 75 bp, synthetic construct
  source 1..75: mol_type = other DNA
acatcaggccatcaaatattaatgccatcgggcaaaagctggcggtggcaggtgtacgggatgcgaattattacc

SEQ ID NO: 375333 - DNA, 75 bp, synthetic construct
  source 1..75: mol_type = other DNA
tctcataaatacttcactcgtcatcaccctggatatttcagccgtcttgtactgactcagtctctttctgctgtc

SEQ ID NO: 375334 - DNA, 75 bp, synthetic construct
  source 1..75: mol_type = other DNA
tttatgacgtctaagtgggggaaataccttgaagtggatcccttctataacccgaacctcactcataataaagaa

SEQ ID NO: 375335 - DNA, 75 bp, synthetic construct
  source 1..75: mol_type = other DNA
tgacaaggtggcaatcgacccgaaacataaagccccatattcaacgcgtatcccggcagtagtgctggcggttaa

SEQ ID NO: 375336 - DNA, 75 bp, synthetic construct
  source 1..75: mol_type = other DNA
gccagcgcggtgaagttctccttgcacattacggcggcgaactggcaatcaatgccgactctgacaccgttcatc

SEQ ID NO: 375337 - DNA, 75 bp, synthetic construct
  source 1..75: mol_type = other DNA
cacggtttgcgttcaaatgtgacactgacagaggattcagaagactggatgccatcatgtgcatcggtcacaaat

SEQ ID NO: 375338 - DNA, 75 bp, synthetic construct
  source 1..75: mol_type = other DNA
cgataacgtgcctcctgtctggcttggagagcaacaacttgccgaactggacaacctgcaaatcgtaccggacgg

SEQ ID NO: 375339 - DNA, 75 bp, synthetic construct
  source 1..75: mol_type = other DNA
gctacgcgggtgatggagcaggaataaaggccattacgggcggtgacaaggtggcaattgacccgaaacacaaag

SEQ ID NO: 375340 - DNA, 75 bp, synthetic construct
  source 1..75: mol_type = other DNA
agcagagggggaaacgctggcaacacatgcgccgaatttctggaaatggttgcgccgttcggtggctgagaatga

SEQ ID NO: 375341 - DNA, 75 bp, synthetic construct
  source 1..75: mol_type = other DNA
agtcattatttttgcgggtagtgatgcctgggcacatgcgaagcagtggcaggaacaggacgggcgactggctgg

SEQ ID NO: 375342 - DNA, 75 bp, synthetic construct
  source 1..75: mol_type = other DNA
gcatcatcgccaagaaatcactgatcatgtaataggaaaaattctggcacatgcccctaatagctcagtagataa

SEQ ID NO: 375343 - DNA, 75 bp, synthetic construct
  source 1..75: mol_type = other DNA
atgccccactgcgtccgtacttctgcaatgctatttagaatcgctgacgaatgggaatactcagcaaaaaacgca

SEQ ID NO: 375344 - DNA, 75 bp, synthetic construct
  source 1..75: mol_type = other DNA
gcaagcatgaaggcgctggaagatgccagggaacgcgcgttagtggttggcttttcgctgattatcatgccggat

SEQ ID NO: 375345 - DNA, 75 bp, synthetic construct
  source 1..75: mol_type = other DNA
acgtattaaaagctatcacgattacggcacctttacgccgttgcaggtggcggcgattgcggcactggagggcga

SEQ ID NO: 375346 - DNA, 75 bp, synthetic construct
  source 1..75: mol_type = other DNA
aaacgctacgatgtgctggtggtccacgacctggcctatgccgatatcgtctacgatggctggaaagcgccgtca

SEQ ID NO: 375347 - DNA, 75 bp, synthetic construct
  source 1..75: mol_type = other DNA
gcctggatgaaaatatgcgggtactggtctcggatgcggtaaacggcggagggatcgttgagagattattctggg

SEQ ID NO: 375348 - DNA, 75 bp, synthetic construct
  source 1..75: mol_type = other DNA
aggtctgtgtctctccagggattggctttggcgactacggcgacacgcatgtgcgctttgcactgattgaaaacc

SEQ ID NO: 375349 - DNA, 75 bp, synthetic construct
  source 1..75: mol_type = other DNA
gtcaggctgtcagaggcatcaaagcaatgttccgcgctgatggcttactgccagccagcagtaaacatattcacg

SEQ ID NO: 375350 - DNA, 75 bp, synthetic construct
  source 1..75: mol_type = other DNA
cgttgaaatcgacccggaatcagaagccatcgtcactattggttcgaaagagggactggcgcatctgatgctggc

SEQ ID NO: 375351 - DNA, 75 bp, synthetic construct
  source 1..75: mol_type = other DNA
tgccaatccagcatcaggtattgggatggcctttgagaaacctaaaaagcaaaacatgcttactctccggccaga

SEQ ID NO: 375352 - DNA, 75 bp, synthetic construct
  source 1..75: mol_type = other DNA
gcttcggaggtgagcttgtagcccatggaatgagatctattgcccgaacggccgcagaggagtcgggtaagttca

SEQ ID NO: 375353 - DNA, 75 bp, synthetic construct
  source 1..75: mol_type = other DNA
atggccaaaatcgctaagaagctcactgacactgaaatcaaaagcaccaaacctgccgaaaaagaggttaacctt

SEQ ID NO: 375354 - DNA, 75 bp, synthetic construct
  source 1..75: mol_type = other DNA
tgaacagcactacgccctggtaaccggcaataaaaaactcatcaatactctggcgcaacagatactcgaagcgca

SEQ ID NO: 375355 - DNA, 75 bp, synthetic construct
  source 1..75: mol_type = other DNA
gaaatctacgaacctctgcacaatttactggaacgttttgggccacagcgttcacagtaccgacctgatatgccg

SEQ ID NO: 375356 - DNA, 75 bp, synthetic construct
  source 1..75: mol_type = other DNA
ttggcaagaacgacacgccccctgaccaacacagaagtactgcgcactaaagcgttagaaaaggatctaacgttg

SEQ ID NO: 375357 - DNA, 75 bp, synthetic construct
  source 1..75: mol_type = other DNA
ctgcaattgccgcgctggaaggcgatcaacagtgcgtgcgcgatattgctgaacagtataagcgccgccgcgatg

SEQ ID NO: 375358 - DNA, 75 bp, synthetic construct
  source 1..75: mol_type = other DNA
tcgccatgctggataacagcgcgcgttgcctgggaatattccgcgaacagtggctggcggattattatcgtttga

SEQ ID NO: 375359 - DNA, 75 bp, synthetic construct
  source 1..75: mol_type = other DNA
ttagctaccggctggagtgctataccccagcgccgaaacgccagtatggctattttgttctgccgttattacatc

SEQ ID NO: 375360 - DNA, 75 bp, synthetic construct
  source 1..75: mol_type = other DNA
aaggcattaaaccaacgacaatgctgcaaaaagggttacgtcaggcgattactgatttcgcgagctggcagcagg

SEQ ID NO: 375361 - DNA, 75 bp, synthetic construct
  source 1..75: mol_type = other DNA
cgctaactggcagcaggcaacgcgggtgacattaggatgctgcccgcaaggcctctttactgattgccgcaccgg

SEQ ID NO: 375362 - DNA, 75 bp, synthetic construct
  source 1..75: mol_type = other DNA
tggctggcagattactatcggctgaaacgtccggcactggcggcgtggcgtgaagcgagggctgaacagcagcaa

SEQ ID NO: 375363 - DNA, 75 bp, synthetic construct
  source 1..75: mol_type = other DNA
cgccgtcgagcgtcgttggaggatattccggcaacgatctcccgcatgtccttgctgcaaatcgataccatcaat

SEQ ID NO: 375364 - DNA, 75 bp, synthetic construct
  source 1..75: mol_type = other DNA
tgggaaagtcttgcagaagagcggggaggctctctggataaatatatcgtcagtccactattcactgttcctcag

SEQ ID NO: 375365 - DNA, 75 bp, synthetic construct
  source 1..75: mol_type = other DNA
aaagcctttgataaaggatcgattggcctggacgaaaatatgcgggtactggtatcagatgcggtaaacggcgga

SEQ ID NO: 375366 - DNA, 75 bp, synthetic construct
  source 1..75: mol_type = other DNA
ttgccgcaggtacgtaaaaattacccttttgaggggtttgtagagtggcatcggaaagaggtttttagggggtga

SEQ ID NO: 375367 - DNA, 75 bp, synthetic construct
  source 1..75: mol_type = other DNA
tttgctgccgctactcgagcgtgcgctggccggaaagctcactgcaacgcacagcgcggtactttcgccttttga

SEQ ID NO: 375368 - DNA, 75 bp, synthetic construct
  source 1..75: mol_type = other DNA
gcaagcggctggtgggagtggaagccgcataaacggcatctggaaggtttatttactgccggaaaggtgatggtg

SEQ ID NO: 375369 - DNA, 75 bp, synthetic construct
  source 1..75: mol_type = other DNA
tgtcagaaaagaggacgggaaaaaagagtgggtcctcgatggttaccaggttgcacgtaacgacggccagggtaa

SEQ ID NO: 375370 - DNA, 75 bp, synthetic construct
  source 1..75: mol_type = other DNA
tgccttacccccctctgaactccctcgttttctggcagcactgaacaatgcttctgtccgtttagaaacaagact

SEQ ID NO: 375371 - DNA, 75 bp, synthetic construct
  source 1..75: mol_type = other DNA
ctatgggttaaaaatacccaacttgttccgaatgattacaacccaaataacgtagcgccgcctgagaaacggctg

SEQ ID NO: 375372 - DNA, 75 bp, synthetic construct
  source 1..75: mol_type = other DNA
tcgtcataaccgcgctcgtggacgtcaccaaatcactgccatgtcagaaatcgtccgtgaactcagccagttggg

SEQ ID NO: 375373 - DNA, 75 bp, synthetic construct
  source 1..75: mol_type = other DNA
gtaatcaacggattgccgcgactattcgtcacaaccgcgctcgtggtcgccatcaaatcactgcaatgtcggaaa

SEQ ID NO: 375374 - DNA, 75 bp, synthetic construct
  source 1..75: mol_type = other DNA
ctgatagaggcgaagtgttctcgtgctgacttgttagcagatagaaaaaagcgtttccgtaaaaatccgtctctt

SEQ ID NO: 375375 - DNA, 75 bp, synthetic construct
  source 1..75: mol_type = other DNA
atgggggatactatgcaacaacgattaacgcaggatttattaacccaatttctcgccagcttgccggaagacgat

SEQ ID NO: 375376 - DNA, 75 bp, synthetic construct
  source 1..75: mol_type = other DNA
tagcgacgaagtattgcgcctcaagcaaattaacggcctgcaagaactgtttgccgaccgtcaatattcccgcgc

SEQ ID NO: 375377 - DNA, 75 bp, synthetic construct
  source 1..75: mol_type = other DNA
agacgtcttgcctacgcatcagaggtttaccggatttatacctggataaagagcagtaaaggcatccgggttccg

SEQ ID NO: 375378 - DNA, 75 bp, synthetic construct
  source 1..75: mol_type = other DNA
acgcatcagaggtttaccggatttatacctggataaagagtagtaaaggcatccgggttccgaccacgaagaaat

SEQ ID NO: 375379 - DNA, 75 bp, synthetic construct
  source 1..75: mol_type = other DNA
acgcatcagatgtttaccggatttataccgggataaaaagcagtaaaagtatccggattccgaccacgaagaaat

SEQ ID NO: 375380 - DNA, 75 bp, synthetic construct
  source 1..75: mol_type = other DNA
tggcgatccatcaggttagcccctttcgtgaagagccagtggattgcgttctgtgggttaaaaacagccaactta

SEQ ID NO: 375381 - DNA, 75 bp, synthetic construct
  source 1..75: mol_type = other DNA
acgtggcaccacccgaaaaaaaactgctgaaaaaatccattgaaatagatggttttacccaacccattgtggtca

SEQ ID NO: 375382 - DNA, 75 bp, synthetic construct
  source 1..75: mol_type = other DNA
tcagatgtttaccggatttataccgggataaaaagcagtaaaggtatccggattccggccacgaagaaatcactt

SEQ ID NO: 375383 - DNA, 75 bp, synthetic construct
  source 1..75: mol_type = other DNA
ttacttcacgttgttaacggaagagtacggaaagtacatgggtggcccaagggtaattgctgttggggtaaccct

SEQ ID NO: 375384 - DNA, 75 bp, synthetic construct
  source 1..75: mol_type = other DNA
ctcatgtcatctactgaccaatatcgcggtggtggagcgttttttgtcagtgcggtttagtctgactgaagcaga

SEQ ID NO: 375385 - DNA, 75 bp, synthetic construct
  source 1..75: mol_type = other DNA
gcccatccttcatgccatctgctgaccaatatcgcggtggtggagcgtttcttgccggtgcggtttggtttgata

SEQ ID NO: 375386 - DNA, 75 bp, synthetic construct
  source 1..75: mol_type = other DNA
aaagattacttcgcgttgtaattacgcagagcgttacgccccagcacaatccccgcgccaaccatgccacccagt

SEQ ID NO: 375387 - DNA, 75 bp, synthetic construct
  source 1..75: mol_type = other DNA
gctgacaaccttggtcaaagattcagtaaaccaaaaaagcaaaatatgcctgcccttcccccaagcgaattgcca

SEQ ID NO: 375388 - DNA, 75 bp, synthetic construct
  source 1..75: mol_type = other DNA
aactttgatttcaaaagtactctacgcgccaacctgcaacactggcacccacaacacggcaagttgtatatcgaa

SEQ ID NO: 375389 - DNA, 75 bp, synthetic construct
  source 1..75: mol_type = other DNA
ggcagttacccggcattcgtacccatctggtggcgtttgacacaagcgtggttgatctcacggcagacgttgccg

SEQ ID NO: 375390 - DNA, 75 bp, synthetic construct
  source 1..75: mol_type = other DNA
gtggcagtcggagaaacggatccgcagttagtcggtttgctgtcccgttatcccgcctgggtgctggttccgtca

SEQ ID NO: 375391 - DNA, 75 bp, synthetic construct
  source 1..75: mol_type = other DNA
gcggctttagtggcctgtattgccgaacaactggatggcgttgttaaggaaaccagcacaattaagggagtgatg

SEQ ID NO: 375392 - DNA, 75 bp, synthetic construct
  source 1..75: mol_type = other DNA
tgtttactcacccgttatcctgcttgggtactggtgcctgcgagtgaaatagctttccatcaggtcacattgcca

SEQ ID NO: 375393 - DNA, 75 bp, synthetic construct
  source 1..75: mol_type = other DNA
tgcaggaaaagtcgctctactgtcgggcggcggcagcggacacgagccgatgcactgcggttatatcggccaggg

SEQ ID NO: 375394 - DNA, 75 bp, synthetic construct
  source 1..75: mol_type = other DNA
cgacgccactggatcaggcatggtgagataaccggcctgagtaaacagcagacagaggcgatgatagaggaaatc

SEQ ID NO: 375395 - DNA, 75 bp, synthetic construct
  source 1..75: mol_type = other DNA
ccggagaaaaatacctcatccagcctggcgagatacggcagcagccgcatggggtggaaagtcgtctgatcctga

SEQ ID NO: 375396 - DNA, 75 bp, synthetic construct
  source 1..75: mol_type = other DNA
ggcgctgggttacgcgcactatctcaacaacccgtggttccagctctacccggatatcggcaacctgtcggcgtg

SEQ ID NO: 375397 - DNA, 75 bp, synthetic construct
  source 1..75: mol_type = other DNA
cactatgctggatagcgctgtcaaaacgttaaatgctggcgaacgaccggtgatacacagtgacagaggtgggca

SEQ ID NO: 375398 - DNA, 75 bp, synthetic construct
  source 1..75: mol_type = other DNA
atgatggctgagttaaatattcctgagccaaataaacacacgattggaaatgatattttttattttgaagttcct

SEQ ID NO: 375399 - DNA, 75 bp, synthetic construct
  source 1..75: mol_type = other DNA
cggggagtgctggctggaacggctgcaactggcaaaaacgttaggcttcgattttgtcgagatgtcggtagatga

SEQ ID NO: 375400 - DNA, 75 bp, synthetic construct
  source 1..75: mol_type = other DNA
gagatgtggagcgaaacggcggaagacccggcggcggaagtggcgaaagcgcgtgattgggtgaaagcgcgcatg

SEQ ID NO: 375401 - DNA, 75 bp, synthetic construct
  source 1..75: mol_type = other DNA
ggacaacgatgtgcagatggaattgcaggccggaatcgggcatatcgtcgcggtgcatgtgaaagacaccaaacc

SEQ ID NO: 375402 - DNA, 75 bp, synthetic construct
  source 1..75: mol_type = other DNA
atgctcaggcatgagggggggcggctatcagaaaaggttgtacgcagacttatggtggaggaacagcttgtcgtc

SEQ ID NO: 375403 - DNA, 75 bp, synthetic construct
  source 1..75: mol_type = other DNA
atgatgccgcatgcgaaggctttttcggcagactgaaaacggaaatgtattatgggcgtaaatggtcgggcatca

SEQ ID NO: 375404 - DNA, 75 bp, synthetic construct
  source 1..75: mol_type = other DNA
aattataaagatgggatgacagtttggttattttcttgtaatacaggtaaaggacaaaattcatttgctagctaa

SEQ ID NO: 375405 - DNA, 75 bp, synthetic construct
  source 1..75: mol_type = other DNA
ttccagttccctgcaggtaaagtctggctatcaccggtggtggactgcttcgatggaaaagttgtgagctggtct

SEQ ID NO: 375406 - DNA, 75 bp, synthetic construct
  source 1..75: mol_type = other DNA
cgaccggtgatacacagtgacagaggtgagcattatcgctggtcaggctggctggaaagagtgaatgcagaaggt

SEQ ID NO: 375407 - DNA, 75 bp, synthetic construct
  source 1..75: mol_type = other DNA
cagccagtgaaatcgccaggcgtattggtgtcagtcttgcggtattgtataaatggaaagatgaaattatcggca

SEQ ID NO: 375408 - DNA, 75 bp, synthetic construct
  source 1..75: mol_type = other DNA
attttgtcgagatgtcggtagatgaaacggacgatcgcctgtcgcgcctcgactggagccgcgagcagcgtctgg

SEQ ID NO: 375409 - DNA, 75 bp, synthetic construct
  source 1..75: mol_type = other DNA
gcccatttagaatcgtctgactctgtggtcaaaagatttgaaccttcatctttttctagaagaggtcccggccca

SEQ ID NO: 375410 - DNA, 75 bp, synthetic construct
  source 1..75: mol_type = other DNA
ctgacagccggtgactttacaaaataccgcgaagcacggttaaaaggcgacgttcgtaacggagacggcacacta

SEQ ID NO: 375411 - DNA, 75 bp, synthetic construct
  source 1..75: mol_type = other DNA
tatttccgcttttagccctgacaagctgtatcaatgtagaagccaaaaccagcctgggtgaggtaggaaagctga

SEQ ID NO: 375412 - DNA, 75 bp, synthetic construct
  source 1..75: mol_type = other DNA
atgcacagtgggggattcccgccggcacggtgcagatgctcgaccggctggaaagtgaaatcctggctgagtgat

SEQ ID NO: 375413 - DNA, 75 bp, synthetic construct
  source 1..75: mol_type = other DNA
tgcgaccatcgcggcctgccgctggcgcttatcagcacggaaggggcaacagcgtggtgcgcagaatatgatgaa

SEQ ID NO: 375414 - DNA, 75 bp, synthetic construct
  source 1..75: mol_type = other DNA
accgcgaagcacggttaaaaggtgaagtacgaaatgaagatgggacgcttatgtcgcccgttaagccccgcacgg

SEQ ID NO: 375415 - DNA, 75 bp, synthetic construct
  source 1..75: mol_type = other DNA
aaagaaaattggccgattatttgacaactgaacttccggggcaaacgatcatttcatcccattccccccaaatag

SEQ ID NO: 375416 - DNA, 75 bp, synthetic construct
  source 1..75: mol_type = other DNA
atctagtggtgggacgccaatgttatctaactcaggttttatgaattctgactcccgattcaaaataggaggtta

SEQ ID NO: 375417 - DNA, 75 bp, synthetic construct
  source 1..75: mol_type = other DNA
atgtggagcgaaacggcggaagacccggcggcagaagtggcgaaagcgcgtgattgggtgaaagcgcgcatggcc

SEQ ID NO: 375418 - DNA, 75 bp, synthetic construct
  source 1..75: mol_type = other DNA
gatcttggcccggcaggggatattcatttctccatcactatcaccactaaagcttgcgagatggaaaaaagcgat

SEQ ID NO: 375419 - DNA, 75 bp, synthetic construct
  source 1..75: mol_type = other DNA
tattggtgattctttagagtctttacaagaaatcaattctcgctattatcttaaatttgttaatttaaaatatat

SEQ ID NO: 375420 - DNA, 75 bp, synthetic construct
  source 1..75: mol_type = other DNA
taaccaaagcgcaatagaatatttacaaaagaaaaaagcaataagaatgcgtatacttcttaagaaaattaaaaa

SEQ ID NO: 375421 - DNA, 75 bp, synthetic construct
  source 1..75: mol_type = other DNA
atgggcgtctaagttaccaattctcgtctgatggctacatacggcggtcagtttacgcttacttttatgtggatg

SEQ ID NO: 375422 - DNA, 75 bp, synthetic construct
  source 1..75: mol_type = other DNA
gggctggcgaaagatctcgacgaggcggctgaactggcggcctctggggagatcaccttctcgccgtgccacgag

SEQ ID NO: 375423 - DNA, 75 bp, synthetic construct
  source 1..75: mol_type = other DNA
cttataccaacatgagcgagcagatggcgaagattttgcgtatgggcgctaacgaccagagcgtgatcgaccgcc

SEQ ID NO: 375424 - DNA, 75 bp, synthetic construct
  source 1..75: mol_type = other DNA
ttgattcggggcaatgcattgctaaggctattacgaacatccagagtgagtaaatataacgtaggggtatctcac

SEQ ID NO: 375425 - DNA, 75 bp, synthetic construct
  source 1..75: mol_type = other DNA
ttatccgcacggatgatgagcggactcaccggtaccattacgacagccggcaccggctggtgcactacacgcgga

SEQ ID NO: 375426 - DNA, 75 bp, synthetic construct
  source 1..75: mol_type = other DNA
ctaatggtaagttaaaaatggatacagtgctaacagcaccaacgaaccttaattcaaataaggatctaatggcta

SEQ ID NO: 375427 - DNA, 75 bp, synthetic construct
  source 1..75: mol_type = other DNA
ttgctgattcaggcgctgacgccagggattattcaggcgggctattccgtcgaacaacagcgggaagtgtttgag

SEQ ID NO: 375428 - DNA, 75 bp, synthetic construct
  source 1..75: mol_type = other DNA
attatatacaatccatcctaaatatggaattgcgttatttaaaaaaacaacaaacccctgataaaaatagtgtct

SEQ ID NO: 375429 - DNA, 75 bp, synthetic construct
  source 1..75: mol_type = other DNA
aatatcgtcaaaaaagatctgctacgcgatccgggtctgcaccgttcgatgttcgctaacggcttgtcgactgtg

SEQ ID NO: 375430 - DNA, 75 bp, synthetic construct
  source 1..75: mol_type = other DNA
tggagctggcgggcgtagctgccggtatggcaggtttactcccggctgaagggcaaacgccagactccaaaacca

SEQ ID NO: 375431 - DNA, 75 bp, synthetic construct
  source 1..75: mol_type = other DNA
gaagatggctttattcgttccaatgggttgggttcaaatttttgtcgaccctcatcactttgtattgatcctgta

SEQ ID NO: 375432 - DNA, 75 bp, synthetic construct
  source 1..75: mol_type = other DNA
atagtacttttgataatgacaatagcataatttgtaattcggataatgcatcgatatatttatcaaccaacactc

SEQ ID NO: 375433 - DNA, 75 bp, synthetic construct
  source 1..75: mol_type = other DNA
ctgagtggattcgaagccttagttcagggagtgaatgttattacttggggacaacctttttatagtggatggggg

SEQ ID NO: 375434 - DNA, 75 bp, synthetic construct
  source 1..75: mol_type = other DNA
tatctaattaaatttgatgggaattataaagatgggatgacagtttggttattttcttgtaatacaggtaaagga

SEQ ID NO: 375435 - DNA, 75 bp, synthetic construct
  source 1..75: mol_type = other DNA
ctgtctgagcttcctgttaatgattggtctgagtctggtggcagaaggtttcggtttccacattccgaaaggtta

SEQ ID NO: 375436 - DNA, 75 bp, synthetic construct
  source 1..75: mol_type = other DNA
tcccggtatgtcgcggtgaactggatgaaatcatcggtatcgtacgtgctaaagaactgctggtggcgctggaag

SEQ ID NO: 375437 - DNA, 75 bp, synthetic construct
  source 1..75: mol_type = other DNA
acgtgataaagcacgtttgttggggctgtcgctggcgctgatcatgcgtctgggactgttatcgctgatttcatg

SEQ ID NO: 375438 - DNA, 75 bp, synthetic construct
  source 1..75: mol_type = other DNA
cttccagtcaggtggcgctaattcagatatcacgacccgcactatcgaagcggtgcgtaaatcgaaggaagcgtt

SEQ ID NO: 375439 - DNA, 75 bp, synthetic construct
  source 1..75: mol_type = other DNA
tcaggcggcgctaattcagatatcacgatccgcacacttgaagcggtgcgtaaatctaaggaagcgttagacctg

SEQ ID NO: 375440 - DNA, 75 bp, synthetic construct
  source 1..75: mol_type = other DNA
tgagctattcaaaattcacttccagtcaggcggcgctaattcagatatcacgatccgcacattcgaagcggtgcg

SEQ ID NO: 375441 - DNA, 75 bp, synthetic construct
  source 1..75: mol_type = other DNA
ttaaattgaggaatggcgatgaatggaaaatgtatttcgttatgcttgatggagggcgctatatattttcctcgc

SEQ ID NO: 375442 - DNA, 75 bp, synthetic construct
  source 1..75: mol_type = other DNA
ttaaatggtggggcagtagttgtaataacggtaaaaatacctcttactagcacatcggaacagttgtttaataaa

SEQ ID NO: 375443 - DNA, 75 bp, synthetic construct
  source 1..75: mol_type = other DNA
atgcttattactggagtgtttttaaaatcgctgaggcctttgggcttcaccgggacacagtaaaaaaacggcttc

SEQ ID NO: 375444 - DNA, 75 bp, synthetic construct
  source 1..75: mol_type = other DNA
tgtttccggaactgttacctctattggtagtgcgattacgctgatgtctgtttccttattcctgctttatctaac

SEQ ID NO: 375445 - DNA, 75 bp, synthetic construct
  source 1..75: mol_type = other DNA
cgccgtttaattctcggcagttgccttgcgggggccgcggtttgtgtcgctgtttccggaactgttacctctatt

SEQ ID NO: 375446 - DNA, 75 bp, synthetic construct
  source 1..75: mol_type = other DNA
tattctcgtggagaaagccttcgcattaaattgaagaatggagatgaatgggaggtgtatttcgttacgcttgat

SEQ ID NO: 375447 - DNA, 75 bp, synthetic construct
  source 1..75: mol_type = other DNA
tatgcgcctgattactggcaacatgcgccgccagataaacgccattaaggcacgcgtggaatggctggcggtgaa

SEQ ID NO: 375448 - DNA, 75 bp, synthetic construct
  source 1..75: mol_type = other DNA
agcttaacgaccctacataccgtcgtatgcgcctgattacgggcaacatgcgccgccaggtaaattccattaaag

SEQ ID NO: 375449 - DNA, 75 bp, synthetic construct
  source 1..75: mol_type = other DNA
attgagggcgaaggcatagaacgctatgaaattgactggaagataccggaaagcaatatcatagtgcaggtcaaa

SEQ ID NO: 375450 - DNA, 75 bp, synthetic construct
  source 1..75: mol_type = other DNA
gaacagcaccgcgctctgggtcagatgaaagaaatggctgctaaatacggctacgacatctctggtccggctacc

SEQ ID NO: 375451 - DNA, 75 bp, synthetic construct
  source 1..75: mol_type = other DNA
attgagtacgtgcagacgcacagcgcaccgcagccggtaccggcagatattcgcaaatttgttaccgtcaaaatt

SEQ ID NO: 375452 - DNA, 75 bp, synthetic construct
  source 1..75: mol_type = other DNA
caggaagcggtcagaacgggcgcaacgcaaaacatgttttacccgaaaaactggattgaggacggcgatccggcg

SEQ ID NO: 375453 - DNA, 75 bp, synthetic construct
  source 1..75: mol_type = other DNA
tatgcgcctgattactggcaacatgcgccgccagataaacgccattaaagcgcgcgtggaatggctggcggtgaa

SEQ ID NO: 375454 - DNA, 75 bp, synthetic construct
  source 1..75: mol_type = other DNA
cattgaactatacgcagatcaggcaggttgccccgccaacgtcatgattatgggcgttgatgtatggcgcatgtt

SEQ ID NO: 375455 - DNA, 75 bp, synthetic construct
  source 1..75: mol_type = other DNA
tacgtgcagacgcacagcgcaccgcagccggtaccggcagatattcgcaaatttgttaccgtcaaaattggttaa

SEQ ID NO: 375456 - DNA, 75 bp, synthetic construct
  source 1..75: mol_type = other DNA
attaaagaactcctgcttggcaaaaaacaatggaaaatgaactccttaaagaagccgttgaatatgggcgagcaa

SEQ ID NO: 375457 - DNA, 75 bp, synthetic construct
  source 1..75: mol_type = other DNA
aaaccacaaaatatcatcactcagtctggcggtgctgagtggtcaggtaaggataaagaagcttttgatccaaat

SEQ ID NO: 375458 - DNA, 75 bp, synthetic construct
  source 1..75: mol_type = other DNA
ctcgacgcgggaaagaaggagagctggtaatgctccgggctctgaattgcagccagggtcaacgttatcttgaac

SEQ ID NO: 375459 - DNA, 75 bp, synthetic construct
  source 1..75: mol_type = other DNA
tccatcgaaggtggtcagcacctgaacgttaacgtgatgaaccgtgaaatgctgctcgacgcgatggaaaacccg

SEQ ID NO: 375460 - DNA, 75 bp, synthetic construct
  source 1..75: mol_type = other DNA
ggttgttgaagaaattatggcgcgactggcaaaggaagttcgccaggctttttctggtgtccgcgatcgccgtcg

SEQ ID NO: 375461 - DNA, 75 bp, synthetic construct
  source 1..75: mol_type = other DNA
cgattttggccccggctcaatgacccgctctggctacgtacgcatcgtcaaacgctggcagcgtggtcagccact

SEQ ID NO: 375462 - DNA, 75 bp, synthetic construct
  source 1..75: mol_type = other DNA
acaggactttgacgttacaggttaccaggtcagccagcattttgttcgctcccgggatggaacccgtgtgtcgta

SEQ ID NO: 375463 - DNA, 75 bp, synthetic construct
  source 1..75: mol_type = other DNA
tttcctttcccatattattcacttggacatgatttatggatcggtcttattggtaaattaactggtaatgtacat

SEQ ID NO: 375464 - DNA, 75 bp, synthetic construct
  source 1..75: mol_type = other DNA
aggagattatatatatttagctgaccaagatgatatatggaagaaagggcggattactaatacattacctttatt

SEQ ID NO: 375465 - DNA, 75 bp, synthetic construct
  source 1..75: mol_type = other DNA
accttgctatgaccacgatacggcccaggcgctggttaatgtcggcgcacaaatagccgccatgacgccgggcga

SEQ ID NO: 375466 - DNA, 75 bp, synthetic construct
  source 1..75: mol_type = other DNA
ccgaatgtgcatcaggctatcgcaatggtggaatctgatgacgttgcgccaggtaacgtactgggcattatgcag

SEQ ID NO: 375467 - DNA, 75 bp, synthetic construct
  source 1..75: mol_type = other DNA
acaaattcgcgctggagaaattcatcaacgaattgctgccggtgattgatagcctggatcgtgcgctggaagtgg

SEQ ID NO: 375468 - DNA, 75 bp, synthetic construct
  source 1..75: mol_type = other DNA
ttataccgccgggcgacgcggcgttgccaacaccgtattaattgaaaaactcgtaggtgcagcggcggagcgtgg

SEQ ID NO: 375469 - DNA, 75 bp, synthetic construct
  source 1..75: mol_type = other DNA
ttgatgaagaaagcaacgactattttctgaccatcagcggatttctgcaacccgcctctctgtataccggtaacc

SEQ ID NO: 375470 - DNA, 75 bp, synthetic construct
  source 1..75: mol_type = other DNA
tcttggccgccgtataaacttttttgataaagaaattgacgctgtgttcatgcaatcagaagcctgccagagcat

SEQ ID NO: 375471 - DNA, 75 bp, synthetic construct
  source 1..75: mol_type = other DNA
aaaaattgcgaatctcgaagctcagctggctgaagcccagacccgtgaacgtgacggcattttgcgcgtaaaagc

SEQ ID NO: 375472 - DNA, 75 bp, synthetic construct
  source 1..75: mol_type = other DNA
aagccatcatcccggcgcaacgagccagcccatctgccccatattttgcaacgtattgcgcactggcgtggagaa

SEQ ID NO: 375473 - DNA, 75 bp, synthetic construct
  source 1..75: mol_type = other DNA
aagtggatcgtagttttggcgatattccgttagttcacggcatgccttttatttctggtgtcggtatcgaagcat

SEQ ID NO: 375474 - DNA, 75 bp, synthetic construct
  source 1..75: mol_type = other DNA
attccattggtccggcggcgaaagcgatggcggaaaatttcgacctgaatctgcatgtggtcgatgtcggctggc

SEQ ID NO: 375475 - DNA, 75 bp, synthetic construct
  source 1..75: mol_type = other DNA
gaccacctatccagaagtacgtgtatggaacctgtcattaggttgtcaatccccatgttctgaagacagcttctc

SEQ ID NO: 375476 - DNA, 75 bp, synthetic construct
  source 1..75: mol_type = other DNA
ttatcggcattcttgccggttacgatgtcaaaggtgtattgcaactggcagtaaaaacggcagcggtgatgctgc

SEQ ID NO: 375477 - DNA, 75 bp, synthetic construct
  source 1..75: mol_type = other DNA
gattggccttgatccggcgttgttgctggggcatacggcagtggtatcggcaagcctgatttttatcccgctcac

SEQ ID NO: 375478 - DNA, 75 bp, synthetic construct
  source 1..75: mol_type = other DNA
caagagaaagtcgttctcgcagaataatttttacctgagggggaggttatcccccttaacaatcaggagttttta

SEQ ID NO: 375479 - DNA, 75 bp, synthetic construct
  source 1..75: mol_type = other DNA
ttaaagccgttggggtgcaacgtaatggcagtgaatttgtattgctagaggtggatgcatcggatggggtgaaaa

SEQ ID NO: 375480 - DNA, 75 bp, synthetic construct
  source 1..75: mol_type = other DNA
cctatttctgtcgaagctgtttgagcagtaccgctttacagcaagagttcgacgttcagtatgaggttgagcgag

SEQ ID NO: 375481 - DNA, 75 bp, synthetic construct
  source 1..75: mol_type = other DNA
acacacgagtcatagaggctgagccgacatggataagttttagtagacctagtcgaattgaaaaatctcgcaggg

SEQ ID NO: 375482 - DNA, 75 bp, synthetic construct
  source 1..75: mol_type = other DNA
tgtttattactgtcggcctttatatcctcccattaatatgtctttggattgactatgaatgcaagcagagttttt

SEQ ID NO: 375483 - DNA, 75 bp, synthetic construct
  source 1..75: mol_type = other DNA
ctggttttcttgacctggagaaaagtcgtcgccgcttgcgtcgcgataaagcgattaatcatgacttccgccagc

SEQ ID NO: 375484 - DNA, 75 bp, synthetic construct
  source 1..75: mol_type = other DNA
ttagagcagtcggccgtagtgcagcttttggtttggttgttttcggatcaagatgttatggattcgtatgaaagt

SEQ ID NO: 375485 - DNA, 75 bp, synthetic construct
  source 1..75: mol_type = other DNA
caagcctgatttttatcccgctcactatattgattgccgtttgtgtgccgggtaatcaggtgctgccgtttggcg

SEQ ID NO: 375486 - DNA, 75 bp, synthetic construct
  source 1..75: mol_type = other DNA
ccgacatgtgatcgacagtctggcaaaaaagcccggtgcgttctgccatgcaacgctgagaaatgacatcctgcc

SEQ ID NO: 375487 - DNA, 75 bp, synthetic construct
  source 1..75: mol_type = other DNA
gaacaagagcagacagaaggcgtatcagatccatttgccggactggaaaacgcgcttttaatagtgtctcagtga

SEQ ID NO: 375488 - DNA, 75 bp, synthetic construct
  source 1..75: mol_type = other DNA
ccgggctgcccagatagtttctgcggtttacggtgcgcagggtgtcaaagtaccactgaatgatgcgcttcttca

SEQ ID NO: 375489 - DNA, 75 bp, synthetic construct
  source 1..75: mol_type = other DNA
acgtattgcgcactggcgtggagaagatgccgcatggctggctgccaccacggatgctaatgtcaaaacactgtt

SEQ ID NO: 375490 - DNA, 75 bp, synthetic construct
  source 1..75: mol_type = other DNA
cagcgaacgcacggagcttgaaagcgcactggataccgtcagcgaggaaattgccgggattaccggaatcagcgg

SEQ ID NO: 375491 - DNA, 75 bp, synthetic construct
  source 1..75: mol_type = other DNA
atgaaacctgttatttcccttatcgaagcactgaacgccgttaaaaataatcttgcctccctgaatgagcagaaa

SEQ ID NO: 375492 - DNA, 75 bp, synthetic construct
  source 1..75: mol_type = other DNA
gcgtaggcgacatcatcaagatcaccatcaaagaagcaattccgcgtggtaaggtcaaaaaaggtgatgtgctga

SEQ ID NO: 375493 - DNA, 75 bp, synthetic construct
  source 1..75: mol_type = other DNA
atatttagcctgccttatttgttccgcgatcgtgatcattattatcaggtcatgcaaggcgatatcggaaggaaa

SEQ ID NO: 375494 - DNA, 75 bp, synthetic construct
  source 1..75: mol_type = other DNA
atgaaaataaaagtatccgctggcattatcggtgctgttcttatgctatccgcaagccagtcctgggcagtaaca

SEQ ID NO: 375495 - DNA, 75 bp, synthetic construct
  source 1..75: mol_type = other DNA
gtgggagaaggagcagacagaaggtgcctcagatccatttgccggaatggaaaacgcgcttttaatagtgtctca

SEQ ID NO: 375496 - DNA, 75 bp, synthetic construct
  source 1..75: mol_type = other DNA
gttacgccgggaaatgtccgcatcagaaatcatgatgtgggcagaatttgacaggttcagcccgctgggtgacga

SEQ ID NO: 375497 - DNA, 75 bp, synthetic construct
  source 1..75: mol_type = other DNA
ctgctggggcgaggatgaggataagccggaggtggatccgtttgcggcgctggaagacgcgctgaactttgcagc

SEQ ID NO: 375498 - DNA, 75 bp, synthetic construct
  source 1..75: mol_type = other DNA
tggtgtatatgaataccaaagggatgagcgatccggtccagacgctgcgggcgctgacggatgatgccggatttg

SEQ ID NO: 375499 - DNA, 75 bp, synthetic construct
  source 1..75: mol_type = other DNA
ctggcggccagtaaaggcattgagctggtgtatatgaataccaaagggatgagcgatccggtccagacgctgcgg

SEQ ID NO: 375500 - DNA, 75 bp, synthetic construct
  source 1..75: mol_type = other DNA
gcataaccggacaagatggctcatatctggcagagtttctgctggaaaaaggttacgaggtgcatggtattaaac

SEQ ID NO: 375501 - DNA, 75 bp, synthetic construct
  source 1..75: mol_type = other DNA
gctgataaagcacaatataccagcactgacccgctatcggctcagttgggtgaaacagaattaccttcgtgcaga

SEQ ID NO: 375502 - DNA, 75 bp, synthetic construct
  source 1..75: mol_type = other DNA
gtgacgccagaaagattgggcagaaaaaacggctccgctcgctgaaggatctggataaatctgcattggcgctcg

SEQ ID NO: 375503 - DNA, 75 bp, synthetic construct
  source 1..75: mol_type = other DNA
caggcccgatgggaattggcgctatcgattacgccattaacggcggcatacaaccggcgcgggtggtggtagtcg

SEQ ID NO: 375504 - DNA, 75 bp, synthetic construct
  source 1..75: mol_type = other DNA
ggtctctgaaatggttgccaaagaccttgaagcggcgaagaaacactctctgctgaaatcccacggctacgatgt

SEQ ID NO: 375505 - DNA, 75 bp, synthetic construct
  source 1..75: mol_type = other DNA
ggcgatattatcattgccgttgacccgcgctatttccgccctgcggaagtggaaaccctgctgggcgacccgacc

SEQ ID NO: 375506 - DNA, 75 bp, synthetic construct
  source 1..75: mol_type = other DNA
ggaaaaatagacgaggttttgcgcaatttcgacgagaaaatactgtctcttgaccacgatcttgttatcaacaga

SEQ ID NO: 375507 - DNA, 75 bp, synthetic construct
  source 1..75: mol_type = other DNA
ggtctctgagatggtagccaaagatcttgaagcagcgaaaaaacactccctgctcaaatctcatggctacgaggt

SEQ ID NO: 375508 - DNA, 75 bp, synthetic construct
  source 1..75: mol_type = other DNA
attacccgcgctatcgccaacatcgctcagggtctggaatcctgcctgcacctcggcaacatggactccctgcgt

SEQ ID NO: 375509 - DNA, 75 bp, synthetic construct
  source 1..75: mol_type = other DNA
tataccgccgacgtggatgcgatgggcacgctgcgtctgctggaagccatccgcttcctggggctggagaagaaa

SEQ ID NO: 375510 - DNA, 75 bp, synthetic construct
  source 1..75: mol_type = other DNA
ttacacatgagtttgcacatgtcagtgaatctggtgctcgagcgcaagatttgcacatcagtttatgtgcggtat

SEQ ID NO: 375511 - DNA, 75 bp, synthetic construct
  source 1..75: mol_type = other DNA
catcggcgtttgtggccctgttaatgactctgtgtaataagtcattttccgctactcagttcgccctgctctcag

SEQ ID NO: 375512 - DNA, 75 bp, synthetic construct
  source 1..75: mol_type = other DNA
gttactgctgttgacgatggacgcgctggatttgacgcacttctctttcctgcctgctctgctggaagtcggggt

SEQ ID NO: 375513 - DNA, 75 bp, synthetic construct
  source 1..75: mol_type = other DNA
ccatcagcaaaaggggatgataagtttatcaccaccgactatttgcaacagtgccggagccactacgctgacccg

SEQ ID NO: 375514 - DNA, 75 bp, synthetic construct
  source 1..75: mol_type = other DNA
ccgaacattcatcctcagaaagagtatttaattcgtaaggatgagaatattcgctttgctaaacaacacggcgtg

SEQ ID NO: 375515 - DNA, 75 bp, synthetic construct
  source 1..75: mol_type = other DNA
atgtactggttgatggcggctctgctgatcccctgtattatcgcaacgttgcttgcgccagaaccaaccgacact

SEQ ID NO: 375516 - DNA, 75 bp, synthetic construct
  source 1..75: mol_type = other DNA
gctgatggaccgctataccccgccgttcttcggacgtcgacgcggctggctgctcgctacgcaagcgttgctgtt

SEQ ID NO: 375517 - DNA, 75 bp, synthetic construct
  source 1..75: mol_type = other DNA
aaggaaaaacatatcacccgaaggggatacacgctctgctttctcagtaaactgcaggatagtctgagacggagg

SEQ ID NO: 375518 - DNA, 75 bp, synthetic construct
  source 1..75: mol_type = other DNA
aatcagcgataactatttctcgaagtcgaatatagaacttgataataccgtcgttacgatggttcccacgcgtgg

SEQ ID NO: 375519 - DNA, 75 bp, synthetic construct
  source 1..75: mol_type = other DNA
tcaatgatgtagatgaaacagtctgtattgatcctgggccacgcattgaaggctcatcatggcagttcgacagcg

SEQ ID NO: 375520 - DNA, 75 bp, synthetic construct
  source 1..75: mol_type = other DNA
tgctcggccattattccttcacgctggcagaactggtgaccaaaggacatctgagaccattaaaagaggcgtcag

SEQ ID NO: 375521 - DNA, 75 bp, synthetic construct
  source 1..75: mol_type = other DNA
tcgccagtcttgatgagccggacagtctgaaacgactgagcaaaatgatcagtgatctgctccctccggtggatt

SEQ ID NO: 375522 - DNA, 75 bp, synthetic construct
  source 1..75: mol_type = other DNA
agcaataaaatctctgggccatcagcttgatagtcgttacagacaggttgctgcacgtcttggcgaaaatgaggc

SEQ ID NO: 375523 - DNA, 75 bp, synthetic construct
  source 1..75: mol_type = other DNA
tcagagtgttaaatgcaaatggatttgcccctatatttccagacacctgttatcacttaacccattactggcttg

SEQ ID NO: 375524 - DNA, 75 bp, synthetic construct
  source 1..75: mol_type = other DNA
cgattgcgtgacgttgaagtctgcgtcaccgaagcgggtgttgaaccgccccgggaatcctggagactaaacttc

SEQ ID NO: 375525 - DNA, 75 bp, synthetic construct
  source 1..75: mol_type = other DNA
gctggattatctggacgcactagaactggtcgatacttccggtgcgccagatattgaatggcctacgcctccggc

SEQ ID NO: 375526 - DNA, 75 bp, synthetic construct
  source 1..75: mol_type = other DNA
gtgcggctactggcttacgccctccagaccgaatatcaggaagttggcatgtggcctgagaatggtattgatgtt

SEQ ID NO: 375527 - DNA, 75 bp, synthetic construct
  source 1..75: mol_type = other DNA
ctgttgttaagaagtcgtcagccgctggtgccactgttactgaaggtgccttctcagcagttgcgaatttcaacc

SEQ ID NO: 375528 - DNA, 75 bp, synthetic construct
  source 1..75: mol_type = other DNA
tagttgctaatcataaggaggagttagataccagcggggggacaggtactgcaattgtagttcaggctgcaggta

SEQ ID NO: 375529 - DNA, 75 bp, synthetic construct
  source 1..75: mol_type = other DNA
gcgtgacgttgaagtctgcgtcaccgaagcgggtgttgatctggtcattatgggacatagaaacagactgtttgg

SEQ ID NO: 375530 - DNA, 75 bp, synthetic construct
  source 1..75: mol_type = other DNA
gcgttgaaaaccatggcggatcactacgcatatggtttcactataacggcaaacgtgtcagagaaaacctcggtg

SEQ ID NO: 375531 - DNA, 75 bp, synthetic construct
  source 1..75: mol_type = other DNA
cttaaaaaagtccaaggtaaaaccagatcctctcacccgtgacgaatttattcgttttattgaagcttgccgtca

SEQ ID NO: 375532 - DNA, 75 bp, synthetic construct
  source 1..75: mol_type = other DNA
agttccgctgatttacgttggtgataagaacgtgaaagcggttgaaggcggcaaactttctgacatcgcgccgac

SEQ ID NO: 375533 - DNA, 75 bp, synthetic construct
  source 1..75: mol_type = other DNA
agactaataaagcatttcgttattttgaaaacttgcttgagttatacgaaggatggggaagcatccacggcaaag

SEQ ID NO: 375534 - DNA, 75 bp, synthetic construct
  source 1..75: mol_type = other DNA
caaaaatttatggtgtgtttctgtttatactggcgttcgccctggtgagctgtgtgcacttggatgggaggacat

SEQ ID NO: 375535 - DNA, 75 bp, synthetic construct
  source 1..75: mol_type = other DNA
gcaataaaaactggtgttttcgactatgcaaaacagtttccctcctcacgcaatctggaaaaatttggtgagacc

SEQ ID NO: 375536 - DNA, 75 bp, synthetic construct
  source 1..75: mol_type = other DNA
atgattaagtcggttattgccggtgcggtagctatggcagtggtgtcttttggtgtaaatgctgatccaactact

SEQ ID NO: 375537 - DNA, 75 bp, synthetic construct
  source 1..75: mol_type = other DNA
atttcgtactggcgatgggtcagggtcgcatgatcccgggctttgaagacggtatcaaaggccacaaagctggcg

SEQ ID NO: 375538 - DNA, 75 bp, synthetic construct
  source 1..75: mol_type = other DNA
tatggcaaattcgggcaaggcgctgacctcagcgctggcaccttatcttaacggcccctttggccttgatgttgc

SEQ ID NO: 375539 - DNA, 75 bp, synthetic construct
  source 1..75: mol_type = other DNA
tggatcgcatccggatttgcactgattcttggtattttactctgggtatcgcgaccggaggcaagtaacagcgct

SEQ ID NO: 375540 - DNA, 75 bp, synthetic construct
  source 1..75: mol_type = other DNA
gtctggcggctctgctggatactgaagaaaaaccggcagcatatgccagccagcttgaggatcttcgtgagcgtc

SEQ ID NO: 375541 - DNA, 75 bp, synthetic construct
  source 1..75: mol_type = other DNA
gcgaaatcgacgttctgcgtcgccaggctgcacagcgtttcggcggcaacgaaaaacaagctctggaactgccgc

SEQ ID NO: 375542 - DNA, 75 bp, synthetic construct
  source 1..75: mol_type = other DNA
gggcgacctgatgagccgtaacttcattgacgccatcattaaagaaaaaatcaatccagctggcgcaccgaccta

SEQ ID NO: 375543 - DNA, 75 bp, synthetic construct
  source 1..75: mol_type = other DNA
aggcgtatccaaaccaatgaatttagatattgaattggttaattgtgatatcacttcatttaagggggtgggagg

SEQ ID NO: 375544 - DNA, 75 bp, synthetic construct
  source 1..75: mol_type = other DNA
tcgaatatagaacttgataataccgtcgttacgatggttcccccacgcgtggtgcagtggttaaagcggagtttg

SEQ ID NO: 375545 - DNA, 75 bp, synthetic construct
  source 1..75: mol_type = other DNA
gatattgagttagtaaattgcgatattacagcttttaaacaaggtcaagcagctaaaaacggtaaggttcaatta

SEQ ID NO: 375546 - DNA, 75 bp, synthetic construct
  source 1..75: mol_type = other DNA
gtccgcccccggacagctgtcccgtgaggcggtaaacgggcccccatcggaaaggtccactgcggggagaaaccc

SEQ ID NO: 375547 - DNA, 75 bp, synthetic construct
  source 1..75: mol_type = other DNA
tgaacggggatgaacagacagcgtccaatttaagtgaagagacaacaaaaaagcgccctctcagccccgaactac

SEQ ID NO: 375548 - DNA, 75 bp, synthetic construct
  source 1..75: mol_type = other DNA
atggctacaccgttacggtacgcattaatctttttgctgtgggcgatgatagcggtgatttatgcaccgctgatc

SEQ ID NO: 375549 - DNA, 75 bp, synthetic construct
  source 1..75: mol_type = other DNA
ggtgctggatgcggcgaaagccgtggcgttgctggtgacgaacccggatagcacgctggcagagatgtcagaaac

SEQ ID NO: 375550 - DNA, 75 bp, synthetic construct
  source 1..75: mol_type = other DNA
tactgaatctgcgcccgtcaccggagtttgaacgctggctggaaagcatgggcattatggcaaacggtcgcctga

SEQ ID NO: 375551 - DNA, 75 bp, synthetic construct
  source 1..75: mol_type = other DNA
ccacgctgacgctgaccagaacctcaacgaaaacctcatgatcctgctcgccaccgcaggctgcaactacatcat

SEQ ID NO: 375552 - DNA, 75 bp, synthetic construct
  source 1..75: mol_type = other DNA
atgttcttaacaaatacatcgcgttttttatttttatttttatttttatttttatttttatttcttatgcacaag

SEQ ID NO: 375553 - DNA, 75 bp, synthetic construct
  source 1..75: mol_type = other DNA
atgaaactaaagaccacattgttcagcaatgtatatcagtttaaggatgtaacagaggtgctggctaaagccaac

SEQ ID NO: 375554 - DNA, 75 bp, synthetic construct
  source 1..75: mol_type = other DNA
tctacttcgaaaccgggcaaggttcggcgctgtctgctggcgctaacttcggcgctgaccaggtgacgatggaag

SEQ ID NO: 375555 - DNA, 75 bp, synthetic construct
  source 1..75: mol_type = other DNA
atggctggcttaccgaacagcagtaacgcgctgcaacagtggcatcacttgtttgaagccgagggtgcaaaacgc

SEQ ID NO: 375556 - DNA, 75 bp, synthetic construct
  source 1..75: mol_type = other DNA
tggtcaggatgcgctgaacgccattaccggcgaagggtggtggattggtcgtcccattgaactgccaggctcgcg

SEQ ID NO: 375557 - DNA, 75 bp, synthetic construct
  source 1..75: mol_type = other DNA
gcatgggccgcgtggcggtagacctctacagtcagcagattggtgcgcggctggaggatgtgtcgagctttgcca

SEQ ID NO: 375558 - DNA, 75 bp, synthetic construct
  source 1..75: mol_type = other DNA
atgaaaaagcaagggaaaacaccgcaacctgcggcaaaaacaatgaccgccagcgccccgaaaatggaggcattc

SEQ ID NO: 375559 - DNA, 75 bp, synthetic construct
  source 1..75: mol_type = other DNA
tggggggcaagcctgaaaacatcgcgtcgctcggtgatgttgagaaggtggcaaaggtgttcgtacgtaatgagc

SEQ ID NO: 375560 - DNA, 75 bp, synthetic construct
  source 1..75: mol_type = other DNA
ctggtacgtgtcgagctttaacaacccacatcagttcgcacccggctcggtgtttcatctgctggagcctgacat

SEQ ID NO: 375561 - DNA, 75 bp, synthetic construct
  source 1..75: mol_type = other DNA
cgcaagtattatcagaacggcgcgcacgcaggctacatcatgtatgtgactgacccggcgcaaagtgcgaccgac

SEQ ID NO: 375562 - DNA, 75 bp, synthetic construct
  source 1..75: mol_type = other DNA
ttccaaagagaaactgaaaggatcgctgagtgagctcaagcagctttctggcttaagtggcgtggtaatgggcta

SEQ ID NO: 375563 - DNA, 75 bp, synthetic construct
  source 1..75: mol_type = other DNA
atgaggcattttactagcaatcaaattgattctacttttctaaatgcctttggtgaacctatcacaattaacggg

SEQ ID NO: 375564 - DNA, 75 bp, synthetic construct
  source 1..75: mol_type = other DNA
gcacgcaagcaacgtaacctaacccagcgtgaaactgcagcaagtatgggcatgaaacagtcaacggtttcagag

SEQ ID NO: 375565 - DNA, 75 bp, synthetic construct
  source 1..75: mol_type = other DNA
aagccagaaccaaaacctgccgtcgaagaaaaagcggcaccgacgggtaaagcgtatgtagtgcaactgggcgcg

SEQ ID NO: 375566 - DNA, 75 bp, synthetic construct
  source 1..75: mol_type = other DNA
gctggtgccgaaagctggcgatcgtgacgagcctgatatgatgccagccgccactcaggcgttgccgacacagcc

SEQ ID NO: 375567 - DNA, 75 bp, synthetic construct
  source 1..75: mol_type = other DNA
tagtgggtacgatcgtgctggtggcgctgggggtgattgtacttccagggctgctggacgggcagaaaaaacatt

SEQ ID NO: 375568 - DNA, 75 bp, synthetic construct
  source 1..75: mol_type = other DNA
gagtattacaatgaatggcatccgcatagtgcattgggttatctctccccgagggaatatctgtgtcagcgggta

SEQ ID NO: 375569 - DNA, 75 bp, synthetic construct
  source 1..75: mol_type = other DNA
cctgcttgagcccgacattaatcaggaaatttacggcctgcctgaatatctcagcgcgcttaattccgcctggct

SEQ ID NO: 375570 - DNA, 75 bp, synthetic construct
  source 1..75: mol_type = other DNA
gaatgaatccgcgacgctgttccgccgcaagtattatcagaacggcgcgcacgcgggttacatcatgtatgtgac

SEQ ID NO: 375571 - DNA, 75 bp, synthetic construct
  source 1..75: mol_type = other DNA
tacacgcaaccgcaccagttttcgcccggttccgtcttccacctgcttgagcctgatattaatcaggagctgtac

SEQ ID NO: 375572 - DNA, 75 bp, synthetic construct
  source 1..75: mol_type = other DNA
cgccgcgcagaaccaggaggacgtgaacaacatccgccaggccatgaaaagcgctaaaggaccgggcaacttccg

SEQ ID NO: 375573 - DNA, 75 bp, synthetic construct
  source 1..75: mol_type = other DNA
tgcccaaaccagatgtaaaaacggagttgcataaccttgcagtggcgttcgagtattacaatgaatggcatccgc

SEQ ID NO: 375574 - DNA, 75 bp, synthetic construct
  source 1..75: mol_type = other DNA
tcacagaagacagcgaaatcaagagtgatgtccctcaccgcaaccgtttcagacggcttgttgattatgcaacac

SEQ ID NO: 375575 - DNA, 75 bp, synthetic construct
  source 1..75: mol_type = other DNA
cctgaccgccgcctgcctgctgccggacaccggtgcgcgtaatatcgacagcctgctgaaccagcaaatcctgcc

SEQ ID NO: 375576 - DNA, 75 bp, synthetic construct
  source 1..75: mol_type = other DNA
ggcaaagcccggcgctctgcgccatcgcacagcggctgcgggcggctaaaaccggcctcacgccggagaacggcc

SEQ ID NO: 375577 - DNA, 75 bp, synthetic construct
  source 1..75: mol_type = other DNA
ccggatttgacgttatccagggctgagccgcaggcagggccatttgagattgcaggtgcagatatatttgaacgg

SEQ ID NO: 375578 - DNA, 75 bp, synthetic construct
  source 1..75: mol_type = other DNA
ggtcagtgatggtctgtatgtcacgatgcaggagggtgaactggttgtgaaggatggctgggacagagcgcggga

SEQ ID NO: 375579 - DNA, 75 bp, synthetic construct
  source 1..75: mol_type = other DNA
tacgcacaacgccaagtcaggctatatcgcgcagtccggcttataccgcgtgctggtctggccttatctgtttaa

SEQ ID NO: 375580 - DNA, 75 bp, synthetic construct
  source 1..75: mol_type = other DNA
aaggatgccgccgaggggcagtctgatcctttcatggcgatgattaactggtgcgagcgtaccgaatcaaaggtc

SEQ ID NO: 375581 - DNA, 75 bp, synthetic construct
  source 1..75: mol_type = other DNA
ttatgattcatttattacgcaacttgaagctcctgtgcagaatgctgaagggcgtgaacgtctgatggcggtaaa

SEQ ID NO: 375582 - DNA, 75 bp, synthetic construct
  source 1..75: mol_type = other DNA
tttgtgctctcctgccagatcctgcaccagagtcagatgataacaccgagagcacagataaccccctctttccat

SEQ ID NO: 375583 - DNA, 75 bp, synthetic construct
  source 1..75: mol_type = other DNA
tctttcgagagaggaagcgggacgtatccgcgagaattacatggccctgcaggcaaagctgcagtatgaaaaaga

SEQ ID NO: 375584 - DNA, 75 bp, synthetic construct
  source 1..75: mol_type = other DNA
tccggtagaaatatgcaaggtaactctgactcaggtgatctaccgaaggctcgacggcagaaccagagccacttc

SEQ ID NO: 375585 - DNA, 75 bp, synthetic construct
  source 1..75: mol_type = other DNA
ccggcagcagagccgcctgggagcgggcgcgcacagccagccaggcatggtcacagcgggagaatgacgtcgcct

SEQ ID NO: 375586 - DNA, 75 bp, synthetic construct
  source 1..75: mol_type = other DNA
gagcgaatcgatcacaacgaactacatatgattaaagcggaaattgagaaggaaaagcatattgccagccttcga

SEQ ID NO: 375587 - DNA, 75 bp, synthetic construct
  source 1..75: mol_type = other DNA
agtctgaaacagtacgcctgccgtcattttgccgaacgcttaccggaaatggcgagaaatggtgagctggaaagt

SEQ ID NO: 375588 - DNA, 75 bp, synthetic construct
  source 1..75: mol_type = other DNA
cctggcagcgttgtcatgagctgtttgcacaacagggactgatgctacagaaacaacatcacgggcttgttgtcg

SEQ ID NO: 375589 - DNA, 75 bp, synthetic construct
  source 1..75: mol_type = other DNA
ggaaaaaaatatgtcgttaacaatttttctttgccaacttccttaagttcttatataagcctatataatgagact

SEQ ID NO: 375590 - DNA, 75 bp, synthetic construct
  source 1..75: mol_type = other DNA
atggtgaattaaaagggcattgcgaagaattagtgaaaaaattaaaaattcaagataaggtgatatttcatggtt

SEQ ID NO: 375591 - DNA, 75 bp, synthetic construct
  source 1..75: mol_type = other DNA
agcattaccaaagccggaaacagctatgccagaaagctattggtcgaggctgcgtggggttaccgccatccggca

SEQ ID NO: 375592 - DNA, 75 bp, synthetic construct
  source 1..75: mol_type = other DNA
cttggtccatttatcgagcaggtatccggaagggatctggcaatgctcacagaatcagagaaggaaaaacttgcg

SEQ ID NO: 375593 - DNA, 75 bp, synthetic construct
  source 1..75: mol_type = other DNA
atgtccaatagcttcgataagcctcaaacgctctcggcacataattctgatgccgaacccttttttccgaaaaac

SEQ ID NO: 375594 - DNA, 75 bp, synthetic construct
  source 1..75: mol_type = other DNA
accacccgtcgcgtggtctgaacatcagaaaactgccgcgcattctggaagccgccgagcgcggttatcttccgg

SEQ ID NO: 375595 - DNA, 75 bp, synthetic construct
  source 1..75: mol_type = other DNA
ctactatgcacagggcaccagtgatgctgaccgggacaacattctcgaagccctggtcaatctgggccatgaagc

SEQ ID NO: 375596 - DNA, 75 bp, synthetic construct
  source 1..75: mol_type = other DNA
actggtttattaccctgccggaacacaatgacgaactccggctggatgacggcaaccgtggggaagatggtaagg

SEQ ID NO: 375597 - DNA, 75 bp, synthetic construct
  source 1..75: mol_type = other DNA
gagtacattgcacagcaggcacactatgcgaaagataatactgatcctgtttttcactacattctttcctggcag

SEQ ID NO: 375598 - DNA, 75 bp, synthetic construct
  source 1..75: mol_type = other DNA
gcgaacagcaacgatgacgcatcactgcctccgccggagcaggataaacgctgggaaccgccttctccgatgaga

SEQ ID NO: 375599 - DNA, 75 bp, synthetic construct
  source 1..75: mol_type = other DNA
ggtggcagccctgccgcagggtaacgagattgagttcaaggaggccgcgtccggcggaccggaggcgttcatgtc

SEQ ID NO: 375600 - DNA, 75 bp, synthetic construct
  source 1..75: mol_type = other DNA
gtgttactggtcaagatggttcatatttagctgagtttttacttgaaaaaggctatgaagttcatggtattaagc

SEQ ID NO: 375601 - DNA, 75 bp, synthetic construct
  source 1..75: mol_type = other DNA
tacgtcaattcgttgactttgccgcatccgagttgggtattaaattacgctttgaggggcatggcgttgatgaag

SEQ ID NO: 375602 - DNA, 75 bp, synthetic construct
  source 1..75: mol_type = other DNA
gtactcttcgtcttctagatgctattcgttttctggggcttgagaaaaaaacccgtttctatcaggcatctactt

SEQ ID NO: 375603 - DNA, 75 bp, synthetic construct
  source 1..75: mol_type = other DNA
tggagaatatggtggctcaacaatgcaagccccatacaaagagaaacatcacaaactgatttctcatgctcatgg

SEQ ID NO: 375604 - DNA, 75 bp, synthetic construct
  source 1..75: mol_type = other DNA
atggtcaaagatgttcaggcacagtacttatatggtgtactggttgaacaaaaggccattgataaatttgtaccg

SEQ ID NO: 375605 - DNA, 75 bp, synthetic construct
  source 1..75: mol_type = other DNA
cttctacgcagaagcagaaaagggagtagcggttattgtgagcggcatcaaaggacactttaaactaaagagggg

SEQ ID NO: 375606 - DNA, 75 bp, synthetic construct
  source 1..75: mol_type = other DNA
tgggggcatctgcgcaatatcgaggtgcagccgattgtcggtaatgccaaagcgcgcgcggcggcgctggcgaac

SEQ ID NO: 375607 - DNA, 75 bp, synthetic construct
  source 1..75: mol_type = other DNA
atgggacaaattttcaccccccgcccctaccaggatctcattatcaaccacgaaaccgaaacactgcgcggcaac

SEQ ID NO: 375608 - DNA, 75 bp, synthetic construct
  source 1..75: mol_type = other DNA
gccgttcggtactgtcattccagatgaaagcacccggctaaaatccttccggctgcgaggtggtggtaagcgcgc

SEQ ID NO: 375609 - DNA, 75 bp, synthetic construct
  source 1..75: mol_type = other DNA
gatgtcattgttgctgttgatcctcgatattttcgtccagctgaagtcgaaacattactgggcgatccaactaaa

SEQ ID NO: 375610 - DNA, 75 bp, synthetic construct
  source 1..75: mol_type = other DNA
ttacaggtcaagatggttcctacttggctgaattccttcttgataaagggtatgaagtgcatggcattaaacgtc

SEQ ID NO: 375611 - DNA, 75 bp, synthetic construct
  source 1..75: mol_type = other DNA
tcgcgccgctacgtgttgcagcaaacacctggccggatgaagcagtgaagtgggggcatttgcgcaatatcgagg

SEQ ID NO: 375612 - DNA, 75 bp, synthetic construct
  source 1..75: mol_type = other DNA
gctgatatagatttagcagcatttaggcgaaagattaaagaatataaaaaaaccaaaacccagcctgctggattt

SEQ ID NO: 375613 - DNA, 75 bp, synthetic construct
  source 1..75: mol_type = other DNA
acggggcgaaaggttgaagtccggataacagatgttactgacctgtcagattggctggaagattatgtcttgcta

SEQ ID NO: 375614 - DNA, 75 bp, synthetic construct
  source 1..75: mol_type = other DNA
agctgcacgcaaaatatttcgaccttgtgctggaaggaaagaaacgcgcagagtttcggaaaaatgaccgtaatt

SEQ ID NO: 375615 - DNA, 75 bp, synthetic construct
  source 1..75: mol_type = other DNA
atggttgccacggatggagcatggaactattcagatgaacagatggagcgtgcacagcaaaacgggtggcttgga

SEQ ID NO: 375616 - DNA, 75 bp, synthetic construct
  source 1..75: mol_type = other DNA
cagcaccaaaacttcgtgctgaccgggaaagaatcaacgccgccagagataaactcagagcggaaaccgatattc

SEQ ID NO: 375617 - DNA, 75 bp, synthetic construct
  source 1..75: mol_type = other DNA
acaaagcagccaatggtacaaatgtgacgttaattactgcaccaaaaggcagtgatgaaaatacattcaaagccg

SEQ ID NO: 375618 - DNA, 75 bp, synthetic construct
  source 1..75: mol_type = other DNA
aactgagtatgaaagacaaagactatcacccactaattggtcgaacaggtgtggatgtaggtagagcgttctctg

SEQ ID NO: 375619 - DNA, 75 bp, synthetic construct
  source 1..75: mol_type = other DNA
atggaagttacgcccacggtgttacaaaaaggtcgcatccggctgaaattacacatcagccagaacgttccgggg

SEQ ID NO: 375620 - DNA, 75 bp, synthetic construct
  source 1..75: mol_type = other DNA
cgaaggataagcattttcacccttctgacgtaacacttgataatccagaggtgcgttggaaacacagagagcacc

SEQ ID NO: 375621 - DNA, 75 bp, synthetic construct
  source 1..75: mol_type = other DNA
agcactattttatcttgcagtgatcaataagccatttatagctagtaaaaaatcttcttctgatctttcaaagct

SEQ ID NO: 375622 - DNA, 75 bp, synthetic construct
  source 1..75: mol_type = other DNA
acggggcgaaaggttgaagcccggataacagatgttactgacctgtcagactggctggaagattatgtcttgcta

SEQ ID NO: 375623 - DNA, 75 bp, synthetic construct
  source 1..75: mol_type = other DNA
caatgagatctcagaacagcttaatctcagcccgaaaacggtgaacagctatcgctaccgtatgttcagtaaatt

SEQ ID NO: 375624 - DNA, 75 bp, synthetic construct
  source 1..75: mol_type = other DNA
gcgacgtcggtggaatttaaagaggccgtcctggggatggaggtcacgcccacggtgttacaaaaaggtcgcatc

SEQ ID NO: 375625 - DNA, 75 bp, synthetic construct
  source 1..75: mol_type = other DNA
ggtatgtttgcctgcaatggtattctctttaaccacgaatcacctcgccgtggcgagacctttgttactcgtaaa

SEQ ID NO: 375626 - DNA, 75 bp, synthetic construct
  source 1..75: mol_type = other DNA
cccgccggttccaggactgtgagtttgagaattatcaggcggtgaatactgacgcacagaaaaaccttgaagcct

SEQ ID NO: 375627 - DNA, 75 bp, synthetic construct
  source 1..75: mol_type = other DNA
gaacggtaccagtcttgttatgaccggcagttgcggtaccgggaaaaatcatctggcggtatcaatggcaaaaca

SEQ ID NO: 375628 - DNA, 75 bp, synthetic construct
  source 1..75: mol_type = other DNA
gtgaattacgcgatgaagatggatttgcgccagatgtcatccaggcgcagatccttcatggcctgccgcacgggt

SEQ ID NO: 375629 - DNA, 75 bp, synthetic construct
  source 1..75: mol_type = other DNA
acagcgttatatcataggttgtggcgatgaacgcatcacaggagagttgcttgaacatgccgcaagtattgctat

SEQ ID NO: 375630 - DNA, 75 bp, synthetic construct
  source 1..75: mol_type = other DNA
ctggcaagcgatgagactgcagagtgtgagaagcacggaaaatatactcgtctggtgttgaaagggccagatatt

SEQ ID NO: 375631 - DNA, 75 bp, synthetic construct
  source 1..75: mol_type = other DNA
tgagaattatcaggcggtgaatactgacgcacagaaaaaccttgaagcctgtcagcgctatgccgcttcctggaa

SEQ ID NO: 375632 - DNA, 75 bp, synthetic construct
  source 1..75: mol_type = other DNA
gtttgcactgatcgacacccgttcacagatggaggacgggacggagtcgattaacagtcaggttgtcggactgga

SEQ ID NO: 375633 - DNA, 75 bp, synthetic construct
  source 1..75: mol_type = other DNA
atcgtctgaccaccgcgcaacgctgcgatctgattgccgttattgataaggggttacttgcggaatacggaaccc

SEQ ID NO: 375634 - DNA, 75 bp, synthetic construct
  source 1..75: mol_type = other DNA
gcgactttctttgtcagggcctcaggtctcagcatggtagacgccggaataaacgacggcgccatactggttgtg

SEQ ID NO: 375635 - DNA, 75 bp, synthetic construct
  source 1..75: mol_type = other DNA
tgtgaacctgcgcatgctcaacggcagtcattcattcctggcgtatctggggtatcttgcaggatatcagcacat

SEQ ID NO: 375636 - DNA, 75 bp, synthetic construct
  source 1..75: mol_type = other DNA
gactcccctggcatgaaaagcatgccgattcgcgtcttacccgcatgaccgttgatgtggactctctcgcccgct

SEQ ID NO: 375637 - DNA, 75 bp, synthetic construct
  source 1..75: mol_type = other DNA
attctgcggcaggcgtaggggtgctgatactgttgcagcacggcattgactccggtgtcgccgcaggcgatatgt

SEQ ID NO: 375638 - DNA, 75 bp, synthetic construct
  source 1..75: mol_type = other DNA
ctgcgttgaaaagaaaacggaacattacttcacttccggccagcgcagatatggctcgtacacagaagacggaat

SEQ ID NO: 375639 - DNA, 75 bp, synthetic construct
  source 1..75: mol_type = other DNA
gtgccatcttatgatgatggcaagagatattactgcgtaccacctcaattctgtacacatcagtgcccgccgttt

SEQ ID NO: 375640 - DNA, 75 bp, synthetic construct
  source 1..75: mol_type = other DNA
aatactggcataccgatgatgtcgaacgattaatgcaatttggctacagcagtagctggaagcgtctctcgtgga

SEQ ID NO: 375641 - DNA, 75 bp, synthetic construct
  source 1..75: mol_type = other DNA
atgaaaacaaagcaggaatggctttttcagttacgaaaatgtacatcaagagatactcttgaaaaagttattgag

SEQ ID NO: 375642 - DNA, 75 bp, synthetic construct
  source 1..75: mol_type = other DNA
ggggatgtgatcgttcgtgttgatcctcgttatttccgtcctgcagaagttgaaactcttcttggtgatccagca

SEQ ID NO: 375643 - DNA, 75 bp, synthetic construct
  source 1..75: mol_type = other DNA
atgaaaaaagcgttaattacgggcgtaacaggtcaagatggttcatatttagctgaattccttcttgataaagga

SEQ ID NO: 375644 - DNA, 75 bp, synthetic construct
  source 1..75: mol_type = other DNA
ctgtacgtgaatttgtccgaatggcggctaaagaagttggcttggaacttcagttctctggtaaaggtattgatg

SEQ ID NO: 375645 - DNA, 75 bp, synthetic construct
  source 1..75: mol_type = other DNA
atgattttgtcctcatcgtcaaaggcaccaaagcacaggcggaagccatcagggaggagtcggggtgtgctcgaa

SEQ ID NO: 375646 - DNA, 75 bp, synthetic construct
  source 1..75: mol_type = other DNA
atgattttgtccccatcgtcaaaggcaccaaagcacaggcggaagccatcagggaggagtgtcggggtgtgctcg

SEQ ID NO: 375647 - DNA, 75 bp, synthetic construct
  source 1..75: mol_type = other DNA
gctaagcaaaagtatcctgttgatctgcttagacaggtagggattattgatgatgatcctttgggccgactgtct

SEQ ID NO: 375648 - DNA, 75 bp, synthetic construct
  source 1..75: mol_type = other DNA
agggaggagtgtcggggtgtgctcgaaggcagtctgaaactcaggctgaacatggataagactaaaatcccccat

SEQ ID NO: 375649 - DNA, 75 bp, synthetic construct
  source 1..75: mol_type = other DNA
cgcggtggcgtacctgccgctatgccgatgattttgtcctcatcgtcaaaggcaccaaagcacaggcggaagcca

SEQ ID NO: 375650 - DNA, 75 bp, synthetic construct
  source 1..75: mol_type = other DNA
aatatgtcgctgacctatgacggtacctacggcacgttaaacggcagttataactacagccaaaattctcagcga

SEQ ID NO: 375651 - DNA, 75 bp, synthetic construct
  source 1..75: mol_type = other DNA
tcgtagaacgttacaacacccttggcggtgtttgcctgaacgtcggctgtatcccttctaaagcactgctgcacg

SEQ ID NO: 375652 - DNA, 75 bp, synthetic construct
  source 1..75: mol_type = other DNA
tgtgacaaccagtccagcgaaaatcccactgaggccgatctggggatttacagccatctttatgcggtaacggag

SEQ ID NO: 375653 - DNA, 75 bp, synthetic construct
  source 1..75: mol_type = other DNA
gcaaaggcaggcctgttcagctgggccgtaccggtttactggggctgaaagcgggcaaactcagcaatggccggg

SEQ ID NO: 375654 - DNA, 75 bp, synthetic construct
  source 1..75: mol_type = other DNA
atggagtatggcaaatacgaaactctcgcaagggctggttattcaggcgcagcccgcccacagggggactggcag

SEQ ID NO: 375655 - DNA, 75 bp, synthetic construct
  source 1..75: mol_type = other DNA
cgcagacggtatgaccaagctgattttcgacaaagaatcacaccgtgtgatcggtggtgcgattgtcggtactaa

SEQ ID NO: 375656 - DNA, 75 bp, synthetic construct
  source 1..75: mol_type = other DNA
ggtatggcgaaaggccgcaaagtcaaagtggtcaacggtctgggtaaattcaccggggctaacaccctggaagtt

SEQ ID NO: 375657 - DNA, 75 bp, synthetic construct
  source 1..75: mol_type = other DNA
atgaaatctggttctcctgatggttcgcgtatctggctggttgccggtatcaccgatatgcgaaatggctttaac

SEQ ID NO: 375658 - DNA, 75 bp, synthetic construct
  source 1..75: mol_type = other DNA
gatggcattaaaacccaggagatgtacgtcgaagtggacgtcaacagtggcccttgctatgggcgtaccgtctgc

SEQ ID NO: 375659 - DNA, 75 bp, synthetic construct
  source 1..75: mol_type = other DNA
gaaaatccgtgaaattgttctgatgggcggtgcttatggtactggcaacttcaccccatctgctgagttcaacat

SEQ ID NO: 375660 - DNA, 75 bp, synthetic construct
  source 1..75: mol_type = other DNA
gatgacaacacacaggattatcccacgaaaactgacctgggcgggcgcagtcatttactggtatcaacggagtaa

SEQ ID NO: 375661 - DNA, 75 bp, synthetic construct
  source 1..75: mol_type = other DNA
agagcctgcagaacgcgccgctgggcagtaccgacagccccgccgccgatgcggtgcgctttcgtccccatcccg

SEQ ID NO: 375662 - DNA, 75 bp, synthetic construct
  source 1..75: mol_type = other DNA
atgatctcactcccatcaggtacccgtatctggctcgttaccggcgttaccgatatgcgtaaatccttcaacgga

SEQ ID NO: 375663 - DNA, 75 bp, synthetic construct
  source 1..75: mol_type = other DNA
ctggggttacgtaatgccctggcaattgctggtgcgaaaaatggtatccgtgaagccgaacaggatcgccagatg

SEQ ID NO: 375664 - DNA, 75 bp, synthetic construct
  source 1..75: mol_type = other DNA
ttgcggcaatcaagagcggcaaatacgacaccattatctgtaactatccgaacggcgacatggtaggtcacaccg

SEQ ID NO: 375665 - DNA, 75 bp, synthetic construct
  source 1..75: mol_type = other DNA
tgatcaactcaccgaaagtggctacctacgatctgcaaccggaaatgagctccgcagagctgaccgaaaaactgg

SEQ ID NO: 375666 - DNA, 75 bp, synthetic construct
  source 1..75: mol_type = other DNA
aacgctgatttcgatggcttcgcgcgtaagaaagtggttaacgtcgatttcgtgatgctgaccgaatacgccgct

SEQ ID NO: 375667 - DNA, 75 bp, synthetic construct
  source 1..75: mol_type = other DNA
agtttgtgaaagcgaccgttatccgtgctgaaggccagccagatgcagcgatggaagacggcgatgcgctgattt

SEQ ID NO: 375668 - DNA, 75 bp, synthetic construct
  source 1..75: mol_type = other DNA
tcattggtcgttactacgcgatggaccgcgataaccgttgggatcgcgttgaaaaagcttatgacctgctgactc

SEQ ID NO: 375669 - DNA, 75 bp, synthetic construct
  source 1..75: mol_type = other DNA
caggcaaagcagtacacattatgggtctgctctccgcaggtggtgtacacagccacgaagatcacatcatggcga

SEQ ID NO: 375670 - DNA, 75 bp, synthetic construct
  source 1..75: mol_type = other DNA
ccgacatttattgcatcacagatggggcactccagcgccagcatggtctacaatgtttatggtgcatggatgcct

SEQ ID NO: 375671 - DNA, 75 bp, synthetic construct
  source 1..75: mol_type = other DNA
aaagctaaaacaatgactatccgtcgtaattatacaaaactcggggagttcactctaccaaaaacagaagcggga

SEQ ID NO: 375672 - DNA, 75 bp, synthetic construct
  source 1..75: mol_type = other DNA
acgaatttattcgttttattgatgcctgtcaccatcaacaaacaaaaaacctgtggtccttagcagtatacacag

SEQ ID NO: 375673 - DNA, 75 bp, synthetic construct
  source 1..75: mol_type = other DNA
ggtgcggtagataaagcgaaaaacgcaggcaaagcagtacacattatgggtctgctctccgcaggtggtgtacac

SEQ ID NO: 375674 - DNA, 75 bp, synthetic construct
  source 1..75: mol_type = other DNA
gtaaaaaaatgccagcaagtcggtcaccactataaagcagattccatcagagattcctgggcatctgcattaagg

SEQ ID NO: 375675 - DNA, 75 bp, synthetic construct
  source 1..75: mol_type = other DNA
ttgatgtcctgaaaagccaggctgaaatgacaagacttggccctcagtatcaaattgacgtcaagcttcgggagt

SEQ ID NO: 375676 - DNA, 75 bp, synthetic construct
  source 1..75: mol_type = other DNA
ccactttcaaacatcgcggtggcaatgcggatgcagcctgcaattctgccgaaaatccgtgaaattgtgctaatg

SEQ ID NO: 375677 - DNA, 75 bp, synthetic construct
  source 1..75: mol_type = other DNA
aaaaaataaatccccggcggcgttcagtcgccgggtttatgtgatccccgaagatgaaacttattcaatctcttc

SEQ ID NO: 375678 - DNA, 75 bp, synthetic construct
  source 1..75: mol_type = other DNA
aggcgcgtccggaaaccgtgcgttcacgcggccaggtcatggaacgttatacgctgcattcacagggcaagatta

SEQ ID NO: 375679 - DNA, 75 bp, synthetic construct
  source 1..75: mol_type = other DNA
tggcacgtctggaatttatcatcaaccgcatgattggcgtccacccgcgtgcattacttgagttcgacgatcagg

SEQ ID NO: 375680 - DNA, 75 bp, synthetic construct
  source 1..75: mol_type = other DNA
gagaaaaactggatattgaactggtgagtgcaccggggaacagcagtaaagatgtctttaaaggaagtgaacagg

SEQ ID NO: 375681 - DNA, 75 bp, synthetic construct
  source 1..75: mol_type = other DNA
gcattgatattggtgacgcttcccttctgcttaccggtacaccagtgaattcagatgatgctgcttttttaccga

SEQ ID NO: 375682 - DNA, 75 bp, synthetic construct
  source 1..75: mol_type = other DNA
ttgctgacgctggacgtcctggctgagacagcaccaaaacttcgtgctgaccgggaaagaatcaacgccgccaga

SEQ ID NO: 375683 - DNA, 75 bp, synthetic construct
  source 1..75: mol_type = other DNA
tggcgcgcctggaatttatcatcaaccgcatgattggcgttcacccgcgcgcactgcttgagtttgacgaccagg

SEQ ID NO: 375684 - DNA, 75 bp, synthetic construct
  source 1..75: mol_type = other DNA
gtttaacgatcgcgccatctcttatcgtgtgcaccagggttacgaccatcgtggcgtagcgctctccgccggtgt

SEQ ID NO: 375685 - DNA, 75 bp, synthetic construct
  source 1..75: mol_type = other DNA
ggatgttcgccgacctggaagaggcaactgacgtggaaacccgtgttgctctttacgacaaaatactcaaagctg

SEQ ID NO: 375686 - DNA, 75 bp, synthetic construct
  source 1..75: mol_type = other DNA
atatgccggacgcttcttttgccggtcagcaggaaaccttcctcaacgttcagggttttgacgccgttctcgtgg

SEQ ID NO: 375687 - DNA, 75 bp, synthetic construct
  source 1..75: mol_type = other DNA
gggatcgatagcctgtctctgaacccggataccgtggtgcaaacctggttaagcctggctgaactgaagaaataa

SEQ ID NO: 375688 - DNA, 75 bp, synthetic construct
  source 1..75: mol_type = other DNA
ggaatttagcgtgaaaagctccagcgtagaaacgatgccggatctgccgttgaaagtgatgatgaacgtcggtaa

SEQ ID NO: 375689 - DNA, 75 bp, synthetic construct
  source 1..75: mol_type = other DNA
atctgcacgcctgctttgtcgcgattaaaaaaaagctgacttcctttggtgtaaaagttgacgcgctgaaatcgc

SEQ ID NO: 375690 - DNA, 75 bp, synthetic construct
  source 1..75: mol_type = other DNA
tgataatcccttctccggtcacctgttcatcttccgtggccgacggggtgacatgattaaaatcctgtgggctga

SEQ ID NO: 375691 - DNA, 75 bp, synthetic construct
  source 1..75: mol_type = other DNA
cgatatgcgtaaatccttcaacggtctgggggagcagatacagcatgtgctggatgataaccccttctccggtca

SEQ ID NO: 375692 - DNA, 75 bp, synthetic construct
  source 1..75: mol_type = other DNA
ttgggccgttggtggagatataagtggatcacttttcatccgtcgttgacagctcctgtggttcgtgggattgca

SEQ ID NO: 375693 - DNA, 75 bp, synthetic construct
  source 1..75: mol_type = other DNA
aaaaatccgtgaaattgtgctgatgggcggcgcttatggtacaggtaacttcacgccgtctgccgagttcaatat

SEQ ID NO: 375694 - DNA, 75 bp, synthetic construct
  source 1..75: mol_type = other DNA
caccaaacgccttgaggaaggtcagtttatctggcctgcggtgcgtgacggtaagatatatcaggaagcactggg

SEQ ID NO: 375695 - DNA, 75 bp, synthetic construct
  source 1..75: mol_type = other DNA
actggcaatgctcctcgataagctggactggcgtcagccaaaaacatcccgccttaacgcactgtcacgaacggt

SEQ ID NO: 375696 - DNA, 75 bp, synthetic construct
  source 1..75: mol_type = other DNA
ggtacagtgcggatattttggtgatgggtgatgactgggcagggaagtttgacagctttgcgtatatttgtgagg

SEQ ID NO: 375697 - DNA, 75 bp, synthetic construct
  source 1..75: mol_type = other DNA
tacgtcagttcgtggaaatggcggcagcacagctgggcatcaaactgcgctttgaaggcacgggcgttgaagaga

SEQ ID NO: 375698 - DNA, 75 bp, synthetic construct
  source 1..75: mol_type = other DNA
tcttcaaccatgaatccccgcgccgcggcgaaaccttcgttacccgcaaaatcacccgcgcaatcgccaacatcg

SEQ ID NO: 375699 - DNA, 75 bp, synthetic construct
  source 1..75: mol_type = other DNA
accggcgatggactgtgtctgctgaccaaacggctggagcgcggccgcttcgcctggccgtcagcccgggatggc

SEQ ID NO: 375700 - DNA, 75 bp, synthetic construct
  source 1..75: mol_type = other DNA
gagcaaaaagcggagtatttgcgggggtacagtgcggatattttggtgatgggggatgactgggcagggaagttt

SEQ ID NO: 375701 - DNA, 75 bp, synthetic construct
  source 1..75: mol_type = other DNA
cgccaaaaagggcagagcaccggtttaccctcaggatgaccgcatgtcgatcatcgccgggctggcgtgcgtgga

SEQ ID NO: 375702 - DNA, 75 bp, synthetic construct
  source 1..75: mol_type = other DNA
ccgctgagatgatgctgcgccaaatgggttggacggaagcggctgacttaattgttaaaggtatggaaggcgcaa

SEQ ID NO: 375703 - DNA, 75 bp, synthetic construct
  source 1..75: mol_type = other DNA
ttaaagcttacatgaacaatgcgggtaatatttttgcgtcaggtaatcttaccgccgggacgataaaatccaacg

SEQ ID NO: 375704 - DNA, 75 bp, synthetic construct
  source 1..75: mol_type = other DNA
tcaggaacattagtttcaacctatgacgatcaaacgtgtagtggtggtcaaaatacacattgcaccagtagtata

SEQ ID NO: 375705 - DNA, 75 bp, synthetic construct
  source 1..75: mol_type = other DNA
accctggtgcacaaaggtaacatcatgaagttcaccgaaggagcgtttaaagactggggctaccagctggcgcgt

SEQ ID NO: 375706 - DNA, 75 bp, synthetic construct
  source 1..75: mol_type = other DNA
ccgctgagatgatgctgcgccacatgggttggacggaagcggctgacattattgttaaaggtatggaaggcgcaa

SEQ ID NO: 375707 - DNA, 75 bp, synthetic construct
  source 1..75: mol_type = other DNA
ccgctgagatgatgctgcgccatatgggttggacggaagcggctgacgtaattgttaaaggtatggaaggcgcaa

SEQ ID NO: 375708 - DNA, 75 bp, synthetic construct
  source 1..75: mol_type = other DNA
ttgatgtatatgctgctggaacagtaggaacaggttctggaggaactgtaaatgcttatatgaatagttctggta

SEQ ID NO: 375709 - DNA, 75 bp, synthetic construct
  source 1..75: mol_type = other DNA
aaaaattgatgcggacggtaatatttcagccggtaattgggtgtgggctaaaaatggctatggtgacgttattgg

SEQ ID NO: 375710 - DNA, 75 bp, synthetic construct
  source 1..75: mol_type = other DNA
acggatatattaatatcaaatatgataagttatcaacgttatcaaatgcagcaggaacaggaactgatccgggac

SEQ ID NO: 375711 - DNA, 75 bp, synthetic construct
  source 1..75: mol_type = other DNA
gaagcagttaaccgctatatcagtattcgatatgacaagatttccacactgtcatcatctaataatcaaagcagc

SEQ ID NO: 375712 - DNA, 75 bp, synthetic construct
  source 1..75: mol_type = other DNA
aaggattctctttactagaattaactcttgttttaggtgttgggacgatggtggcttttatgaagtttcaggata

SEQ ID NO: 375713 - DNA, 75 bp, synthetic construct
  source 1..75: mol_type = other DNA
tatgacaggtgatctgaatatgggaggtaataatattaataatataaaagacatatatgtatcaggaaccggcaa

SEQ ID NO: 375714 - DNA, 75 bp, synthetic construct
  source 1..75: mol_type = other DNA
aacctatgacttcgaacgtctgatggaaggcgctaatctgctgaaatgttcagagtttggtgaagcgatcatcga

SEQ ID NO: 375715 - DNA, 75 bp, synthetic construct
  source 1..75: mol_type = other DNA
ggatgaagaatatcaggccgtttatgaagtgtctcctgatgttgttcgcgtagcaatggagattgcctacttatg

SEQ ID NO: 375716 - DNA, 75 bp, synthetic construct
  source 1..75: mol_type = other DNA
caaaacagctgcaaaacagatcaaaggctggacagaccgcctgagaacagcagttaatctggctttatcattgcc

SEQ ID NO: 375717 - DNA, 75 bp, synthetic construct
  source 1..75: mol_type = other DNA
aggaaatttcaggtcataaaaacgcctcgcaaacagcgagatataatcgaagaatttcagttgttccggtcgtcg

SEQ ID NO: 375718 - DNA, 75 bp, synthetic construct
  source 1..75: mol_type = other DNA
ttgtgacccgtattggccctttaggcagtgttgcgggtgtggcctccggagagattgccgcaatgggggcaacca

SEQ ID NO: 375719 - DNA, 75 bp, synthetic construct
  source 1..75: mol_type = other DNA
gtggtgccgaccggttactcttttaaccttgatggttcgacgctgtatcaaagtattgccgctattttcatcgcg

SEQ ID NO: 375720 - DNA, 75 bp, synthetic construct
  source 1..75: mol_type = other DNA
aaggagtattcactggatgctttgatggccggtgttacagccgaaaatattcatgaggaagtttcttttgggcct

SEQ ID NO: 375721 - DNA, 75 bp, synthetic construct
  source 1..75: mol_type = other DNA
aacctatgacttcgaacgtctgatggacggcgctaagctgctgaaatgttcagagtttggtgatgcgatcatcga

SEQ ID NO: 375722 - DNA, 75 bp, synthetic construct
  source 1..75: mol_type = other DNA
aacctatgacttcgaacgtctgatggatggcgctaagctgctgaaatgttcagagtttggtgacgcgatcatcga

SEQ ID NO: 375723 - DNA, 75 bp, synthetic construct
  source 1..75: mol_type = other DNA
aacctatgacttcgaacgtctgatggatggcgctaacctgctgaaatgttcagagtttggtgaggcgatcatcga

SEQ ID NO: 375724 - DNA, 75 bp, synthetic construct
  source 1..75: mol_type = other DNA
cttcgaacgtctgatggaaggcgctaagctgctgaaatgtagcgagtttggtgacgcgatcataaagaacatgta

SEQ ID NO: 375725 - DNA, 75 bp, synthetic construct
  source 1..75: mol_type = other DNA
cttcgagcgtctgatggatggcgctaaactgctgaaatgttcagagtttggtgacgcgatcatcgaaaacatgta

SEQ ID NO: 375726 - DNA, 75 bp, synthetic construct
  source 1..75: mol_type = other DNA
aacctatgacttcgaacgtctgatggagggcgctaacctgctgaaatgttcagagtttggtgatgcgatcatcga

SEQ ID NO: 375727 - DNA, 75 bp, synthetic construct
  source 1..75: mol_type = other DNA
cagacgcaaacaagtattagtcgtccattagcattcggcccatggcttgcactgagcgcagggtattattttttg

SEQ ID NO: 375728 - DNA, 75 bp, synthetic construct
  source 1..75: mol_type = other DNA
cggcgaagatgccgaaagaggcaaaagagaaagcggaagcagagttgcagaagctgaaaatgatgtctccgatgt

SEQ ID NO: 375729 - DNA, 75 bp, synthetic construct
  source 1..75: mol_type = other DNA
tgtcggcagaagcgaccgtggtgcgcggttatatcgactggatggttcaggtgccgtggaatgcgcgtagcaagg

SEQ ID NO: 375730 - DNA, 75 bp, synthetic construct
  source 1..75: mol_type = other DNA
atgagttatcagactaatcaggaaaacgtgctggctgagttacgcgccacgctgggaaatatcagcgccgatgag

SEQ ID NO: 375731 - DNA, 75 bp, synthetic construct
  source 1..75: mol_type = other DNA
tcaaaaaagacctgcgtcaggcgcaagaaatcctcgataccgaccattatggtctggaacgtgtgaaagatcgca

SEQ ID NO: 375732 - DNA, 75 bp, synthetic construct
  source 1..75: mol_type = other DNA
tcgactatggtcgcgcggataacgaaaaccgcgttggtcaggttacggggctggcgtggacagaagtgggtggcg

SEQ ID NO: 375733 - DNA, 75 bp, synthetic construct
  source 1..75: mol_type = other DNA
gggtaggtaaaacttctctggggcagtccatcgccaaagctaccggacgtaaatatgtccgtatggcgctaggcg

SEQ ID NO: 375734 - DNA, 75 bp, synthetic construct
  source 1..75: mol_type = other DNA
ctcctgcaaggctgaaggctagccgcgctggagtcatggctaatcccagcctgactgttccgaaaggcaaaatga

SEQ ID NO: 375735 - DNA, 75 bp, synthetic construct
  source 1..75: mol_type = other DNA
cagcagcaaaaacaaatggaaaatgcccttgctgaactaatgagtcgttactggattcttgagcgtggatttctg

SEQ ID NO: 375736 - DNA, 75 bp, synthetic construct
  source 1..75: mol_type = other DNA
gctgacccggcatcactggtcagtgatgtggccgctgaatacccacgcccggctggaaattattaccggtctgtt

SEQ ID NO: 375737 - DNA, 75 bp, synthetic construct
  source 1..75: mol_type = other DNA
taaaggttgggctgtggtaagaagctcgccctggcatcttgttggggtttttgcgacagaggaagacgcagaaac

SEQ ID NO: 375738 - DNA, 75 bp, synthetic construct
  source 1..75: mol_type = other DNA
ctgccgggtgacgcgtgatgtgtattccctcgatgggttggtgaagctgatcgacaaaggcgcatttgttacggg

SEQ ID NO: 375739 - DNA, 75 bp, synthetic construct
  source 1..75: mol_type = other DNA
gcgagctggataacaacaacagcttcaacgatgaacgcgggggaatgcccgcacagaaacgccgcaccgcaccag

SEQ ID NO: 375740 - DNA, 75 bp, synthetic construct
  source 1..75: mol_type = other DNA
aacgaagccctgaagcgcaaaatcgacgcggcgaagatgccgaaagaggcaaaagagaaagcggaagcagagctg

SEQ ID NO: 375741 - DNA, 75 bp, synthetic construct
  source 1..75: mol_type = other DNA
gaaactggttctggaactgacagaacgaaaccagctatccgtcacagcagaatcaaaagcgttatttgcgaaatt

SEQ ID NO: 375742 - DNA, 75 bp, synthetic construct
  source 1..75: mol_type = other DNA
ccaccggattaattgccccgataacgcaacagttgatgtctcaggtcgaacatagccttaatcctgttgcacatt

SEQ ID NO: 375743 - DNA, 75 bp, synthetic construct
  source 1..75: mol_type = other DNA
atgaaatctccgggcatatagtagaaaatgttattgagctggctcgccggttaggtattgatatcattgccgaag

SEQ ID NO: 375744 - DNA, 75 bp, synthetic construct
  source 1..75: mol_type = other DNA
ctatttgaagggggaaacacactgctgtggtcagcgtattccatatcattacccattggtagagatgatgtgtgc

SEQ ID NO: 375745 - DNA, 75 bp, synthetic construct
  source 1..75: mol_type = other DNA
cgaatcacaggagttgttcatgacagagaaaggaagcagctatctgcagggataccgctatgcacctccactacc

SEQ ID NO: 375746 - DNA, 75 bp, synthetic construct
  source 1..75: mol_type = other DNA
tcagcgcggacattgtgatattacaataaaactaaaggattatatttggcatggcgaagccaaaaaacatacatc

SEQ ID NO: 375747 - DNA, 75 bp, synthetic construct
  source 1..75: mol_type = other DNA
atggccctggcggaaacgtaacgccagtaaccattaacggtacagtctggctccagggcgacggttgcaaagcca

SEQ ID NO: 375748 - DNA, 75 bp, synthetic construct
  source 1..75: mol_type = other DNA
agaacggtgagcttgcagcgttctacgtgcatgggacacggagcgcacagataccggccatcattgaaaagccgc

SEQ ID NO: 375749 - DNA, 75 bp, synthetic construct
  source 1..75: mol_type = other DNA
gtggtccagcattcgggttagtctgcaatggcgactcatttttcagtggcgtgatggctatgcatatgacgtgta

SEQ ID NO: 375750 - DNA, 75 bp, synthetic construct
  source 1..75: mol_type = other DNA
gtattgtttgcactggatgattttggtactggctatgcaacccacagctacctgcagtcgtttcctgtcgattac

SEQ ID NO: 375751 - DNA, 75 bp, synthetic construct
  source 1..75: mol_type = other DNA
tccctggcggtaaaaaactcatttataacggcgtgaccatgccgctcactgccattgccgattttgccgaaaaag

SEQ ID NO: 375752 - DNA, 75 bp, synthetic construct
  source 1..75: mol_type = other DNA
ggtgcagaagctgctgccggtggatctggcggccagtaaaggcattgagctggtgtatgtgaataccaaagggat

SEQ ID NO: 375753 - DNA, 75 bp, synthetic construct
  source 1..75: mol_type = other DNA
gatattaatggcgtggtgcgctgggatttcgcgccattgcaatcgctggaactggaagcaggttacagccgctag

SEQ ID NO: 375754 - DNA, 75 bp, synthetic construct
  source 1..75: mol_type = other DNA
acgatgccgacatccaccgtcattatgtggcgacgctgtgcctgcagatattacgctgtcgtccacatgctgtat

SEQ ID NO: 375755 - DNA, 75 bp, synthetic construct
  source 1..75: mol_type = other DNA
gcaggaacattccttatctttcggtttcgggttcgctgcaagagcgactggggcaaattcttcatcaacttcccg

SEQ ID NO: 375756 - DNA, 75 bp, synthetic construct
  source 1..75: mol_type = other DNA
aaagatatcactttaaccgccgcgcatgtggctgcttttgccagaagggcaacggatacatatgcggatgctgat

SEQ ID NO: 375757 - DNA, 75 bp, synthetic construct
  source 1..75: mol_type = other DNA
acgaacgccaggtcttctgaaacggcagcgggacagagcgcctcggctgcggcaggctcaaaaacagcggctgcg

SEQ ID NO: 375758 - DNA, 75 bp, synthetic construct
  source 1..75: mol_type = other DNA
aagtccatacgcagttggttgactgcgctggatgaggtgacaatcgagcgtgaagacggtacagaagtgaccgtt

SEQ ID NO: 375759 - DNA, 75 bp, synthetic construct
  source 1..75: mol_type = other DNA
acatggatggctcagttctaacaatgtggagccgcggagctggttcatcattatgggcttattatatcagcgact

SEQ ID NO: 375760 - DNA, 75 bp, synthetic construct
  source 1..75: mol_type = other DNA
tattgcatcaagttccccaagcatcagtaccctagttgacgagtggtttgatactccttcagtaaaagagatggt

SEQ ID NO: 375761 - DNA, 75 bp, synthetic construct
  source 1..75: mol_type = other DNA
actatggcggctcaggcagatattactggggccatttctgcagcaagtaaagctgagcaagaacgaattcagact

SEQ ID NO: 375762 - DNA, 75 bp, synthetic construct
  source 1..75: mol_type = other DNA
gcgtggtacgaacaggaattatcgcgcaggaacattccttatctttcggtttcgggttcgctgcaagagcgactg

SEQ ID NO: 375763 - DNA, 75 bp, synthetic construct
  source 1..75: mol_type = other DNA
tgtttattgtattgatatctgggtgttcaaatgaccacatggataaaatagatgatcccagagtcattcctgatg

SEQ ID NO: 375764 - DNA, 75 bp, synthetic construct
  source 1..75: mol_type = other DNA
ttgccaagccagaaatacgcccatttccaccacagccaatagaaccggatgagcattcaactggaggagaacaat

SEQ ID NO: 375765 - DNA, 75 bp, synthetic construct
  source 1..75: mol_type = other DNA
acatcaatggtgttaagtttgatggttcaggcgatatcaacattaatacattggtatctcgtggccgagttacgg

SEQ ID NO: 375766 - DNA, 75 bp, synthetic construct
  source 1..75: mol_type = other DNA
ggctggttttttctcaatatattctactgctgagcgagctatacactcgattatcgcaagcgtgaaagatgatga

SEQ ID NO: 375767 - DNA, 75 bp, synthetic construct
  source 1..75: mol_type = other DNA
acagatgaattagcctcacgagtggttatcaccacttattcctcagctggcggatacgccatgaataattgtgaa

SEQ ID NO: 375768 - DNA, 75 bp, synthetic construct
  source 1..75: mol_type = other DNA
caccagcgaatcactggctgcaactccaaaggcagttaaagctgcgaatgacaatgcgaatagccgattggcgaa

SEQ ID NO: 375769 - DNA, 75 bp, synthetic construct
  source 1..75: mol_type = other DNA
tctgggccgggttaatcacgctgattgtgatcgaactggtcctcggcattgataacctggtctttattgccatcc

SEQ ID NO: 375770 - DNA, 75 bp, synthetic construct
  source 1..75: mol_type = other DNA
tttggcaccgaatttagcaaaatgcgcaatctgactcagcgcttgaaagctgccgggctcgatacagccaagcta

SEQ ID NO: 375771 - DNA, 75 bp, synthetic construct
  source 1..75: mol_type = other DNA
aaattgatgtttatcagagtcggcgtttcgaaaagtctctgagtaaactcccggaagcgcaactgaaagttgtgg

SEQ ID NO: 375772 - DNA, 75 bp, synthetic construct
  source 1..75: mol_type = other DNA
tcaatgttactggcggcatcaatggtagtttgaacggtaatgctgcaactgcaacaaaactgcaaacagcacgca

SEQ ID NO: 375773 - DNA, 75 bp, synthetic construct
  source 1..75: mol_type = other DNA
tctgatgtaggagcattatcgctttctggaggagcgttaactggcggattaactgctgctggcgagattatttca

SEQ ID NO: 375774 - DNA, 75 bp, synthetic construct
  source 1..75: mol_type = other DNA
tcgaggtgaccgaaaggattgggggtattacggccttattgctgaagaggttggtgagattgccccgcaatatgt

SEQ ID NO: 375775 - DNA, 75 bp, synthetic construct
  source 1..75: mol_type = other DNA
ggttgcgccgagtgttcaattacgagggcaaggtactgataccaggcagtacatcatggcttacagaaccgatgg

SEQ ID NO: 375776 - DNA, 75 bp, synthetic construct
  source 1..75: mol_type = other DNA
agcacaacgaaaacgttgagtggtataaaaataacaccgacgcgattgacgctgctggcgacaaagctcgtgagg

SEQ ID NO: 375777 - DNA, 75 bp, synthetic construct
  source 1..75: mol_type = other DNA
aaggtttacgctaatgatgaagttattgtccgtagtcagaatgcgttaaggatgattgctggcgattacggtgtc

SEQ ID NO: 375778 - DNA, 75 bp, synthetic construct
  source 1..75: mol_type = other DNA
aacaagcgacaacaggaaggaattgaactcagactgaaccgccccgggtttcctggagagtattttatctgtgaa

SEQ ID NO: 375779 - DNA, 75 bp, synthetic construct
  source 1..75: mol_type = other DNA
cagagtttaatcctgccgcagatctatccagtgctctcgaagtacataaatcaaatcattttccattcttaaaat

SEQ ID NO: 375780 - DNA, 75 bp, synthetic construct
  source 1..75: mol_type = other DNA
ccggcatttgaggcacacatcagcctgcctggtgcaaccgccgccggtgaaaaagccggaccgtcagaggaataa

SEQ ID NO: 375781 - DNA, 75 bp, synthetic construct
  source 1..75: mol_type = other DNA
gaatatgacgcctgctaaggggctgattgctcttctggttggtggcgcttacctcattattgataattgggaaac

SEQ ID NO: 375782 - DNA, 75 bp, synthetic construct
  source 1..75: mol_type = other DNA
atctcgcttggcgtttacccaacgatcacccttgccgaagctcgttcccgtcgtgatgaagctcgaaaacttgtg

SEQ ID NO: 375783 - DNA, 75 bp, synthetic construct
  source 1..75: mol_type = other DNA
ccattgtcgactcaagcgttagatttactcaatgaactcaagatcatgacagggaactatcgttatgtttttcca

SEQ ID NO: 375784 - DNA, 75 bp, synthetic construct
  source 1..75: mol_type = other DNA
cactaatttatggatataataaagtcagttttgttttgattgaggttggaaatattgcatgtatagaaactgaat

SEQ ID NO: 375785 - DNA, 75 bp, synthetic construct
  source 1..75: mol_type = other DNA
ccccgttttttaatcgaaaaaattatgaggaataccaggcatcccttaatcagccgcgtcagtacaaaccgaatg

SEQ ID NO: 375786 - DNA, 75 bp, synthetic construct
  source 1..75: mol_type = other DNA
atctcataattgataactgggaaaccgttggaccggttattaaaaatgtctgggaagtcattgatagcaccgccc

SEQ ID NO: 375787 - DNA, 75 bp, synthetic construct
  source 1..75: mol_type = other DNA
ttgccggaatgggggtggaatcagaaattgcggcgacggggataaagaattttatgctgtcgctgacagcgggga

SEQ ID NO: 375788 - DNA, 75 bp, synthetic construct
  source 1..75: mol_type = other DNA
ggctgatgtccgcaaagtggtggacggtctggatacgccggatgcgtttaaggccatgacggagcaggtacgcgc

SEQ ID NO: 375789 - DNA, 75 bp, synthetic construct
  source 1..75: mol_type = other DNA
gcagaaccagatcaatgcgatttcttccacgctgggggaaaccttcctgccttcactcaatgaaggcataaaaga

SEQ ID NO: 375790 - DNA, 75 bp, synthetic construct
  source 1..75: mol_type = other DNA
ccaaatccattaccgcagtgaccagagagatgcgtacgctggggaaggtatcggcagaaacgggattgatgggga

SEQ ID NO: 375791 - DNA, 75 bp, synthetic construct
  source 1..75: mol_type = other DNA
cggttatgcatcagacatcatggaagcttttcagaacgatattttcccttatgtaggtaaaaggccaattggcga

SEQ ID NO: 375792 - DNA, 75 bp, synthetic construct
  source 1..75: mol_type = other DNA
atggataatgtatttgttaaagcaaaaggtctcaggaaaaaaccatattttaagattgtctcagatcataccctt

SEQ ID NO: 375793 - DNA, 75 bp, synthetic construct
  source 1..75: mol_type = other DNA
aatgcacaggaggttatgtactatatatatactttttgggaccgttcgttaaacgatttacaaaaattgttgtct

SEQ ID NO: 375794 - DNA, 75 bp, synthetic construct
  source 1..75: mol_type = other DNA
ccgatattgctgattctggttgcgctggtagtggaacggggcgtgacgttatggagcgtcagcgaacaggtggcg

SEQ ID NO: 375795 - DNA, 75 bp, synthetic construct
  source 1..75: mol_type = other DNA
cggtttcaatggcgaagaaaacctcgttcgtggttgtggtggtgattgcgctactgacgatttacgggacattgg

SEQ ID NO: 375796 - DNA, 75 bp, synthetic construct
  source 1..75: mol_type = other DNA
gcttcatgtactggattgggtgccggttcgtcttgcgggtgtggtatatgccttgatcggtcatggtgagaaagc

SEQ ID NO: 375797 - DNA, 75 bp, synthetic construct
  source 1..75: mol_type = other DNA
gtatcgatactctttataaagaggcaacagaacaggatgttgaacagtttctgggggagtcgtttattgctctct

SEQ ID NO: 375798 - DNA, 75 bp, synthetic construct
  source 1..75: mol_type = other DNA
gtggtgatatctcctggtattgagtatatggaggacggtcttcccgatccggtgaaagcgatggggcgtcttctg

SEQ ID NO: 375799 - DNA, 75 bp, synthetic construct
  source 1..75: mol_type = other DNA
acagggaactatcgttatgtttttccagggcggaacgatccgaataggccaatgagcgaagcgagtataaatcaa

SEQ ID NO: 375800 - DNA, 75 bp, synthetic construct
  source 1..75: mol_type = other DNA
tccaatcatttcccgttccttaaagctgatgagttacctgattttttgcgtgctctagacagttacacagggagt

SEQ ID NO: 375801 - DNA, 75 bp, synthetic construct
  source 1..75: mol_type = other DNA
gttaaccgccgtgaagaatggatgtgtgcacaagtcttgtttacggggcaggttgatattgttggtgaaggagtg

SEQ ID NO: 375802 - DNA, 75 bp, synthetic construct
  source 1..75: mol_type = other DNA
ttatccgtgaatggactgatgaagatatgaaaagttatgcgcaggatatgctacgcctaatatatacagaacttt

SEQ ID NO: 375803 - DNA, 75 bp, synthetic construct
  source 1..75: mol_type = other DNA
caacttaaatgatagaacggatttttctgtgtgtattaatcgactggctgaagatggtattttggaagaggagac

SEQ ID NO: 375804 - DNA, 75 bp, synthetic construct
  source 1..75: mol_type = other DNA
cggtttatccccgctggcgcggggaacacctcaccgcttttgacgccagggaaatcggcggcgggttatcccccc

SEQ ID NO: 375805 - DNA, 75 bp, synthetic construct
  source 1..75: mol_type = other DNA
gatgaagtccattgcgtgacgttcgattacggtcagcgacatcgcgcagaaatcgacgtggcacgcgaactggcg

SEQ ID NO: 375806 - DNA, 75 bp, synthetic construct
  source 1..75: mol_type = other DNA
gtggaggccaggattccaccacctgtctggtgcaggcattacaacaatatgatgaagtccattgcgtgacgttcg

SEQ ID NO: 375807 - DNA, 75 bp, synthetic construct
  source 1..75: mol_type = other DNA
ggaacacgataaatcgctcacgaagaataattctacccccggtttatccccgctggcgcggggaacacaccatta

SEQ ID NO: 375808 - DNA, 75 bp, synthetic construct
  source 1..75: mol_type = other DNA
aatacggtttatccccgctggcgcggggaacaccatcaacaaccgtttttttattgccgtatttgcggtttatcc

SEQ ID NO: 375809 - DNA, 75 bp, synthetic construct
  source 1..75: mol_type = other DNA
atccccgctggcgcggggaacacccagattccgctttctctaccttctctttttccggtttatccccgctggcgc

SEQ ID NO: 375810 - DNA, 75 bp, synthetic construct
  source 1..75: mol_type = other DNA
ccggtgatatctgggtaaaaggatcgcgccgctacagaaattttgatgattatctcatcccgactgctgagtttg

SEQ ID NO: 375811 - DNA, 75 bp, synthetic construct
  source 1..75: mol_type = other DNA
ctggcgtaacaatcttaagctggggtccgggaaatatcggccattacgcacagtcgataccgaattgtacaaaaa

SEQ ID NO: 375812 - DNA, 75 bp, synthetic construct
  source 1..75: mol_type = other DNA
ccactttactcacctcaaaaataatcacgtcagaccaaaagacaaaaagctgttgctgaccaccatcctggcaga

SEQ ID NO: 375813 - DNA, 75 bp, synthetic construct
  source 1..75: mol_type = other DNA
ggtttatccccgctggcgcggggaacacattaagtccaccgtcgccgcgttgaaatcgctcggtttatccccgct

SEQ ID NO: 375814 - DNA, 75 bp, synthetic construct
  source 1..75: mol_type = other DNA
cttaaactggcgcgtgagggccggaaaatgagcagcagagatctggcaaaattcaccgatgtcagacgttacgct

SEQ ID NO: 375815 - DNA, 75 bp, synthetic construct
  source 1..75: mol_type = other DNA
gccagcgggctgacgttactgacagcggcgatcacgttgtggaacacggtatatatagaaagagctattgagtca

SEQ ID NO: 375816 - DNA, 75 bp, synthetic construct
  source 1..75: mol_type = other DNA
aaacagcttcctggatgctgcgttattgcggtttatccccgctggcgcggggaacacactaagcatacataactg

SEQ ID NO: 375817 - DNA, 75 bp, synthetic construct
  source 1..75: mol_type = other DNA
acaccgccgtaccccgccgtacatgttcaccgaggaggtggcgcttgcggccatgcgcgctcacgctgccggtga

SEQ ID NO: 375818 - DNA, 75 bp, synthetic construct
  source 1..75: mol_type = other DNA
ctggcgcggggaacacccgtaagtggtttgagcgatgatatttgtgctcggtttatccccgctggcgcggggaac

SEQ ID NO: 375819 - DNA, 75 bp, synthetic construct
  source 1..75: mol_type = other DNA
gggaactcgacagaacggcctcagtagtctcgtcaggctccggtttatccccgctggcgcggggaacacacacgc

SEQ ID NO: 375820 - DNA, 75 bp, synthetic construct
  source 1..75: mol_type = other DNA
tttctgcgtgacgctggtgatgccgcaggggcgctggcgcacctgcaacgtgcgacacagctcgactgtccaggc

SEQ ID NO: 375821 - DNA, 75 bp, synthetic construct
  source 1..75: mol_type = other DNA
ttattgccttgcttctggaagatgcaaaacgcttacatgaactggagcccaatgcaggcacagaggcccgcattt

SEQ ID NO: 375822 - DNA, 75 bp, synthetic construct
  source 1..75: mol_type = other DNA
gatcgctgccgtcgctggacgatggaaggcggttttgcccgtatgtatccgctgcaagcctgtgtgcgcctggca

SEQ ID NO: 375823 - DNA, 75 bp, synthetic construct
  source 1..75: mol_type = other DNA
aacactggctctgcaacagcagcacccatgaccacgtcggtttatccccgctggcgcggggaacacgaaatgctg

SEQ ID NO: 375824 - DNA, 75 bp, synthetic construct
  source 1..75: mol_type = other DNA
tatccccgctggcgcggggaacacatttgtcgccgtatgagttttacgcgccgtctcggtttatccccgctggcg

SEQ ID NO: 375825 - DNA, 75 bp, synthetic construct
  source 1..75: mol_type = other DNA
tttatccccgctggcgcggggaacacggagcgggaaggtcagaccgtcaacaacgcaccggtttatccccgctgg

SEQ ID NO: 375826 - DNA, 75 bp, synthetic construct
  source 1..75: mol_type = other DNA
cggggaacacttgttgataaagtggcgcgccaggtgcgtttacggtttatccccgctggcgcggggaacaccggt

SEQ ID NO: 375827 - DNA, 75 bp, synthetic construct
  source 1..75: mol_type = other DNA
cggtttatccccgctggcgcggggaacacaaaattcatattgataaacaccgcgtttgtatcggtttatccccgc

SEQ ID NO: 375828 - DNA, 75 bp, synthetic construct
  source 1..75: mol_type = other DNA
gtaataaagccccggagttttatatccggtttatccccgctggcgcggggaacacgggttgacgccagcgaacat

SEQ ID NO: 375829 - DNA, 75 bp, synthetic construct
  source 1..75: mol_type = other DNA
cagactgccaggaataccttcactcccgtatgacactgctggcgtcgcgactggaagaggtcaatgcgatggcga

SEQ ID NO: 375830 - DNA, 75 bp, synthetic construct
  source 1..75: mol_type = other DNA
attacacacctgctgccgatggcgacgcgcaccgataaaggtattctcctggccgaagaactgctggtctggctc

SEQ ID NO: 375831 - DNA, 75 bp, synthetic construct
  source 1..75: mol_type = other DNA
ttccggtgaagatccatggcttgctatagagaaaatattgccatggcctgaatttattgccagcctggaagaaac

SEQ ID NO: 375832 - DNA, 75 bp, synthetic construct
  source 1..75: mol_type = other DNA
gaaagatgagcagtagggacctgactcgattttcagcagcccgacgtcatgcaattctggtgtgtgtcctggaag

SEQ ID NO: 375833 - DNA, 75 bp, synthetic construct
  source 1..75: mol_type = other DNA
taacgaatggaagggacttcccctgattatgcgcctgattaactcttgtgcaatcatggggtacacatcgtcccg

SEQ ID NO: 375834 - DNA, 75 bp, synthetic construct
  source 1..75: mol_type = other DNA
ttacctttccggcagggatacgacccggcgcgagcatttaaccgaactgtaccgctatcttggcgtgaaggcatt

SEQ ID NO: 375835 - DNA, 75 bp, synthetic construct
  source 1..75: mol_type = other DNA
atcacggaaattctcgatgaggtaaacagctggacggcgtttacccgacatttttcgcatataaaaaatgacatt

SEQ ID NO: 375836 - DNA, 75 bp, synthetic construct
  source 1..75: mol_type = other DNA
gagaaggatggtagtcactccctcaggcattgaccggcaatactatgaaatttgcgcaatgaatgagctgaaggg

SEQ ID NO: 375837 - DNA, 75 bp, synthetic construct
  source 1..75: mol_type = other DNA
gcgggactgatccggcaggcggtgaaattgcggcaggagaacgagcaggagaagcaggagcgcgcccagcagatc

SEQ ID NO: 375838 - DNA, 75 bp, synthetic construct
  source 1..75: mol_type = other DNA
gaaggttgaagcaccacctgcgtcgaagccggtcgtggaagaaaaagcagcgccaacgggtaaagcctatgttgt

SEQ ID NO: 375839 - DNA, 75 bp, synthetic construct
  source 1..75: mol_type = other DNA
ctgggcagtatgttcagtcgggcaaaacatcagcaggctgagcgccttcagaaaacgggcaaactgatacagcag

SEQ ID NO: 375840 - DNA, 75 bp, synthetic construct
  source 1..75: mol_type = other DNA
cacgggatttcatccctgagagctggaaaaagatggtgatcaccccctcaggtattgaccggcaatactatgaaa

SEQ ID NO: 375841 - DNA, 75 bp, synthetic construct
  source 1..75: mol_type = other DNA
caactgagagccacttcggcagctttgccgcttaatgatgcccttgaaactattcgtgatatgtaccgtaaacag

SEQ ID NO: 375842 - DNA, 75 bp, synthetic construct
  source 1..75: mol_type = other DNA
cgcttgagtttgtccctgaaagctggcgcaaggtggtgattacacctgcgggtattgaccggcagtactatgaat

SEQ ID NO: 375843 - DNA, 75 bp, synthetic construct
  source 1..75: mol_type = other DNA
cattacaccgatacggcaggtttcacggagcatgtctttgcgctgatgcatatgctgggattcgcttttgcccca

SEQ ID NO: 375844 - DNA, 75 bp, synthetic construct
  source 1..75: mol_type = other DNA
ccgaactgctgctggaggtggacgaatggacgggcttcactcggcatttcgcgcatctgaaatcgggcgacccgg

SEQ ID NO: 375845 - DNA, 75 bp, synthetic construct
  source 1..75: mol_type = other DNA
aacagcgtcccttcgggtgtttcgccctttgccgatttggtttatggcatgcttcctcatccgaaaattacagag

SEQ ID NO: 375846 - DNA, 75 bp, synthetic construct
  source 1..75: mol_type = other DNA
gtgatgaaaaagaacgcttactgattgtgccggatgatgacattctgctaaccaggatgtgctttttaagtgagc

SEQ ID NO: 375847 - DNA, 75 bp, synthetic construct
  source 1..75: mol_type = other DNA
gggagcacattaatctgacgggagactatatctggcggaacaataagaagctggctgaagggaagtatcgtcctt

SEQ ID NO: 375848 - DNA, 75 bp, synthetic construct
  source 1..75: mol_type = other DNA
taaatatccggctctacagtcaattatttccacaacaccttttaatatcaaagagatagaaacgcactggcatga

SEQ ID NO: 375849 - DNA, 75 bp, synthetic construct
  source 1..75: mol_type = other DNA
aatagaagacgtccttccctggcaggaattcatcaacagcgtggaagagacgcggttcctgtcacgtaaggacaa

SEQ ID NO: 375850 - DNA, 75 bp, synthetic construct
  source 1..75: mol_type = other DNA
tctgttgaagtgatcgaacgaaccctggccgaagcaacaacacttgccgacagggcggttttttctgcgcttacc

SEQ ID NO: 375851 - DNA, 75 bp, synthetic construct
  source 1..75: mol_type = other DNA
catcactcgaagatattcaggcatggtacatccgtgatgaaacttattcagccgctcttgcagagctggtaaatg

SEQ ID NO: 375852 - DNA, 75 bp, synthetic construct
  source 1..75: mol_type = other DNA
cggtctttatgcatcggctgggtgaaatcagagatcgggggctggagaatcagagctatcgagccagcggtctga

SEQ ID NO: 375853 - DNA, 75 bp, synthetic construct
  source 1..75: mol_type = other DNA
tgctcggattcgcttttgcgccaaggatccgggatcttcatgacaaacggctgtttattcatggaaaagctgagt

SEQ ID NO: 375854 - DNA, 75 bp, synthetic construct
  source 1..75: mol_type = other DNA
gaaaaatacagtacgctgcgtaaatacgccccccggatgctgtccgtgttgcagttcagggctgcccccgccgca

SEQ ID NO: 375855 - DNA, 75 bp, synthetic construct
  source 1..75: mol_type = other DNA
caaagggaatcaggacacctctggtaatgcggctacagcgaccaaattgcagacggcgtgtactatcaacggtgt

SEQ ID NO: 375856 - DNA, 75 bp, synthetic construct
  source 1..75: mol_type = other DNA
tactggctgtggaactattcatcttgcaggttgtgttattgaggttatgggtaataaaggagccatgaccatccg

SEQ ID NO: 375857 - DNA, 75 bp, synthetic construct
  source 1..75: mol_type = other DNA
ttgagcaaactgtagaattagccgcaggggcattacagaaaaaccagaacggcgcagatattccaggaaaagata

SEQ ID NO: 375858 - DNA, 75 bp, synthetic construct
  source 1..75: mol_type = other DNA
acgggacgagctattcaccaggatggcgcagagcgtataacactaaaaacaagcctactgcggctgatgtcggag

SEQ ID NO: 375859 - DNA, 75 bp, synthetic construct
  source 1..75: mol_type = other DNA
atcggcattgatatttcagactctgtaaccagtaccagaagtgatgttgcggcaagttcgctggcagttaaaaaa

SEQ ID NO: 375860 - DNA, 75 bp, synthetic construct
  source 1..75: mol_type = other DNA
ttgagcaaactgtagaattagccgcaggagcattacagaaaaaccagaacggcgcagatattccgggaaaagata

SEQ ID NO: 375861 - DNA, 75 bp, synthetic construct
  source 1..75: mol_type = other DNA
cgccgacaccgcgacgaaattaaaaacagccataaacattaatggcgtcagattcgatggttctacgaacatttc

SEQ ID NO: 375862 - DNA, 75 bp, synthetic construct
  source 1..75: mol_type = other DNA
taacgggtgtccctactgcgcctacggctgcacagggcacaaacaatacgcagatcgctacgactgcttacgtac

SEQ ID NO: 375863 - DNA, 75 bp, synthetic construct
  source 1..75: mol_type = other DNA
gattcgatggttcggctgacattaatatcaatactctgaggtgtactggcaatagcggacactaccatttgttct

SEQ ID NO: 375864 - DNA, 75 bp, synthetic construct
  source 1..75: mol_type = other DNA
tggtgatttcatttttaaaacagatgggggatttgcgctgggaagtggtgcgcaagttgcgtctagtggcgatat

SEQ ID NO: 375865 - DNA, 75 bp, synthetic construct
  source 1..75: mol_type = other DNA
tgaatggctggattctcaaggggcattcaatcacccatactggatgtgcaaatgttcatggtcgtacggcaataa

SEQ ID NO: 375866 - DNA, 75 bp, synthetic construct
  source 1..75: mol_type = other DNA
cggcgaccagattgcagacggcgcgcactattaacggtgtttcgtttgatggttctaaaaatattgagctaacgg

SEQ ID NO: 375867 - DNA, 75 bp, synthetic construct
  source 1..75: mol_type = other DNA
cctgttgagtacggctaacacatggagtgcacgccagactttcaacggcgggatcaccggggcactgacagggaa

SEQ ID NO: 375868 - DNA, 75 bp, synthetic construct
  source 1..75: mol_type = other DNA
ggaaatggtggataactggcagaagagtgtaaggagccgtgcgctcccggaagaggcgatgacgggctggaacga

SEQ ID NO: 375869 - DNA, 75 bp, synthetic construct
  source 1..75: mol_type = other DNA
cagaaacatgcctgaaaacgctgagtgacatactgacccggcatgaacttaaacagagcagtaaagtggctttac

SEQ ID NO: 375870 - DNA, 75 bp, synthetic construct
  source 1..75: mol_type = other DNA
gctgaagatacagagcgggaaacgcttgcaatggaatggtgtaatgcactggctggagatatggctgatgcggcg

SEQ ID NO: 375871 - DNA, 75 bp, synthetic construct
  source 1..75: mol_type = other DNA
acgctctgcctgcgtctgtatgaacacaatggcgtggaattacagacggcatcctggtacaccatcgcccggatg

SEQ ID NO: 375872 - DNA, 75 bp, synthetic construct
  source 1..75: mol_type = other DNA
tcccgtctggtgtatgttgtttctgaaacaaaaacagagcccacactcttccttcaaaaatccccgctcacgttt

SEQ ID NO: 375873 - DNA, 75 bp, synthetic construct
  source 1..75: mol_type = other DNA
ataaaacaataattataaatactatattaggttggagtgaaccaagcattacttgggaagagctttgtgaagaat

SEQ ID NO: 375874 - DNA, 75 bp, synthetic construct
  source 1..75: mol_type = other DNA
ctgatgacccggattgccagtgggtgtcgtgtgggggttacggcgtcatgtcgtccggtcattgcggtgcacggt

SEQ ID NO: 375875 - DNA, 75 bp, synthetic construct
  source 1..75: mol_type = other DNA
cagacgcaccgcgtgccaaaaaatgtaaatgcggaaaatcaccgacaatattcgacatggagaacgggtgccaaa

SEQ ID NO: 375876 - DNA, 75 bp, synthetic construct
  source 1..75: mol_type = other DNA
tgtggcggccgcgaattatcgcagtgcggtaacagagtggaataacctgaaatctgttagagagggaagtcatga

SEQ ID NO: 375877 - DNA, 75 bp, synthetic construct
  source 1..75: mol_type = other DNA
gctgctgacaccaccaccggatgtgctttcagcagaccagatgatgcacctcagcagaaaatcctcattgttaaa

SEQ ID NO: 375878 - DNA, 75 bp, synthetic construct
  source 1..75: mol_type = other DNA
atgacttctgaagtgaaactgaaaaccggtgttgacccccggtcattaccggattatgctgccctgcgcgatgaa

SEQ ID NO: 375879 - DNA, 75 bp, synthetic construct
  source 1..75: mol_type = other DNA
tgagcggtctgggatatctgacggcaggattaaccgccagtctgcccgtcatcagcctgttattactgtgcctgg

SEQ ID NO: 375880 - DNA, 75 bp, synthetic construct
  source 1..75: mol_type = other DNA
accttaaaggtgccaccgctgctggcgaaggtgagttattcattggctggagtggcacgagcggtgaccatgcgc

SEQ ID NO: 375881 - DNA, 75 bp, synthetic construct
  source 1..75: mol_type = other DNA
ccgctgagatgatgctgcgccatatgggctggactgaagcggctgacctgattgttaaaggtatggaaggcgcaa

SEQ ID NO: 375882 - DNA, 75 bp, synthetic construct
  source 1..75: mol_type = other DNA
atcttccgtgaaaactcggaagacatttatgcgggtatcgaatggaaagcagactctgccgacgctgagaaagtg

SEQ ID NO: 375883 - DNA, 75 bp, synthetic construct
  source 1..75: mol_type = other DNA
cttcgaacgtctgatggaaggcgctaacctgctgaaatgttcagagtttggtaacgcgatcatcaagaatatgta

SEQ ID NO: 375884 - DNA, 75 bp, synthetic construct
  source 1..75: mol_type = other DNA
cagatggccgccaggctggaacgctcccggggctgggttatcaaacaggcgctttctgcatggcttgcccaggag

SEQ ID NO: 375885 - DNA, 75 bp, synthetic construct
  source 1..75: mol_type = other DNA
tccctgtgccgcacagccggcgttgcataaaattccgctctgcgatgagtattgtttaatcaaaaatccccgcag

SEQ ID NO: 375886 - DNA, 75 bp, synthetic construct
  source 1..75: mol_type = other DNA
cctggcgcaaacatcggtgacgaatgcgccctgtttgaagccacccacggtactgcgccgaaatatgccggacag

SEQ ID NO: 375887 - DNA, 75 bp, synthetic construct
  source 1..75: mol_type = other DNA
gaaatcacggatcccagggctgcaaagatagaggacatcgtaaaactacccatcaacggggtccgggccgtccag

SEQ ID NO: 375888 - DNA, 75 bp, synthetic construct
  source 1..75: mol_type = other DNA
tcaatatgaccaaacgctgctcacggcccacttcattgggattgaaggcgttccgttcgtagttgctccggatgg

SEQ ID NO: 375889 - DNA, 75 bp, synthetic construct
  source 1..75: mol_type = other DNA
ctgcaacgtgcgacacagctcgactgtcaggcaggcgtcaaaaaagagattgaacgactggagcgggagctgaaa

SEQ ID NO: 375890 - DNA, 75 bp, synthetic construct
  source 1..75: mol_type = other DNA
gcggtattcgctctctcaacgttgctctgcgccaggaactggatctctacatctgcctgcgtccggtacgttact

SEQ ID NO: 375891 - DNA, 75 bp, synthetic construct
  source 1..75: mol_type = other DNA
atcatcagttcgagaaaccatcggtaattaataatataccggcctcgcaagcagctcagtggattaatgctcaag

SEQ ID NO: 375892 - DNA, 75 bp, synthetic construct
  source 1..75: mol_type = other DNA
caacgtacaccgattgaacatgtgctggacacgggcgtgcgcccaatcaatgccctgcttaccgttgggcgcggg

SEQ ID NO: 375893 - DNA, 75 bp, synthetic construct
  source 1..75: mol_type = other DNA
tgctgtacagttccgcgtgaattacagaaatggcggtatcttttatcgttcagcgcgtgatggttatggctttga

SEQ ID NO: 375894 - DNA, 75 bp, synthetic construct
  source 1..75: mol_type = other DNA
tattctggttaacttctataccggagtcggaagttgccagaccttgcagatgaaggcgcattacagaaatggtgg

SEQ ID NO: 375895 - DNA, 75 bp, synthetic construct
  source 1..75: mol_type = other DNA
gttggtgcatatacgcaggcagaatgtaactcaaggtttattacaggtattcgcctgggcggtctgtcatctgtt

SEQ ID NO: 375896 - DNA, 75 bp, synthetic construct
  source 1..75: mol_type = other DNA
gcttgggattattggtgaagttgatggtgacgacccagcaagattgaggcctttacagtattgcattaatggaac

SEQ ID NO: 375897 - DNA, 75 bp, synthetic construct
  source 1..75: mol_type = other DNA
ggcgaatggtcttcgtattgcctatggcaactatggattctttatccgaaacgatggttcaagcacatacttcat

SEQ ID NO: 375898 - DNA, 75 bp, synthetic construct
  source 1..75: mol_type = other DNA
tcaataacgacccgaattacagcacaactatcaacaatgccttggctctcaaagcgcctttggcaagccctgcat

SEQ ID NO: 375899 - DNA, 75 bp, synthetic construct
  source 1..75: mol_type = other DNA
ggggatgatggcgcgttacacccgtgcagatgtgattgtcgttggtttaattggtgaacgtggacgcgaagtaaa

SEQ ID NO: 375900 - DNA, 75 bp, synthetic construct
  source 1..75: mol_type = other DNA
atgaccacgcgcctgactcgctggctaaccacgctggataacttcgaagccaaaatggcgcagttgcctgcggta

SEQ ID NO: 375901 - DNA, 75 bp, synthetic construct
  source 1..75: mol_type = other DNA
taacctcgctggataattttgaagcaaaaatggcgcaactgcctgcggtgcgccgctacggacgattaatccgcg

SEQ ID NO: 375902 - DNA, 75 bp, synthetic construct
  source 1..75: mol_type = other DNA
tacatccgagcgtattaaccgcacgatcggcattgatatttcagactctgtaaccagtaccagaagtgatgttgc

SEQ ID NO: 375903 - DNA, 75 bp, synthetic construct
  source 1..75: mol_type = other DNA
tggtgataaaactgctggcgcagcgtcagtggatattggtgaattctaccaggtaactattcagcatcgtaagga

SEQ ID NO: 375904 - DNA, 75 bp, synthetic construct
  source 1..75: mol_type = other DNA
cccggggttgggttatcaaacaggcgctttctgcatggcttgcccaggaggaggagcgtaatcgcctgacgctgg

SEQ ID NO: 375905 - DNA, 75 bp, synthetic construct
  source 1..75: mol_type = other DNA
gcggaaagatcatcaccaataaaacgatatcatggccagtcggcctcgccggtggattccagggaagtttaaccg

SEQ ID NO: 375906 - DNA, 75 bp, synthetic construct
  source 1..75: mol_type = other DNA
attatttgaaagagtattgcgatgtggttatatatattaaaagttttaatgaagtaaaatactacagtgtagtaa

SEQ ID NO: 375907 - DNA, 75 bp, synthetic construct
  source 1..75: mol_type = other DNA
ggcgattgtgtttaaagacgaaaatgcggttgggttttttgaggatgttcaggaaggggtagatgagtataaaaa

SEQ ID NO: 375908 - DNA, 75 bp, synthetic construct
  source 1..75: mol_type = other DNA
gggtaaatcaacgttgctaagaatgattggtggtattgaccgccccgacagtggaaagatcatcaccaataaaac

SEQ ID NO: 375909 - DNA, 75 bp, synthetic construct
  source 1..75: mol_type = other DNA
ctgaaagagaaaattgagtttgtcgaagaatttgccgaactcggtaagtactttgatatgccgattaaaacttac

SEQ ID NO: 375910 - DNA, 75 bp, synthetic construct
  source 1..75: mol_type = other DNA
gcggttagttttcatgaggatgttcaggaggggatagaggagtataaaaacaacataacaattaatacatattga

SEQ ID NO: 375911 - DNA, 75 bp, synthetic construct
  source 1..75: mol_type = other DNA
ttaaaagccaaactttcgctgggcgaagattatctcaactccgatatttttgatggcttcagttacattggcggc

SEQ ID NO: 375912 - DNA, 75 bp, synthetic construct
  source 1..75: mol_type = other DNA
ataggtgggattgaccgtccagataagggaagaattgtaacagataaaacaatatcatggccagttggactttca

SEQ ID NO: 375913 - DNA, 75 bp, synthetic construct
  source 1..75: mol_type = other DNA
ggcgatttacatatcagataggaaatatgtaagttactttgattgcttggatacagctatatcatcatatataac

SEQ ID NO: 375914 - DNA, 75 bp, synthetic construct
  source 1..75: mol_type = other DNA
gctttggcttaagtatggctttcaaatttgattattatcttgtcgatgaagtgacagctgttggagatgccagat

SEQ ID NO: 375915 - DNA, 75 bp, synthetic construct
  source 1..75: mol_type = other DNA
tacgagctgactggcagagcgattatcagcatacccgcagtaacgatgacggcgacactgacgatagcggtacgc

SEQ ID NO: 375916 - DNA, 75 bp, synthetic construct
  source 1..75: mol_type = other DNA
attggttgatgacgaaggtaatgtttatctggcaggcgttaaaccgggtgaacatatgaccgttttctgggaggg

SEQ ID NO: 375917 - DNA, 75 bp, synthetic construct
  source 1..75: mol_type = other DNA
atgcctattacgggttagagaaggtgcaaacggacagcgactttgccgatcaggtctggagctacttcgcgaccg

SEQ ID NO: 375918 - DNA, 75 bp, synthetic construct
  source 1..75: mol_type = other DNA
tgatttgattgaaggcttattaatcggcgctatcgtcggctctaccgatgctgcagcggtcttttctctgctggg

SEQ ID NO: 375919 - DNA, 75 bp, synthetic construct
  source 1..75: mol_type = other DNA
caccagcagtatattacttagttcattttcttcccgtcttggcattcctattctggttatttttctggcgatcgg

SEQ ID NO: 375920 - DNA, 75 bp, synthetic construct
  source 1..75: mol_type = other DNA
ggttccggcaacggttgccggatgcggcgtaaaacgccttatccgtcctggggggctgggcttggatcttgtagg

SEQ ID NO: 375921 - DNA, 75 bp, synthetic construct
  source 1..75: mol_type = other DNA
accgctatgacgccgatggcctgtgtaccgccagggtcaacggcctggaggaaaccatcctctacagccgggacg

SEQ ID NO: 375922 - DNA, 75 bp, synthetic construct
  source 1..75: mol_type = other DNA
accaacaatattgggttgttgcactattgcgtgaactagaagaggaggggttagtcgaacagattgaagatagag

SEQ ID NO: 375923 - DNA, 75 bp, synthetic construct
  source 1..75: mol_type = other DNA
atccggaaaatccgtgggagcagtttgtttatcaattgagtgccgataaatggtgtgtaggtgcggcactgcgcg

SEQ ID NO: 375924 - DNA, 75 bp, synthetic construct
  source 1..75: mol_type = other DNA
ggtgagttatactacttttttgtttttcaataagaaacgccaacttcctcactactatattgcccttcttctggc

SEQ ID NO: 375925 - DNA, 75 bp, synthetic construct
  source 1..75: mol_type = other DNA
gacagcaaaggcgagcgtcacgtaatagttaacggcgtcctgatggtcaaacagggcaaaaggggaaggccatga

SEQ ID NO: 375926 - DNA, 75 bp, synthetic construct
  source 1..75: mol_type = other DNA
cttgcttcctgttcatggtcaggcatttcatccatttctcttaattttttttctacctgtctttcaagtatggat

SEQ ID NO: 375927 - DNA, 75 bp, synthetic construct
  source 1..75: mol_type = other DNA
atgaatgccaccgttcacaattcggtgacaaccacaaagctatcaaggaattcttccccaacgcccagctttttg

SEQ ID NO: 375928 - DNA, 75 bp, synthetic construct
  source 1..75: mol_type = other DNA
atcaacagcttcgagcgtgatgatggtacaccactgaactacagtctggttaatattcgcgactggtgcaagaac

SEQ ID NO: 375929 - DNA, 75 bp, synthetic construct
  source 1..75: mol_type = other DNA
tttttccccaccttctgaaggaaacaaagatgttcagcagatacaggaagatctgcctcaggagaaagaagataa

SEQ ID NO: 375930 - DNA, 75 bp, synthetic construct
  source 1..75: mol_type = other DNA
ggccattgtgtttatggatgataatgcggttagttttcatgaggatgttcaggaggggatagaggagtacaaaaa

SEQ ID NO: 375931 - DNA, 75 bp, synthetic construct
  source 1..75: mol_type = other DNA
ttcactttttcgtgccgggttaaaggcgctaaagcacgatgcaggttaagagtttcagttattattggtggaaca

SEQ ID NO: 375932 - DNA, 75 bp, synthetic construct
  source 1..75: mol_type = other DNA
cgtagcgtttgccccggagactcgagggatgtcactggcgcagaccagcaatatgacgatccgcgggcagagaat

SEQ ID NO: 375933 - DNA, 75 bp, synthetic construct
  source 1..75: mol_type = other DNA
aaacactgccggacggcgtccattgttgattggcagctttgccatgatgacgctggcgctggcggttttggggct

SEQ ID NO: 375934 - DNA, 75 bp, synthetic construct
  source 1..75: mol_type = other DNA
gctctgggttacatgatgcaacgttgtgaagaagttggctgccagaatcatggcaatgccgaagtcgctcatagc

SEQ ID NO: 375935 - DNA, 75 bp, synthetic construct
  source 1..75: mol_type = other DNA
gtcagccagcgcgccggattttttccggcagaagccacatggggcgggctggttccgtcactggtacgggagtac

SEQ ID NO: 375936 - DNA, 75 bp, synthetic construct
  source 1..75: mol_type = other DNA
atggtagcagtaaaaatctcaggtgtgctgaaagatggtgcgggaaaaccaatacagaactgcactattcaactg

SEQ ID NO: 375937 - DNA, 75 bp, synthetic construct
  source 1..75: mol_type = other DNA
tagagggccacagacttatgtttctgatctcggtcatgttacaggttctacggccagagccagaaataaggaaat

SEQ ID NO: 375938 - DNA, 75 bp, synthetic construct
  source 1..75: mol_type = other DNA
accgttaactgtgctttttatatgtcaaacaaaataagtaatgagccattctatgatgactcaacattaaccatg

SEQ ID NO: 375939 - DNA, 75 bp, synthetic construct
  source 1..75: mol_type = other DNA
ctggcatcatcatcactgttatctgtttaaagtgcctgctacacgcactgagttctggctggagaagattggcaa

SEQ ID NO: 375940 - DNA, 75 bp, synthetic construct
  source 1..75: mol_type = other DNA
gacgctgactggattggcttgctgggcgcgggaacgctcgccgggctgttcgttggcacatcgctgtttggctat

SEQ ID NO: 375941 - DNA, 75 bp, synthetic construct
  source 1..75: mol_type = other DNA
catcggcgtgatatcggtggcgacgatgtttgtctcatcccccgtcgaactgttggtgatgcgggtacttatcgg

SEQ ID NO: 375942 - DNA, 75 bp, synthetic construct
  source 1..75: mol_type = other DNA
gtccattgttgattggcagctttgccatgatgacgctggcgctggcggttttggggctgatcccggatatgggga

SEQ ID NO: 375943 - DNA, 75 bp, synthetic construct
  source 1..75: mol_type = other DNA
tcagcggtttacaccaacatgttcggtaaagccgtcgttgcggacgtcaataactactaccgtaaccaggccacg

SEQ ID NO: 375944 - DNA, 75 bp, synthetic construct
  source 1..75: mol_type = other DNA
ggcgttaccggattgttcagcgcctgggatttatttcactgctgaagctgaaagtattcatggccggctttgtcg

SEQ ID NO: 375945 - DNA, 75 bp, synthetic construct
  source 1..75: mol_type = other DNA
taaaccgcgccctgctatggagataaaaccgattatccaggagcagacacagcgcattacgccatcggctaaacc

SEQ ID NO: 375946 - DNA, 75 bp, synthetic construct
  source 1..75: mol_type = other DNA
ggcctttgacgtcacacactcgcatgtccgcctggatgagaacaccgcctacgacaatcgcacgctggacggcaa

SEQ ID NO: 375947 - DNA, 75 bp, synthetic construct
  source 1..75: mol_type = other DNA
tttttaatggtttcacatagtttgaattcattgaaagagttttgtgatgtggcgattgtgtttaaagacgataat

SEQ ID NO: 375948 - DNA, 75 bp, synthetic construct
  source 1..75: mol_type = other DNA
attcattgaaagagttttgtgatgtggcgattgtgtttaaggatgataatgcggttagttttcatgaggatgttc

SEQ ID NO: 375949 - DNA, 75 bp, synthetic construct
  source 1..75: mol_type = other DNA
ttcttaatggtttcccatagtatgaatttattaaaatcatattgtgatattgcaatctatatcggtagagacaat

SEQ ID NO: 375950 - DNA, 75 bp, synthetic construct
  source 1..75: mol_type = other DNA
gaatgacagcgaaatggtccgcgccggcaacgataaagagatgtacaccgccacctataaccagaacttcaggga

SEQ ID NO: 375951 - DNA, 75 bp, synthetic construct
  source 1..75: mol_type = other DNA
gcgaggagcagaccaactacaacgtcatgctctcccattatttcaacatgggcggcattcgtaacatgagtatct

SEQ ID NO: 375952 - DNA, 75 bp, synthetic construct
  source 1..75: mol_type = other DNA
ctcgacggtaactctttccgcgtcagttactccaaagactttgatgaactaaacagccgcgtcaccttcgccgga

SEQ ID NO: 375953 - DNA, 75 bp, synthetic construct
  source 1..75: mol_type = other DNA
gatataaaagttatgacggtaaatggagatagtatgtccccaactcttgtttccggggatcgattgtttgtcgac

SEQ ID NO: 375954 - DNA, 75 bp, synthetic construct
  source 1..75: mol_type = other DNA
ttttggatcttagcgttagcgcaggacctgggacctatatgctttcagactatgttgatgtgctctacgccattg

SEQ ID NO: 375955 - DNA, 75 bp, synthetic construct
  source 1..75: mol_type = other DNA
ttatcagcacacccgcagcaacgatgaagagacggataacagcaccgagagaaactgggactggagccgttacta

SEQ ID NO: 375956 - DNA, 75 bp, synthetic construct
  source 1..75: mol_type = other DNA
cggaggatgttgttgtccgttatggtggcgaagagtttgtcatcatactttttaatgcaacattgccggaagcag

SEQ ID NO: 375957 - DNA, 75 bp, synthetic construct
  source 1..75: mol_type = other DNA
gcctggcgcctggcgatctcaccgcgtacagccgtaactataaaattcgctttagtttcccctggctgtagggat

SEQ ID NO: 375958 - DNA, 75 bp, synthetic construct
  source 1..75: mol_type = other DNA
gaagcacgcgcccagctgccgcacgcacatcttatttttgtcgcccgtatccgtcaggaggtgactcatgcttaa

SEQ ID NO: 375959 - DNA, 75 bp, synthetic construct
  source 1..75: mol_type = other DNA
cgcggtctgttgattggcatgggtatgacggaaaagcagggcggctcagatgtgatgagtaataccactcgcgcg

SEQ ID NO: 375960 - DNA, 75 bp, synthetic construct
  source 1..75: mol_type = other DNA
gattgcgccctgggtagccatgccatgatgcgccgtgcgttctcgctggcgatatatcacgctcatcaacgccat

SEQ ID NO: 375961 - DNA, 75 bp, synthetic construct
  source 1..75: mol_type = other DNA
ccatgtttctatgttctcaggtttacgggcaatcatggcatacgaacgtagaggctgggtcaataaataaaacag

SEQ ID NO: 375962 - DNA, 75 bp, synthetic construct
  source 1..75: mol_type = other DNA
atgacaattttggtaacgagcacctttgttcgcagcgaagtcatcaatgccggacggcagttgtgtttctgtatt

SEQ ID NO: 375963 - DNA, 75 bp, synthetic construct
  source 1..75: mol_type = other DNA
ggtggcgaatgcgctgtggaaagcgcaaccggatctgccaactgcttccgaagcgtggatcctcgctggtggcgc

SEQ ID NO: 375964 - DNA, 75 bp, synthetic construct
  source 1..75: mol_type = other DNA
tgtaatggattggtactttttgttcatgctgctgccctgtaaagcaatgcgccgtagtacctcacaccacggcgc

SEQ ID NO: 375965 - DNA, 75 bp, synthetic construct
  source 1..75: mol_type = other DNA
aaactatttttcagggaaggcgtagattttctagaaaaaaaaggtgaatgggttcgtataactgagccatattca

SEQ ID NO: 375966 - DNA, 75 bp, synthetic construct
  source 1..75: mol_type = other DNA
acttgacatttatgtcagagctaaataatccagaagcgggtgagtattcaggaatacttaacgtaacatttactc

SEQ ID NO: 375967 - DNA, 75 bp, synthetic construct
  source 1..75: mol_type = other DNA
aaggtgaaggaattcgcctgatcctgaaaatgggcgggatgacgcgttttgattgtgccctgggtagccatgcca

SEQ ID NO: 375968 - DNA, 75 bp, synthetic construct
  source 1..75: mol_type = other DNA
atatttgcttatctggcactgacgccgaaaggctcgttcctggcgacaattgccggtgttacagtcggcaccctg

SEQ ID NO: 375969 - DNA, 75 bp, synthetic construct
  source 1..75: mol_type = other DNA
tcggaaaaccgtgacgaacggctggtgttaatcaatccggagcttttagaaaaaagcggcgaaacaggcattgaa

SEQ ID NO: 375970 - DNA, 75 bp, synthetic construct
  source 1..75: mol_type = other DNA
atgtcagttttacaagtgttacatattccggacgagcggcttcgcaaagttgctaaaccggtagaagaagtgaat

SEQ ID NO: 375971 - DNA, 75 bp, synthetic construct
  source 1..75: mol_type = other DNA
catcagcgcaaaagcccgtggtctcaccgaccgtcaggcacagcgggagtctgaagagcagcgtcttcgtgacgt

SEQ ID NO: 375972 - DNA, 75 bp, synthetic construct
  source 1..75: mol_type = other DNA
taaaaatttattcaatgaggcggaaatagctcatgccataaaatatgttgagggattgagagaaaaattcatgat

SEQ ID NO: 375973 - DNA, 75 bp, synthetic construct
  source 1..75: mol_type = other DNA
tgtatttcccgtacgtgctgatgaagccgctgactattatcgccatgattgcgggcggtatgtctggcacctgga

SEQ ID NO: 375974 - DNA, 75 bp, synthetic construct
  source 1..75: mol_type = other DNA
cgtttacagcagcagctgcgtaagccagctgaagaactggggcgagagattactcatcagctattcctgctgggc

SEQ ID NO: 375975 - DNA, 75 bp, synthetic construct
  source 1..75: mol_type = other DNA
gaagcatttatggaagtgaaagggcaggatcgctattttgatcgcgcggttcgtcgtttgcagcaacaattgcgc

SEQ ID NO: 375976 - DNA, 75 bp, synthetic construct
  source 1..75: mol_type = other DNA
ggctggtggggcataaatggtttttctcggtgccgcaaagcgatgcgcatctggtgctggcgcagaccacgggcg

SEQ ID NO: 375977 - DNA, 75 bp, synthetic construct
  source 1..75: mol_type = other DNA
tcaaactaacgttgtcagtgcacgtgcgctacatgctgcgctgaatatcgggaaggatttttcgacatggataac

SEQ ID NO: 375978 - DNA, 75 bp, synthetic construct
  source 1..75: mol_type = other DNA
aatgccggtgaacagcatctgggaaggttctggcaatattatgtgcctggatgtattgcgcgttcttaataagca

SEQ ID NO: 375979 - DNA, 75 bp, synthetic construct
  source 1..75: mol_type = other DNA
gtgcactggcaaactcacactgtttttaatcaacctatacccttaaataacagtaatttatacctgtctgatggc

SEQ ID NO: 375980 - DNA, 75 bp, synthetic construct
  source 1..75: mol_type = other DNA
ttgcacggtctgaaacagcttcctggtctggccgtacagcgtctgatgcagcagggttacggctttgcgggcgaa

SEQ ID NO: 375981 - DNA, 75 bp, synthetic construct
  source 1..75: mol_type = other DNA
gtccagggcttcttccgcagccaaccggaagtgaacgatgccatcaccaaagcggcaaaagcgaaaggtgcctac

SEQ ID NO: 375982 - DNA, 75 bp, synthetic construct
  source 1..75: mol_type = other DNA
gtccagggcttctatcgtagccagccagaagtcaatgatgccatcaccaaagcagcaaaagcgaaaggtgcctac

SEQ ID NO: 375983 - DNA, 75 bp, synthetic construct
  source 1..75: mol_type = other DNA
caataagtgataataaggttaatgtattaacgaaaataggtcaaggaatatatgatggtattcgtgggagatatg

SEQ ID NO: 375984 - DNA, 75 bp, synthetic construct
  source 1..75: mol_type = other DNA
aaaattagcgtggcagaattaaccggtgcggaatttatgctctacaccacggttgggggggcacgagttagtggt

SEQ ID NO: 375985 - DNA, 75 bp, synthetic construct
  source 1..75: mol_type = other DNA
ttattggatcaccggcgatgaattttattcgcggcacgatcgatggcgataaattcgttacggaaacgcttaaat

SEQ ID NO: 375986 - DNA, 75 bp, synthetic construct
  source 1..75: mol_type = other DNA
accgggagcattggtattgacagccgggagcagctgaccgaagcgctggtccgcgtcgagggtgagcgcagccgg

SEQ ID NO: 375987 - DNA, 75 bp, synthetic construct
  source 1..75: mol_type = other DNA
ttgttttacggtgtggtgagagacagggaatcgggaggggagtctatgatgacgttggcgcagtggtttgaagag

SEQ ID NO: 375988 - DNA, 75 bp, synthetic construct
  source 1..75: mol_type = other DNA
ctgttagccatctgtattgggctccgtttgggaaacggaaaatattgtacgttaaggctattttttaatcaggtt

SEQ ID NO: 375989 - DNA, 75 bp, synthetic construct
  source 1..75: mol_type = other DNA
gtgcgcgacgttgccgtcaacggcacgcgtctgcaaacgctcaacgacgagcgagagatgcaggctgaacgcgtg

SEQ ID NO: 375990 - DNA, 75 bp, synthetic construct
  source 1..75: mol_type = other DNA
tcaatgtgctggtttgatatgttttactcgccggagctggcgcgacgcgtctataacagtcctttcccgctggtg

SEQ ID NO: 375991 - DNA, 75 bp, synthetic construct
  source 1..75: mol_type = other DNA
ctatgatgacgctggcgcagtggtttgaagagaaagggattgagaaggggattcagcagggaagacaggaggaaa

SEQ ID NO: 375992 - DNA, 75 bp, synthetic construct
  source 1..75: mol_type = other DNA
gccgattctgttttatcagggcgaggccacaccttatccgctctcaatgtgctggtttgatatgttttactcgcc

SEQ ID NO: 375993 - DNA, 75 bp, synthetic construct
  source 1..75: mol_type = other DNA
tttgtaaaatacttctttcctctcgatcgtgaagatttgcttaacctgatggatctcaccaaaaattctcctgat

SEQ ID NO: 375994 - DNA, 75 bp, synthetic construct
  source 1..75: mol_type = other DNA
gttcgttcagtaaaagcattgcgccaggcctgcgcgtgggctgggtcgcgccggggcgttatcacgataaactgc

SEQ ID NO: 375995 - DNA, 75 bp, synthetic construct
  source 1..75: mol_type = other DNA
tcggacagcagccaggtcggttactttaagcgcgtcgatgacgcaacgcactaccaggttaacgttggcaccagc

SEQ ID NO: 375996 - DNA, 75 bp, synthetic construct
  source 1..75: mol_type = other DNA
ttccgcattcaggatatcggcgattctgtctctggcacactacacgtccgtgttgaagaacagaatggtcaggtg

SEQ ID NO: 375997 - DNA, 75 bp, synthetic construct
  source 1..75: mol_type = other DNA
ctgtagctcaggttgccgaagtgaaggcgattcagtttgcggtgggtaagagcggtaaaatatcggtggttgcgt

SEQ ID NO: 375998 - DNA, 75 bp, synthetic construct
  source 1..75: mol_type = other DNA
gattttgggtagcttgctattgcaaggaatgagtcagcaggatcgcagttttgcttctcgcgtgagcatggaaag

SEQ ID NO: 375999 - DNA, 75 bp, synthetic construct
  source 1..75: mol_type = other DNA
ctttaatgtaccgtccacgcaaatggcggcagcaacgtttgtgcaggaaggtcactatcatcgtcatatccggcg

SEQ ID NO: 376000 - DNA, 75 bp, synthetic construct
  source 1..75: mol_type = other DNA
ctacgaatatgacgataatgcggataaggggatgtacctcagcatgagcattccgtggagcgacagcagcaccgt

SEQ ID NO: 376001 - DNA, 75 bp, synthetic construct
  source 1..75: mol_type = other DNA
atatttccctgaactatgtctgtggagaatcatctgaagagattatggcctggtgttatgccagttacttcacat

SEQ ID NO: 376002 - DNA, 75 bp, synthetic construct
  source 1..75: mol_type = other DNA
acagtggtcacgccctgccggtgaagatgcgcggccccggcggtcagtcagtgcgcttacagtggcagcagcacc

SEQ ID NO: 376003 - DNA, 75 bp, synthetic construct
  source 1..75: mol_type = other DNA
tcagcgccagaaattaagcctgttattcaggaccagacgcggcaagtcacaccaacggaagcgccgacgtcaatt

SEQ ID NO: 376004 - DNA, 75 bp, synthetic construct
  source 1..75: mol_type = other DNA
tggtcgctctacggtggtgcgctggcagataaacactatcagtcggcggcgatgggggtggggcgcgacctcgca

SEQ ID NO: 376005 - DNA, 75 bp, synthetic construct
  source 1..75: mol_type = other DNA
ggcgaaggttgatctcagcgccaactaccatgaaggggaataccgttcggcggggatcgccttacagggcggggc

SEQ ID NO: 376006 - DNA, 75 bp, synthetic construct
  source 1..75: mol_type = other DNA
ccgcagcggtcttttctctgctcggcggcaagggacttaacgaacgtgttggttcgacgctggagatagagtccg

SEQ ID NO: 376007 - DNA, 75 bp, synthetic construct
  source 1..75: mol_type = other DNA
gctgtcgctggcaacggtcggcgtgctgattacttctggtttaaccggtatgatggcggcgtggctgtttaatct

SEQ ID NO: 376008 - DNA, 75 bp, synthetic construct
  source 1..75: mol_type = other DNA
actgtcgctggcgacgctgggcgtacttatcacctctggtttaaccggcatgatggcggcgtggctgtttaatct

SEQ ID NO: 376009 - DNA, 75 bp, synthetic construct
  source 1..75: mol_type = other DNA
ggtagccgtagtccttatccctggtctttgtgctggttggacgaatttgccgacccgactactgcacggaagctt

SEQ ID NO: 376010 - DNA, 75 bp, synthetic construct
  source 1..75: mol_type = other DNA
attcataatgatggatatataaaaggggaacagcgcattcttcgattgtttttgcagaatggggcagatcctgaa

SEQ ID NO: 376011 - DNA, 75 bp, synthetic construct
  source 1..75: mol_type = other DNA
ccggcgctcattttgtccgcatggatgattttcttcgcccgtcctctttcgggtatttgccggattgctaccgtt

SEQ ID NO: 376012 - DNA, 75 bp, synthetic construct
  source 1..75: mol_type = other DNA
atttgaacctgatagcgggagggtactgataaatggtatagatatacgccaaattggaataaataattatcaccg

SEQ ID NO: 376013 - DNA, 75 bp, synthetic construct
  source 1..75: mol_type = other DNA
gatcaagtggtatcgaagcactgttccaagatgtgaatgcattacaaaaatggttgctccaatctgatgaatccc

SEQ ID NO: 376014 - DNA, 75 bp, synthetic construct
  source 1..75: mol_type = other DNA
ttatatttttattacttttcattatatcaaacatttactcatgtttatattttattaacaccgggcatttgttag

SEQ ID NO: 376015 - DNA, 75 bp, synthetic construct
  source 1..75: mol_type = other DNA
gtcgaaactgggcgtcagttctgatgcagggttgttggaggccgcagatattctgttatgtatgcggcattgcga

SEQ ID NO: 376016 - DNA, 75 bp, synthetic construct
  source 1..75: mol_type = other DNA
atggtgaattactgtcttatatcattggcgctgacacggctgattggttcattgtcgccatcaccgctggacggt

SEQ ID NO: 376017 - DNA, 75 bp, synthetic construct
  source 1..75: mol_type = other DNA
gtgaaaatatctgtggttttgcagaggaaatggatgaagagtggatggtagaatgtgccagagcaagtcatattc

SEQ ID NO: 376018 - DNA, 75 bp, synthetic construct
  source 1..75: mol_type = other DNA
tctcacgcaccctggcaccgcgcgggattttatggagatccacttacctaaagatttacgtgaactgtgcgatct

SEQ ID NO: 376019 - DNA, 75 bp, synthetic construct
  source 1..75: mol_type = other DNA
tgctcgggttagctgcgctgggctttatcagtcataacaccactgtcgccgtttcaattctggtgttgatcattg

SEQ ID NO: 376020 - DNA, 75 bp, synthetic construct
  source 1..75: mol_type = other DNA
tcgtctcggcatttaaaaaaggtgagcttacacgccatcaagtagtaatgaatcgtaatatggcaaggagtcgag

SEQ ID NO: 376021 - DNA, 75 bp, synthetic construct
  source 1..75: mol_type = other DNA
atacccgtaatggcaatattctggcgaaggttgcggcaccggaatcactggctgtggtgtgtttaacccagcgcg

SEQ ID NO: 376022 - DNA, 75 bp, synthetic construct
  source 1..75: mol_type = other DNA
tgtcgtgatgtattagctccaggtggcagttttgttgtgaaggtgttccagggcgaaggtttcgatgagtatcta

SEQ ID NO: 376023 - DNA, 75 bp, synthetic construct
  source 1..75: mol_type = other DNA
aggtcaaagttcgtaagccggactcttctcgtgctcgttcgcgggaagtgtatatagtagcgaccgggcgtaaac

SEQ ID NO: 376024 - DNA, 75 bp, synthetic construct
  source 1..75: mol_type = other DNA
cgtgatgaactggtgatgaaagcactgctggaacgcgtaggcgacagcaaagtccaggttgtcatgtccgatatg

SEQ ID NO: 376025 - DNA, 75 bp, synthetic construct
  source 1..75: mol_type = other DNA
ggcggcaggagggaggactgctgcgccatcaggcgcagtttcctcacacaccgtcaggtgtgcagggagcgcagg

SEQ ID NO: 376026 - DNA, 75 bp, synthetic construct
  source 1..75: mol_type = other DNA
ggacagctgtccgggggcggacgcaaaattttttgccgggttcatggctaaaaattttgtggccggtgcatctca

SEQ ID NO: 376027 - DNA, 75 bp, synthetic construct
  source 1..75: mol_type = other DNA
cgccatcaggcgcagtttcctcacacaccgtcaggtgtgcagggagcgcaggttacggcgcgacagaggcggcgc

SEQ ID NO: 376028 - DNA, 75 bp, synthetic construct
  source 1..75: mol_type = other DNA
aatcctcagccgtaaaaagctgctggatgacgacaaagagcacttctttatcaacatcagccttgataccgccag

SEQ ID NO: 376029 - DNA, 75 bp, synthetic construct
  source 1..75: mol_type = other DNA
taaacagcgcggtcacggcgatagatgccaaaacgggcgaagtgaaaggacgtctggtgcttgatgagcgtaaac

SEQ ID NO: 376030 - DNA, 75 bp, synthetic construct
  source 1..75: mol_type = other DNA
tacctggcaggcatgaaactcggcgacacaccgctggtggagtacacccgcgaccgcctgcaccgggaaacgctg

SEQ ID NO: 376031 - DNA, 75 bp, synthetic construct
  source 1..75: mol_type = other DNA
gctctaaggcctcccacaacggttttttagcggacttagccaagattttacctttgcatgttacccctctcatcg

SEQ ID NO: 376032 - DNA, 75 bp, synthetic construct
  source 1..75: mol_type = other DNA
atatttttgaacaaaactcatgagaaagatatttcgcgtttaagcattggtaacgaagttaatgaaaaaataatt

SEQ ID NO: 376033 - DNA, 75 bp, synthetic construct
  source 1..75: mol_type = other DNA
ccctctgaggtgctccagccattcagcaaaaacacgaaccagtaaatcctccccacaacgctttcttctttcact

SEQ ID NO: 376034 - DNA, 75 bp, synthetic construct
  source 1..75: mol_type = other DNA
tttaatgcgggagttgcatgagcggtatacgggagaaactatcagaccatgggagctacagaggtgcttaagtct

SEQ ID NO: 376035 - DNA, 75 bp, synthetic construct
  source 1..75: mol_type = other DNA
cctttccataatcggttttgataacatcgacctgacgcaattttgtgatccgccgctgacaaccatcgcgcagcc

SEQ ID NO: 376036 - DNA, 75 bp, synthetic construct
  source 1..75: mol_type = other DNA
ccttctttagcgaaattattcgcggtatcgaagttacggcggcaaatcacggatatctggtgctgattggcgact

SEQ ID NO: 376037 - DNA, 75 bp, synthetic construct
  source 1..75: mol_type = other DNA
aagcaaattgatggcatgttgctgctgggttcaaggctgccgtttgatgccagcattgaggaacagcgtaatctg

SEQ ID NO: 376038 - DNA, 75 bp, synthetic construct
  source 1..75: mol_type = other DNA
acctttatcacgcaacgttttccgcgccataaactggctgatgacgggacgcccgttcgtgccggtcagaatatc

SEQ ID NO: 376039 - DNA, 75 bp, synthetic construct
  source 1..75: mol_type = other DNA
atgatcgctctgatggtggctgaatttattgccatcaatcctgatgcggaactgtatgctattgcgcagggggcc

SEQ ID NO: 376040 - DNA, 75 bp, synthetic construct
  source 1..75: mol_type = other DNA
ctattacgcgggtgaaaccaccccttacgggattatcacggcattcaaagccgcatccgggaaaaacagcaaccc

SEQ ID NO: 376041 - DNA, 75 bp, synthetic construct
  source 1..75: mol_type = other DNA
ctacggtgctttcccttgggcgagccacagctcattgctttaaaccttatccggacacacaaaatttctattacg

SEQ ID NO: 376042 - DNA, 75 bp, synthetic construct
  source 1..75: mol_type = other DNA
tctcgatgaggactacaaggctcctgttggcaaccaaacgctctgcgagctcattatggaacggcggcattggcc

SEQ ID NO: 376043 - DNA, 75 bp, synthetic construct
  source 1..75: mol_type = other DNA
agttgtttgaggcattcggtgatccagaagaagtcacccgagaaatgcttctgggacaggcggaactcattcata

SEQ ID NO: 376044 - DNA, 75 bp, synthetic construct
  source 1..75: mol_type = other DNA
actcgcaattcactttgtaacatccagtataaagatgcagaaaaagaggtgaatgtgttcgtaactcatgagtca

SEQ ID NO: 376045 - DNA, 75 bp, synthetic construct
  source 1..75: mol_type = other DNA
atgattaatctcattctttctgctccagtaaaagaaatgactgaagcatttaagcgagtattcgcaaatgcagac

SEQ ID NO: 376046 - DNA, 75 bp, synthetic construct
  source 1..75: mol_type = other DNA
gtcggcagtatttggcacatatgcatactgtccgggtaattctgtttgccgttatgcggatactaaatatattgg

SEQ ID NO: 376047 - DNA, 75 bp, synthetic construct
  source 1..75: mol_type = other DNA
aacagacgctgtatataacgcaacctgggccgctctgcttgccatctttcagcacaataaacacgcaacgacaga

SEQ ID NO: 376048 - DNA, 75 bp, synthetic construct
  source 1..75: mol_type = other DNA
gattgtgctcgtcgattggtcagacatccgagagcataaacgcatcatggctctgcgcgcctcaatagccttcaa

SEQ ID NO: 376049 - DNA, 75 bp, synthetic construct
  source 1..75: mol_type = other DNA
ccggcatacggctttggcttacgccaaagtcgtaccaacagtccagagcgattcgacatcatcctactgatagcg

SEQ ID NO: 376050 - DNA, 75 bp, synthetic construct
  source 1..75: mol_type = other DNA
cgcggctattgccctgacaagtgttggaatagacctggacgattacgacgaatgcgtcttgcgactacatgaatg

SEQ ID NO: 376051 - DNA, 75 bp, synthetic construct
  source 1..75: mol_type = other DNA
gccttatgttaaaagccattcgtttatatggagcgttcagtatgctcaatgtttgtttcagtaacgacaagctac

SEQ ID NO: 376052 - DNA, 75 bp, synthetic construct
  source 1..75: mol_type = other DNA
tgcaaattcgttagtaacggaagatgctgcagcattagatacaggagagcatttggtagaatatacgcgctcaaa

SEQ ID NO: 376053 - DNA, 75 bp, synthetic construct
  source 1..75: mol_type = other DNA
aaaacaaaagacaggatatcttacgcattcaatggacaaagaacatccccagaagaccaaaaacaaatactgaaa

SEQ ID NO: 376054 - DNA, 75 bp, synthetic construct
  source 1..75: mol_type = other DNA
agaaaagcgaagagcaactcatcaatgagcgtgaccatgctgagtctgctttagctgatatgtactttgcagcaa

SEQ ID NO: 376055 - DNA, 75 bp, synthetic construct
  source 1..75: mol_type = other DNA
ggagacagcaccccaacgatatttaattacacggccaatgttattcaggttggtaacaacgcaccaactgcgggt

SEQ ID NO: 376056 - DNA, 75 bp, synthetic construct
  source 1..75: mol_type = other DNA
aaagtttactgattatattaaacactgtatagaaacgacaaaacacctttcaattcaacagcaaatgaaagttga

SEQ ID NO: 376057 - DNA, 75 bp, synthetic construct
  source 1..75: mol_type = other DNA
accgagtggatgctctatgcgcagaaagtcgaatctacagacacctccagcctgccagtaacgtttccagaacaa

SEQ ID NO: 376058 - DNA, 75 bp, synthetic construct
  source 1..75: mol_type = other DNA
cgcgcctgcgtggttcgttactgttaagttcattgcttgttgcttcttcatttagcgcgcaggcagcagaagaaa

SEQ ID NO: 376059 - DNA, 75 bp, synthetic construct
  source 1..75: mol_type = other DNA
ttccgacgagaataaacaaaaattaacagagtggatgctctttgcgcagaaagtcgaatctacagacacttccgg

SEQ ID NO: 376060 - DNA, 75 bp, synthetic construct
  source 1..75: mol_type = other DNA
gaaggcaacgccaagattattcgtctgatcgcccgtgatgaagctctgcatttgactggcacccagcatatgctg

SEQ ID NO: 376061 - DNA, 75 bp, synthetic construct
  source 1..75: mol_type = other DNA
aaagcagctctctttcttctggcgcccggaagaagttgacgtctcccgcgaccgtatcgattatcaggcgctgcc

SEQ ID NO: 376062 - DNA, 75 bp, synthetic construct
  source 1..75: mol_type = other DNA
gaacgtggcactgctgccgctgatctcgatcccggaactggagacctgggtcgaaacctgggcgttctcagaaac

SEQ ID NO: 376063 - DNA, 75 bp, synthetic construct
  source 1..75: mol_type = other DNA
ctgtgtggcttgcttggtttcgttgcgccagaaacttcgggcggtggttttaacctgattcctatcgcgacagca

SEQ ID NO: 376064 - DNA, 75 bp, synthetic construct
  source 1..75: mol_type = other DNA
gctggtacatactgctgataattacccacttctgttaaccgtcgcttttctttgttcggcggtgctggcaatgtt

SEQ ID NO: 376065 - DNA, 75 bp, synthetic construct
  source 1..75: mol_type = other DNA
tctattcgcgcgccgttaacggggatcattctggttctggaaatgaccgataactaccagctcattttgccaatg

SEQ ID NO: 376066 - DNA, 75 bp, synthetic construct
  source 1..75: mol_type = other DNA
ttaccgggttatcaatatggataagctgaaatcggatatccggggcgggatggttgaagtgctggaaggacaaat

SEQ ID NO: 376067 - DNA, 75 bp, synthetic construct
  source 1..75: mol_type = other DNA
ctacagagtgagcaggaatactctgattgatgctgttcagggaggtaagatggagatcctcgaagggaaattgta

SEQ ID NO: 376068 - DNA, 75 bp, synthetic construct
  source 1..75: mol_type = other DNA
catggtgctggggcgcgaagggccaaccgtgcagatcggcggtaatatcgggcggatggtactcgatgttttccg

SEQ ID NO: 376069 - DNA, 75 bp, synthetic construct
  source 1..75: mol_type = other DNA
ggcgcggacgatcctgagatggcggaaattgccgaagagtgtaagcaggagtgctatgacctgtttgttcaggca

SEQ ID NO: 376070 - DNA, 75 bp, synthetic construct
  source 1..75: mol_type = other DNA
ttacgctgtttatgttctttggtacgttgaaaagcgcgcgcgttctgcaattcgttttcttcagcctgaccgtgc

SEQ ID NO: 376071 - DNA, 75 bp, synthetic construct
  source 1..75: mol_type = other DNA
cacttcgcgggctggataggtctgatctgcggtgccagcgcgatctacctggcaatgggtgaagtgctgaacgag

SEQ ID NO: 376072 - DNA, 75 bp, synthetic construct
  source 1..75: mol_type = other DNA
tctgcggtgccagcgcaatctatctggcgatgggtgaagtactgaacgagcagtttggtcgcaccgttctgccga

SEQ ID NO: 376073 - DNA, 75 bp, synthetic construct
  source 1..75: mol_type = other DNA
aaacgtctcgccagcttattaaccgggcaggggctggcgtttcgtgttcaggattccagcctgcccggacgcccg

SEQ ID NO: 376074 - DNA, 75 bp, synthetic construct
  source 1..75: mol_type = other DNA
atccactctcagtattaagagagatattaattcatgttcttgaatccacggtgacagaagaacgacgtcgattat

SEQ ID NO: 376075 - DNA, 75 bp, synthetic construct
  source 1..75: mol_type = other DNA
ccgttttctgacgtccgcgaggagctgccacgcggtacgtttgcttataccagtgctccgacgatgattattcgt

SEQ ID NO: 376076 - DNA, 75 bp, synthetic construct
  source 1..75: mol_type = other DNA
gaaaaaactggtatgaggaagtaagtaattttcaggcagacacgataaagattgtttacgacgagaataatataa

SEQ ID NO: 376077 - DNA, 75 bp, synthetic construct
  source 1..75: mol_type = other DNA
accgtatcgattatcaggcgctgccagagcacgaaaagcacatctttatcagcaacctgaagtaccagacgcttt

SEQ ID NO: 376078 - DNA, 75 bp, synthetic construct
  source 1..75: mol_type = other DNA
ccggaagaagttgacgtttctcgtgaccgtatcgattaccaggcactgcctgaacacgaaaaacacatctttatc

SEQ ID NO: 376079 - DNA, 75 bp, synthetic construct
  source 1..75: mol_type = other DNA
atgctctttgcgcagaaagtcgaatctacagacacttccagcctgccagtaacgtttcccgaacaaccagaatga

SEQ ID NO: 376080 - DNA, 75 bp, synthetic construct
  source 1..75: mol_type = other DNA
taaatggatgttcaaagatggcgtagtgataaagcgaacttataccgaggaagagcagaggcaacaagcggaaaa

SEQ ID NO: 376081 - DNA, 75 bp, synthetic construct
  source 1..75: mol_type = other DNA
caggcaatccaaaaaccgaagagcaatatcttttaactaaaaactcaggcgtcgtctggttatggaccgaagatg

SEQ ID NO: 376082 - DNA, 75 bp, synthetic construct
  source 1..75: mol_type = other DNA
taacctgattcctatcgctaccgcggggaatttcagcatgggaatgctggtgtttatcttcgtcgctcgggtcat

SEQ ID NO: 376083 - DNA, 75 bp, synthetic construct
  source 1..75: mol_type = other DNA
aagggaattgagaagggaattgagaagggaattgagaagggaattgagaagggaattgagaagggaattgagaag

SEQ ID NO: 376084 - DNA, 75 bp, synthetic construct
  source 1..75: mol_type = other DNA
gtccggaaattctgggaagagcaggacgttgcccagattgaagggattgttgttgatggtgctgtacgtgatgtt

SEQ ID NO: 376085 - DNA, 75 bp, synthetic construct
  source 1..75: mol_type = other DNA
atcagtgccgatattctcaatgtactggatagcaaaaccgctgttgatacaacgaataccggtgtggcgacctac

SEQ ID NO: 376086 - DNA, 75 bp, synthetic construct
  source 1..75: mol_type = other DNA
cagcttgctaaggagactatgagttcattcgggcttggtaaacttaagcagatggccatggaaaaagcctatgac

SEQ ID NO: 376087 - DNA, 75 bp, synthetic construct
  source 1..75: mol_type = other DNA
tcaagagtaataatgcaacaggcatatccacagttaggaattaatccagtagaaagtggttgtgtgggattaact

SEQ ID NO: 376088 - DNA, 75 bp, synthetic construct
  source 1..75: mol_type = other DNA
aaactgaaaaaacagatccagcgttacgatcagcaagatgctttttatgccgccatcaaggcggctgctaatgaa

SEQ ID NO: 376089 - DNA, 75 bp, synthetic construct
  source 1..75: mol_type = other DNA
ctctttccccgaaacgcgaagcaatggaaatcaacggctttaaattttatgcccgtccgatgagcgtacaggaat

SEQ ID NO: 376090 - DNA, 75 bp, synthetic construct
  source 1..75: mol_type = other DNA
tcatagaggcatttaaaaaaggtgagctaacacgccatcaagtagtaatgaatcgtaatatggcaaggagtcgag

SEQ ID NO: 376091 - DNA, 75 bp, synthetic construct
  source 1..75: mol_type = other DNA
ctttagcgataaatatgttcaacaggcacagaaaaaggggttacgttcccgtgcttggtttaaacttgatgaaat

SEQ ID NO: 376092 - DNA, 75 bp, synthetic construct
  source 1..75: mol_type = other DNA
gttgttttgctcagtgataatgagcaatacgaaggtggaaaagctctttggcaacatatcgcccgtcgctcttcc

SEQ ID NO: 376093 - DNA, 75 bp, synthetic construct
  source 1..75: mol_type = other DNA
aagtattcctgaatccgagatatggagtgaacacccagatcgaagtaagcatggggttgttcttgtcgctgaatc

SEQ ID NO: 376094 - DNA, 75 bp, synthetic construct
  source 1..75: mol_type = other DNA
acaacagcactaaatgtccctgatgtaaaagcagctattaatttttacactgaagtaatgaagatggtggtaatt

SEQ ID NO: 376095 - DNA, 75 bp, synthetic construct
  source 1..75: mol_type = other DNA
catccggatgcaaaattggcctcagcaaagattgttaacgcggagtgggatgaccacatgcgggtaacacttgat

SEQ ID NO: 376096 - DNA, 75 bp, synthetic construct
  source 1..75: mol_type = other DNA
gatggcagaacacgcccggaacatgcgcggctgcacaatatggttttccggtatgacgacattttctggcagacg

SEQ ID NO: 376097 - DNA, 75 bp, synthetic construct
  source 1..75: mol_type = other DNA
aaaacaaatcatcgtggatgcagagggaaacgcgaaggtaatcgagctgggcagtccgcgtcgtctggcaaccat

SEQ ID NO: 376098 - DNA, 75 bp, synthetic construct
  source 1..75: mol_type = other DNA
atgaagaaagtttttctttgcgccgccatattagctgctgttagtagcccggctttcgcctcttcattacaggat

SEQ ID NO: 376099 - DNA, 75 bp, synthetic construct
  source 1..75: mol_type = other DNA
acagccgggagcgtcagcttgctttttccctctggcttaaacgtctggcaggatcacgtcagaccggtcatgaaa

SEQ ID NO: 376100 - DNA, 75 bp, synthetic construct
  source 1..75: mol_type = other DNA
atcaggcgctgattcgaaaactggtggaagttcgtgacgcgcagctgcgtgagcaggttgtacaaacgctgaata

SEQ ID NO: 376101 - DNA, 75 bp, synthetic construct
  source 1..75: mol_type = other DNA
ggcgaccactgctgatgccgccctgaaaccggaggatttacagcatctgccgtcgctgatggcaaaaccacaggc

SEQ ID NO: 376102 - DNA, 75 bp, synthetic construct
  source 1..75: mol_type = other DNA
aacagtcatgctgtcgttgtgttcggcatcatgaccgggcttgaggccgtccctgtgtttaccctcgaaaaaaac

SEQ ID NO: 376103 - DNA, 75 bp, synthetic construct
  source 1..75: mol_type = other DNA
gccatgcaccggcatctggaggcggatcacgataagctgccgctggtggtgccgattttgttttatcagggcgag

SEQ ID NO: 376104 - DNA, 75 bp, synthetic construct
  source 1..75: mol_type = other DNA
acgcggtcatactgaacaagcggatttgttttatggtgtgctgagagacagggaaacgggaggggagtctatgat

SEQ ID NO: 376105 - DNA, 75 bp, synthetic construct
  source 1..75: mol_type = other DNA
atgaagaaagtttttctttgcgccatcttagcctccttaagctatccggctatcgcctcatcattgcaggatcaa

SEQ ID NO: 376106 - DNA, 75 bp, synthetic construct
  source 1..75: mol_type = other DNA
tgaaacgtttgtgcgatcggtttgccgcccggagaaaatcagtgcagctccaccgcatccaaaaggcctgcagga

SEQ ID NO: 376107 - DNA, 75 bp, synthetic construct
  source 1..75: mol_type = other DNA
tggcagcacatacacgcagcagctttcaggtctccagcgaaaccaaagagcgttacaaccaatgtacaaatattg

SEQ ID NO: 376108 - DNA, 75 bp, synthetic construct
  source 1..75: mol_type = other DNA
gagcacattcaggttatcaccagcctgaccaacgcactggatgatgagtccgtcatcgagcgtctggcacacacc

SEQ ID NO: 376109 - DNA, 75 bp, synthetic construct
  source 1..75: mol_type = other DNA
gattattgatatcaataacgacgattcgctcgatatcagtatcagcctgaggctcaccgagcgcacactcgtcaa

SEQ ID NO: 376110 - DNA, 75 bp, synthetic construct
  source 1..75: mol_type = other DNA
aagaatatcccggaacccacgccgccggagccggttacccgcccgatggagctgtatatcaatggcgaactggtg

SEQ ID NO: 376111 - DNA, 75 bp, synthetic construct
  source 1..75: mol_type = other DNA
aacttcctcgacagcggcctgtacaccagcctgaccgaacgtctggttgctgcccagcgtcatactgaaaacgaa

SEQ ID NO: 376112 - DNA, 75 bp, synthetic construct
  source 1..75: mol_type = other DNA
aaaattcaggatgccggtctgtcacagatttccgtcactaacagcgcgatcaataacctgccgccagatgtggac

SEQ ID NO: 376113 - DNA, 75 bp, synthetic construct
  source 1..75: mol_type = other DNA
ttggtcgtggtagtgctaaacagtctgcgggcggtgcggcaatcatccacttcctgggtggtatccacgaaatct

SEQ ID NO: 376114 - DNA, 75 bp, synthetic construct
  source 1..75: mol_type = other DNA
cgttacgggaaaagctattcacctttgaggtggatattctgcgtaacgatgtctgtgatatcagcctgaacctgc

SEQ ID NO: 376115 - DNA, 75 bp, synthetic construct
  source 1..75: mol_type = other DNA
ttttattcgcccgcgtacatatggaaacaatgtctcaagcgggcaaataatgagccgagtcaagattgtggttat

SEQ ID NO: 376116 - DNA, 75 bp, synthetic construct
  source 1..75: mol_type = other DNA
gtgaagaatatcccggaacctccgccgccggaaccggtcacccgcccggtggagctttatatcaatggtgaactg

SEQ ID NO: 376117 - DNA, 75 bp, synthetic construct
  source 1..75: mol_type = other DNA
aacgcggtgattgaggatttcagcggcgaccagaatctgctgatggccccggttttgctgtggctgcgggataac

SEQ ID NO: 376118 - DNA, 75 bp, synthetic construct
  source 1..75: mol_type = other DNA
cactgacggcacagtgtccagcgttgaagctgtagcggaacccgatgaacctgaagaaatgtggacggtgaaacg

SEQ ID NO: 376119 - DNA, 75 bp, synthetic construct
  source 1..75: mol_type = other DNA
cactgacggcagtgtgtcgagtgttgaagcggtagcggaacctgatgaacctgaagaaatgtggacggtgaaaag

SEQ ID NO: 376120 - DNA, 75 bp, synthetic construct
  source 1..75: mol_type = other DNA
ctggcgtctatctttgttgaaccggcgaaaatcctgttccttaacaacgccattaaccacggtatcttctcgccg

SEQ ID NO: 376121 - DNA, 75 bp, synthetic construct
  source 1..75: mol_type = other DNA
aggaacaggacggcatcaaatcccacacccacggggggagtgtctcaaatactgaccttggcacgaaaacgacct

SEQ ID NO: 376122 - DNA, 75 bp, synthetic construct
  source 1..75: mol_type = other DNA
gacaaaaatctggcttgatgtgagctggaccgggacgttaacaagcgaatgggctgtacagagcaaaattactgt

SEQ ID NO: 376123 - DNA, 75 bp, synthetic construct
  source 1..75: mol_type = other DNA
acgaccagcgagaagggattcactcagttaagtaacgcgacagacagcgccagtgaagggcaagctgcaacaccg

SEQ ID NO: 376124 - DNA, 75 bp, synthetic construct
  source 1..75: mol_type = other DNA
ggctatccggtgagtaaaacgcagttctatctcgcgagtaaagcgaactctggcgctgatactgcatgcggcatt

SEQ ID NO: 376125 - DNA, 75 bp, synthetic construct
  source 1..75: mol_type = other DNA
tcgcctttgatgggacgcagaatattggtatcagtgcgacggcggtcggggcttactcaaaagccgaaagcgatg

SEQ ID NO: 376126 - DNA, 75 bp, synthetic construct
  source 1..75: mol_type = other DNA
agtaaaggtctggctggacgtttgctggacaggttcactaaccagcgtatggggcgtgcagaccaaaatcacgct

SEQ ID NO: 376127 - DNA, 75 bp, synthetic construct
  source 1..75: mol_type = other DNA
gtacccggaaggcgtgcgcttcggtgaagaagaagatgacattgcccgtctggtgattggtattgctgcccgtaa

SEQ ID NO: 376128 - DNA, 75 bp, synthetic construct
  source 1..75: mol_type = other DNA
acgcactggatgatgagtccgtcatcgagcgtctggcgcacaccaccagcgtagatgaagtactggaactgctgg

SEQ ID NO: 376129 - DNA, 75 bp, synthetic construct
  source 1..75: mol_type = other DNA
caatgctggatcgtgaaaaactgaccccgacctatctgggtgagtctatcgccgtgccgcacggtacggttgaag

SEQ ID NO: 376130 - DNA, 75 bp, synthetic construct
  source 1..75: mol_type = other DNA
cgccatcatggtggggcagacattcgataaagcgcaatatcccctgctggcaaaagcctatccggacggtcgcat

SEQ ID NO: 376131 - DNA, 75 bp, synthetic construct
  source 1..75: mol_type = other DNA
gaatgagaatgccgtggtttattcggtcaccctgggggcagaactgggtgattttgaatttaactgggtgggact

SEQ ID NO: 376132 - DNA, 75 bp, synthetic construct
  source 1..75: mol_type = other DNA
cagcccgatgccatcaataacccggcgttacgggaaaaactatttacctttgaggtggatattctgcgcaacgat

SEQ ID NO: 376133 - DNA, 75 bp, synthetic construct
  source 1..75: mol_type = other DNA
agaggccgacggcgcaatgtacgttgagaacatcccggagccgccaccgccggagccagtgacgcgccctgtcga

SEQ ID NO: 376134 - DNA, 75 bp, synthetic construct
  source 1..75: mol_type = other DNA
aaaattacagcttattaaagcattgaaagaaatttcaggaaatacagagaaggactctcattacgatagacttct

SEQ ID NO: 376135 - DNA, 75 bp, synthetic construct
  source 1..75: mol_type = other DNA
tggagatggcgaatcgtggcgaaggaaagctgctcgatcagttcaataatcccgataacccttacgcccattaca

SEQ ID NO: 376136 - DNA, 75 bp, synthetic construct
  source 1..75: mol_type = other DNA
gtggcgatcatctgcgatcgtggcgatcgctacctttctaccggggtgtttggggaagagcattttagccagggg

SEQ ID NO: 376137 - DNA, 75 bp, synthetic construct
  source 1..75: mol_type = other DNA
atcccatatctggacttatatatacctatcttgaagatctatataacatccatgtaaggatgcgagaaggtacac

SEQ ID NO: 376138 - DNA, 75 bp, synthetic construct
  source 1..75: mol_type = other DNA
ctactacataagaccgcatggaaccaagaaagaataactttattattcaatgaaaaaggagttaagcgagccctg

SEQ ID NO: 376139 - DNA, 75 bp, synthetic construct
  source 1..75: mol_type = other DNA
ttgtctcgttatacactacacggactaggaataactggtgtacatactgaagaaaacctgctaccagctccttca

SEQ ID NO: 376140 - DNA, 75 bp, synthetic construct
  source 1..75: mol_type = other DNA
tgcgatcgtggcgatcgctacctttccaccggcgtgtttggggaagaacactttagccagggggcggggatttaa

SEQ ID NO: 376141 - DNA, 75 bp, synthetic construct
  source 1..75: mol_type = other DNA
accggcaccattaccggtgtgtcacggtttatgcgtgagcaatccaaaccggtgacgattgtcggcctgcagccg

SEQ ID NO: 376142 - DNA, 75 bp, synthetic construct
  source 1..75: mol_type = other DNA
aaggcaagttgcttgaccagttcaacaaccccgataacccctacgcccattacaccaccaccgggccggaaatct

SEQ ID NO: 376143 - DNA, 75 bp, synthetic construct
  source 1..75: mol_type = other DNA
gtagcgatcatctgcgatcgtggcgatcgctacctttccaccggggtgtttggggaagagcattttagtcagggg

SEQ ID NO: 376144 - DNA, 75 bp, synthetic construct
  source 1..75: mol_type = other DNA
gctttatgcgcgagcaatccaaaccggtaacgattgtcggcctacagccggaagagggcagcagcattcccggca

SEQ ID NO: 376145 - DNA, 75 bp, synthetic construct
  source 1..75: mol_type = other DNA
ggcagcaaaccggcgggcgcattacccattttgtctccagcatgggaacaaccggcaccatcaccggcgtgtcac

SEQ ID NO: 376146 - DNA, 75 bp, synthetic construct
  source 1..75: mol_type = other DNA
atggtgattaagtcaattggctttgtcctgctggttagcacctgcgggaatgatgcctgcgatgccatacccgta

SEQ ID NO: 376147 - DNA, 75 bp, synthetic construct
  source 1..75: mol_type = other DNA
ttatgcagacatcaacaatgacagcagctttgatatcagcatcagcctgatgctgaccgagcgaacgctggtcag

SEQ ID NO: 376148 - DNA, 75 bp, synthetic construct
  source 1..75: mol_type = other DNA
aggtcggtgtaagacaacggttatgggaggtaatgaatcaaactcttaataaagaatttaacggcgttgatttat

SEQ ID NO: 376149 - DNA, 75 bp, synthetic construct
  source 1..75: mol_type = other DNA
atggcggttaaattagaagtaattatctataccaatgaaaaaggcgcgactcttacccggattacagggagttat

SEQ ID NO: 376150 - DNA, 75 bp, synthetic construct
  source 1..75: mol_type = other DNA
ccgattctcgagtggcgagctcgctgtcgtttgaaaaggtgtacgtgcttaacgtggtagtgaccgacttcaccg

SEQ ID NO: 376151 - DNA, 75 bp, synthetic construct
  source 1..75: mol_type = other DNA
tgaggtggatattctgcgcaacgatgtctgtgatatcagcttgaacctgcaactgacggaacgtgtgctggtcag

SEQ ID NO: 376152 - DNA, 75 bp, synthetic construct
  source 1..75: mol_type = other DNA
gtcatgggagtaccgctacaccctgaacgtggtgatagaggatttcagcggcgaccagaatctgcttatggcccc

SEQ ID NO: 376153 - DNA, 75 bp, synthetic construct
  source 1..75: mol_type = other DNA
aaattagataaggagagtaaacggaataagccagggaaggcgacaggtaaaggtaaaccagttggtgataaatgg

SEQ ID NO: 376154 - DNA, 75 bp, synthetic construct
  source 1..75: mol_type = other DNA
aaatcaaaaatggcgtatcgacggtaggagtcattgacacatccggaaaacctgtcgttgtggctctggacaaac

SEQ ID NO: 376155 - DNA, 75 bp, synthetic construct
  source 1..75: mol_type = other DNA
tttaccatggggatattattaaacattcagacaatagcctgtcagttgagaacttactgactataagcagaaata

SEQ ID NO: 376156 - DNA, 75 bp, synthetic construct
  source 1..75: mol_type = other DNA
agagcggtgcgtttctatgaacaggtaaagcgtgagaatccgccagtcgaaactggagtatggaaagacgctatt

SEQ ID NO: 376157 - DNA, 75 bp, synthetic construct
  source 1..75: mol_type = other DNA
aaccggagcatggaaagacgctgttgactgggtgctcaaagaggcttgccaagctgtaaacattggcatcaaagg

SEQ ID NO: 376158 - DNA, 75 bp, synthetic construct
  source 1..75: mol_type = other DNA
gctgccagccgcattgtcgtcgacaaagagcattatgaagtcattgcaggcgttaacattccaatgctcgtggaa

SEQ ID NO: 376159 - DNA, 75 bp, synthetic construct
  source 1..75: mol_type = other DNA
caccgtcgccgaagcgcagaaacgcgcctacgccttaatgaccgatatccactgggatgattgcttctgccggaa

SEQ ID NO: 376160 - DNA, 75 bp, synthetic construct
  source 1..75: mol_type = other DNA
tcgcgcaaaacgaaaaggtagatctgaccatcgtcggcccggaagcgccgctggtgattggcgtcgttgacgcgt

SEQ ID NO: 376161 - DNA, 75 bp, synthetic construct
  source 1..75: mol_type = other DNA
actgcaaaacgtcgctatcggcgtgaccgatatcccggcgctgctggacttcgcgcaaaacgaaaagatcgatct

SEQ ID NO: 376162 - DNA, 75 bp, synthetic construct
  source 1..75: mol_type = other DNA
gaagcggaagaactggcacgaattgcactggtatcgctggaagcagagccggtggcaaagattatagctcattac

SEQ ID NO: 376163 - DNA, 75 bp, synthetic construct
  source 1..75: mol_type = other DNA
tggcagaagcgcagaaacgcgcttatgccttaatgaccgatatccattgggacgactgcttctgccggaaagata

SEQ ID NO: 376164 - DNA, 75 bp, synthetic construct
  source 1..75: mol_type = other DNA
gggcacaaaactggcggatgacgagcaggtggtaaccaacggcggacgcgtactgtgcgtcaccgcgctgggtca

SEQ ID NO: 376165 - DNA, 75 bp, synthetic construct
  source 1..75: mol_type = other DNA
gcaaatcaccgcgctgcgcgctcgcctgcagacgatgcagctgcaattgacggcgggcgataatccggaactgaa

SEQ ID NO: 376166 - DNA, 75 bp, synthetic construct
  source 1..75: mol_type = other DNA
cggtgaagttgatggcgatgatccggcagtattcagaccaatacaaaagttaattaacggaacatggtataacgt

SEQ ID NO: 376167 - DNA, 75 bp, synthetic construct
  source 1..75: mol_type = other DNA
tatccagcactgccactgtggcgcttaccgtggataacaccatggttatggccacagtggattacgtgaatgaca

SEQ ID NO: 376168 - DNA, 75 bp, synthetic construct
  source 1..75: mol_type = other DNA
aggatttcctggcccgccataagatccctacggcggaataccagaacttcaccgaggtagaacctgcgctggcgt

SEQ ID NO: 376169 - DNA, 75 bp, synthetic construct
  source 1..75: mol_type = other DNA
gtgatacatccgttggatggaattgggatagtggtgcatataacgccatgattggtggtgcatctgcattaattc

SEQ ID NO: 376170 - DNA, 75 bp, synthetic construct
  source 1..75: mol_type = other DNA
agggtgatcctaatactgatgttaatattttaacaagacataaaaatattcatttaataggacctaaaccttata

SEQ ID NO: 376171 - DNA, 75 bp, synthetic construct
  source 1..75: mol_type = other DNA
gtgcttccagcagaagaagcggaagagctggcacggattgcgctggcatcactggcagcagagccggtggcaaag

SEQ ID NO: 376172 - DNA, 75 bp, synthetic construct
  source 1..75: mol_type = other DNA
ggcagcagtacagttacgtacttctcgaaaacgtagaagctatggttgatgaagcctgccacgctgccatgcttc

SEQ ID NO: 376173 - DNA, 75 bp, synthetic construct
  source 1..75: mol_type = other DNA
ttccacattgcagaacagcaagttgacggcacaagtgactacctcaaggatggagaatggcctgttgataatgga

SEQ ID NO: 376174 - DNA, 75 bp, synthetic construct
  source 1..75: mol_type = other DNA
tgacgatggggaagaaccggcatcgaaagtaacccactggatgccgctaccagaaccgccgcaggaggtgcgcca

SEQ ID NO: 376175 - DNA, 75 bp, synthetic construct
  source 1..75: mol_type = other DNA
cttgaatgggctgcgcagcttgcagaagcaaatcacccacaaactggcgactggctttacgatgacccgctggag

SEQ ID NO: 376176 - DNA, 75 bp, synthetic construct
  source 1..75: mol_type = other DNA
ctgacatgcccgaattcgatggaccaactccggtaactccggatggttggataagctgtagtgagcgaatgccga

SEQ ID NO: 376177 - DNA, 75 bp, synthetic construct
  source 1..75: mol_type = other DNA
ttcggcaccgtcaccgaggcgttagaacttgatacggccaagaatggttacatcctcctggttcaggacgcagag

SEQ ID NO: 376178 - DNA, 75 bp, synthetic construct
  source 1..75: mol_type = other DNA
tattgcgctggtggcgatggctatcgcgctgctgtctacgctttacccttcatggcgcgctgccgccactcaacc

SEQ ID NO: 376179 - DNA, 75 bp, synthetic construct
  source 1..75: mol_type = other DNA
cagtcaaactggacggcgttaatcgcgtcgcacctatcactaccggtgatgtggtactgcaaagcgcgcgcagcg

SEQ ID NO: 376180 - DNA, 75 bp, synthetic construct
  source 1..75: mol_type = other DNA
caacagtgaagtcgacggctatgaaatgctggtgaatattgaggatgcctcgcgtctgatgcgttatccggcagg

SEQ ID NO: 376181 - DNA, 75 bp, synthetic construct
  source 1..75: mol_type = other DNA
aaaaacaactacccaccaagcatccccaacactcaggtcggcgtatatggcgactggtttaatgatggcaatccc

SEQ ID NO: 376182 - DNA, 75 bp, synthetic construct
  source 1..75: mol_type = other DNA
gacaatggggaagaaccggcatcgaaagtaacccactggatgccgctaccggagccgccgcaggaggtgaatcaa

SEQ ID NO: 376183 - DNA, 75 bp, synthetic construct
  source 1..75: mol_type = other DNA
acgccgtatctggtcaatgtgaaacaagctgatctcgaaccggggaaatataatgtcattctcggcgaacaactt

SEQ ID NO: 376184 - DNA, 75 bp, synthetic construct
  source 1..75: mol_type = other DNA
gctcaggacgctacgacagcacaaaaaggaattgtccagctcagtagtgcaaccaacagcgcatctgaaacgctt

SEQ ID NO: 376185 - DNA, 75 bp, synthetic construct
  source 1..75: mol_type = other DNA
ccgccgtaacgctgaaaatagacccttcggtagtgctggcaacccgccagtatgttgatgatcagataatccagg

SEQ ID NO: 376186 - DNA, 75 bp, synthetic construct
  source 1..75: mol_type = other DNA
tatctctggtatatggatttaggcactgtaactaatgctcaacgcagaaccgcagttctcaaggatggattcttt

SEQ ID NO: 376187 - DNA, 75 bp, synthetic construct
  source 1..75: mol_type = other DNA
gccaccaacagcacgtctgaaacgcttgccgcaacaccaaaagcggtaaaagcagcatatgaccttgctaacggg

SEQ ID NO: 376188 - DNA, 75 bp, synthetic construct
  source 1..75: mol_type = other DNA
ctgacgccgggcgtcaggagttggttaatgccaacaaaacaggaacaaataaagttgagattgtttctgttggtt

SEQ ID NO: 376189 - DNA, 75 bp, synthetic construct
  source 1..75: mol_type = other DNA
agtttattcgtggctgggatgacggacgaggtattgatgcaggacgagagatactttcatttcaggaaggcacta

SEQ ID NO: 376190 - DNA, 75 bp, synthetic construct
  source 1..75: mol_type = other DNA
tttaaggtttaaagtcggaagtcgtcattatattattaatttcccctttgaatctgacggtaaaaaaatagagct

SEQ ID NO: 376191 - DNA, 75 bp, synthetic construct
  source 1..75: mol_type = other DNA
gcgcccgtcagacacactcacccgtggagtcagataacgggagtgcctgctgcctcgctgacggcaaaaggcacc

SEQ ID NO: 376192 - DNA, 75 bp, synthetic construct
  source 1..75: mol_type = other DNA
cccaggatgcaacaacgacccgtaaagggatcgtacaactgagcagtgccatcaacagcacgtctgaaacgctgg

SEQ ID NO: 376193 - DNA, 75 bp, synthetic construct
  source 1..75: mol_type = other DNA
gcacctctgaaacgctggccgcaacaccgaaagcggttaaggctgcatatgacctggctaacgggaaatataccg

SEQ ID NO: 376194 - DNA, 75 bp, synthetic construct
  source 1..75: mol_type = other DNA
ggtgatgcttacgctcctggctggcgacgagactacaacacgaaaaatcaacaacctgcatttgctttagggcga

SEQ ID NO: 376195 - DNA, 75 bp, synthetic construct
  source 1..75: mol_type = other DNA
acgcaaccactgcgcggaaagggatagttcagctcagtagcgccaccaacagcacgtctgaaacgcttgcggcaa

SEQ ID NO: 376196 - DNA, 75 bp, synthetic construct
  source 1..75: mol_type = other DNA
gtgagctcatgcatagggagtaatactaattgtaacagcgtccgctttaactttaatttaaataccattttacag

SEQ ID NO: 376197 - DNA, 75 bp, synthetic construct
  source 1..75: mol_type = other DNA
aaccagaacggcgcagatattccgggaaaagataccttcaccaaaaacattggtgcctgccgcgcatatagcgca

SEQ ID NO: 376198 - DNA, 75 bp, synthetic construct
  source 1..75: mol_type = other DNA
gtcagagttttacaccacaacccgcaaaccctctgcgggagatgttggtgcatatacgcaggcagaatgtaactc

SEQ ID NO: 376199 - DNA, 75 bp, synthetic construct
  source 1..75: mol_type = other DNA
acatcgcggcagcagacccgcatacccggtacgcacagaaagccagtccggcattcaccggcacaccaacagcac

SEQ ID NO: 376200 - DNA, 75 bp, synthetic construct
  source 1..75: mol_type = other DNA
gtaattggagggccggattacacaaaagaccctgtagccacgcttgttctgaatcgtgacggtcggggaaataat

SEQ ID NO: 376201 - DNA, 75 bp, synthetic construct
  source 1..75: mol_type = other DNA
ggtggccctgactacaccaccacgccggtggacacgctgattatgaagctggacggcaccgggaacaacgtgatg

SEQ ID NO: 376202 - DNA, 75 bp, synthetic construct
  source 1..75: mol_type = other DNA
gggaaatggaaatccaaaaggtcttactggtgcgttatggcgacggacctcggttggatttactaattttgcatg

SEQ ID NO: 376203 - DNA, 75 bp, synthetic construct
  source 1..75: mol_type = other DNA
ttaacagcagcacaggcatgtggattcatatgcgtgaccagaatgttatttttggacgtaatgcggtatccactg

SEQ ID NO: 376204 - DNA, 75 bp, synthetic construct
  source 1..75: mol_type = other DNA
actattagtggagcgtcaacattgattcttcactttaatatgaatgcggggagttgcccggcggttcagttccgt

SEQ ID NO: 376205 - DNA, 75 bp, synthetic construct
  source 1..75: mol_type = other DNA
cggatgaagccgggcgttatacaatggacgtcgagtatggtcagtacagcgtcagtctgttggtggaggggttcc

SEQ ID NO: 376206 - DNA, 75 bp, synthetic construct
  source 1..75: mol_type = other DNA
aaatcaggcttctggcgcattacagaaaaaccagaacggcgcagatattccaggaaaagataccttcacaaaaaa

SEQ ID NO: 376207 - DNA, 75 bp, synthetic construct
  source 1..75: mol_type = other DNA
tacggttacgttgctggcgaacatgtacatgaggccaagtgtttgggtgttgttaaacacagcataattcacagc

SEQ ID NO: 376208 - DNA, 75 bp, synthetic construct
  source 1..75: mol_type = other DNA
gggtctataacgcagacattggtgacgcatcgacattaatcctccacttcaatatgaatacgggagctgccctgc

SEQ ID NO: 376209 - DNA, 75 bp, synthetic construct
  source 1..75: mol_type = other DNA
ggctgcgacaccgaaagcggttaaggcggtaatggatgaaacaaataagaaagccccattaaacagcccggcgct

SEQ ID NO: 376210 - DNA, 75 bp, synthetic construct
  source 1..75: mol_type = other DNA
ttccatgcgatggaagagcaacagcgcagtgataaggcatcactggaaaccctgacccgcgaactgactgaactg

SEQ ID NO: 376211 - DNA, 75 bp, synthetic construct
  source 1..75: mol_type = other DNA
cacacgaccgcaccggagctgccgcgtctgctggccagcatgccggtaccgcccggcacggtcagcgagctgcag

SEQ ID NO: 376212 - DNA, 75 bp, synthetic construct
  source 1..75: mol_type = other DNA
ggcgttacaccctgacgcttcaggatgaccgtagcagtgaacgggttgagcgtgtgctgacgggggtgtcatcgc

SEQ ID NO: 376213 - DNA, 75 bp, synthetic construct
  source 1..75: mol_type = other DNA
atgatgcaacgttgtgaagaagttggctgccagaatcatggcaatgccgaagtcgctcatagcgaatcacactga

SEQ ID NO: 376214 - DNA, 75 bp, synthetic construct
  source 1..75: mol_type = other DNA
tctctgggttacatgatgcaacgttgtgaagaacctggttgccagaatcatggtaatgccgaagtcgctcatagc

SEQ ID NO: 376215 - DNA, 75 bp, synthetic construct
  source 1..75: mol_type = other DNA
gtagtctggggatgttatgggtggaaaacgccgtcactctgctggtattgcggttcgtgcaagctgtgggggtct

SEQ ID NO: 376216 - DNA, 75 bp, synthetic construct
  source 1..75: mol_type = other DNA
ttctcatatggtattaggactaccaaacatccttgatgtcatattatgtaaagatattgataacacatgcaggaa

SEQ ID NO: 376217 - DNA, 75 bp, synthetic construct
  source 1..75: mol_type = other DNA
agtttgcaattaacggtgatggcgcacatcaactgaactatatcgccagctacgtgcctattcgcgccgatgcaa

SEQ ID NO: 376218 - DNA, 75 bp, synthetic construct
  source 1..75: mol_type = other DNA
gcctgctgcctctttccttttcgtcattcgcggcaaccacggatttagggccgaaaggaacattgaaattcaccc

SEQ ID NO: 376219 - DNA, 75 bp, synthetic construct
  source 1..75: mol_type = other DNA
tggccggagtggagaacgggtggaaagtgtgctgacggaggcgtcatcccgtctgcgtggcgatctgctgagaaa

SEQ ID NO: 376220 - DNA, 75 bp, synthetic construct
  source 1..75: mol_type = other DNA
tgttctttgccgggcagctaagcgctgtccgcctttgcgccgtgatggccctggtctccggaacctggtcctcac

SEQ ID NO: 376221 - DNA, 75 bp, synthetic construct
  source 1..75: mol_type = other DNA
aacgttttagaaacaatattttgtgaagatatcgataaaacctgcaaaaaaataataacattagtagatgttttg

SEQ ID NO: 376222 - DNA, 75 bp, synthetic construct
  source 1..75: mol_type = other DNA
cgacctgggctgcgggcttcattagccatgtgtcgctggtcgaaatcctgatcccattctgtgtgatggcgattg

SEQ ID NO: 376223 - DNA, 75 bp, synthetic construct
  source 1..75: mol_type = other DNA
gatgatgtgcgcacggatgctcagccaggagtcgctgcgtaaacagaaccgcttctcccgtgcctcggagaaaat

SEQ ID NO: 376224 - DNA, 75 bp, synthetic construct
  source 1..75: mol_type = other DNA
catctcctttaacgtgccggatgactattcactgggcgatgctgtacaggcaattattgacactgagaaaacgct

SEQ ID NO: 376225 - DNA, 75 bp, synthetic construct
  source 1..75: mol_type = other DNA
ggcgctcagcacgctgctgcttagcgttctcttgtgggtgttcattccgaaaggtttcttcccggtacaggacaa

SEQ ID NO: 376226 - DNA, 75 bp, synthetic construct
  source 1..75: mol_type = other DNA
caggagtcgctgcgtaaacagaaccgcttctcccgcgcctcggaaaaaatgttcgacaggataatcgccgcctat

SEQ ID NO: 376227 - DNA, 75 bp, synthetic construct
  source 1..75: mol_type = other DNA
ccagatgcaatccgccgaagagtatcgccagctaatcatcgcctaccagaacggcgcgccgattcgtctgggcga

SEQ ID NO: 376228 - DNA, 75 bp, synthetic construct
  source 1..75: mol_type = other DNA
gcggtgcaaagtttgacctcgtttgttggcgttgacggcactaacccatcgctgaacagtgcgcgtttgcagatc

SEQ ID NO: 376229 - DNA, 75 bp, synthetic construct
  source 1..75: mol_type = other DNA
ggtgtgcgcttcggtgaagaagaagatgacattgcccgtctggtgattggtattgctgcccgtaacaacgagcac

SEQ ID NO: 376230 - DNA, 75 bp, synthetic construct
  source 1..75: mol_type = other DNA
gggtgtgtgtgcggcgatggctgtctccttcgttgtctctgctattttgctgaaaaccagcaaagtgaaagaaga

SEQ ID NO: 376231 - DNA, 75 bp, synthetic construct
  source 1..75: mol_type = other DNA
gctctcggttacatgatgcaacgcagtgaagaagtggattgccagagccatggcaatgccgaagtggcgcatagc

SEQ ID NO: 376232 - DNA, 75 bp, synthetic construct
  source 1..75: mol_type = other DNA
agtatcgcgtggtgctggaacacaacaccgaaaataccccaggcctcgcggcgctggataccattcgcctgacca

SEQ ID NO: 376233 - DNA, 75 bp, synthetic construct
  source 1..75: mol_type = other DNA
tgagctggaatttgaagacctgcctgaaaccgtgttcaccgccctcgaccgaaaaggtgaaatccatttttggcc

SEQ ID NO: 376234 - DNA, 75 bp, synthetic construct
  source 1..75: mol_type = other DNA
tctggttgctgcccagcgccatactgaaaacgaagtgaaagtgaaagacagtctgaaagacagctttgacgattc

SEQ ID NO: 376235 - DNA, 75 bp, synthetic construct
  source 1..75: mol_type = other DNA
aacgcatgaacaaattgacagcctgtcacaagacgtaacccaaacgcagcaacagttaaccaacacccaaaaacg

SEQ ID NO: 376236 - DNA, 75 bp, synthetic construct
  source 1..75: mol_type = other DNA
cgccagccgtatgttgacaatgatttctcgccaggtgccagacattctcaaagcggcgtacaacttcggcggctt

SEQ ID NO: 376237 - DNA, 75 bp, synthetic construct
  source 1..75: mol_type = other DNA
agcctgaatggtttccgtgttatcgaggccatgtggacataccctggtgtgtataacgctgataaccctctcagt

SEQ ID NO: 376238 - DNA, 75 bp, synthetic construct
  source 1..75: mol_type = other DNA
aagaagcatgcgccagtcggataaggccagcccataccacatgatggaatctgaatatgacgaagaagagcacga

SEQ ID NO: 376239 - DNA, 75 bp, synthetic construct
  source 1..75: mol_type = other DNA
ctgcaggctcaatctcaggagcacatgtcagcagtatcgagcatcccgctcgtcaaactactgggcattactcca

SEQ ID NO: 376240 - DNA, 75 bp, synthetic construct
  source 1..75: mol_type = other DNA
cgcacccgcgacagcgtcagcgacatgattcactcctactcgataccggttttcggtacggatatgagccagatc

SEQ ID NO: 376241 - DNA, 75 bp, synthetic construct
  source 1..75: mol_type = other DNA
cgtcagcgccggcggtaccggacaaacaacctgaaccacagccaccggaaattaacgatgaggtgatcgcttccg

SEQ ID NO: 376242 - DNA, 75 bp, synthetic construct
  source 1..75: mol_type = other DNA
ccgccgaaaaattacgctgcgacaccgtcgtgacggtaccgaataactttacgcccccgaaaacagtgagggcgt

SEQ ID NO: 376243 - DNA, 75 bp, synthetic construct
  source 1..75: mol_type = other DNA
cgcactgctgctgtatatggcctggctgggctaccgactagccgaaatggcgcagtttaaagtgacacaaattct

SEQ ID NO: 376244 - DNA, 75 bp, synthetic construct
  source 1..75: mol_type = other DNA
ctgcgtgttgctttatatggcctggctgggctaccggctggcggaaatggcgcagtttaaagtgacacaaatact

SEQ ID NO: 376245 - DNA, 75 bp, synthetic construct
  source 1..75: mol_type = other DNA
tcaccttatctggtcaatgtgagccagtccgtattacaaccgggtgagtataatgtcattcttggtgaacagatt

SEQ ID NO: 376246 - DNA, 75 bp, synthetic construct
  source 1..75: mol_type = other DNA
cccgccgaaaaattacgctgcgacaccgtcgtgacggtgccgggttactttacgcttcccgaaaacagtgagggc

SEQ ID NO: 376247 - DNA, 75 bp, synthetic construct
  source 1..75: mol_type = other DNA
cctggtatcagttctttaatagcctcttgcaggacagtgcttatgaaatgttaccaaagccctgctttgaggttt

SEQ ID NO: 376248 - DNA, 75 bp, synthetic construct
  source 1..75: mol_type = other DNA
tcgaaatcgaagacgactacgaagacgatgaccagcgggaagaagaaatcgacgcagcaaacgctgagagcaatt

SEQ ID NO: 376249 - DNA, 75 bp, synthetic construct
  source 1..75: mol_type = other DNA
tacgctgaacccgataaccaatcaagcgcagctcgaccgcgacaacgggcaggataccgccattcagaacgcgca

SEQ ID NO: 376250 - DNA, 75 bp, synthetic construct
  source 1..75: mol_type = other DNA
tgactttatgatgatgtcagcgggagcgggaaccttcaacggtgaatctgcggtgtctgtcggaacatcttttaa

SEQ ID NO: 376251 - DNA, 75 bp, synthetic construct
  source 1..75: mol_type = other DNA
aaattcagcgtctggcgcaagactcaacacaaacgcatgaacaaattgacagcctgacacaagacgtaacccaaa

SEQ ID NO: 376252 - DNA, 75 bp, synthetic construct
  source 1..75: mol_type = other DNA
aacgcataccgtgattaaagccggtgtctctgcggatacacaatctgatttcggcgcgggtgtcggcgtgggata

SEQ ID NO: 376253 - DNA, 75 bp, synthetic construct
  source 1..75: mol_type = other DNA
cgcaatctgcaattgatgcgaacaagggagctattgctgatactcagaaagatgtcgcagatgttaaagcaagcg

SEQ ID NO: 376254 - DNA, 75 bp, synthetic construct
  source 1..75: mol_type = other DNA
gcacatgcccagtcaacggctgaccatgccaacgctaacgccaacaccgctctgatgaacggcgtcaaactttcc

SEQ ID NO: 376255 - DNA, 75 bp, synthetic construct
  source 1..75: mol_type = other DNA
agcctgacacaagacgcaacccaaacgcatcagcagttaagcaacacgcaaaaacgggtcgcagataacagccaa

SEQ ID NO: 376256 - DNA, 75 bp, synthetic construct
  source 1..75: mol_type = other DNA
gagccctgacttctacaaaccgacagaatggtttgtgatggctaagacggtcaatgccagccgtatgatggactt

SEQ ID NO: 376257 - DNA, 75 bp, synthetic construct
  source 1..75: mol_type = other DNA
gctcgctcaaaagcctgagtatcgcaagatggtgggaaccatcgctgaagagatgacccgtaagtggataaagct

SEQ ID NO: 376258 - DNA, 75 bp, synthetic construct
  source 1..75: mol_type = other DNA
atagatacccaccaggcaacgcagcagcatatcgacagcgtgcaatacggggagcaaattcagcgtctggcacaa

SEQ ID NO: 376259 - DNA, 75 bp, synthetic construct
  source 1..75: mol_type = other DNA
atgccggaacgcatacggtacttaaagccggtatttctgcggatacgcaatctgatttcggcgcaggtgtcggcg

SEQ ID NO: 376260 - DNA, 75 bp, synthetic construct
  source 1..75: mol_type = other DNA
atcagagcatgatcaacgcccgacagtctacggtaactgatgcccagcaaacgcaaattacagagcaacaggcgc

SEQ ID NO: 376261 - DNA, 75 bp, synthetic construct
  source 1..75: mol_type = other DNA
ttctggcttggtttggtgacgccgatcggcatcaaatgcagcatgtatcttgtggggagcttctttgatttcccg

SEQ ID NO: 376262 - DNA, 75 bp, synthetic construct
  source 1..75: mol_type = other DNA
ggcgtgtctgaccgtgagatgaactggaagcagtatctctgtgccattctcggcctgaacatgctggggctggca

SEQ ID NO: 376263 - DNA, 75 bp, synthetic construct
  source 1..75: mol_type = other DNA
tgtttgcggtcgtgactacggcggcttcctgtggcgcggtgattgcgatgcatgattcgtttaccgctctcggtg

SEQ ID NO: 376264 - DNA, 75 bp, synthetic construct
  source 1..75: mol_type = other DNA
gatgaagcggaatattgcgaccgcatcggcctggtgtaccgcgggaaattaatcgccagcggcacgccggacgat

SEQ ID NO: 376265 - DNA, 75 bp, synthetic construct
  source 1..75: mol_type = other DNA
acgatgagcaacccgatcccaccatggagcaagcctttattcagttgatccacgactgggataaggagcatagca

SEQ ID NO: 376266 - DNA, 75 bp, synthetic construct
  source 1..75: mol_type = other DNA
atgaaccggatattctgtttctcgacgaaccgacttccggcgttgaccccctcacccgccgtgaattttggctgc

SEQ ID NO: 376267 - DNA, 75 bp, synthetic construct
  source 1..75: mol_type = other DNA
tattctgatttaccccatgatttgaaaattggtctgcgttccttatcaagttcagccgcaatctactcgggtttg

SEQ ID NO: 376268 - DNA, 75 bp, synthetic construct
  source 1..75: mol_type = other DNA
agatcataattgcgatggcagacgtactgttgagatccacaaactagatctctcagactggcaagcattcaataa

SEQ ID NO: 376269 - DNA, 75 bp, synthetic construct
  source 1..75: mol_type = other DNA
aaaaattctttttcggtttgcgacgcccgcctttgttgcggttagcgacgttcggattaaggtctgcctcgttgc

SEQ ID NO: 376270 - DNA, 75 bp, synthetic construct
  source 1..75: mol_type = other DNA
aggtgcgctgcaaaactttctgccctatcaggcggtgaataccgttgaaggagcgcaacagctgttacccatggg

SEQ ID NO: 376271 - DNA, 75 bp, synthetic construct
  source 1..75: mol_type = other DNA
aaaatatcaagatattcacactagcgtttacgctcaccgtggtacttattcagctatcccgtttaatttcgccac

SEQ ID NO: 376272 - DNA, 75 bp, synthetic construct
  source 1..75: mol_type = other DNA
tcggcaccgaatacctcgaattttgccgaggtgccaaatttaaccccctcaaccgcttcaaagccgagccgggca

SEQ ID NO: 376273 - DNA, 75 bp, synthetic construct
  source 1..75: mol_type = other DNA
atgagagaattaaacttcccactacagatttttattgataacgacaccgctatgatggtgcaaagcttcactgat

SEQ ID NO: 376274 - DNA, 75 bp, synthetic construct
  source 1..75: mol_type = other DNA
aacaaatacagcgttagccctgaaaaatatctcaaggcggctatagcaattttgtacagcgataatattctggtg

SEQ ID NO: 376275 - DNA, 75 bp, synthetic construct
  source 1..75: mol_type = other DNA
taaagctaatggctgagcactcagacgaaattgaagactttattcaggaaattgaaactggtgaaccgcgtttta

SEQ ID NO: 376276 - DNA, 75 bp, synthetic construct
  source 1..75: mol_type = other DNA
aataaatacagcattagccctgaaaaatatctcaaggcggctatagcaattttgtatagcgacagtattttggtg

SEQ ID NO: 376277 - DNA, 75 bp, synthetic construct
  source 1..75: mol_type = other DNA
gtggagtttaacgagcctcgaatgatgctaccaattgcagattcgaacatgaaaagattgattatcgagcaaacg

SEQ ID NO: 376278 - DNA, 75 bp, synthetic construct
  source 1..75: mol_type = other DNA
atgaacaattacgaattacagatttttgttgatagcgacaccgctcttatgattcaggctttcagtgattccggt

SEQ ID NO: 376279 - DNA, 75 bp, synthetic construct
  source 1..75: mol_type = other DNA
aacaaacttagtgtcagcccagagcaatttttgaaaggtgctgtgacaatcctgtacgctgacaatattttggtg

SEQ ID NO: 376280 - DNA, 75 bp, synthetic construct
  source 1..75: mol_type = other DNA
atgaataatttcccactacagatttttattgataccgacaccgctatgatgattcaggctttcagtgattccggt

SEQ ID NO: 376281 - DNA, 75 bp, synthetic construct
  source 1..75: mol_type = other DNA
tatgatgattcaggctttcactgatgtaggtgttagcattgactttgacaggctgttaaggctaatggctgataa

SEQ ID NO: 376282 - DNA, 75 bp, synthetic construct
  source 1..75: mol_type = other DNA
aatttttgaaaggtgctgtgacaatcctgtacagcgataatattctggtgacggattctgtgagggttcaccaat

SEQ ID NO: 376283 - DNA, 75 bp, synthetic construct
  source 1..75: mol_type = other DNA
atgagcaattacgaattacagattttcgttgataacgacaccgctatgatggtgcaaagcttcattgatgcaggt

SEQ ID NO: 376284 - DNA, 75 bp, synthetic construct
  source 1..75: mol_type = other DNA
atgagagaattaaacttcccgctacagattttcgttgataacgacaccgctatgatggtgcaaagcttcgttgat

SEQ ID NO: 376285 - DNA, 75 bp, synthetic construct
  source 1..75: mol_type = other DNA
atgaacaacttcccaatgcaaattttcgttgataacgacaccgccatgatggtgcaaagcttcattgatgcaggt

SEQ ID NO: 376286 - DNA, 75 bp, synthetic construct
  source 1..75: mol_type = other DNA
ctttccgctatggaaaccgcgtttgccactttcaaacaggaactgaccggcaaggttgaagaaaccagccaggca

SEQ ID NO: 376287 - DNA, 75 bp, synthetic construct
  source 1..75: mol_type = other DNA
gaaagtcagtcagtctttcagaaaacaggctgatgctgctgagcagagtctgagccgacaggcgctggctgcaca

SEQ ID NO: 376288 - DNA, 75 bp, synthetic construct
  source 1..75: mol_type = other DNA
ccgtttttctgaagaggcagcgcgggtaaaaaaagagctgggtgaaaccagtgcgcttgctgatttgatgtccgg

SEQ ID NO: 376289 - DNA, 75 bp, synthetic construct
  source 1..75: mol_type = other DNA
tcttcctgcaaccaacgcaggatctgactattgatactcaggtcagccgcacccagtaccagtttaccttgcagg

SEQ ID NO: 376290 - DNA, 75 bp, synthetic construct
  source 1..75: mol_type = other DNA
cgggccttattgcgttcactgaccctgaccggaggggctgctgccaccacaacggcagaattgtggaaaatggcc

SEQ ID NO: 376291 - DNA, 75 bp, synthetic construct
  source 1..75: mol_type = other DNA
ggtgtatgagatggcccgtaaaggtgcgcaggatgagctccggctgcagttgcgtgatggcggtctgttatcggg

SEQ ID NO: 376292 - DNA, 75 bp, synthetic construct
  source 1..75: mol_type = other DNA
aacattatctccaccgctgacagcattcgtcagatgctgccgcagctcactgagagtctgccgaaatcggtaaaa

SEQ ID NO: 376293 - DNA, 75 bp, synthetic construct
  source 1..75: mol_type = other DNA
acgtcgtccgttaggtatcggcatggtcggcggcctgattgtcagccaggtgctgacgctgttcaccacgccggt

SEQ ID NO: 376294 - DNA, 75 bp, synthetic construct
  source 1..75: mol_type = other DNA
caggcgattgccgccctcggcctgaccagcgaaaccgtacgcaccgctattaccggcgctaacgttaactcggca

SEQ ID NO: 376295 - DNA, 75 bp, synthetic construct
  source 1..75: mol_type = other DNA
caggcgattgccgccctcggcctgaccagcgaaaccgtgcgcaccgccattaccggagctaacgtcaactcggca

SEQ ID NO: 376296 - DNA, 75 bp, synthetic construct
  source 1..75: mol_type = other DNA
cgccagttgattatcgcctaccagaacggcgcgccgattcgtctgggcgatgtcgcaaccgtagagcaaggtgca

SEQ ID NO: 376297 - DNA, 75 bp, synthetic construct
  source 1..75: mol_type = other DNA
gaatgttcagcgccagcccggtgctaacattatctccaccgccgacagcattcggcagatgctgccacagctcac

SEQ ID NO: 376298 - DNA, 75 bp, synthetic construct
  source 1..75: mol_type = other DNA
cgtctgatgcgcggctatgcggaaggtggttatgtgggtggtgccggaagtccggcgcagatgcggcgggcggaa

SEQ ID NO: 376299 - DNA, 75 bp, synthetic construct
  source 1..75: mol_type = other DNA
cgaaagcagaacaactgattgagcagggcattattactgacggcatgatagtgaaagtgaacgcggcgctggatg

SEQ ID NO: 376300 - DNA, 75 bp, synthetic construct
  source 1..75: mol_type = other DNA
atgggcgaagaaacatcagatgcggccgtaggtttgtttctcggtgacggcgacagcgtcaaagtgacccagctt

SEQ ID NO: 376301 - DNA, 75 bp, synthetic construct
  source 1..75: mol_type = other DNA
gcgtgcaacaggcgtcagcaaaggtccggggcagcaggaagccgtcaggagcgctgcgtcggctgaagagctgac

SEQ ID NO: 376302 - DNA, 75 bp, synthetic construct
  source 1..75: mol_type = other DNA
ttcgcatcggcgtcgagggtgacacctgcgatggccgcattatcagcggtaacgatattcaggaaatagccgaat

SEQ ID NO: 376303 - DNA, 75 bp, synthetic construct
  source 1..75: mol_type = other DNA
atacattgctggaaaacggttatctgccggtggtcagctcgattggcgtaacagacgaagggcaactgatgaacg

SEQ ID NO: 376304 - DNA, 75 bp, synthetic construct
  source 1..75: mol_type = other DNA
gacgcctgcggatcagatagacattatcactggagcactggcgggaacggcaaataaaaccctgctggcatgggc

SEQ ID NO: 376305 - DNA, 75 bp, synthetic construct
  source 1..75: mol_type = other DNA
gaaaggtaaaaatcgcacatcccggcaaacgcgctctgccggggagagggaggaagagcaggcaagggaagcgct

SEQ ID NO: 376306 - DNA, 75 bp, synthetic construct
  source 1..75: mol_type = other DNA
ggctgcggcggcgaacttccatttcgcgaccgggggatttacggggacggggggtaaatatgaacctgcggggat

SEQ ID NO: 376307 - DNA, 75 bp, synthetic construct
  source 1..75: mol_type = other DNA
ttattgatttgagtctggatgcggcccggttcgatgaacagatggcccgggtcaggcgtcatttttccgggatgg

SEQ ID NO: 376308 - DNA, 75 bp, synthetic construct
  source 1..75: mol_type = other DNA
gcgtgcaacaggcgtcagcaaaggtccggggcagcaggaagccgtcaggatcgcggcgtcggctgaagagctgac

SEQ ID NO: 376309 - DNA, 75 bp, synthetic construct
  source 1..75: mol_type = other DNA
gcgtgcaacaggcgtcagcaaaggtccggggcagcagtaagccgtcaggaccgccgcgtcggctgaagagctgac

SEQ ID NO: 376310 - DNA, 75 bp, synthetic construct
  source 1..75: mol_type = other DNA
ggccgcgcttgctgctgccgcctggcaggcagagcaggctgaccgggccttattgcgttcactgaccctgaccgg

SEQ ID NO: 376311 - DNA, 75 bp, synthetic construct
  source 1..75: mol_type = other DNA
tataaacgaagtgagagaaatactgtataacaataagataagggactttaatattataacatcattgaatgcaaa

SEQ ID NO: 376312 - DNA, 75 bp, synthetic construct
  source 1..75: mol_type = other DNA
ggactgagcagtaatttatataatgagcagatttatgtcccactaaaaacaatgtttagactcaaaatgagcaac

SEQ ID NO: 376313 - DNA, 75 bp, synthetic construct
  source 1..75: mol_type = other DNA
ttagctgcagccacaaaagtccgtgaaataaaagaagctcactcaagggctataggtactgcaaaaaatagaccg

SEQ ID NO: 376314 - DNA, 75 bp, synthetic construct
  source 1..75: mol_type = other DNA
cattcaacatgacaactttgcactattatctaaaggaggctctccttaacatcatagaaaatagaagacagaatt

SEQ ID NO: 376315 - DNA, 75 bp, synthetic construct
  source 1..75: mol_type = other DNA
tgcaggagtaataatgcatattattaagtattttttagatgtaacaataagtattaggacaacaatgattacaat

SEQ ID NO: 376316 - DNA, 75 bp, synthetic construct
  source 1..75: mol_type = other DNA
gataagtacaatggcaatgttgctattgttaatgaatctagtccgtttttcagtaagaaacaaatatttattaat

SEQ ID NO: 376317 - DNA, 75 bp, synthetic construct
  source 1..75: mol_type = other DNA
ttccggtaaaagctttcctgccagctgcaacaatgttgaaaatgccagccaactgcatgaagtatggcaaaaagg

SEQ ID NO: 376318 - DNA, 75 bp, synthetic construct
  source 1..75: mol_type = other DNA
ccgtgtgggggagcgatttgccatgcttgaggcggcgttagtgttgtccggtcatattactggctggggtgtaca

SEQ ID NO: 376319 - DNA, 75 bp, synthetic construct
  source 1..75: mol_type = other DNA
ttgctaacgaggctgaagcacacaaccacgggcttttaccactggatgagataggacaggcagcaagcgcccgtg

SEQ ID NO: 376320 - DNA, 75 bp, synthetic construct
  source 1..75: mol_type = other DNA
cagcacagctacaatgcgtggttgcgtgagttcggcacggggaacaaagagcaccagcagattattgagcagacg

SEQ ID NO: 376321 - DNA, 75 bp, synthetic construct
  source 1..75: mol_type = other DNA
tatccgcgccgcttattggcctggtgggtgctgatggtttcggcgtccatttgttcgagcagtcgagcgccggta

SEQ ID NO: 376322 - DNA, 75 bp, synthetic construct
  source 1..75: mol_type = other DNA
cgcgtggccatgaagatattaccagggcgatcccctgtgctgatatcggtgagcgcgacggctggcgctcactta

SEQ ID NO: 376323 - DNA, 75 bp, synthetic construct
  source 1..75: mol_type = other DNA
agcgtttctgaaagaacctgagccgccaaagggatttcgcgatctgcttgataaactgccgcagtttaagcagat

SEQ ID NO: 376324 - DNA, 75 bp, synthetic construct
  source 1..75: mol_type = other DNA
gcatgtcgcctaagagtcttgagacagtacaggacaatatgctaaatagtcagcactggtattcagatgtattac

SEQ ID NO: 376325 - DNA, 75 bp, synthetic construct
  source 1..75: mol_type = other DNA
gcccgggcaatcgagttgattaccgcatctgaagacattcagtcgcaggacccgcttactcttcagttaaaagat

SEQ ID NO: 376326 - DNA, 75 bp, synthetic construct
  source 1..75: mol_type = other DNA
tatatcgatcctggtgagatggcgccggaagggccgtatggtgaccacacaggttactataatgaagtcgatagt

SEQ ID NO: 376327 - DNA, 75 bp, synthetic construct
  source 1..75: mol_type = other DNA
atggatcgcttattgatagttggtaatgccgatatatggaagggaaataataaagagctgccattaggctccgtt

SEQ ID NO: 376328 - DNA, 75 bp, synthetic construct
  source 1..75: mol_type = other DNA
aagtgtgctgcctgacttaattgacctgttcgacccatcctgcaaacagatggctcaaaattatggtatcactct

SEQ ID NO: 376329 - DNA, 75 bp, synthetic construct
  source 1..75: mol_type = other DNA
ctggatactgaaacagaatcatatccaaacattgaagtcagcggggaggtggtcccggttgcagatgctcatgga

SEQ ID NO: 376330 - DNA, 75 bp, synthetic construct
  source 1..75: mol_type = other DNA
ccgccaaaaggtttccgcgacctgtttgataaactgccgcagtttaagcaagtattgaacatgccgacaaagcga

SEQ ID NO: 376331 - DNA, 75 bp, synthetic construct
  source 1..75: mol_type = other DNA
cgtgacgatcaaaaagcaatacgccgggcacgcgaagcgcgtcatgatgggcgtctggtcgtttttacgccagtt

SEQ ID NO: 376332 - DNA, 75 bp, synthetic construct
  source 1..75: mol_type = other DNA
tttctaatgacctcgaagtacctgccagtgcagaaatcgtgctggaagggtatatcgacccgggtgagatggctg

SEQ ID NO: 376333 - DNA, 75 bp, synthetic construct
  source 1..75: mol_type = other DNA
gggacgtcccattaaaaaagatccggatgtcgtcgcacgtattgacgcaatctgggatgaactggctatcttcaa

SEQ ID NO: 376334 - DNA, 75 bp, synthetic construct
  source 1..75: mol_type = other DNA
ttcccggtatttaccgtgacgcatattactcagcgtgaagatgcgatttaccactccacctatactggtcgtccg

SEQ ID NO: 376335 - DNA, 75 bp, synthetic construct
  source 1..75: mol_type = other DNA
ttctgtggcgctgggtgctgatcccgccacaattctcggtgcagtcacgcccgttccagatacgctttcagagta

SEQ ID NO: 376336 - DNA, 75 bp, synthetic construct
  source 1..75: mol_type = other DNA
gttaaaagatgcctggacagaaaatcacggggcggcaggtcgtgagtgggttaaatggctggcaggccaccagca

SEQ ID NO: 376337 - DNA, 75 bp, synthetic construct
  source 1..75: mol_type = other DNA
atccgcgcaaagcggcagttgctgcggctattgcccgcgttcaggccaaaaaagccgcccagcaaaaggttgtaa

SEQ ID NO: 376338 - DNA, 75 bp, synthetic construct
  source 1..75: mol_type = other DNA
tcgaagatgctattaaagatgcggctaactcagctatagatggtactgtagaagcactgcttgatgatcatattg

SEQ ID NO: 376339 - DNA, 75 bp, synthetic construct
  source 1..75: mol_type = other DNA
tagccctgcgattctttttcggtgtggaagaagatgaaaacgtaaatgagattatcgggcaagaccatgaccaga

SEQ ID NO: 376340 - DNA, 75 bp, synthetic construct
  source 1..75: mol_type = other DNA
ccggacggtacggttatcggcgaatctgacaagcccgttttgtttaccggaaaaagtgctgccattaacggttat

SEQ ID NO: 376341 - DNA, 75 bp, synthetic construct
  source 1..75: mol_type = other DNA
atgaaaaaagcaccgaatttaaagctccagccgaaagacaaaatgaccgaagtcattatctttgcaggtagtgat

SEQ ID NO: 376342 - DNA, 75 bp, synthetic construct
  source 1..75: mol_type = other DNA
caaagcgcgcaagctggaacagcaacaacaggctaatgcggaaccagaagaacaggttgatccacgcaaagcggc

SEQ ID NO: 376343 - DNA, 75 bp, synthetic construct
  source 1..75: mol_type = other DNA
atgtccgctgaacacgtactgacgatgctgaacgagcacgaagtaaagtttgttgatttgcgcttcaccgatact

SEQ ID NO: 376344 - DNA, 75 bp, synthetic construct
  source 1..75: mol_type = other DNA
ccgttctgaaatgtgtctggtaatggagcagatgggcctggtggttgaagcacatcaccacgaagtggcaaccgc

SEQ ID NO: 376345 - DNA, 75 bp, synthetic construct
  source 1..75: mol_type = other DNA
ctaagcgcgctgaagattacctgcgttccactggcattgccgacactgtactgttcgggccagagccagaattct

SEQ ID NO: 376346 - DNA, 75 bp, synthetic construct
  source 1..75: mol_type = other DNA
tagaagaaaatcaccactgtgcaataaagaaatatggatagtaatgggcaactctttttcgaaaaaaacatttca

SEQ ID NO: 376347 - DNA, 75 bp, synthetic construct
  source 1..75: mol_type = other DNA
ctgttacgctgaaagcgggtgaacgtctggccggtctcaatcatgtagctgaattgcgtgcgagatattggggtg

SEQ ID NO: 376348 - DNA, 75 bp, synthetic construct
  source 1..75: mol_type = other DNA
tcctgttcgatgacatccgtttcggatcgtctatctccggttcccacgttgctatcgacgatatcgaaggtgcat

SEQ ID NO: 376349 - DNA, 75 bp, synthetic construct
  source 1..75: mol_type = other DNA
aaaccccgcgttgaatgccgtcctgatggcgtttactgggttacgccaaaggttgataagcaatcaggcgaaatt

SEQ ID NO: 376350 - DNA, 75 bp, synthetic construct
  source 1..75: mol_type = other DNA
tgttaccgaaagataaaggcgaggatgcagtgatttttgcgggggatgacgcatacagccatgcagagcattaca

SEQ ID NO: 376351 - DNA, 75 bp, synthetic construct
  source 1..75: mol_type = other DNA
agttaagcacaacaacgggctggcattttggcgcgtacatcatgccgaatggttctgtcattggtgagtctgaaa

SEQ ID NO: 376352 - DNA, 75 bp, synthetic construct
  source 1..75: mol_type = other DNA
cgagcgtgatttaccgattaaagagcttgccggatacagaaaagggagtatcagaaacgaagatgacgagttccg

SEQ ID NO: 376353 - DNA, 75 bp, synthetic construct
  source 1..75: mol_type = other DNA
tggcagacacgcaaatcatcgacaaagggcgctattacgtgcgcgtttatcgtgctggtgaaatatcagagcagc

SEQ ID NO: 376354 - DNA, 75 bp, synthetic construct
  source 1..75: mol_type = other DNA
cagttaagcggaaaccatgaggaatggcagttaagcacaacaacgggctggcattttggcgcgtacatcatgccg

SEQ ID NO: 376355 - DNA, 75 bp, synthetic construct
  source 1..75: mol_type = other DNA
tctgggtaacgccaaaagtggacaagcagtcaggcgaaattatccggcctgagacgtggttatgttctccgcttg

SEQ ID NO: 376356 - DNA, 75 bp, synthetic construct
  source 1..75: mol_type = other DNA
ggtttgcgcctgtcaattatgaccctgcaagcctgccgatttcagaactgtacggctacagggaaagcgaggggc

SEQ ID NO: 376357 - DNA, 75 bp, synthetic construct
  source 1..75: mol_type = other DNA
acctgataccggagagctacggcgagcaggtccaccgcgtgggggagcgtttcgccatactggaggccgcgcttg

SEQ ID NO: 376358 - DNA, 75 bp, synthetic construct
  source 1..75: mol_type = other DNA
gtggcggtatcgttatcagcaccattaatcgggctggtgggcgctgacggcttcggggtacatcttttcgaacaa

SEQ ID NO: 376359 - DNA, 75 bp, synthetic construct
  source 1..75: mol_type = other DNA
tgatggctttggcgtgcattttttcgaaaactccacggcaggcaagaccacaacgcagagcatcgcatcgagttt

SEQ ID NO: 376360 - DNA, 75 bp, synthetic construct
  source 1..75: mol_type = other DNA
tattccgtggcgggtacggcggatagctggcgcgacagcgtggcgcggctggctggtggcaatccgttcatgatg

SEQ ID NO: 376361 - DNA, 75 bp, synthetic construct
  source 1..75: mol_type = other DNA
ggcggcaggcatacgggatgcgaattattaccccgatgggatgcacagccagaagcgggagaactggcgcgaata

SEQ ID NO: 376362 - DNA, 75 bp, synthetic construct
  source 1..75: mol_type = other DNA
ccgtcaaatacagtttgccgaaggacatcctagccttgaggcttggcttgaattggtattggccggtcgagatga

SEQ ID NO: 376363 - DNA, 75 bp, synthetic construct
  source 1..75: mol_type = other DNA
cagggttacctatgtcaggtattggtgtggatatcggtggtaattcatatggttatagttcaaaacgatatggtg

SEQ ID NO: 376364 - DNA, 75 bp, synthetic construct
  source 1..75: mol_type = other DNA
agtgtaagagaatggatgcaatctcaggtaaatgaacaaactaatgaagatttgcatctggattttgataatatg

SEQ ID NO: 376365 - DNA, 75 bp, synthetic construct
  source 1..75: mol_type = other DNA
aatgatggcgatgacacatatggcgagcgcactgatgcgcagtcgccgtggtgaagaaatagagccgctggacgc

SEQ ID NO: 376366 - DNA, 75 bp, synthetic construct
  source 1..75: mol_type = other DNA
ctcaaaaaccccagggcgcacccagcttatcaacctgtttgaagtggctgacggcaagcgtctggttgacttgcc

SEQ ID NO: 376367 - DNA, 75 bp, synthetic construct
  source 1..75: mol_type = other DNA
tattcgccacctaccttccgataccggaattgaagtggcttttgcaggccgttccaacgcaggtaaatccagcgc

SEQ ID NO: 376368 - DNA, 75 bp, synthetic construct
  source 1..75: mol_type = other DNA
gcattcctgaactttcagcacttccaccttcattaagaaagaaaaattttactgacacatataatgctgcatctt

SEQ ID NO: 376369 - DNA, 75 bp, synthetic construct
  source 1..75: mol_type = other DNA
tgatacacgagaatatgaactatggcgtccggcccatcgctttttctccattatttttctcattattctattagt

SEQ ID NO: 376370 - DNA, 75 bp, synthetic construct
  source 1..75: mol_type = other DNA
ccgtttcgctttgaacgctgatccggtgcagttaatggaatctgcccgtgcaagtgcccaaccgccaaccgaacc

SEQ ID NO: 376371 - DNA, 75 bp, synthetic construct
  source 1..75: mol_type = other DNA
tatactgatgccagtatcttccttactctctccgttattaagcctgatggtttttatcattggtacactatacga

SEQ ID NO: 376372 - DNA, 75 bp, synthetic construct
  source 1..75: mol_type = other DNA
tttaggtggtgcagtactgactgatggcagcacgctgggtacattaggtggtgcagcagttggtggtattatcgg

SEQ ID NO: 376373 - DNA, 75 bp, synthetic construct
  source 1..75: mol_type = other DNA
ctaaagtaaaaatgctcgcttatgcgtttttcatcagtgtcctggcatctgcaccgatgagcgcttttgcaggtg

SEQ ID NO: 376374 - DNA, 75 bp, synthetic construct
  source 1..75: mol_type = other DNA
tggaagttaacccgtgtgaagaaggctatttgctggccaacctttatggattatggatggctgctaacgaagagg

SEQ ID NO: 376375 - DNA, 75 bp, synthetic construct
  source 1..75: mol_type = other DNA
ttattcagactttaagcccgatggtgatttcctatcgctcgcgggaaaaatcgattgaagtggcgcgacataaag

SEQ ID NO: 376376 - DNA, 75 bp, synthetic construct
  source 1..75: mol_type = other DNA
gtagggtgcctgatcccgggtggctggtttacaaagtaccggcattgcacaaatacaaagggatgtctctgtacc

SEQ ID NO: 376377 - DNA, 75 bp, synthetic construct
  source 1..75: mol_type = other DNA
agattaacgaaaatctcgtccagcgcggcatcatgattttcgccattttactggcctggagcgccatcgtactga

SEQ ID NO: 376378 - DNA, 75 bp, synthetic construct
  source 1..75: mol_type = other DNA
tgaaatgtatcgcaccttcaactgcggcgtcgggatgattattgccctgcctgctccggaagtggacaaagccct

SEQ ID NO: 376379 - DNA, 75 bp, synthetic construct
  source 1..75: mol_type = other DNA
atcgcggaaggttgtctgcaatcgggctgttcactggtgggtggcgaaacggcagaaatgccggggatgtatcac

SEQ ID NO: 376380 - DNA, 75 bp, synthetic construct
  source 1..75: mol_type = other DNA
agtggtcagcgtcatcctcaatatttttgccgtaatgaccgcgttttttggggtttatttaggctttcgcgaagc

SEQ ID NO: 376381 - DNA, 75 bp, synthetic construct
  source 1..75: mol_type = other DNA
cagcgtttgggctgatgccgcaagcgatttgaaaagccgcctggataaagtcagcagtttccatgccagctttac

SEQ ID NO: 376382 - DNA, 75 bp, synthetic construct
  source 1..75: mol_type = other DNA
atcagtttagcgcggtggagcaggacgatcagcgcagcagttatcaactgaaatcccagcaaaatggggctgtgg

SEQ ID NO: 376383 - DNA, 75 bp, synthetic construct
  source 1..75: mol_type = other DNA
tgacttagatgattattttatctttacatttaaacaggctatttctgataaaataattactgagccaaatttcat

SEQ ID NO: 376384 - DNA, 75 bp, synthetic construct
  source 1..75: mol_type = other DNA
agtgctggagcaggtttctcatctcgcgccgctggataaaccagtactggttataggtgagcgcgggaccgggaa

SEQ ID NO: 376385 - DNA, 75 bp, synthetic construct
  source 1..75: mol_type = other DNA
cagttcaccattaacgtgggacgtgatggcacaatccatcagtttagcgcggtggagcaggacgatcagcgcagc

SEQ ID NO: 376386 - DNA, 75 bp, synthetic construct
  source 1..75: mol_type = other DNA
atttatgggtaaaacgtccaaatttgttcaactggcatatgacccagccagacgaaagcattctggtttctgatg

SEQ ID NO: 376387 - DNA, 75 bp, synthetic construct
  source 1..75: mol_type = other DNA
gggcatttttggggaatggactgtctcgtttcgctttgaactctgatcctgtgcagctgatggagtctgcccgag

SEQ ID NO: 376388 - DNA, 75 bp, synthetic construct
  source 1..75: mol_type = other DNA
ttaacaccgccggtgggtagtgcgctatttgttggttgttctatctcaggtgtgaagattcaacatttaatcaaa

SEQ ID NO: 376389 - DNA, 75 bp, synthetic construct
  source 1..75: mol_type = other DNA
gtgaacgtcctggcgaatatgatgtttggttctatttcaggttcagccgttgcggcagctgctgccgttggtggc

SEQ ID NO: 376390 - DNA, 75 bp, synthetic construct
  source 1..75: mol_type = other DNA
ttaacaccgccagtgggtagtgcgctatttgttggttgttctatctcgggtgtgaagattcaacatttaatcaaa

SEQ ID NO: 376391 - DNA, 75 bp, synthetic construct
  source 1..75: mol_type = other DNA
ttccttaacttcattgattttatcatcgagaattcaccagatactgctttgcatgttttaacaaacggacgcaaa

SEQ ID NO: 376392 - DNA, 75 bp, synthetic construct
  source 1..75: mol_type = other DNA
aaatggcaaagcgaagcaaaaagataaaaatcacctttggtatcccgctctactcatcaagaccacttgtgcatg

SEQ ID NO: 376393 - DNA, 75 bp, synthetic construct
  source 1..75: mol_type = other DNA
atcaatgccggtaactcagggatcaacattgagttaagaatcattccgacactggctaactatatggaactggac

SEQ ID NO: 376394 - DNA, 75 bp, synthetic construct
  source 1..75: mol_type = other DNA
tccttgctggcccggcagtagtgtctttactggcgaaagataagaagttacatcaccttacgtctaaacatcgcg

SEQ ID NO: 376395 - DNA, 75 bp, synthetic construct
  source 1..75: mol_type = other DNA
tcgcaactggtctaagttgctggcagattatgttgcatttactggtagtggcgctgctggtggtgggctggatga

SEQ ID NO: 376396 - DNA, 75 bp, synthetic construct
  source 1..75: mol_type = other DNA
acgctcaattgcaagtgagctggccattgcaatgcagtcggcccgacgcatcctgttggtgggtgaccacctgca

SEQ ID NO: 376397 - DNA, 75 bp, synthetic construct
  source 1..75: mol_type = other DNA
tttctgtagcatcgctatttatggcgggatatttgccagggatcttaatgggtctcgcggtaatgatagtctgcg

SEQ ID NO: 376398 - DNA, 75 bp, synthetic construct
  source 1..75: mol_type = other DNA
taaaatcggcatgcttgaacgtatgcgggacattatcgaatatgcgataaaagaaaatcttgcagccagagaagc

SEQ ID NO: 376399 - DNA, 75 bp, synthetic construct
  source 1..75: mol_type = other DNA
tccttgccggcccggcggtggtgtcgttactggcgaaagataaaaagttacatcaccttgcgtctaaacatcgcg

SEQ ID NO: 376400 - DNA, 75 bp, synthetic construct
  source 1..75: mol_type = other DNA
taatactgtcttagtaacggaacgctgcaataacttgtgtctgttttgttcgcagccaccaaagaaatcaaatga

SEQ ID NO: 376401 - DNA, 75 bp, synthetic construct
  source 1..75: mol_type = other DNA
ggagctggataaacaaaaagcgccagtgtctgtgcaaaactttgtcgattatgtgaacagcggtttttataacaa

SEQ ID NO: 376402 - DNA, 75 bp, synthetic construct
  source 1..75: mol_type = other DNA
taacacgtggtgccggagatggtattcgcatagaggtaagaggaacagattcacaggccgattataaggggccga

SEQ ID NO: 376403 - DNA, 75 bp, synthetic construct
  source 1..75: mol_type = other DNA
gcacaggctgattatcgcggacgtctgacgcaggataaccattccgtgaaatatccggtggattttgccgctaag

SEQ ID NO: 376404 - DNA, 75 bp, synthetic construct
  source 1..75: mol_type = other DNA
gtttctctgcttaacgccattcgtggcaacgctaaaattggcatcatcaccaacggctttagcgccttgcagcaa

SEQ ID NO: 376405 - DNA, 75 bp, synthetic construct
  source 1..75: mol_type = other DNA
tggattatcgatttcgctgaactgaaagcggcgtttaagccaacttatgagcgcctcgatcaccattatctcaat

SEQ ID NO: 376406 - DNA, 75 bp, synthetic construct
  source 1..75: mol_type = other DNA
ttatcgatgtacttgctggctacatagaacctatcgctggtaaatgcctgcaggctcaggctaaccgtgtaccaa

SEQ ID NO: 376407 - DNA, 75 bp, synthetic construct
  source 1..75: mol_type = other DNA
gcattgaatttgatgcggatgaacttgtgagtttttgtcaaaatatttatttaaattgtgttgcacatgatgtta

SEQ ID NO: 376408 - DNA, 75 bp, synthetic construct
  source 1..75: mol_type = other DNA
tttttggtttgaaaggtatattagactctaattctttatgggctacaaacatatatttcttaaatgataaagagg

SEQ ID NO: 376409 - DNA, 75 bp, synthetic construct
  source 1..75: mol_type = other DNA
cttataagaacgcagaagccgtacaacatgcccaggctgctaaaaaatccatttataaaggttttggcgtaacct

SEQ ID NO: 376410 - DNA, 75 bp, synthetic construct
  source 1..75: mol_type = other DNA
atgatatttgttgtgggagggagggtgaagactcttatatcgctaattgctttaattagctcttctgtttatgca

SEQ ID NO: 376411 - DNA, 75 bp, synthetic construct
  source 1..75: mol_type = other DNA
agcgatattcagggccacgttgatggctggatcaaagcccaccagcagcaatttgacggctgggtgaatgaggcg

SEQ ID NO: 376412 - DNA, 75 bp, synthetic construct
  source 1..75: mol_type = other DNA
aactgaaagatccgaagatcgccaaactgttcgataccaacggcgacggtaaagcggatttaaccggttgtaacc

SEQ ID NO: 376413 - DNA, 75 bp, synthetic construct
  source 1..75: mol_type = other DNA
aggcaagaatacagtagtgttgagtaatggtattgagctaaaaattggttgctcaataaacccctattcttacga

SEQ ID NO: 376414 - DNA, 75 bp, synthetic construct
  source 1..75: mol_type = other DNA
tacctacactaaaacaatttttgatctgaacaaatcatttggcattaataagtttatcattattgttcctactct

SEQ ID NO: 376415 - DNA, 75 bp, synthetic construct
  source 1..75: mol_type = other DNA
tcaaataagtaaatctgttaaagtcgagttcagaacacaattttctacagacagaatagctgaaatgattaaaca

SEQ ID NO: 376416 - DNA, 75 bp, synthetic construct
  source 1..75: mol_type = other DNA
acctgcttatcactgacggcagttttacgctgaacagcggcaacgagccacagcgatgtgataaccgggtcagca

SEQ ID NO: 376417 - DNA, 75 bp, synthetic construct
  source 1..75: mol_type = other DNA
atcgatcaaagccggaaccgttaactttttaaaaagcgatgctataaaagaacactttcgagatgattacgagcg

SEQ ID NO: 376418 - DNA, 75 bp, synthetic construct
  source 1..75: mol_type = other DNA
tcaaataagtaaatctgtcaaagtcgagtttagaacacaattttctacagacagaatagctgaaatgattaaaca

SEQ ID NO: 376419 - DNA, 75 bp, synthetic construct
  source 1..75: mol_type = other DNA
acattgaggatattgttggtgatggtagtgctaatcttaaatttgttaaatctgacggaaaagaggccacttttg

SEQ ID NO: 376420 - DNA, 75 bp, synthetic construct
  source 1..75: mol_type = other DNA
aacactttcgagatgattacgggcgtgaactaaagacttacgttgttgaaagtcagaaaagttctggtaaaaata

SEQ ID NO: 376421 - DNA, 75 bp, synthetic construct
  source 1..75: mol_type = other DNA
gaagtcttttatgactcagagcttgaacggctcaacataacagatggagagatccagtctgtagctgtttttaca

SEQ ID NO: 376422 - DNA, 75 bp, synthetic construct
  source 1..75: mol_type = other DNA
ttgtgatataaaagatactataaatatcactgactacctgaacattcagacaatcagaaaaattaaatctgggtt

SEQ ID NO: 376423 - DNA, 75 bp, synthetic construct
  source 1..75: mol_type = other DNA
ctttcatccagaacactcatgaatgaaatttttgatgatgagatcatagatgataatgataacttcaaagattca

SEQ ID NO: 376424 - DNA, 75 bp, synthetic construct
  source 1..75: mol_type = other DNA
acatctaaacttcaagaggtagggcgtggtttacgtcttccagtgaatgaatacatgtgtcgtggctttgttgaa

SEQ ID NO: 376425 - DNA, 75 bp, synthetic construct
  source 1..75: mol_type = other DNA
tatttatccaaaatggtgactttgttcttaatacaggtaatgaacctgaattatgcaacaaccgtaaaagtatcg

SEQ ID NO: 376426 - DNA, 75 bp, synthetic construct
  source 1..75: mol_type = other DNA
attttggcatcacctgctccaccgccaccaactggattgccaacatgatcgttggcgcaacgttcctgaccatgc

SEQ ID NO: 376427 - DNA, 75 bp, synthetic construct
  source 1..75: mol_type = other DNA
tgcggcagtcggtgcggtgggcagcggctggctctcctttaaactcgggcgcaaaaagagcctgatgatcggcgc

SEQ ID NO: 376428 - DNA, 75 bp, synthetic construct
  source 1..75: mol_type = other DNA
gggcgcggtgtgcgactggtggggctgcatgtgacgttgcttgatccgcaaatggaaagacaactggtgctggga

SEQ ID NO: 376429 - DNA, 75 bp, synthetic construct
  source 1..75: mol_type = other DNA
atggccttcctacatcacggccatcaggaggaatacatgtcagcactaaaaaagcagcgcatcgatttgagatta

SEQ ID NO: 376430 - DNA, 75 bp, synthetic construct
  source 1..75: mol_type = other DNA
cctagcgattattccagcctggttcgtcagcttacgccatgagattgctacattcctttttatcatggagatatg

SEQ ID NO: 376431 - DNA, 75 bp, synthetic construct
  source 1..75: mol_type = other DNA
ttctttctcgcgttctgctgggtctggcggtgggtgttgcttcctataccgcgccactatacctctccgaaattg

SEQ ID NO: 376432 - DNA, 75 bp, synthetic construct
  source 1..75: mol_type = other DNA
atcatatccgcgaaattttctcgcgctatacctcgcgcattgaaccgttatcactggatgaagcctatctcgatg

SEQ ID NO: 376433 - DNA, 75 bp, synthetic construct
  source 1..75: mol_type = other DNA
ttgatctgctcataacaggcagaaatttcacactgaacagcgcacgtgaacctgtgacatgtgataaccgggcca

SEQ ID NO: 376434 - DNA, 75 bp, synthetic construct
  source 1..75: mol_type = other DNA
attggtgagcgcagtccaacgttaagggctgatattttcacccgcctggaattactgattgaagatgatgaacgc

SEQ ID NO: 376435 - DNA, 75 bp, synthetic construct
  source 1..75: mol_type = other DNA
cttacctgagcatttgagaaaaaagctaccacgatatcctaccatcccggctattcgtatgggacgcctggcagt

SEQ ID NO: 376436 - DNA, 75 bp, synthetic construct
  source 1..75: mol_type = other DNA
gtggcacaaacggcacaatcaggatgccaaggtgatgtggctgcgtaacgagatccggcgactctataacgacga

SEQ ID NO: 376437 - DNA, 75 bp, synthetic construct
  source 1..75: mol_type = other DNA
atcggacagcgttctgttgtgctgcgtaacgacgtttatttgaaaataattttaatgattgaaacggatattcgc

SEQ ID NO: 376438 - DNA, 75 bp, synthetic construct
  source 1..75: mol_type = other DNA
caggttcaattcatcctacaaagttcactaatgcagacggtgagcctgtgaatgaggtattatcaagtgatcttg

SEQ ID NO: 376439 - DNA, 75 bp, synthetic construct
  source 1..75: mol_type = other DNA
gcagattgaagaatcttactccatctccgccggactggatttcccgtctgtcggcccacaacacgcgtatctcaa

SEQ ID NO: 376440 - DNA, 75 bp, synthetic construct
  source 1..75: mol_type = other DNA
tgactaaatgccagaatattacggccggcactaacaccacgttgtacctgaagcgtgaagatttactgcacggcg

SEQ ID NO: 376441 - DNA, 75 bp, synthetic construct
  source 1..75: mol_type = other DNA
gcgcgcataaaaccaaccaggtgttggggcaggcattgttggcaaagcggatgggtaaaaccgaaatcatcgcgg

SEQ ID NO: 376442 - DNA, 75 bp, synthetic construct
  source 1..75: mol_type = other DNA
accatattgaccatttggctttccgctcattgtccacacagtcagcttcacttcaatctgtgaagtttttttacg

SEQ ID NO: 376443 - DNA, 75 bp, synthetic construct
  source 1..75: mol_type = other DNA
gcgaagaaacgaaagcgcaaattctggaaagagaaggtcgcctgccggatgccgttatcgcctgcgttggcggcg

SEQ ID NO: 376444 - DNA, 75 bp, synthetic construct
  source 1..75: mol_type = other DNA
tctgccggactggatttcccgtctgtcggcccacaacacgcgtatctcaacagcactgggcgcgctgattatgtg

SEQ ID NO: 376445 - DNA, 75 bp, synthetic construct
  source 1..75: mol_type = other DNA
aaaggagagaaagcccgtcttgagatggaagaaattggattatggagaaagtatcaacccggattgctggagggc

SEQ ID NO: 376446 - DNA, 75 bp, synthetic construct
  source 1..75: mol_type = other DNA
ttagctaccggctggagtgctacacgccagcgcccaaacgccagtatggttatttcgttctaccgttattgcacc

SEQ ID NO: 376447 - DNA, 75 bp, synthetic construct
  source 1..75: mol_type = other DNA
aatgcatcgccagacaggcatccttgaagttatcttgaggtgtactggcaatagcggacactaccatttgttctt

SEQ ID NO: 376448 - DNA, 75 bp, synthetic construct
  source 1..75: mol_type = other DNA
ttaatgggtgcggaagtgatcccggtgcatagcggttccgcgacgctgaaagatgcctgtaatgaggcgctacgc

SEQ ID NO: 376449 - DNA, 75 bp, synthetic construct
  source 1..75: mol_type = other DNA
gtgcgcaaaaagatcctgaatttcaggctcagttcaacgacctgctgaaaaactatgccgggcgtccaaccgcgc

SEQ ID NO: 376450 - DNA, 75 bp, synthetic construct
  source 1..75: mol_type = other DNA
agcaaccaatgtttcaggtggtgttggtattgtcggtgctttccagcctgtgtcttatgtacgattaattggtga

SEQ ID NO: 376451 - DNA, 75 bp, synthetic construct
  source 1..75: mol_type = other DNA
tcagaaaagccaatagcctaactcatacagccagagttcgtgctgtggtccattttatttcttttttgattaaca

SEQ ID NO: 376452 - DNA, 75 bp, synthetic construct
  source 1..75: mol_type = other DNA
ttaggcttctttatgggaagtgtaagccctgaaggattatcagagagagctttacaaactgcattgaataatgtt

SEQ ID NO: 376453 - DNA, 75 bp, synthetic construct
  source 1..75: mol_type = other DNA
agggaggggagtcttataaatcggtagctgtacgccttgatctggacggcaaactgaaccgccttttaagcgcgt

SEQ ID NO: 376454 - DNA, 75 bp, synthetic construct
  source 1..75: mol_type = other DNA
ttgtgatggataacgaggccctgaaatcaaccttttctcatgtatgcgatgaatggagtgcatatgagtcgaatc

SEQ ID NO: 376455 - DNA, 75 bp, synthetic construct
  source 1..75: mol_type = other DNA
ttacaagaagggtaacgctatttcaaacccatttggtggtgatttaaatgtaggtcctgcaggacagtctaatac

SEQ ID NO: 376456 - DNA, 75 bp, synthetic construct
  source 1..75: mol_type = other DNA
tggaggcagcagacaccagcgctgcggggaattttgggtatcatcttacgcttgataagcttccaaaatctgctt

SEQ ID NO: 376457 - DNA, 75 bp, synthetic construct
  source 1..75: mol_type = other DNA
aaataacagagtcaatgattgttaaggaaaactcgtgctattttgatttcacatcaggaagtattaaaaatgttc

SEQ ID NO: 376458 - DNA, 75 bp, synthetic construct
  source 1..75: mol_type = other DNA
acacggaaatgcgttattcagagaagacgatcaaaccaggctatatgacgaaaatatctttaatgttgccagtca

SEQ ID NO: 376459 - DNA, 75 bp, synthetic construct
  source 1..75: mol_type = other DNA
attactgattaacggcattattaaccataatgagccgcaaggtgtcgtgtattcacgtctggatcccggaagtta

SEQ ID NO: 376460 - DNA, 75 bp, synthetic construct
  source 1..75: mol_type = other DNA
atgaaaaccagtattatcaacggctcggaagtgtctagattatccgtggcgattcacttaactcatacagtcaga

SEQ ID NO: 376461 - DNA, 75 bp, synthetic construct
  source 1..75: mol_type = other DNA
ttgtgattgataacgaagccctgaaatcaaccttttcccatgtatgcgatgaatggagtgcatatgagtcgaatc

SEQ ID NO: 376462 - DNA, 75 bp, synthetic construct
  source 1..75: mol_type = other DNA
actgatggaaactcatacgtgccagccacttttatacccgttacaatatcttatagaccatctggctttacgttc

SEQ ID NO: 376463 - DNA, 75 bp, synthetic construct
  source 1..75: mol_type = other DNA
agatggtcatggctttttaccaaatcattacacccggttcaatttcaaagaaaaacccactcaatcccttccccg

SEQ ID NO: 376464 - DNA, 75 bp, synthetic construct
  source 1..75: mol_type = other DNA
cgcaagctgcttaaagatctaggcggtggcattgagccaatgagctttaaaaccgttgtcgccacgaccgcactc

SEQ ID NO: 376465 - DNA, 75 bp, synthetic construct
  source 1..75: mol_type = other DNA
agttggtggcaaattcgagtcagtggcacaatttgtcacgaacggtgcaatagtgatccacacccaacgcctgaa

SEQ ID NO: 376466 - DNA, 75 bp, synthetic construct
  source 1..75: mol_type = other DNA
gacatggcggttatttgtggtgtgaaactaaacatcgttgatgatcccacatacgagcaccgggctaaacttgct

SEQ ID NO: 376467 - DNA, 75 bp, synthetic construct
  source 1..75: mol_type = other DNA
agaaactaattaaagaaatcaaagagcgtatcagcagcccggaggttcgagacgatattgagcgccgggcttatg

SEQ ID NO: 376468 - DNA, 75 bp, synthetic construct
  source 1..75: mol_type = other DNA
agttcccgagtacttgccgggttctctatggccgaagcagacgctctgcgttccgctatcggtaaaaagaacatg

SEQ ID NO: 376469 - DNA, 75 bp, synthetic construct
  source 1..75: mol_type = other DNA
gttctctggtagcgtggtgcataggcataaccaacgtcgatcctatccgtcacggtcttctgtttgagcgtttca

SEQ ID NO: 376470 - DNA, 75 bp, synthetic construct
  source 1..75: mol_type = other DNA
atagagggcatttacgccgcccctccagcgccagtagtaccggaagaaaaaccaatgcctaatcctcttagcatg

SEQ ID NO: 376471 - DNA, 75 bp, synthetic construct
  source 1..75: mol_type = other DNA
gcacacggcctggaagcgcaagtacctttccacggcgcacgagcgcaaattctggctgtggaaaaacaaattgcc

SEQ ID NO: 376472 - DNA, 75 bp, synthetic construct
  source 1..75: mol_type = other DNA
cgctgttctatccgagctttgatatcaaagcgtttttcggcctggattctatccacctggataccttattcaaaa

SEQ ID NO: 376473 - DNA, 75 bp, synthetic construct
  source 1..75: mol_type = other DNA
ttaatcagttatcaatctatgtggttgaaaactcattatcccgcagagtttttcgctgctgctctcactattctt

SEQ ID NO: 376474 - DNA, 75 bp, synthetic construct
  source 1..75: mol_type = other DNA
cggagctggatgtgactgttttctacggatttaacccgaatattttgtactttcgcctagaggaaggcgaaaagc

SEQ ID NO: 376475 - DNA, 75 bp, synthetic construct
  source 1..75: mol_type = other DNA
ctgatgacgttctggaacagacagtagcgtcgcccgcgccaggtaaccaggttagcgaattaacaatgtgggtta

SEQ ID NO: 376476 - DNA, 75 bp, synthetic construct
  source 1..75: mol_type = other DNA
gggatgcgtgtcatctgtgttgatgacgcagagagcgacttctggctctcagcgtctctgccgtgcgctaccgtc

SEQ ID NO: 376477 - DNA, 75 bp, synthetic construct
  source 1..75: mol_type = other DNA
gtggcggtccactacggctatgacgataaaggccgtctgacgggcgaacggcagactgacggagaagacggaccg

SEQ ID NO: 376478 - DNA, 75 bp, synthetic construct
  source 1..75: mol_type = other DNA
gccggaggcggacgaggtgccgccggagctgcccgcataccgggtgctgacgggcgtggtggacggcttcgggcg

SEQ ID NO: 376479 - DNA, 75 bp, synthetic construct
  source 1..75: mol_type = other DNA
ccagcggtaacgcgtgctgatgaaatcgaatcaattgaatcttttgaatcaagcctggttatcgatttaggtggg

SEQ ID NO: 376480 - DNA, 75 bp, synthetic construct
  source 1..75: mol_type = other DNA
ctgttccattaagccccggtaaaaggctggacgcattgaatcatattgcggaattgagagctaaagtgtttggcc

SEQ ID NO: 376481 - DNA, 75 bp, synthetic construct
  source 1..75: mol_type = other DNA
ctttattgataccgtgggtctgaagttaagttttgcgatatgtgccgcaatctggggcctggcgacaatggggca

SEQ ID NO: 376482 - DNA, 75 bp, synthetic construct
  source 1..75: mol_type = other DNA
tgcttgctccaccgttgattgcctggtgcattatgtttcatagctggcaatttgcgtttattgtttcaggtagcc

SEQ ID NO: 376483 - DNA, 75 bp, synthetic construct
  source 1..75: mol_type = other DNA
atacgaaaggtttatcctgattataaccagaaaatccacgttattctggatggagcaggttaccaccgttcacag

SEQ ID NO: 376484 - DNA, 75 bp, synthetic construct
  source 1..75: mol_type = other DNA
cgacgtattacttttactattggtgcgatactgatgacgactatcggtctggtcagtatcatagaaaacccctat

SEQ ID NO: 376485 - DNA, 75 bp, synthetic construct
  source 1..75: mol_type = other DNA
acggggagaggctggcggaggttatccgtcagaactgcaacgtctggtatccgctgaagccaggggacgggcatc

SEQ ID NO: 376486 - DNA, 75 bp, synthetic construct
  source 1..75: mol_type = other DNA
ctggcattcatgcgtggtatcatgggcgttagtgaagcttcagctattccggcgggcgtaaaaacagcctcaaca

SEQ ID NO: 376487 - DNA, 75 bp, synthetic construct
  source 1..75: mol_type = other DNA
cattactattattaactatcttgaccgtaccgctcttggcgttgcggcaccaaccataatgtcagatttagggat

SEQ ID NO: 376488 - DNA, 75 bp, synthetic construct
  source 1..75: mol_type = other DNA
accagaaaatccacgttattctggatggagcaggttaccaccgttcacagttagtgaaagactgggcggaagtgg

SEQ ID NO: 376489 - DNA, 75 bp, synthetic construct
  source 1..75: mol_type = other DNA
ttgaacgttacaaccagtcagtactgaacgcggtgcgcgacgttgcagtcaatggcacgcgtttgcaaacgctga

SEQ ID NO: 376490 - DNA, 75 bp, synthetic construct
  source 1..75: mol_type = other DNA
tggactgttttttcgccgcggtggagatgcgcgataatcccgccctgcgcgacatccctattgctattggcggca

SEQ ID NO: 376491 - DNA, 75 bp, synthetic construct
  source 1..75: mol_type = other DNA
cagcccggagctggcggagctgctacgtcagcagcacagcgatgtgcgtccaagccgccatctgaataaagcgca

SEQ ID NO: 376492 - DNA, 75 bp, synthetic construct
  source 1..75: mol_type = other DNA
ttattatctggtggatgcgtcttatcagcaggcagtgaatttgctgccggaagagaaacgtaaattgctggtgca

SEQ ID NO: 376493 - DNA, 75 bp, synthetic construct
  source 1..75: mol_type = other DNA
gacggacccggcaggaaaccggctgccggacccggaactgcacccggacagcaccctcacggcatggccggataa

SEQ ID NO: 376494 - DNA, 75 bp, synthetic construct
  source 1..75: mol_type = other DNA
ggaagcgatggggctgcgaacctgcggcgatgtgcaaaagtatgatctggtgatgttgctcaaacgttttggcaa

SEQ ID NO: 376495 - DNA, 75 bp, synthetic construct
  source 1..75: mol_type = other DNA
gatatccctgttgctattggcggtagccgcgaacgtcggggagtgatcagcaccgccaattatcccgcgcgtaaa

SEQ ID NO: 376496 - DNA, 75 bp, synthetic construct
  source 1..75: mol_type = other DNA
caacaaatgaccagaacaccgatctacaacgtaatgcgttgagctgtgcaggatgcgagctgatttttgaagaca

SEQ ID NO: 376497 - DNA, 75 bp, synthetic construct
  source 1..75: mol_type = other DNA
atggtcgcgaggatcggtaaaaagaataccttcctgattggcgctttgctgggaacctgcggttatctgctgttc

SEQ ID NO: 376498 - DNA, 75 bp, synthetic construct
  source 1..75: mol_type = other DNA
cttcctgattggcgctttgctgggaacctgcggttatctgctgttcttctgggtttccgtctggtcactgccggt

SEQ ID NO: 376499 - DNA, 75 bp, synthetic construct
  source 1..75: mol_type = other DNA
agccgccagggtaacctgtatgcgggcgacacccagaacaccaactctgactcctatacccgctcgaaatatggc

SEQ ID NO: 376500 - DNA, 75 bp, synthetic construct
  source 1..75: mol_type = other DNA
actacaaaggtcagccagcggttggaccggaaaccaaagaaatcagtccgtacagcattgttggcctgagcgcga

SEQ ID NO: 376501 - DNA, 75 bp, synthetic construct
  source 1..75: mol_type = other DNA
ggctgggataacggcgtgaccaccagcaactgggtgcagtacgaacacacccgtaactcgcgtattccggaaggt

SEQ ID NO: 376502 - DNA, 75 bp, synthetic construct
  source 1..75: mol_type = other DNA
atactcaacgacagcggcggcaggagcattcactttgagccgctgtttcccggcgagataagctacagccgcagc

SEQ ID NO: 376503 - DNA, 75 bp, synthetic construct
  source 1..75: mol_type = other DNA
ttttattcggcaaaacgaccgtttttctgggacgttttcaggacggctttcgtaacggtaagaaaaatattgtgt

SEQ ID NO: 376504 - DNA, 75 bp, synthetic construct
  source 1..75: mol_type = other DNA
catccatgataattacgcgttatgcctgcagttctggctcaatggcgttaatcgccaggagttactgcgtttaat

SEQ ID NO: 376505 - DNA, 75 bp, synthetic construct
  source 1..75: mol_type = other DNA
aggtcattgagcgtttatttattgctgttgatgataatgatgttattgacacacaggttagcttgccgccaacga

SEQ ID NO: 376506 - DNA, 75 bp, synthetic construct
  source 1..75: mol_type = other DNA
gctttattacagtatgcaggccagctatcagatgctcgatctgttagaacaaactcgcgatgtgattgattacgc

SEQ ID NO: 376507 - DNA, 75 bp, synthetic construct
  source 1..75: mol_type = other DNA
acgctaagtggttcacacaccctcgccgaagcgaaactgcgggaagaaaaagcgcagtcccaggccgatttgtta

SEQ ID NO: 376508 - DNA, 75 bp, synthetic construct
  source 1..75: mol_type = other DNA
gtggcgctggatagcgatattcgccagcgtttagaactgcttatttcgcgtttcccactatatccggagcaataa

SEQ ID NO: 376509 - DNA, 75 bp, synthetic construct
  source 1..75: mol_type = other DNA
tgcggtatccgttttgccgccgagatcatcgtgccgtttattctcgcattatttattgctgttatatataactaa

SEQ ID NO: 376510 - DNA, 75 bp, synthetic construct
  source 1..75: mol_type = other DNA
atggcaaagccgatcatcacgctcaatggcctaaaaatcgtcattatgttgggaatgctggtcattattctctgc

SEQ ID NO: 376511 - DNA, 75 bp, synthetic construct
  source 1..75: mol_type = other DNA
ctgaaaggcggaatttccggtcgcagtgccagaggaaaacgtatccacacccgtgccattcacagcatcgacacc

SEQ ID NO: 376512 - DNA, 75 bp, synthetic construct
  source 1..75: mol_type = other DNA
ctgactgctgatgagcgcaaacaatttaaatacatgcgagcgcgctacaagcacctgcgttttgcgcaacggctg

SEQ ID NO: 376513 - DNA, 75 bp, synthetic construct
  source 1..75: mol_type = other DNA
gggataagcacgacgacatggtggcggatgatatggaaaccgtcggtcatatgatgcaccggtggcgctggatag

SEQ ID NO: 376514 - DNA, 75 bp, synthetic construct
  source 1..75: mol_type = other DNA
agtcaggaagctttcgggaaaacaaggattcgtcaaccaataattttcggaaaatctcggaaacgtcaaccaact

SEQ ID NO: 376515 - DNA, 75 bp, synthetic construct
  source 1..75: mol_type = other DNA
aacatgacgctggaagagaacctggaagcgttgactaggatgtttcctgaggatgaagtactaaacgggatggct

SEQ ID NO: 376516 - DNA, 75 bp, synthetic construct
  source 1..75: mol_type = other DNA
gaagccctgctgaaaatggagtattgtggtgtatgtcataccgatcttcatgttaagaatggcgattttggtgac

SEQ ID NO: 376517 - DNA, 75 bp, synthetic construct
  source 1..75: mol_type = other DNA
ggtttccgccagcgactttgccctgcaatttacgcccggaaaacgctatcgggtcattgacgttatccataatga

SEQ ID NO: 376518 - DNA, 75 bp, synthetic construct
  source 1..75: mol_type = other DNA
aagagtcgattgcaagcctacaatacttgattgatgaggaattacagcggcttatttccaatctttacccgctgg

SEQ ID NO: 376519 - DNA, 75 bp, synthetic construct
  source 1..75: mol_type = other DNA
ccgcttgaatcgctattgcgcgactgagagtgcgactactatcctcagcatggcgctggtgagtgaagcagaggg

SEQ ID NO: 376520 - DNA, 75 bp, synthetic construct
  source 1..75: mol_type = other DNA
agcaaatgccagatcttagtgtgcgatcgccgggctgaagaaggtgtcaatctgcacggcgggcgcaagattgcg

SEQ ID NO: 376521 - DNA, 75 bp, synthetic construct
  source 1..75: mol_type = other DNA
gcgatgatgtgtgctttattgccgtacttgagcgttacgggcaacgactggctccggcctgtggtttgctcggcg

SEQ ID NO: 376522 - DNA, 75 bp, synthetic construct
  source 1..75: mol_type = other DNA
ctctgccagtgatccccgcgctaaaactaaccagtcaggggctatttgatggcgagaagtttgccttcactacgc

SEQ ID NO: 376523 - DNA, 75 bp, synthetic construct
  source 1..75: mol_type = other DNA
agtttccgccagcgactttgccctgcaatttacgcccggaaaacgctatcgggtcattgacgtcatccataacga

SEQ ID NO: 376524 - DNA, 75 bp, synthetic construct
  source 1..75: mol_type = other DNA
tattcagatggcgtttctttctctgccagtgatccccgcgctgaaactaaccagtcaggggctgtttgatggcga

SEQ ID NO: 376525 - DNA, 75 bp, synthetic construct
  source 1..75: mol_type = other DNA
ccctgccagtgatccccgcgttgaaactgaccagccaggggttgtttgatggcgagaagtttgccttcactacgc

SEQ ID NO: 376526 - DNA, 75 bp, synthetic construct
  source 1..75: mol_type = other DNA
gcagaatcaatatttacaggtcagctcttgcgtccctgcactggaaggctgcgatgttaacggcgccagttttac

SEQ ID NO: 376527 - DNA, 75 bp, synthetic construct
  source 1..75: mol_type = other DNA
gacagggcagatgctgcgccagggtattgcacagccgaaaatgacctgcctggcgacgcgtgccttaatcattgc

SEQ ID NO: 376528 - DNA, 75 bp, synthetic construct
  source 1..75: mol_type = other DNA
gaaaaaagctcagggctgtacgatatttttaatcgctacgtgccttatttaaagacaactgacgctaatgatggt

SEQ ID NO: 376529 - DNA, 75 bp, synthetic construct
  source 1..75: mol_type = other DNA
gacccgtatatgcgtggacgtatgagcgatgagccatcttattcaccgcctgttgatattggcggcgtgatggtc

SEQ ID NO: 376530 - DNA, 75 bp, synthetic construct
  source 1..75: mol_type = other DNA
attgaaccattattgttgaaggccatttctgctggggaatcttcattgaagccgggcgcaattaacataaataag

SEQ ID NO: 376531 - DNA, 75 bp, synthetic construct
  source 1..75: mol_type = other DNA
ccctgatgacacaaggcaaacacgataaagtgttccttgaaaaatacactaccgggtatccccagctcgcagctg

SEQ ID NO: 376532 - DNA, 75 bp, synthetic construct
  source 1..75: mol_type = other DNA
tcgcatggcgctccagcttgaaggacaaactgcgctgctgtttcgtctggcgcgggcgtgggatcggcgtgccga

SEQ ID NO: 376533 - DNA, 75 bp, synthetic construct
  source 1..75: mol_type = other DNA
gctctttagatgttatcgaccatagtattagtaagctcagagaacttaaagaggcctcgccaaacgttcctcaca

SEQ ID NO: 376534 - DNA, 75 bp, synthetic construct
  source 1..75: mol_type = other DNA
acattatggtgtcacagcggctgatcttttcaatccctgcaccaatctttccgtcttcgggaaaatcatcaccga

SEQ ID NO: 376535 - DNA, 75 bp, synthetic construct
  source 1..75: mol_type = other DNA
gtatcaaacctaaagaaattaccgtatatccccaatatgccatgcgtggcactgttttagatgaaaaggaaacaa

SEQ ID NO: 376536 - DNA, 75 bp, synthetic construct
  source 1..75: mol_type = other DNA
gcagtatgactatgacgccgcaggccggatggtcatccggacaaaacaccgtgacggctaccgcccggaaacaga

SEQ ID NO: 376537 - DNA, 75 bp, synthetic construct
  source 1..75: mol_type = other DNA
gcgatgagccatcttattcaccgccggttgatattggcggcgtgatggtcggcggtacggtgagccgtgtcgtgg

SEQ ID NO: 376538 - DNA, 75 bp, synthetic construct
  source 1..75: mol_type = other DNA
gatatagtgaatgcatatctattgaaaaaggaaaaattaaaacacgatgaaaatcctcttaaaaaacctgctaac

SEQ ID NO: 376539 - DNA, 75 bp, synthetic construct
  source 1..75: mol_type = other DNA
aaggcaatctttaagtgctcatgatgaagttgttgaagcatatagaataaagaaaagtttgtccaatttgaaaaa

SEQ ID NO: 376540 - DNA, 75 bp, synthetic construct
  source 1..75: mol_type = other DNA
cgcgcggcctgacgaccgttatttgcgaccctcatgaaatcgtcaacgtgatgggagaagccggattcgcctggt

SEQ ID NO: 376541 - DNA, 75 bp, synthetic construct
  source 1..75: mol_type = other DNA
tgcaaattaaaacctcgtcaggagcagaaaccagcgcctttatcgaacgcgtggcagatatcagccagcatatgg

SEQ ID NO: 376542 - DNA, 75 bp, synthetic construct
  source 1..75: mol_type = other DNA
caaaatcccatggcacaagggccgggcgctcttttgaggtcataaccatgacctataaacaagccctgcgagtcg

SEQ ID NO: 376543 - DNA, 75 bp, synthetic construct
  source 1..75: mol_type = other DNA
ggaatggcagggagtgcgtgtcgtaacgaccgaaactcttgctaaggggtatggaaccgaaactaataacatcaa

SEQ ID NO: 376544 - DNA, 75 bp, synthetic construct
  source 1..75: mol_type = other DNA
ctacgtccgacaaacaaatttcgtgcgaattaccgctaaaatcgcgtttttctgtcgacgcacacgtttgcgtat

SEQ ID NO: 376545 - DNA, 75 bp, synthetic construct
  source 1..75: mol_type = other DNA
cggcgatgaacgaaatggtaaaagagcgtttggttttaggcgcagcgctgaaagaagcgattagcaataaccaac

SEQ ID NO: 376546 - DNA, 75 bp, synthetic construct
  source 1..75: mol_type = other DNA
ggctggcagttcttcagcccggcgatgaacgaaatggtaaaagagcgtttggttttaggcgcggcgctgaaagaa

SEQ ID NO: 376547 - DNA, 75 bp, synthetic construct
  source 1..75: mol_type = other DNA
gcggctggtatgtgcgacaaatgccgatcttccggcgatggttgatgaaggcacgtttcgcgctgacctgctgga

SEQ ID NO: 376548 - DNA, 75 bp, synthetic construct
  source 1..75: mol_type = other DNA
tgagtttcagatgcagcaggaaaaagagttgctgcaactcagtttgcaacaagggaaatataaccagaagcgcgc

SEQ ID NO: 376549 - DNA, 75 bp, synthetic construct
  source 1..75: mol_type = other DNA
attattgatccctttaaacggcgtccacctgaagaacccatcgccgttccagaaaacacttcacttccgacgctg

SEQ ID NO: 376550 - DNA, 75 bp, synthetic construct
  source 1..75: mol_type = other DNA
tttccgcgtacccggcgtttagttattgcggatgatgatattgaagctcggctgattggttcattgtcgccatca

SEQ ID NO: 376551 - DNA, 75 bp, synthetic construct
  source 1..75: mol_type = other DNA
cggtgtattaagtaaagcgtcaacgctggagatttttcatcaggaactctttttgtcattaaatggtgtacgtca

SEQ ID NO: 376552 - DNA, 75 bp, synthetic construct
  source 1..75: mol_type = other DNA
actgctttttggcaccaaaaagctcggctccatcggttccgatcttggtgcgtcgatcaaaggctttaaaaaagc

SEQ ID NO: 376553 - DNA, 75 bp, synthetic construct
  source 1..75: mol_type = other DNA
ggaatcttgctggcagagctggtcgttggggaaaagaattccaaggtaatgtcatctgcatcgatagcgacaatg

SEQ ID NO: 376554 - DNA, 75 bp, synthetic construct
  source 1..75: mol_type = other DNA
gcgccgctgatattatgcgccgcaaatggatctacgaagctgaaacgggtttattcttcaaccgtgataacaaga

SEQ ID NO: 376555 - DNA, 75 bp, synthetic construct
  source 1..75: mol_type = other DNA
gcggcgttcgcaccagctcttaactgtcacactcgggagtcttttttttcgtgcatcgcagcgcaactccgccaa

SEQ ID NO: 376556 - DNA, 75 bp, synthetic construct
  source 1..75: mol_type = other DNA
gagagttttctccaataatataagtcatgtagctcaaaaattgggggttgagtctgatgatttacttcaatacta

SEQ ID NO: 376557 - DNA, 75 bp, synthetic construct
  source 1..75: mol_type = other DNA
agtccatcctatctaaaaaaacataaaaagatatcacaccccagtgatctggaaaatcatagtattttgggaatt

SEQ ID NO: 376558 - DNA, 75 bp, synthetic construct
  source 1..75: mol_type = other DNA
gagagcgtagcgattttttcagcaactcacctgaatttgacgatctggttcttaaaagcggaaaaatagaaaatg

SEQ ID NO: 376559 - DNA, 75 bp, synthetic construct
  source 1..75: mol_type = other DNA
aatgttacgctgcttcgacgtgattcccgccatttagaattgactgatgcaggtcaaaaagcttatgtaaaaata

SEQ ID NO: 376560 - DNA, 75 bp, synthetic construct
  source 1..75: mol_type = other DNA
tggtagctcgtaatccgggtattagcccaatattaatgcaaaaactgtgggacaggttttgtgattgcgatagag

SEQ ID NO: 376561 - DNA, 75 bp, synthetic construct
  source 1..75: mol_type = other DNA
tttattttagagtcttgggtagaggactatatctacaagagagaaaaaagtttaattatttatttggtgcctacg

SEQ ID NO: 376562 - DNA, 75 bp, synthetic construct
  source 1..75: mol_type = other DNA
gattttagatgctttggcaaataatgcgacagtagcattggcaatagaaaaaggttttcttagtgaggggtttga

SEQ ID NO: 376563 - DNA, 75 bp, synthetic construct
  source 1..75: mol_type = other DNA
gggaaaaatggagtaggtaaaagcactattttgagaactatccattcttatttcaagaaaaatgattcatataga

SEQ ID NO: 376564 - DNA, 75 bp, synthetic construct
  source 1..75: mol_type = other DNA
aaaatagcagtttacttgatgatttacctgcattagtaaaaatggaaatttactcaattgttaatggaattgaac

SEQ ID NO: 376565 - DNA, 75 bp, synthetic construct
  source 1..75: mol_type = other DNA
tcttcatatgttgcagcctttagacgcatatctgatacgatgagtattgaattaggatataattcgaaaggcaca

SEQ ID NO: 376566 - DNA, 75 bp, synthetic construct
  source 1..75: mol_type = other DNA
cgaaactccagctaccgatgctttcctgtctgaagtgcgggcgcagggggtggatgctgctatagaagctgcaaa

SEQ ID NO: 376567 - DNA, 75 bp, synthetic construct
  source 1..75: mol_type = other DNA
tatcccaccaaaagttgcgctggcgctactggataaaattaagcacctggaggacacaaatattgatgccacatg

SEQ ID NO: 376568 - DNA, 75 bp, synthetic construct
  source 1..75: mol_type = other DNA
cttggtgaaattaagcgcctggaggacacaaatattgatgctatgtgccgaatagcaccgcttgagactaagctc

SEQ ID NO: 376569 - DNA, 75 bp, synthetic construct
  source 1..75: mol_type = other DNA
agcgaatcaaccgagtactttccaccaacgtgacggggtattttctctgctgccgcgaggcggtaaaacgcatgg

SEQ ID NO: 376570 - DNA, 75 bp, synthetic construct
  source 1..75: mol_type = other DNA
atatcagcgacgaaaatcaggtcatcgcaatgtttacagcaatcgatcagcacgatgaaccgctagcagcgctgg

SEQ ID NO: 376571 - DNA, 75 bp, synthetic construct
  source 1..75: mol_type = other DNA
ggctaatgaagcgcatccgattgatggcctatctggtgaatatgcggagaaatcccttgaagaatgggcggaaca

SEQ ID NO: 376572 - DNA, 75 bp, synthetic construct
  source 1..75: mol_type = other DNA
atggcgttctggttattttggaggccatgaaggcaacaggaaatatgccagccaccgacgctttcctggctgaag

SEQ ID NO: 376573 - DNA, 75 bp, synthetic construct
  source 1..75: mol_type = other DNA
atgatttttatttcttcgagcagcctcgaactttcccacaacaccgtaaaagttgcaaaaacgttaaatgcgtca

SEQ ID NO: 376574 - DNA, 75 bp, synthetic construct
  source 1..75: mol_type = other DNA
cggtaaaactggccttagcaggcgcgccgttaatactggctgtgagtgcgttggtgctgacgttgtggggaagcg

SEQ ID NO: 376575 - DNA, 75 bp, synthetic construct
  source 1..75: mol_type = other DNA
tgcatacgcccggtgataaacgatgtgaagatgttatcaaatggaccggctttgatgggctgaaaaacgcagaga

SEQ ID NO: 376576 - DNA, 75 bp, synthetic construct
  source 1..75: mol_type = other DNA
ggattcgacgaacagaaaaacgcagagaacaatgctcgttatatcgcagctttcaacccaaaggttgcactggag

SEQ ID NO: 376577 - DNA, 75 bp, synthetic construct
  source 1..75: mol_type = other DNA
ttcagagcttgagactaatctcgctgcgctggtggcagagaacgctgggctgaaacacgcaatggccgtaactct

SEQ ID NO: 376578 - DNA, 75 bp, synthetic construct
  source 1..75: mol_type = other DNA
ggcggaagaggtcgcgcaggccattgtctggctgcttagtgataaagcctcttatgtcacgggaagttttatcga

SEQ ID NO: 376579 - DNA, 75 bp, synthetic construct
  source 1..75: mol_type = other DNA
gcgtaatgcgtcagatcgaaaccgtcttgacgtgttatgcacgccggatctggttaaccagttccgcttcctggc

SEQ ID NO: 376580 - DNA, 75 bp, synthetic construct
  source 1..75: mol_type = other DNA
cgccccagacaggctttccctcctcaagagcccgcaatcccgatatcacccgaagtgtggccggaatgggggatc

SEQ ID NO: 376581 - DNA, 75 bp, synthetic construct
  source 1..75: mol_type = other DNA
aaaagcggctaacccggatatcacccgaagcgtggcggggatgggcgatcgccagtacaactatgtcgtcatgcc

SEQ ID NO: 376582 - DNA, 75 bp, synthetic construct
  source 1..75: mol_type = other DNA
tcccgtcagatgttcgtgttcctctgacgtatatcgaatttgataacagtaatgccgtcagcggaacaccggcac

SEQ ID NO: 376583 - DNA, 75 bp, synthetic construct
  source 1..75: mol_type = other DNA
agtgctgtccggcacgtatggggatatttccacgtttggtgtcagccgtaatgaccatctgatttcctgtatggg

SEQ ID NO: 376584 - DNA, 75 bp, synthetic construct
  source 1..75: mol_type = other DNA
aaggatgatgcaaacctgaaaatcatcagtgatgagcttctgaaacgctggggaccggccaaaatgtctgacggc

SEQ ID NO: 376585 - DNA, 75 bp, synthetic construct
  source 1..75: mol_type = other DNA
tatctgtacgccgccacactgtgtgccgttgccagccaggcgctttccatcgacccggcgcgtcctctccagacg

SEQ ID NO: 376586 - DNA, 75 bp, synthetic construct
  source 1..75: mol_type = other DNA
ctggcgttaacactgggatcaccgctttccggcgcgctgctggagatgcatggatttatgggggctggttctgga

SEQ ID NO: 376587 - DNA, 75 bp, synthetic construct
  source 1..75: mol_type = other DNA
tttccggcgcgctgctggagatgcatggatttatggggcatcctgaaccgccccgggtttcctggagagtgtttt

SEQ ID NO: 376588 - DNA, 75 bp, synthetic construct
  source 1..75: mol_type = other DNA
cgatcgtctgacgcgtgaagagcgtaacagtctgctgtggggagggattgccacggtcagtgtggctgccggtga

SEQ ID NO: 376589 - DNA, 75 bp, synthetic construct
  source 1..75: mol_type = other DNA
ggcggctgcccagttattcgaaaaatggctggaaacgcatccgatgccgcaggcgctgttcacaacgtcgtttgc

SEQ ID NO: 376590 - DNA, 75 bp, synthetic construct
  source 1..75: mol_type = other DNA
tatctgccgtggacgtgcgctggaactattacgcgggtgaaaccaccccttacgggattattacggcattcaaag

SEQ ID NO: 376591 - DNA, 75 bp, synthetic construct
  source 1..75: mol_type = other DNA
atggcccaggatttaggcatttcggaaggggttgccgggcaatcggtgaccgtgaccgcctttgtggcgatgttt

SEQ ID NO: 376592 - DNA, 75 bp, synthetic construct
  source 1..75: mol_type = other DNA
atcgctacacctttaaggtctacattccctcgcagattgcgaccgccgcgccctgtactaaaacacccggcgtca

SEQ ID NO: 376593 - DNA, 75 bp, synthetic construct
  source 1..75: mol_type = other DNA
ggtgaaagtgcgcaatgccagcagccagcgggtcatcagcgcgatggtggcggaaagcggcgtggtgacaacggt

SEQ ID NO: 376594 - DNA, 75 bp, synthetic construct
  source 1..75: mol_type = other DNA
tggtcgagcgcgatcaaccggtgatgattgtttaccagagcgcggggatcaccgcctcgatgcccggcgtagcgc

SEQ ID NO: 376595 - DNA, 75 bp, synthetic construct
  source 1..75: mol_type = other DNA
ggtggcatggctgcattcagacaatggcttaggtattccggcaataaccaggagtaaaaacattgctgacagttg

SEQ ID NO: 376596 - DNA, 75 bp, synthetic construct
  source 1..75: mol_type = other DNA
gatttaactccaaattttaccaataatgatatattcaaaaaccttgatgctatttatagcgtggctgtgggcaag

SEQ ID NO: 376597 - DNA, 75 bp, synthetic construct
  source 1..75: mol_type = other DNA
aaaactatataccactccgccagcaccgatagcgttagaggccattgaaaacgcaattgaatatatccgcagtat

SEQ ID NO: 376598 - DNA, 75 bp, synthetic construct
  source 1..75: mol_type = other DNA
tctgtgacgcagagtactggcggttaaccacaggtgagaaagaatcccagcagccgcaaccggaaaagaatatgc

SEQ ID NO: 376599 - DNA, 75 bp, synthetic construct
  source 1..75: mol_type = other DNA
cctatgctgaagtggaaaccgccgtcgaagcactacgctgcggagccttcgactatgttatcaaaccgtttgatc

SEQ ID NO: 376600 - DNA, 75 bp, synthetic construct
  source 1..75: mol_type = other DNA
aggcactgagcaccagctggcaatgggggcacattctcaccaacagcccggcgatgatggacatctgcaaagaca

SEQ ID NO: 376601 - DNA, 75 bp, synthetic construct
  source 1..75: mol_type = other DNA
cgctgacttcgcctgcggaaatcgccctcaaccggatgaacttcaccgtcagttgcccgcaaagctggcagatga

SEQ ID NO: 376602 - DNA, 75 bp, synthetic construct
  source 1..75: mol_type = other DNA
ctggttgcccgcgatacgccgctcaccgcgaatgatgtggagttgaagccttacaacgtcagtgcccagcgccgg

SEQ ID NO: 376603 - DNA, 75 bp, synthetic construct
  source 1..75: mol_type = other DNA
tccgtcgcagattgcgaccgccgcgccctgtactaaaacacccggcgttacgctgacttcgcctgcggaaatcgc

SEQ ID NO: 376604 - DNA, 75 bp, synthetic construct
  source 1..75: mol_type = other DNA
cggtggtgccagatgctcgtccgtctttaaataatggcatagtcggttttgatgaaggctggaacgcctgccgcg

SEQ ID NO: 376605 - DNA, 75 bp, synthetic construct
  source 1..75: mol_type = other DNA
tgtcagtttcacagatggcagaagtgggctttatactgactatcccattctttttaaagcgatttggcattaaaa

SEQ ID NO: 376606 - DNA, 75 bp, synthetic construct
  source 1..75: mol_type = other DNA
aatatttccggttcggtctttgttgaacaggaagttgattccaacattcgtgccagcgcacaggggctctttatg

SEQ ID NO: 376607 - DNA, 75 bp, synthetic construct
  source 1..75: mol_type = other DNA
tttatgcggcatccgtaactgatccggatatgatgttttgggtgatgttagtcaatgcgatggcgtttatgccga

SEQ ID NO: 376608 - DNA, 75 bp, synthetic construct
  source 1..75: mol_type = other DNA
cgctacgttgttattttgtttgccgttttgctgacgctctcctgcttgctggtttcctttgctaactcattcagt

SEQ ID NO: 376609 - DNA, 75 bp, synthetic construct
  source 1..75: mol_type = other DNA
ccagacaattcaggccactgaccgccgctacgttgttattttgtttgccgttttgctgacgctctcctgcttgct

SEQ ID NO: 376610 - DNA, 75 bp, synthetic construct
  source 1..75: mol_type = other DNA
tgctgagttctatgttgaggaaaaaacatcacgtcgaccgtccagaactgaatatggaatcatttgaggagatag

SEQ ID NO: 376611 - DNA, 75 bp, synthetic construct
  source 1..75: mol_type = other DNA
cccatttggtcagttcagtacccttataggatggtttttgattgcggaatcaatattaaccgcatgtgctggcgt

SEQ ID NO: 376612 - DNA, 75 bp, synthetic construct
  source 1..75: mol_type = other DNA
cggcagcctagacgtgcgagacaatgttgagcgccttgcttatgaaattgctctggcatcactggaagcagagcc

SEQ ID NO: 376613 - DNA, 75 bp, synthetic construct
  source 1..75: mol_type = other DNA
tattttattgatggtgtatttcaacctttgagatatgagcgtgactgtgaaaaagcggttgtggccgctggcggt

SEQ ID NO: 376614 - DNA, 75 bp, synthetic construct
  source 1..75: mol_type = other DNA
tctgatagcacgaaggcaaatgataaattagaatggaaagcaaacagagaattatatgacatgattagagacgct

SEQ ID NO: 376615 - DNA, 75 bp, synthetic construct
  source 1..75: mol_type = other DNA
gatcctaatcagcctgtcttttcgttagcaagttgttctttttcagataatgatgcccgaaaccttatcggatta

SEQ ID NO: 376616 - DNA, 75 bp, synthetic construct
  source 1..75: mol_type = other DNA
cgcatgacgcattatttaaatcttttctcatgcaccctgacaccgcgcgggattttatggagatccacttaccca

SEQ ID NO: 376617 - DNA, 75 bp, synthetic construct
  source 1..75: mol_type = other DNA
aaaggttatggcgcgcattgacactgccctgaccctgaccgagtgccagccgttgcgtcatcgccatccggcaac

SEQ ID NO: 376618 - DNA, 75 bp, synthetic construct
  source 1..75: mol_type = other DNA
tatcaaactatataataaagaaagaagatatatatatgacaattgttggcgctacgattgggaaatgtgggctta

SEQ ID NO: 376619 - DNA, 75 bp, synthetic construct
  source 1..75: mol_type = other DNA
acaaccgaaaagacgacctgttaaaaaccatttcccttatttgcgggttgctaatgtccaaagaggtgatattaa

SEQ ID NO: 376620 - DNA, 75 bp, synthetic construct
  source 1..75: mol_type = other DNA
tggcagttacgatcatttaaattagatgtaagaggatacgcgagacattttaaagtattaaatagctgcttattt

SEQ ID NO: 376621 - DNA, 75 bp, synthetic construct
  source 1..75: mol_type = other DNA
ttctgagtcatctagaaaaataaaatcctccgaaatactacctgagggaaaatatcctgttatcgagcaaagcca

SEQ ID NO: 376622 - DNA, 75 bp, synthetic construct
  source 1..75: mol_type = other DNA
cgtcatcccacaccttttctgaactattgccagcattcctggcggttacatgacggagtactccagccattatgt

SEQ ID NO: 376623 - DNA, 75 bp, synthetic construct
  source 1..75: mol_type = other DNA
atgaatgtggaaaagctgatcgttgatcatatggaaacctggacctcggcgttgcaaacccgttccaccgccggg

SEQ ID NO: 376624 - DNA, 75 bp, synthetic construct
  source 1..75: mol_type = other DNA
ggctctcgaaaaccttggtttgggagatgcattaattggtgatgaatgtaaaattgcagggtttgacagtagtaa

SEQ ID NO: 376625 - DNA, 75 bp, synthetic construct
  source 1..75: mol_type = other DNA
gccgaggaactggctgaaaactgggcgcgtattagcgaacatttcgacacactatttaccaccgaagccagcgtg

SEQ ID NO: 376626 - DNA, 75 bp, synthetic construct
  source 1..75: mol_type = other DNA
gaaaattatattttgtcagaaaatgatattgttatttcattagacagaccaattattaataccgggttaaaatat

SEQ ID NO: 376627 - DNA, 75 bp, synthetic construct
  source 1..75: mol_type = other DNA
atgcctttaaaagtgagtggtttacctctgtcggtttacgtttattgcggaatgctaacattgctcatggagtta

SEQ ID NO: 376628 - DNA, 75 bp, synthetic construct
  source 1..75: mol_type = other DNA
gctgattctggaactggctgtgcgcggtaaactggtgccgcaggatccgaatgatgaaccggcgtcggagctgct

SEQ ID NO: 376629 - DNA, 75 bp, synthetic construct
  source 1..75: mol_type = other DNA
tatttggattaatagaggcattaaaagctagcataaaaaccgcccagcaaacccaactgcaccttgcagacgcac

SEQ ID NO: 376630 - DNA, 75 bp, synthetic construct
  source 1..75: mol_type = other DNA
tcgagcaactcatgtccctctgcgaccaactggaacagcaatccttgaccagtctggacgcacatcagcaactgg

SEQ ID NO: 376631 - DNA, 75 bp, synthetic construct
  source 1..75: mol_type = other DNA
atttatttactggtgtaacgataaagcatttacctggggataaattacagcaatacgtaataccattaatgccat

SEQ ID NO: 376632 - DNA, 75 bp, synthetic construct
  source 1..75: mol_type = other DNA
ggtaaactggtgcctcaggatccgcatgatgaaccggcgtcggagctgttgaaacgtattgcggcagagaaagcg

SEQ ID NO: 376633 - DNA, 75 bp, synthetic construct
  source 1..75: mol_type = other DNA
ctaaggatgattttgtcgtacagggggccttaacatcaagctatatagcaactttgtgtttattcgctgttgaag

SEQ ID NO: 376634 - DNA, 75 bp, synthetic construct
  source 1..75: mol_type = other DNA
tccgaatgacgaacctgcctctgaactgctcaaacgaattgcgcaggaaaaagctcaactggtgaaaaaaggaaa

SEQ ID NO: 376635 - DNA, 75 bp, synthetic construct
  source 1..75: mol_type = other DNA
tagttctcattcacaagcgcgagaaccacgactcctatgcggtggcgatcaccaatgggagtcacgatttttacg

SEQ ID NO: 376636 - DNA, 75 bp, synthetic construct
  source 1..75: mol_type = other DNA
cgaatgcgctggcagccgctgcgctctccatgtccgtgggcgcaacgcttgatgctatcaaagcggggctggcaa

SEQ ID NO: 376637 - DNA, 75 bp, synthetic construct
  source 1..75: mol_type = other DNA
cgcggcagttccggtaaaattgatttgtatggcattaagaaattgcgtgagctgattctggaactggctgtgcgc

SEQ ID NO: 376638 - DNA, 75 bp, synthetic construct
  source 1..75: mol_type = other DNA
tagatttatattaaataaagaacagcagcaatcatgcttttgtgatcattttattaaaatgaatttcttatgtaa

SEQ ID NO: 376639 - DNA, 75 bp, synthetic construct
  source 1..75: mol_type = other DNA
atcaaatgagtggtattactctgacctccaattagacgaaaacaaatatataaataatggtgatttaatatacgc

SEQ ID NO: 376640 - DNA, 75 bp, synthetic construct
  source 1..75: mol_type = other DNA
gaatacgattacgcagttattgaacttggcgcgaaccatcagggcgaaattgcctggactgtgagtctgactcgc

SEQ ID NO: 376641 - DNA, 75 bp, synthetic construct
  source 1..75: mol_type = other DNA
acaaagccatgctatcagcactgccagcggcgttggcgaacatttttccgataaaactgcgcttatcgcgcgtct

SEQ ID NO: 376642 - DNA, 75 bp, synthetic construct
  source 1..75: mol_type = other DNA
gagaatttaacaaaaacaggaactactgttgaaagcctgttgtttgaagattttatatcacacccattcatgatt

SEQ ID NO: 376643 - DNA, 75 bp, synthetic construct
  source 1..75: mol_type = other DNA
tttggcattgcggtggtgccgttgatttccagttatcagccttccaccgtggcggtgaacatgaatgacttaccc

SEQ ID NO: 376644 - DNA, 75 bp, synthetic construct
  source 1..75: mol_type = other DNA
atacgtgaattgaaaaacgtggtggaacgttcagtgtatcgccacggcaccagcgattatccgcttgatgacatc

SEQ ID NO: 376645 - DNA, 75 bp, synthetic construct
  source 1..75: mol_type = other DNA
ggaaaaattattgcgtgtgattgagtacggtgaactggagcgcgttggcggcagccagccattgcaggtgaatgt

SEQ ID NO: 376646 - DNA, 75 bp, synthetic construct
  source 1..75: mol_type = other DNA
gcgtgtgacagctcgccgcttaatcaatatcagcgacgctttagtcaggatgtcgcaccgcagtatgtggacatc

SEQ ID NO: 376647 - DNA, 75 bp, synthetic construct
  source 1..75: mol_type = other DNA
cgatgcttacggatttcacccacaacctgcttaacgcgccgctgctggataaacaggccgaatggtgcgaagtgt

SEQ ID NO: 376648 - DNA, 75 bp, synthetic construct
  source 1..75: mol_type = other DNA
ggaaagaaaccagcaatacatcaaaagccgtgatcaggagaacgaggatattgcgctaacggtagggaagctgag

SEQ ID NO: 376649 - DNA, 75 bp, synthetic construct
  source 1..75: mol_type = other DNA
atccgacattttacggcgtatgttgaaattttccgccgcatcacagcctgctgctccggtgacgaaagaggttcg

SEQ ID NO: 376650 - DNA, 75 bp, synthetic construct
  source 1..75: mol_type = other DNA
aaacggcaggcaacgtcagccgccatgaaatgtatcgcaccttcaactgcggcgtcgggatgattatcgccgtgc

SEQ ID NO: 376651 - DNA, 75 bp, synthetic construct
  source 1..75: mol_type = other DNA
gtatcgatctggtcgctatgtgtgttaacgatctggtggtgcaaggcgctgaaccgctctttttcctcgactatt

SEQ ID NO: 376652 - DNA, 75 bp, synthetic construct
  source 1..75: mol_type = other DNA
ccactggatttacgcgagtttcagatgcagcaggaaaaagaactgcttcaggtcagcttggaacaagggaagtat

SEQ ID NO: 376653 - DNA, 75 bp, synthetic construct
  source 1..75: mol_type = other DNA
ggcttaccacacggtaatggcatacaaagtttctgaagtcatcgctgcaatccgcgtcgctggcattcgcatcaa

SEQ ID NO: 376654 - DNA, 75 bp, synthetic construct
  source 1..75: mol_type = other DNA
gttgcgtcacctgctatcgtcgaagcgaagccggtcaaaacgattaaagacaaggttcgcgcaatgcgtgaactt

SEQ ID NO: 376655 - DNA, 75 bp, synthetic construct
  source 1..75: mol_type = other DNA
aacccacgacaccttaaaacagctggcgaagaaatggccgctggtggcgatcaccaacggtaacgcccagccgga

SEQ ID NO: 376656 - DNA, 75 bp, synthetic construct
  source 1..75: mol_type = other DNA
tggtattcctgactgccggaattgttttatggacagttatggatattatttttgatgcctgtattgattcgtgga

SEQ ID NO: 376657 - DNA, 75 bp, synthetic construct
  source 1..75: mol_type = other DNA
aactagatttagaaacatgctgctttgccgttgatacctgggggggagatgaacatgcggggctgtatggcgaag

SEQ ID NO: 376658 - DNA, 75 bp, synthetic construct
  source 1..75: mol_type = other DNA
atctgcttggctagaacacattccttttgctttctggttagttgacacactgcggccaagaaatattgttgagct

SEQ ID NO: 376659 - DNA, 75 bp, synthetic construct
  source 1..75: mol_type = other DNA
tagcgaggaagagaagccgtttgaattgccggagggatgggagtgggtaactttttcacatttaggctatttttt

SEQ ID NO: 376660 - DNA, 75 bp, synthetic construct
  source 1..75: mol_type = other DNA
tcatctgtccccgttgggatgggagcacataaatctgagtggggattacgtctggcgaacaaatctcaagctggg

SEQ ID NO: 376661 - DNA, 75 bp, synthetic construct
  source 1..75: mol_type = other DNA
atcgggggctggagaatcagagctatcgagccagcggtctgacgttgctgactgcggcgatctcactgtggaata

SEQ ID NO: 376662 - DNA, 75 bp, synthetic construct
  source 1..75: mol_type = other DNA
gttacaccattccaacaaaggacggtgacggtgagttttcatgtgagcgttacgatcatgattttggcggttggg

SEQ ID NO: 376663 - DNA, 75 bp, synthetic construct
  source 1..75: mol_type = other DNA
catgtacttactggcggcggaaaaactcaatgtgccgatcggtgagatcttacatgtgggagacgatctcactac

SEQ ID NO: 376664 - DNA, 75 bp, synthetic construct
  source 1..75: mol_type = other DNA
aaaaagaaatggccgctggtggcgatcaccaacggtaacgcccagccggaactgtttggtctgggcgactatttt

SEQ ID NO: 376665 - DNA, 75 bp, synthetic construct
  source 1..75: mol_type = other DNA
tggagttgagcgacggcactttatcgtggttagggaacgccttgtactggatgccgctaccagaaccgccgcagg

SEQ ID NO: 376666 - DNA, 75 bp, synthetic construct
  source 1..75: mol_type = other DNA
tggcgctgcgtgaggcggcagaacgtgcaattccggcaatggaacgcctgttaatgttgccagttgatgatgatc

SEQ ID NO: 376667 - DNA, 75 bp, synthetic construct
  source 1..75: mol_type = other DNA
ccgcaggaagtgcagcagaacgccgactggctcaagcgcatgaatgcccagggcaatgatatttacatccgccct

SEQ ID NO: 376668 - DNA, 75 bp, synthetic construct
  source 1..75: mol_type = other DNA
ctggacgagccagcaacagcaagccatgagcgcatggcgggaggcagccaaggacatgaggacagccgccgggga

SEQ ID NO: 376669 - DNA, 75 bp, synthetic construct
  source 1..75: mol_type = other DNA
tggccatccatgccggtggcggcgagaacccgcactgccacctgatgatctccgagcggatcaatgacggcatcg

SEQ ID NO: 376670 - DNA, 75 bp, synthetic construct
  source 1..75: mol_type = other DNA
cgaaaagcctgaacaccctgcgtgatgaactgctgaaccgctgggggccgctcaaaatgatggaggcgcagctgt

SEQ ID NO: 376671 - DNA, 75 bp, synthetic construct
  source 1..75: mol_type = other DNA
gacatctgtgactggcagggatcgtggggcagggaggagtgtgagcaaaagctcattgagttccagaatcttgag

SEQ ID NO: 376672 - DNA, 75 bp, synthetic construct
  source 1..75: mol_type = other DNA
cagggcgctaacggggcgatacgggagctggaaaaattccgccagcagggtttttcacctgagcaggtgattcga

SEQ ID NO: 376673 - DNA, 75 bp, synthetic construct
  source 1..75: mol_type = other DNA
taattgatcatattaatgatcgcaaagatgtccgtcagagaatgttggataccgcgacggtttcttctggattcc

SEQ ID NO: 376674 - DNA, 75 bp, synthetic construct
  source 1..75: mol_type = other DNA
ctggaagccttaatcccgctgctgccgccggaatatgccagcggcgtgatgtgggcgcagagtaagttcagttaa

SEQ ID NO: 376675 - DNA, 75 bp, synthetic construct
  source 1..75: mol_type = other DNA
tgtttgatcgtttaggtgaactggcgattgttaagcgtcgcactggtggctatgacggtcgcggtcaatggcgtt

SEQ ID NO: 376676 - DNA, 75 bp, synthetic construct
  source 1..75: mol_type = other DNA
gaatttgccctgccggtcgagctgaccctcgaccagcagaaggcgctggcgtccgagttcgcccagcacctgacc

SEQ ID NO: 376677 - DNA, 75 bp, synthetic construct
  source 1..75: mol_type = other DNA
gactaagctggccaaccaagaactggaactgtcggatggttttgtcccagatggacgcgtactaaaaggaatcat

SEQ ID NO: 376678 - DNA, 75 bp, synthetic construct
  source 1..75: mol_type = other DNA
attggaactgggttgtaaatccaattgattacaaaaaatatagagctttcacgtatttatcaggatatatcttgg

SEQ ID NO: 376679 - DNA, 75 bp, synthetic construct
  source 1..75: mol_type = other DNA
ggttaatcagtacggtgatgcggatgtgtcgtaccttgatgtgcagtcacccgccacgctgggccgtatccgtta

SEQ ID NO: 376680 - DNA, 75 bp, synthetic construct
  source 1..75: mol_type = other DNA
accattaacaaatatgccagtcagttggcagcagaaccgatagcgactaatgacgttcgagagcagcagacagcc

SEQ ID NO: 376681 - DNA, 75 bp, synthetic construct
  source 1..75: mol_type = other DNA
tatagagctttcacatatttatcaggaaatatcttggatgacgtaactcactggatgccgctaccggaaccgccg

SEQ ID NO: 376682 - DNA, 75 bp, synthetic construct
  source 1..75: mol_type = other DNA
gtaaatccggtattggcggcgcagatggtaaacatggcctgcatgaatatctgcagacccaggtggtttatttac

SEQ ID NO: 376683 - DNA, 75 bp, synthetic construct
  source 1..75: mol_type = other DNA
ccgctggatttacgtgagtttcagatgcagcaggaaaaagagttgctgcaactcagtttgcaacaggggaaatat

SEQ ID NO: 376684 - DNA, 75 bp, synthetic construct
  source 1..75: mol_type = other DNA
tatctctcctcccgttggcaagggccgtttatttcccttaactgcgcggcgttaaatgaaaatctgctggattcc

SEQ ID NO: 376685 - DNA, 75 bp, synthetic construct
  source 1..75: mol_type = other DNA
ccacttgggatgacggtgatggcgaagacctgcatctcaaagaagtaacccactggatgccgctaccagaaccgc

SEQ ID NO: 376686 - DNA, 75 bp, synthetic construct
  source 1..75: mol_type = other DNA
ggcagcgttacacaaatggatcaaaaagcgttaccagaggaagagaaagaggaagatataaatactgatctcccc

SEQ ID NO: 376687 - DNA, 75 bp, synthetic construct
  source 1..75: mol_type = other DNA
gccagcgttacacaaacgaatcaaaaagcgttaccagaggaagatgaagaggaagatataaatactgatctcccc

SEQ ID NO: 376688 - DNA, 75 bp, synthetic construct
  source 1..75: mol_type = other DNA
cgaaaggcgttcggcctgagacgttgcttcgacaggttaacaccgtctcgtttccggacagtgcgatcccaccag

SEQ ID NO: 376689 - DNA, 75 bp, synthetic construct
  source 1..75: mol_type = other DNA
acatgtggagaagaatttgcccagcgcctacttggtcacacatcggagaagacaacaaaactgtatcttgatgag

SEQ ID NO: 376690 - DNA, 75 bp, synthetic construct
  source 1..75: mol_type = other DNA
ggggggaacggaccatgaaaaatattgcgacaggcggcgttctggaacgcatccgccgactgaccccgccacatg

SEQ ID NO: 376691 - DNA, 75 bp, synthetic construct
  source 1..75: mol_type = other DNA
ggttcaggcaggcattgcgaaaaccgattcgaacggagcagggcgctaacggggcgatacgggaactggaaaaat

SEQ ID NO: 376692 - DNA, 75 bp, synthetic construct
  source 1..75: mol_type = other DNA
agcgacacatcgcgtctgaccgcgacgctggaagccttaatcccgctgctgccgccggagtatgccagcggcgtg

SEQ ID NO: 376693 - DNA, 75 bp, synthetic construct
  source 1..75: mol_type = other DNA
gaaaggcgaaaaagtcctcatggacaccaccgggccgattgcgcgcacaaataccagttatgacggcacagatcg

SEQ ID NO: 376694 - DNA, 75 bp, synthetic construct
  source 1..75: mol_type = other DNA
tcattaagacaaatgtgtgccaaccatggaattgcgaccaatagtacaaatgataatgttccaggcttgctttcc

SEQ ID NO: 376695 - DNA, 75 bp, synthetic construct
  source 1..75: mol_type = other DNA
gtatggcgatcttctttttattcgctatgttattgggtgcggtgctgcaaattactaacgtctttggtaatcctt

SEQ ID NO: 376696 - DNA, 75 bp, synthetic construct
  source 1..75: mol_type = other DNA
ctgaaatcccgtcagtaccagtgtgagcaggtgaactacgacacgtttatttcgtatccgcagcttgatgcctgg

SEQ ID NO: 376697 - DNA, 75 bp, synthetic construct
  source 1..75: mol_type = other DNA
gcgctcatccctgctggacgagtggtacaaggattcatccgaccttgtggtgatgatgggacgcgacctgttcaa

SEQ ID NO: 376698 - DNA, 75 bp, synthetic construct
  source 1..75: mol_type = other DNA
ggcgggctggatgtattccttgcgccgttcttcccggatgcaacgatgctgatcacctcgttcaacaacctgtcg

SEQ ID NO: 376699 - DNA, 75 bp, synthetic construct
  source 1..75: mol_type = other DNA
gcgagcgacacgagcattacggtattccgcatggttttagttcgcgtgttgcgcttgaacgttatttgcatggct

SEQ ID NO: 376700 - DNA, 75 bp, synthetic construct
  source 1..75: mol_type = other DNA
cgcgcgtacttgaaaaagtcggttttactgtcgatgtggtaacccagaaagcgtatggttaccgccgtggggaaa

SEQ ID NO: 376701 - DNA, 75 bp, synthetic construct
  source 1..75: mol_type = other DNA
agctactttcacgcattgagcaactggacaagcaaggtcagttggcattgcccggttttcctggtgcgcttaccg

SEQ ID NO: 376702 - DNA, 75 bp, synthetic construct
  source 1..75: mol_type = other DNA
ggcgatccatctcctgtcggctttgttttattgctgctgtcgatgattgtttatggctgcgcgttcgacttcttt

SEQ ID NO: 376703 - DNA, 75 bp, synthetic construct
  source 1..75: mol_type = other DNA
tacagaattattgctatcaaccccgcaatcaattttttatgacgtgaatccagacggcacatcaatcacggagtt

SEQ ID NO: 376704 - DNA, 75 bp, synthetic construct
  source 1..75: mol_type = other DNA
aggatgggttgatgcttttggttatgtcctacaccaaaaaagaagcaatgcggatcaaaattgcttacatcaacg

SEQ ID NO: 376705 - DNA, 75 bp, synthetic construct
  source 1..75: mol_type = other DNA
atgagtccaacttcagcactaacaagctgcttcaggacgttaacgtggggtggctggagcacatcagaaccgacg

SEQ ID NO: 376706 - DNA, 75 bp, synthetic construct
  source 1..75: mol_type = other DNA
gatgatatccgtgcacttgaagccggaaaaaacggacgtagtgcacctgcactggactggctgcgtcttcctgag

SEQ ID NO: 376707 - DNA, 75 bp, synthetic construct
  source 1..75: mol_type = other DNA
gatggtcagggggataccgcctttccggaagcattaccggtgccaccggacgtgatgcagaccttcttcccgaat

SEQ ID NO: 376708 - DNA, 75 bp, synthetic construct
  source 1..75: mol_type = other DNA
cctggccgactggaaggtggtgctgtttatgcaggggcgttgcccttactgtcaccagtttgacccggtactgaa

SEQ ID NO: 376709 - DNA, 75 bp, synthetic construct
  source 1..75: mol_type = other DNA
tgctgtcggcgattatgcaggagctgggctatgtgggcgtgatggcgatggagtgttttgtcacgccgcaaggtc

SEQ ID NO: 376710 - DNA, 75 bp, synthetic construct
  source 1..75: mol_type = other DNA
tgcactggctggctaacatttctggccgcgatgacattgacgatatagacggcggtgaaattcgtgaactggcac

SEQ ID NO: 376711 - DNA, 75 bp, synthetic construct
  source 1..75: mol_type = other DNA
ttaccttgcagaccgcgccggtatcaggggccggttcagcaatgcggatgcataccatctggaccaggcctttcc

SEQ ID NO: 376712 - DNA, 75 bp, synthetic construct
  source 1..75: mol_type = other DNA
ggacgcacgctcatccctgctggatgaatggcacaaggaagctgacgacctcgtggtgattatggggcgcaacct

SEQ ID NO: 376713 - DNA, 75 bp, synthetic construct
  source 1..75: mol_type = other DNA
ggcgggctggatgtattccttgcaccgttcttcccggattcaacgatgcttatcacctcgttcaacaacctgtca

SEQ ID NO: 376714 - DNA, 75 bp, synthetic construct
  source 1..75: mol_type = other DNA
cttgcgccgttcttcccggatgcaacgatgctgatcacctcgttcaacaacctgtcgatttactggcagaaaggt

SEQ ID NO: 376715 - DNA, 75 bp, synthetic construct
  source 1..75: mol_type = other DNA
ccggaaacagagcggttccggtgggacagccgggaccagctgaccgggtattgcagcgcacagggtgagcagtgg

SEQ ID NO: 376716 - DNA, 75 bp, synthetic construct
  source 1..75: mol_type = other DNA
gagagcactgaatttacaaaaaaaattaacgtgttcggtgtgaccgaccagaaaggcgaaaaaatcctcctggac

SEQ ID NO: 376717 - DNA, 75 bp, synthetic construct
  source 1..75: mol_type = other DNA
gatcacctcgttcaacaacctgtcgatttactggcagaaaggaacaatgcgtcgcctgatgaaagacgagccgga

SEQ ID NO: 376718 - DNA, 75 bp, synthetic construct
  source 1..75: mol_type = other DNA
tccacactcaattacacatgcgggtaatcagccggaagaggtcattgttcttaattataaaaatataacatggaa

SEQ ID NO: 376719 - DNA, 75 bp, synthetic construct
  source 1..75: mol_type = other DNA
gatccatatgtatatggcattttgggtgaaaggatcgattaaagggatgatcgaagggaaggtaagtcgtcgctg

SEQ ID NO: 376720 - DNA, 75 bp, synthetic construct
  source 1..75: mol_type = other DNA
cagatgggacgcattttgcacccgttcttcggcattgcgattttcgtcgcactgatgtttatgtttgtgcgtttt

SEQ ID NO: 376721 - DNA, 75 bp, synthetic construct
  source 1..75: mol_type = other DNA
gggtgttctgctgctcaataccgtcttgacggttcgcgctggtcaggcgcattcccacgccagcctcggctggga

SEQ ID NO: 376722 - DNA, 75 bp, synthetic construct
  source 1..75: mol_type = other DNA
ggtgcactcggtatcgcttacctggcgatgtacttcatcgaacatggcttcaacatcaccataaataccgtcaat

SEQ ID NO: 376723 - DNA, 75 bp, synthetic construct
  source 1..75: mol_type = other DNA
gaaactactcatggaagaggctgattttcagaagcagctaccgaaagatgccccaccatccgagcgactggagga

SEQ ID NO: 376724 - DNA, 75 bp, synthetic construct
  source 1..75: mol_type = other DNA
acgctggaatcaagcggtgcgatacgaattgaacgccgtgggcgcaatggcagttatctggtcgaaatggataac

SEQ ID NO: 376725 - DNA, 75 bp, synthetic construct
  source 1..75: mol_type = other DNA
agccgaatcgcgaaaccatcgccgcaatgtgccgcgcgcgacaaattgccctcgccagccacgatgacgccacgc

SEQ ID NO: 376726 - DNA, 75 bp, synthetic construct
  source 1..75: mol_type = other DNA
atgcggcatttcgcgtcgccgacgacgagagcaaccgctttacgctgccgcaggcggtgaagctggtgaccaaaa

SEQ ID NO: 376727 - DNA, 75 bp, synthetic construct
  source 1..75: mol_type = other DNA
agcatggcatgaacgtgctgatgggcgcgccgaatatcgtgcgcggcggttcgcactccggcaacgtggcggcca

SEQ ID NO: 376728 - DNA, 75 bp, synthetic construct
  source 1..75: mol_type = other DNA
attcccacgccagcctcggctgggaaacgtttactgataaagtcatcagtctgattaatcagcatcgtgaaggcg

SEQ ID NO: 376729 - DNA, 75 bp, synthetic construct
  source 1..75: mol_type = other DNA
gcattttccgttcgccccggcattgcgacaccgccgtcactgctgaatatgtataaagagctcgaaaatactatt

SEQ ID NO: 376730 - DNA, 75 bp, synthetic construct
  source 1..75: mol_type = other DNA
attcccacgccagcctcggctgggaaacgttcacagataaagtcatcagcctgattaaccagcatcgagaaggtg

SEQ ID NO: 376731 - DNA, 75 bp, synthetic construct
  source 1..75: mol_type = other DNA
ttgagtcagcaggtgcagcacttgagcgagcggacagagcgcttgagccagttatacagcgagaacaggagataa

SEQ ID NO: 376732 - DNA, 75 bp, synthetic construct
  source 1..75: mol_type = other DNA
gggggacaccgccggatgcgccagccacgttacaggccatgcagtcctgccgccaggagacggcggcgctggagc

SEQ ID NO: 376733 - DNA, 75 bp, synthetic construct
  source 1..75: mol_type = other DNA
aaaagagacgggaaccgacgagcaggcaatgcgcctgacgctgcgccaggcggcgcagcaaggaataattaccgc

SEQ ID NO: 376734 - DNA, 75 bp, synthetic construct
  source 1..75: mol_type = other DNA
ggtactgtttatcgctaccctgatcgttggtgctatcgtgaacttcgtgataggccagttggtggagaaaacggg

SEQ ID NO: 376735 - DNA, 75 bp, synthetic construct
  source 1..75: mol_type = other DNA
aaggtaaaatgcttggtgctcgtcagcgtaataaagtcaacggtcagggatactataatgaaattggtattggcc

SEQ ID NO: 376736 - DNA, 75 bp, synthetic construct
  source 1..75: mol_type = other DNA
acgtaataaagttaatggtcagggctattataatgaaattggtattggccttgaaatacctgatggttttggtgg

SEQ ID NO: 376737 - DNA, 75 bp, synthetic construct
  source 1..75: mol_type = other DNA
cggtaacaagacccgtctggcctatgcaggtttaaaaattagtgaatttggctctctggactatggtcgtaacta

SEQ ID NO: 376738 - DNA, 75 bp, synthetic construct
  source 1..75: mol_type = other DNA
cgggaacgttttttctctcggcctttgtttgggcattgattgccgttatcttctggcaagccggtgggggggact

SEQ ID NO: 376739 - DNA, 75 bp, synthetic construct
  source 1..75: mol_type = other DNA
gtgttccgctggcgtacggcgatgaacgaatattacatggcgaactggcaacaactgcgtcatatcgaaggtgcc

SEQ ID NO: 376740 - DNA, 75 bp, synthetic construct
  source 1..75: mol_type = other DNA
cgggcagatcccgattagcgccgcgcgtttctggtcgttggatttcctgattttttacgcttactacattgtttg

SEQ ID NO: 376741 - DNA, 75 bp, synthetic construct
  source 1..75: mol_type = other DNA
tttggtcaggttcgcggtgctttccagtacctgattaactcatggaccacactggttgagttgatgtctatctaa

SEQ ID NO: 376742 - DNA, 75 bp, synthetic construct
  source 1..75: mol_type = other DNA
tcgctgatgggcaccgggctgctggcggtggtggggatcaaactgccgggactggaatttaaaaaccagcgcgta

SEQ ID NO: 376743 - DNA, 75 bp, synthetic construct
  source 1..75: mol_type = other DNA
ccgcataaagtgaccattgaacagttttatcgcgaagtgggcgtctttctggggattgcgctgattgcggtagtg

SEQ ID NO: 376744 - DNA, 75 bp, synthetic construct
  source 1..75: mol_type = other DNA
gcaaatactcgctcaccgatgcgcagatgcagcagtatgaagaggaacagctggcgcttgccgcacgctggtcgc

SEQ ID NO: 376745 - DNA, 75 bp, synthetic construct
  source 1..75: mol_type = other DNA
ggggcgtttgaccgtcttgggccacaccgcgcggcgctgatgaactcgctgggcgatgcgttaaaagcggcagat

SEQ ID NO: 376746 - DNA, 75 bp, synthetic construct
  source 1..75: mol_type = other DNA
tcgacgtggtgtttggtgagcgcaaactgaaaaccaccgtgctggctaacgatggtgagctgattgtgcttggtg

SEQ ID NO: 376747 - DNA, 75 bp, synthetic construct
  source 1..75: mol_type = other DNA
tgatgccgcacaccgcgcagccggtactgccagcgcaaaatcaggctctaccgccagaagttcgcgcgtttctta

SEQ ID NO: 376748 - DNA, 75 bp, synthetic construct
  source 1..75: mol_type = other DNA
ttataccatgccgttaccgctcttttcaccaccgctgatctatacggacctgacgctgacaacacatcaacagga

SEQ ID NO: 376749 - DNA, 75 bp, synthetic construct
  source 1..75: mol_type = other DNA
agagaagcgaatattgagcagcaattgcgcgaacttacactattgccactcaatattaagcatatatcggtgaag

SEQ ID NO: 376750 - DNA, 75 bp, synthetic construct
  source 1..75: mol_type = other DNA
tacccacctcgcccaggcgttaaatcgcagtttgtttgccatcggtattgataataccctgccggaagagttcgc

SEQ ID NO: 376751 - DNA, 75 bp, synthetic construct
  source 1..75: mol_type = other DNA
ttataagtagagttaagggggatctttacaaagagcatcactctgaattgaaaggtgagttgctttcgcgtatag

SEQ ID NO: 376752 - DNA, 75 bp, synthetic construct
  source 1..75: mol_type = other DNA
gcagaagagcagacggtgccgcagcttaaagccgcggcgcaggctgcacttgatggtaatgctgcgggagcagaa

SEQ ID NO: 376753 - DNA, 75 bp, synthetic construct
  source 1..75: mol_type = other DNA
cactggtggaacccgttatacgtcggacattggggattattcgccacaaagatgccgtgctttctccggcagcag

SEQ ID NO: 376754 - DNA, 75 bp, synthetic construct
  source 1..75: mol_type = other DNA
tggcgcgttacggcaacttcgtcacttacgatccgccgttaacgccgctgaccgtgctgctgtgggtgctgccag

SEQ ID NO: 376755 - DNA, 75 bp, synthetic construct
  source 1..75: mol_type = other DNA
aaggggcgtattgaggccagaacatactggcaccgggaactgggcggaatgacccgtaatcagcatctgctggga

SEQ ID NO: 376756 - DNA, 75 bp, synthetic construct
  source 1..75: mol_type = other DNA
gacccgtaatcagcatctgctgggaaaaatcaacagcggacaggttgatccgctggcggcccattatatatctcc

SEQ ID NO: 376757 - DNA, 75 bp, synthetic construct
  source 1..75: mol_type = other DNA
tttatcaccggtcgtttcgcccctgccataaaggaagaattgaagcgtcgggggattgctcgcaacttttacgac

SEQ ID NO: 376758 - DNA, 75 bp, synthetic construct
  source 1..75: mol_type = other DNA
gccgccagccggaggcgatggacggcgaaggtggctggctgctgccggggctgattgagctgcataccgataatc

SEQ ID NO: 376759 - DNA, 75 bp, synthetic construct
  source 1..75: mol_type = other DNA
gggctttgatgtggcttctattgagaaagcgctggcgcacaatgaacgcaatgaaaaccgcgttcgcggcgcatc

SEQ ID NO: 376760 - DNA, 75 bp, synthetic construct
  source 1..75: mol_type = other DNA
tgcttttattaccgggctttttcaccgacttcctcggtcttctgcttttattgccgccggtgcaaaagcatctga

SEQ ID NO: 376761 - DNA, 75 bp, synthetic construct
  source 1..75: mol_type = other DNA
cgagagcaaccgctttacgctgccgcaggcggtgaagctggtgaccaaaaatccggcgcaggcgctgaatcttca

SEQ ID NO: 376762 - DNA, 75 bp, synthetic construct
  source 1..75: mol_type = other DNA
ttcgctggagatgcaggacggcgaaatccgcgcctttgccgaaagccagagccgcctgccggaggcgatggacgg

SEQ ID NO: 376763 - DNA, 75 bp, synthetic construct
  source 1..75: mol_type = other DNA
ctggtgctggcgcatcgcaagggcaaccacattcatatcgaccacgtctggcgtcagggtaaaagggtgttctga

SEQ ID NO: 376764 - DNA, 75 bp, synthetic construct
  source 1..75: mol_type = other DNA
gctcgatcttgggaaacgagcgaaagttcgccaaattattgaacatatgtggtttcaacgtaaggcattattaaa

SEQ ID NO: 376765 - DNA, 75 bp, synthetic construct
  source 1..75: mol_type = other DNA
attagacctacatacaggtggtgggcagaagaaagtggagcttccgctcaaactgctggttgccggtgatttcag

SEQ ID NO: 376766 - DNA, 75 bp, synthetic construct
  source 1..75: mol_type = other DNA
tgctgctgtagtgacaaagttcatcgcgaaatcgtcgcccgcttcgaactggctgaagacatggcggataatctg

SEQ ID NO: 376767 - DNA, 75 bp, synthetic construct
  source 1..75: mol_type = other DNA
tactggttatattcacgtcagttatcggtatgtcactggtacgtaaccagggctttaagaatttcgtgctgatgc

SEQ ID NO: 376768 - DNA, 75 bp, synthetic construct
  source 1..75: mol_type = other DNA
tgcagtttatgctggttatgctggctgcatggggcattagctggggagccagatttgtcatggagcaggccgttc

SEQ ID NO: 376769 - DNA, 75 bp, synthetic construct
  source 1..75: mol_type = other DNA
atggccgacagttttcagaatgaagttcccgccgcccgcgttaatatcaagcttgatctgcatgttggaaacgct

SEQ ID NO: 376770 - DNA, 75 bp, synthetic construct
  source 1..75: mol_type = other DNA
ggatccgaaagccgatccgctcaacgaagaagagatgtcccgccttgcgctggggatgcgtactcaactgcaaaa

SEQ ID NO: 376771 - DNA, 75 bp, synthetic construct
  source 1..75: mol_type = other DNA
aagtttcagtacgttaacttttggttgagtgatgaacaacgtattttatttggcaatggaatggttgggtattat

SEQ ID NO: 376772 - DNA, 75 bp, synthetic construct
  source 1..75: mol_type = other DNA
cgtgaagcgttatcgctggtgacatggggctgtgctttctttgtcgccagtcattactacacttacctgtcaccc

SEQ ID NO: 376773 - DNA, 75 bp, synthetic construct
  source 1..75: mol_type = other DNA
ctgccgggtattatggtggcgttaattgtggcaggtatcagctgctaccagactggcaattatcagcaggtaaaa

SEQ ID NO: 376774 - DNA, 75 bp, synthetic construct
  source 1..75: mol_type = other DNA
ttcctgaacaaagcgtgccggaaggtaagcgtgccggatatgtcgcttatttgccgggcattgtggtggcgttaa

SEQ ID NO: 376775 - DNA, 75 bp, synthetic construct
  source 1..75: mol_type = other DNA
gagcgattatgactttatcctcgttgatagtggtcctcaccttgacgccttcctgaaaaatgctttggcctcggc

SEQ ID NO: 376776 - DNA, 75 bp, synthetic construct
  source 1..75: mol_type = other DNA
caggctatgttgcagaatgtaagccgtgaagagctgttagaggagtttattgttccttctgttgtgcctggggtt

SEQ ID NO: 376777 - DNA, 75 bp, synthetic construct
  source 1..75: mol_type = other DNA
cctggttttaagccttctgaggtactcaggaaaaccatcattgaccgtatcgctgatgattatgattttgtcttt

SEQ ID NO: 376778 - DNA, 75 bp, synthetic construct
  source 1..75: mol_type = other DNA
tcatgaaaaaaataccacctaaaataatgagtaacattattgctgtagtaatgattactcatgttttgattgcat

SEQ ID NO: 376779 - DNA, 75 bp, synthetic construct
  source 1..75: mol_type = other DNA
gtcattgccacgacttgatggattcgaacgatgtggagaatcgtttgacaccattatcagtgctaatcctgtttc

SEQ ID NO: 376780 - DNA, 75 bp, synthetic construct
  source 1..75: mol_type = other DNA
cgttccttctgaatggtctggcagcgagtgatttgcttctgacccctactccaccggcacaggttgatttccatt

SEQ ID NO: 376781 - DNA, 75 bp, synthetic construct
  source 1..75: mol_type = other DNA
acggtgacgctgaacgtcgatcaacctgccgctacctgctggttccatccacatcaacacggtaaaaccggacgt

SEQ ID NO: 376782 - DNA, 75 bp, synthetic construct
  source 1..75: mol_type = other DNA
accattggcgcaggccagtccactttcgccgggaaaacggcgacgacctgggggtataacggcaatttgttaggg

SEQ ID NO: 376783 - DNA, 75 bp, synthetic construct
  source 1..75: mol_type = other DNA
cagttccgtatcttgtcagaaaatggcaaaccgccagcgacgcatcgcgcaggctggaaagataccgttaaggta

SEQ ID NO: 376784 - DNA, 75 bp, synthetic construct
  source 1..75: mol_type = other DNA
taaatacaaccattactcacgatttcaaaccgattatttcaatgtatcgtttgtaaacgcagagtatgagtacac

SEQ ID NO: 376785 - DNA, 75 bp, synthetic construct
  source 1..75: mol_type = other DNA
ctgcaactttctatggacccgatgctcgatatgatggggatgcagatgctgatggagaaatatggcgatcaggcg

SEQ ID NO: 376786 - DNA, 75 bp, synthetic construct
  source 1..75: mol_type = other DNA
ctgatgggcgagcgttttgaagtgctggtggaggttaacgacaacaaaccgtttgacctggtgacgctgccggtc

SEQ ID NO: 376787 - DNA, 75 bp, synthetic construct
  source 1..75: mol_type = other DNA
gcgacggtggtctgctacctgaaccagtgaaggtgagcgaactgccggtgctgatgggcgagcgttttgaagtgc

SEQ ID NO: 376788 - DNA, 75 bp, synthetic construct
  source 1..75: mol_type = other DNA
acggtgacgctgaacgttgatcaacctgccgccacttgctggttccatccgcatcaacacggcaaaaccgggcgt

SEQ ID NO: 376789 - DNA, 75 bp, synthetic construct
  source 1..75: mol_type = other DNA
ccaactggcggaagagacgacgttgcactggcacgggctggaagtgccgggtgaagtggacggcggcccgcaggg

SEQ ID NO: 376790 - DNA, 75 bp, synthetic construct
  source 1..75: mol_type = other DNA
gtatttgcggcggatcgtccaacgttaccgatccctgatttgctcacgaccgatgcccgtaatcgtattcagtta

SEQ ID NO: 376791 - DNA, 75 bp, synthetic construct
  source 1..75: mol_type = other DNA
tcatgaccttcgtatccttgtgatcgaccttgacccgcaggcgtccagcactatgtttttggaccatacccatag

SEQ ID NO: 376792 - DNA, 75 bp, synthetic construct
  source 1..75: mol_type = other DNA
catatcgtcacggttgagtcagaactgcctacggcagcgcgttttgaatgggtgcatcgtcatttaccggggctg

SEQ ID NO: 376793 - DNA, 75 bp, synthetic construct
  source 1..75: mol_type = other DNA
aatccgctgaatcgcattgaggtgaggcaacatcttgggaaagaggcacaggcgctggcgctgcgtcatttccgt

SEQ ID NO: 376794 - DNA, 75 bp, synthetic construct
  source 1..75: mol_type = other DNA
caactggatgtgctccgtcaggagctggcgacgctgaaacaggacgcggcatcacagcgcgataccctcagaacg

SEQ ID NO: 376795 - DNA, 75 bp, synthetic construct
  source 1..75: mol_type = other DNA
tactgtgctataaaataaagtatgttgtaactaaagtggttaatattatggcgcgttacgatctcgtagaccgac

SEQ ID NO: 376796 - DNA, 75 bp, synthetic construct
  source 1..75: mol_type = other DNA
taaacatatcattaagaatttgcatcgtgatgaagtcctggcacagctggaaaaaagcctgaaatcaccacgcag

SEQ ID NO: 376797 - DNA, 75 bp, synthetic construct
  source 1..75: mol_type = other DNA
tggcaaaactggaacgtgaatatcgggatattgcagccctgccacaggatgcgaagttaaaaatcaaacgtccgg

SEQ ID NO: 376798 - DNA, 75 bp, synthetic construct
  source 1..75: mol_type = other DNA
tgcgacggccaagatccttccgtggccgtggagcgaatcacggtacaggagtgctttagccgatataggcagcgc

SEQ ID NO: 376799 - DNA, 75 bp, synthetic construct
  source 1..75: mol_type = other DNA
gtctgcggggacatcgcctttgttttcgtgtattctatatcgtttattgccagataaagctgataatcatgctgc

SEQ ID NO: 376800 - DNA, 75 bp, synthetic construct
  source 1..75: mol_type = other DNA
cctgtatatgttcgtgtctggtcaatggagggtagagaaggagtaacttataatatttcatctgacggtggaatc

SEQ ID NO: 376801 - DNA, 75 bp, synthetic construct
  source 1..75: mol_type = other DNA
cgctgtttatccacagtaatgttatcagttcacactcagaggctctgtcacaactcggtcagcgattacaggcag

SEQ ID NO: 376802 - DNA, 75 bp, synthetic construct
  source 1..75: mol_type = other DNA
tcccgctgtttatccacagtaatgttatcagttcacactcagaggctctgtcacaactcggacaacgattacagg

SEQ ID NO: 376803 - DNA, 75 bp, synthetic construct
  source 1..75: mol_type = other DNA
ggccaagatcctgccgtggccgtggggtgaatcaagctaccggagtgctttagccgatataggcagcgctaaggg

SEQ ID NO: 376804 - DNA, 75 bp, synthetic construct
  source 1..75: mol_type = other DNA
agctccgatatggttatccaagcttgaatcagttgatcgtcagctctttcaaatatttaatgaaatgtattcttc

SEQ ID NO: 376805 - DNA, 75 bp, synthetic construct
  source 1..75: mol_type = other DNA
gctttagcgaagaacaacaacaagccttaagaggggtttcactgcgtgccatacctttccctttattacatgcct

SEQ ID NO: 376806 - DNA, 75 bp, synthetic construct
  source 1..75: mol_type = other DNA
acgcggagacgctacgcaaagaggtgattcgtccgcccatcgttcctggcgtagacgtgattccagcctctatcg

SEQ ID NO: 376807 - DNA, 75 bp, synthetic construct
  source 1..75: mol_type = other DNA
tgccggtgcttcggtatttgccctctctaaccgcggtgcaagtagcgcaatggcgaaatacctgtctgaacgcga

SEQ ID NO: 376808 - DNA, 75 bp, synthetic construct
  source 1..75: mol_type = other DNA
tttacttcaggccatgagtcgggatattgaggagcaaagaaaagaattcaatctgacagagtatcatcaaacata

SEQ ID NO: 376809 - DNA, 75 bp, synthetic construct
  source 1..75: mol_type = other DNA
gctcgatagcgcgacgagctggcatattgcttgagtcaatgagccgggacattgaagatcaacgcaaagagttta

SEQ ID NO: 376810 - DNA, 75 bp, synthetic construct
  source 1..75: mol_type = other DNA
tgaacaaagcagccgcgctggatgaactgatatggcttacagccgtgtttcgactttctccggggattatctccg

SEQ ID NO: 376811 - DNA, 75 bp, synthetic construct
  source 1..75: mol_type = other DNA
gtaagggcgttgaatctgtatttgataccgccacggcaattcagtggtatgcgcagagggaagctgatatcgaaa

SEQ ID NO: 376812 - DNA, 75 bp, synthetic construct
  source 1..75: mol_type = other DNA
ttgatcgaactgctgaactgttacaaattcaccccggtttgccgcttggtgaaaaagttgaaaaattaaaacaag

SEQ ID NO: 376813 - DNA, 75 bp, synthetic construct
  source 1..75: mol_type = other DNA
tgaagaagattaagccggtgcataagctgcacagtcgcaataccgaacaagccgcgtttgtagtgttgaaatcgc

SEQ ID NO: 376814 - DNA, 75 bp, synthetic construct
  source 1..75: mol_type = other DNA
cgctgggcgaagaaacaccatccgcgctggtatcgtgaaatcgagaaggcagaagcgaaaaaagagagtgaagaa

SEQ ID NO: 376815 - DNA, 75 bp, synthetic construct
  source 1..75: mol_type = other DNA
taacaaagcacaaagttttgaagtggtggcgcaatatcaattcgacttcggcttgcgcccatcactcgcttacct

SEQ ID NO: 376816 - DNA, 75 bp, synthetic construct
  source 1..75: mol_type = other DNA
tcacagcttcctgatggttttgtgcttgatgcccaaccagaacagcagcaatcacctttggtttcaccagaggaa

SEQ ID NO: 376817 - DNA, 75 bp, synthetic construct
  source 1..75: mol_type = other DNA
tcaccaccgctgatctatacggacctgacgctgacaacacatcaacaggagcagatccgcaaaatgctcgaatca

SEQ ID NO: 376818 - DNA, 75 bp, synthetic construct
  source 1..75: mol_type = other DNA
aaacgggccacaccgcccctggatgatgatctgatagtgaatttatgcaccagtgaacgtaagcgtcgtctcagc

SEQ ID NO: 376819 - DNA, 75 bp, synthetic construct
  source 1..75: mol_type = other DNA
ctgaatgagtttgtaaacagatttaatcgggtaacagctccatacgaactagcagcaaaggtagtgactccaact

SEQ ID NO: 376820 - DNA, 75 bp, synthetic construct
  source 1..75: mol_type = other DNA
tatgtatggcgttctcagtggattgatggatgttggtaaaggtgttggcctgtttcaggatatgacaccagaaga

SEQ ID NO: 376821 - DNA, 75 bp, synthetic construct
  source 1..75: mol_type = other DNA
aatggaagcactaaaaaaccgtagtgatcagttatataaacgtgttgattccgctctatcaccaagaacaaaagt

SEQ ID NO: 376822 - DNA, 75 bp, synthetic construct
  source 1..75: mol_type = other DNA
cagaaaaaagtggtggcgggatcagcggcgttgacgggtctgtttggtatcaccgaaccagcggtatatggcgtc

SEQ ID NO: 376823 - DNA, 75 bp, synthetic construct
  source 1..75: mol_type = other DNA
ctggatttcctgggtattccggtcacattgttgaattactcatcatcggttattcccattattttttctgcctgg

SEQ ID NO: 376824 - DNA, 75 bp, synthetic construct
  source 1..75: mol_type = other DNA
aaatcagcgctaatgatgaagttctatttttgaaacaaggccatgagatcattgccaagaatcaggtaatgactc

SEQ ID NO: 376825 - DNA, 75 bp, synthetic construct
  source 1..75: mol_type = other DNA
tcgtaccccagagcctgcaccggctgatttatggccctgacaaacgggccacaccgcccctggatgatgatctga

SEQ ID NO: 376826 - DNA, 75 bp, synthetic construct
  source 1..75: mol_type = other DNA
atccgaatatctactacttccataatctgacgcccggttgggtgtcattcaatggtgaaaatgtagtggcacagt

SEQ ID NO: 376827 - DNA, 75 bp, synthetic construct
  source 1..75: mol_type = other DNA
gctgataccacgtttgccagcggcctgttgggtaaaggtattgccattctgccctctgttggtgaagtgcgttct

SEQ ID NO: 376828 - DNA, 75 bp, synthetic construct
  source 1..75: mol_type = other DNA
ttgttatcaatgctgctgcaacagcaatgtggatgagcaatgataaagagatttactggggatgcaataaaaaag

SEQ ID NO: 376829 - DNA, 75 bp, synthetic construct
  source 1..75: mol_type = other DNA
gagtggaccggcaatcctgatattgataacgccatcatcatgctcgaccgcatagatacgctggaaaattgcgat

SEQ ID NO: 376830 - DNA, 75 bp, synthetic construct
  source 1..75: mol_type = other DNA
aagaccgcgcccgcttttacagctacctgcatcgcgtctggtcgaaaaccagcgagaaaccggtgtggatggatc

SEQ ID NO: 376831 - DNA, 75 bp, synthetic construct
  source 1..75: mol_type = other DNA
agcaaaaaagacaacatgttggcgcatggcgggccagtggactttcccggatggcgtactgcgaacagcacaata

SEQ ID NO: 376832 - DNA, 75 bp, synthetic construct
  source 1..75: mol_type = other DNA
gaaaagcgcattttcaggctgaaatccaccggtgatgttttcagaccggaggccgactgtccggaaaacctcgtc

SEQ ID NO: 376833 - DNA, 75 bp, synthetic construct
  source 1..75: mol_type = other DNA
accgcgtgagcagtgaaagccgccagtggctggcacagtgcgggctgacggtggagcggctggcggcacagatag

SEQ ID NO: 376834 - DNA, 75 bp, synthetic construct
  source 1..75: mol_type = other DNA
caaccgctaaaaaaggtgaaaaaaggaaatattacctgggcctcttttaacctcagcgaaaaggatctcgacgaa

SEQ ID NO: 376835 - DNA, 75 bp, synthetic construct
  source 1..75: mol_type = other DNA
ttgcggcggcgctcaatcgggcgttgacgatgtcgctggcggaacgtatttcccgccatgcagaaatgctggaag

SEQ ID NO: 376836 - DNA, 75 bp, synthetic construct
  source 1..75: mol_type = other DNA
gagtggcgaaacggggaatgaggatcagccgctaaaaaaggtgaaaaaaggaaatattacctgggcctcttttaa

SEQ ID NO: 376837 - DNA, 75 bp, synthetic construct
  source 1..75: mol_type = other DNA
cgacggagtcacagtggagaagcctggtgctgaaagccggcggaaaatactggcatgtgtacatgtcgaagaaga

SEQ ID NO: 376838 - DNA, 75 bp, synthetic construct
  source 1..75: mol_type = other DNA
gacaccttgcttgaacagctttgtgattatgatttgctgggtttccagacagaaaacgatcgtctggcgttcctg

SEQ ID NO: 376839 - DNA, 75 bp, synthetic construct
  source 1..75: mol_type = other DNA
gtgcaatttcagcgtcctgcctgggacggctatctacgcgtaaatgcgttgctggcagataaattactgccgctg

SEQ ID NO: 376840 - DNA, 75 bp, synthetic construct
  source 1..75: mol_type = other DNA
aggtaattataatattattgattctgtcgatacggaatatattgaaaaaacatcagcggtgccaaacaacgcatt

SEQ ID NO: 376841 - DNA, 75 bp, synthetic construct
  source 1..75: mol_type = other DNA
gtattgctttatatttaaactccgggcaaacatatgcaggtttcagcagttatcccggatatacatcaggagaaa

SEQ ID NO: 376842 - DNA, 75 bp, synthetic construct
  source 1..75: mol_type = other DNA
atccggagagctttttcttctttcatctgcgggaggctgcaccgttgccgaaaggcttcccgctccatgctttta

SEQ ID NO: 376843 - DNA, 75 bp, synthetic construct
  source 1..75: mol_type = other DNA
ttcatcacccgcagcaggcccggctttcctcccagaagctggatgccatcgaaaaaatggaatcccgtcccgtcg

SEQ ID NO: 376844 - DNA, 75 bp, synthetic construct
  source 1..75: mol_type = other DNA
cctttatgtcgctggcgattaatgcacggctactgcgcgccagtatgctggacgtcgccggtcagcgtcacgtca

SEQ ID NO: 376845 - DNA, 75 bp, synthetic construct
  source 1..75: mol_type = other DNA
tggtggtggtttttgtggtctgtaatttgattgttgatttgctcaacgccgcgctggacccgcgcattcgtcgtc

SEQ ID NO: 376846 - DNA, 75 bp, synthetic construct
  source 1..75: mol_type = other DNA
ccgtgcgttttatcgcgtttcttggcgtgtcgatgcctaacttctggttggcgtttttactggtgatggcatttt

SEQ ID NO: 376847 - DNA, 75 bp, synthetic construct
  source 1..75: mol_type = other DNA
ggcgattgcggcggctcgccatgttggtgtagcgccggcagatgccgctaacgcgctgggttcgtttattaacgc

SEQ ID NO: 376848 - DNA, 75 bp, synthetic construct
  source 1..75: mol_type = other DNA
gaacagtgtggctataaaccgggttttgtgatcggcggtgttccggggaactttgacgtttcggcacgtttaggc

SEQ ID NO: 376849 - DNA, 75 bp, synthetic construct
  source 1..75: mol_type = other DNA
tggcaacgccatgacccgtggaaatccgtgtgtggaagcggtactggaaaaaaacatcccttatatgtctggccc

SEQ ID NO: 376850 - DNA, 75 bp, synthetic construct
  source 1..75: mol_type = other DNA
gctggagcgagcaggagctggtgggtgagcagggtcactggcaggcgaaaaagctgaccactgacgcttctgaat

SEQ ID NO: 376851 - DNA, 75 bp, synthetic construct
  source 1..75: mol_type = other DNA
ggggatctgcaaagacgacctggcgccgtcattaggccgtgccgatgaagtctttctgctgcaaccgcctcacat

SEQ ID NO: 376852 - DNA, 75 bp, synthetic construct
  source 1..75: mol_type = other DNA
aaccgcgctcaaacaccatgaagatgggcgtctgcaaagacgatctggcaccgtcgttaggccgtgccgatgaag

SEQ ID NO: 376853 - DNA, 75 bp, synthetic construct
  source 1..75: mol_type = other DNA
caacctgccgccgacgccggaaatgctggcttctacccgcacaatgctcggtctggatcagccgctgtacgtgca

SEQ ID NO: 376854 - DNA, 75 bp, synthetic construct
  source 1..75: mol_type = other DNA
ccgataacgtcacgctggaagatgaaatccaacttaaaacccgcgcgcgggaaaaaggcttgctggtgatggggc

SEQ ID NO: 376855 - DNA, 75 bp, synthetic construct
  source 1..75: mol_type = other DNA
gattcatccgctttcgccagccacgcataaatacactccatcattactgaaaaacgtcgctgtgattaacgccgg

SEQ ID NO: 376856 - DNA, 75 bp, synthetic construct
  source 1..75: mol_type = other DNA
ggtggctcgtgaagagaatgtctggtttgcctcctcgctggatgatgccgcgcgtctggcttgcctgctttcgcg

SEQ ID NO: 376857 - DNA, 75 bp, synthetic construct
  source 1..75: mol_type = other DNA
tcagcagcggacttatttgcggcttgtataccggcggtacgctggccgccgaagcggcgggattacttgccgggc

SEQ ID NO: 376858 - DNA, 75 bp, synthetic construct
  source 1..75: mol_type = other DNA
gcgccagccaacgaaggtttgatttgcggtctgtatactggcggtacgctggctgccgaagcggcgggattactt

SEQ ID NO: 376859 - DNA, 75 bp, synthetic construct
  source 1..75: mol_type = other DNA
tgtgctcacagattgcgctggcaggtgagggaattactcacgcgattggtcttggcgggcgcgatctcagccgtg

SEQ ID NO: 376860 - DNA, 75 bp, synthetic construct
  source 1..75: mol_type = other DNA
tgcgtggccgtcaacaaaaatccggcagtggcctcatttcgtaatgtcacgcgcccgacacagccgctctggcca

SEQ ID NO: 376861 - DNA, 75 bp, synthetic construct
  source 1..75: mol_type = other DNA
ttatcttcttggtacagtgctctcgcacttttttgctctctacgccagcatcaattcgtaccactgtctgaaaat

SEQ ID NO: 376862 - DNA, 75 bp, synthetic construct
  source 1..75: mol_type = other DNA
catcgcgatcgcctgcccgatttcgccgtgcgttttatcgcgtttctcggcgtgtcgatgcctaacttctggctg

SEQ ID NO: 376863 - DNA, 75 bp, synthetic construct
  source 1..75: mol_type = other DNA
gcggtttgtataccggcggtacgctggctgctgaagcggcgggattacttgccggacaccttggcgtggaagccg

SEQ ID NO: 376864 - DNA, 75 bp, synthetic construct
  source 1..75: mol_type = other DNA
gccgggcaccttggcgtggaagccgacgatacccatcatcacggcatgatgctggacgccgatggtcaccagatc

SEQ ID NO: 376865 - DNA, 75 bp, synthetic construct
  source 1..75: mol_type = other DNA
gcaaaatcaccccgactttcactgaagagtctgacggtgtgcgcctggatatcgatttcacttttgcctgcgaag

SEQ ID NO: 376866 - DNA, 75 bp, synthetic construct
  source 1..75: mol_type = other DNA
aggcttattcaccttcctggtgattctggtgggatataacgccactcaggccttcggcggcacgggtgtaaatgg

SEQ ID NO: 376867 - DNA, 75 bp, synthetic construct
  source 1..75: mol_type = other DNA
ccttcggcggcacaggtgtaaatggcgcgattatcgccgcactgtttttgctcggttataacccaggcgcgacca

SEQ ID NO: 376868 - DNA, 75 bp, synthetic construct
  source 1..75: mol_type = other DNA
ctggcactctactggcgggcgcaaccgcacagtgcattacgcagtcaggtacgcggggcgattattcccggcctg

SEQ ID NO: 376869 - DNA, 75 bp, synthetic construct
  source 1..75: mol_type = other DNA
cctttatacatgctgatggcagttatccgtcagacgaatctctgctcagtaatgaagtggtttcggtatcgctga

SEQ ID NO: 376870 - DNA, 75 bp, synthetic construct
  source 1..75: mol_type = other DNA
ttgggcgttggcgaaccgttgatttatggcgtcaccctgccccgcatgaaaccgtttattaccgcctgtttaggc

SEQ ID NO: 376871 - DNA, 75 bp, synthetic construct
  source 1..75: mol_type = other DNA
cgcggcaatattatcggcgtgttgattgccgcgtgggcctgcgctcgcattgaaggcatggtgcgccgctttatg

SEQ ID NO: 376872 - DNA, 75 bp, synthetic construct
  source 1..75: mol_type = other DNA
gaaatctctggatagcgatgaaaatgagatttgggaagtgctggggcatgtacctggagacagcgatgatatctt

SEQ ID NO: 376873 - DNA, 75 bp, synthetic construct
  source 1..75: mol_type = other DNA
gaagagcgaaacgccgtaatgctggagtacatgaaagaaaaggatgtcgccagcatgtctggccgtctgctcaat

SEQ ID NO: 376874 - DNA, 75 bp, synthetic construct
  source 1..75: mol_type = other DNA
ggctatcgacacgctgcaaagctgggtaatgaaactggttcgcctggtcatgcaactaaccccttacggcgttct

SEQ ID NO: 376875 - DNA, 75 bp, synthetic construct
  source 1..75: mol_type = other DNA
gcctgttccccatcctttccatggctggcgcaggtcaggtaggcgcagcgctggcgctttactggcgagcgcagc

SEQ ID NO: 376876 - DNA, 75 bp, synthetic construct
  source 1..75: mol_type = other DNA
cctgaacagcaatccgcttggttgtgcggtattagccgggctgttcctgattgctgtagtgtttggcgtgcatca

SEQ ID NO: 376877 - DNA, 75 bp, synthetic construct
  source 1..75: mol_type = other DNA
gcgatcgatgttatccacgcccaggtaagcggcggcggtcgtctgatttatctcggtgcgggaacatccggtcgt

SEQ ID NO: 376878 - DNA, 75 bp, synthetic construct
  source 1..75: mol_type = other DNA
ctcattccacatgctgaccgttgtgaacacagaaagccaggagacatggaaatggacggaaagaaccgggcagca

SEQ ID NO: 376879 - DNA, 75 bp, synthetic construct
  source 1..75: mol_type = other DNA
agggcgcaatattgcacaaaacctggcgttgctggggaataaagcctggctactgagcgccgtaggcagtgattt

SEQ ID NO: 376880 - DNA, 75 bp, synthetic construct
  source 1..75: mol_type = other DNA
gattgcgctgtcagggcgtgacgatgtggcaaaagttgctgcctggttccatcaacatggcctgaaccgactggt

SEQ ID NO: 376881 - DNA, 75 bp, synthetic construct
  source 1..75: mol_type = other DNA
accgcacagtagtgttccatgacacgagtgtggatgagtactttaaaataggttctaccatcaaaacagatcgcg

SEQ ID NO: 376882 - DNA, 75 bp, synthetic construct
  source 1..75: mol_type = other DNA
atatctcgcacagcaccgtgaatttattcagagggcaaaggtcattgtcgcagactgtaatatcagtgaagaggc

SEQ ID NO: 376883 - DNA, 75 bp, synthetic construct
  source 1..75: mol_type = other DNA
taatatcagtgaagaggcactggcatggattctggataatgccgccaacgtacctgtatttgtcgatccggtttc

SEQ ID NO: 376884 - DNA, 75 bp, synthetic construct
  source 1..75: mol_type = other DNA
cgtgaatttattcagagggcaaaggtcattgtcgcggactgtaatatcagtgaagaggcactggcatggattctg

SEQ ID NO: 376885 - DNA, 75 bp, synthetic construct
  source 1..75: mol_type = other DNA
cactttagttacgtccatgatttgaatgaaggtttcgtctttcattctaaagatgcagctattaatttttatgag

SEQ ID NO: 376886 - DNA, 75 bp, synthetic construct
  source 1..75: mol_type = other DNA
ttgccaattcatatgaagaataccatactccagtgtatgcggtgtctttctcgaaggatgaattcagtgaagata

SEQ ID NO: 376887 - DNA, 75 bp, synthetic construct
  source 1..75: mol_type = other DNA
tacagacgctgcgcagccgcttacaggatatacgccagcatcttcactgccagttaccggtttacgtggtactga

SEQ ID NO: 376888 - DNA, 75 bp, synthetic construct
  source 1..75: mol_type = other DNA
tcacgctcattcgccattatggcgtcagtctcattcatctggatgcctgcgctgaatgtctgccgggtctgccca

SEQ ID NO: 376889 - DNA, 75 bp, synthetic construct
  source 1..75: mol_type = other DNA
accgagagctatcactacgactcgcctgacgtctgtccgccgctgcgcacgcctacgctgttattgtgcggcagc

SEQ ID NO: 376890 - DNA, 75 bp, synthetic construct
  source 1..75: mol_type = other DNA
gtgacgcaatctgcaatgtgcataccgctgtggcccgcccggaacggcaatactgcgcatctggtcatgtgccct

SEQ ID NO: 376891 - DNA, 75 bp, synthetic construct
  source 1..75: mol_type = other DNA
gattgcggcgctggtcggtgtgctggtgactaacctgtttggtctgactgctgaaggtctggttcagggtggcgc

SEQ ID NO: 376892 - DNA, 75 bp, synthetic construct
  source 1..75: mol_type = other DNA
atggcaacctaccacttaagtgttaaatttggcggtaagggaaatgctgcaaaccacgccgattacatcgagcgc

SEQ ID NO: 376893 - DNA, 75 bp, synthetic construct
  source 1..75: mol_type = other DNA
catgccggaatgggcgcgagataatccctcacatttctggcaggcggctgaccagtttgaacgtgcgaacggttc

SEQ ID NO: 376894 - DNA, 75 bp, synthetic construct
  source 1..75: mol_type = other DNA
acgccaggtatcccgaccggggaggtgcgaaaaaggattccggaaacctgacccccactcagcaaaaagagcagt

SEQ ID NO: 376895 - DNA, 75 bp, synthetic construct
  source 1..75: mol_type = other DNA
tgtggatgagaaggggattcaggtgacggcgaaaggtcgcttgctgatccgcaacatttgcatgtgctttgatac

SEQ ID NO: 376896 - DNA, 75 bp, synthetic construct
  source 1..75: mol_type = other DNA
attggacgtttactcgaggccggagaatcaagacaacgtattgcactgatttttgatgtgggcgtttctaccatt

SEQ ID NO: 376897 - DNA, 75 bp, synthetic construct
  source 1..75: mol_type = other DNA
acggagtgagcagacaggagcgaactgaacctgaacgggttaaatcaccgtcacgcggattttctatgggattct

SEQ ID NO: 376898 - DNA, 75 bp, synthetic construct
  source 1..75: mol_type = other DNA
cactctgaaacgcgtgaagaatcagccgggaattaacggcgtgaagaacattatcgcggtcagttccggtaaagg

SEQ ID NO: 376899 - DNA, 75 bp, synthetic construct
  source 1..75: mol_type = other DNA
cgaaagttggtattttggatgccgatatctacggtccatcaattccaaccatgctgggcgcggaaaaccaacgtc

SEQ ID NO: 376900 - DNA, 75 bp, synthetic construct
  source 1..75: mol_type = other DNA
cggtggcgcagagaaactggccgagaaatacaacacgcagttgttaggccaaatgccacttcatatctctcttcg

SEQ ID NO: 376901 - DNA, 75 bp, synthetic construct
  source 1..75: mol_type = other DNA
aatttggtggcaaggggcaggctgcaaaccacgccgattacatcgagcgcaaagagaaataccgcgaccgtcagg

SEQ ID NO: 376902 - DNA, 75 bp, synthetic construct
  source 1..75: mol_type = other DNA
accagtttgaacgtgcgaatggttcgacttatagggaactggaaatcgctctgccccgtgaactgacaccggaac

SEQ ID NO: 376903 - DNA, 75 bp, synthetic construct
  source 1..75: mol_type = other DNA
cggaaggagcgaaagtcggcattctggacgcagacatctatggtccgtcgatcccaaccatgctgggcgcggaaa

SEQ ID NO: 376904 - DNA, 75 bp, synthetic construct
  source 1..75: mol_type = other DNA
ctgatgaagctgctgcgggaaaacttccagtttaatgccgacgcggaaatctcgatcgaagtcgatccgcgtgaa

SEQ ID NO: 376905 - DNA, 75 bp, synthetic construct
  source 1..75: mol_type = other DNA
tggatattctcagaaagctattgcggcgatgctgaatgtacatcgtaatacgatccgtaattgggcaatgcacaa

SEQ ID NO: 376906 - DNA, 75 bp, synthetic construct
  source 1..75: mol_type = other DNA
tgatgccgtgattcagcgtgtcgaaatgtacaacgcatcgcttcctgttccgctttcaccagctgaatgccgggc

SEQ ID NO: 376907 - DNA, 75 bp, synthetic construct
  source 1..75: mol_type = other DNA
gccggacgtaaagtcagccagttgcactggggtggcggtacgccgacgtacctgaacaaagcgcaaattagccgt

SEQ ID NO: 376908 - DNA, 75 bp, synthetic construct
  source 1..75: mol_type = other DNA
cagtggagtctggcaaaaaaagtgctggtgggtctggtgatgggcgtggtctttggccttgctctgcataccatt

SEQ ID NO: 376909 - DNA, 75 bp, synthetic construct
  source 1..75: mol_type = other DNA
tggtgtaactacagtcagtcttggaatttatgccgcaggaaaaccttttgctgaggaggtggcaaaattggtttt

SEQ ID NO: 376910 - DNA, 75 bp, synthetic construct
  source 1..75: mol_type = other DNA
cgcttattattttcgaggttcctggtcccagagttcgtttgtattctggtcagtaacgttaagtgaggattctgt

SEQ ID NO: 376911 - DNA, 75 bp, synthetic construct
  source 1..75: mol_type = other DNA
acggcgaaaggtcgcctgcttatccgcaacatttgcatgtgctttgatacctatctgcgccagaaagcgcggatg

SEQ ID NO: 376912 - DNA, 75 bp, synthetic construct
  source 1..75: mol_type = other DNA
tcccgttctgccataagctttgttacttctgcggttgcaataagattgtcacacgccagcagcacaaggccgatc

SEQ ID NO: 376913 - DNA, 75 bp, synthetic construct
  source 1..75: mol_type = other DNA
actgctacgcgcagaaccagaaagagttgaagcagtactatcagcaagtggatgaacaaggcaatgcgctgtggc

SEQ ID NO: 376914 - DNA, 75 bp, synthetic construct
  source 1..75: mol_type = other DNA
tcccgttctgccacaagctttgctatttctgtggctgcaataaaattgtgactcgccagcagcataaagccgacc

SEQ ID NO: 376915 - DNA, 75 bp, synthetic construct
  source 1..75: mol_type = other DNA
acctgatttacggcctgccgaaacagacgccggaaagtttcgcctttaccctgaaacgcgtggcggagctaaacc

SEQ ID NO: 376916 - DNA, 75 bp, synthetic construct
  source 1..75: mol_type = other DNA
ccgatcgtctgagtgtctttaactacgcgcatctgccgaccatttttgctgctcagcgtaaaatcaaagatgctg

SEQ ID NO: 376917 - DNA, 75 bp, synthetic construct
  source 1..75: mol_type = other DNA
agcttgatctggctgtactggcaaaatcccgggaagaagagacgacccggccaaccctgaaagaactggcagcga

SEQ ID NO: 376918 - DNA, 75 bp, synthetic construct
  source 1..75: mol_type = other DNA
tcctgatgatccggagattttttcgcagacagaggcgcagcaactggtcgcggaagagcttgtggagaagtggga

SEQ ID NO: 376919 - DNA, 75 bp, synthetic construct
  source 1..75: mol_type = other DNA
gctgggacaccggggggatcgatggcgaaattgtctatcagaggtcaaaaaaacacggtgttttccgggtgctgc

SEQ ID NO: 376920 - DNA, 75 bp, synthetic construct
  source 1..75: mol_type = other DNA
cagtgcccgcttgaggctattcaatgtccaattacactggagcagcctgaaaaaggtatttttgtgaagaattca

SEQ ID NO: 376921 - DNA, 75 bp, synthetic construct
  source 1..75: mol_type = other DNA
gtgagcgtggctatctatcgcagcaaaaaatggctcgccgccgtcgggcagatcgagcgttgtgttctttgtgga

SEQ ID NO: 376922 - DNA, 75 bp, synthetic construct
  source 1..75: mol_type = other DNA
acacttgagtattgatgaagtgttttattttagtgatttaccaagaccatcatcactcagtaatacagtgttctc

SEQ ID NO: 376923 - DNA, 75 bp, synthetic construct
  source 1..75: mol_type = other DNA
attgagggctcggtatggccaaaatccattcgcggctcgacgcctaaaataaaaggctcctgccagatcgaaaaa

SEQ ID NO: 376924 - DNA, 75 bp, synthetic construct
  source 1..75: mol_type = other DNA
ctgatcaaaattattatctgcctaaagaatcctcatacggtgacggagaatggaaaacgctgccgttccaggtcg

SEQ ID NO: 376925 - DNA, 75 bp, synthetic construct
  source 1..75: mol_type = other DNA
aactggaagccattctggcgcgggcgcgcaaagaggggtacggacagaactaccgcggctgggatcaagaagaaa

SEQ ID NO: 376926 - DNA, 75 bp, synthetic construct
  source 1..75: mol_type = other DNA
gtactggcaaaatcccgggaagaagagacgacccggccaacccttaaagaactggcagcgaagctgtccggagga

SEQ ID NO: 376927 - DNA, 75 bp, synthetic construct
  source 1..75: mol_type = other DNA
gtttatctgtgtgaagtggggacggacaccgcaaaagaaattctctatgcccgtatgaaagccgagcccacgcct

SEQ ID NO: 376928 - DNA, 75 bp, synthetic construct
  source 1..75: mol_type = other DNA
gcgcagggggcacaactgattctcgccaatggtatgaatctggaattgtggttccaacgcttttaccagcatctc

SEQ ID NO: 376929 - DNA, 75 bp, synthetic construct
  source 1..75: mol_type = other DNA
cggtgtttggtcatacgttgcttaatgcgatgcgtattcgcaccaaagcggcgcgcggtctggcgatgggaacgg

SEQ ID NO: 376930 - DNA, 75 bp, synthetic construct
  source 1..75: mol_type = other DNA
ggcctatcctttatatgagcagctacaccagatccgcgcgcgctggaaatcgatcatcaccatctgttttatcgg

SEQ ID NO: 376931 - DNA, 75 bp, synthetic construct
  source 1..75: mol_type = other DNA
gcctacccctggcgatattaaacgtgcgcaggaggcacaactgattctcgccaatggtatgaatctggaattgtg

SEQ ID NO: 376932 - DNA, 75 bp, synthetic construct
  source 1..75: mol_type = other DNA
cattgactgggaatcactgaaggtaacctcgcaggacattattgctcttctgtccggccttgctcccggaactac

SEQ ID NO: 376933 - DNA, 75 bp, synthetic construct
  source 1..75: mol_type = other DNA
tattcggtaacagaggcgaaccgtcagctacaggcgttgaggataaacagcgggcgctacgaggggctgtggcgc

SEQ ID NO: 376934 - DNA, 75 bp, synthetic construct
  source 1..75: mol_type = other DNA
tcgaaactctggcctcagaagttgggcagaatgccgccgcggcagccatgagtgctcaggaggcgaaagacgcag

SEQ ID NO: 376935 - DNA, 75 bp, synthetic construct
  source 1..75: mol_type = other DNA
taatattcgtgatgcgttgataaaatacgatcccgctaatgcacaaacctaccaacgtaatgccgatacttataa

SEQ ID NO: 376936 - DNA, 75 bp, synthetic construct
  source 1..75: mol_type = other DNA
aacggcccggtacctacgtatatcgaccttctgaaggttactaccagtacgctggtgcagggaattaaagccggg

SEQ ID NO: 376937 - DNA, 75 bp, synthetic construct
  source 1..75: mol_type = other DNA
atgccaaatgcatggttgccgacctttattgaagcctataacaaccggttcgctacgtcgcctcgtactactgat

SEQ ID NO: 376938 - DNA, 75 bp, synthetic construct
  source 1..75: mol_type = other DNA
tgggacaccggggggatcgatggtgaaattgtttatcagagatcaaaaaacacggtgttttccgggtgctgccgg

SEQ ID NO: 376939 - DNA, 75 bp, synthetic construct
  source 1..75: mol_type = other DNA
ggggatcgatggagaaatcgtttatcagaggtcaaaaaaacacggtgttttccgggtgctgccggtaaaaggcgc

SEQ ID NO: 376940 - DNA, 75 bp, synthetic construct
  source 1..75: mol_type = other DNA
ctacattagagagtcaaattcataagtttgtttttccattccgggccgggttaaaggggatgattcggccattgc

SEQ ID NO: 376941 - DNA, 75 bp, synthetic construct
  source 1..75: mol_type = other DNA
gtctgaccatcaaagtgcggcaattaagcgaaggatttcgtgacgaacagtggatttctgcactggcggccccgc

SEQ ID NO: 376942 - DNA, 75 bp, synthetic construct
  source 1..75: mol_type = other DNA
cagttgtttcagtttgaacccagggaggtcagacggatttttgctggcgagtacgaaatggggtctgacgctcag

SEQ ID NO: 376943 - DNA, 75 bp, synthetic construct
  source 1..75: mol_type = other DNA
ccaataacggcgcgttgcaggcgcgtttaacccagccgggtaaacgcaccggaaaaatctattatgtgcaggtgg

SEQ ID NO: 376944 - DNA, 75 bp, synthetic construct
  source 1..75: mol_type = other DNA
tcacgtggaatccacgattcgcgatgttccctgtctgaaagccctttctccctggctgggacgtaaacaccgcga

SEQ ID NO: 376945 - DNA, 75 bp, synthetic construct
  source 1..75: mol_type = other DNA
atccgacaaataccggcgtcagcactaccagcagtagttcgatcacgggcagtaacgccgcagatttacaaagca

SEQ ID NO: 376946 - DNA, 75 bp, synthetic construct
  source 1..75: mol_type = other DNA
atgatccccggcaccactgttcttgcgggaaccggcagtgaagaaggggctgtgaccacgaccacgccgtttggt

SEQ ID NO: 376947 - DNA, 75 bp, synthetic construct
  source 1..75: mol_type = other DNA
ctggtgcagggggtgatccgcggcaacaacggtaatacgctggatcttggcacttacggcaccactaccctcgac

SEQ ID NO: 376948 - DNA, 75 bp, synthetic construct
  source 1..75: mol_type = other DNA
ctcaccagccagtgctggcaagtcacgccacaatctaaccgcattggcctgcggttacagggcgagttaccgctt

SEQ ID NO: 376949 - DNA, 75 bp, synthetic construct
  source 1..75: mol_type = other DNA
tggctggatgcactgaaagatcccaacggcctgaaaacctttgtgaacaccacgctgggcgagacctgggaagag

SEQ ID NO: 376950 - DNA, 75 bp, synthetic construct
  source 1..75: mol_type = other DNA
ccctgacacaggcaccggtcattctgttaactcatccacgtatgggagaactgttgtttcagtttgaacccaggg

SEQ ID NO: 376951 - DNA, 75 bp, synthetic construct
  source 1..75: mol_type = other DNA
tgggtggtgcggcagcaaaaaactaccgtgaaaaatccgtggacgtggtctgctatgacgagctttcctcgttcg

SEQ ID NO: 376952 - DNA, 75 bp, synthetic construct
  source 1..75: mol_type = other DNA
tcatgtggagtcgacattacgggatgttccctgtctgaaaattctttccccctggctggggcgtaagcacaggga

SEQ ID NO: 376953 - DNA, 75 bp, synthetic construct
  source 1..75: mol_type = other DNA
tggaagacgttgccgtttcaggtggcaataatgaactgcatgggtaatgaccggatccgcacgattaatcttata

SEQ ID NO: 376954 - DNA, 75 bp, synthetic construct
  source 1..75: mol_type = other DNA
tattagaaaaaaataaggggcttattgccccttttctttttgctatttgtttactaattgataaatcatatcttt

SEQ ID NO: 376955 - DNA, 75 bp, synthetic construct
  source 1..75: mol_type = other DNA
tcatggctgtgtgatccatcagtctgagcttgaccagagtaacgggcggtggatctgtgaaaacacgggcatgtg

SEQ ID NO: 376956 - DNA, 75 bp, synthetic construct
  source 1..75: mol_type = other DNA
atgggtaacgaccaggttcgcacggttaacctgattaaatctgcccgtgttggctatacaaagatgttgctgggg

SEQ ID NO: 376957 - DNA, 75 bp, synthetic construct
  source 1..75: mol_type = other DNA
cgcgctccatcacgttccatatctggacggcgtacagtccgttcaccacctgggtacagatagtctatgactggc

SEQ ID NO: 376958 - DNA, 75 bp, synthetic construct
  source 1..75: mol_type = other DNA
attttttcgcagacagaggcgcagcaactggtcgcggaagagcttgtggagaagtgggaaaaaggaaagatgcgt

SEQ ID NO: 376959 - DNA, 75 bp, synthetic construct
  source 1..75: mol_type = other DNA
ctggtgcctgggcggcgctgccgccaaaaactaccgtgaaaaatccgtggacgtggtctgctatgacgaactttc

SEQ ID NO: 376960 - DNA, 75 bp, synthetic construct
  source 1..75: mol_type = other DNA
tgtgggttgtgccattgctggtagaaaactcactgtataaaaaagcgaatcgagtgctggtggtggatgtcagcc

SEQ ID NO: 376961 - DNA, 75 bp, synthetic construct
  source 1..75: mol_type = other DNA
catgtcgaacaaattcttgctgcccaggcaacgcgcgaagcccgccttgccgtggcagatgacgtcattgataat

SEQ ID NO: 376962 - DNA, 75 bp, synthetic construct
  source 1..75: mol_type = other DNA
gggggggcgggtattttattgagcataaatcccgaaacagtctgctttttcagcccacggattctgccgctgaag

SEQ ID NO: 376963 - DNA, 75 bp, synthetic construct
  source 1..75: mol_type = other DNA
ccattccagatcgccattatgaactgtatgggtaacgaccaggttcgcacggttaacctgattaaatctgcccgt

SEQ ID NO: 376964 - DNA, 75 bp, synthetic construct
  source 1..75: mol_type = other DNA
tggtgcctgggcggcgctgccgccaaaaactaccgtgaaaaatccgtggacgtggtctgctatgacgagctttcc

SEQ ID NO: 376965 - DNA, 75 bp, synthetic construct
  source 1..75: mol_type = other DNA
aaaacccgcaatcagcggggcgtgtatctgtgtgaagtggggacggacaccgcaaaagaaattctctatgcccgt

SEQ ID NO: 376966 - DNA, 75 bp, synthetic construct
  source 1..75: mol_type = other DNA
aacgtcttgtttctctgtcgcgcacaaagctgttgcgtctgtggcaggccgtgttttcagtatgtctgctgctcc

SEQ ID NO: 376967 - DNA, 75 bp, synthetic construct
  source 1..75: mol_type = other DNA
ctggcaaaacgcgctggcgcgtcggtggtgattggtgtcgatcctatcgctcatcgctgtgatattgcccgtcgc

SEQ ID NO: 376968 - DNA, 75 bp, synthetic construct
  source 1..75: mol_type = other DNA
cgcgatcggtcaaattgccatccaactggcgaaacgcgctggcgcatcggtggtaattggcgtcgatcctatcgc

SEQ ID NO: 376969 - DNA, 75 bp, synthetic construct
  source 1..75: mol_type = other DNA
gttgtgctggtggcgtcttgccaaagaagccggtgcgaatgaagagaagcatgctgctatttctgaacgttatgg

SEQ ID NO: 376970 - DNA, 75 bp, synthetic construct
  source 1..75: mol_type = other DNA
aactgaagcaatcccacagtgggcggcagaagaaggacatgccatcaccgattatcagcagattggcgatgctgc

SEQ ID NO: 376971 - DNA, 75 bp, synthetic construct
  source 1..75: mol_type = other DNA
atggcgattaaaaagctggatgtggtgacgcaggtctgtccgtttccactcatagaagcaaaagcagcactggca

SEQ ID NO: 376972 - DNA, 75 bp, synthetic construct
  source 1..75: mol_type = other DNA
atgcatcaatttgagtctgttgttgcccgtctgcgccgtctcgccagtcgtacgctgacccgtgccggtacgctt

SEQ ID NO: 376973 - DNA, 75 bp, synthetic construct
  source 1..75: mol_type = other DNA
atgcaccattctgagtctgttgttgcccgcctgcgccgtttcgccagtcgtacgctgacccgcgccggtacgctt

SEQ ID NO: 376974 - DNA, 75 bp, synthetic construct
  source 1..75: mol_type = other DNA
aacctgggctaaattcgggatgctttgcgttgtgggggtgatcctgatcgtcgtagttatctggctggcgtctaa

SEQ ID NO: 376975 - DNA, 75 bp, synthetic construct
  source 1..75: mol_type = other DNA
cgcgatcggtcaaattgccatccaactggcaaaacgcgctggcgcgtcggtggtaattggcgtcgatcctatcgc

SEQ ID NO: 376976 - DNA, 75 bp, synthetic construct
  source 1..75: mol_type = other DNA
gatcaaaacgctgaccggcaagcagggtgccgatgtgattatcgaaaccagcggttacgccgacgcgctgcaatc

SEQ ID NO: 376977 - DNA, 75 bp, synthetic construct
  source 1..75: mol_type = other DNA
gaaaatatatcaaagcgatttgtgaagagtttttaagtcggatccaagaagtgcaaacggggggggaagatgaat

SEQ ID NO: 376978 - DNA, 75 bp, synthetic construct
  source 1..75: mol_type = other DNA
tccgccgcgcttacctgaacgcgccagatgatgcggaattgctgggcaaactggtcaatgcgttaaacgcctgta

SEQ ID NO: 376979 - DNA, 75 bp, synthetic construct
  source 1..75: mol_type = other DNA
cttctggtgtcaatttatggggcctgtattacattggatcagagatactcagagaaggctggttacatcgtagta

SEQ ID NO: 376980 - DNA, 75 bp, synthetic construct
  source 1..75: mol_type = other DNA
aactattatttcatttaagtcaaaacaagatgaatcaagctatccgcagttcgttccaggtctttttgatgatga

SEQ ID NO: 376981 - DNA, 75 bp, synthetic construct
  source 1..75: mol_type = other DNA
aaaaaatctacatgcgattgaaaaagataatagcaaagctgctcgtagagagttggatcaatttattcgagacac

SEQ ID NO: 376982 - DNA, 75 bp, synthetic construct
  source 1..75: mol_type = other DNA
tgtgtggcgttttctggccctgagtgccggagaatctcaaatcatccacgtaaccgcctggacggaacgcgaagc

SEQ ID NO: 376983 - DNA, 75 bp, synthetic construct
  source 1..75: mol_type = other DNA
accttgtacacacacaaactgcctttgtgtggcgttttctggcactgagtgccggagaatctcaaatcatccacg

SEQ ID NO: 376984 - DNA, 75 bp, synthetic construct
  source 1..75: mol_type = other DNA
cccagtactactgagcccaaatcaacacgcattaagcagattaaaactaataaaaaagaagccgtgacctcggag

SEQ ID NO: 376985 - DNA, 75 bp, synthetic construct
  source 1..75: mol_type = other DNA
ggccggggcacaccgcaaagcggtagatctggcaaaactgcaaatcactctggcgctggagcgtgaatccgtctg

SEQ ID NO: 376986 - DNA, 75 bp, synthetic construct
  source 1..75: mol_type = other DNA
aagatattcgcaatctccagtgggatatcatggcgaccgccagcatcttacaacagtgggatttggtgcggacta

SEQ ID NO: 376987 - DNA, 75 bp, synthetic construct
  source 1..75: mol_type = other DNA
tttcacgccactttatgcctgcctgcaaaccattatcccgaccgaatacggcgagtcctggttctgcgaaggtgt

SEQ ID NO: 376988 - DNA, 75 bp, synthetic construct
  source 1..75: mol_type = other DNA
gaaaaacgcttatttagaagttcagacccttttgaatatcttaagtctatagagccacccgtaaactcagtcgct

SEQ ID NO: 376989 - DNA, 75 bp, synthetic construct
  source 1..75: mol_type = other DNA
aagcgctgaatgacgccgtcccgcagctcctgaataaccccgagatgatgcgcatctttgccgatgaggggaata

SEQ ID NO: 376990 - DNA, 75 bp, synthetic construct
  source 1..75: mol_type = other DNA
atgttaaatgcgctgataagtatgaggtcaggaactatattgagaaaaaaattggcagtgaatatttagttccgc

SEQ ID NO: 376991 - DNA, 75 bp, synthetic construct
  source 1..75: mol_type = other DNA
ggcagtggcctgatggggcagatcaaaggttatctgcaggatggtgttgttattggtgggctggtagtagccgcc

SEQ ID NO: 376992 - DNA, 75 bp, synthetic construct
  source 1..75: mol_type = other DNA
tccctgagaatcagcggtggatggtcaccagtgaaggggctttttcttatctcgcacgcgatttggggctaaaag

SEQ ID NO: 376993 - DNA, 75 bp, synthetic construct
  source 1..75: mol_type = other DNA
atgctgcagaagtctcatccataaccaagcctggtgcagaaattcatgagtatcagcctacccctggcgatatta

SEQ ID NO: 376994 - DNA, 75 bp, synthetic construct
  source 1..75: mol_type = other DNA
atgctgaattttttgaaaaaactttatagctatctagagtttttaggtgctcttatttgggttggtgttgggttg

SEQ ID NO: 376995 - DNA, 75 bp, synthetic construct
  source 1..75: mol_type = other DNA
gaaacaccggcgacttctgccagccctcatcagttgccggaagacaatacagtgatacagagcgtgatgccatta

SEQ ID NO: 376996 - DNA, 75 bp, synthetic construct
  source 1..75: mol_type = other DNA
tcaatatgaaaggtggggttggtaaaacaactttatgcgttgggattgctgagtttttagccaaccatatggggc

SEQ ID NO: 376997 - DNA, 75 bp, synthetic construct
  source 1..75: mol_type = other DNA
cgtaaattcatcaccgaaaatgacttaaaagaaagttacgactatatctttatcgatagccccccaacaatctca

SEQ ID NO: 376998 - DNA, 75 bp, synthetic construct
  source 1..75: mol_type = other DNA
gaactccagtctggattcatttaaaagcctgcccgatggttcgcgtgtttataccctgaagctggatgtatcaaa

SEQ ID NO: 376999 - DNA, 75 bp, synthetic construct
  source 1..75: mol_type = other DNA
ctgctcgatcgcatttcaggcgagtgcaactgaaaaattcaaggtcattacaacatttaccatcatcgcagatat

SEQ ID NO: 377000 - DNA, 75 bp, synthetic construct
  source 1..75: mol_type = other DNA
agcagaaagcgagcagcaggcagggcaacatgcagacgctgccgcccgggaaaaagaagaggtaaaaaacctggc

SEQ ID NO: 377001 - DNA, 75 bp, synthetic construct
  source 1..75: mol_type = other DNA
gttctgttcaacttcaacaaagcaaccctgaaaccggaaggtcaggctgctctggatcagctgtacagccagctg

SEQ ID NO: 377002 - DNA, 75 bp, synthetic construct
  source 1..75: mol_type = other DNA
cggcgtttctccggtattcgcaggcggtgttgagtacgcgatcactccagaaatcgctacccgtctggaatacca

SEQ ID NO: 377003 - DNA, 75 bp, synthetic construct
  source 1..75: mol_type = other DNA
gcgtttctccggttttcgcaggtggtgttgagtacgcgatcactcctgaaatcgctacccgtctggaataccagt

SEQ ID NO: 377004 - DNA, 75 bp, synthetic construct
  source 1..75: mol_type = other DNA
atgaaactttccctgacgccggaagccgacagcgttaacgtacaggcactgaatatggggcgaattgtcgttgac

SEQ ID NO: 377005 - DNA, 75 bp, synthetic construct
  source 1..75: mol_type = other DNA
ttgaagtcaatttacaggctgagccggaacataatcgggtacgaattgaaacgctttgccgcctgaccgggaaaa

SEQ ID NO: 377006 - DNA, 75 bp, synthetic construct
  source 1..75: mol_type = other DNA
ttgaagtcaatttacaggccgagccggagcacaatcgggtgcgtatagaaaccttatgccgcctgaccgggaaaa

SEQ ID NO: 377007 - DNA, 75 bp, synthetic construct
  source 1..75: mol_type = other DNA
aatttcttgaacaattggttcagcaagatattgataaacggaaattaatacttgaacatataagacaaagaagtt

SEQ ID NO: 377008 - DNA, 75 bp, synthetic construct
  source 1..75: mol_type = other DNA
gtttggtgccatcgtggtggttggtgttgttctgctggtcgccattatctggctgctgggcaagtcggcctccat

SEQ ID NO: 377009 - DNA, 75 bp, synthetic construct
  source 1..75: mol_type = other DNA
tgatttgccccagatggagccgccgtcatcgggcggtggcagcgggctgttcgggcagattaaaggctattccca

SEQ ID NO: 377010 - DNA, 75 bp, synthetic construct
  source 1..75: mol_type = other DNA
aatatagctaacttccagaatattgttcttgccgccagcatatttcttgcttatgcagggatggaaatgaatgcg

SEQ ID NO: 377011 - DNA, 75 bp, synthetic construct
  source 1..75: mol_type = other DNA
ttcgccagcaagagatggacagcaaccggtggcgtagtcgtacttaccgatcctgcccggatcaaaaaactgctg

SEQ ID NO: 377012 - DNA, 75 bp, synthetic construct
  source 1..75: mol_type = other DNA
gccatactgacccgaatctacaaacccggcatagattatgcgaaggcgggcgtgatgctttcgtcaatgaccgat

SEQ ID NO: 377013 - DNA, 75 bp, synthetic construct
  source 1..75: mol_type = other DNA
atgaaactggccctgacgctggaagctgacagcgttaacgtgcaggcgctgaacatggggtgcattgtcgttgac

SEQ ID NO: 377014 - DNA, 75 bp, synthetic construct
  source 1..75: mol_type = other DNA
aaatccatttgatgcttttgatagcgatggtgtctcaggtgccattgcagaatcagacactatttttgaaaatat

SEQ ID NO: 377015 - DNA, 75 bp, synthetic construct
  source 1..75: mol_type = other DNA
cttcgttagcaggaaacgctaaaaccaagataaacgatccatttgttggcgcttttattttttcatggctaatat

SEQ ID NO: 377016 - DNA, 75 bp, synthetic construct
  source 1..75: mol_type = other DNA
gagtagcaattatgcgcaaggtgaaaaccgctacagcaattgtggtatcgagccgcttaccgctacacaggacac

SEQ ID NO: 377017 - DNA, 75 bp, synthetic construct
  source 1..75: mol_type = other DNA
cgtacagaaggatgttgatgcattttttgagcaagagaaaattgatcaggtttatcttgctgcggctaaagttgg

SEQ ID NO: 377018 - DNA, 75 bp, synthetic construct
  source 1..75: mol_type = other DNA
ggtattaaccgggcacggcgcggccatcgacaccacgaccgccgccggcaagctggtctttggcatcttcgccgc

SEQ ID NO: 377019 - DNA, 75 bp, synthetic construct
  source 1..75: mol_type = other DNA
tacgctaacgttgcatcatcattttttggtgccaagttccagcgtaatattgaagaattgctggtagcgccggtg

SEQ ID NO: 377020 - DNA, 75 bp, synthetic construct
  source 1..75: mol_type = other DNA
ccttctaattcgcatgtaattcctgcattactacgccgttttcatgaggcaaagttagaaggtctaccacaagtt

SEQ ID NO: 377021 - DNA, 75 bp, synthetic construct
  source 1..75: mol_type = other DNA
ttcagctcacaaggccggaattcaaaaattactttttttaggctcaagctgtatttatcctaaattcgcagagca

SEQ ID NO: 377022 - DNA, 75 bp, synthetic construct
  source 1..75: mol_type = other DNA
acgggcatacttgagccaactaatgagccatacgcaattgctaaaattgcgggcataaaattatgtgaatcttat

SEQ ID NO: 377023 - DNA, 75 bp, synthetic construct
  source 1..75: mol_type = other DNA
cacatccagattgcagggatacgttgcaggggcattgattagcacaaatgcgagcaacaaccctgcttacgggaa

SEQ ID NO: 377024 - DNA, 75 bp, synthetic construct
  source 1..75: mol_type = other DNA
ggtgtttctggcggtactgagctgaccgcgtctggctcggctaaccagatgatcaccagcatctctaccgcgatg

SEQ ID NO: 377025 - DNA, 75 bp, synthetic construct
  source 1..75: mol_type = other DNA
cagcaataccggtactgacggcctgttccagagcgcggtaactttccaggtgggcgcagaatcttctgacaccat

SEQ ID NO: 377026 - DNA, 75 bp, synthetic construct
  source 1..75: mol_type = other DNA
ctgttcgggtatctcagaaccagaatcaacagtgtgttcagatccgtggtgcaggtatgcgttccgcagacagaa

SEQ ID NO: 377027 - DNA, 75 bp, synthetic construct
  source 1..75: mol_type = other DNA
gtaaatgaattaattcagcagggatatctgaacaacggtttttcccgctccccctttggacaaagctatattacc

SEQ ID NO: 377028 - DNA, 75 bp, synthetic construct
  source 1..75: mol_type = other DNA
attgccacaccaatgatttattcagaaattgaagactggctgaatgaacaactttatcaaagtgcggctttacat

SEQ ID NO: 377029 - DNA, 75 bp, synthetic construct
  source 1..75: mol_type = other DNA
ctcatcttacaaagcgggcataaagaaactattattcttagggtcaagttgtatctatccaaagtttgcagaaca

SEQ ID NO: 377030 - DNA, 75 bp, synthetic construct
  source 1..75: mol_type = other DNA
cttatgaccgcccagctcgacggcgtggtagagcgctgcaatcagcgctggctgaccggggagggcaacgtatga

SEQ ID NO: 377031 - DNA, 75 bp, synthetic construct
  source 1..75: mol_type = other DNA
acaaaataccaatattgagaactatttattccatttcaagatcattaatcttcacttcaagctccaggctggtcg

SEQ ID NO: 377032 - DNA, 75 bp, synthetic construct
  source 1..75: mol_type = other DNA
gacaagccctggaagctggactggttttacgaagtgcgtcatctttcgacgtcattaggactggtagaggcggga

SEQ ID NO: 377033 - DNA, 75 bp, synthetic construct
  source 1..75: mol_type = other DNA
atgcgtctaaaccccggccaacaacaagctgtcgaattcgttaccggcccctgcctggtgctggcgggcgcgggt

SEQ ID NO: 377034 - DNA, 75 bp, synthetic construct
  source 1..75: mol_type = other DNA
gcgcaatgtcggccagctcgtcggcgaccttatgcaggtgcaggactgcgccaccgttcgccgtgacccggcgca

SEQ ID NO: 377035 - DNA, 75 bp, synthetic construct
  source 1..75: mol_type = other DNA
gtgacctcgaatgccttgagcatatgcgcaatgtcggccagctcgtcggcgaccttatgcaggtgcaggactgcg

SEQ ID NO: 377036 - DNA, 75 bp, synthetic construct
  source 1..75: mol_type = other DNA
gcatacgctatgaccccagccggcacttcagtcttatcgccgaagcggggtttgaaaagcggaaaagtttttttg

SEQ ID NO: 377037 - DNA, 75 bp, synthetic construct
  source 1..75: mol_type = other DNA
taccgatcatcgtcatccctactctggcgtctaccgatgcgccatgcagctcgctggttgtcatctacacggccc

SEQ ID NO: 377038 - DNA, 75 bp, synthetic construct
  source 1..75: mol_type = other DNA
agggcatattacgttcgatacaacaaagcccgatggagcccctcgaaaactacttgatgtaacgcttcttcatca

SEQ ID NO: 377039 - DNA, 75 bp, synthetic construct
  source 1..75: mol_type = other DNA
tcactcctctggtcaacgaaccgtttgtgctggcctgccgacgcgatcatcctttggccaaaaagcaactggtgg

SEQ ID NO: 377040 - DNA, 75 bp, synthetic construct
  source 1..75: mol_type = other DNA
actggttttacgaagtgcgtcatctttcgacgtcattaggactggtggaggcgggactggggatttcggcgcttc

SEQ ID NO: 377041 - DNA, 75 bp, synthetic construct
  source 1..75: mol_type = other DNA
cagttcatttaacaatgctgctaaattacttaatattacgcaacctgcattaacgcgcagaataaaaaagatgga

SEQ ID NO: 377042 - DNA, 75 bp, synthetic construct
  source 1..75: mol_type = other DNA
ggcgtttctggcggtactgagctgactgcgtctggctcggctaaccagatgatcaccagcatctctaccgcgatg

SEQ ID NO: 377043 - DNA, 75 bp, synthetic construct
  source 1..75: mol_type = other DNA
ttcaaactcaataataccaatctgtacgggaagtctgatgaagaactaggcattttgtctaaaaattatcgtcgc

SEQ ID NO: 377044 - DNA, 75 bp, synthetic construct
  source 1..75: mol_type = other DNA
gccgaaagggatgctgaaattgagaacgaaaatcatggcccttcggggccattgtttctctgtggaggagtccat

SEQ ID NO: 377045 - DNA, 75 bp, synthetic construct
  source 1..75: mol_type = other DNA
aatgccagagactccgctgaagtggtggaaaccgcattctgtactttcgtgttgtcgcggacccggtacgctgaa

SEQ ID NO: 377046 - DNA, 75 bp, synthetic construct
  source 1..75: mol_type = other DNA
tggggtattcttatcgggatatatcgaaaattacagaaaggaatttgaaaaatacagcggaactgcttaatcgtt

SEQ ID NO: 377047 - DNA, 75 bp, synthetic construct
  source 1..75: mol_type = other DNA
acgggaagtctgatgaagaactaggcgttttgtctaaaaattatcgtcgcagaaacaaaaagatacgtacaacag

SEQ ID NO: 377048 - DNA, 75 bp, synthetic construct
  source 1..75: mol_type = other DNA
ctcaagaaggacatcattaaggccatgaacaaggcagctgcgctggatgaaatgataccggggttgctgagtgaa

SEQ ID NO: 377049 - DNA, 75 bp, synthetic construct
  source 1..75: mol_type = other DNA
tgaacaaagcagccgcgctggatgaactgataccggggttatgggcgttggcctcaacacgattttacgtcactt

SEQ ID NO: 377050 - DNA, 75 bp, synthetic construct
  source 1..75: mol_type = other DNA
ccgggcttatcttgaagctatcaacgaaaaaccggaccgggcagacacgataaaaaaaggggagaagtatgagtg

SEQ ID NO: 377051 - DNA, 75 bp, synthetic construct
  source 1..75: mol_type = other DNA
ccttgagctttttaatgcactgcctgaatcagaacaggatgctcagctcaccgagatgcgcgcccgagtaaaaaa

SEQ ID NO: 377052 - DNA, 75 bp, synthetic construct
  source 1..75: mol_type = other DNA
ttagctgtatggtttttttgtatcggtgcctcaataagcctaaaagcttccggtattgttctaaaaaaatcaggt

SEQ ID NO: 377053 - DNA, 75 bp, synthetic construct
  source 1..75: mol_type = other DNA
ctgagcattggcgtacatgcgtactgttcgtggacataccttaatggtgcgccttttggtgggtttcagcaggta

SEQ ID NO: 377054 - DNA, 75 bp, synthetic construct
  source 1..75: mol_type = other DNA
cagccgtagcaaatacaaagtgttcaccagatggacttgtaggccgcgacagcaaaggggcaatactttcgtgcc

SEQ ID NO: 377055 - DNA, 75 bp, synthetic construct
  source 1..75: mol_type = other DNA
ttactgccggcgagtatttacagctaaacggaatcgccaacgcaggcactcattgctcaccagacgggcttgtag

SEQ ID NO: 377056 - DNA, 75 bp, synthetic construct
  source 1..75: mol_type = other DNA
caaccagccgtgacggcattcactttgagaagcagggctgcgtgctgacgccaccggaaggcatcatgcatttcc

SEQ ID NO: 377057 - DNA, 75 bp, synthetic construct
  source 1..75: mol_type = other DNA
ccgataacattgagcaggcttttacccaggggctgatgaatcatgtcagttcacaccttcaaatgatggttgaag

SEQ ID NO: 377058 - DNA, 75 bp, synthetic construct
  source 1..75: mol_type = other DNA
tttcctgttctattactacaactggtcttcctgcttcttgtttttacccatgtggctaacccggatggtggggct

SEQ ID NO: 377059 - DNA, 75 bp, synthetic construct
  source 1..75: mol_type = other DNA
cactatggcatccgtctcggagaaggtctgcgactctatgtggataatcagtctgggcgactggtactgtggcgt

SEQ ID NO: 377060 - DNA, 75 bp, synthetic construct
  source 1..75: mol_type = other DNA
tttgcgggactggcatctggagcatgttcttgctcattcagcagccggagaaagttatatgtgggaatgccccga

SEQ ID NO: 377061 - DNA, 75 bp, synthetic construct
  source 1..75: mol_type = other DNA
ggccgggcgactggtactgtggcgctattaccctgaggaagggctggatggttaccgcagtgttgaacttcctga

SEQ ID NO: 377062 - DNA, 75 bp, synthetic construct
  source 1..75: mol_type = other DNA
ctccgataccgtcaaggaaatgctgtacgcccgttttgccctgccggtggtttctgccagtgaagccgccccgta

SEQ ID NO: 377063 - DNA, 75 bp, synthetic construct
  source 1..75: mol_type = other DNA
actgaccaatattctggcggtaggcggtaacgcggtgattaccgcagaagcccacacagaactggggcagctttg

SEQ ID NO: 377064 - DNA, 75 bp, synthetic construct
  source 1..75: mol_type = other DNA
aggtgcgggtcattaccgcaccgccttactacccgcagtggcaggtgggcgagaactattccgcctggcggtaca

SEQ ID NO: 377065 - DNA, 75 bp, synthetic construct
  source 1..75: mol_type = other DNA
atggaggaggctccggcttctttccatgaggaccacacgatggacagaagcaacgatatctaccagaaagtcacc

SEQ ID NO: 377066 - DNA, 75 bp, synthetic construct
  source 1..75: mol_type = other DNA
aaatcggcgcgtgtgggttacaccaaaatgctgctgggcgtggtcgggtattttattgagcataaatcccgtaac

SEQ ID NO: 377067 - DNA, 75 bp, synthetic construct
  source 1..75: mol_type = other DNA
atgttttgattaaagcgcctggcgcaggcggtgtacgcattgaaaatcaaactggcattttaaccgactggcgcg

SEQ ID NO: 377068 - DNA, 75 bp, synthetic construct
  source 1..75: mol_type = other DNA
acgatggggaattccatcgatgttgaaaaaaatattagcagcgttgtgccgacgcaaggcgcgtggttcgtgcca

SEQ ID NO: 377069 - DNA, 75 bp, synthetic construct
  source 1..75: mol_type = other DNA
aaagaaattctctatgcccgtatgaaagccgatcccacgcctgcggatgaagccacgtcgtatgccatccgtttt

SEQ ID NO: 377070 - DNA, 75 bp, synthetic construct
  source 1..75: mol_type = other DNA
catcatggctgcgtgatccatcagtctgagcttgaccagagcaacgggcggtggatctgcgaaaacacggggatg

SEQ ID NO: 377071 - DNA, 75 bp, synthetic construct
  source 1..75: mol_type = other DNA
tgttctgaccaaacgtcgctacacccgggaaaatgcgctcgatcgcgcttatgcctcctttaacgccaaccgtaa

SEQ ID NO: 377072 - DNA, 75 bp, synthetic construct
  source 1..75: mol_type = other DNA
ctttattgagcataaaaaccgtaacagtcttctgtttcagcctacggattctgtcgctgaagattttatgaagtc

SEQ ID NO: 377073 - DNA, 75 bp, synthetic construct
  source 1..75: mol_type = other DNA
tatccagctgagctacggatgcatcgggaaacttactttactgcagattttttgataccgctactaaagccgtat

SEQ ID NO: 377074 - DNA, 75 bp, synthetic construct
  source 1..75: mol_type = other DNA
ccgtgaaaaatccgtggacgtggtctgttatgacgagctttcctcgttcgaaccggatgttgaaaaagagggttc

SEQ ID NO: 377075 - DNA, 75 bp, synthetic construct
  source 1..75: mol_type = other DNA
tcacgtggaggcgacgattcgggatgtgccatgtctgaaagacctttatccatggctggggcgtaaacatcgtga

SEQ ID NO: 377076 - DNA, 75 bp, synthetic construct
  source 1..75: mol_type = other DNA
tgtgtatctgtgtgaggtgggaacggacaccgccaaagaaattctctatgcccgtatgaaagccgatcccacccc

SEQ ID NO: 377077 - DNA, 75 bp, synthetic construct
  source 1..75: mol_type = other DNA
caaggatgcaactgcacaaccgacccttgaagaactggcagcgaagctgtccggaggagtgaatggttacagtcg

SEQ ID NO: 377078 - DNA, 75 bp, synthetic construct
  source 1..75: mol_type = other DNA
tggacgcgtgacggtctggcatttttcagtgccagtgatgaggagatgccgccaccgcgctccatcacgtaccac

SEQ ID NO: 377079 - DNA, 75 bp, synthetic construct
  source 1..75: mol_type = other DNA
agcatcatggctgtgtgatccatcagtctgagcttgaccagagtaacgggcggtggatctgtgaaaacacgggca

SEQ ID NO: 377080 - DNA, 75 bp, synthetic construct
  source 1..75: mol_type = other DNA
cgactgtatcctggtgaggcggttgttactgtgggagggcgacgcagtaaagctatggctgaccagattatggct

SEQ ID NO: 377081 - DNA, 75 bp, synthetic construct
  source 1..75: mol_type = other DNA
agcgttttttacctctgtgaacatcatggctgtgtgatccatcagtcggaacttgaccagactgatggccgctgg

SEQ ID NO: 377082 - DNA, 75 bp, synthetic construct
  source 1..75: mol_type = other DNA
gaaaaatctgtcgatgtggtctgttatgacgaactctcctcgtttgaaccggatgtggaaaaagaaggttcgcca

SEQ ID NO: 377083 - DNA, 75 bp, synthetic construct
  source 1..75: mol_type = other DNA
gttgctgggtgtggtcgggtattttattgagcacaaatcccgtaataccctgctttttcagccgacagactctgc

SEQ ID NO: 377084 - DNA, 75 bp, synthetic construct
  source 1..75: mol_type = other DNA
atcatcattatggggcgtcctgatgaggaagagacgctgttacgtgtggatgcggcgatcaacaaaaataccgcc

SEQ ID NO: 377085 - DNA, 75 bp, synthetic construct
  source 1..75: mol_type = other DNA
tgatggctgctgttctgccgggggtattcagtcaccaggcgggggctgctgaagtgtctgctgctccggaagtca

SEQ ID NO: 377086 - DNA, 75 bp, synthetic construct
  source 1..75: mol_type = other DNA
ggagcgcaaagttgtcagcgccgaagaacgaatgcagaaaggccaaaaccatctggcaaatctgaaggcgatgat

SEQ ID NO: 377087 - DNA, 75 bp, synthetic construct
  source 1..75: mol_type = other DNA
taataacccgcatgtctttgaaaagcgactcttttctgagctgggttacggcgctgaacttaaagtattaagcgc

SEQ ID NO: 377088 - DNA, 75 bp, synthetic construct
  source 1..75: mol_type = other DNA
ccaattcgtgaacgcaaaagtattcccaccagctggctgaagatcaccttatatgaaggacgtaatcgccaggtg

SEQ ID NO: 377089 - DNA, 75 bp, synthetic construct
  source 1..75: mol_type = other DNA
agcgcaaaagtattcccaccagctggctgaagatcaccttatatgaaggacgtaatcgccaggtgcgccgcatga

SEQ ID NO: 377090 - DNA, 75 bp, synthetic construct
  source 1..75: mol_type = other DNA
cccggttcagggcgtttatgcggcaggtcgtcttgaccgcgatagcgaagggttactggtactgaccaataatgg

SEQ ID NO: 377091 - DNA, 75 bp, synthetic construct
  source 1..75: mol_type = other DNA
gctgctgcaacgcaatgaagaagtacgcgaacgctggcagaacaaaattcgctacctgctggtggatgagtatca

SEQ ID NO: 377092 - DNA, 75 bp, synthetic construct
  source 1..75: mol_type = other DNA
ttacgctgtgtaaagaacgccgtcagtacggcgaactggtgcgcccggagccgagccgcttcctgctggagctgc

SEQ ID NO: 377093 - DNA, 75 bp, synthetic construct
  source 1..75: mol_type = other DNA
cgcgagcgctggcagaacaaaattcgctacctgctggtggatgagtatcaggacaccaacaccagccagtatgaa

SEQ ID NO: 377094 - DNA, 75 bp, synthetic construct
  source 1..75: mol_type = other DNA
gaaaaacgatcttatgaccccggtgcaggcggcagccagcgccaaaggcgagcgcgaccgtatttttgcccactg

SEQ ID NO: 377095 - DNA, 75 bp, synthetic construct
  source 1..75: mol_type = other DNA
tgaaagcggccaacattctcatcgccaataacccgcacgtatttgaaaagcgtctgttctccgaacttggctacg

SEQ ID NO: 377096 - DNA, 75 bp, synthetic construct
  source 1..75: mol_type = other DNA
cgatgaccagtcgatctactcctggcgcggtgcccgtccgcaaaacctggtgctattgagccaggatttcccaac

SEQ ID NO: 377097 - DNA, 75 bp, synthetic construct
  source 1..75: mol_type = other DNA
ttgaggtcaggcagcacctgaagcatccatggaatgtcatgacaggaatgcgttatgacgtaacccgtcatgtca

SEQ ID NO: 377098 - DNA, 75 bp, synthetic construct
  source 1..75: mol_type = other DNA
tgacgcgtcgcgcagcaattattatgcgcggctatatttccggcttaatggaaaattggctctttgccccgcaat

SEQ ID NO: 377099 - DNA, 75 bp, synthetic construct
  source 1..75: mol_type = other DNA
cgttacgcgcggtgcaatctactggcattttaaagataagtcggatttgttcagtgagatctgggaactgtcaga

SEQ ID NO: 377100 - DNA, 75 bp, synthetic construct
  source 1..75: mol_type = other DNA
tgggcgagattgcaaaagcagctggcgttacgcgcggtgcaatctactggcattttaaagataagtcggatttgt

SEQ ID NO: 377101 - DNA, 75 bp, synthetic construct
  source 1..75: mol_type = other DNA
atcgttctgctttactgctctgtctgacgttactgacaggatgccccggacgcggggattattatcggtttgatg

SEQ ID NO: 377102 - DNA, 75 bp, synthetic construct
  source 1..75: mol_type = other DNA
ccaatcatgccgccatatactgcggcaacggtgagctgcttcaccatctgcctgaacaactgagtaaacgggaga

SEQ ID NO: 377103 - DNA, 75 bp, synthetic construct
  source 1..75: mol_type = other DNA
tgactggtggcgcaacggtcagaacctttacctggacaatatggaggcgactggtttttacaggatttccctgcc

SEQ ID NO: 377104 - DNA, 75 bp, synthetic construct
  source 1..75: mol_type = other DNA
aggattgctggattttttacaggaaaaaaatcctccacactgctgcttatttccgccgcctgtacaaccagattt

SEQ ID NO: 377105 - DNA, 75 bp, synthetic construct
  source 1..75: mol_type = other DNA
aacgcggcaaaaaagccatactgaccccctccggctggatgcctgggtgctgccttttatgaatgtttatggcgt

SEQ ID NO: 377106 - DNA, 75 bp, synthetic construct
  source 1..75: mol_type = other DNA
ctgggtgggaagtatgtaccaggatgtgcaacaggatttcaggggaaaactgagcaggctttccctgccatctca

SEQ ID NO: 377107 - DNA, 75 bp, synthetic construct
  source 1..75: mol_type = other DNA
cttgtggagaagtgggaaaaaggaaagatgcgtctgctgtgggataacaaaaagcggcgtaacgaagcgctggac

SEQ ID NO: 377108 - DNA, 75 bp, synthetic construct
  source 1..75: mol_type = other DNA
tattattcgtgcagaaaagaaaaatatgtataatgaattgcgcgaaatgcggcaacagatttattctttacctaa

SEQ ID NO: 377109 - DNA, 75 bp, synthetic construct
  source 1..75: mol_type = other DNA
tattaccgacgagcgtaaaaaagcgatcgatttctctgacggctactacaaaagcggcctgttagtgatggtgaa

SEQ ID NO: 377110 - DNA, 75 bp, synthetic construct
  source 1..75: mol_type = other DNA
gatgtgaaaagcgtgaaagatctcgacgggaaagtggttgctgtgaagagcggcactggctccgttgattacgcg

SEQ ID NO: 377111 - DNA, 75 bp, synthetic construct
  source 1..75: mol_type = other DNA
tgcttcaggggaaagacgatggtatcctcaccaatgaggataccaaaggggacgttcaggtacgggaattaacaa

SEQ ID NO: 377112 - DNA, 75 bp, synthetic construct
  source 1..75: mol_type = other DNA
ggcatcccggggactcgcggtaggattactgagtggttttaatacggcataccgcggtgcaattcatgccccgtc

SEQ ID NO: 377113 - DNA, 75 bp, synthetic construct
  source 1..75: mol_type = other DNA
agtgtgaaaacgcgtgataccggcttcagtcatatcacacctgttgtcagggctgaacaggggacgggcggcacg

SEQ ID NO: 377114 - DNA, 75 bp, synthetic construct
  source 1..75: mol_type = other DNA
accggaagctgtcagccattcactggcactggcggcgtcactggatgggcaggggtacagcgttaacgacatcat

SEQ ID NO: 377115 - DNA, 75 bp, synthetic construct
  source 1..75: mol_type = other DNA
caaatggattccacgggttatgataccagttgcaaagaaagcgattagaagattactttccttatcacaaaatgc

SEQ ID NO: 377116 - DNA, 75 bp, synthetic construct
  source 1..75: mol_type = other DNA
caggatatatctcatggaaaaaccatgtaaaacagaaagtcaaaaacaattatcttcctgagattgatgattatc

SEQ ID NO: 377117 - DNA, 75 bp, synthetic construct
  source 1..75: mol_type = other DNA
gaacaggcccttttgcaggttcagaacactggtctcatttataatgttacagccgttgttttcgatgaggcaatg

SEQ ID NO: 377118 - DNA, 75 bp, synthetic construct
  source 1..75: mol_type = other DNA
atcctcaccaatgaggataccaaagggggcgttcaggtacgggaattaacaatgctgattaaacaactggttagc

SEQ ID NO: 377119 - DNA, 75 bp, synthetic construct
  source 1..75: mol_type = other DNA
aatctggaagagttcagtggatgctacccacgactttcttacaggtcatgaccgacaagaaatcgaaaaagaagt

SEQ ID NO: 377120 - DNA, 75 bp, synthetic construct
  source 1..75: mol_type = other DNA
atatggatattatgatgatgaaggtaaaccactacttattcgctcacaccagccacggcaccttttaaacacaat

SEQ ID NO: 377121 - DNA, 75 bp, synthetic construct
  source 1..75: mol_type = other DNA
gcgttcatcattaatatcctgctgacgttgcttggttatattcctggtttaattcacgctttttgggtgcaaacc

SEQ ID NO: 377122 - DNA, 75 bp, synthetic construct
  source 1..75: mol_type = other DNA
cgcgacgccctctatgttggtaaaggtgcaaaagaagttgtttttgccagcattgatagagccactccggcgaag

SEQ ID NO: 377123 - DNA, 75 bp, synthetic construct
  source 1..75: mol_type = other DNA
ttggcggggaggttggtaagcaactgggcgtaagctacttccttgaacgtcgcgagctaggggttatcaatattg

SEQ ID NO: 377124 - DNA, 75 bp, synthetic construct
  source 1..75: mol_type = other DNA
ttgcgaaagcagggtgataattctgttctgacgcggccggtatcatttacccagaaggactgggagagcaggacg

SEQ ID NO: 377125 - DNA, 75 bp, synthetic construct
  source 1..75: mol_type = other DNA
acaggtcgcgcggctggcaacctgtacttccgtgtatgggctgatctggattgggctgttatggaccatagcgca

SEQ ID NO: 377126 - DNA, 75 bp, synthetic construct
  source 1..75: mol_type = other DNA
attcgtctttaacccgcatgtggtcagacgcagtaagcaggtcggatttatctaccgggtcgattcagtaggcga

SEQ ID NO: 377127 - DNA, 75 bp, synthetic construct
  source 1..75: mol_type = other DNA
ttttgtttgactattttagaggcggctagttttggattgccttgtgtggggactaatgttggtgctatacctgaa

SEQ ID NO: 377128 - DNA, 75 bp, synthetic construct
  source 1..75: mol_type = other DNA
aaaaagtcgtccggcattcccggtgcggggatgctttcccgtcttcttctggcctcaggagccgttgccggcgtt

SEQ ID NO: 377129 - DNA, 75 bp, synthetic construct
  source 1..75: mol_type = other DNA
ttaatgacagaaaagaactggttgctgtaccggaaacggtggggggcaggaaaaagtcgtccggaattcccggtg

SEQ ID NO: 377130 - DNA, 75 bp, synthetic construct
  source 1..75: mol_type = other DNA
tgggtccttgttgctgtacttaatggttatgccggtgagaaagggaagacgaactggtttacggtgattcccgca

SEQ ID NO: 377131 - DNA, 75 bp, synthetic construct
  source 1..75: mol_type = other DNA
agtactcacaagccgggcgggttctgccacagttcgtctggatttcagcccgtcagggcagaaggccgtgatgtg

SEQ ID NO: 377132 - DNA, 75 bp, synthetic construct
  source 1..75: mol_type = other DNA
tgcattgcgaaagcagggtgataattctgttctgacgcagccggtatcatttgctcagaaggactgggagagcag

SEQ ID NO: 377133 - DNA, 75 bp, synthetic construct
  source 1..75: mol_type = other DNA
cagggggctggttcgctcacgtttaatggtgattatacggtcagaccggaagggaatcagacctgggtgggcggg

SEQ ID NO: 377134 - DNA, 75 bp, synthetic construct
  source 1..75: mol_type = other DNA
aaataacacttggacatacaagtttttatataaaccttaatgaccttgaactggaatcacttgcagataatgatt

SEQ ID NO: 377135 - DNA, 75 bp, synthetic construct
  source 1..75: mol_type = other DNA
gaaaccggggtatgtgaaggagaccaccaccgccagtgatggccatactgcgcgtcatctgtcgccggcctggaa

SEQ ID NO: 377136 - DNA, 75 bp, synthetic construct
  source 1..75: mol_type = other DNA
gacgcagggtgagttaaaacgacttgcggaacggcaactgacgaaatgggcaaagcatgttggtaacgggatgag

SEQ ID NO: 377137 - DNA, 75 bp, synthetic construct
  source 1..75: mol_type = other DNA
cctcgagatgcgttcaaaggggattgaacgccagatgaccgaaggggaattaaaacggcttgcagaacggcagct

SEQ ID NO: 377138 - DNA, 75 bp, synthetic construct
  source 1..75: mol_type = other DNA
gatatgctccggttcacccgggcggcgtaccggcattgtccggtaccggtgcgcgtgcaggtgatttaaaaggga

SEQ ID NO: 377139 - DNA, 75 bp, synthetic construct
  source 1..75: mol_type = other DNA
gggatggcgtacacccgctggtctgacagtgttcaggattaccgacgtgatgaagtgaaaccggggtatgtgaag

SEQ ID NO: 377140 - DNA, 75 bp, synthetic construct
  source 1..75: mol_type = other DNA
actctaaggacattagggttgtgaacaatgggtgcaactttttttatactgatggagatttttatgaaaaaaaaa

SEQ ID NO: 377141 - DNA, 75 bp, synthetic construct
  source 1..75: mol_type = other DNA
cgaagtcacgcaaagagctggcgcgcgagggttacgagattgatggtcagatgtattcgatgaacttccgcgttg

SEQ ID NO: 377142 - DNA, 75 bp, synthetic construct
  source 1..75: mol_type = other DNA
cgtcctgcgggaccaacgccaattgagttgctgaaacaggaatatgaacgccggaaagcggctgggtttgtttga

SEQ ID NO: 377143 - DNA, 75 bp, synthetic construct
  source 1..75: mol_type = other DNA
catggcctccggacctggctgagtttgtggcgctgatttcggaaagcggggccaatccattcggtctgacggtgg

SEQ ID NO: 377144 - DNA, 75 bp, synthetic construct
  source 1..75: mol_type = other DNA
aacggcctcagcgttccgcccgtacggcggcaactggcagcaccaaaacgcccgtcggggccaacaccaattgag

SEQ ID NO: 377145 - DNA, 75 bp, synthetic construct
  source 1..75: mol_type = other DNA
aaaacggatttatcagcgacggaaacggtctggaagctgtgggaactcatgggggaggtttattcgaaccgctgg

SEQ ID NO: 377146 - DNA, 75 bp, synthetic construct
  source 1..75: mol_type = other DNA
cacggatcacctgggcggcattgtcgcgctgagttatgcatcggtgaagaaaagtgacacgatgaagacgggtga

SEQ ID NO: 377147 - DNA, 75 bp, synthetic construct
  source 1..75: mol_type = other DNA
aaattggttgcaaccataatggtagtgttgatattgcaagagaaatgatattaaaagccaaagaggccggtgtta

SEQ ID NO: 377148 - DNA, 75 bp, synthetic construct
  source 1..75: mol_type = other DNA
ttggtatgaactattgggtaaaaaagccgagagggatttcgatgaagatcaacttatcatccattcaggttttgt

SEQ ID NO: 377149 - DNA, 75 bp, synthetic construct
  source 1..75: mol_type = other DNA
ggataccacatagaaaatcgagaattattgataaaacatgagagcattcttagatttgagtcatccttagcaaaa

SEQ ID NO: 377150 - DNA, 75 bp, synthetic construct
  source 1..75: mol_type = other DNA
ccgtcagtcgagccatcagtggaagataaaagcgcgctgaacaccgcgatgaaacgcagcgttgcgaaagctgcc

SEQ ID NO: 377151 - DNA, 75 bp, synthetic construct
  source 1..75: mol_type = other DNA
gatctggagcgcggcgtcagcacgcataatgaagatgaagcccgtttaaaccgtcggatgtgcgaagttgcggaa

SEQ ID NO: 377152 - DNA, 75 bp, synthetic construct
  source 1..75: mol_type = other DNA
cgattgaaagagcattaggtagttttgataaaagagttactaactctgagaggaaaaataaactagtggcaagaa

SEQ ID NO: 377153 - DNA, 75 bp, synthetic construct
  source 1..75: mol_type = other DNA
gatcatcgccacgatctctgtcacctccggtgtcgataagggcattcgcgtgttatcggaactcaacgttgcgct

SEQ ID NO: 377154 - DNA, 75 bp, synthetic construct
  source 1..75: mol_type = other DNA
aagcggcactgatcgccttgtcggtgataatcgccactatctcggtgacatccggtgtcgataagggcattcgcg

SEQ ID NO: 377155 - DNA, 75 bp, synthetic construct
  source 1..75: mol_type = other DNA
cggacatatcacaccacaagccgcactggcgacacatttcccggcaggactgccggttgtttgtaccaccagtga

SEQ ID NO: 377156 - DNA, 75 bp, synthetic construct
  source 1..75: mol_type = other DNA
gtcggtattggtctgggatccatccgttgctgtcgtgcgttattgaaagccgatggcacgcctgctgcgccgttg

SEQ ID NO: 377157 - DNA, 75 bp, synthetic construct
  source 1..75: mol_type = other DNA
cgattggtcaccaccttggggttatcgattgcctggaagcggcgcttacctgcccgtgggatgaatatctggcat

SEQ ID NO: 377158 - DNA, 75 bp, synthetic construct
  source 1..75: mol_type = other DNA
ggattgccactctggaggcgggcagcgaagcccgccgtaaaatggaaggcgtgccgaaatatggtgagatcgtca

SEQ ID NO: 377159 - DNA, 75 bp, synthetic construct
  source 1..75: mol_type = other DNA
ccaaagccttgcatgacagtttcgggatagaagtcggcacgatgacgaccattcatgcctataccggcactcagt

SEQ ID NO: 377160 - DNA, 75 bp, synthetic construct
  source 1..75: mol_type = other DNA
gtgactgccgaagaggtgaataacgcacttaaacaagcaaccaccaaaacgagtcatttggttataccgatgaag

SEQ ID NO: 377161 - DNA, 75 bp, synthetic construct
  source 1..75: mol_type = other DNA
gccgaaaaagaggcgaaaaatattccgtggaaagcgaaaggtgcagaaatcattgtcgaatgtacaggcttttat

SEQ ID NO: 377162 - DNA, 75 bp, synthetic construct
  source 1..75: mol_type = other DNA
gggggctataacttccagtgggcgtggtcgagtgcatgggcttgtgcgcaggatttggtggcatgtgcagcgaca

SEQ ID NO: 377163 - DNA, 75 bp, synthetic construct
  source 1..75: mol_type = other DNA
tggcgaaggatgatacaggcttcacgcttgaactgaacggcatgactgtcggttgcgaaaagctggtcatcgcga

SEQ ID NO: 377164 - DNA, 75 bp, synthetic construct
  source 1..75: mol_type = other DNA
gattagcacattgaccgactggcgcgtacaacccaacggcactgaaggctatcgcactgccgaagtgacgctcgg

SEQ ID NO: 377165 - DNA, 75 bp, synthetic construct
  source 1..75: mol_type = other DNA
tcgtcctcgtccggtagcgggttcagagtttgagctgcccgccgatgttctgattatggcctttggtttccaggc

SEQ ID NO: 377166 - DNA, 75 bp, synthetic construct
  source 1..75: mol_type = other DNA
agataaaggtggcccgccagcgcaaaacggcagcaggaaaagcgtcatcagacgctcagccatctcgcagtgcag

SEQ ID NO: 377167 - DNA, 75 bp, synthetic construct
  source 1..75: mol_type = other DNA
atggtagtgtccgctattgccagtacacctcagataaaggtggctcgccagcgcaaaacggcagcaggaaaagcg

SEQ ID NO: 377168 - DNA, 75 bp, synthetic construct
  source 1..75: mol_type = other DNA
aagaccgtcgcctggtacgataacgagtatggtttcgtcactcaactcattcgtaccctggaaaaattcgccaaa

SEQ ID NO: 377169 - DNA, 75 bp, synthetic construct
  source 1..75: mol_type = other DNA
gcgtcgattacttgaagtcaaaagcaacatagacattgttgctattaatgatctcacttccccaaaaattctcgc

SEQ ID NO: 377170 - DNA, 75 bp, synthetic construct
  source 1..75: mol_type = other DNA
gatcactctggcgctgtatcgatcgggaatctggaacgctacatcaccgataccgcgctggcgatgggctggcgt

SEQ ID NO: 377171 - DNA, 75 bp, synthetic construct
  source 1..75: mol_type = other DNA
acagtgcgccatcaactaatgacgcttacgcgtcagcagataccattgatgtggtgccggaagtcagcggccgca

SEQ ID NO: 377172 - DNA, 75 bp, synthetic construct
  source 1..75: mol_type = other DNA
gtatgctggagtatcaggctcactgctggagcaacataatcttaactataacattcaacaaaatttcgccaatca

SEQ ID NO: 377173 - DNA, 75 bp, synthetic construct
  source 1..75: mol_type = other DNA
cttactggaatacgaataataaagataccttgtatcaagtcggctataatacgagtgtacatgagatttatttaa

SEQ ID NO: 377174 - DNA, 75 bp, synthetic construct
  source 1..75: mol_type = other DNA
agactatgtttataactggaatgatttttataatttacgttataacaaaagaggaaagtttcaggcaaatatatc

SEQ ID NO: 377175 - DNA, 75 bp, synthetic construct
  source 1..75: mol_type = other DNA
gatgagcttcgccgtgtcggtatcgcaaaccagactaaaatcgcaggagcgcctgtccaggggccactgtttgat

SEQ ID NO: 377176 - DNA, 75 bp, synthetic construct
  source 1..75: mol_type = other DNA
ttgtcggtgcgggtccggccggggtgggtatggcggcgcttcttcgtcgtagtgccatacaggatatcctggtcg

SEQ ID NO: 377177 - DNA, 75 bp, synthetic construct
  source 1..75: mol_type = other DNA
tatgctgtcgtaccttatgccacggaatatcggcgtaataatatctctttagaccctatgtctatgagtatgcat

SEQ ID NO: 377178 - DNA, 75 bp, synthetic construct
  source 1..75: mol_type = other DNA
gaaactgttcgctgagcaggtccgtacttacgtaccggctgacgactaccgcgtactgggtactgatggcttcgg

SEQ ID NO: 377179 - DNA, 75 bp, synthetic construct
  source 1..75: mol_type = other DNA
gattcgcctgatgagtgacagcggcaaaaccttcgagggtaaagtggattcgattggctacggcgtgctaccgga

SEQ ID NO: 377180 - DNA, 75 bp, synthetic construct
  source 1..75: mol_type = other DNA
atggaaagtacgccgaaaaaagctcctcgcagtaaattccctgctctgttagtggttgcgttggcgctggttgcc

SEQ ID NO: 377181 - DNA, 75 bp, synthetic construct
  source 1..75: mol_type = other DNA
cagacaggtacggcttttcagattattggttatcgctattcgacggagggattttattctttgagtgataccaca

SEQ ID NO: 377182 - DNA, 75 bp, synthetic construct
  source 1..75: mol_type = other DNA
gaatgtctcaggaatacatttttcagggggaatatatatatccctatgggcgcatcaaaaaacactttcgacagg

SEQ ID NO: 377183 - DNA, 75 bp, synthetic construct
  source 1..75: mol_type = other DNA
cttcatccgatactttgggggcaatgggcgatgctatagaagtgtttctgatcaacaaagggtattcacggcaac

SEQ ID NO: 377184 - DNA, 75 bp, synthetic construct
  source 1..75: mol_type = other DNA
ctgcggaatgtataggctgtcatgcctgtgaaattgcctgtgcggcggcacacaaccaagaaaactggccgcaga

SEQ ID NO: 377185 - DNA, 75 bp, synthetic construct
  source 1..75: mol_type = other DNA
acgtaacaccagtgcagaaggccagggaggcattgaaaatcatgatgaaccgccgttcccggatatgaatgatta

SEQ ID NO: 377186 - DNA, 75 bp, synthetic construct
  source 1..75: mol_type = other DNA
gccaacgctacttcttccccggctatcgttttttacacgccttgcgtaaagcggcacggcgcggggtgcggatca

SEQ ID NO: 377187 - DNA, 75 bp, synthetic construct
  source 1..75: mol_type = other DNA
agtggcattgatggacgatcactgggcgacagtagggtccagtaatctcgatccgctcagtttgtcactgaatct

SEQ ID NO: 377188 - DNA, 75 bp, synthetic construct
  source 1..75: mol_type = other DNA
attctgaacagcaacgcagaaacagccagagatgaagcgggtgcgctgatggatgctcttgatgctccgggtagc

SEQ ID NO: 377189 - DNA, 75 bp, synthetic construct
  source 1..75: mol_type = other DNA
ccgttgctgtaaccggttcgctgggggattcgttgtcctctgtctggcagaccgtaaaagatggcacagcggcgg

SEQ ID NO: 377190 - DNA, 75 bp, synthetic construct
  source 1..75: mol_type = other DNA
atgtttgaagatgctttaaatgccgttaatgctgtccgggataaaaccggtggaggcaggaaaacaaccggcaaa

SEQ ID NO: 377191 - DNA, 75 bp, synthetic construct
  source 1..75: mol_type = other DNA
acatcaggaaagagcttttgatgggttatcagtgcgcggcaaagggcaggatccctgttaagggccggagcgcgg

SEQ ID NO: 377192 - DNA, 75 bp, synthetic construct
  source 1..75: mol_type = other DNA
gtcttgcttcgtcggtaacaaaggaagatttactgtttatcaggaaagatttgttaaccgggtatcataatctct

SEQ ID NO: 377193 - DNA, 75 bp, synthetic construct
  source 1..75: mol_type = other DNA
ttatcaggaaagatttattgaccgggtatcacaatctctcgaacggcaagacaactcctgtcaaagggcgatctg

SEQ ID NO: 377194 - DNA, 75 bp, synthetic construct
  source 1..75: mol_type = other DNA
tcatacgaaaggatttgctgaccggatatcacgttctgaaacgtgggcaaaaaacacccattaagggacgttccg

SEQ ID NO: 377195 - DNA, 75 bp, synthetic construct
  source 1..75: mol_type = other DNA
tccatcagggagtcatggacaagtatcttaaaacgcgcaggtctgagacacagaaaatcgtaccaatccaggcat

SEQ ID NO: 377196 - DNA, 75 bp, synthetic construct
  source 1..75: mol_type = other DNA
ctggctcccttaaaaaagtccaaggtaaaaccagatcctctcacccgtgacgaatttattcgttttattgaggct

SEQ ID NO: 377197 - DNA, 75 bp, synthetic construct
  source 1..75: mol_type = other DNA
atgggggcgctgtccggcgtttcatcgttatgcgatacccggacagcattttccacatggaaccgtctggcgcag

SEQ ID NO: 377198 - DNA, 75 bp, synthetic construct
  source 1..75: mol_type = other DNA
gtctggtacaggaaggaaagattattgaagcggcagaactttgccaccagaccagttccttaccagaaatctgcg

SEQ ID NO: 377199 - DNA, 75 bp, synthetic construct
  source 1..75: mol_type = other DNA
cacaatcaagaaaactggccgctgagtcacagtgactttcgaccgcgtatccacgttgtagggaaaggccaggct

SEQ ID NO: 377200 - DNA, 75 bp, synthetic construct
  source 1..75: mol_type = other DNA
gaggcaacggcgcaacgactgccccgacggtcatcacagggccagacgggacggtggagatcagtgtcaccagcc

SEQ ID NO: 377201 - DNA, 75 bp, synthetic construct
  source 1..75: mol_type = other DNA
ctgttcatggtgcggatctggtcgtcactgcaatggcggcaggaagacaggctgcgcgcgatatgttagccatgt

SEQ ID NO: 377202 - DNA, 75 bp, synthetic construct
  source 1..75: mol_type = other DNA
cgcaagggggccgcaaaaatttctgcccatgagcgaaaaaaacactttggcgaaatttattgcgctctggatcaa

SEQ ID NO: 377203 - DNA, 75 bp, synthetic construct
  source 1..75: mol_type = other DNA
cccgatgtcagccaggtcgttccgcgtatggaacgggtagctgtgattggtgccgggccagcaggactggggtgt

SEQ ID NO: 377204 - DNA, 75 bp, synthetic construct
  source 1..75: mol_type = other DNA
atgacaaacatgatctcatatcagggacttgttcgcaccttccctaataaagggttccgtgaaaaactagctcgt

SEQ ID NO: 377205 - DNA, 75 bp, synthetic construct
  source 1..75: mol_type = other DNA
ttcactgctaaggaaagatggtttgatggtgctcaatcaggatggcggcagcttaatacagtctctcagcacatc

SEQ ID NO: 377206 - DNA, 75 bp, synthetic construct
  source 1..75: mol_type = other DNA
gttatccggcgtttcatcgttatgcgatacccggacagcattttccacctggaaccgtctggcgcagcggttcga

SEQ ID NO: 377207 - DNA, 75 bp, synthetic construct
  source 1..75: mol_type = other DNA
ccctggaaattaaattccatcgtcgccgctggcgtatcatggtcgggcgttcaagcctggcctctttccgctccg

SEQ ID NO: 377208 - DNA, 75 bp, synthetic construct
  source 1..75: mol_type = other DNA
aaccaagggttgaagcgattcgcaacggaaaaccaacaacggttatcgttatcgatataaaaaagaaatttagat

SEQ ID NO: 377209 - DNA, 75 bp, synthetic construct
  source 1..75: mol_type = other DNA
ggatttcccatttgatgaaagtaagatgcatcttttcactataaaaaagggcttactgtcacatctcaacaacag

SEQ ID NO: 377210 - DNA, 75 bp, synthetic construct
  source 1..75: mol_type = other DNA
tgaaaataacacaatgttttacgaatcatgttatctcgaaggttgaatctactcgagaacctagaggtgacgaaa

SEQ ID NO: 377211 - DNA, 75 bp, synthetic construct
  source 1..75: mol_type = other DNA
aaaatatagaactttgtcttaaattccagactctacccacttttgcacaacagctaataagttacatccattata

SEQ ID NO: 377212 - DNA, 75 bp, synthetic construct
  source 1..75: mol_type = other DNA
cgcgatatatcagttctcaactctctttggggagaagggagaatttcagacagcagagcatctcgtgacagctac

SEQ ID NO: 377213 - DNA, 75 bp, synthetic construct
  source 1..75: mol_type = other DNA
cgctgttcggacagaagaaacctgcccggatactgagagaggaattttccgctgttattgcgccgcttcatcagg

SEQ ID NO: 377214 - DNA, 75 bp, synthetic construct
  source 1..75: mol_type = other DNA
gggttctactgtaagttttggtttacgcgttatcaggcctcccgtgatcaggcccagaaagtcagccgggcgatc

SEQ ID NO: 377215 - DNA, 75 bp, synthetic construct
  source 1..75: mol_type = other DNA
tttaggcagaatgatattatcaaaaaaggcccatattcattaaggcgatcagaacggctaatgtctgctttgaat

SEQ ID NO: 377216 - DNA, 75 bp, synthetic construct
  source 1..75: mol_type = other DNA
atgacaaacccgcaattcgccggacatccgttcggcacaaccgttaccgcagagacgttacgcgatactttcgcg

SEQ ID NO: 377217 - DNA, 75 bp, synthetic construct
  source 1..75: mol_type = other DNA
tgaaaaacagaaactgaccgacctgattaagtctctggaacacgaagtgacgttggtggacgatacgctggcgcg

SEQ ID NO: 377218 - DNA, 75 bp, synthetic construct
  source 1..75: mol_type = other DNA
gcaaactggatgaagcaatggctcgtttcgaatctttcgaacgtcgtattgaccagatggaagcggaagcagaaa

SEQ ID NO: 377219 - DNA, 75 bp, synthetic construct
  source 1..75: mol_type = other DNA
aaaacaactcaatcctttaacgattctgcgtccatggaagaggttgtcgagtatctcaaaggaacatattcagct

SEQ ID NO: 377220 - DNA, 75 bp, synthetic construct
  source 1..75: mol_type = other DNA
gcacgcgcctgcatgttaagccacggttcagggacaaacctggacaacctcgcgggcaatatgaacacaaagcgc

SEQ ID NO: 377221 - DNA, 75 bp, synthetic construct
  source 1..75: mol_type = other DNA
tatataatgttattcgccagcgatatacaattctgaatcctattcaactgcgcacacaaatttctctcgacacgt

SEQ ID NO: 377222 - DNA, 75 bp, synthetic construct
  source 1..75: mol_type = other DNA
acgccatgcaccgatggttatcaccgtagttttttatcgtctggaaggggagagtgcggaagacggcagcgtgat

SEQ ID NO: 377223 - DNA, 75 bp, synthetic construct
  source 1..75: mol_type = other DNA
gggctttatgtcagtaccggtggttttacaaaagatgctcgctatgaggccgatcgttcgacgataccactgacg

SEQ ID NO: 377224 - DNA, 75 bp, synthetic construct
  source 1..75: mol_type = other DNA
ggcatcggttggtctcagctggctccattagtcaaacccggcctgtcccgagcccagttactcgccttataccag

SEQ ID NO: 377225 - DNA, 75 bp, synthetic construct
  source 1..75: mol_type = other DNA
gaggcaagaaagaattcactctgctgaacaaatcagaaatggagttgctggctgacgcttatgagatggcaaata

SEQ ID NO: 377226 - DNA, 75 bp, synthetic construct
  source 1..75: mol_type = other DNA
tgatgcatattatgattattggtgcatttatctttgcgttcttacaagttgttttattagcctccctggttcacg

SEQ ID NO: 377227 - DNA, 75 bp, synthetic construct
  source 1..75: mol_type = other DNA
gaagtggaatgcggaagagattaagcgcgatagtctgagtgatgcaaccagaaacacccttggttcaacgctgac

SEQ ID NO: 377228 - DNA, 75 bp, synthetic construct
  source 1..75: mol_type = other DNA
gcgcgttagtggaaaactatgagcaggtggatattgaaactaagctgttggtgccgcttaagaaaacgtatttgc

SEQ ID NO: 377229 - DNA, 75 bp, synthetic construct
  source 1..75: mol_type = other DNA
aacaaacgctacattacgctggcaccgattgcgactgtgcttgggctggcgtttaaactctccgacccggagaaa

SEQ ID NO: 377230 - DNA, 75 bp, synthetic construct
  source 1..75: mol_type = other DNA
tggcgaagattttacaagtgccgaacgccacccgttcccgcattggtcgcggtcagtacctgacgccgagcgagc

SEQ ID NO: 377231 - DNA, 75 bp, synthetic construct
  source 1..75: mol_type = other DNA
cgtgagcgggatcctggcgattaccgtcggcgtgccgaactcattaggcccgggcgaactgctgcaacattacgg

SEQ ID NO: 377232 - DNA, 75 bp, synthetic construct
  source 1..75: mol_type = other DNA
cgtatcgctaaacagaaagagcgcccaccagccagcaaaacgcggaaaagcgcggtaaaaataaaatctcgtggc

SEQ ID NO: 377233 - DNA, 75 bp, synthetic construct
  source 1..75: mol_type = other DNA
gcgcgtatgctcacattcgccgtcagttcaaaatctctatcggaaagatggaagggattgaagagccgctggcgc

SEQ ID NO: 377234 - DNA, 75 bp, synthetic construct
  source 1..75: mol_type = other DNA
cgcgtgcttaccagggcgcaccgattgccatcaccgttgaaggggctaacattctgacccgcagcatgatgatct

SEQ ID NO: 377235 - DNA, 75 bp, synthetic construct
  source 1..75: mol_type = other DNA
atgaataaatatcttcgtgatttcatgacactacatagtaatattaggccaaaacgtcgagaaatgaaggaaggt

SEQ ID NO: 377236 - DNA, 75 bp, synthetic construct
  source 1..75: mol_type = other DNA
ggcgatggttgtcgccatgagccgcgagatctgcgtgaaactgtacgatgccatcgtggcgatacgccctgaatg

SEQ ID NO: 377237 - DNA, 75 bp, synthetic construct
  source 1..75: mol_type = other DNA
aatgcccgtgaatccggcggcatcatctttaccaccgtgcagaagtttgcgccgctggacggagagcagagccat

SEQ ID NO: 377238 - DNA, 75 bp, synthetic construct
  source 1..75: mol_type = other DNA
gtttctggaagaagtgcgcgaattgccgcagcgcaatctggccgtcgagttgctggagaaactgctgaacgatgg

SEQ ID NO: 377239 - DNA, 75 bp, synthetic construct
  source 1..75: mol_type = other DNA
gcgcgatgcgttacccaatgcgtcgtttatgggctttaccggaacaccggtttcttccgaagataaagacacccg

SEQ ID NO: 377240 - DNA, 75 bp, synthetic construct
  source 1..75: mol_type = other DNA
tcgtggtggtgaccgaccgtaacgatctcgacggccaactgtatgccaccttctgccaggcacaggatttgctta

SEQ ID NO: 377241 - DNA, 75 bp, synthetic construct
  source 1..75: mol_type = other DNA
caccgccaataaccgctttatggtggtcaatcaggtggcgattcagggcataaaacaggtacgtcgcccggatgt

SEQ ID NO: 377242 - DNA, 75 bp, synthetic construct
  source 1..75: mol_type = other DNA
ctggcctgcgcgcgtattggcgctattcactcggtggtgtttggtggatttgcctcgcacagcgtggcggcgcga

SEQ ID NO: 377243 - DNA, 75 bp, synthetic construct
  source 1..75: mol_type = other DNA
aagatgcatttctttggcgacagcgaagggcgcattgtgcgcggcctgctggcggtgttgttgactgccgttgag

SEQ ID NO: 377244 - DNA, 75 bp, synthetic construct
  source 1..75: mol_type = other DNA
attccgtggtggaaaagcacagcgctcatgggaactgattcaggcactgaatgcccgggaaagtaccctgaatgc

SEQ ID NO: 377245 - DNA, 75 bp, synthetic construct
  source 1..75: mol_type = other DNA
accgctggctggagaaacagccagaggcgctggcattaattgccgtctcttcggaaacagaagaagagcgcacct

SEQ ID NO: 377246 - DNA, 75 bp, synthetic construct
  source 1..75: mol_type = other DNA
cggtggcaaaatcattccctataaaaaattactcgacgatgcgataagtcaggcgcagcatcagccgcgccacgt

SEQ ID NO: 377247 - DNA, 75 bp, synthetic construct
  source 1..75: mol_type = other DNA
atcgctggctggagaaacagccaggggcgctggcattgattgccgtctcttcggaaacagaggaagagcgtacct

SEQ ID NO: 377248 - DNA, 75 bp, synthetic construct
  source 1..75: mol_type = other DNA
aagatggcgcaaccgtgcctatctactatgaatcgcgcctggcaaaactcgacctcaaccacgaagagctggaaa

SEQ ID NO: 377249 - DNA, 75 bp, synthetic construct
  source 1..75: mol_type = other DNA
atggatcgagaactgaaaaatctgatgctgaacattaaccaactggcggcgatagcgggaatatgtcgtcagact

SEQ ID NO: 377250 - DNA, 75 bp, synthetic construct
  source 1..75: mol_type = other DNA
caattaggttatcgtaaagcagcgaagcttctgaaagaaaccctggaagaagaaaaggccaccgacatcaaactg

SEQ ID NO: 377251 - DNA, 75 bp, synthetic construct
  source 1..75: mol_type = other DNA
agaaaaggccaccgacatcaaactgactgatctggcccttaataacgtaaataagaaagccgaaaataaagcctg

SEQ ID NO: 377252 - DNA, 75 bp, synthetic construct
  source 1..75: mol_type = other DNA
gcacgacggggaaactcgcactcacatcagccctaacagctttaagcgcggatggtcagcaacatttggtgctgg

SEQ ID NO: 377253 - DNA, 75 bp, synthetic construct
  source 1..75: mol_type = other DNA
gaatacattacatgaatgggacgaaggggaatttcagcttgagccgccgctggataccgaggaaggacgggcagc

SEQ ID NO: 377254 - DNA, 75 bp, synthetic construct
  source 1..75: mol_type = other DNA
ttcagttgatgcttgtcctaagttcgtgtctcaagctggagcaagttttttcaaaatagtagtaggttcaagaga

SEQ ID NO: 377255 - DNA, 75 bp, synthetic construct
  source 1..75: mol_type = other DNA
catctgctttattaatggactgccgctggcggttgtggaactgaaaagccccatcgatgacaaagtagatatctg

SEQ ID NO: 377256 - DNA, 75 bp, synthetic construct
  source 1..75: mol_type = other DNA
ccgcagcgtaatctggcagtcgagttgctggagaaactgctgaacgacggcattcatgcccgcaccaaaaacaac

SEQ ID NO: 377257 - DNA, 75 bp, synthetic construct
  source 1..75: mol_type = other DNA
gtttctggaagaagtgcgcgaattgccgcagcgtaatctggcagtcgagttgctggagaaactgctgaacgacgg

SEQ ID NO: 377258 - DNA, 75 bp, synthetic construct
  source 1..75: mol_type = other DNA
ccatatcgaaatctggcggtagagctgctggaaaaactgattaatgacggtatccagtcccgtacaaaaaacaat

SEQ ID NO: 377259 - DNA, 75 bp, synthetic construct
  source 1..75: mol_type = other DNA
tgaaacagattctggataatgccgtaattgctaacggcgtggatgatattttcacgctggctggtctggataaac

SEQ ID NO: 377260 - DNA, 75 bp, synthetic construct
  source 1..75: mol_type = other DNA
ctggcggttgtggaactaaaaagccctgtcgatgacaaggtagatatctgggatgcgtaccaccagttacagacc

SEQ ID NO: 377261 - DNA, 75 bp, synthetic construct
  source 1..75: mol_type = other DNA
cttctgattatccgcatgatttaacggcggctattgaacaaattaactggcagttgcagggtgccgatttaccaa

SEQ ID NO: 377262 - DNA, 75 bp, synthetic construct
  source 1..75: mol_type = other DNA
gcgacgagaacagatcattcagcgtctgcgacagcaagggagtgtgcaggttaacgatctgtcggcattgtatgg

SEQ ID NO: 377263 - DNA, 75 bp, synthetic construct
  source 1..75: mol_type = other DNA
tttaatgttcccggtcacagtgagtttcatctgcaagttgccgaacccacctcttatctgtgccgctatctgtaa

SEQ ID NO: 377264 - DNA, 75 bp, synthetic construct
  source 1..75: mol_type = other DNA
ctgaaaacttcgataatgtgactcgtctcgaccgctttacgaccgatctcacgctacataatggcctcgtgacgt

SEQ ID NO: 377265 - DNA, 75 bp, synthetic construct
  source 1..75: mol_type = other DNA
cgctggcgcggaatgaattttacagatgttgccacgcaaatgaccaacaagtcgggtttgctggagattatccag

SEQ ID NO: 377266 - DNA, 75 bp, synthetic construct
  source 1..75: mol_type = other DNA
cagttgcagggtgccgatttaccaaaacaaggtattcaggggcaggggagtttccaggcccagtggcaggagtca

SEQ ID NO: 377267 - DNA, 75 bp, synthetic construct
  source 1..75: mol_type = other DNA
ttcaccctgactcgcggggatgattacttcggacaggatttcacattttttgaagccttaagaacggcagacaga

SEQ ID NO: 377268 - DNA, 75 bp, synthetic construct
  source 1..75: mol_type = other DNA
cgtgttaacaaaggctatttcagcaccatcggttgatatttttgatggcatgaatatggttggcatggcgctctt

SEQ ID NO: 377269 - DNA, 75 bp, synthetic construct
  source 1..75: mol_type = other DNA
ctattgccgcatcaactttcttggctgcggtaacggcattcgtctatttctggcggttcgtggaaaatggtgggg

SEQ ID NO: 377270 - DNA, 75 bp, synthetic construct
  source 1..75: mol_type = other DNA
cgggtgtagggattcgtatttattctaaaaacacgacaactgatggcctgattaagctgaacacacaaactcccc

SEQ ID NO: 377271 - DNA, 75 bp, synthetic construct
  source 1..75: mol_type = other DNA
cgcgcgacttgccagcgttaattacggtattacttaaatccggtgtaaagattgtcgttgaccatttcgcgttgc

SEQ ID NO: 377272 - DNA, 75 bp, synthetic construct
  source 1..75: mol_type = other DNA
aacgttttccggtcaaaatcatggtcgataaaccggatccagaaatgttccgtatcggcgcttcagcaaccgcta

SEQ ID NO: 377273 - DNA, 75 bp, synthetic construct
  source 1..75: mol_type = other DNA
cgttggcgcggaatgaattttaccgatgtcgccacgcaaatgaccaacaagtcgggcttgttggagattatccaa

SEQ ID NO: 377274 - DNA, 75 bp, synthetic construct
  source 1..75: mol_type = other DNA
aaacggcgcaggcgcggacagaaacggcgctcgatacactaatgagcactgaatcaccagcgactattcaggatg

SEQ ID NO: 377275 - DNA, 75 bp, synthetic construct
  source 1..75: mol_type = other DNA
acaaggatgaaaaacggagttgactctattgctcaaagctttgagcacatggtagagacagcaaaggatatggat

SEQ ID NO: 377276 - DNA, 75 bp, synthetic construct
  source 1..75: mol_type = other DNA
agctgcaggagatgctggctgaacgcggagtgaatgtcgatcactccacgatttaccgctgggttcagcgttatg

SEQ ID NO: 377277 - DNA, 75 bp, synthetic construct
  source 1..75: mol_type = other DNA
gaagagtatcggcgctggcgcaatgaatcttggcgatacgacgggagtgataaatacccgtggccacagcctgtg

SEQ ID NO: 377278 - DNA, 75 bp, synthetic construct
  source 1..75: mol_type = other DNA
attgtgatcggtggaactttatttactcataaggttggtaaacgtattcgtccgcttaatgtggaaaagcaacgt

SEQ ID NO: 377279 - DNA, 75 bp, synthetic construct
  source 1..75: mol_type = other DNA
ataggtatatgcatcggtaagaaaaaaaatataacaccaacaggtgagtggttatttgttgtgacagtggaagac

SEQ ID NO: 377280 - DNA, 75 bp, synthetic construct
  source 1..75: mol_type = other DNA
cgcaaaacgcggaaagctacggttgccgcgcatggcgggtacataatgagaaaagcctgctggcggcgctggaag

SEQ ID NO: 377281 - DNA, 75 bp, synthetic construct
  source 1..75: mol_type = other DNA
gaaccaagcaagcatagtagaaacggccttaatcgctacgagtggactactaccgcataatctgaataaagccat

SEQ ID NO: 377282 - DNA, 75 bp, synthetic construct
  source 1..75: mol_type = other DNA
taaaatatcaaaacaggtatctatggttaatattccatctcctgttaaacacattttaccaatagaattatttac

SEQ ID NO: 377283 - DNA, 75 bp, synthetic construct
  source 1..75: mol_type = other DNA
ggtgatgtggctgatctccatctccagcccaaaagagctgattcagattgcggagtacttccggactccactggc

SEQ ID NO: 377284 - DNA, 75 bp, synthetic construct
  source 1..75: mol_type = other DNA
atgccagatataaacccaatcagattaccttcctcccatctattagtacgagatatatcccagcttcagtccgca

SEQ ID NO: 377285 - DNA, 75 bp, synthetic construct
  source 1..75: mol_type = other DNA
agcaattaaatgcagcaataaaaacctgctcattctctctttcttctaatatgttcaattgcccagaatatctat

SEQ ID NO: 377286 - DNA, 75 bp, synthetic construct
  source 1..75: mol_type = other DNA
cctgtttttatctgtctcattttatgccagtgcagaaacagctatgcgcacaaactttcagaatggcgtaagtga

SEQ ID NO: 377287 - DNA, 75 bp, synthetic construct
  source 1..75: mol_type = other DNA
aagcggctgtagctgtaattaatatcggagtagctctcatgctcgcggtggcagtaggaatgattgcagtgatga

SEQ ID NO: 377288 - DNA, 75 bp, synthetic construct
  source 1..75: mol_type = other DNA
aagcggcggtagcggtaatcagtatcggagtagctcttatgctggctgtggcttgtggtatgcttgcagtgatga

SEQ ID NO: 377289 - DNA, 75 bp, synthetic construct
  source 1..75: mol_type = other DNA
acgctatcacgatccgcagacacatgcgtttatcgacagaacacagttaatgcgcagctacaccaaaccgaaaaa

SEQ ID NO: 377290 - DNA, 75 bp, synthetic construct
  source 1..75: mol_type = other DNA
tgaccgcattagagcagctacatcaggactactcgcaaaggctggacgagtgggagagcgccttcgcggaatggc

SEQ ID NO: 377291 - DNA, 75 bp, synthetic construct
  source 1..75: mol_type = other DNA
cgacaaaaacagcccgcagtttaaggcgctgcgtgagcaggcgttaaaacttgctgaaacacagtttactgcgag

SEQ ID NO: 377292 - DNA, 75 bp, synthetic construct
  source 1..75: mol_type = other DNA
tttgagcgcgcccgcgacgctgtcagtaaagcggatgctggcatcgtgaaagcacgacgccagcttaacgccctt

SEQ ID NO: 377293 - DNA, 75 bp, synthetic construct
  source 1..75: mol_type = other DNA
gtatgttaattctggcgatgatattatatctatagaattattgagtaatttctatatagatataaccatagatcc

SEQ ID NO: 377294 - DNA, 75 bp, synthetic construct
  source 1..75: mol_type = other DNA
gaatcatgagtatactgcaaagaaagatattgtggcaataaaaaggaatatggaagagaaaaaactagctagatt

SEQ ID NO: 377295 - DNA, 75 bp, synthetic construct
  source 1..75: mol_type = other DNA
actattatgggactggacatagagtcaaagaatctggaacaattattaaagttgtcatcaccatttttgcatact

SEQ ID NO: 377296 - DNA, 75 bp, synthetic construct
  source 1..75: mol_type = other DNA
taaaaggatttttgatgcagcgtctaagatagaggctgatgatgaaacaatagaaaaggggaaacgccgattcga

SEQ ID NO: 377297 - DNA, 75 bp, synthetic construct
  source 1..75: mol_type = other DNA
tcgtgtcacccgtacgactgaaagtggtcaagatgataagtcttctggtttaagggttgtcacattgaacatcac

SEQ ID NO: 377298 - DNA, 75 bp, synthetic construct
  source 1..75: mol_type = other DNA
tcatgggaagtgggaagaattatcaaataatttagatactgcatttgagattttcattgatgataaagataagaa

SEQ ID NO: 377299 - DNA, 75 bp, synthetic construct
  source 1..75: mol_type = other DNA
gatgcttcgggtaaagtttctttcgcaaatatcggcgatcaaacgtcagtcacaataagcgctgttccccgacaa

SEQ ID NO: 377300 - DNA, 75 bp, synthetic construct
  source 1..75: mol_type = other DNA
agcttctggcgcggtactgaaagcacgcagcattatcgtggcgaccggtgcaaaatggcgcaacatgaacgttcc

SEQ ID NO: 377301 - DNA, 75 bp, synthetic construct
  source 1..75: mol_type = other DNA
tacgttccagaacgaaattaccgatcgcaacgtgatgggcgttccggctgtgttcgtgaatggtaaagagtttgg

SEQ ID NO: 377302 - DNA, 75 bp, synthetic construct
  source 1..75: mol_type = other DNA
acccggcaggtgttgatgataaagatctggttaaatacgccgatgttggcgcgacttactatttcaataaaaaca

SEQ ID NO: 377303 - DNA, 75 bp, synthetic construct
  source 1..75: mol_type = other DNA
ttcccgtcatcgaaaatccggacaaagaaggctatggatggcagtttgaccgtatcgatggttcgaagacagaga

SEQ ID NO: 377304 - DNA, 75 bp, synthetic construct
  source 1..75: mol_type = other DNA
tctgcaggacaaactgcgcagcctgaaaaacgtcgacattattctgaatgcgcaaaccacggaagtgaaaggcga

SEQ ID NO: 377305 - DNA, 75 bp, synthetic construct
  source 1..75: mol_type = other DNA
atgggcgaacgtttcggcggtcagatcctcgatactgtggatatcgaaaactatatctctgtgccgaaaaccgaa

SEQ ID NO: 377306 - DNA, 75 bp, synthetic construct
  source 1..75: mol_type = other DNA
cgtaagtcattaaaagataatgatgaagatagtcctgtctatatcgctactgtcccgaagcgcggttataaatta

SEQ ID NO: 377307 - DNA, 75 bp, synthetic construct
  source 1..75: mol_type = other DNA
atactctttactggattgaaaatggcgtattccagacctctgtcccttacgttgttccttaccttgacaaatttc

SEQ ID NO: 377308 - DNA, 75 bp, synthetic construct
  source 1..75: mol_type = other DNA
atggtgccggttatctggtacagcgaagaagagggagaggaaataatgctatcttcgcctccccctataccagag

SEQ ID NO: 377309 - DNA, 75 bp, synthetic construct
  source 1..75: mol_type = other DNA
gcgacagcgattatgctgttgcaaacaaaacccagaactttgaagtcactgcacagtaccagtttgattttggtc

SEQ ID NO: 377310 - DNA, 75 bp, synthetic construct
  source 1..75: mol_type = other DNA
ccaggttaaccatactgcggcaggtggtgataaagcagacgcgtggactgctgggctaaaatacgatgctaacaa

SEQ ID NO: 377311 - DNA, 75 bp, synthetic construct
  source 1..75: mol_type = other DNA
ttatgtcgataaaattggtagacaatgcagatggttcaaccatgctggataaacgttatgtcatcactaacggta

SEQ ID NO: 377312 - DNA, 75 bp, synthetic construct
  source 1..75: mol_type = other DNA
accctccgatggcagtaaagccggtaagcagaaggataacgccaatgcagacgaaacaacgtctttatgtaccgc

SEQ ID NO: 377313 - DNA, 75 bp, synthetic construct
  source 1..75: mol_type = other DNA
ctgggaaccggtttaccaggtcacattcccggacggctccacggatgtactgagccaggaagatatctggcatgt

SEQ ID NO: 377314 - DNA, 75 bp, synthetic construct
  source 1..75: mol_type = other DNA
agcttggatttgaatgtgagtctgttgtcggctctggctgcctgtaatagtgataaagctgatattcgtaaaatt

SEQ ID NO: 377315 - DNA, 75 bp, synthetic construct
  source 1..75: mol_type = other DNA
cgtgctctgaacgtgatgctgaagaacaagtcaatcaaagatcgcctggtaccgatcatcgccgacgaagcgcgt

SEQ ID NO: 377316 - DNA, 75 bp, synthetic construct
  source 1..75: mol_type = other DNA
atgacttacgacacctatacagggaaaagggtaagcagccagaaagccatgcggcttacagcggttttcggttgt

SEQ ID NO: 377317 - DNA, 75 bp, synthetic construct
  source 1..75: mol_type = other DNA
gagcttcttccgatagatccgggctgtgtggaaccgaagctgaacagccagtggcagccggtttatcaggtgacg

SEQ ID NO: 377318 - DNA, 75 bp, synthetic construct
  source 1..75: mol_type = other DNA
tgatgaaagcctggcatgaacattacgccttgctggcgatcaactgtatgaatctggaaagtgctcacgcagcta

SEQ ID NO: 377319 - DNA, 75 bp, synthetic construct
  source 1..75: mol_type = other DNA
ccatggcggttgttttccaatcgaggattttatagatggtttctggcgacctgcacaggagtacggtgattttta

SEQ ID NO: 377320 - DNA, 75 bp, synthetic construct
  source 1..75: mol_type = other DNA
gtggaggcccatgcaactacgcctttctggcgcaccatggcaccgctaacccgcgatgctattagtgcaatgtgg

SEQ ID NO: 377321 - DNA, 75 bp, synthetic construct
  source 1..75: mol_type = other DNA
tgacccaggaggatatctggcatgtgcgcacgctgacgctggacggtctggtggggctgaatcccatcgcctatg

SEQ ID NO: 377322 - DNA, 75 bp, synthetic construct
  source 1..75: mol_type = other DNA
ttgcacaggggcaatttgacaatattcacgaagtattttctctacggcgtataaaccttgccagtaaagaaaact

SEQ ID NO: 377323 - DNA, 75 bp, synthetic construct
  source 1..75: mol_type = other DNA
tgggccatctggcagatgcgccgcgttacgaccaggccgccaatgcagacatgatgacgcaacccactgatgtgg

SEQ ID NO: 377324 - DNA, 75 bp, synthetic construct
  source 1..75: mol_type = other DNA
acgacccggcttacgcttacgaagttgctgtcatcatgcatgacgggctggagcgtatgtacggtgaaaaacaag

SEQ ID NO: 377325 - DNA, 75 bp, synthetic construct
  source 1..75: mol_type = other DNA
gaaaaagtgacgcaccggtgaccacgccagcagagctggcggaggctatcgggctgtcctacgacacctataccg

SEQ ID NO: 377326 - DNA, 75 bp, synthetic construct
  source 1..75: mol_type = other DNA
aaatgccggacgccggaaggaatatgacctgggacctacgtgcgcccgcaccgacaccctcacaccttcgagcta

SEQ ID NO: 377327 - DNA, 75 bp, synthetic construct
  source 1..75: mol_type = other DNA
caaaatcagcggcacccttaaaacacgggcggtggatgaacggctgcataagctgatttcggcaaaacccaatgg

SEQ ID NO: 377328 - DNA, 75 bp, synthetic construct
  source 1..75: mol_type = other DNA
tgcaataccatacgggggtgcaaacaccggagtggaaaccgcggctggtgtggagttgtctggggctgtatatcg

SEQ ID NO: 377329 - DNA, 75 bp, synthetic construct
  source 1..75: mol_type = other DNA
cggaaaaacaaaagagcgtgtttatctagccgaagaaggaggccaaaaagtcagtcaactcgactggaaattcaa

SEQ ID NO: 377330 - DNA, 75 bp, synthetic construct
  source 1..75: mol_type = other DNA
aacattagctggtcgtggaggcaatatggtggacagggactggctggatacgagcaatcccggaacctggactga

SEQ ID NO: 377331 - DNA, 75 bp, synthetic construct
  source 1..75: mol_type = other DNA
gccgaacttcaccgagaagcttgagctgccgagcctgcaagacttcggcgcgctgctggaagagcagagcaaaga

SEQ ID NO: 377332 - DNA, 75 bp, synthetic construct
  source 1..75: mol_type = other DNA
gatctcgaactgggcggccacatggcgtccttccagtcttccgcaaccatttatgatgtgtgctttaaccacttc

SEQ ID NO: 377333 - DNA, 75 bp, synthetic construct
  source 1..75: mol_type = other DNA
ggcgtaggttctgacgtttatagcgtgacctctttcaccgaactggcgcgagatggtcaggattgtgaacgctgg

SEQ ID NO: 377334 - DNA, 75 bp, synthetic construct
  source 1..75: mol_type = other DNA
gggttgtcctacgacacctataccggaaagcagatcagcagtcagcgggccatgcgactgacggcggttttttcc

SEQ ID NO: 377335 - DNA, 75 bp, synthetic construct
  source 1..75: mol_type = other DNA
cgcgtgaggccatttcactggcagcggcaaccgaggagcacggtgccaggttgtttggtaatggtgcggtgacat

SEQ ID NO: 377336 - DNA, 75 bp, synthetic construct
  source 1..75: mol_type = other DNA
cgcgcgttccgtatatcgctcaggtgatgaacgacgctccggcagtggcatctaccgactatatgaaactgttcg

SEQ ID NO: 377337 - DNA, 75 bp, synthetic construct
  source 1..75: mol_type = other DNA
gtgttcttttcgggattatttcaacgaaaaagtgatgcgccggtgaccacgccagcagagctggcggatgccatc

SEQ ID NO: 377338 - DNA, 75 bp, synthetic construct
  source 1..75: mol_type = other DNA
tgtctgcatagcctataccctcaaacttactacatcggtacgttagtcgtgttcactcgtcctgatggggacgca

SEQ ID NO: 377339 - DNA, 75 bp, synthetic construct
  source 1..75: mol_type = other DNA
taaattgcttgctatgattcggctgatgaaagataaaggtcgttggctggaagatgagatagctgagcatcaaca

SEQ ID NO: 377340 - DNA, 75 bp, synthetic construct
  source 1..75: mol_type = other DNA
tcagtttgtgccccgtgattttgcccatctgcttgatctgctaggatccccaaacacggccgacgctgccgataa

SEQ ID NO: 377341 - DNA, 75 bp, synthetic construct
  source 1..75: mol_type = other DNA
atcgccactcacgaagcagaaatgctggcagtgttaactagtgccggtggtagtgatagcgtatttagggaggtg

SEQ ID NO: 377342 - DNA, 75 bp, synthetic construct
  source 1..75: mol_type = other DNA
tcgccatgatagagctgatgaagaagaacaatcagtggggggaagaagaaatcgccactcacgaagcagaaatgc

SEQ ID NO: 377343 - DNA, 75 bp, synthetic construct
  source 1..75: mol_type = other DNA
gaacaatcagtggggggaagaagaaatcgccactcacgaagcggaaatgctggcagtattaaccagtggtagtga

SEQ ID NO: 377344 - DNA, 75 bp, synthetic construct
  source 1..75: mol_type = other DNA
gcagtaccacgccctgacggtgggggagaaaggtacgctgagctataaaggaacgcgctttgtcagctttgttgg

SEQ ID NO: 377345 - DNA, 75 bp, synthetic construct
  source 1..75: mol_type = other DNA
acggggcacaggcggctccaggtgagtcagttgaggtgcaaatagatatgggccagggggataatcttctgttac

SEQ ID NO: 377346 - DNA, 75 bp, synthetic construct
  source 1..75: mol_type = other DNA
tccgacagtggccataacattcgacggaaagccggtaaaagacgatacggtagtgtacggcctggagaacctcag

SEQ ID NO: 377347 - DNA, 75 bp, synthetic construct
  source 1..75: mol_type = other DNA
cgaagtcgttaaagcaaggttaatgtcggtgttaaatgaaatcactgacccctatgagcgtgagcagagtataca

SEQ ID NO: 377348 - DNA, 75 bp, synthetic construct
  source 1..75: mol_type = other DNA
atcaaccaactgatccaagacgtattggattatcaacatagtaaaccagatcaaacctactacattggcacgttg

SEQ ID NO: 377349 - DNA, 75 bp, synthetic construct
  source 1..75: mol_type = other DNA
atatggcaccgctccagcaaaagctggtggtggtgagcaacaagcgggaaaaaccgattaacgatcgccgttcgc

SEQ ID NO: 377350 - DNA, 75 bp, synthetic construct
  source 1..75: mol_type = other DNA
gcgaaatgctgctgcttgatgtgatcccgctgtcgctgggcctcgagaccatgggcggcctggtggagaaagtga

SEQ ID NO: 377351 - DNA, 75 bp, synthetic construct
  source 1..75: mol_type = other DNA
gtaacatccggtgtgttgcgtacggatcaacaactttctgatcaggcttatgcgcgtatcaaaaaggattttgag

SEQ ID NO: 377352 - DNA, 75 bp, synthetic construct
  source 1..75: mol_type = other DNA
atgtttttccaggggctttttcagcgcaaaaataacactcccgtcacaacgcccgggatgcttgcggaagaactg

SEQ ID NO: 377353 - DNA, 75 bp, synthetic construct
  source 1..75: mol_type = other DNA
ggcgtgcggatgaacgggcaattttacagcgatttgcctgccagtatatgactgattgggtatccggcgatgaag

SEQ ID NO: 377354 - DNA, 75 bp, synthetic construct
  source 1..75: mol_type = other DNA
gtaacggtgctgtgacatccggtgtgttgcgtacggaacaaaagctcacgccggatgcttatgagcgcatgaaga

SEQ ID NO: 377355 - DNA, 75 bp, synthetic construct
  source 1..75: mol_type = other DNA
catacgacacctataccggaaagcggatcagcagccagcgggccatgcggctgacggcggtgtattcctgcgtca

SEQ ID NO: 377356 - DNA, 75 bp, synthetic construct
  source 1..75: mol_type = other DNA
caccttcaacaatattgaagagctggggcttggcttcattaactattcccttgtgccgtatctgacccgtattga

SEQ ID NO: 377357 - DNA, 75 bp, synthetic construct
  source 1..75: mol_type = other DNA
gggttgcatgttctgcgcttacttaacgaaccgaccgctgcggctatcgcctacgggctggattccggtcaggaa

SEQ ID NO: 377358 - DNA, 75 bp, synthetic construct
  source 1..75: mol_type = other DNA
cgcgcttaaagacgcgggggtagaagctgacgaagtgctgggaggggggatggggggggttctactcgcgtgccg

SEQ ID NO: 377359 - DNA, 75 bp, synthetic construct
  source 1..75: mol_type = other DNA
ctgttaaacgcctgatggggcgctcgctggctgatatccagcaacgctatccgcatttgccttatcaattccagg

SEQ ID NO: 377360 - DNA, 75 bp, synthetic construct
  source 1..75: mol_type = other DNA
gcatattcgcgtaacgtttcaggtcgatgctgatggtcttttgagcgtgacggcgatggagaaatccaccggcgt

SEQ ID NO: 377361 - DNA, 75 bp, synthetic construct
  source 1..75: mol_type = other DNA
gggtgagcgcgaactggtgcaggactgccgctcactggcgcgttttgcgctgcgtggtattccggcgctaccggc

SEQ ID NO: 377362 - DNA, 75 bp, synthetic construct
  source 1..75: mol_type = other DNA
tattggtgcggcgattcaggcggatattctggtgggtaataagccagacagtgaaatgctgctgcttgatgtgat

SEQ ID NO: 377363 - DNA, 75 bp, synthetic construct
  source 1..75: mol_type = other DNA
cctatctgcagcggccgattccgcagattaactcgatagtcagcggcgggcagatttttaccaacggcgagttct

SEQ ID NO: 377364 - DNA, 75 bp, synthetic construct
  source 1..75: mol_type = other DNA
aattaaatccgcagctcagcgaaaaagagggcttctgcggacgcctgcaggagtggcgtcacgaagataacgtca

SEQ ID NO: 377365 - DNA, 75 bp, synthetic construct
  source 1..75: mol_type = other DNA
caaacccatcgtcgaagcggcgctggctgaggagggcaacattcatatcgtcacgaaagccgaatcactgtatct

SEQ ID NO: 377366 - DNA, 75 bp, synthetic construct
  source 1..75: mol_type = other DNA
gatattcaattgacgctggcgcagaacattcctgtaactggtgcggttgtggtaactacgccgcaagacatcgcg

SEQ ID NO: 377367 - DNA, 75 bp, synthetic construct
  source 1..75: mol_type = other DNA
cactcccggctgaagagtgacatgcttgatgaaagcggtcagagctggcgtgccacctttaaccgcatgtttact

SEQ ID NO: 377368 - DNA, 75 bp, synthetic construct
  source 1..75: mol_type = other DNA
accgtcaaccagaacctgccggacggctggggcggtttttatctgagcggtcgggtggcggattactggaaccgt

SEQ ID NO: 377369 - DNA, 75 bp, synthetic construct
  source 1..75: mol_type = other DNA
gctggatgccgaacggatgcatcgggcggcacaatgcctgttgggcgagaatgatttcacctcgttccgcgcggt

SEQ ID NO: 377370 - DNA, 75 bp, synthetic construct
  source 1..75: mol_type = other DNA
cgtaacgttatgcatattaatgtcacgcgtcacggtccttatgtggtggtagatatcaaagcgaatgcctttgta

SEQ ID NO: 377371 - DNA, 75 bp, synthetic construct
  source 1..75: mol_type = other DNA
gcagagcatcgttctcctgcacatgacactgattcattttgcgatcttactggtttccaaaactacaataattaa

SEQ ID NO: 377372 - DNA, 75 bp, synthetic construct
  source 1..75: mol_type = other DNA
atagcttgttttttaatgctcgatgaatacaaaaaaattgctatagaactaggctatgaattagtttttgtttct

SEQ ID NO: 377373 - DNA, 75 bp, synthetic construct
  source 1..75: mol_type = other DNA
tctggtgttctcggcctgacggagaactcactgctgatgaatctgctgaaccagttacaggaagacgggcacgac

SEQ ID NO: 377374 - DNA, 75 bp, synthetic construct
  source 1..75: mol_type = other DNA
caatcccctgatatatacactgtaacagatagtgctgatttcgaaccattacacgtttctactgtctggaatggt

SEQ ID NO: 377375 - DNA, 75 bp, synthetic construct
  source 1..75: mol_type = other DNA
gggacaaaaatcctgtagctaccttgcgggtaatactcccagtctggtgagtattgacagcggcgcattccgttt

SEQ ID NO: 377376 - DNA, 75 bp, synthetic construct
  source 1..75: mol_type = other DNA
gtttttatctttatttaaaggatatattcaatcgttttttgttttcattttcataaatttgttatttttttttaa

SEQ ID NO: 377377 - DNA, 75 bp, synthetic construct
  source 1..75: mol_type = other DNA
accctcgttatatgcgctgttcctgatttcgttacttgggccgttggttatctttctgctgtttcggatgatccg

SEQ ID NO: 377378 - DNA, 75 bp, synthetic construct
  source 1..75: mol_type = other DNA
gttcgatttgcgcagggatgttcgtcaatggcacttgcctgtgaatataccaacaaccctgaattatcaattgcc

SEQ ID NO: 377379 - DNA, 75 bp, synthetic construct
  source 1..75: mol_type = other DNA
ggcgctgcgtggcaaagttggtggtacggcgcgcattattgccgtgctggaaccgcgctcgaataccatgaaaat

SEQ ID NO: 377380 - DNA, 75 bp, synthetic construct
  source 1..75: mol_type = other DNA
aaaacatcccttatatgtcaggtccacagtggctgcacgattttgtgctgcgcgaccgctgggtgctggccattg

SEQ ID NO: 377381 - DNA, 75 bp, synthetic construct
  source 1..75: mol_type = other DNA
attcaatcgttttttgttttcattttcataaatttgttatttttttttaaaaaaaagactgtttatataacaagc

SEQ ID NO: 377382 - DNA, 75 bp, synthetic construct
  source 1..75: mol_type = other DNA
ttgcagggaagcggatgtgcgctcattgagaagttgcctggcgtgacgagttacgcggatgcgttttataactgc

SEQ ID NO: 377383 - DNA, 75 bp, synthetic construct
  source 1..75: mol_type = other DNA
gctgatgacgataccggacggactgtttgcaggactcgccagcgtaacaacattcagagagacctttaacggttg

SEQ ID NO: 377384 - DNA, 75 bp, synthetic construct
  source 1..75: mol_type = other DNA
cgtgggggaccatgtgtttgccgggtgcaccagtgcgacaacattttacagggtcttttataactgcagggaact

SEQ ID NO: 377385 - DNA, 75 bp, synthetic construct
  source 1..75: mol_type = other DNA
tgaacatatttcagctgagtttttatcacagcatattgattttattcagggagcgaaggttattgttgcagactg

SEQ ID NO: 377386 - DNA, 75 bp, synthetic construct
  source 1..75: mol_type = other DNA
gttgagcgccgggcttatgaaattgctctggcatcgctggaagcagtatcggatgaacgagcagcctatgaatta

SEQ ID NO: 377387 - DNA, 75 bp, synthetic construct
  source 1..75: mol_type = other DNA
atagaacaagttttatatgattataacacttctacatggaaaattgaaggagtattttggggagaaggagaatga

SEQ ID NO: 377388 - DNA, 75 bp, synthetic construct
  source 1..75: mol_type = other DNA
tgttgctggtactggcaacggcggcgggctccaacaccctgacccatattaacgatgcttcattctggctgttca

SEQ ID NO: 377389 - DNA, 75 bp, synthetic construct
  source 1..75: mol_type = other DNA
ttaccccagaggcaaaagtgtacatcgagggtgtatggagtcgtctcacaaatagaaaaggggatacatctcttt

SEQ ID NO: 377390 - DNA, 75 bp, synthetic construct
  source 1..75: mol_type = other DNA
acgaccgtagtgataatacttcggagcataataataacggggctggaattgaaaattacaacttcattacgacgg

SEQ ID NO: 377391 - DNA, 75 bp, synthetic construct
  source 1..75: mol_type = other DNA
ggctacaaacaacgttttaaaatgccctacattggcttgactggaagttatcgttatgaagattttgagctaggt

SEQ ID NO: 377392 - DNA, 75 bp, synthetic construct
  source 1..75: mol_type = other DNA
tgctggcacgtcgcgtggtgttgagtgtggactggacgctgctgctggtgtttatggcgatgtttatcgacgtcc

SEQ ID NO: 377393 - DNA, 75 bp, synthetic construct
  source 1..75: mol_type = other DNA
cgtctttattactggcatgggcggtaaacgtaggtggctttggtttattacccggatcgctggcaaatttgattg

SEQ ID NO: 377394 - DNA, 75 bp, synthetic construct
  source 1..75: mol_type = other DNA
cagtgtggactggacgctgctgctggtgtttatggcgatgtttatcgacgtccatttactaacccaactgccagc

SEQ ID NO: 377395 - DNA, 75 bp, synthetic construct
  source 1..75: mol_type = other DNA
aatcagcgttgcggaaatcatcgccaaaaccgccggtaagttgtttgtgccggaacatgtcccggaaatgcaatt

SEQ ID NO: 377396 - DNA, 75 bp, synthetic construct
  source 1..75: mol_type = other DNA
ctgctgtgctggtgttgtttccctggaaaggcgctgcaatatcatacggggacgcaaacgccggagtggaaacca

SEQ ID NO: 377397 - DNA, 75 bp, synthetic construct
  source 1..75: mol_type = other DNA
gatcgctgctgacgccgattggtaatccgcaaaatatccttatctggggacgttcgggtctttcgtttgccggtt

SEQ ID NO: 377398 - DNA, 75 bp, synthetic construct
  source 1..75: mol_type = other DNA
taaaatgccctacattggcttgactggaagttatcgttatgaagattttgagctaggtggcacatttaaatacag

SEQ ID NO: 377399 - DNA, 75 bp, synthetic construct
  source 1..75: mol_type = other DNA
gatgtatgctactgtgatatttttgatatacaggctgtctacaaataaatcattagcattagcgctaattatatt

SEQ ID NO: 377400 - DNA, 75 bp, synthetic construct
  source 1..75: mol_type = other DNA
gagcctgaagaaggtggacgtaaagtcagccaactgaactggaaatacagtaacgccgccattcttaaaggcgcc

SEQ ID NO: 377401 - DNA, 75 bp, synthetic construct
  source 1..75: mol_type = other DNA
caacggtcggcgagatccgcccttttgctgacgacctggatgctgtcaggttcaaccgccacaaaatcaaccggc

SEQ ID NO: 377402 - DNA, 75 bp, synthetic construct
  source 1..75: mol_type = other DNA
cctgcgcaaccagccagtatacgtgctaaatgcgcaactggaggaatgtccggtcggggtggaaggagagatttg

SEQ ID NO: 377403 - DNA, 75 bp, synthetic construct
  source 1..75: mol_type = other DNA
cagtgcccgcactgatgcagatgctgtgcgaataccacagcggcgatcggatgagttatccgacgttgcgtctgg

SEQ ID NO: 377404 - DNA, 75 bp, synthetic construct
  source 1..75: mol_type = other DNA
ggcacagttggggcaattgctgtcgggcttggggcagatgcgtctacccggtctaccttttgccaagtatgccta

SEQ ID NO: 377405 - DNA, 75 bp, synthetic construct
  source 1..75: mol_type = other DNA
aacctggggtctgctggagctggtcaactccgtggttgggctgattattgtgctgattattagcatggtagcgta

SEQ ID NO: 377406 - DNA, 75 bp, synthetic construct
  source 1..75: mol_type = other DNA
aatgggcacttcgataaaacaagtgccatcaatattgcggaagccatcaacgctggatttaatgccattaagtaa

SEQ ID NO: 377407 - DNA, 75 bp, synthetic construct
  source 1..75: mol_type = other DNA
tgatgatgattacatgcgcgaaaacttatacaacatgaagttacaatgcctggctgaagtgcttagtaaaagatc

SEQ ID NO: 377408 - DNA, 75 bp, synthetic construct
  source 1..75: mol_type = other DNA
atgacgatacatcatgccgcattggcgcgaatgttaccggcggaaaaaaaggaaaagctattacgacagttggcg

SEQ ID NO: 377409 - DNA, 75 bp, synthetic construct
  source 1..75: mol_type = other DNA
cgcaacaaaatcaaccggcggctaagcaaactcgaccttgcctctccggcgctggagcctgaggtaatttggctg

SEQ ID NO: 377410 - DNA, 75 bp, synthetic construct
  source 1..75: mol_type = other DNA
atgaaggtttacgtcattaaaattgctgttcgtggtgtcagtcctatggtctggcgtcggctgaggattgcagcc

SEQ ID NO: 377411 - DNA, 75 bp, synthetic construct
  source 1..75: mol_type = other DNA
gcgcaagaccctcgggacacaacccgttttactctgtgtccggacgccaatattacccaaacaccgcaggtgtgg

SEQ ID NO: 377412 - DNA, 75 bp, synthetic construct
  source 1..75: mol_type = other DNA
gcgctggttgccatgccgcaaagttggtggggggtaaatagttctctggcgctgcccaccgttagtgcaccggtc

SEQ ID NO: 377413 - DNA, 75 bp, synthetic construct
  source 1..75: mol_type = other DNA
gacgctgccgcgtctcaggatgactgggtgatagtgcacgaccctgagcatcgtcatcaaccgttcccattgacg

SEQ ID NO: 377414 - DNA, 75 bp, synthetic construct
  source 1..75: mol_type = other DNA
tttgtcgatggtcatgggatctcgcatcctcgccgtcttggcgtcgccagccattttggtttgctggtggatgtg

SEQ ID NO: 377415 - DNA, 75 bp, synthetic construct
  source 1..75: mol_type = other DNA
ccactgatggataaaggcgagcagctggcctgggtctggcgcagcaaagcgcgctgtaacccgttgtttatcgct

SEQ ID NO: 377416 - DNA, 75 bp, synthetic construct
  source 1..75: mol_type = other DNA
atcctcgccgtcttggcgtcgccagccattttggcttattggtggatgtgccgaccattggcgtggcgaaaaaac

SEQ ID NO: 377417 - DNA, 75 bp, synthetic construct
  source 1..75: mol_type = other DNA
aacccagcgagctgggagaactggtctatcgctatgccgataaaatgttcaccttaagccaggaaatgctggata

SEQ ID NO: 377418 - DNA, 75 bp, synthetic construct
  source 1..75: mol_type = other DNA
tttaaacgcaagggacgtggtctcgaacccagcgaactgggagagctggtctatcgctatgccgataaaatgttt

SEQ ID NO: 377419 - DNA, 75 bp, synthetic construct
  source 1..75: mol_type = other DNA
gctgtcgcaaaaacctgatttagtgtttgtcgatggtcatgggatctcgcatcctcgccgtcttggcgtcgccag

SEQ ID NO: 377420 - DNA, 75 bp, synthetic construct
  source 1..75: mol_type = other DNA
atcccggatgtctcgctaaaacagctcaacgtgcgtgaccaacaggcactgattagcacattgaccgactggcgc

SEQ ID NO: 377421 - DNA, 75 bp, synthetic construct
  source 1..75: mol_type = other DNA
cgattcatctgccgaaacggttggttgaacggctgcaacaactcgggcaaatcccggatgtgacgctgaaacagc

SEQ ID NO: 377422 - DNA, 75 bp, synthetic construct
  source 1..75: mol_type = other DNA
ttacgctgaatgacacaccgttcgtggatgaacgcgtgattgagcagcatattgaggcaggcatttcactgtgtg

SEQ ID NO: 377423 - DNA, 75 bp, synthetic construct
  source 1..75: mol_type = other DNA
gatggaagtcggtttccccgtctcttcgccgggcgattttgaatcggtgcaaaccatcgctcgccaggtcaaaaa

SEQ ID NO: 377424 - DNA, 75 bp, synthetic construct
  source 1..75: mol_type = other DNA
ttgctagaaaacgttttgaaatattaaatactggtgacctagcgaaccagcatgggcatattgaattgccaccca

SEQ ID NO: 377425 - DNA, 75 bp, synthetic construct
  source 1..75: mol_type = other DNA
agcatcaacaacagcagccagagccagaacgtcacctttgtacctggtgatgcatcgcagctcacttcaaccgtt

SEQ ID NO: 377426 - DNA, 75 bp, synthetic construct
  source 1..75: mol_type = other DNA
cgacgctggcagagatcctgaagttcgtcaatgaagtgccgtttgaggcgattcgctttattctcgattctgcga

SEQ ID NO: 377427 - DNA, 75 bp, synthetic construct
  source 1..75: mol_type = other DNA
cgctggcgctggcgacggcgctgcaaactgtacctgaacaaaatattgatgtgacaaatagcgagagcgcattaa

SEQ ID NO: 377428 - DNA, 75 bp, synthetic construct
  source 1..75: mol_type = other DNA
agcgagtgaagcggcgagtggtatgcctgatccgacgttgcctgagcttcctgatggtcatggcagggcgacgat

SEQ ID NO: 377429 - DNA, 75 bp, synthetic construct
  source 1..75: mol_type = other DNA
gcggataaatgtcctgaggggggaacatcgtcgtgtcagtggcagtgcccgggtttccctcaaacgtcgtatctg

SEQ ID NO: 377430 - DNA, 75 bp, synthetic construct
  source 1..75: mol_type = other DNA
caaagtagacctcgaaaaaggtttctggtggagcaactcaaaccaagaaattcagggtattaccggtattgaacg

SEQ ID NO: 377431 - DNA, 75 bp, synthetic construct
  source 1..75: mol_type = other DNA
cagcgtcgggtcagtggtagtgcccgggtttccctcaagcgtcgtatctggctgagggatgccggacagtgctgt

SEQ ID NO: 377432 - DNA, 75 bp, synthetic construct
  source 1..75: mol_type = other DNA
cccgacaaatgattatcgaaacctttatttgtccggtaagtagtatcagcaatccagatgaatttaataccttct

SEQ ID NO: 377433 - DNA, 75 bp, synthetic construct
  source 1..75: mol_type = other DNA
ccgtcaccgcaaccatcaacagcagcagccagagccggaacgtgacgtttatcgccgatgtcaggacggcgcaga

SEQ ID NO: 377434 - DNA, 75 bp, synthetic construct
  source 1..75: mol_type = other DNA
ggcagacggtcagcgtgttggcggacaacggcgcaacggtcgccccgacggtcaccacgcagccggacggtacgg

SEQ ID NO: 377435 - DNA, 75 bp, synthetic construct
  source 1..75: mol_type = other DNA
tggtggtggtagcagaacacttcggggccgatgatgaacggctggcgcgtgcgctgatgctttcgcatttgagcg

SEQ ID NO: 377436 - DNA, 75 bp, synthetic construct
  source 1..75: mol_type = other DNA
ttgtcagagtcggtgcgcgcttgctgtataactatctggttaaaggcggcgttcaggtgtttgagtaccgccgcc

SEQ ID NO: 377437 - DNA, 75 bp, synthetic construct
  source 1..75: mol_type = other DNA
ataatctgaacggcatcatcgccgcagactgccagcaggtggatgaaaccatgctgcccaaacgcacctggtgga

SEQ ID NO: 377438 - DNA, 75 bp, synthetic construct
  source 1..75: mol_type = other DNA
gatgtcaggacggcgaagatagcggatctggtggttattaaggatggttcagaggcggacggttcgacggcgaac

SEQ ID NO: 377439 - DNA, 75 bp, synthetic construct
  source 1..75: mol_type = other DNA
ttggttgctggagcggatttacctgtcagtgttttattagttgatgattttggtaatccggttgataacggtctg

SEQ ID NO: 377440 - DNA, 75 bp, synthetic construct
  source 1..75: mol_type = other DNA
ctggagcatatcagtagtacgttgcagcgcgttattattcctttcagaagtgaattaacgctaggagatacatgg

SEQ ID NO: 377441 - DNA, 75 bp, synthetic construct
  source 1..75: mol_type = other DNA
ctatgaagtcgaagtttgggtcaatgattcccctttactctctcgtactgtaacttttaaagcagacgatgagaa

SEQ ID NO: 377442 - DNA, 75 bp, synthetic construct
  source 1..75: mol_type = other DNA
tcgccgatgtagcgcatgagaagggcgcactgttgcgacgtcgaggcgtagagtggaattatttcgtcagcgacc

SEQ ID NO: 377443 - DNA, 75 bp, synthetic construct
  source 1..75: mol_type = other DNA
tacgcccgcgccttcaatatctcgccggacgatgttgataaataccagcgtcagatcggcaaggtgatggagctg

SEQ ID NO: 377444 - DNA, 75 bp, synthetic construct
  source 1..75: mol_type = other DNA
gctttatttccataactctcacttcgaccgcaccgttctgcgttatgcaatgccgcgactggcaccgccagtcga

SEQ ID NO: 377445 - DNA, 75 bp, synthetic construct
  source 1..75: mol_type = other DNA
gagacggtgttcagcaaaaatgtcaggctaattacaagctccctgaaacagaactggataatcctgttagctatg

SEQ ID NO: 377446 - DNA, 75 bp, synthetic construct
  source 1..75: mol_type = other DNA
gtcattatggtcgtcgaaagcggcggccagtttcaggtggttatcggtaatcacgtgcacgatgtctggctggcg

SEQ ID NO: 377447 - DNA, 75 bp, synthetic construct
  source 1..75: mol_type = other DNA
acggaacccgcacagcttattcaatggtatttattacgctggcagattgaagttttctttaaggtattaaaaagc

SEQ ID NO: 377448 - DNA, 75 bp, synthetic construct
  source 1..75: mol_type = other DNA
ttggcacaggttctgcgtgaacatggtgaccatgatgcggccacaagagctgaagaggcactgcaaaaagcgatt

SEQ ID NO: 377449 - DNA, 75 bp, synthetic construct
  source 1..75: mol_type = other DNA
ttgcggagattgaatcggcacgcggtgatatttccctgacctatttcgagtacggtacgctgtcggcgttgtggc

SEQ ID NO: 377450 - DNA, 75 bp, synthetic construct
  source 1..75: mol_type = other DNA
atacgatgcctgttgctgttcagccaggagcttttctgccatccgcgagccagtgtgacaggtgatgaagaatgt

SEQ ID NO: 377451 - DNA, 75 bp, synthetic construct
  source 1..75: mol_type = other DNA
atacgatgcctgttgctgttcagccaggagcttttctgccatccgcgagccagtgtgacagatgatgaaggatgt

SEQ ID NO: 377452 - DNA, 75 bp, synthetic construct
  source 1..75: mol_type = other DNA
tcagatcggcaaggtgatggagctgggcctcggctttggcggtggcgtcgcggcgttcctgaccttcgccctggt

SEQ ID NO: 377453 - DNA, 75 bp, synthetic construct
  source 1..75: mol_type = other DNA
tctagattattgtatttctgacagtgaaagccccagaacatgtgaaatattatatggagtcttaaatactggaga

SEQ ID NO: 377454 - DNA, 75 bp, synthetic construct
  source 1..75: mol_type = other DNA
ggatagagcaacttaaaaagttaccaggttttatatccaccagacgttccaatgcacaatattttgtagataaat

SEQ ID NO: 377455 - DNA, 75 bp, synthetic construct
  source 1..75: mol_type = other DNA
tctgtacatgatacggtagcaaatgccgaatatatagataagaatggttttttgtcggaaaccaccagatacctt

SEQ ID NO: 377456 - DNA, 75 bp, synthetic construct
  source 1..75: mol_type = other DNA
gggggctaaatgggtgtctgtgggtgaaggcagatatgagcgtacctatagggcctacaaagaaggagaaaactt

SEQ ID NO: 377457 - DNA, 75 bp, synthetic construct
  source 1..75: mol_type = other DNA
tatatcgccggggagccattaaccgtcacagtaacgttacgggatgagtttggtaaccctgctttcgggctgaca

SEQ ID NO: 377458 - DNA, 75 bp, synthetic construct
  source 1..75: mol_type = other DNA
gacaggaagggatttagctggcaggaacagactccgtatatttccgtagtagatattctgcgagcaaggcgctct

SEQ ID NO: 377459 - DNA, 75 bp, synthetic construct
  source 1..75: mol_type = other DNA
ggcgtaggttctgacgtttatagcgtgacctccttcacagagctggcgcgtgatggtcaggattgtgaacgctgg

SEQ ID NO: 377460 - DNA, 75 bp, synthetic construct
  source 1..75: mol_type = other DNA
cagagcaggtccgtacttatgtaccggctgacgattaccgcgtgctgggtactgatggctttggtcgttccgaca

SEQ ID NO: 377461 - DNA, 75 bp, synthetic construct
  source 1..75: mol_type = other DNA
cgtacacgatttaaccacagactataacttgccgacacgactactgacagctctcagcgatgagagcgtactaat

SEQ ID NO: 377462 - DNA, 75 bp, synthetic construct
  source 1..75: mol_type = other DNA
ccattggaaatgagtggtgcaataggcatagaacaattaaaaaaattgccaggatttatttctgttagaagaaaa

SEQ ID NO: 377463 - DNA, 75 bp, synthetic construct
  source 1..75: mol_type = other DNA
gcacttgggatgatttagaatataaagcaatccaatcagttttagactctaaaatgttcacgatgggggagtatg

SEQ ID NO: 377464 - DNA, 75 bp, synthetic construct
  source 1..75: mol_type = other DNA
ccctgaaactggctgcaggatacgacgatatctcagtcgtggcaaaaggtatggagcagatgctgaataccccgg

SEQ ID NO: 377465 - DNA, 75 bp, synthetic construct
  source 1..75: mol_type = other DNA
ggaaacatcatgggggttctgattgctggagaactccatttttgttatttaagaacttacaccgtgaataccttt

SEQ ID NO: 377466 - DNA, 75 bp, synthetic construct
  source 1..75: mol_type = other DNA
ttttaaaaaagaaccacgaaagcacgaaattacacagacggtttgctgtggtgacacgctattaccgttaaccat

SEQ ID NO: 377467 - DNA, 75 bp, synthetic construct
  source 1..75: mol_type = other DNA
cgtaacctacaccgtgaatttggttttacgttagatggtgctgcaactaagcatgacacgctgttaccacggttc

SEQ ID NO: 377468 - DNA, 75 bp, synthetic construct
  source 1..75: mol_type = other DNA
atttagcggtattcctgataccgcatagagccaacaccagctactggcttaggcacatttacagcaataaccact

SEQ ID NO: 377469 - DNA, 75 bp, synthetic construct
  source 1..75: mol_type = other DNA
ggaagcatcatggtggttctgatgactggcgtacaccgtatcgtttatttcgtaacctgcatcgtgaatttggtt

SEQ ID NO: 377470 - DNA, 75 bp, synthetic construct
  source 1..75: mol_type = other DNA
gaaattacacagatggtttgctgtgctgacacgctattaccgttaaccatcattaaccgtggtggactaagagga

SEQ ID NO: 377471 - DNA, 75 bp, synthetic construct
  source 1..75: mol_type = other DNA
ctttcttctgttcatctgcgtttgccacgcaaattccagtacctgaaatacccaagtatgtaaatgatttaactg

SEQ ID NO: 377472 - DNA, 75 bp, synthetic construct
  source 1..75: mol_type = other DNA
tttggtttccattacaaatcccgtactcactcgacctacggcaatattgatctcctgaaggctgcctgccgtcag

SEQ ID NO: 377473 - DNA, 75 bp, synthetic construct
  source 1..75: mol_type = other DNA
ctgacgcaaaaaagccacgcacaactgatcgtgttagtagtagaaacaacaggcgatgaaaccatcgagcaatat

SEQ ID NO: 377474 - DNA, 75 bp, synthetic construct
  source 1..75: mol_type = other DNA
cacagacgctcgacagcttcataaaactatacaggcaaggaaaacccattaagtacattgcagatgctctcagaa

SEQ ID NO: 377475 - DNA, 75 bp, synthetic construct
  source 1..75: mol_type = other DNA
gcatgacgcattgttgccacggttcaccgatgatattcacaatcaatcatgggttggtgaacgggtcttcgttaa

SEQ ID NO: 377476 - DNA, 75 bp, synthetic construct
  source 1..75: mol_type = other DNA
atttaagtgatattggttgtctggagattcagggggccagtctagacattcgccacaccagaactacaattatat

SEQ ID NO: 377477 - DNA, 75 bp, synthetic construct
  source 1..75: mol_type = other DNA
ctggagaactccatttttgttatttaagaacttacaccgtgaatttattttcagtctggatggtgctgcaactga

SEQ ID NO: 377478 - DNA, 75 bp, synthetic construct
  source 1..75: mol_type = other DNA
tggtggcgattttcatcctcggtcagcttctcaaacgtacgctgggcgggcaaacgggcatacgctgggagcagc

SEQ ID NO: 377479 - DNA, 75 bp, synthetic construct
  source 1..75: mol_type = other DNA
atgccactaatcctatggtcagtccattaatcgaacacatgaaagaaaatctgcgccaacagattctggacagag

SEQ ID NO: 377480 - DNA, 75 bp, synthetic construct
  source 1..75: mol_type = other DNA
ggttgagagagcaacggaggccttaaacggaagttatgatgttcgttttgatgctaacgatcctagcagcattga

SEQ ID NO: 377481 - DNA, 75 bp, synthetic construct
  source 1..75: mol_type = other DNA
gtcgcgcagtcgcgtcggtgattcgatagatggcattggtggagaaatcacaggcgcagatcgctttatctttgg

SEQ ID NO: 377482 - DNA, 75 bp, synthetic construct
  source 1..75: mol_type = other DNA
gaaaagcccgaagacattctggaatcagcagtatatcgacactggtgccgtattttgcggaaacctgacattgat

SEQ ID NO: 377483 - DNA, 75 bp, synthetic construct
  source 1..75: mol_type = other DNA
ccctatatcattgagttgaacacggggcaagaaactatcgttatagcccatgccgactatccggataatgaatac

SEQ ID NO: 377484 - DNA, 75 bp, synthetic construct
  source 1..75: mol_type = other DNA
gtgagccgaccttggaacggtcgcatcctgcatacccactatgccactggtcagcaggccgaagccctggttgaa

SEQ ID NO: 377485 - DNA, 75 bp, synthetic construct
  source 1..75: mol_type = other DNA
accgatgatattcacaatcagtcatgggatggtgaacgggtattctgtaacccaccatacagcgacactaaaaca

SEQ ID NO: 377486 - DNA, 75 bp, synthetic construct
  source 1..75: mol_type = other DNA
gggttggtgaaagggtattctgtaacccaccatacagcgacactaaaacattcctcgtaaaagcatctgaagcag

SEQ ID NO: 377487 - DNA, 75 bp, synthetic construct
  source 1..75: mol_type = other DNA
atgggcgtcaaaatcacaggtttagacaaaatgcagaaacagctaaaagaggttgagagagcaacggaggcctta

SEQ ID NO: 377488 - DNA, 75 bp, synthetic construct
  source 1..75: mol_type = other DNA
gacgcctgccctgcggatcttttgccgcaacagttgtactggttcagcaaaggtcagcaacacgataaagctacc

SEQ ID NO: 377489 - DNA, 75 bp, synthetic construct
  source 1..75: mol_type = other DNA
ctgcatccggtgtagcgcctgtgctgacgcctgccctgcggatcttttgccgcaacagttgtactggttcagcaa

SEQ ID NO: 377490 - DNA, 75 bp, synthetic construct
  source 1..75: mol_type = other DNA
attcgtctggaaagacaacaggagacagtaggcatcatccagctcaggagcagattgcataatacagctcgtaag

SEQ ID NO: 377491 - DNA, 75 bp, synthetic construct
  source 1..75: mol_type = other DNA
cggggcttgccgaatacggcccctttttacctcacgggctgcaggtggagctgccggacattccgaccaccacca

SEQ ID NO: 377492 - DNA, 75 bp, synthetic construct
  source 1..75: mol_type = other DNA
gatgcgctgacggagtcggtcaacgcctacggtcgcaagctgattggtgacggtgcgctgctgggcttcagctgc

SEQ ID NO: 377493 - DNA, 75 bp, synthetic construct
  source 1..75: mol_type = other DNA
gatgcgctgacggagtcggtcaacgcctacggtcgcaagctaattggcgacggtgcactgctgggcttcagttgc

SEQ ID NO: 377494 - DNA, 75 bp, synthetic construct
  source 1..75: mol_type = other DNA
atacgctggatcagctatgccaccggtactacggaaaaaccaaaggcgttactgaagaagtgttgaccgccaatc

SEQ ID NO: 377495 - DNA, 75 bp, synthetic construct
  source 1..75: mol_type = other DNA
atgcgcgcgatcggtaaattgcctaaaagcgtgttgatactggaatttatcggaatgatgttgctgtcggtaagc

SEQ ID NO: 377496 - DNA, 75 bp, synthetic construct
  source 1..75: mol_type = other DNA
acggagcaggttctgcaggcaaatccggggctggctgaatacggcccctttttaccgcacgggttgcaggtggat

SEQ ID NO: 377497 - DNA, 75 bp, synthetic construct
  source 1..75: mol_type = other DNA
ggtcagcgtacaggaatgaagttgcttgaggatacgtacagcctgtacgggtttaaagccaagatcctcattgca

SEQ ID NO: 377498 - DNA, 75 bp, synthetic construct
  source 1..75: mol_type = other DNA
gcatgttgccaatgaaaccattacgttcaatagtgccgataaagctaaattagctcatccgggagtaagttcagt

SEQ ID NO: 377499 - DNA, 75 bp, synthetic construct
  source 1..75: mol_type = other DNA
caaaaatcggtcaccacagagctgattgctcaggcggaaaaactcggtgctatcgcctacattgacgccccaatc

SEQ ID NO: 377500 - DNA, 75 bp, synthetic construct
  source 1..75: mol_type = other DNA
gttacttcagccagcagtatatcgaccagcccatcacccaggcgctgattgatgcgctgaccgagtcggtcaatg

SEQ ID NO: 377501 - DNA, 75 bp, synthetic construct
  source 1..75: mol_type = other DNA
ccagctataactatgctgatccgaccagagtcaccccggctgatatcatcggtgccgttaacgcggcgggcaacc

SEQ ID NO: 377502 - DNA, 75 bp, synthetic construct
  source 1..75: mol_type = other DNA
atttaaaaacgtatgggaacgcttttagcagtacggattattggacaagtactcagctcatgggagtacacgaga

SEQ ID NO: 377503 - DNA, 75 bp, synthetic construct
  source 1..75: mol_type = other DNA
cctcacgggctgcaggtggagttgccggacattccgaccaccaccaccgtgcagaccgtccagctatgggactga

SEQ ID NO: 377504 - DNA, 75 bp, synthetic construct
  source 1..75: mol_type = other DNA
gacagcgaatgtcgccagcacaggaaaaatgaacgggttctcattctcctaccgcaatatagctttcaaggcatc

SEQ ID NO: 377505 - DNA, 75 bp, synthetic construct
  source 1..75: mol_type = other DNA
atccttcacaacaaccctgcaaaattctcaaaagtctatgcaactcagcatctaagccagaaaataaaaatccgt

SEQ ID NO: 377506 - DNA, 75 bp, synthetic construct
  source 1..75: mol_type = other DNA
atatccagacaacaccaatcccacttccagatgtggcttccatttcttagcaggctcatacaactgctcagacag

SEQ ID NO: 377507 - DNA, 75 bp, synthetic construct
  source 1..75: mol_type = other DNA
attcttcatctgcacctattagaacccattcctttcacagccggtcattcccttcaggaacaatcagttagtaat

SEQ ID NO: 377508 - DNA, 75 bp, synthetic construct
  source 1..75: mol_type = other DNA
ccaggtccactctgcagagcctgattgataatgcgttaaccggccgccctgatttgctgacttttatcactatgc

SEQ ID NO: 377509 - DNA, 75 bp, synthetic construct
  source 1..75: mol_type = other DNA
taaacttggaaaggcgtactcttgggcaaatctcagtaaccgtcttaactataaccacagccatttagaagctct

SEQ ID NO: 377510 - DNA, 75 bp, synthetic construct
  source 1..75: mol_type = other DNA
taaggccaatattgcttctaccggtaagatgaacggcttctctttcgaataccgcaatatagctttcaaggcatc

SEQ ID NO: 377511 - DNA, 75 bp, synthetic construct
  source 1..75: mol_type = other DNA
gttggatatgatcatctctgactgtccgatcgactccacccagcaggaggggctattttccataaaaattggcga

SEQ ID NO: 377512 - DNA, 75 bp, synthetic construct
  source 1..75: mol_type = other DNA
cgcaggggcataaacaggaagcggcgcggctacttggctggggccgcaacaccctgacgcgtaagttaaaagagc

SEQ ID NO: 377513 - DNA, 75 bp, synthetic construct
  source 1..75: mol_type = other DNA
tcatctttacttacttgcctcctctcctgaacctgtcgataaaacatattcagaacaattggttagtaacgtatc

SEQ ID NO: 377514 - DNA, 75 bp, synthetic construct
  source 1..75: mol_type = other DNA
tgccagtcgtatcgatattactgacggaaagttgtatctgggaaaaaatgagaaccttgccagcactcgaattat

SEQ ID NO: 377515 - DNA, 75 bp, synthetic construct
  source 1..75: mol_type = other DNA
tattgatatttactgagagctcagatcaactttccagggcaacagatcgcgtacccggtttgccggccagtcctg

SEQ ID NO: 377516 - DNA, 75 bp, synthetic construct
  source 1..75: mol_type = other DNA
acaattattttgatcaattcggacttcatgatattgcttcaatgcctaccactcagtaccgtcaggcccttgcaa

SEQ ID NO: 377517 - DNA, 75 bp, synthetic construct
  source 1..75: mol_type = other DNA
aaagcctgatgagcaaacgcgtaaagcggatagccgtgatccagaagaaatgctgatggcctttaccagcgcagc

SEQ ID NO: 377518 - DNA, 75 bp, synthetic construct
  source 1..75: mol_type = other DNA
gccgggaaaccagctgattgcatggccgtggcaatgcaggctgcgcagtggggaatgaacccgtttgccgtggct

SEQ ID NO: 377519 - DNA, 75 bp, synthetic construct
  source 1..75: mol_type = other DNA
aatcaaagattttctggatctgacagatgagcagttgctgcaggctctggattacgtcccggtgcagcgtaatgg

SEQ ID NO: 377520 - DNA, 75 bp, synthetic construct
  source 1..75: mol_type = other DNA
cgctccagattagtgctcatgatgagacaaaggggaaaatctctggaggaaatcaaagattttctggatctgaca

SEQ ID NO: 377521 - DNA, 75 bp, synthetic construct
  source 1..75: mol_type = other DNA
tggaactgctgcaactattttcagcccagacggcttgaaccaactgatgaaattcgccgaggtaatggcgcaaag

SEQ ID NO: 377522 - DNA, 75 bp, synthetic construct
  source 1..75: mol_type = other DNA
acgcctccgccagtattggtagcgcctggttccgtcgcggcactctggacgttaatcaggtcattggcgatacca

SEQ ID NO: 377523 - DNA, 75 bp, synthetic construct
  source 1..75: mol_type = other DNA
gggttcgatcaatatgatcagtaaacaaccacgtaatgactctggtattgacgcctctgccagtattggtagcgc

SEQ ID NO: 377524 - DNA, 75 bp, synthetic construct
  source 1..75: mol_type = other DNA
gaagtaattaaagggccgtccggcaccgactacgggcgcagcgcaccgacgggctcgatcaatatgatcagcaaa

SEQ ID NO: 377525 - DNA, 75 bp, synthetic construct
  source 1..75: mol_type = other DNA
gatgctgtgaaagcaaaaggatatcaggtggtgacttctccggataaagcctactactggattcaggcgaatgtg

SEQ ID NO: 377526 - DNA, 75 bp, synthetic construct
  source 1..75: mol_type = other DNA
atgatgactgcagaagagcgggttgtcatagctgtgtatatgatgcgggataaaggcccggagattcctggaaat

SEQ ID NO: 377527 - DNA, 75 bp, synthetic construct
  source 1..75: mol_type = other DNA
tggcctcgattaacaagagcggctaccgctatcatccgggcgagccaagaaccttcctgctcaccgccaatatgc

SEQ ID NO: 377528 - DNA, 75 bp, synthetic construct
  source 1..75: mol_type = other DNA
gtgggcaattactgacgatggggaagaaccggcatcgaaagtaacccactggatgacgctaccggagccaccgca

SEQ ID NO: 377529 - DNA, 75 bp, synthetic construct
  source 1..75: mol_type = other DNA
tgatctatgcagcaattacttacaccctacttaccttactttataccgtcgtcaatatcccttactgcgcattgg

SEQ ID NO: 377530 - DNA, 75 bp, synthetic construct
  source 1..75: mol_type = other DNA
gcggtagttttcttatttgtagcggtgaccatgcaatatatctagatgaacacggaaagaagcatatagagttag

SEQ ID NO: 377531 - DNA, 75 bp, synthetic construct
  source 1..75: mol_type = other DNA
atcaacaaatggctttgatagtaaagaaaaaatttatttgaacagacacgggtttgatatgaccagatttatttc

SEQ ID NO: 377532 - DNA, 75 bp, synthetic construct
  source 1..75: mol_type = other DNA
agtcactatcttctggtggacgaacgccctgctggcagtgattagcctcgcgatgttctttgttcccatgcaggc

SEQ ID NO: 377533 - DNA, 75 bp, synthetic construct
  source 1..75: mol_type = other DNA
tcagcgtatctcgctgcaatcctggcgttttgtgctggcgaccgcgggaggcatgctttctactgttctgatgat

SEQ ID NO: 377534 - DNA, 75 bp, synthetic construct
  source 1..75: mol_type = other DNA
gctcaaactggggttggccttcggtggtgcccttatcggctggatgctggcttatggcggatatgatgcggcaga

SEQ ID NO: 377535 - DNA, 75 bp, synthetic construct
  source 1..75: mol_type = other DNA
aaatggcgacaacaatggcacgagggaaagctgctattaccttcttcagagagcccccagctacttcctgtgact

SEQ ID NO: 377536 - DNA, 75 bp, synthetic construct
  source 1..75: mol_type = other DNA
ctaggaatcaactgactctatactacaaaagagataagcttgatacattgcaagggataataagcaagtgggcac

SEQ ID NO: 377537 - DNA, 75 bp, synthetic construct
  source 1..75: mol_type = other DNA
ggcacagatgagcgccaggatggcgcttgccaatatagaagacccaacaattttcggcggacttacaccggaggc

SEQ ID NO: 377538 - DNA, 75 bp, synthetic construct
  source 1..75: mol_type = other DNA
aaaggtaaaagatgaatatgatattgagtctatttgtaggttcctagataaacactttccgtgttggaaaggtgt

SEQ ID NO: 377539 - DNA, 75 bp, synthetic construct
  source 1..75: mol_type = other DNA
ggcgtaaaggctgccctaattattctcctgagtttaaacagcaactcgttgctgcctcctgcgaacccgggatat

SEQ ID NO: 377540 - DNA, 75 bp, synthetic construct
  source 1..75: mol_type = other DNA
aatcgctcgcagaggacccggagagtgttttatctgtgaactcaggctgccagatcatcgtttccgatggaagca

SEQ ID NO: 377541 - DNA, 75 bp, synthetic construct
  source 1..75: mol_type = other DNA
tctggataattatcatactgaatatgacagtgccaccgcctgcggcggcagcgggcgggggggccacacccgccc

SEQ ID NO: 377542 - DNA, 75 bp, synthetic construct
  source 1..75: mol_type = other DNA
gatttaacaagttgtcattttaaaggtgacgttatatcgaaggtgtcttttttatcatcaaatctacaacatgta

SEQ ID NO: 377543 - DNA, 75 bp, synthetic construct
  source 1..75: mol_type = other DNA
cagccttcagggaaaaatatcatcagatggctgcttaaaaaaagaacaaatggtagtgtccgctattgtcagtac

SEQ ID NO: 377544 - DNA, 75 bp, synthetic construct
  source 1..75: mol_type = other DNA
agcgtacaataccgggtcggcaggtaccactctcggtgttggactggctaccggtctgattggcatggccgcgga

SEQ ID NO: 377545 - DNA, 75 bp, synthetic construct
  source 1..75: mol_type = other DNA
cctctaatgacattgaaacctaatgattcaaattctgtttataaagattacgacccgagaggcaaagacgataca

SEQ ID NO: 377546 - DNA, 75 bp, synthetic construct
  source 1..75: mol_type = other DNA
gtttgttgccggattcattggcgaaatcaatatgtttaacgccacggtgatcgaacgtctcgacgagcaacgcgt

SEQ ID NO: 377547 - DNA, 75 bp, synthetic construct
  source 1..75: mol_type = other DNA
tgcttcgtgcgcgcggccttcgaggcggggatcggcctggatgccctggcgcggctgtgccgtgcgctcgacgca

SEQ ID NO: 377548 - DNA, 75 bp, synthetic construct
  source 1..75: mol_type = other DNA
gtgccgatttcctgaaaacggcccagcttttgcgccagacatatccggatctcgaaatcgtggtgccgctggtga

SEQ ID NO: 377549 - DNA, 75 bp, synthetic construct
  source 1..75: mol_type = other DNA
atgttgccgccctgcgtcagggcacatcaggtgcgaaaattcagaccagtactgaaacgggtaaccagcataaat

SEQ ID NO: 377550 - DNA, 75 bp, synthetic construct
  source 1..75: mol_type = other DNA
acagcaatcaagaagcgtaaccttgaggtgaagactcagatgagtgagaccatctggcttgaacctgccagtgag

SEQ ID NO: 377551 - DNA, 75 bp, synthetic construct
  source 1..75: mol_type = other DNA
tgtttttgttggcattgatgcgcctgacttcaatattaccctcgaaggtaacctcaaaaagcagggtatcaaaac

SEQ ID NO: 377552 - DNA, 75 bp, synthetic construct
  source 1..75: mol_type = other DNA
tggcgaaatgcccgatggtggtgggctatcgtatgaagcctttcaccttctggctggcgaagcgactggtaaaaa

SEQ ID NO: 377553 - DNA, 75 bp, synthetic construct
  source 1..75: mol_type = other DNA
acctcaaaaagcagggtatcaaaaccattcattacgtcagtccgtccgtatgggcgtggcgacagaaacgcgttt

SEQ ID NO: 377554 - DNA, 75 bp, synthetic construct
  source 1..75: mol_type = other DNA
ctgaattgatttatacgagtgaaagtttaataaaaaaaagattaagggatgaaggaacgtcatttactgaaatat

SEQ ID NO: 377555 - DNA, 75 bp, synthetic construct
  source 1..75: mol_type = other DNA
ccgccctgaccggtgacgtgaccggcagcacggagctggtccgtaacgcctgtacggtgttcaggacaatgcacg

SEQ ID NO: 377556 - DNA, 75 bp, synthetic construct
  source 1..75: mol_type = other DNA
gctgggaatcaagcatggtggatcgttggcacatgcaaatgctgcttgataatggcctgatatacaggaagcggt

SEQ ID NO: 377557 - DNA, 75 bp, synthetic construct
  source 1..75: mol_type = other DNA
gtatggactgaacgggcaaccttgcggtgaagtcacggaagaagataaatcagtagccagcgaactactgaagcg

SEQ ID NO: 377558 - DNA, 75 bp, synthetic construct
  source 1..75: mol_type = other DNA
tcataacttttacggcacggattccgattacgacgattcgaccaccgacaccgctaccatgcgttttgagcacga

SEQ ID NO: 377559 - DNA, 75 bp, synthetic construct
  source 1..75: mol_type = other DNA
gcggacgcggtgccatcacctgcccagctggtgtggcaaaaggttctccggtcaccaccgtcgacaccgccaagt

SEQ ID NO: 377560 - DNA, 75 bp, synthetic construct
  source 1..75: mol_type = other DNA
cacgctggttgtcgaagcatcaacgccttcgctttatgcgccacaacaatctgccgatccgaaattctcgcgtcc

SEQ ID NO: 377561 - DNA, 75 bp, synthetic construct
  source 1..75: mol_type = other DNA
tggaagctaccggtgtttatcacgaacggctggccactgaattacatgatgccggtttccgggtttctctggcca

SEQ ID NO: 377562 - DNA, 75 bp, synthetic construct
  source 1..75: mol_type = other DNA
ttttcttgtgtatggttctgtctggtccggtatatgcgcaggatagagcaacatattcgctactgaataaacctg

SEQ ID NO: 377563 - DNA, 75 bp, synthetic construct
  source 1..75: mol_type = other DNA
tggaaccgttgttatttgatgctgtacagaaaacacggagactgagatccgcgtcagacatcccggggattttta

SEQ ID NO: 377564 - DNA, 75 bp, synthetic construct
  source 1..75: mol_type = other DNA
taaggcgattattgctggtggcccacggtacgacctgaacgggcaaccttgcggcgaagtcacggagaaagagaa

SEQ ID NO: 377565 - DNA, 75 bp, synthetic construct
  source 1..75: mol_type = other DNA
ggtgtattacgcggcgcattaacctcacaccttcacacgacgcgataccttaaggcgattattgctggtggccca

SEQ ID NO: 377566 - DNA, 75 bp, synthetic construct
  source 1..75: mol_type = other DNA
gttgatatagataagaaaacatgtttatccttttttatcgacgtgaataatgagctgcctggcaaatttactctt

SEQ ID NO: 377567 - DNA, 75 bp, synthetic construct
  source 1..75: mol_type = other DNA
agattttacttaaagtgtttaagtctaaggtatataaattcgcaaagagatcttgaaaaatacattaaaattgaa

SEQ ID NO: 377568 - DNA, 75 bp, synthetic construct
  source 1..75: mol_type = other DNA
tctgaattagatctagaaccaaaaagcaatgactttcatgtaaattcgacaggtgaacaggttgaaaatatagaa

SEQ ID NO: 377569 - DNA, 75 bp, synthetic construct
  source 1..75: mol_type = other DNA
tcggtaaccggtgttaaaccgcgtattctcggtgtgccggggctggataccaaagaggtggctgttgcactggca

SEQ ID NO: 377570 - DNA, 75 bp, synthetic construct
  source 1..75: mol_type = other DNA
cagtatattgaagagctggaaagtgcgctgggtgtatccggacggcgtcgtggcccggcaggagtggggctgtga

SEQ ID NO: 377571 - DNA, 75 bp, synthetic construct
  source 1..75: mol_type = other DNA
cttctggggttcccgctgcctgagtgatgacccgctctttgccttcgaaaactacacccgcacggcgcaggtact

SEQ ID NO: 377572 - DNA, 75 bp, synthetic construct
  source 1..75: mol_type = other DNA
tataatgacactgatgatgattatattttgatacaaaaggttattactgatgatgtaagtgatagtgaattgaag

SEQ ID NO: 377573 - DNA, 75 bp, synthetic construct
  source 1..75: mol_type = other DNA
aattatctgaaaccgcccattatggatgggtagggcatagcaaaatgagtgaacagcaaagagaacaaagcatca

SEQ ID NO: 377574 - DNA, 75 bp, synthetic construct
  source 1..75: mol_type = other DNA
ctgcgtgggtttgcttacctgtcagcgtatggctgcaagacagtgcaggaggcgatcacttaccgcgaaaacttc

SEQ ID NO: 377575 - DNA, 75 bp, synthetic construct
  source 1..75: mol_type = other DNA
cgacggtatccgcgccaaaatgcgcagcctggtcagtcagggctatctcattggtggtgattgctggctggatga

SEQ ID NO: 377576 - DNA, 75 bp, synthetic construct
  source 1..75: mol_type = other DNA
ggcatcgttgcaggccatcgctgaccagtcaaaaccggtcaccgttgtcgtgcgcgtggaagacggcaccggcga

SEQ ID NO: 377577 - DNA, 75 bp, synthetic construct
  source 1..75: mol_type = other DNA
cccggtgcctcctctcgaaaacctgaccctgcgccagcgtattaccgcaagatacctggcaaatctggtcacttc

SEQ ID NO: 377578 - DNA, 75 bp, synthetic construct
  source 1..75: mol_type = other DNA
aatgccaaattccgcgaactgaaaaacaacggttatatcgtggatggcacatgctggttcagtgaagaatccaac

SEQ ID NO: 377579 - DNA, 75 bp, synthetic construct
  source 1..75: mol_type = other DNA
ttgcctgtgaacagggctggaatgcagccggtcagcctgtcagccagcgcgccggacttttcccggcagaagcca

SEQ ID NO: 377580 - DNA, 75 bp, synthetic construct
  source 1..75: mol_type = other DNA
tggtgcaactggaaaccttcgctcaacgtaaaccgcatcagctctctggtggtcaacagcaacgcgtcgccattg

SEQ ID NO: 377581 - DNA, 75 bp, synthetic construct
  source 1..75: mol_type = other DNA
gttgcactggcatcagtctgtcagaagctgcgcgctttcgggtatatcagcgcatggggctgtaaaaccatttcc

SEQ ID NO: 377582 - DNA, 75 bp, synthetic construct
  source 1..75: mol_type = other DNA
cgccaccgcgtatgccaccgcccgtgcgctgggtctgcgtgccagaatcgaccaggagcagggctggcataaaac

SEQ ID NO: 377583 - DNA, 75 bp, synthetic construct
  source 1..75: mol_type = other DNA
ggcccgactttactggctgggacacggtgctgaatgccgaagcaacggcttatgccaccgctcgtgcgcttggtc

SEQ ID NO: 377584 - DNA, 75 bp, synthetic construct
  source 1..75: mol_type = other DNA
cgcaaggcgcttcgggcaggggacaccctggtggtttggcggctggatcgtctcgggcgcagcctgcccgaccta

SEQ ID NO: 377585 - DNA, 75 bp, synthetic construct
  source 1..75: mol_type = other DNA
gaaaatggcaagatggtgatggtcagcgaattcttcaatgaagacgatcctgactttgaccactctctcgaccaa

SEQ ID NO: 377586 - DNA, 75 bp, synthetic construct
  source 1..75: mol_type = other DNA
cgcggggagaacctggaagaagtacgcctgccgcccctgtacgaccgagtaaacgttatggcagtcagagagcat

SEQ ID NO: 377587 - DNA, 75 bp, synthetic construct
  source 1..75: mol_type = other DNA
tgcgaaatatgcttacatagacgatgccggtgagcaaaaaacctggacaggtcagggacgtactccggcaccaat

SEQ ID NO: 377588 - DNA, 75 bp, synthetic construct
  source 1..75: mol_type = other DNA
accgtttccaatatcatcggcaccaccgacgaaaatggtcagtacaccggactgaaagccctgctggcggcggag

SEQ ID NO: 377589 - DNA, 75 bp, synthetic construct
  source 1..75: mol_type = other DNA
tgcgcgtggaagacggcaccggcgacgacgaagaaacgaaacttgcgcagaccgtttccaatatcatcggcacca

SEQ ID NO: 377590 - DNA, 75 bp, synthetic construct
  source 1..75: mol_type = other DNA
gacggagaagattgagacaggcagtgcagcgggcaagctggtttttcatgttttcgcagcgctagccgagttcga

SEQ ID NO: 377591 - DNA, 75 bp, synthetic construct
  source 1..75: mol_type = other DNA
ggcctgactttactggctgggacacggtgctgaatgccgacgcaacggcatatgccaccgcccgtgcgctcggtc

SEQ ID NO: 377592 - DNA, 75 bp, synthetic construct
  source 1..75: mol_type = other DNA
ctcagcttttgcgctactgatgtgttcaccaagtcgtgcctcagaaatactggccttgcgtgctgactgtgaaat

SEQ ID NO: 377593 - DNA, 75 bp, synthetic construct
  source 1..75: mol_type = other DNA
tatcttcctgagattgaggattatcaccgaagcgataagttacccgatgaagcagcattacttgctattgctgat

SEQ ID NO: 377594 - DNA, 75 bp, synthetic construct
  source 1..75: mol_type = other DNA
atcaaggtgcaatacacttaactgaatttggttactgtgtacataactatttaatcaagccttgtgcaaaaatta

SEQ ID NO: 377595 - DNA, 75 bp, synthetic construct
  source 1..75: mol_type = other DNA
ttgaccattgccgaaaacattttcctcggtcgtgagtttgttaatcgctttggcaaaattgactggaaaaccatg

SEQ ID NO: 377596 - DNA, 75 bp, synthetic construct
  source 1..75: mol_type = other DNA
agttcaggacatacgcggcgttctggtcgtctttgctgaacgtcgtcaggaccgcaatggtccctatgtgattct

SEQ ID NO: 377597 - DNA, 75 bp, synthetic construct
  source 1..75: mol_type = other DNA
tgtcattacaacggtcaggtagttcctgacattcccggcgtgctggcggtatacgccgaacgtcgccaggaccgc

SEQ ID NO: 377598 - DNA, 75 bp, synthetic construct
  source 1..75: mol_type = other DNA
ctcgcggtatacgccgaacgccgccaggaccgcaacggaccttatacctgcctgatgagcatcaccctgaactaa

SEQ ID NO: 377599 - DNA, 75 bp, synthetic construct
  source 1..75: mol_type = other DNA
ggtggaagatatcagcggtgtactggccgtattcgcagagcgacgccaggaccgcaatggcccgtatgtcgtatt

SEQ ID NO: 377600 - DNA, 75 bp, synthetic construct
  source 1..75: mol_type = other DNA
ggatcgtgaatcagtattatttggtgactccacgctggcgcttcgtcagtggatgcgtgaaaacggaattcagtt

SEQ ID NO: 377601 - DNA, 75 bp, synthetic construct
  source 1..75: mol_type = other DNA
ttcttcaccactaaagaacgcgttgaagcaccacctacaacgacgtctatgcgggaagatttacgtgatatctgg

SEQ ID NO: 377602 - DNA, 75 bp, synthetic construct
  source 1..75: mol_type = other DNA
atggaagcattacttcagcttaaaggcatcgataaagccttcccgggcgtaaaagccctctcgggcgcagcgtta

SEQ ID NO: 377603 - DNA, 75 bp, synthetic construct
  source 1..75: mol_type = other DNA
gatgtccgataccgtcgactacggcgagtggtgtaatggtaaacgcctgaccgggatcagttttgctggcacgct

SEQ ID NO: 377604 - DNA, 75 bp, synthetic construct
  source 1..75: mol_type = other DNA
ggcgcagaggcagaaaacatcaatctcttcgaccgtatgcaactggaacacgttatcgctatctgccgccaggca

SEQ ID NO: 377605 - DNA, 75 bp, synthetic construct
  source 1..75: mol_type = other DNA
tacctctgataatggtgcagttatcgatggtcctctgccgctgaacggagcgcaaaaaggctataagagccagac

SEQ ID NO: 377606 - DNA, 75 bp, synthetic construct
  source 1..75: mol_type = other DNA
gtattcatagggttggattcagtcgcatatataagcggttatttcaaaaatggacaagacttgatcctctaccat

SEQ ID NO: 377607 - DNA, 75 bp, synthetic construct
  source 1..75: mol_type = other DNA
tgttttgccatcagctgaaaatgtattctctgattttattaagaacaatccagctttgacaaccaatgcttttac

SEQ ID NO: 377608 - DNA, 75 bp, synthetic construct
  source 1..75: mol_type = other DNA
tttttcgaatttaaaaacacaatcgatatgatggggagcgaagacttttgtcagttcctgcgggatgatgaagag

SEQ ID NO: 377609 - DNA, 75 bp, synthetic construct
  source 1..75: mol_type = other DNA
atagagaaatctcgaaagatgaaacctgaggttaacaatatttttaaacgtcatggctactttgatcagtttggc

SEQ ID NO: 377610 - DNA, 75 bp, synthetic construct
  source 1..75: mol_type = other DNA
ggcccgttcgctggatgccatctctgaccaggcaaaacccgtgaccgttgttgtgcgtgtgccgcagggtgaaac

SEQ ID NO: 377611 - DNA, 75 bp, synthetic construct
  source 1..75: mol_type = other DNA
acctttaaagccaaactggaagagttgtgggcgcgggcgctgggtgacgagcgagaagagattggtcgggtgatc

SEQ ID NO: 377612 - DNA, 75 bp, synthetic construct
  source 1..75: mol_type = other DNA
ttctgcggaagaatggcaaccgcaaaaccgtggctttgattactttatgggattccacgctgcaggaacggcata

SEQ ID NO: 377613 - DNA, 75 bp, synthetic construct
  source 1..75: mol_type = other DNA
tattacactgcggcagtgggtaaatggcacttatcaaaaatcaataatgtcccggttcctgaagataaacaaaca

SEQ ID NO: 377614 - DNA, 75 bp, synthetic construct
  source 1..75: mol_type = other DNA
tacctacaaaataggtattgataaagccattgaggccgcaaaaaaatcgacaccgaccctgctttcgctaatgga

SEQ ID NO: 377615 - DNA, 75 bp, synthetic construct
  source 1..75: mol_type = other DNA
aagatgaagctccaattcgcgaaatggtctgcttcgtgctcgagcaaaatggctttcagccggtcgaagcggaag

SEQ ID NO: 377616 - DNA, 75 bp, synthetic construct
  source 1..75: mol_type = other DNA
atctcaccgggtgatggcgggcgaagaaccgctggagatggggccgacagaatttaaactgctgcacttttttat

SEQ ID NO: 377617 - DNA, 75 bp, synthetic construct
  source 1..75: mol_type = other DNA
atggcggtggaagaggtgatcgagatgctggggctaagtctggacccgacgtctcatcgggtgatggcgggcgaa

SEQ ID NO: 377618 - DNA, 75 bp, synthetic construct
  source 1..75: mol_type = other DNA
tatatcccgtcgattatccgcgctatgtccagcggtgacgaaaaacctgccagtaatacggtctctactggttca

SEQ ID NO: 377619 - DNA, 75 bp, synthetic construct
  source 1..75: mol_type = other DNA
cagaggttcaggctgttaacgtagggcaaccccaacccgcgcagctttctaaaatcacgcgcgttccttatgacc

SEQ ID NO: 377620 - DNA, 75 bp, synthetic construct
  source 1..75: mol_type = other DNA
gaactcacaggctgtgtcttcggcgcgatcccccctttcagcttccatccaaaactcaaactggttgccgatccc

SEQ ID NO: 377621 - DNA, 75 bp, synthetic construct
  source 1..75: mol_type = other DNA
ctggaacaggccgggaagactccggaagaagagcctggcaagccagcattgcagcttggtattgaaaaacttaaa

SEQ ID NO: 377622 - DNA, 75 bp, synthetic construct
  source 1..75: mol_type = other DNA
gtgactgagcaggaaaataaaatcccgactgcaaccgaaattgaacagcagctacgggaacgcagacagaaagaa

SEQ ID NO: 377623 - DNA, 75 bp, synthetic construct
  source 1..75: mol_type = other DNA
gataacggcagcggcaaacaggcagaagttcagcctgttaacgcagggcaacccgcgcagcttgcaaaaattacg

SEQ ID NO: 377624 - DNA, 75 bp, synthetic construct
  source 1..75: mol_type = other DNA
aacctgtgttgtactgcgcttctggcatcacgtcagcgctcactcacccgcgagcagttaaccgagcaactcaac

SEQ ID NO: 377625 - DNA, 75 bp, synthetic construct
  source 1..75: mol_type = other DNA
taataagctgctcgcctcccgcgccattgccaaagcggtagaagatgaagcgcgcagcaaaaaaatctcccatga

SEQ ID NO: 377626 - DNA, 75 bp, synthetic construct
  source 1..75: mol_type = other DNA
tccataacgccgagcgcgttcgccagctggcccacgacggccatgagctagtgtatgtgccttgccaccgcagtc

SEQ ID NO: 377627 - DNA, 75 bp, synthetic construct
  source 1..75: mol_type = other DNA
atatatcagcgacagcggtgacgccgaaccggcagagacgatgaaggtgtatcagttgctggcggaattgataac

SEQ ID NO: 377628 - DNA, 75 bp, synthetic construct
  source 1..75: mol_type = other DNA
tctattaagctgttccacgactatctcgatctgcaccgtagcaacccaaatctggatgtgcagatggtgccagta

SEQ ID NO: 377629 - DNA, 75 bp, synthetic construct
  source 1..75: mol_type = other DNA
gagcgccaacccgtcgatcaaccgcggtacgctggagaaagagagccgcaccgtcgcgcaacgtctctccgtgct

SEQ ID NO: 377630 - DNA, 75 bp, synthetic construct
  source 1..75: mol_type = other DNA
acacgcattttggtgagcgttttctgggggcgatgatggtcgggatgataccggatttaagtcaggccgccagtg

SEQ ID NO: 377631 - DNA, 75 bp, synthetic construct
  source 1..75: mol_type = other DNA
atcctccgtgcgggtaacgatcatgagaaagagtatctggtgacggtcgataaaccgattaccgatgaatttatt

SEQ ID NO: 377632 - DNA, 75 bp, synthetic construct
  source 1..75: mol_type = other DNA
tgaacgttagcttaagcggcattccgctgggggaatggcgtgatttaactgacgatgagttaatcgacctcttta

SEQ ID NO: 377633 - DNA, 75 bp, synthetic construct
  source 1..75: mol_type = other DNA
ccgaaaacagcgggcatcaaacgtccagtcgttaagatggaaaacggcggaaaaaggcggtcgcccggcgtccaa

SEQ ID NO: 377634 - DNA, 75 bp, synthetic construct
  source 1..75: mol_type = other DNA
tatgtcctgcactggataacggtggctgatgatgaaattacccgactggggataccagccccctcttccgtcatt

SEQ ID NO: 377635 - DNA, 75 bp, synthetic construct
  source 1..75: mol_type = other DNA
tcgccaatgtgagctggcaacaaggacgcctgcaccttagcctttacagccttggactgtggggtccgaacggtc

SEQ ID NO: 377636 - DNA, 75 bp, synthetic construct
  source 1..75: mol_type = other DNA
cagtcgttaagatggaaaaaacggcggaaaaaggtggtcgcccggcgtccaacggtaaacgtttcacctcgccgg

SEQ ID NO: 377637 - DNA, 75 bp, synthetic construct
  source 1..75: mol_type = other DNA
gatgtcgggcagcagcgattgtacctgaccgttcctcagatatatatgagtaatcaggcccgtggttatattgcg

SEQ ID NO: 377638 - DNA, 75 bp, synthetic construct
  source 1..75: mol_type = other DNA
gcaattattaggtctcatcattcaggggatagctcgctagaaatatcgttgacagcagatcgcacagaggttttt

SEQ ID NO: 377639 - DNA, 75 bp, synthetic construct
  source 1..75: mol_type = other DNA
tcagaatgaaagagagatggtgtttttaggtgctccatatatagaatatggagcttttgatccaaattgtggaga

SEQ ID NO: 377640 - DNA, 75 bp, synthetic construct
  source 1..75: mol_type = other DNA
gcgaattgaatgaactcacacaaagcgcaatatcttacaacaatgccgtaagtgagattattaacgtctggtttg

SEQ ID NO: 377641 - DNA, 75 bp, synthetic construct
  source 1..75: mol_type = other DNA
acctacagcgccccgctgaagcccggctaccgcagcctgattcactcgccgtctggtgttctcggcctgacggag

SEQ ID NO: 377642 - DNA, 75 bp, synthetic construct
  source 1..75: mol_type = other DNA
tccgccgcaccggaagttacattaaaaactcgctcccgcaggaagaacgcataaagatggttgccgaccaggtag

SEQ ID NO: 377643 - DNA, 75 bp, synthetic construct
  source 1..75: mol_type = other DNA
tctattaagctgttccacgactatctcgatttgcaccgcagcaacccaaatctggatgtgcagatggtgccagta

SEQ ID NO: 377644 - DNA, 75 bp, synthetic construct
  source 1..75: mol_type = other DNA
ttggtaaggtaacgccgaagggcgaaacccagctgactccagaagagaagctgcttcgtgcgatcttcggtgaga

SEQ ID NO: 377645 - DNA, 75 bp, synthetic construct
  source 1..75: mol_type = other DNA
aatgtcaaatccgtggcgtgacctattccgccccgctgcgcgttaaactgcgtctggtgatctatgagcgcgaag

SEQ ID NO: 377646 - DNA, 75 bp, synthetic construct
  source 1..75: mol_type = other DNA
tcgaagaaggcaactacgttatcgcccaggcgaactccaacctggatgaagaaggccacttcgtagaagacctgg

SEQ ID NO: 377647 - DNA, 75 bp, synthetic construct
  source 1..75: mol_type = other DNA
ggcgaaccggtgtttgacgtccaggaatgtcaaatccgtggtgtgacctattccgcaccgctgcgcgttaaactg

SEQ ID NO: 377648 - DNA, 75 bp, synthetic construct
  source 1..75: mol_type = other DNA
atatccgtaacggtaaaggtgaagtcgatgatatcgaccacctcggcaaccgccgtatccgttccgttggcgaaa

SEQ ID NO: 377649 - DNA, 75 bp, synthetic construct
  source 1..75: mol_type = other DNA
gtacctttgttatcaacggtactgagcgtgttatcgtttcccagctgcaccgtagtccgggcgtcttctttgact

SEQ ID NO: 377650 - DNA, 75 bp, synthetic construct
  source 1..75: mol_type = other DNA
ctggaaatatctaaacataaaaactttaaggtgttaaatggctcagactccttaatgctggatgcatttaaagaa

SEQ ID NO: 377651 - DNA, 75 bp, synthetic construct
  source 1..75: mol_type = other DNA
ccgcaatggtaacgcctttcgatgaaatggaaaaaatggacatttcagcagcaaaaaaaatggcacgttggttag

SEQ ID NO: 377652 - DNA, 75 bp, synthetic construct
  source 1..75: mol_type = other DNA
aagctgcgctctccaaattggatgaatccggtatcgtttacattggtgcggaagtgaccggtggcgacattctgg

SEQ ID NO: 377653 - DNA, 75 bp, synthetic construct
  source 1..75: mol_type = other DNA
cgatgatatcgaccacctcggcaaccgtcgtatccgttccgttggcgaaatggcggaaaaccagttccgcgttgg

SEQ ID NO: 377654 - DNA, 75 bp, synthetic construct
  source 1..75: mol_type = other DNA
gaacatcggtctgatcaactctctgtctgtatacgcgcagactaacgaatacggcttccttgagactccgtatcg

SEQ ID NO: 377655 - DNA, 75 bp, synthetic construct
  source 1..75: mol_type = other DNA
taacctgccgtagcaaaggcgaatccagtttgttcagccgcgaccaggttgattacatggacgtatccacccagc

SEQ ID NO: 377656 - DNA, 75 bp, synthetic construct
  source 1..75: mol_type = other DNA
attcgtgataagaataaaaaactcccagtttacgaagtatgttttgccggtagttggtataataatggccatgat

SEQ ID NO: 377657 - DNA, 75 bp, synthetic construct
  source 1..75: mol_type = other DNA
ataatggcgagtggacatataccatggtgagttataaaaaacatttgggtgaaccacttcgcaaagttatcaaat

SEQ ID NO: 377658 - DNA, 75 bp, synthetic construct
  source 1..75: mol_type = other DNA
caaaagctaataaagattcgcgcagctaagcgtaaaggtaaatttgatcatcctcctcttaactatagtatcaag

SEQ ID NO: 377659 - DNA, 75 bp, synthetic construct
  source 1..75: mol_type = other DNA
atattgtaaataataaagatgaggcaaaaaatatcgttcagcagttgcttaaatctgatctaaggcgtgaaattc

SEQ ID NO: 377660 - DNA, 75 bp, synthetic construct
  source 1..75: mol_type = other DNA
ttaaagataagctcgaagcgaaaactattgttcaacggttgcttgagtctgatattgaacgtgaacgtttaggac

SEQ ID NO: 377661 - DNA, 75 bp, synthetic construct
  source 1..75: mol_type = other DNA
cactgttcaggattcaccaactatgttctcccgtcgggttttcgaaattttggcttgcggtacaccagttgtgtc

SEQ ID NO: 377662 - DNA, 75 bp, synthetic construct
  source 1..75: mol_type = other DNA
cgcaggcttcgaggttcgagacgtacacccgactcactacggtcgcgtatgtccaatcgaaacccctgaaggtcc

SEQ ID NO: 377663 - DNA, 75 bp, synthetic construct
  source 1..75: mol_type = other DNA
tgatcgaagtcccggttgagtacatcgcaggtaaagtggttgctaaagactacattgatgagtctaccggcgagc

SEQ ID NO: 377664 - DNA, 75 bp, synthetic construct
  source 1..75: mol_type = other DNA
agaccgttatgacttgtctgcggttggtcgtatgaaattcaaccgttctctgctgcgcgaagaaatcgaaggttc

SEQ ID NO: 377665 - DNA, 75 bp, synthetic construct
  source 1..75: mol_type = other DNA
ttgcctcaaaagctaataaagattcgtgcggctaagcgtaaaggcaaatttgatcacccccctcttaactgtagt

SEQ ID NO: 377666 - DNA, 75 bp, synthetic construct
  source 1..75: mol_type = other DNA
cggcggctggctggcgaccatgtttggcattggcggctccatcagtggttttaatttgcacagcttcctggtggc

SEQ ID NO: 377667 - DNA, 75 bp, synthetic construct
  source 1..75: mol_type = other DNA
ttctcgggatagtcggtgcggtggtcggcggctggctggctggcgaccatgtttggcattggcggctccatcagt

SEQ ID NO: 377668 - DNA, 75 bp, synthetic construct
  source 1..75: mol_type = other DNA
gcggcgttaggggcaggtattacagcctataactccaattctgccggtgccacgctgggggtaggactggctgcc

SEQ ID NO: 377669 - DNA, 75 bp, synthetic construct
  source 1..75: mol_type = other DNA
cgggcaccaggacacggcagatgtcaacgctgaccaggacttcacctcaagcacccaggaccgcgtcgggacggt

SEQ ID NO: 377670 - DNA, 75 bp, synthetic construct
  source 1..75: mol_type = other DNA
acaacgcggtcgggcgctttggtcgtatttcggaagtggcttcgcgtgttgccggtcagctcagtagcgaaggca

SEQ ID NO: 377671 - DNA, 75 bp, synthetic construct
  source 1..75: mol_type = other DNA
ctactggattcaggcgaatgtgctgaaggccgataagatggatctgcgggagtctcagggatggctgaaccgtgg

SEQ ID NO: 377672 - DNA, 75 bp, synthetic construct
  source 1..75: mol_type = other DNA
tcacagaaaacagtgttcctgcagatcaagaatacctctgataaagacatgtctggcctgcaagccaaagtcgct

SEQ ID NO: 377673 - DNA, 75 bp, synthetic construct
  source 1..75: mol_type = other DNA
actgaaacaggtaaccagcataaatatcagacccgtgtggtctcaaatgcgaacaaggttaacctgaaatttgaa

SEQ ID NO: 377674 - DNA, 75 bp, synthetic construct
  source 1..75: mol_type = other DNA
gcggccggtgtctgtgtgacagcgccctgggcggtggcgctcgcgccttcggtcagctatgtcacagccgccggc

SEQ ID NO: 377675 - DNA, 75 bp, synthetic construct
  source 1..75: mol_type = other DNA
tgccaccggtgggcgggaatccggccctgcacggtattgaacctgatgagcaggatgtgacactggcactgggtg

SEQ ID NO: 377676 - DNA, 75 bp, synthetic construct
  source 1..75: mol_type = other DNA
caggtttcttgatagcaacagcagtatcctcaatgttgctgtctcacgcgctaaagatagttttctggtatttgg

SEQ ID NO: 377677 - DNA, 75 bp, synthetic construct
  source 1..75: mol_type = other DNA
gccaggtggtcggcaacttcaacagcctgatcatgatgcgggtacgggaaaccgccactgccgaactgctgacca

SEQ ID NO: 377678 - DNA, 75 bp, synthetic construct
  source 1..75: mol_type = other DNA
atccgcccgctacaacgccgtcggacgctttggccgtatctcggaagtcgccagccgtattgccgggcagctttc

SEQ ID NO: 377679 - DNA, 75 bp, synthetic construct
  source 1..75: mol_type = other DNA
gtccggattatgcgaaaattttacgttatgtcaccaatatcggggaactctatcagacgtattcgatgcaggtga

SEQ ID NO: 377680 - DNA, 75 bp, synthetic construct
  source 1..75: mol_type = other DNA
actgaaacgggtaatcaacataaataccagactcgcatcgtctctaacgctaataaagttaacctcaagttccct

SEQ ID NO: 377681 - DNA, 75 bp, synthetic construct
  source 1..75: mol_type = other DNA
atgttgcagctttgcgtcagggaacatctggctccaaaattcagacaagcacagaaaccggcaaccagcataaat

SEQ ID NO: 377682 - DNA, 75 bp, synthetic construct
  source 1..75: mol_type = other DNA
cgcaccgttttcctgcagatcaaaaacacgtcggataaagacatgagtggactacagggaaaaattgccgatgca

SEQ ID NO: 377683 - DNA, 75 bp, synthetic construct
  source 1..75: mol_type = other DNA
agcaaggcgacggtgacgacagacaatgttgccgcgctgaagcagggttcttccggcgttaaagttcagaccagt

SEQ ID NO: 377684 - DNA, 75 bp, synthetic construct
  source 1..75: mol_type = other DNA
gtgggtatggctgcagatgcgatggtggaagacaccaattacaccatgatcaccgatgtgcagatcgccgaacgg

SEQ ID NO: 377685 - DNA, 75 bp, synthetic construct
  source 1..75: mol_type = other DNA
ccgacaaagacatgtccggtctgcaggcgaaagtgacgaaggcgcttcaggataaagggtatacagtgacatccg

SEQ ID NO: 377686 - DNA, 75 bp, synthetic construct
  source 1..75: mol_type = other DNA
ttgtacgttaaggctactttttaatcagtcgttggttctcgataaagtgcctgaatacggcaaacctgcgaagtg

SEQ ID NO: 377687 - DNA, 75 bp, synthetic construct
  source 1..75: mol_type = other DNA
aatattttaattaaagcatttgtttccagcggacaatttttattaccgctaatcattagcctgttagtgtgggct

SEQ ID NO: 377688 - DNA, 75 bp, synthetic construct
  source 1..75: mol_type = other DNA
actcatcgtctgctggcgcgacgctgggtgtaggcctggccaccgggctgatcggtatggctgcagatgcaatgg

SEQ ID NO: 377689 - DNA, 75 bp, synthetic construct
  source 1..75: mol_type = other DNA
cacacggtatttctgcaaataaaaaatacttcagataaagatatgagcggactgcaggctaagattgccagcgca

SEQ ID NO: 377690 - DNA, 75 bp, synthetic construct
  source 1..75: mol_type = other DNA
aagcaaccgggatttattacagtgcgggaagtattgcgacctttaccattccgttgattacggctcatctatcac

SEQ ID NO: 377691 - DNA, 75 bp, synthetic construct
  source 1..75: mol_type = other DNA
aattatcgatttagccagttataccttatatggctatatctcaatggcaacgttttatctggttagccagtggct

SEQ ID NO: 377692 - DNA, 75 bp, synthetic construct
  source 1..75: mol_type = other DNA
cattcgtaataccgttcgcccaacaacattactgatgctgtacacctttatctcatttatcgccctgctcaccgt

SEQ ID NO: 377693 - DNA, 75 bp, synthetic construct
  source 1..75: mol_type = other DNA
gggcatgaagccaaatggaggtagccgttataaccctcttgaagcggaaacaattgcagcatggctggtggcgca

SEQ ID NO: 377694 - DNA, 75 bp, synthetic construct
  source 1..75: mol_type = other DNA
gatctggcctttttgagcaatcgtgggctttatattccgtcaccgcagctgggagacggatttattgcgtttatc

SEQ ID NO: 377695 - DNA, 75 bp, synthetic construct
  source 1..75: mol_type = other DNA
ccatcgagacgatagccatgaccgaccatgtcggtctatctgattatcagcctgactatctcgctgctgatgaat

SEQ ID NO: 377696 - DNA, 75 bp, synthetic construct
  source 1..75: mol_type = other DNA
tatagtcctttctgttgggctattccgctttaataaaacataccagataaagaccggacaactgcgccgcacctg

SEQ ID NO: 377697 - DNA, 75 bp, synthetic construct
  source 1..75: mol_type = other DNA
ttctgctgaagagaaatacaaaccgaaaactctacagcctgttgtttcgttcaattgcaaaggcggaaaagtcaa

SEQ ID NO: 377698 - DNA, 75 bp, synthetic construct
  source 1..75: mol_type = other DNA
ggaacccggggcggttcaatcttccgtaatattcccccgctgctgcaaatcttcttctggtactttgccgtgttg

SEQ ID NO: 377699 - DNA, 75 bp, synthetic construct
  source 1..75: mol_type = other DNA
gttaaccagccagtatctcaacatcgtcaaaaactcctctcttgccgccgctattggctatcccgatatggtttc

SEQ ID NO: 377700 - DNA, 75 bp, synthetic construct
  source 1..75: mol_type = other DNA
ttttaccgccgctaaccgtgcgcgcgtgtcacaatcgcagggtgatgatattcagacgcggctgggtttacacag

SEQ ID NO: 377701 - DNA, 75 bp, synthetic construct
  source 1..75: mol_type = other DNA
gtatgttcagctcaagggcgatgaccggacgggtgatgtatcagacggcgagtggctgcatatcaatggacgtga

SEQ ID NO: 377702 - DNA, 75 bp, synthetic construct
  source 1..75: mol_type = other DNA
tgggcgggtaaagccatgcacgacaacccggtgacgggcatgattttcgaaccagaacactacctggcgcactga

SEQ ID NO: 377703 - DNA, 75 bp, synthetic construct
  source 1..75: mol_type = other DNA
agaccggacaactgcgccgcacctggccgatcgccgctgtgttgatcattggtttgcctttactggcgcaatggc

SEQ ID NO: 377704 - DNA, 75 bp, synthetic construct
  source 1..75: mol_type = other DNA
gcgggtctgacaccacggcgttatgaatcaggtagcagtgtgagaggggcgagccggatgagtaaggccggacat

SEQ ID NO: 377705 - DNA, 75 bp, synthetic construct
  source 1..75: mol_type = other DNA
atgcctgtcgcggccgcacaattgacgatatgcactccgatatcgtttcagcggttattcgctaatgaacctgac

SEQ ID NO: 377706 - DNA, 75 bp, synthetic construct
  source 1..75: mol_type = other DNA
ttacctgattcttctcgatcagcttgaatggcagcgttcagacaaccggaataatttcagctggagcgtgaacag

SEQ ID NO: 377707 - DNA, 75 bp, synthetic construct
  source 1..75: mol_type = other DNA
aataatatgggcattgctacaaaattggtgaatcgcgttcacagcaaaattgtgattagggatgaagagttgttg

SEQ ID NO: 377708 - DNA, 75 bp, synthetic construct
  source 1..75: mol_type = other DNA
gcatacgcaaaaaatgaacgtgaaaatataaccgctactgaggaaagtgcatttcggaaggggctcctcacgtac

SEQ ID NO: 377709 - DNA, 75 bp, synthetic construct
  source 1..75: mol_type = other DNA
gtcatgtataaaggaatgaaactgttaacaaaagaggggcttgagcttattcgtgacggtattgctgaggctaca

SEQ ID NO: 377710 - DNA, 75 bp, synthetic construct
  source 1..75: mol_type = other DNA
attgccacatcaactaacaatcaggccgtcaccaatattattgaagcctttggaaaagatttctctactggtttt

SEQ ID NO: 377711 - DNA, 75 bp, synthetic construct
  source 1..75: mol_type = other DNA
gatgccctgagccattatctgactcaacagcagggggatatgctcgctgttaacggtcctccgggaacgggtaaa

SEQ ID NO: 377712 - DNA, 75 bp, synthetic construct
  source 1..75: mol_type = other DNA
ctagccagcatgtaggggccagtgttcatatcctgcctttgtatgaccatctgctgatgagccaggttaaggttc

SEQ ID NO: 377713 - DNA, 75 bp, synthetic construct
  source 1..75: mol_type = other DNA
gccagagtcgatgaagaaatgaacagttacataaggaatcactttaaggagcaggcagccagactcagcagtatt

SEQ ID NO: 377714 - DNA, 75 bp, synthetic construct
  source 1..75: mol_type = other DNA
ctgcgctatgaaatacgccgtgagtttgcaccctatataggcgtttcctggaatcaactttacgggaaaacatcc

SEQ ID NO: 377715 - DNA, 75 bp, synthetic construct
  source 1..75: mol_type = other DNA
gaagtggtggagagacggagacggcagaagcccagcttctctgggggcacgcagtaggcccatggtgggatttgg

SEQ ID NO: 377716 - DNA, 75 bp, synthetic construct
  source 1..75: mol_type = other DNA
aaagtatattgctaataaattaaatataagtaataaaacagtctatagccacatctatcatgcaatggaaaaaaa

SEQ ID NO: 377717 - DNA, 75 bp, synthetic construct
  source 1..75: mol_type = other DNA
atatagatcctattggtggaggcacagtcaaattaacaccagatcatatgactcctcattcagtaaacccggtta

SEQ ID NO: 377718 - DNA, 75 bp, synthetic construct
  source 1..75: mol_type = other DNA
gaagaatgttgaagcagtcgattcagctacttcaagtataaatagctgtattaggcaattaacattccctgagag

SEQ ID NO: 377719 - DNA, 75 bp, synthetic construct
  source 1..75: mol_type = other DNA
tgtgcagcgtgtggagctggcttcacctctggcggatgtggtcctgaacaaaacgcaggcggcatcatgtacgca

SEQ ID NO: 377720 - DNA, 75 bp, synthetic construct
  source 1..75: mol_type = other DNA
tcagaaccactgaacgttatcgctcaaaccatgtcttttcgtgaaatgctgttacgccagcgggtcaatgagggt

SEQ ID NO: 377721 - DNA, 75 bp, synthetic construct
  source 1..75: mol_type = other DNA
gaacgcaaggcgacactgatttccctttacccggaagatcagcaggaggcggtcgcccgtaccctgacactggaa

SEQ ID NO: 377722 - DNA, 75 bp, synthetic construct
  source 1..75: mol_type = other DNA
cttttgaagcaattgatattccgttaattaggtatgttgccagtacaaaaaaaccaatgattatctcaactggta

SEQ ID NO: 377723 - DNA, 75 bp, synthetic construct
  source 1..75: mol_type = other DNA
tcgaagctattgatttaccgctaattcgatatgtagctcaaactgggaaaccgatgattatctcgacagggatgg

SEQ ID NO: 377724 - DNA, 75 bp, synthetic construct
  source 1..75: mol_type = other DNA
tgttcaacgtgtggagctggcttctcctctggcggatgtggtcctgaacaaaacacaggccgcatcatgtacgca

SEQ ID NO: 377725 - DNA, 75 bp, synthetic construct
  source 1..75: mol_type = other DNA
tttttttggggcatggctacctagtgaagaaattgaaggtgcttttgacccagatgaaaattggggagttatttt

SEQ ID NO: 377726 - DNA, 75 bp, synthetic construct
  source 1..75: mol_type = other DNA
gtccactaaaggcgacggcacagcaacggaggcgttgcttaataccgttcgcgccgttctgaatgcagaggatac

SEQ ID NO: 377727 - DNA, 75 bp, synthetic construct
  source 1..75: mol_type = other DNA
tacgacggcctgagtgttgctggcccgtcaggtgcatacgagtattttgcccgcagcgccagcggtctggtgcgt

SEQ ID NO: 377728 - DNA, 75 bp, synthetic construct
  source 1..75: mol_type = other DNA
agtgatccgcacgctggaactggaatctgaacccgccactaaattgttgcaggagaatgcttaccgtgagttgct

SEQ ID NO: 377729 - DNA, 75 bp, synthetic construct
  source 1..75: mol_type = other DNA
cgatgaaattcaggctgttaaggcgttagatgttggttcatataaagagcttaaagatcgttcagtagttggcga

SEQ ID NO: 377730 - DNA, 75 bp, synthetic construct
  source 1..75: mol_type = other DNA
cactggttcatccacaaacggtgctggtgtgaatattaccgggaatgtgacaaacgggacaatcaccggtacgac

SEQ ID NO: 377731 - DNA, 75 bp, synthetic construct
  source 1..75: mol_type = other DNA
tggtgccaattacaacaccacacgcctgactatcaccccggcagatgattcgaccatcccgccgacaccggcagt

SEQ ID NO: 377732 - DNA, 75 bp, synthetic construct
  source 1..75: mol_type = other DNA
acctgctggatgtggtggagaacgccctgaacagtgagaacgtccgcccggtggcagatcgtctgacggttcgca

SEQ ID NO: 377733 - DNA, 75 bp, synthetic construct
  source 1..75: mol_type = other DNA
ggtcgggatatccgccgtagcgccatctttgctgccctgcatgttgagggtgttcaacgtgtggaactggcttct

SEQ ID NO: 377734 - DNA, 75 bp, synthetic construct
  source 1..75: mol_type = other DNA
gagcgcaaggccgcatttgtggccctttatccggcggatgagcaggacgcggtacggcgcacgctggcactggaa

SEQ ID NO: 377735 - DNA, 75 bp, synthetic construct
  source 1..75: mol_type = other DNA
acttacaaggcggcgcagaaagatgggaagtcacttaccaagttcggaccgcatgatttgcggcgcacagccagc

SEQ ID NO: 377736 - DNA, 75 bp, synthetic construct
  source 1..75: mol_type = other DNA
cagcggcaaaagccagcctgcagaggtacatcgccagtcagacgcggctgggtcgggatattcgccgtagcgcca

SEQ ID NO: 377737 - DNA, 75 bp, synthetic construct
  source 1..75: mol_type = other DNA
gatggaaagcgatgaagcgttacgcctgcgtgtgcctgcagcctttgaggggctttctgttgcggggccaactgc

SEQ ID NO: 377738 - DNA, 75 bp, synthetic construct
  source 1..75: mol_type = other DNA
gaaggcgacggaacagcagaaaaagacctgctggatgtggtggaaaaagccctgaacagtgagaacgtccgcccg

SEQ ID NO: 377739 - DNA, 75 bp, synthetic construct
  source 1..75: mol_type = other DNA
tcaatgaaagtatgttccttatgacaaacatccctcatcaggatcccccccccaaagaaagatgttattcagaat

SEQ ID NO: 377740 - DNA, 75 bp, synthetic construct
  source 1..75: mol_type = other DNA
catttgaagcaattgatatacctctgatcaaatatgtagccagaacaggtaaaccgatgattatctctacaggta

SEQ ID NO: 377741 - DNA, 75 bp, synthetic construct
  source 1..75: mol_type = other DNA
aaaaaaggttatcttagcaaggaactcaaaaagctaattaaaatgaatacataccctgagttatacaatgggcaa

SEQ ID NO: 377742 - DNA, 75 bp, synthetic construct
  source 1..75: mol_type = other DNA
ccaaatattaacatacataaaatattgctatcaaacttaacgatagaaaagagcaacctgacatatggttattat

SEQ ID NO: 377743 - DNA, 75 bp, synthetic construct
  source 1..75: mol_type = other DNA
gaacgcaaggccgaatttgttgcgcttcatccgaaagatgaacaggaagcagtgatccgtacgctggaactggaa

SEQ ID NO: 377744 - DNA, 75 bp, synthetic construct
  source 1..75: mol_type = other DNA
tatgcagggttatcttattggtaagccgcagccgttaattgatacgttgaatgaaatcgaacccattcgcgaaag

SEQ ID NO: 377745 - DNA, 75 bp, synthetic construct
  source 1..75: mol_type = other DNA
gaaggcgatgctgcaaagaacctttgacgataatctcgataccctgctgggcaaattcagcgattatatctggga

SEQ ID NO: 377746 - DNA, 75 bp, synthetic construct
  source 1..75: mol_type = other DNA
tgaatgataatcccttctccggccacctgtttatcttccgtggccgacggggtgacaccgtcaaaattctttggg

SEQ ID NO: 377747 - DNA, 75 bp, synthetic construct
  source 1..75: mol_type = other DNA
ggctggattttaataagatagcggaaaagaaaaaaatattctcaggttttaaaaaagacgctgaaggttttgaag

SEQ ID NO: 377748 - DNA, 75 bp, synthetic construct
  source 1..75: mol_type = other DNA
cggataaattccctgaagacagcaccaaaattcacgttgccaccgtacagtcgctggtgaaacgcaccctgcaat

SEQ ID NO: 377749 - DNA, 75 bp, synthetic construct
  source 1..75: mol_type = other DNA
gcgaagctccagcgcatcatcggcctggccacgtttaaccgtgaccgcagcgaaacgatagataaacaggtgcgt

SEQ ID NO: 377750 - DNA, 75 bp, synthetic construct
  source 1..75: mol_type = other DNA
ctcgacgatgcccagatgtgcctgcgactcgggttccgcctggctgtctggtactaccgtctggtcaccaaagat

SEQ ID NO: 377751 - DNA, 75 bp, synthetic construct
  source 1..75: mol_type = other DNA
tatcgagtggcgcagttagcagccacgcgccgcaaactgccgttgctgccgtgctgtgtgccgcgatgattgggc

SEQ ID NO: 377752 - DNA, 75 bp, synthetic construct
  source 1..75: mol_type = other DNA
tatcgagtggcgcagttgacagccacacaccgcaaactgccgttgctgccgtgctgtgtgccgcgatgattgggc

SEQ ID NO: 377753 - DNA, 75 bp, synthetic construct
  source 1..75: mol_type = other DNA
agccgctgatccgcaccatctttattctgccgtgggcggtaccgggctttgtcaccatcctggttttcgccggga

SEQ ID NO: 377754 - DNA, 75 bp, synthetic construct
  source 1..75: mol_type = other DNA
ccgccaaggagctgatgggtaaagatatcaattatgaggtgcttgtcagtaaagatggtctatatagctggcgta

SEQ ID NO: 377755 - DNA, 75 bp, synthetic construct
  source 1..75: mol_type = other DNA
atacttttatagaatacaaaaggctaactatggggcttgtgacgctagcaatgcagcacataccactatcatatg

SEQ ID NO: 377756 - DNA, 75 bp, synthetic construct
  source 1..75: mol_type = other DNA
gcaacgcgcaggagggggtttatctctccaaaggcgagcaggtagagcgcatcagcccgcagggagaagtgatca

SEQ ID NO: 377757 - DNA, 75 bp, synthetic construct
  source 1..75: mol_type = other DNA
gagatgggttttgatattcgcacctctctccgtcagcgcgatccgaagtttcgccagatggtgctacgtgcttac

SEQ ID NO: 377758 - DNA, 75 bp, synthetic construct
  source 1..75: mol_type = other DNA
cgcagcagctcctggaggcgcatttcccggccagtattcaggaagagatagctgacgagatgggttttgatattc

SEQ ID NO: 377759 - DNA, 75 bp, synthetic construct
  source 1..75: mol_type = other DNA
tggtcgcctgtttaactatggttctgaaatctacgagcccctgttggatctcctggaacgttatggaccgcagcg

SEQ ID NO: 377760 - DNA, 75 bp, synthetic construct
  source 1..75: mol_type = other DNA
tttgtcaccatcctcgtctttgccgggatgttcaacgactcctttggggtcatcaacaacgcgatcctttcattc

SEQ ID NO: 377761 - DNA, 75 bp, synthetic construct
  source 1..75: mol_type = other DNA
ctgccgccatcgttgaataccagataaatgccacgctttacctttaccctggccccgaaagcgaacccattcgcg

SEQ ID NO: 377762 - DNA, 75 bp, synthetic construct
  source 1..75: mol_type = other DNA
tttatcggcgtatttgctgattttctgcgcgaagggctgtggggactggtgacgctgggtgaggaggtgccgcgc

SEQ ID NO: 377763 - DNA, 75 bp, synthetic construct
  source 1..75: mol_type = other DNA
tgaaaggagcgttaatatcgccaacattggtcttaaaatttcccctatgaaaattaatcagataaaagacattat

SEQ ID NO: 377764 - DNA, 75 bp, synthetic construct
  source 1..75: mol_type = other DNA
cgtcgacctgctgacgaccggcgtcgatattccgtcgatctgtaatatcgtgttcctgcgcaaggtacgcagccg

SEQ ID NO: 377765 - DNA, 75 bp, synthetic construct
  source 1..75: mol_type = other DNA
cgatcatcaagatcaccggtgatgccgataaagacgcgcgaaaagtgcagaccatgatcacccgcttcaataaag

SEQ ID NO: 377766 - DNA, 75 bp, synthetic construct
  source 1..75: mol_type = other DNA
accggttaaagaaaattatccgggcgaacagtttgtggaatggcacaggaaagaggtgttcagaggcgagggaat

SEQ ID NO: 377767 - DNA, 75 bp, synthetic construct
  source 1..75: mol_type = other DNA
ctggcgctccaccttcttcgacgtgctgcagtggacagtggtctggacgctgctcgccaccacgctgcagtgtac

SEQ ID NO: 377768 - DNA, 75 bp, synthetic construct
  source 1..75: mol_type = other DNA
cgcgcttataactaccagtgcgcgatatgtggctttaatatgcgccacgacgacaccaccgtagcgttggaagcg

SEQ ID NO: 377769 - DNA, 75 bp, synthetic construct
  source 1..75: mol_type = other DNA
gaaacccggggcggttcaggttcaggaaaatcgaccctgttgatgctgctggcgcgtttttatgatccctgctcc

SEQ ID NO: 377770 - DNA, 75 bp, synthetic construct
  source 1..75: mol_type = other DNA
tgttgatgctgctggcgcgtttttatgatccctgctccggaaagatatggctcaacaccagcgaaggccgacaaa

SEQ ID NO: 377771 - DNA, 75 bp, synthetic construct
  source 1..75: mol_type = other DNA
cgccggcgctgcgcagggtgatgataccaatctgcagcagatttataccgaggcgggcattcaggggatatgcag

SEQ ID NO: 377772 - DNA, 75 bp, synthetic construct
  source 1..75: mol_type = other DNA
tctattgtgaaatatccatctttttatgtgtttcttttattactggtttttgctagaaaatatatggataaaaaa

SEQ ID NO: 377773 - DNA, 75 bp, synthetic construct
  source 1..75: mol_type = other DNA
tcagtacccctgcttatgcacaggcacggctggaaataggcaaagtcaacagcaccctgcaggaaaaagtctccg

SEQ ID NO: 377774 - DNA, 75 bp, synthetic construct
  source 1..75: mol_type = other DNA
atcatcgtttgacgagaagtcgtttaatgacttcatcatgcacctttcaaactcgttgtcgaattcctttattaa

SEQ ID NO: 377775 - DNA, 75 bp, synthetic construct
  source 1..75: mol_type = other DNA
atgatttcaactgacgataattttaatcataagttcagaacgatatcaagatatcgcgattttgtaaactcccca

SEQ ID NO: 377776 - DNA, 75 bp, synthetic construct
  source 1..75: mol_type = other DNA
gttcctcaacctggctatctgcattgctgtgtggcgagccaaaggcaatctggcaaaagtcgtaagggctgaatg

SEQ ID NO: 377777 - DNA, 75 bp, synthetic construct
  source 1..75: mol_type = other DNA
agcggcaaagcgggatgtggggacaggggaaaatcagataccggacatggcctcttttgccagtggtgatggatg

SEQ ID NO: 377778 - DNA, 75 bp, synthetic construct
  source 1..75: mol_type = other DNA
ggctgtcagcgtggcgtgatttccgggcacaactggcctcggcctacccggccccggcggaaaaaaaggcacagg

SEQ ID NO: 377779 - DNA, 75 bp, synthetic construct
  source 1..75: mol_type = other DNA
tggtggtcgccgcggcggttagcgtctggtggttaggtatggccctgcgcggttataaagttgctgatgacagag

SEQ ID NO: 377780 - DNA, 75 bp, synthetic construct
  source 1..75: mol_type = other DNA
caacctgatctcggtgattgggggattcctgctggcctcaaagggcagcattgattatcccctgtttatctacac

SEQ ID NO: 377781 - DNA, 75 bp, synthetic construct
  source 1..75: mol_type = other DNA
atggataatgcagaactcgccattggtatcgatctcggcactaccaatagtttaattgccgtctggaaagacggt

SEQ ID NO: 377782 - DNA, 75 bp, synthetic construct
  source 1..75: mol_type = other DNA
atacttgaatctatgtgtcgcgtgcttgaagcggattactcagatcttatgacctgtacgaccagcagtggctac

SEQ ID NO: 377783 - DNA, 75 bp, synthetic construct
  source 1..75: mol_type = other DNA
cctcaaaaaggtgccccggagtataatcataagcgctggtttgaagcgatagaccctgccactatttcggcagag

SEQ ID NO: 377784 - DNA, 75 bp, synthetic construct
  source 1..75: mol_type = other DNA
atttcattttgaatacagtagctgcgccacataatctcgacgattttaccaccttgctgaagcgtgatggcacca

SEQ ID NO: 377785 - DNA, 75 bp, synthetic construct
  source 1..75: mol_type = other DNA
agttttcaacatagcgaagatgggatcatccgccaaataaaaacattactaaaaacattagcaatccctgatgat

SEQ ID NO: 377786 - DNA, 75 bp, synthetic construct
  source 1..75: mol_type = other DNA
tgggctaccatatggatttctttgaaaaaactaatgctgacaaaaattcaataggttttacctatcaagattacg

SEQ ID NO: 377787 - DNA, 75 bp, synthetic construct
  source 1..75: mol_type = other DNA
caaacatcggttttgttacaacaactatattggatgcgctttctccggatttacaggcaaagacccgggaatcac

SEQ ID NO: 377788 - DNA, 75 bp, synthetic construct
  source 1..75: mol_type = other DNA
gggaatgcgaattttacgagaacgaactggaagatttgtggttgccgctgctcaatcgcttgcgagtgccgattg

SEQ ID NO: 377789 - DNA, 75 bp, synthetic construct
  source 1..75: mol_type = other DNA
tcacgcctccgctggcgacaactttcttggtggcgaagattttacccatatgctggtcgatgaggttttaaaacg

SEQ ID NO: 377790 - DNA, 75 bp, synthetic construct
  source 1..75: mol_type = other DNA
ttctgcaacgtccgattaaagatgtggtgatctccgttccggcttatttcagcgatgaacaacgcaagcataccc

SEQ ID NO: 377791 - DNA, 75 bp, synthetic construct
  source 1..75: mol_type = other DNA
gattaagtgccgatccagtaaaagatattcagcattttaccggtctgactgcactgaaattcttacttgcgactt

SEQ ID NO: 377792 - DNA, 75 bp, synthetic construct
  source 1..75: mol_type = other DNA
gcactgaaatttttgctggcgaccttgttaatcacacctctggcacgctacgcaaaacagccgttattgatacgc

SEQ ID NO: 377793 - DNA, 75 bp, synthetic construct
  source 1..75: mol_type = other DNA
ttcgatgtgccgttgaagaaaaccggggcttatcagtcgattgatattcgctttagttatgatatcaacggtttg

SEQ ID NO: 377794 - DNA, 75 bp, synthetic construct
  source 1..75: mol_type = other DNA
atgagtcaggtgctgctaagttttggtatcgccctggcgctggttccactgttgattttcaccagtgacagtaag

SEQ ID NO: 377795 - DNA, 75 bp, synthetic construct
  source 1..75: mol_type = other DNA
atgccaacagtaccaacagtcaccggtcgtcaggtcgaaagcagggggtttcagtctcctggttttcaggcatta

SEQ ID NO: 377796 - DNA, 75 bp, synthetic construct
  source 1..75: mol_type = other DNA
tattcagcattttaccggtcgcactgcactgaaatttttgctggcgaccttgttaatcacacctctggcacgcta

SEQ ID NO: 377797 - DNA, 75 bp, synthetic construct
  source 1..75: mol_type = other DNA
agcgggaataagtctatgcctcactaccacgttagtgaaaagggatacaatctcgtgcaacgtgagaataaataa

SEQ ID NO: 377798 - DNA, 75 bp, synthetic construct
  source 1..75: mol_type = other DNA
tcatcgtgtctgatcgcaaccagactcatgaaggcatgtcgttctggcaggctcgcatgtatgacgcactggaac

SEQ ID NO: 377799 - DNA, 75 bp, synthetic construct
  source 1..75: mol_type = other DNA
ccggtgcatctcaccctggacagatggaacgggagggggttacgtctgccccccggaaagtccacagcgggaaac

SEQ ID NO: 377800 - DNA, 75 bp, synthetic construct
  source 1..75: mol_type = other DNA
cctgactttaaatttaagcagagcttgtacgcaactgcgcaggccaaactgaatcaggtaattaaagcgcgcgag

SEQ ID NO: 377801 - DNA, 75 bp, synthetic construct
  source 1..75: mol_type = other DNA
tcagtaatttacgctgtcctggtgttgctacttttaggcttgcgtcataataaatggttttctctgttcaaaaag

SEQ ID NO: 377802 - DNA, 75 bp, synthetic construct
  source 1..75: mol_type = other DNA
acgtggacggggaaggggatgccttcacgctggcctcaaagcgtaccaccacctttatgtcctcggggatgaccc

SEQ ID NO: 377803 - DNA, 75 bp, synthetic construct
  source 1..75: mol_type = other DNA
tgcgccgatgagcgctgccacacttaaccaggtgctgacgctgacttacaaggcggcgcagaaagatgggaagtc

SEQ ID NO: 377804 - DNA, 75 bp, synthetic construct
  source 1..75: mol_type = other DNA
accttgctggcgatcctcgccgggctggatgacggcagcagtggcgaagtgagtctggtgggacaaccgctacat

SEQ ID NO: 377805 - DNA, 75 bp, synthetic construct
  source 1..75: mol_type = other DNA
tactgcttttagccttacggtataacaagttgctttcccttttcaaccggttacgcaagcaggttcacaacaaat

SEQ ID NO: 377806 - DNA, 75 bp, synthetic construct
  source 1..75: mol_type = other DNA
tgccggattgttgccgtttctctggctggtctgggcgatcaatcacggtggactaggtgccgatccggtgaaaga

SEQ ID NO: 377807 - DNA, 75 bp, synthetic construct
  source 1..75: mol_type = other DNA
aaattggtaaagtgattgcagatttaccagaaggccaaagagttgttcgtacagaaagagctgtcagagcgccac

SEQ ID NO: 377808 - DNA, 75 bp, synthetic construct
  source 1..75: mol_type = other DNA
aaagagctgaaggccgcgaaaaaacgcgaactgctgcccgttctggttgccgtgggtgaacggcgtgctggagca

SEQ ID NO: 377809 - DNA, 75 bp, synthetic construct
  source 1..75: mol_type = other DNA
ctgtgtgccagcaaaccagttcacctggcacccggtatcgcgcgcggtaggtaatgtcaaaaaccagggagcgga

SEQ ID NO: 377810 - DNA, 75 bp, synthetic construct
  source 1..75: mol_type = other DNA
gcagcagaccagggtctggtagatattcatgaccgccgcccgctggttctgtcgccagaagctgcacaggaatgg

SEQ ID NO: 377811 - DNA, 75 bp, synthetic construct
  source 1..75: mol_type = other DNA
tttaatgctgcaacgtcgcgggcaaaaaccgttggagaaagtgattggcgggctactgctgtttgtcgcagcggc

SEQ ID NO: 377812 - DNA, 75 bp, synthetic construct
  source 1..75: mol_type = other DNA
tgacgggtatcgcaaccttcctgattttaatgctgcaacgtcgcgggcaaaaaccgttggagaaagtgattggcg

SEQ ID NO: 377813 - DNA, 75 bp, synthetic construct
  source 1..75: mol_type = other DNA
aacgcgtaaaacagacaggctgggtgattgtggtgctggtagtggcgctgaatatctggttgttagtgggtacgg

SEQ ID NO: 377814 - DNA, 75 bp, synthetic construct
  source 1..75: mol_type = other DNA
aatccaacgccttattttattactttggataaaataaaagtaaatgacaagttaattaaagatggtgattatatg

SEQ ID NO: 377815 - DNA, 75 bp, synthetic construct
  source 1..75: mol_type = other DNA
gaccgcatacaactttgtgaatgtcggtaatggggcagcaagccatgctcctcagcaagcgatctacgcagctat

SEQ ID NO: 377816 - DNA, 75 bp, synthetic construct
  source 1..75: mol_type = other DNA
tggctctagttgtagcagctctgtctggctgtgcatccaccagtagttacgaacccgcagcgtacaaaaccaatc

SEQ ID NO: 377817 - DNA, 75 bp, synthetic construct
  source 1..75: mol_type = other DNA
atctgaagtcgttacgcgagcagaacaggtcatctacgaccagaaattctctggcgcagccgctgaccttctcaa

SEQ ID NO: 377818 - DNA, 75 bp, synthetic construct
  source 1..75: mol_type = other DNA
aggtaaaagtatatttatagcatatatttcacttgcatttttatttttaattatactattgctgagttggaatta

SEQ ID NO: 377819 - DNA, 75 bp, synthetic construct
  source 1..75: mol_type = other DNA
atgatgaaaagcacgctaaaaaaaatatatagaacattgttattaattcaaatgtctccgtttttagtgtgggcg

SEQ ID NO: 377820 - DNA, 75 bp, synthetic construct
  source 1..75: mol_type = other DNA
gttatgagttctcccgtattatcgatatggcgagagatgttttaatcaaccatacacgagatattgatattaatg

SEQ ID NO: 377821 - DNA, 75 bp, synthetic construct
  source 1..75: mol_type = other DNA
ttaacatttgtactctgatgccaatgcgttccatcccgttcaaagtggtttgcctgctgggaatgaacgacggcg

SEQ ID NO: 377822 - DNA, 75 bp, synthetic construct
  source 1..75: mol_type = other DNA
acaggacatttggttgaagggctgggagaagcacaggcctggcaagcgccgttgtggaaggcgctggtggaatat

SEQ ID NO: 377823 - DNA, 75 bp, synthetic construct
  source 1..75: mol_type = other DNA
ctggcctgaaacagatgtcgtcgcaaagttccggcggtgcgtcagttatcactttacagttccagctaacattgc

SEQ ID NO: 377824 - DNA, 75 bp, synthetic construct
  source 1..75: mol_type = other DNA
tgttcatataaagaaatcagtgaggagcagtttaccgaagcactgtcacttgcagctcgagttccgcttgaaggt

SEQ ID NO: 377825 - DNA, 75 bp, synthetic construct
  source 1..75: mol_type = other DNA
tggtggaaatcaccataccttctgccggtggggtgcaagccatgatttgtatggctttacgaaaattggcagctt

SEQ ID NO: 377826 - DNA, 75 bp, synthetic construct
  source 1..75: mol_type = other DNA
atgttaagggtctaccattccaatcgtctggacgtgctggaagagttgatggagttcatcgtcgaatgcgaacgg

SEQ ID NO: 377827 - DNA, 75 bp, synthetic construct
  source 1..75: mol_type = other DNA
ttccacgtttgccatagcccgcagcgtgaagttgaagttttacacgatcgcctgctggcgatgctggaggaagac

SEQ ID NO: 377828 - DNA, 75 bp, synthetic construct
  source 1..75: mol_type = other DNA
aatcgatctcgcgtgcaacggtgtgcagattactgggtggttgccgcaggttcagccggatggcctgctgcgctg

SEQ ID NO: 377829 - DNA, 75 bp, synthetic construct
  source 1..75: mol_type = other DNA
ccagagcagtcaggaactggatgcctttgtcgatgttactccagacagcctgctgcataacattcagtccgacat

SEQ ID NO: 377830 - DNA, 75 bp, synthetic construct
  source 1..75: mol_type = other DNA
gagaggcacaggcctggcaagcgccgttgtggaaggcgctggtggaatatacacatgaactcggacaaccgcgtt

SEQ ID NO: 377831 - DNA, 75 bp, synthetic construct
  source 1..75: mol_type = other DNA
tcgtgcgcggcagtcacatccggtactggaagcgtttatcagcctgttatcactgcctgacagtcgctttgtgtc

SEQ ID NO: 377832 - DNA, 75 bp, synthetic construct
  source 1..75: mol_type = other DNA
ctggcggtagcgattttgatctcagcggtggtgtcgctgaccctgacaccgatgatgtgcgcgcggatgctcagc

SEQ ID NO: 377833 - DNA, 75 bp, synthetic construct
  source 1..75: mol_type = other DNA
gcagatgatggcattgctgttgtcacggatggtgacggtacaaatatagccattggtgataaagcggatagcaga

SEQ ID NO: 377834 - DNA, 75 bp, synthetic construct
  source 1..75: mol_type = other DNA
ggccgattttctggatgtaaacagagaaaggtttatcagtccatttgaatatgcaaagattaataatccattaaa

SEQ ID NO: 377835 - DNA, 75 bp, synthetic construct
  source 1..75: mol_type = other DNA
tgctgcaccaaccaaccactgagagacgacgcgcgcgcttactggctggcgaaagcatcgacgcttccccccgcg

SEQ ID NO: 377836 - DNA, 75 bp, synthetic construct
  source 1..75: mol_type = other DNA
ctgaattacatgagggttttacttcaactgtaaaagataatgttgcaactgttgattatataacaaacctttttc

SEQ ID NO: 377837 - DNA, 75 bp, synthetic construct
  source 1..75: mol_type = other DNA
attgttattggtaaaaatgccaaatccggcggtggtcagggggtagttatcggtgagatgtcaacgccacgatgt

SEQ ID NO: 377838 - DNA, 75 bp, synthetic construct
  source 1..75: mol_type = other DNA
aaaaatgagcggcaaaacgccagccgtggtggtggtgcatgagaatcgtggactgaatccgtatatcgaagatgt

SEQ ID NO: 377839 - DNA, 75 bp, synthetic construct
  source 1..75: mol_type = other DNA
tgtattgagttagccctcgatatcgaaaagttttgccacaaaactgctatttcaaactttaacgccattgctggc

SEQ ID NO: 377840 - DNA, 75 bp, synthetic construct
  source 1..75: mol_type = other DNA
aagttccggcggtgcgtcagttatcaccttgcagttccagctaaccttaccgctggatgtcgccgagcaggaagt

SEQ ID NO: 377841 - DNA, 75 bp, synthetic construct
  source 1..75: mol_type = other DNA
cactgagaaaatcgagacgggcagtgcagcgggcaagacggttttctatgtgatctcggcgctggccgagttcga

SEQ ID NO: 377842 - DNA, 75 bp, synthetic construct
  source 1..75: mol_type = other DNA
attattgaggaacagagcaaagaaatcgacactcttaaaacacagtcaacagttgcagccatgaatccgtccagc

SEQ ID NO: 377843 - DNA, 75 bp, synthetic construct
  source 1..75: mol_type = other DNA
accatgagcggccacatctggctctgaaatacaaaacgcccgatgacgttcatcaggcgttttacagacagaaaa

SEQ ID NO: 377844 - DNA, 75 bp, synthetic construct
  source 1..75: mol_type = other DNA
ctttcgaactttttagtggtgaaagtttgaacgagaaaaggatgatcagcaaaattacaacatataaccctattg

SEQ ID NO: 377845 - DNA, 75 bp, synthetic construct
  source 1..75: mol_type = other DNA
aggtcatcgagattaacgatggcgtgcgcaccatttccaccgtctcaacggccatcatcggcatggtctgcacgg

SEQ ID NO: 377846 - DNA, 75 bp, synthetic construct
  source 1..75: mol_type = other DNA
ggcacgataacaaagccgttgctactgagttgctgggcgtggcgcaaagcctgcgtgggtttgcttacctgtcag

SEQ ID NO: 377847 - DNA, 75 bp, synthetic construct
  source 1..75: mol_type = other DNA
accaccgccaccgcgtatgccaccgcccgtgcgctgggtctgcgtgccagaatcgaccaggagcagggctggcat

SEQ ID NO: 377848 - DNA, 75 bp, synthetic construct
  source 1..75: mol_type = other DNA
ggcatcaatgccaaattccgcgagctgaaaaataacgggtatatcgttgacggctcctgctggtatgacccggag

SEQ ID NO: 377849 - DNA, 75 bp, synthetic construct
  source 1..75: mol_type = other DNA
tggggaaaccgcacctgctcagatgacccgcttttcctgtatgagaactacacccgcaccgcgcaggtgctggcc

SEQ ID NO: 377850 - DNA, 75 bp, synthetic construct
  source 1..75: mol_type = other DNA
gcacgactgacgaaaatggcaaatacaccggcctgaaagcgctgctgacggcgcagaccgtcaccggcgtgaaac

SEQ ID NO: 377851 - DNA, 75 bp, synthetic construct
  source 1..75: mol_type = other DNA
gcattaacaaaggccactgaagcatcaaaaagtgctgccgctgcagagtcctcaaaaagcgcggcagctaccagt

SEQ ID NO: 377852 - DNA, 75 bp, synthetic construct
  source 1..75: mol_type = other DNA
ccgacgaaaacggtcagtacaccggactgaaagccctgctggcggcggagtcggtaaccggtgttaagccgcgca

SEQ ID NO: 377853 - DNA, 75 bp, synthetic construct
  source 1..75: mol_type = other DNA
tgctctgatgacccgcttttcctgtttgagaactacacccgcaccgcgcaggtgctggccgacacgatggccgag

SEQ ID NO: 377854 - DNA, 75 bp, synthetic construct
  source 1..75: mol_type = other DNA
aggcgaagaggcacaggcgcaaaccatttcgaacatcatcggcaccacggatgagaacggcaaatacaccgggct

SEQ ID NO: 377855 - DNA, 75 bp, synthetic construct
  source 1..75: mol_type = other DNA
ctggtttgacgaagaggccaacagcaaagaatccctgaaggccgggaagctgtttatcgattatgactatacgcc

SEQ ID NO: 377856 - DNA, 75 bp, synthetic construct
  source 1..75: mol_type = other DNA
aaaaccctgtctaacgttggcgtgcagggtgtcaccggcatcagcgcctcagttttttgggatttgcaggcatcc

SEQ ID NO: 377857 - DNA, 75 bp, synthetic construct
  source 1..75: mol_type = other DNA
gaacgacgtcaccacgcttgtgcgcaaggatggttttcgcttctggggttcccgctgtctgagcgatgatccgct

SEQ ID NO: 377858 - DNA, 75 bp, synthetic construct
  source 1..75: mol_type = other DNA
atgagtgactatcatcacggcgtgcaggtgctggagattaacgagggcacccgcgtcatttccaccgtatccacg

SEQ ID NO: 377859 - DNA, 75 bp, synthetic construct
  source 1..75: mol_type = other DNA
agctgatggtcatctggccggatttcctcgcatgggatacggtcaccagtactaccgccaccgcgtatgccaccg

SEQ ID NO: 377860 - DNA, 75 bp, synthetic construct
  source 1..75: mol_type = other DNA
ctggcgtgatgtgcaggagaacatggaatacctgatggaattccgtgggcgtaaatgggattacggtaaaaagac

SEQ ID NO: 377861 - DNA, 75 bp, synthetic construct
  source 1..75: mol_type = other DNA
gtggctagaaatgatccgcaattcaacgtaagaatgccagatgagataaaacagcaacttacgcatattgctgca

SEQ ID NO: 377862 - DNA, 75 bp, synthetic construct
  source 1..75: mol_type = other DNA
cgctcactcggtgagctggcccgtttaacactggcacaatggcagtcacaattgttaattcctgtcgcggttaag

SEQ ID NO: 377863 - DNA, 75 bp, synthetic construct
  source 1..75: mol_type = other DNA
tctaacgtcggcgtgcagggtgtcaccggcatcagcgcatcagtcttttgggatttgcaggcatccggcaccgat

SEQ ID NO: 377864 - DNA, 75 bp, synthetic construct
  source 1..75: mol_type = other DNA
ttgcagtacgaaatgcagcctacaacgaatacggcgggataaactgtgaggtgcagtttgaagatgcggtcaatg

SEQ ID NO: 377865 - DNA, 75 bp, synthetic construct
  source 1..75: mol_type = other DNA
agccagcgagaagggatgctgatttggcctgactttactggctgggacacggtgttgaatgctgaagcaacggca

SEQ ID NO: 377866 - DNA, 75 bp, synthetic construct
  source 1..75: mol_type = other DNA
agccagcgcgaaggaatgctgatctggcccgaatttactggctgggacacggtgctgaatgccgaagcaacggca

SEQ ID NO: 377867 - DNA, 75 bp, synthetic construct
  source 1..75: mol_type = other DNA
gccagcgcaccatgaagaaggagctggaaaagctgaccagtgcggatgagatactggcatacagggtggactgga

SEQ ID NO: 377868 - DNA, 75 bp, synthetic construct
  source 1..75: mol_type = other DNA
actaaagggatggaaatccacattcgccagcgcaccatgaagaaggagctggaaaagctgaccagtgcggatgag

SEQ ID NO: 377869 - DNA, 75 bp, synthetic construct
  source 1..75: mol_type = other DNA
atgatgcatatcagaaatttttcgtattacaccccggcggagccggatgttgcaggcgcgatgtacctgaagtct

SEQ ID NO: 377870 - DNA, 75 bp, synthetic construct
  source 1..75: mol_type = other DNA
caccgttcgaacgcggcgatgaagcagaaggttttttgatagtgacgtctgcagctgataaagggctggtcgata

SEQ ID NO: 377871 - DNA, 75 bp, synthetic construct
  source 1..75: mol_type = other DNA
caccgtttgagcgcggcgatgaagcagaaggttttctgatagtgacgtctgcagctgacaaaggactggtcgaaa

SEQ ID NO: 377872 - DNA, 75 bp, synthetic construct
  source 1..75: mol_type = other DNA
atcccatacgatccagaacccatcggaagattcaacgtagcgccaggaacaaaagttctgcttctgagcgaacgt

SEQ ID NO: 377873 - DNA, 75 bp, synthetic construct
  source 1..75: mol_type = other DNA
gaccgcagccgttcagcgtaggggaagagtatccgtggctggctgagcgtgatgaagacggtgcggtggtcacct

SEQ ID NO: 377874 - DNA, 75 bp, synthetic construct
  source 1..75: mol_type = other DNA
gcatcggggaattatggccgggcgatgaaatcgtttttgtcggtgtcaccagtgcgcatcgcagcagtgcgtttg

SEQ ID NO: 377875 - DNA, 75 bp, synthetic construct
  source 1..75: mol_type = other DNA
aaacgattccatagaagtgctattttagcatctagggtcaaccatcctaacgtcgctaaaacattagattatttt

SEQ ID NO: 377876 - DNA, 75 bp, synthetic construct
  source 1..75: mol_type = other DNA
gcacatcctgattttggcgttgcactggaacgtaccgtgactgaactgctgcagggccgcagtttgaaggacctg

SEQ ID NO: 377877 - DNA, 75 bp, synthetic construct
  source 1..75: mol_type = other DNA
cgtggtatttgcggtctaccgtttacgcgccagtccgacaatcagaccatttatattccgatgaatatcattggt

SEQ ID NO: 377878 - DNA, 75 bp, synthetic construct
  source 1..75: mol_type = other DNA
aacttgtatgtttctaacggtatgtctgctggcaatacccgtaacgaagcacgcgttcaggggttgtccgaagtt

SEQ ID NO: 377879 - DNA, 75 bp, synthetic construct
  source 1..75: mol_type = other DNA
atgaggcaggacgttggagggaaagaagcagcggaaattgcagccgacggttccgtgccggctgataaatttata

SEQ ID NO: 377880 - DNA, 75 bp, synthetic construct
  source 1..75: mol_type = other DNA
cgccctggaatgtatccgatacaccgcaacgcggtcactgaatgacgctaaaaatattcttgttgctgattgtga

SEQ ID NO: 377881 - DNA, 75 bp, synthetic construct
  source 1..75: mol_type = other DNA
acgctaccagtgaaacagaatatgccggggctttcgttcctcactcactggctgttatgcaatttagtgctgata

SEQ ID NO: 377882 - DNA, 75 bp, synthetic construct
  source 1..75: mol_type = other DNA
accctcgaacactatccggggatgactgaaaaagcactggcagaaatcgttgatgaagcgcgtaaccgctggccg

SEQ ID NO: 377883 - DNA, 75 bp, synthetic construct
  source 1..75: mol_type = other DNA
tctctaccgctcagcaagatacggagaaccagaggttggagcttgagcaagctggttggacgtttgacttttggt

SEQ ID NO: 377884 - DNA, 75 bp, synthetic construct
  source 1..75: mol_type = other DNA
tccgaaatgctcagcaaaatccgcgatggtgaaacgctggttgttgccaaactcgaccgactgggacgcgatgcg

SEQ ID NO: 377885 - DNA, 75 bp, synthetic construct
  source 1..75: mol_type = other DNA
tatccgtacacgtgatcccgcgtccgcatggcgatctggaagaagtgttcccgatcggcctgaaaggcgacagca

SEQ ID NO: 377886 - DNA, 75 bp, synthetic construct
  source 1..75: mol_type = other DNA
ttcctgcatggtctgaaattccaccaccatcacatgaggaacttattgaacaggccgaatcagagaggcaattat

SEQ ID NO: 377887 - DNA, 75 bp, synthetic construct
  source 1..75: mol_type = other DNA
gatatcgtcgaaatacgtgaagggaaaattgttcctatattcaagtttgatgaagagcaagaagtacatgtcagg

SEQ ID NO: 377888 - DNA, 75 bp, synthetic construct
  source 1..75: mol_type = other DNA
cgcgggctaaagctgaaggcaggaagttgggaagaccctctaaaattgcaccagaagctcgcggagcgattgtag

SEQ ID NO: 377889 - DNA, 75 bp, synthetic construct
  source 1..75: mol_type = other DNA
ccaatcacaagggacgcaacccgcaagaacgcgcctccctgaaaaagcgcctgctgcgcaagtggatgagcaaat

SEQ ID NO: 377890 - DNA, 75 bp, synthetic construct
  source 1..75: mol_type = other DNA
aggtgatcgacgaaatctgttactacatgacctgccagaacgcagttttcctttgcggacagtttatccgacagg

SEQ ID NO: 377891 - DNA, 75 bp, synthetic construct
  source 1..75: mol_type = other DNA
gcgttttacgctctttttccgcaacagtctgaagcccataatcacctcagttaacgaaaatagcattaaaagagg

SEQ ID NO: 377892 - DNA, 75 bp, synthetic construct
  source 1..75: mol_type = other DNA
atggtgaaatgttggtagttgcaaaactagaccgtctgggacgtgatgcgattgatgttctccagacggtcaggg

SEQ ID NO: 377893 - DNA, 75 bp, synthetic construct
  source 1..75: mol_type = other DNA
gctgggtggcaaattgactattggtttgccgatatcgtcagtgggaaggttccggctatgcaacgtaaagcgttt

SEQ ID NO: 377894 - DNA, 75 bp, synthetic construct
  source 1..75: mol_type = other DNA
atgaatattggatttatcggcaccggcataatgggtaagccgatggcttataatttacaacaagccggacatact

SEQ ID NO: 377895 - DNA, 75 bp, synthetic construct
  source 1..75: mol_type = other DNA
cgaaaccatcgccaacggcccattcgtgcattatcccaacgaaaaatggttcccactgaccgaaaatgacgatgt

SEQ ID NO: 377896 - DNA, 75 bp, synthetic construct
  source 1..75: mol_type = other DNA
gtaaatctcgtgatgatttgcaggcagtgatggcgatggtgcgcggtggcgatcttggccagccgttccagttca

SEQ ID NO: 377897 - DNA, 75 bp, synthetic construct
  source 1..75: mol_type = other DNA
aagttgatcttcaggaagcacgtaacgcggtcgataacgcgagtcgcgaagtggagtcccgttttgacttccgta

SEQ ID NO: 377898 - DNA, 75 bp, synthetic construct
  source 1..75: mol_type = other DNA
gaagaattacgcctgatgcatgcagaaggtgtttttcgcacacaagaaatctggagaaaggagggatatttatga

SEQ ID NO: 377899 - DNA, 75 bp, synthetic construct
  source 1..75: mol_type = other DNA
gcgcgcggcattgactggcaggtgtgggatgacgttgtcgccgatccggatatcgctaccgtggtccgaggaatg

SEQ ID NO: 377900 - DNA, 75 bp, synthetic construct
  source 1..75: mol_type = other DNA
tttgttgattggccagcagtagatggtggcgatgaggatgatgatgacgatgaagaggtttttagtgatgaaaca

SEQ ID NO: 377901 - DNA, 75 bp, synthetic construct
  source 1..75: mol_type = other DNA
tgatgataatgaagaagtttccgggcgtttaagcattatctccggtgacattaccgaggacatgatcgctgaagc

SEQ ID NO: 377902 - DNA, 75 bp, synthetic construct
  source 1..75: mol_type = other DNA
gtcaaatacagatcatctaatgatcgtagatgttgaggagaaaacagttaatgatttctttaaaaactacacact

SEQ ID NO: 377903 - DNA, 75 bp, synthetic construct
  source 1..75: mol_type = other DNA
aagaaatactgcctgcaggtgtgcgcagtgtttgtattattctgaacaaaaaagatgatggatggtggtacggga

SEQ ID NO: 377904 - DNA, 75 bp, synthetic construct
  source 1..75: mol_type = other DNA
aagaaattctgcctgcaggtgtacgcagcgtttgtattattctgaacaaaaaagatgatggatggtggtacggga

SEQ ID NO: 377905 - DNA, 75 bp, synthetic construct
  source 1..75: mol_type = other DNA
gattattcatacggatttatctgcaccatggcgtcttaaggatatatcatcaagattatatctcagcgaaagttt

SEQ ID NO: 377906 - DNA, 75 bp, synthetic construct
  source 1..75: mol_type = other DNA
aggtggtcaagtgcttttgaatgttgcaagtataatctttgaccattatactgtttgtaacgcaggagcttatgt

SEQ ID NO: 377907 - DNA, 75 bp, synthetic construct
  source 1..75: mol_type = other DNA
ggcaagcccgatccgcgagaagatctcaaacgaatcgaagccgtcagaaaagcgataggcgatgacgtcaatctg

SEQ ID NO: 377908 - DNA, 75 bp, synthetic construct
  source 1..75: mol_type = other DNA
aattttgagtgcgggaattataacgacatagaaaactttattaaattaaaaagcgacaaggatgtaattgaggaa

SEQ ID NO: 377909 - DNA, 75 bp, synthetic construct
  source 1..75: mol_type = other DNA
ttactgataaatatgaattaacccgcacacattccgaagttctggaagccgtgaaagtggttaaaccgggtaaaa

SEQ ID NO: 377910 - DNA, 75 bp, synthetic construct
  source 1..75: mol_type = other DNA
atacaatgaagatgtcggtgaattacaccgcaccgatgccaacggtaatcgtattaaactgcgtttcgctactat

SEQ ID NO: 377911 - DNA, 75 bp, synthetic construct
  source 1..75: mol_type = other DNA
tgtttctaatatggatgttagtggtggtgtggtttctaatccatcttccgaagacccgtatacaacaacggcacc

SEQ ID NO: 377912 - DNA, 75 bp, synthetic construct
  source 1..75: mol_type = other DNA
tcgctgaatgacgctaaaaatattcttgttgctgattgtgaaaatgggggggggttatgcgtgatgatcgtttta

SEQ ID NO: 377913 - DNA, 75 bp, synthetic construct
  source 1..75: mol_type = other DNA
gttatgcaacttagtgctgatatggcgctgaatgaggcaggtaaaattcttaccgcagatattcagagggtacgc

SEQ ID NO: 377914 - DNA, 75 bp, synthetic construct
  source 1..75: mol_type = other DNA
cagccgccgaagccatcaaaacgctgatggatgcgcttattgatatttctgttattgctgacatggcgcataagc

SEQ ID NO: 377915 - DNA, 75 bp, synthetic construct
  source 1..75: mol_type = other DNA
atgacggtctcaaccgaagttgaccacaacgaatacacaggtaacggcgttacgacatcatttccgtataccttt

SEQ ID NO: 377916 - DNA, 75 bp, synthetic construct
  source 1..75: mol_type = other DNA
gcaatatcctgttaatgttgctggcaacaagtattttattgatggctacgatcttgtgaataatattgctgtaga

SEQ ID NO: 377917 - DNA, 75 bp, synthetic construct
  source 1..75: mol_type = other DNA
gaatataatgaaaaatgggttaagccagttattgaatcttgtggattagttgacttgcaagatatctttaataaa

SEQ ID NO: 377918 - DNA, 75 bp, synthetic construct
  source 1..75: mol_type = other DNA
gggataattggtcttggtgtgggcaaatgggtctccggatatactgcaacatttgctcctgatattaccacaggg

SEQ ID NO: 377919 - DNA, 75 bp, synthetic construct
  source 1..75: mol_type = other DNA
ataggtgtacctgtgccttctggcagtgccgcagatgttcttctgcaattatctagcgcaggagaaggaaaaggt

SEQ ID NO: 377920 - DNA, 75 bp, synthetic construct
  source 1..75: mol_type = other DNA
atgttgataatattgttaatgtgaatattaacaggacattacgggttccagataattttattgaaccacttcctc

SEQ ID NO: 377921 - DNA, 75 bp, synthetic construct
  source 1..75: mol_type = other DNA
attgcattccaccaacatggaagaatcgaccgaaatcctgaccatttttccgtggtatagctatctgatcgggtt

SEQ ID NO: 377922 - DNA, 75 bp, synthetic construct
  source 1..75: mol_type = other DNA
gcacaataaaccgatcgttcacccgaaagtcaccacctttacccatctttcgcaattaccggaactgtggaaggc

SEQ ID NO: 377923 - DNA, 75 bp, synthetic construct
  source 1..75: mol_type = other DNA
agcgagttattattcctttcagaagtgaattaacgctaggagatacatggtcatcatcagatgttttctttcgac

SEQ ID NO: 377924 - DNA, 75 bp, synthetic construct
  source 1..75: mol_type = other DNA
gcaatcaggcgaaaaaaagagagtgaaaaagcgcgctggaataccttcgacagcctgtgcctggtattcagtgtg

SEQ ID NO: 377925 - DNA, 75 bp, synthetic construct
  source 1..75: mol_type = other DNA
ataccgccatcgccagcatcgccaaacgggcagatgaagtgtatttcctgaaagacggtaattttgaagcagata

SEQ ID NO: 377926 - DNA, 75 bp, synthetic construct
  source 1..75: mol_type = other DNA
tcgaccgaaatcctgacgatttttccgtggtacagctacctggtcggcatatttatttttgtgctcggcgtaata

SEQ ID NO: 377927 - DNA, 75 bp, synthetic construct
  source 1..75: mol_type = other DNA
aaaaattgccaaaacctttggggtggatcatcccattgtacctggatccaagtcgcctaatgtcatgaccacgga

SEQ ID NO: 377928 - DNA, 75 bp, synthetic construct
  source 1..75: mol_type = other DNA
agaatacacaggccgcttcgttcagtggaaacaccgactgaacaccgtgcacgattgtctggaaatacgcgctga

SEQ ID NO: 377929 - DNA, 75 bp, synthetic construct
  source 1..75: mol_type = other DNA
ttgttgtatataacctgtcaacgggcgaagttgtcagacagttcaatgtggatggcgttcgtgccaggtatggcc

SEQ ID NO: 377930 - DNA, 75 bp, synthetic construct
  source 1..75: mol_type = other DNA
aatcgccggggttgttggtggttttggttggtttattcagtatggttctggagcagtataccgaacgttccagga

SEQ ID NO: 377931 - DNA, 75 bp, synthetic construct
  source 1..75: mol_type = other DNA
aaaaccaatcgtgtacatcatctgttgtcttcgattgagagccagtttttttacctagctgaatttagtgattca

SEQ ID NO: 377932 - DNA, 75 bp, synthetic construct
  source 1..75: mol_type = other DNA
ccttagatgactttaatcggtcgttaaaaaataagtacggggtaggtgtaggtactgagtataaaccttggctcc

SEQ ID NO: 377933 - DNA, 75 bp, synthetic construct
  source 1..75: mol_type = other DNA
gtatttcgttttgctaaggatgtcatcgtcaacaataacgaggtgattgaagagcaagagcggatggcaaaactt

SEQ ID NO: 377934 - DNA, 75 bp, synthetic construct
  source 1..75: mol_type = other DNA
agacagcattcgatcactggcagtcagaaaataatagcatagttggtaaatatacgcactgggaatctaaaaacg

SEQ ID NO: 377935 - DNA, 75 bp, synthetic construct
  source 1..75: mol_type = other DNA
acataagcagtacatatctactgacacactatgcaggaagactgctaattaaatggttaatacgtaatgatataa

SEQ ID NO: 377936 - DNA, 75 bp, synthetic construct
  source 1..75: mol_type = other DNA
caaggctttcaaggatgacgaggtgctgcaggaaaacatcatcatccgcttggagcgtggtggtcagcagggggc

SEQ ID NO: 377937 - DNA, 75 bp, synthetic construct
  source 1..75: mol_type = other DNA
ttcgtcacaacgaagaatacgagaagattgaaggttgtgacgacggcgtaatcatgcacctgaaatcaggcaaga

SEQ ID NO: 377938 - DNA, 75 bp, synthetic construct
  source 1..75: mol_type = other DNA
agagatgtcagattctctctcgtaccacttctggaacagcggtgtggtaattcgtcacaacgaagaatacgagaa

SEQ ID NO: 377939 - DNA, 75 bp, synthetic construct
  source 1..75: mol_type = other DNA
cagaggtggtcagtgttgctcttgatcctgaaaacgacctggaacgctggcgaacaaacctgtttgttcgcacaa

SEQ ID NO: 377940 - DNA, 75 bp, synthetic construct
  source 1..75: mol_type = other DNA
ggtattgcccaccagttgccggatatgagtagcggcttccgtaagcagttcgatgagctgcgcgccagtgctaat

SEQ ID NO: 377941 - DNA, 75 bp, synthetic construct
  source 1..75: mol_type = other DNA
cagcacaaccgaattttgtgtcagttgccacagtatgcaaccggtgtatgaagaatataaacagtcggtgcattt

SEQ ID NO: 377942 - DNA, 75 bp, synthetic construct
  source 1..75: mol_type = other DNA
ggcgctgatgatccacgttggcggcgataatatgtccgatcaaccaaaaccgctgggcggtggcggtgaacgcta

SEQ ID NO: 377943 - DNA, 75 bp, synthetic construct
  source 1..75: mol_type = other DNA
tagtagcaagcgtcgttgatcctactacctttggtgagcattcaatgttgggatttgaaaatcacatgaacgtgt

SEQ ID NO: 377944 - DNA, 75 bp, synthetic construct
  source 1..75: mol_type = other DNA
tccgtcaccgacggcgtgaaggtgaaagtgagccgggttcctgacggcgttgccgagtacagcgtgtgggggctg

SEQ ID NO: 377945 - DNA, 75 bp, synthetic construct
  source 1..75: mol_type = other DNA
acggaaagcgccggacgtcagcgtgtactcacccagttccctggcaaacgcatctttgttgcctcgattcgtggt

SEQ ID NO: 377946 - DNA, 75 bp, synthetic construct
  source 1..75: mol_type = other DNA
ttgtttccttcggtttatattgcgaaaccaccagcccatatattcatgctgcatctgaaattgtcgacagtcata

SEQ ID NO: 377947 - DNA, 75 bp, synthetic construct
  source 1..75: mol_type = other DNA
ccccctacccgatatttctcctatgttgctggcctggctacaatcacaaagctggcctggaaatgtacgtgaact

SEQ ID NO: 377948 - DNA, 75 bp, synthetic construct
  source 1..75: mol_type = other DNA
cagaatattattgtactaactgatgtcagactacccggaatatcgggactggagctactcaattacatcagtgag

SEQ ID NO: 377949 - DNA, 75 bp, synthetic construct
  source 1..75: mol_type = other DNA
ctatttgccgctcctgggaaaaacctatcaagattattggaacaatggtggagcatcgcatattccgccgaaaaa

SEQ ID NO: 377950 - DNA, 75 bp, synthetic construct
  source 1..75: mol_type = other DNA
gtaaaaattgcccgtaacgattatgaacagcgagtgctggagtttaaacagctactttataaggcaatgagcagc

SEQ ID NO: 377951 - DNA, 75 bp, synthetic construct
  source 1..75: mol_type = other DNA
acccggtacggcagtaatggtttcttccactatcgctagtgctgatgcgcaagaaattgctaccgctctggctgg

SEQ ID NO: 377952 - DNA, 75 bp, synthetic construct
  source 1..75: mol_type = other DNA
ttatcatcgatcctgatctatgtcctgcaccaggggagtttgttgtcgccaaaaacgacggtcacgaagctacat

SEQ ID NO: 377953 - DNA, 75 bp, synthetic construct
  source 1..75: mol_type = other DNA
caaactatggccggacgcagctttctgatgaccagcccgcacgagggcaaccgcaaactgttgcaacgggcattg

SEQ ID NO: 377954 - DNA, 75 bp, synthetic construct
  source 1..75: mol_type = other DNA
ggcgagacggtgatcgaagcgaaagaactgaccaagaaatttggtgattttgccgccaccgatcacgtcaacttt

SEQ ID NO: 377955 - DNA, 75 bp, synthetic construct
  source 1..75: mol_type = other DNA
gcggctggcgctggcctgctcgttgatgcatgaaccggatattctgtttctcgatgaacccacttccggcgtcga

SEQ ID NO: 377956 - DNA, 75 bp, synthetic construct
  source 1..75: mol_type = other DNA
agattaacatgcgggaaattgatgatcggctcagcgcgcgtaatttctgcaccttgatagccatgctgaaactgc

SEQ ID NO: 377957 - DNA, 75 bp, synthetic construct
  source 1..75: mol_type = other DNA
acttctcttggcccatttaccggacgcctggcgggtaagctctctggcgggatgaaacaaaaactcgggctggcc

SEQ ID NO: 377958 - DNA, 75 bp, synthetic construct
  source 1..75: mol_type = other DNA
ggccaggcgctggtgctggggatggatctgaaagagagttccggtaaagcgcgccagcatctcggctatatggcg

SEQ ID NO: 377959 - DNA, 75 bp, synthetic construct
  source 1..75: mol_type = other DNA
gactggatgaaaaccgcttcaatcagttgcagaatctagcaaaaatttatcttgagtttggcggggcatcaacct

SEQ ID NO: 377960 - DNA, 75 bp, synthetic construct
  source 1..75: mol_type = other DNA
gacgatgagatagccgcgttgaccgtcggcggctctttgttgcagaactcgaaagtgcgcaaagacgtgctatcc

SEQ ID NO: 377961 - DNA, 75 bp, synthetic construct
  source 1..75: mol_type = other DNA
taagtggaacgaggtaaataaattccggaatgatgccttagagaaattcgaagagcttgtttcaatggatcaagt

SEQ ID NO: 377962 - DNA, 75 bp, synthetic construct
  source 1..75: mol_type = other DNA
gaggtaaataaatactgggatgatgccttagagaaattcgaagggcttgtttcaatggatcgagttcctttttaa

SEQ ID NO: 377963 - DNA, 75 bp, synthetic construct
  source 1..75: mol_type = other DNA
gaaaatggcgaatgcaactgctctgactgccagcatgaaaagaaaaaaaacaactcacaaaacaacaaaccaggc

SEQ ID NO: 377964 - DNA, 75 bp, synthetic construct
  source 1..75: mol_type = other DNA
tgcgactgccctgaatgccagcacgaaaaggaaaaaacaactcacaaaacagcaaaccaggcaaccttccactga

SEQ ID NO: 377965 - DNA, 75 bp, synthetic construct
  source 1..75: mol_type = other DNA
gaaaatggcgaatgcaactgctctgactgccagcatgaaaagaaaaaaacaactcacaaaacaacaaaccaggca

SEQ ID NO: 377966 - DNA, 75 bp, synthetic construct
  source 1..75: mol_type = other DNA
aaaatgatggtacgccagcaacgcttccgtatgttgattccatcatggccgacccggaaagaggggctggggaac

SEQ ID NO: 377967 - DNA, 75 bp, synthetic construct
  source 1..75: mol_type = other DNA
taaagcccgtctgcgcccgctggtccgtatcatgctgaacatgattgtgcggttactggctgacaaaatggaatt

SEQ ID NO: 377968 - DNA, 75 bp, synthetic construct
  source 1..75: mol_type = other DNA
cgctgaaacgtatgctggcgatgcgtcattacaaacgtgctgaaaccgttgacggtaaagtcgatacccgtgcgc

SEQ ID NO: 377969 - DNA, 75 bp, synthetic construct
  source 1..75: mol_type = other DNA
ttctatatacaaacagaacagattaaatcggagtgtataggtccttgtaagcaagtaagaatatcctggacacct

SEQ ID NO: 377970 - DNA, 75 bp, synthetic construct
  source 1..75: mol_type = other DNA
ttgtggctcgtaacgtcagtgagtcacattttaaaataaaagacctgatgaatcatgatgatccggtttcgctgt

SEQ ID NO: 377971 - DNA, 75 bp, synthetic construct
  source 1..75: mol_type = other DNA
ccaaaaactaccgaccgtattcgcgcggcagctgctgcgaatgatgacgccagtaatgaggctatcgcaatatga

SEQ ID NO: 377972 - DNA, 75 bp, synthetic construct
  source 1..75: mol_type = other DNA
acagcggtgacatcgtgatcgacccgaaagaattgcttgaggcgaactggtatcgctacgacaacttgccgttac

SEQ ID NO: 377973 - DNA, 75 bp, synthetic construct
  source 1..75: mol_type = other DNA
gtccagaaagatggacgaagaattgaatatacggcggcttctctggatgagcttaaccgggcgatcaatgatgcg

SEQ ID NO: 377974 - DNA, 75 bp, synthetic construct
  source 1..75: mol_type = other DNA
tgctaagtctggtaagttaactttccctcaaaatgctactcctactgactggaaagcaacgctgaaagttactgt

SEQ ID NO: 377975 - DNA, 75 bp, synthetic construct
  source 1..75: mol_type = other DNA
aagaaatcgaaaccggactgcaaattgccagataatgcgatgggctatctggagcggaacgggttgataggcgtg

SEQ ID NO: 377976 - DNA, 75 bp, synthetic construct
  source 1..75: mol_type = other DNA
tatcgttacgacgatttacccttactgccacctcctggcaccgtggcgcgccgtctgatagaagatacggtggcg

SEQ ID NO: 377977 - DNA, 75 bp, synthetic construct
  source 1..75: mol_type = other DNA
actgtggttactgcgggcatgaaatgtatccaagcaaaaccgaatgggcgatgctgtgcagccattgccgtgagc

SEQ ID NO: 377978 - DNA, 75 bp, synthetic construct
  source 1..75: mol_type = other DNA
acgcgcactttaaaaagcagctaagccgtgacgatatcgtctggacctactccggtgtgcgtccgctgtgtgatg

SEQ ID NO: 377979 - DNA, 75 bp, synthetic construct
  source 1..75: mol_type = other DNA
cgccgcgaaaacggcctgtggattgtggaagcggaagatatcgataccggcaaaaaatacacctggcaggcgcgc

SEQ ID NO: 377980 - DNA, 75 bp, synthetic construct
  source 1..75: mol_type = other DNA
tggtgcgtaaaggcggtgaagtgcttacccgtactcgtgccacttctgctcgccgcgaaaacggcctgtggattg

SEQ ID NO: 377981 - DNA, 75 bp, synthetic construct
  source 1..75: mol_type = other DNA
tggtggaaatatatgaccgacgtcatgcccgcgaacccggataacagcccggtgagtagcgaactgcaagaagtg

SEQ ID NO: 377982 - DNA, 75 bp, synthetic construct
  source 1..75: mol_type = other DNA
tggtggaaacatatgaccgaggtgatgcccgctaatccggataacagcccggtcagcagcgagctgcaagaagtc

SEQ ID NO: 377983 - DNA, 75 bp, synthetic construct
  source 1..75: mol_type = other DNA
ctgaaatatctggtcgaccacgaatgggtccgccgcgccgacgatgccctgtggcgtcgcacaaaacaaggcatg

SEQ ID NO: 377984 - DNA, 75 bp, synthetic construct
  source 1..75: mol_type = other DNA
aaattaaagggcgtgatatctgtaattaacaccaccgatatgaacgacgtttccttcatgatttctggagatgca

SEQ ID NO: 377985 - DNA, 75 bp, synthetic construct
  source 1..75: mol_type = other DNA
ccggcgacagtcctttcgcagcgaatgcgttgggtaaactggcggcgcaggaaatgctggcagcttatgcgggtt

SEQ ID NO: 377986 - DNA, 75 bp, synthetic construct
  source 1..75: mol_type = other DNA
gccattctttgaacagcataaatcgttattccgcaatccgaagaaactcgcggatgttgtcgccagcctcaacgc

SEQ ID NO: 377987 - DNA, 75 bp, synthetic construct
  source 1..75: mol_type = other DNA
atatatgtggtgggggatgtttaaaaaaactaaacattatcgtaacgcaatgaataatggaataaaaaatggaat

SEQ ID NO: 377988 - DNA, 75 bp, synthetic construct
  source 1..75: mol_type = other DNA
caaggtcaacgcaaaggtttacatcaataccggtaatctgcctgcaataaaactcggggaggcccgcgtgcggct

SEQ ID NO: 377989 - DNA, 75 bp, synthetic construct
  source 1..75: mol_type = other DNA
gtggcagcgtgctgattgtcgggaaacggcggatcccgaatgcctttattacccggctggaaaatggccggtggc

SEQ ID NO: 377990 - DNA, 75 bp, synthetic construct
  source 1..75: mol_type = other DNA
gggctggggaggctacaaggctccgtattacccgatggatgagatgaaagccttcgcggctatggcgcataactg

SEQ ID NO: 377991 - DNA, 75 bp, synthetic construct
  source 1..75: mol_type = other DNA
tgattgtggtgattgatgaccagttcgagcaggcactgccgcaacaaacggcgactgcactggctgccgcggcac

SEQ ID NO: 377992 - DNA, 75 bp, synthetic construct
  source 1..75: mol_type = other DNA
tccctgacggcagataccctcaccgttgaacgcgaactggaagatgaaacagaaacgttaagcattccgctgcct

SEQ ID NO: 377993 - DNA, 75 bp, synthetic construct
  source 1..75: mol_type = other DNA
ggtcaataatgctgatggttcattagacttcagcaaagccgatgccaaaataagccaatacgatctcaacgctat

SEQ ID NO: 377994 - DNA, 75 bp, synthetic construct
  source 1..75: mol_type = other DNA
agaaagcagggtttgatctgatcctctgcggcgatggttcttccgacctttatgcccagcaggttggtctgctgg

SEQ ID NO: 377995 - DNA, 75 bp, synthetic construct
  source 1..75: mol_type = other DNA
gcgtgcctgatgaacaggatattgcggtcaataatgctgatggttcgttagacttcagcaaagccgatgccaaaa

SEQ ID NO: 377996 - DNA, 75 bp, synthetic construct
  source 1..75: mol_type = other DNA
ccgacctttatgcccagcaggttggtctgctggtgggcgaaatcctcaatattccggcagttaacggcgtcagca

SEQ ID NO: 377997 - DNA, 75 bp, synthetic construct
  source 1..75: mol_type = other DNA
cgcctgcgccgccgttacccattcctgaccgaatcgctggcacgtcactacgcgcgcacttacggcagcaacagc

SEQ ID NO: 377998 - DNA, 75 bp, synthetic construct
  source 1..75: mol_type = other DNA
tgaagatcctcgtctggttgtactggttggggcagagctggcagcacatcaacgcctgaagttatttaatgccgc

SEQ ID NO: 377999 - DNA, 75 bp, synthetic construct
  source 1..75: mol_type = other DNA
gggtggcttattaaaaatatcaccctacgtgatgttaacgccgtgtcaggtaatgccgtcaatattggtgccagt

SEQ ID NO: 378000 - DNA, 75 bp, synthetic construct
  source 1..75: mol_type = other DNA
ggcctggttctgacaccggatgcaccgagccacggatttgaagatgctcctgtagatcgcttttcttataacagc

SEQ ID NO: 378001 - DNA, 75 bp, synthetic construct
  source 1..75: mol_type = other DNA
gaaagcaaaaatatctcggtgaccgaagttcatgctcgccatattctgctgaaaccgtcgccgatcatgaccgac

SEQ ID NO: 378002 - DNA, 75 bp, synthetic construct
  source 1..75: mol_type = other DNA
tctggcttacgatggtctgaactacaacacttatcgtaaccagatccgcaaagagatgattatctctgaagtgcg

SEQ ID NO: 378003 - DNA, 75 bp, synthetic construct
  source 1..75: mol_type = other DNA
atcttcgcccaggcattaagcaccgcgaagaaaggcgacattgttggcccgattcgttccggcgttggcttccat

SEQ ID NO: 378004 - DNA, 75 bp, synthetic construct
  source 1..75: mol_type = other DNA
tgccaacggtcgcaccggtaataccgattcgctggcattacagaacattgggctggaaactgacagtcgcggaca

SEQ ID NO: 378005 - DNA, 75 bp, synthetic construct
  source 1..75: mol_type = other DNA
accgcacagccgcatgtttacgcggtgggcgatgtgattggctatccaagcctggcgtcggcggcctacgaccag

SEQ ID NO: 378006 - DNA, 75 bp, synthetic construct
  source 1..75: mol_type = other DNA
ccatagtaataggttccggccccggcggcgaaggcgctgcaatgggcctggttaagcaaggtgcgcgcgtcgcag

SEQ ID NO: 378007 - DNA, 75 bp, synthetic construct
  source 1..75: mol_type = other DNA
atgactgactccactcaaacaaaagacttatacagcgatttacgcttcatcatcatacaacagcaatcaggcagg

SEQ ID NO: 378008 - DNA, 75 bp, synthetic construct
  source 1..75: mol_type = other DNA
ttgtccattctcatgctgcaggcgttgatattggcgctgaatttcacgttgtggccgtaccgcctgatgctgacg

SEQ ID NO: 378009 - DNA, 75 bp, synthetic construct
  source 1..75: mol_type = other DNA
gcgctggattgcccggacggcagcgtcgaaacactaactgctgaaaaatttgttattgcctgcggctctcgtcca

SEQ ID NO: 378010 - DNA, 75 bp, synthetic construct
  source 1..75: mol_type = other DNA
tgctcattctgccgaccagcaggcgctgaacggcggccagatgggctggggccgtattcaggagttgccggggat

SEQ ID NO: 378011 - DNA, 75 bp, synthetic construct
  source 1..75: mol_type = other DNA
atttgagccaaccgttcgcttacttctgactaaatatagtctcactacagggaatcaatcacgatggatggaaga

SEQ ID NO: 378012 - DNA, 75 bp, synthetic construct
  source 1..75: mol_type = other DNA
tagatcaaatcaatagtatgcgagctgtttttggcaacccaaaccaacggccacaagataaaaacccagttgtgc

SEQ ID NO: 378013 - DNA, 75 bp, synthetic construct
  source 1..75: mol_type = other DNA
tcagcatggaaattagctgccggaacagcatttaaaaccacgcaaatattaaaaatatcctggttttggatcgat

SEQ ID NO: 378014 - DNA, 75 bp, synthetic construct
  source 1..75: mol_type = other DNA
aaaggcgatccgaaagcggtgaagattgaagagagtgaaatcaattacctgctgaaagtgtataacacgcacttt

SEQ ID NO: 378015 - DNA, 75 bp, synthetic construct
  source 1..75: mol_type = other DNA
atgtagaatcaaaaagcgatgcaaaattgatgcaattaaaaacacaagagattctgactataatgaataatattt

SEQ ID NO: 378016 - DNA, 75 bp, synthetic construct
  source 1..75: mol_type = other DNA
accgaaccggtggtgcggttgaatgtggaatcacgcggtgatgtgccgctgatggaagcgcgaacgcgaactctg

SEQ ID NO: 378017 - DNA, 75 bp, synthetic construct
  source 1..75: mol_type = other DNA
atgtgacctcgcgcaaatgctacggtccgagcgcgaccagtgaaaaatgtccgggtaacgctctggaaaaaggcg

SEQ ID NO: 378018 - DNA, 75 bp, synthetic construct
  source 1..75: mol_type = other DNA
cgttggtcatagtcaccgctgatcacgcccatgccagccagatagttgcgccggataccaaagctccgggcctca

SEQ ID NO: 378019 - DNA, 75 bp, synthetic construct
  source 1..75: mol_type = other DNA
gaatgatgccagcactgaactgaacttgagccacatcctgatcccgctgccggaaaatccgtcttctgagcaggt

SEQ ID NO: 378020 - DNA, 75 bp, synthetic construct
  source 1..75: mol_type = other DNA
atagccgtcacgattggcgctattggtattgcttgttttaccactttacgtctgataaagaaaacgccacacaag

SEQ ID NO: 378021 - DNA, 75 bp, synthetic construct
  source 1..75: mol_type = other DNA
cgtcatttgcagattatggaactcgagggggcgcagcttccgcgcgtactggatgatcccaaagttgatgtagcg

SEQ ID NO: 378022 - DNA, 75 bp, synthetic construct
  source 1..75: mol_type = other DNA
cagactgccgccttacgtgattcacttagcgataaaccggtaaaaaatattattttactaattggcgatgggatg

SEQ ID NO: 378023 - DNA, 75 bp, synthetic construct
  source 1..75: mol_type = other DNA
ttttcctgccattagcactggtgtatatggttacccgcgtgctgctgcggctgaaatagctgtaaaaaccgtttc

SEQ ID NO: 378024 - DNA, 75 bp, synthetic construct
  source 1..75: mol_type = other DNA
ctgaaatcgcagtaaaaaccgtttcagaatttattacccgtcacgctttacccgaacaggtatactttgtctgtt

SEQ ID NO: 378025 - DNA, 75 bp, synthetic construct
  source 1..75: mol_type = other DNA
tcgcggcatcgagcgcacttatacccgtgatttgctcgtggaagtttttctcgacggacgcggcaacggcctgaa

SEQ ID NO: 378026 - DNA, 75 bp, synthetic construct
  source 1..75: mol_type = other DNA
aaaccggagaagtgattgatcaaggaacactggatcatctgaccggacaattgaccgcatttggcgagtttattc

SEQ ID NO: 378027 - DNA, 75 bp, synthetic construct
  source 1..75: mol_type = other DNA
gtggtgatcgtcacgccggaatataactactccgtgccgggcggactgaaaaatgccatcgactggctatctcgc

SEQ ID NO: 378028 - DNA, 75 bp, synthetic construct
  source 1..75: mol_type = other DNA
gaacaagccggaatttatgggcggcgtgattcagaacaaagttgatccgcaaaccggagaagtgattgatcaggg

SEQ ID NO: 378029 - DNA, 75 bp, synthetic construct
  source 1..75: mol_type = other DNA
tcattaatgatctgctggcacgcactgacatcgtcgatctgatcgatgctcgtgtgaagctgaaaaagcagggca

SEQ ID NO: 378030 - DNA, 75 bp, synthetic construct
  source 1..75: mol_type = other DNA
tcctttagtgaacttccgcaggctgaggctgtatgggtaattgaatcttatgaactctatgcgcagcagtacagg

SEQ ID NO: 378031 - DNA, 75 bp, synthetic construct
  source 1..75: mol_type = other DNA
cgaaaatgaaatcaatgtaggttccgaagtttccagcaccaccgcatggacgcgcacgttcaccaatacgcagct

SEQ ID NO: 378032 - DNA, 75 bp, synthetic construct
  source 1..75: mol_type = other DNA
aatctcaaatccacgcagatgatgagtgtgattgatgcgattggtgagggaccgatagaaggtccggtgaaggga

SEQ ID NO: 378033 - DNA, 75 bp, synthetic construct
  source 1..75: mol_type = other DNA
gtaatgcgtttctgaatgctttcggtcaaataatccagacttctacgggaagtacttttactggcattgtagaag

SEQ ID NO: 378034 - DNA, 75 bp, synthetic construct
  source 1..75: mol_type = other DNA
cgcggtgggtagtatgaacggcagtgcgggtctggtgtattccccggtctaccatatcgccattcagaatgacgg

SEQ ID NO: 378035 - DNA, 75 bp, synthetic construct
  source 1..75: mol_type = other DNA
gtgattcagaacaaagtcgatccgcaaaccagagaggtgattgatcagggaacgctggatcacctggccgggcag

SEQ ID NO: 378036 - DNA, 75 bp, synthetic construct
  source 1..75: mol_type = other DNA
ggcggagcattctggtctgggcggtattggcgtgatgattattatggcgctggtcattgccatttgtgccattgt

SEQ ID NO: 378037 - DNA, 75 bp, synthetic construct
  source 1..75: mol_type = other DNA
atgcatcagcccttaaaaatatgccgacaggtgatggaaatgcagataaaacgctcgattgagaaaatcccgggg

SEQ ID NO: 378038 - DNA, 75 bp, synthetic construct
  source 1..75: mol_type = other DNA
ggcgatggcactgccggaattgcccgcttccagttccgcaggggccgcggtagcgacacctgtgctgattgcaga

SEQ ID NO: 378039 - DNA, 75 bp, synthetic construct
  source 1..75: mol_type = other DNA
gtattccggtgcatatgattgagactatcaacaagctcaaccgtatttctcgccagatgctgcaagagatgggcc

SEQ ID NO: 378040 - DNA, 75 bp, synthetic construct
  source 1..75: mol_type = other DNA
catgcacaaggtgtatttatccgttttattgattttcgcggtgaactgttattacgcgcatccgctattgatgga

SEQ ID NO: 378041 - DNA, 75 bp, synthetic construct
  source 1..75: mol_type = other DNA
cgcgcttctttaatgtcatgctcacaaaaatcataacctacgcgcactttaccgtgcaagagagagcggacctgg

SEQ ID NO: 378042 - DNA, 75 bp, synthetic construct
  source 1..75: mol_type = other DNA
atgacacagcacgaacggttttgtcaggcctgcggaatgccgatgtccgcacctgatgcgcaggggagtagcgat

SEQ ID NO: 378043 - DNA, 75 bp, synthetic construct
  source 1..75: mol_type = other DNA
tcttgctgagatatttgagactgatgaggacttctggtgcaatctgcaggttctgcaagatcgcccagagcaacg

SEQ ID NO: 378044 - DNA, 75 bp, synthetic construct
  source 1..75: mol_type = other DNA
aagtaatcccagacggaacagagcgaagtttacgcaggcctccttccaggcccccaggattcagcataaagcgat

SEQ ID NO: 378045 - DNA, 75 bp, synthetic construct
  source 1..75: mol_type = other DNA
acgctggtggtaactaaaattgccgtcgcgtgggtggttgcggcaattgcctcgcgcattattccggaacatggt

SEQ ID NO: 378046 - DNA, 75 bp, synthetic construct
  source 1..75: mol_type = other DNA
cagcggcccgctaattaaagccatttccagcggtgacatgacgttacccgatctggcgtggcttaataccattcc

SEQ ID NO: 378047 - DNA, 75 bp, synthetic construct
  source 1..75: mol_type = other DNA
gcaacggcaatcttaaaccctgggaagaggcggtatcaggcttggccagcttccttgattcctggcaaaaagtcg

SEQ ID NO: 378048 - DNA, 75 bp, synthetic construct
  source 1..75: mol_type = other DNA
gtataagcgcggccaacggccgccaaattaccctcgatcgagaaatagactacgcggcgaaagaccggctggtgg

SEQ ID NO: 378049 - DNA, 75 bp, synthetic construct
  source 1..75: mol_type = other DNA
cgcaatggcgccgcaacgacgggaactgggttaacgtgccgcgcacctccaccacgtcattcgacgtcccgggga

SEQ ID NO: 378050 - DNA, 75 bp, synthetic construct
  source 1..75: mol_type = other DNA
tcaccacggcagccggaaacagcgtggctttgccgttcgtgatccagaacgggcagacattcatccgggccagtt

SEQ ID NO: 378051 - DNA, 75 bp, synthetic construct
  source 1..75: mol_type = other DNA
cgccaaactgcgttatccaaataccgcgctgctgtacatcgaattcgactcaagccagtttaacggctctatccc

SEQ ID NO: 378052 - DNA, 75 bp, synthetic construct
  source 1..75: mol_type = other DNA
aaagatatctacctggacggaacggcgctggagaatgccgacggttcccaaaacttcagcggcgtgacgtgggag

SEQ ID NO: 378053 - DNA, 75 bp, synthetic construct
  source 1..75: mol_type = other DNA
ccgggcgctatctggtacgtgtacgcgccatcaatgccgcagaaatttcatccgggtggggatattcggaagaga

SEQ ID NO: 378054 - DNA, 75 bp, synthetic construct
  source 1..75: mol_type = other DNA
tggttcatctgtgcaagacgtggagagacttattatgcattctgctgttgtaacaggtccaaacgtaacagtacg

SEQ ID NO: 378055 - DNA, 75 bp, synthetic construct
  source 1..75: mol_type = other DNA
ggttagaaaccgcgccagagaactggcaacacgcgcaaaatcggctggcagactggctacaaacgctgccgccgc

SEQ ID NO: 378056 - DNA, 75 bp, synthetic construct
  source 1..75: mol_type = other DNA
aatttgcatatacactgatgtttgccaccattgcagctgtactttttgctggagcactgtgcagtggtctacttt

SEQ ID NO: 378057 - DNA, 75 bp, synthetic construct
  source 1..75: mol_type = other DNA
aaagacagactttgaaagtactgaaccttttaatgaactatacttttttgataaccagttgaagtttgtacagga

SEQ ID NO: 378058 - DNA, 75 bp, synthetic construct
  source 1..75: mol_type = other DNA
cgtcaccgcatcacattactgttcaatgccaataaagcctatgaccggcaggtagtagaaggcgtaggggaatat

SEQ ID NO: 378059 - DNA, 75 bp, synthetic construct
  source 1..75: mol_type = other DNA
tatccatcgctgcaatatttctactctgtttttaaaaaagcatatgacacgacgccaaaagagtatcgcgatgta

SEQ ID NO: 378060 - DNA, 75 bp, synthetic construct
  source 1..75: mol_type = other DNA
gtttcgccagcttgttgctgaggaaaagtaccgcggagtcgtttatcaggggctggaaaccgcaccagagaactg

SEQ ID NO: 378061 - DNA, 75 bp, synthetic construct
  source 1..75: mol_type = other DNA
gttatacctgcaacgtgtacatccaggaccgaaacgacgcttatacagtcctgcgtgattttgcggccatattcc

SEQ ID NO: 378062 - DNA, 75 bp, synthetic construct
  source 1..75: mol_type = other DNA
aactatccagggtcgttactaggggtggagatcaccgtgaatggtgttacaaaaagcgcatccgcaggtacatcc

SEQ ID NO: 378063 - DNA, 75 bp, synthetic construct
  source 1..75: mol_type = other DNA
accagcggccggtgagtgtaatcccgccgggtaaccagtcgccgccttcgaacatcgtgatcagctcgttttccg

SEQ ID NO: 378064 - DNA, 75 bp, synthetic construct
  source 1..75: mol_type = other DNA
acggcttcaatcagctggaaatgacagccatcggctgcaccaggcagtcagaagctaaccgaaagggacgctggg

SEQ ID NO: 378065 - DNA, 75 bp, synthetic construct
  source 1..75: mol_type = other DNA
gccgtgactactatggtcggcgggactgtaacactgccgttcgttatccagaatggccaggccattatcagggat

SEQ ID NO: 378066 - DNA, 75 bp, synthetic construct
  source 1..75: mol_type = other DNA
gccgtttgtgatccagaacgggcagacattcatccgggccagtttcatccaggacggcactatcagcaacgcaaa

SEQ ID NO: 378067 - DNA, 75 bp, synthetic construct
  source 1..75: mol_type = other DNA
caaaaggctttccgcgacggtcgccggtaacagtgcgcagctggatcgtattgatgaggtaatcgttaacgagaa

SEQ ID NO: 378068 - DNA, 75 bp, synthetic construct
  source 1..75: mol_type = other DNA
taccagcaggccacggccacgcagataaacgggatcacagcgaccgtcaacggacacacatcagccattaccact

SEQ ID NO: 378069 - DNA, 75 bp, synthetic construct
  source 1..75: mol_type = other DNA
ccgccctgggccagcgaatcgacaacatcagcgtttctatggacggcatgacgggcggggtgaagaactctgcaa

SEQ ID NO: 378070 - DNA, 75 bp, synthetic construct
  source 1..75: mol_type = other DNA
cgcatcagcgccgttaacggtcgcgttatcaaacttgaccgcgtagctgatgcagcaccaggtgatcgccttatt

SEQ ID NO: 378071 - DNA, 75 bp, synthetic construct
  source 1..75: mol_type = other DNA
taacggcgtggccgggggcgggaggatgctgataaccagcactctcattcgtatctatgacagcaataacgtact

SEQ ID NO: 378072 - DNA, 75 bp, synthetic construct
  source 1..75: mol_type = other DNA
ggtcaattatgcgattgacctgcagacggacggcggcacatggcagacggtactcaataccagcgtgaccggcaa

SEQ ID NO: 378073 - DNA, 75 bp, synthetic construct
  source 1..75: mol_type = other DNA
aggttgtcacggacctcgattcctcaatggcatcacgcctggaagagctgggtgcacaaactgataaggccagcg

SEQ ID NO: 378074 - DNA, 75 bp, synthetic construct
  source 1..75: mol_type = other DNA
gatccttgcgggaattattaccgcagcgattgtcggctgtggcgtaaccggaagtaaggtgaaaacgggcgtcag

SEQ ID NO: 378075 - DNA, 75 bp, synthetic construct
  source 1..75: mol_type = other DNA
cgctatggaagcactttgatattgtcttcaaaaactttaactccgcgacctcctacagcggcccggcggcggtgc

SEQ ID NO: 378076 - DNA, 75 bp, synthetic construct
  source 1..75: mol_type = other DNA
agcttttatattattcgaggtaacttcgaggaagttgatctcaaaccaattggcttgattgttggtttactgtta

SEQ ID NO: 378077 - DNA, 75 bp, synthetic construct
  source 1..75: mol_type = other DNA
gctggctgaacgtgaagtgttgctgaaaatggctccgcatatcgccttcccgatgcgttttcgcctgccacatcg

SEQ ID NO: 378078 - DNA, 75 bp, synthetic construct
  source 1..75: mol_type = other DNA
tgactgttgggtagacgacgcccgtctggtactcgccaacgcccagatggtggtgcgtaaaggcggtgaagtgct

SEQ ID NO: 378079 - DNA, 75 bp, synthetic construct
  source 1..75: mol_type = other DNA
atgacgctcgcgcagtttgccatgattttctggcacgacctggcggcaccgatcctggcgggaattattaccgca

SEQ ID NO: 378080 - DNA, 75 bp, synthetic construct
  source 1..75: mol_type = other DNA
gaatgcgttgtacgttgctgctaactacccgatcaacgaagtaacgctgttttttaataaccgcctgtatcgcgg

SEQ ID NO: 378081 - DNA, 75 bp, synthetic construct
  source 1..75: mol_type = other DNA
ctattcatgaatatacgccgctaatggattcttccgatatgacgccggaagactggcagcatatcgctgaagaca

SEQ ID NO: 378082 - DNA, 75 bp, synthetic construct
  source 1..75: mol_type = other DNA
gaatgcgttatatgttgccgctaactatccgattaatgaagtaacgcttttttttaataatcgtctgtatcgcgg

SEQ ID NO: 378083 - DNA, 75 bp, synthetic construct
  source 1..75: mol_type = other DNA
gtggtgcatggctggcagtattcatagtgactctgctatggttaatcttaaatcgtcagtggaaattattgatgc

SEQ ID NO: 378084 - DNA, 75 bp, synthetic construct
  source 1..75: mol_type = other DNA
atgaaagagaccgatattgcagccattttaacgtccactcatactattgcgctggtaggggcaagtgataaaccc

SEQ ID NO: 378085 - DNA, 75 bp, synthetic construct
  source 1..75: mol_type = other DNA
gctggtgggggcaagcgacaaacccgatcgtcccagctatcgcgtgatgaaatatctactcgaccaggggtatca

SEQ ID NO: 378086 - DNA, 75 bp, synthetic construct
  source 1..75: mol_type = other DNA
atgaaaaacacacacactctgacccgtgtcacaaagacagcctttgatgaactgaacaaaattaagaaggttaca

SEQ ID NO: 378087 - DNA, 75 bp, synthetic construct
  source 1..75: mol_type = other DNA
gtctggcgcgtattgctgtttggtgcgtcttatcaactggctgttgaactgcgtgaagattattaccgtcagcta

SEQ ID NO: 378088 - DNA, 75 bp, synthetic construct
  source 1..75: mol_type = other DNA
ctacgcgacaatcgcaacaacgatcgccacatcatgcgtgagatccgcgaagcggtcgccagcctgattgtcccc

SEQ ID NO: 378089 - DNA, 75 bp, synthetic construct
  source 1..75: mol_type = other DNA
tatttatctgctatcaggcagtgcaccgcatcactcgcccgctggcggaactgcaaaaagaactggaagcgcgca

SEQ ID NO: 378090 - DNA, 75 bp, synthetic construct
  source 1..75: mol_type = other DNA
gcctggcgggcaagctctccggtgggatgaaacaaaaactcggtctggcctgtaccctggtgggcgaaccgaaag

SEQ ID NO: 378091 - DNA, 75 bp, synthetic construct
  source 1..75: mol_type = other DNA
tcaacaaactaatagttcttatcgctatgcaaatggtactcaaggcagcgcactcgatctaatattagaaaatcc

SEQ ID NO: 378092 - DNA, 75 bp, synthetic construct
  source 1..75: mol_type = other DNA
agacgagaaaagagaagatgtcgaaaaaatcgttttcttctcatttataagtgcgttgggcttacgttgtttttc

SEQ ID NO: 378093 - DNA, 75 bp, synthetic construct
  source 1..75: mol_type = other DNA
agtcagaagtggaacttctgcttgcagaagcgggaagaagcagcacaccggaacgtgacagttgtctgctttatc

SEQ ID NO: 378094 - DNA, 75 bp, synthetic construct
  source 1..75: mol_type = other DNA
tctgaaatctttaaatgcttttggactggatttagcaaggttgctaagcatcaaaattcacaaactgtctcagga

SEQ ID NO: 378095 - DNA, 75 bp, synthetic construct
  source 1..75: mol_type = other DNA
gagttacaaagacagcctttgaagaacttaacaaaattaagaaggttacaggtctttcacatgcagcagtgatga

SEQ ID NO: 378096 - DNA, 75 bp, synthetic construct
  source 1..75: mol_type = other DNA
gaccaatatcgctgcgccaacggctgatattgaccatcggggccattttgttggtgtttgagctgatcagcgtct

SEQ ID NO: 378097 - DNA, 75 bp, synthetic construct
  source 1..75: mol_type = other DNA
cacggtatttgttgcgctgtcggcaatctccgggtttgcggtggtagcggtgtggctgagtatctgcgcctcgca

SEQ ID NO: 378098 - DNA, 75 bp, synthetic construct
  source 1..75: mol_type = other DNA
atctatattagagtcaaaaagaaagaacaaatatgatttcaataccaaactctcatatttagcactttggccttt

SEQ ID NO: 378099 - DNA, 75 bp, synthetic construct
  source 1..75: mol_type = other DNA
ctggccccacaaattgctcgcctcgatcatgataaacagcacatcgccgaagtgatggatttcctcagcgtgacc

SEQ ID NO: 378100 - DNA, 75 bp, synthetic construct
  source 1..75: mol_type = other DNA
acaaaatgctggcggcgttatcgcaggcgtcgctgatccacattaaaggtgagtatgacgaagaggcgtttaacg

SEQ ID NO: 378101 - DNA, 75 bp, synthetic construct
  source 1..75: mol_type = other DNA
tcctgcactggatggtggcgctggatggtaagccgctggcaagcggtgaagtgcctctggatgtcgctccacaag

SEQ ID NO: 378102 - DNA, 75 bp, synthetic construct
  source 1..75: mol_type = other DNA
ctctctctcccctgatgggccagaaaacacatcgtcttctcaaaaatcccgcaagactggcacacagcccggcta

SEQ ID NO: 378103 - DNA, 75 bp, synthetic construct
  source 1..75: mol_type = other DNA
ccgcagaaagcgtgggcgggcgaccggttacgggccgatcgttatgaactgcgtaatgccaggacctggggactg

SEQ ID NO: 378104 - DNA, 75 bp, synthetic construct
  source 1..75: mol_type = other DNA
ggctgggcattgccatgacagctgccgtgccgtcagtggcgatggctcagtcgccggccaccatcagcttcccgc

SEQ ID NO: 378105 - DNA, 75 bp, synthetic construct
  source 1..75: mol_type = other DNA
aagtattgatgcaacagaactagcgaaacttgcaataaaattagctgacaaaggctccattgaatacaagggtga

SEQ ID NO: 378106 - DNA, 75 bp, synthetic construct
  source 1..75: mol_type = other DNA
aaaaaaatgcagctacttacgtttatctgaacggcacgcgcctgaccgtagaacttccgtaccagactgtacgcg

SEQ ID NO: 378107 - DNA, 75 bp, synthetic construct
  source 1..75: mol_type = other DNA
tgaaaaggcacgccaggttaatggcgatgaaccctatatcgaaattatttgtatggattcagaaactgaaattca

SEQ ID NO: 378108 - DNA, 75 bp, synthetic construct
  source 1..75: mol_type = other DNA
gacatttactgtgacagatgctgacaaaaaagcttctttgattacgagtgagacagtttacaaaaatagcgctgg

SEQ ID NO: 378109 - DNA, 75 bp, synthetic construct
  source 1..75: mol_type = other DNA
ccagcagtgatactcaattcaagattgatgcaactaagcttgcagtggctgctaaagatttagctcaaggtaata

SEQ ID NO: 378110 - DNA, 75 bp, synthetic construct
  source 1..75: mol_type = other DNA
aaacttgcaataaaattagctgacaaaggctccattgaatacaagggtgaaccgccccgggtttcctggagagtg

SEQ ID NO: 378111 - DNA, 75 bp, synthetic construct
  source 1..75: mol_type = other DNA
aacttgaggtgctaaggaaccaaatcaaagaagccagtgagactgtggcgcaagctaacaacgagtataagctgc

SEQ ID NO: 378112 - DNA, 75 bp, synthetic construct
  source 1..75: mol_type = other DNA
tgtccagcatcatcgtttcatctgcgggtaacgccaacgctaaaaccggtaatacgatgccgtgggtgtttgact

SEQ ID NO: 378113 - DNA, 75 bp, synthetic construct
  source 1..75: mol_type = other DNA
ggtctggcaaacctcgtcggtgtgacgctgaacaacgcgccgaagacctgggcgaactcaaccaacgacgagatc

SEQ ID NO: 378114 - DNA, 75 bp, synthetic construct
  source 1..75: mol_type = other DNA
ttgcagagcgttcctatccagtatcgcggtctgtatcagattgcgacctactacggcaagctgggtgcggttgag

SEQ ID NO: 378115 - DNA, 75 bp, synthetic construct
  source 1..75: mol_type = other DNA
ccaatcttccaccgttactggaagcaggtatccatattcgtcgtttgaatacaccacccgccccgcacggtgatg

SEQ ID NO: 378116 - DNA, 75 bp, synthetic construct
  source 1..75: mol_type = other DNA
gttaaccaatccggatgcgacgccggaacagacgcgcgtcgcggtgaaagcgatcgaaacgctcaacggtaactg

SEQ ID NO: 378117 - DNA, 75 bp, synthetic construct
  source 1..75: mol_type = other DNA
cgtggtgtggggaataaggatcgcatgattgcgtataccaacgataaaaaatacgtccgttacccgctggttccg

SEQ ID NO: 378118 - DNA, 75 bp, synthetic construct
  source 1..75: mol_type = other DNA
gtcgcaatgatccacttgcctacatgtcatcaaaatacattaatccaaaattctcatctgccttcgagcattggg

SEQ ID NO: 378119 - DNA, 75 bp, synthetic construct
  source 1..75: mol_type = other DNA
cgtatgctataaatgagttagataatctgaaagtgaaaatatcagaagctataaatgaatccattaaagattcta

SEQ ID NO: 378120 - DNA, 75 bp, synthetic construct
  source 1..75: mol_type = other DNA
gtcgatggtgttgtacaacaactggccacctttacacaaggtggtgttgttacaacggcacagacactgatggtt

SEQ ID NO: 378121 - DNA, 75 bp, synthetic construct
  source 1..75: mol_type = other DNA
cggtaacccgctgaacctgtgggggatggaacttggctggaccgttgtagagctggcagcagctcagcaggtagg

SEQ ID NO: 378122 - DNA, 75 bp, synthetic construct
  source 1..75: mol_type = other DNA
tggacaacgacgagcaggtttacattggcgatgatgcgctcggcctgaaagggctggcaaaccttgtcggtgtga

SEQ ID NO: 378123 - DNA, 75 bp, synthetic construct
  source 1..75: mol_type = other DNA
atggaactgggctggaccgttgtagagctggcagcagctcagcaggtaggtcgcccgattgatacccagaagtac

SEQ ID NO: 378124 - DNA, 75 bp, synthetic construct
  source 1..75: mol_type = other DNA
gccacgctgctccgctggggtaaaggggtgctgtaccgggaaattcttaccgatgcctgcgataaaatgaaggtg

SEQ ID NO: 378125 - DNA, 75 bp, synthetic construct
  source 1..75: mol_type = other DNA
accggaataccgggcaccttttcttcgtatggccactgtcagtgttttgtttgttctgctgtgtgaatactccat

SEQ ID NO: 378126 - DNA, 75 bp, synthetic construct
  source 1..75: mol_type = other DNA
cgctgatggcgattatcaccctgtttttaaagagtatgttgcagtggcgcctggagaatcaggaaaaacgcgcgc

SEQ ID NO: 378127 - DNA, 75 bp, synthetic construct
  source 1..75: mol_type = other DNA
attgacctgagctcggttaatggcatggcgaacccgttcgcgcagaagcgccacggcggaaaaataccagtattc

SEQ ID NO: 378128 - DNA, 75 bp, synthetic construct
  source 1..75: mol_type = other DNA
gctttcccagacaacccgatgtcgtatcgatctctcatcggttaacggcatgaacaaccccttcgcacagaagcg

SEQ ID NO: 378129 - DNA, 75 bp, synthetic construct
  source 1..75: mol_type = other DNA
ttcgtggaaacgctacctgtagagtttcgcggttcgtggagcgagaagaagcacgcgccatatatgcgtgttgag

SEQ ID NO: 378130 - DNA, 75 bp, synthetic construct
  source 1..75: mol_type = other DNA
cgtttgtggtgcgcgaactggttccggtgatgttgagccagggcagccaggaggacgaagcggctattttactcg

SEQ ID NO: 378131 - DNA, 75 bp, synthetic construct
  source 1..75: mol_type = other DNA
tgggcgctactttacggcgtggtgctgaccaacgcccgcgcaattggtgagtttggcgcggtgtcggtggtttcc

SEQ ID NO: 378132 - DNA, 75 bp, synthetic construct
  source 1..75: mol_type = other DNA
gcgtttttaaaaactcgcagtttcctgacaatcctgcaagtattgaagcattccagcgttcctggaatccctatt

SEQ ID NO: 378133 - DNA, 75 bp, synthetic construct
  source 1..75: mol_type = other DNA
gcgctttaacttccccggacgccagttactgctgacgctactggacattccttttgccgtgtcaccggtggttgc

SEQ ID NO: 378134 - DNA, 75 bp, synthetic construct
  source 1..75: mol_type = other DNA
tttgaagagtatgttgcaatggcgcctggagaatcaggaaaaacgcgcgcagcaggaggaacatcatgagcattg

SEQ ID NO: 378135 - DNA, 75 bp, synthetic construct
  source 1..75: mol_type = other DNA
acccggacatgctgcacgccatctggctgacggtgatgattgcgctgattgctgtgccggtgaacctggttttcg

SEQ ID NO: 378136 - DNA, 75 bp, synthetic construct
  source 1..75: mol_type = other DNA
ccgaaacaggaagagtggattcactggatcatggagcggcgcgaacggctggagaacggcatcaccgaaaagagc

SEQ ID NO: 378137 - DNA, 75 bp, synthetic construct
  source 1..75: mol_type = other DNA
gtttatcatggccgatcagggaccggtgcgccgccgcattgaactgtggttccgacgcaacaaaatcagcaaccc

SEQ ID NO: 378138 - DNA, 75 bp, synthetic construct
  source 1..75: mol_type = other DNA
cagcaactgcgccacaccatcgaccagcaagggccatcgctctccggcgagcttcatatcttctgctcggtgacc

SEQ ID NO: 378139 - DNA, 75 bp, synthetic construct
  source 1..75: mol_type = other DNA
gtgaacgcgttcccacgccaggcgagctacccgcaaacattgatgaacgggtcatgatttgtccgttaacaaact

SEQ ID NO: 378140 - DNA, 75 bp, synthetic construct
  source 1..75: mol_type = other DNA
ttgcggaaattgatatattcacaacgtcacattgcaatttctgcaacgtcaacattaagggctgcgccattggat

SEQ ID NO: 378141 - DNA, 75 bp, synthetic construct
  source 1..75: mol_type = other DNA
cccgaaccggtgcgtaaccgcgtgatgattttagagcgcagcgatgaaaaaacgccgtttgaactgggcgtgtgt

SEQ ID NO: 378142 - DNA, 75 bp, synthetic construct
  source 1..75: mol_type = other DNA
catgaagcgatggtatcgatggtggcgctcggctgtggcgtggcgctgttgccggaagtggtgctggaaaacagc

SEQ ID NO: 378143 - DNA, 75 bp, synthetic construct
  source 1..75: mol_type = other DNA
gtgcacgtggcgatgctcgcgtgataaacgagctcaggcaggctgaaggccggggaacaatcacagctacgcctt

SEQ ID NO: 378144 - DNA, 75 bp, synthetic construct
  source 1..75: mol_type = other DNA
cctcttcaacaaagaaatggtcatcggcttcggctcccgtaaagaggaatacgtcgacagcaccggagacccgaa

SEQ ID NO: 378145 - DNA, 75 bp, synthetic construct
  source 1..75: mol_type = other DNA
tggcgaacccgttcgcgcagaagcgtcacggcgggaagataccggtattcacattccactggcgaaatgacccgc

SEQ ID NO: 378146 - DNA, 75 bp, synthetic construct
  source 1..75: mol_type = other DNA
gacgaagggcgggataaaaacgcctgttcgctccgttatggcatcctgctgaatgacgtacaggagtggtcaggt

SEQ ID NO: 378147 - DNA, 75 bp, synthetic construct
  source 1..75: mol_type = other DNA
agcgtcctctgttgattgatgcggcgctgtcgcaaaccacccgttgccgtattgacctgagctcggttaatggca

SEQ ID NO: 378148 - DNA, 75 bp, synthetic construct
  source 1..75: mol_type = other DNA
cctcttcaacaaagagatggtgatcggtttcggctcccgtaaagaggaatacgtcgacagcaccggtgacccgaa

SEQ ID NO: 378149 - DNA, 75 bp, synthetic construct
  source 1..75: mol_type = other DNA
atcccaactctcctcatttgtttgcagatttagccgagttactcacggtaattaattataccggacgtaactcac

SEQ ID NO: 378150 - DNA, 75 bp, synthetic construct
  source 1..75: mol_type = other DNA
ccgagtgtacccatgaaagtgatctgcgccgggcaaagcgacgctggcatggcgttctccgcccagtatgccgat

SEQ ID NO: 378151 - DNA, 75 bp, synthetic construct
  source 1..75: mol_type = other DNA
gatgattttctgtcgggaatcgaaaccttcggcgagcgcattcaaccactgatgcagtgccgcgcccatctacct

SEQ ID NO: 378152 - DNA, 75 bp, synthetic construct
  source 1..75: mol_type = other DNA
ctgcgcgacctgtggggcacggggaaaagcgattttaaaggcgattttttcaccatgaatgattgtcgcgtcagt

SEQ ID NO: 378153 - DNA, 75 bp, synthetic construct
  source 1..75: mol_type = other DNA
acgacgccacagacgctggatgttgtcatgatggcgcagcaggatcaggcaagagagcatcgaaaccgggaaggt

SEQ ID NO: 378154 - DNA, 75 bp, synthetic construct
  source 1..75: mol_type = other DNA
atgctgaatagctggcctttagccaaagacttgcaggtactggtagaaatcgtccacagcgggagttttagcgcc

SEQ ID NO: 378155 - DNA, 75 bp, synthetic construct
  source 1..75: mol_type = other DNA
tctggcatggaaattgatattcaggctactcatacaccatcaaatgaaaagctgtatgtagaatgtaaattcatg

SEQ ID NO: 378156 - DNA, 75 bp, synthetic construct
  source 1..75: mol_type = other DNA
atgagaatcgaagaattgcgtgaaatttttagtgaaaatggcctctatgctgtgcgcgttgagaatggagacgtt

SEQ ID NO: 378157 - DNA, 75 bp, synthetic construct
  source 1..75: mol_type = other DNA
aagagatcttaaattaccgggagggaagtctattaatataggttcctcatttagactttactatgtatttaggaa

SEQ ID NO: 378158 - DNA, 75 bp, synthetic construct
  source 1..75: mol_type = other DNA
ctttagcgagtatggggatctacgtctttgatgcagagtacctgtatgaattgctggaagaagacgatcgtgatg

SEQ ID NO: 378159 - DNA, 75 bp, synthetic construct
  source 1..75: mol_type = other DNA
atgaaaaaaattatcactttgatgttgtttttgacattctttgcccacgcgaacgactccgagcctggcagccag

SEQ ID NO: 378160 - DNA, 75 bp, synthetic construct
  source 1..75: mol_type = other DNA
cactggttgaacctgagctgtatggaagggtttgataccggttgtgaagagtttgaaaaattaactaacggttaa

SEQ ID NO: 378161 - DNA, 75 bp, synthetic construct
  source 1..75: mol_type = other DNA
aaacaaaaggcgctgcactggttgaacctgagctgtatggaagggtttgataccggttgtgaagagtttgaaaaa

SEQ ID NO: 378162 - DNA, 75 bp, synthetic construct
  source 1..75: mol_type = other DNA
gacgaaattcctgattattatattgcgcatcttttgacaaaaaataaaagaatattatgtgcagcacctgagtat

SEQ ID NO: 378163 - DNA, 75 bp, synthetic construct
  source 1..75: mol_type = other DNA
cgggcgttaaagagattctggtgatctcccaggatacttccgcgtatggcgttgatgttaaacaccgtacaggct

SEQ ID NO: 378164 - DNA, 75 bp, synthetic construct
  source 1..75: mol_type = other DNA
ttgccaaaaaaattcaagacattcgacgtatggagtgatttggacaaattgctaaaggttgtgaaagaacccaaa

SEQ ID NO: 378165 - DNA, 75 bp, synthetic construct
  source 1..75: mol_type = other DNA
tatcagccagcggacaggcaccgcattttcggataatgcggccctgtttgcccgttcggcctgcctcgatgcgtg

SEQ ID NO: 378166 - DNA, 75 bp, synthetic construct
  source 1..75: mol_type = other DNA
cacgcctgttttctatcgggaagcaaatggcgaatgggtaagcacacacgcaaccgctggggtattattattaga

SEQ ID NO: 378167 - DNA, 75 bp, synthetic construct
  source 1..75: mol_type = other DNA
cggtgcaagaatcactggaagccattggcgaagcgttgaatgaaaacggcaaggtaattgtgaccggttgtctgg

SEQ ID NO: 378168 - DNA, 75 bp, synthetic construct
  source 1..75: mol_type = other DNA
ttcagagcgtattctcaccgaactccgcactgaaggttatgacgtggtaccgagctatgacgatgcggacatggt

SEQ ID NO: 378169 - DNA, 75 bp, synthetic construct
  source 1..75: mol_type = other DNA
gttcttccggcaaggggcagacatttattcgctctgccgaacagcttgctcaggcgtgggagtacgcccagcaag

SEQ ID NO: 378170 - DNA, 75 bp, synthetic construct
  source 1..75: mol_type = other DNA
attttcagtgaagtctcccctcgcccgcatgacaccgggatggtgacgctaatttctcaggatctctcggagttt

SEQ ID NO: 378171 - DNA, 75 bp, synthetic construct
  source 1..75: mol_type = other DNA
ctgaaggtgacggaggccatttccacggggctgaaaatctccggtgccagtacggctgaggcgggctcggtgatc

SEQ ID NO: 378172 - DNA, 75 bp, synthetic construct
  source 1..75: mol_type = other DNA
cgaagcagttgccgctattggctatccctgcatagttaaaccggtaatgagctcttccggcaaagggcagacgtt

SEQ ID NO: 378173 - DNA, 75 bp, synthetic construct
  source 1..75: mol_type = other DNA
ggcaaccgcagcaaatgagtccactggctctggaacgtgcgcaggagattgcccgcaaagtggtgctggcgctgg

SEQ ID NO: 378174 - DNA, 75 bp, synthetic construct
  source 1..75: mol_type = other DNA
atgtcacgtttgataatgtgcagaatgccgtaggcgcaggtctacagattcgattatttggtaagccggaaattg

SEQ ID NO: 378175 - DNA, 75 bp, synthetic construct
  source 1..75: mol_type = other DNA
gtgttactggcgtggttcttcctgaactccgacgttggtctgggcttcgtgaaaggcttctccgaaatgttcgaa

SEQ ID NO: 378176 - DNA, 75 bp, synthetic construct
  source 1..75: mol_type = other DNA
ggtttccaacgagttcgtagcaatgatggatctgcagaaaattgcttccacgctttctccgcgtgcagaaggcat

SEQ ID NO: 378177 - DNA, 75 bp, synthetic construct
  source 1..75: mol_type = other DNA
gcttcttcgaaatgctgggtgaatacattctggcaggtttcaaagttgccattatcgttgccgcgatgctgatcg

SEQ ID NO: 378178 - DNA, 75 bp, synthetic construct
  source 1..75: mol_type = other DNA
caagaaaatgacggttgatgagaaaattggtcagcttcgtttaatcagcgttggcccggataacccgaaagaggc

SEQ ID NO: 378179 - DNA, 75 bp, synthetic construct
  source 1..75: mol_type = other DNA
ccggataacccgaaagaggcgatccgcgagatgatcaaagacggtcaggttggggcgattttcaacaccgtaacc

SEQ ID NO: 378180 - DNA, 75 bp, synthetic construct
  source 1..75: mol_type = other DNA
gcgagatgatcaaagacggtcaggttggggcgattttcaacaccgtaacccgtcaggatatccgcgccatgcagg

SEQ ID NO: 378181 - DNA, 75 bp, synthetic construct
  source 1..75: mol_type = other DNA
gagcgtcgcttccgtctggcggcattgcgttctgaacgtgctgaactgtaccacctgcgcgccacgcgggagatc

SEQ ID NO: 378182 - DNA, 75 bp, synthetic construct
  source 1..75: mol_type = other DNA
ccagctgcttacggaggtcagttctcgcgtcattggtaacctgcgtcgtcgcgccgatggacgtaacgacgttga

SEQ ID NO: 378183 - DNA, 75 bp, synthetic construct
  source 1..75: mol_type = other DNA
ggcgcgttatgagctggtgttcctggcggctggcgtgattctcttctcgctgtttgttggtgtagtgatgttgcc

SEQ ID NO: 378184 - DNA, 75 bp, synthetic construct
  source 1..75: mol_type = other DNA
atctctgcactgatcggtattctccagcacattcgcgtgttgccggtgatcatccgcgcaattggtttcctgctc

SEQ ID NO: 378185 - DNA, 75 bp, synthetic construct
  source 1..75: mol_type = other DNA
gaaagtgctgtgcccaatcgtctttatctctgcactgatcggtattctccagcacattcgcgtgttgccggtgat

SEQ ID NO: 378186 - DNA, 75 bp, synthetic construct
  source 1..75: mol_type = other DNA
cggataccgaagagaatatcgataaccagctgctcacagaggttagttctcgcgtcattggtaacctgcgtcgtc

SEQ ID NO: 378187 - DNA, 75 bp, synthetic construct
  source 1..75: mol_type = other DNA
gcctggtgttgctgaaaaaccgtctcgaaacgttaccgctgaaaaaaatcggcaaccattgcggtggttggcccg

SEQ ID NO: 378188 - DNA, 75 bp, synthetic construct
  source 1..75: mol_type = other DNA
aacagtatgcgccgatgtccgtagcgcaacagtctttggttcttttcgcagcagaacgtggttacctggcggatg

SEQ ID NO: 378189 - DNA, 75 bp, synthetic construct
  source 1..75: mol_type = other DNA
atggggccgtacgctgaccttgccgaaggcatgaaagttaagtgtactggccgtatcctggaagttccggttggc

SEQ ID NO: 378190 - DNA, 75 bp, synthetic construct
  source 1..75: mol_type = other DNA
tccctgggctgactgagtcaatttattgtcagcaggatggtgtctggcgctgcattgcacattaccgggtttctc

SEQ ID NO: 378191 - DNA, 75 bp, synthetic construct
  source 1..75: mol_type = other DNA
gatagcagtggcaaattcgaagtccagaaacagtatctggaaatcgctaaacacaaaaactttaaggtattaaac

SEQ ID NO: 378192 - DNA, 75 bp, synthetic construct
  source 1..75: mol_type = other DNA
atgtctattattctcggtattgatccgggttcgcgcgttaccggctacggcgttatccgtcaggtgggcaggcaa

SEQ ID NO: 378193 - DNA, 75 bp, synthetic construct
  source 1..75: mol_type = other DNA
atggctattattctcggcattgatccgggttcgcgcgtgaccggctacggcgtcatccgccaggtaggtaggcaa

SEQ ID NO: 378194 - DNA, 75 bp, synthetic construct
  source 1..75: mol_type = other DNA
tttggcgattacaacccgtccggcaagctgccgatgtccttcccgcgttctgtcgggcagatccctgtgtactac

SEQ ID NO: 378195 - DNA, 75 bp, synthetic construct
  source 1..75: mol_type = other DNA
tccattaacgccagtagcgcgggatgcgttcgtcaccgagctgctcaagaaaatgacggttgatgagaaaattgg

SEQ ID NO: 378196 - DNA, 75 bp, synthetic construct
  source 1..75: mol_type = other DNA
tcgcgcgatccgcgctggggacgtgcttccgaaggttttggcgaagatacgtatctcacctcaataatgggtaaa

SEQ ID NO: 378197 - DNA, 75 bp, synthetic construct
  source 1..75: mol_type = other DNA
gatcagtggggttttaaaggcattactgtttctgatcacggtgcaatcaaagagttgatcaaacatggcacggcg

SEQ ID NO: 378198 - DNA, 75 bp, synthetic construct
  source 1..75: mol_type = other DNA
gatattgaggcgctgaagttctggaatcaacagatgaaatatgacgccgagcctggcaagttcaatgtctttatc

SEQ ID NO: 378199 - DNA, 75 bp, synthetic construct
  source 1..75: mol_type = other DNA
gtttgagaaaaccgagtgcggtatgtattacctgccgtatgcgacctctcttcgtttgagcgatcttggctatac

SEQ ID NO: 378200 - DNA, 75 bp, synthetic construct
  source 1..75: mol_type = other DNA
tgctggcgctgatccccatcgtcgggattgccgtatttggctggttctggtttcgtggtgaaacctatatggcgg

SEQ ID NO: 378201 - DNA, 75 bp, synthetic construct
  source 1..75: mol_type = other DNA
gagagcttgtcgatgccgcgattaagcttgctggtgatttttattcaatgatggggtacacgcatcgcccaggct

SEQ ID NO: 378202 - DNA, 75 bp, synthetic construct
  source 1..75: mol_type = other DNA
actgcggcagggctggggatcatctatctcttcccttatatcaacaaaaccattccttcaccgcttgtgtgcatc

SEQ ID NO: 378203 - DNA, 75 bp, synthetic construct
  source 1..75: mol_type = other DNA
aaccaaaagtatgtcgatgcttcataatctttgcgaagctggacgcgctaaattaaaccgctctttaccccgtaa

SEQ ID NO: 378204 - DNA, 75 bp, synthetic construct
  source 1..75: mol_type = other DNA
aatctggatattgaacctgttgcctcaactgttgttcatacgggaagtagtccagtgatggctaaagcaggacga

SEQ ID NO: 378205 - DNA, 75 bp, synthetic construct
  source 1..75: mol_type = other DNA
agaaaacgtccggggcgcattgacagggtgatctccgtaggggccttcagaagcaaagccgctgctgattgtgca

SEQ ID NO: 378206 - DNA, 75 bp, synthetic construct
  source 1..75: mol_type = other DNA
ttttggccgtagcgcacgggcgatgcacgttagcccatccacgctctcacggcagattcagcgcctggaagaaga

SEQ ID NO: 378207 - DNA, 75 bp, synthetic construct
  source 1..75: mol_type = other DNA
cccggcgctgtggcgttttcgatgctggagaatctggcagtagtgctgattgcccccgcgctgccctgcccggtg

SEQ ID NO: 378208 - DNA, 75 bp, synthetic construct
  source 1..75: mol_type = other DNA
ccgcagcgcgcgggcaatgcacgttagcccgtccacgctctctcggcagattcagcgcctggaagacgatctcgg

SEQ ID NO: 378209 - DNA, 75 bp, synthetic construct
  source 1..75: mol_type = other DNA
cgcgacccgcaccctcgttgaccgcttcggagtgcatgacaagcctgaagaagtggaaaagctgatgggtggcca

SEQ ID NO: 378210 - DNA, 75 bp, synthetic construct
  source 1..75: mol_type = other DNA
catggcggctctggtggcggtgatgatcatggtctccatcggcaccttctcctggcgctccatcagcaacctgcg

SEQ ID NO: 378211 - DNA, 75 bp, synthetic construct
  source 1..75: mol_type = other DNA
attaatcattctgccttattccgccggccttgccgtggtggggctgcttgagtcaatgatgaccgcgactattgt

SEQ ID NO: 378212 - DNA, 75 bp, synthetic construct
  source 1..75: mol_type = other DNA
ttacggtgaagataattttggaactgtcgtaaaggattgtgattactatcctaaagtggcagagatttttataaa

SEQ ID NO: 378213 - DNA, 75 bp, synthetic construct
  source 1..75: mol_type = other DNA
acaagtgaccagtgctatcaatctaataagaactatgttggtgatgttggttacagcattacacggggcgcggta

SEQ ID NO: 378214 - DNA, 75 bp, synthetic construct
  source 1..75: mol_type = other DNA
ggtggcagccgatccgaatacggtgtccggtatcaagtccgtgggtacgctgattgatgagttgtggctgtttgt

SEQ ID NO: 378215 - DNA, 75 bp, synthetic construct
  source 1..75: mol_type = other DNA
gaatatttaccctggtaataatattatgccagaacggctgaaatggtttttgatttcttttataccttcgatagt

SEQ ID NO: 378216 - DNA, 75 bp, synthetic construct
  source 1..75: mol_type = other DNA
atgctgatggcacactggcaacaacaggtcatcctgaagcattaggttccgcactgacgcataaatggataacta

SEQ ID NO: 378217 - DNA, 75 bp, synthetic construct
  source 1..75: mol_type = other DNA
ggagggtgcagatgtgacaaccacactgtacgtcccctttctcaatagagagtttatcccatcaattagatctga

SEQ ID NO: 378218 - DNA, 75 bp, synthetic construct
  source 1..75: mol_type = other DNA
tcagtaagtatttttacgttccgtgcgcatcgagaaaagaacttgaaagtgcagggctgttaacgactatcgggc

SEQ ID NO: 378219 - DNA, 75 bp, synthetic construct
  source 1..75: mol_type = other DNA
aagaaatccccataacaataaatgagtataactcattcatggatttcaagaaccgtgaatttccgttagaacaaa

SEQ ID NO: 378220 - DNA, 75 bp, synthetic construct
  source 1..75: mol_type = other DNA
atgccaatgcgcttcttgattatcttgatgggttttctgcatttccgcatcggggcaataaacgcgatgatattc

SEQ ID NO: 378221 - DNA, 75 bp, synthetic construct
  source 1..75: mol_type = other DNA
aaatgttccttccggcatcgccgccgttgtggttgcaaccgtgcccctctttaccctggtgcttcagccgcctgt

SEQ ID NO: 378222 - DNA, 75 bp, synthetic construct
  source 1..75: mol_type = other DNA
gagattgccaggttcattcaagataacctttgccattgcagtgaggaatatcaggctctttttgttaatgtgtca

SEQ ID NO: 378223 - DNA, 75 bp, synthetic construct
  source 1..75: mol_type = other DNA
ctgaggccgaacagcagataatcaacctgcacagatatataacagagaaggcagggagcgccattgctgacgatt

SEQ ID NO: 378224 - DNA, 75 bp, synthetic construct
  source 1..75: mol_type = other DNA
atgaagaagtctaccggagggataattacaggtagtaaatttataggactaatcattgttgatctggaagaagaa

SEQ ID NO: 378225 - DNA, 75 bp, synthetic construct
  source 1..75: mol_type = other DNA
tgatcaacgccctgggaaataaccttgatgaaatcgcagccaacctgtctcgcggtgtcgcccccggaatgcgcc

SEQ ID NO: 378226 - DNA, 75 bp, synthetic construct
  source 1..75: mol_type = other DNA
gatggcgagcttccgcttatcccggaaaaattcgctgcgcaccgctcgcgcaacaatcagatcctgctggcggcg

SEQ ID NO: 378227 - DNA, 75 bp, synthetic construct
  source 1..75: mol_type = other DNA
tgatcaacgccctgggaaataaccttgacgaaatcgcaaccaacctgactcgcggtgttgctcccggaatgcgcc

SEQ ID NO: 378228 - DNA, 75 bp, synthetic construct
  source 1..75: mol_type = other DNA
gaaaccatgcgtcgccgcagcgaaaacaacggttttggcctcgcttccagcgatgaagatcaacgcaaggcctgc

SEQ ID NO: 378229 - DNA, 75 bp, synthetic construct
  source 1..75: mol_type = other DNA
gtcgtgaccgtgcgggcatcaccattggcgaaggcgcggggctaatgctgctgacccgtgaaccgcagcccatcg

SEQ ID NO: 378230 - DNA, 75 bp, synthetic construct
  source 1..75: mol_type = other DNA
tgatcaacgccctgggaaataaccttgacgatatcgcagccaacctgactcgcggtgtcgctcccggcatgcgcc

SEQ ID NO: 378231 - DNA, 75 bp, synthetic construct
  source 1..75: mol_type = other DNA
accatcactgcttttatgcatatggtggagtaccggcgtaatcagaagcaactacgcgaaacgccggcgttgccc

SEQ ID NO: 378232 - DNA, 75 bp, synthetic construct
  source 1..75: mol_type = other DNA
aagttcagggcgtcatgctgtacctgcgtacagccaatgaagtccagcaagcggcaaacgctattttcgatcgcg

SEQ ID NO: 378233 - DNA, 75 bp, synthetic construct
  source 1..75: mol_type = other DNA
ctgctgacgaactggtgcggcgagcactcctcgcaagaggcacgacgtttattcagcgaagccgggctgccgacc

SEQ ID NO: 378234 - DNA, 75 bp, synthetic construct
  source 1..75: mol_type = other DNA
gcgtacagccaatgaagtccagcaagcggcaaacgctattttcgatcgcgtaaaaatggcctggccgcaggcgcg

SEQ ID NO: 378235 - DNA, 75 bp, synthetic construct
  source 1..75: mol_type = other DNA
tccacagccaggattttgatgcgctgatggttattcattcgcccagcgccgctgctcccgcaacagaaagcgcgc

SEQ ID NO: 378236 - DNA, 75 bp, synthetic construct
  source 1..75: mol_type = other DNA
catcctttgctggcttctggcagtgaatttaccgcgctggatgtcacgctggatatcgcgccgtttgaaggcgat

SEQ ID NO: 378237 - DNA, 75 bp, synthetic construct
  source 1..75: mol_type = other DNA
gcaatttgtcgtcaccgcagtaatggaaaccatgcgtcgccgcagcgaaaacaacggttttggtctcgcctccag

SEQ ID NO: 378238 - DNA, 75 bp, synthetic construct
  source 1..75: mol_type = other DNA
ttgttgcccggcaacatgatgtagcagccagttacttctctggcgcaagcaataccaggagggaagtcttactgc

SEQ ID NO: 378239 - DNA, 75 bp, synthetic construct
  source 1..75: mol_type = other DNA
attcatatctacgcggagtattactgtgcaatggcattgggaaaagaaagtgacaaatcgcttgctacggctttt

SEQ ID NO: 378240 - DNA, 75 bp, synthetic construct
  source 1..75: mol_type = other DNA
tacagcgaatattttgacagttttatgcgtcattatctgacggtaaaaacgggggagatccctcggacagatggg

SEQ ID NO: 378241 - DNA, 75 bp, synthetic construct
  source 1..75: mol_type = other DNA
atgtattatggcgcgctatccatccgggcagaggcctggctgattgtttcccccgaagtcaccaagatcatggcc

SEQ ID NO: 378242 - DNA, 75 bp, synthetic construct
  source 1..75: mol_type = other DNA
agccagccagttatttctctggctaagcaataccaggaaggaagtcttaccgctgtcgccgccggagaacaggtt

SEQ ID NO: 378243 - DNA, 75 bp, synthetic construct
  source 1..75: mol_type = other DNA
aataccaggaaggaaatctcactgctgtggctgctggagaacaggttgttctggcctctgagcttgctgccgcca

SEQ ID NO: 378244 - DNA, 75 bp, synthetic construct
  source 1..75: mol_type = other DNA
cgagataatcgacgaggttgatataaacgcagaggatgggccgaagcagttgcgcaaagcagaagcaaaggcaaa

SEQ ID NO: 378245 - DNA, 75 bp, synthetic construct
  source 1..75: mol_type = other DNA
cttcagtacgaccccaaagtttatgacgaatatcgtaaggcaaagcgggcggggcggttgaacaatgaaaatcac

SEQ ID NO: 378246 - DNA, 75 bp, synthetic construct
  source 1..75: mol_type = other DNA
agaaccatcaacattgcaattttctggcatcaagttattagaaatccatgctactgctgatgttcatcaccgtat

SEQ ID NO: 378247 - DNA, 75 bp, synthetic construct
  source 1..75: mol_type = other DNA
cagaacgtcaatatcctgacgtcctggcgcgtgaaaaagaccttctttctgaagttcaggatagggtgatcgatt

SEQ ID NO: 378248 - DNA, 75 bp, synthetic construct
  source 1..75: mol_type = other DNA
attttgacgctgaaaagtgaaacagaggggataaagcacagcgtaaaagtattttctgaggccattctgcttaat

SEQ ID NO: 378249 - DNA, 75 bp, synthetic construct
  source 1..75: mol_type = other DNA
tggatctcgtcaacagcctgcgcagttcatctatgttcacaaaaattaaagatcaggctcctgcaagcgtggacc

SEQ ID NO: 378250 - DNA, 75 bp, synthetic construct
  source 1..75: mol_type = other DNA
attcagtgaagcggggctaccgacctatcgtacgccggaaggtacaatcactgcgtttatgcatatggtggagta

SEQ ID NO: 378251 - DNA, 75 bp, synthetic construct
  source 1..75: mol_type = other DNA
cgccttgatttattaaccggtaaacgggtggtgtctgtccagaaagatggtcgcagaattgaatatacggcagct

SEQ ID NO: 378252 - DNA, 75 bp, synthetic construct
  source 1..75: mol_type = other DNA
gcttaaccgggcgatcaatgatgcggagtcggtacaggggacaacccgccgtcgccgtcgtccgctgggagtgag

SEQ ID NO: 378253 - DNA, 75 bp, synthetic construct
  source 1..75: mol_type = other DNA
gattgaagatatccctaccggcatttacaccatcccggaaatcagctctgtgggcaaaaccgaacagcagctgac

SEQ ID NO: 378254 - DNA, 75 bp, synthetic construct
  source 1..75: mol_type = other DNA
aaagttgcgaaagacaaatatggcctggacgttgagctggtcaccttcaacgactacgtgctaccgaacgaagca

SEQ ID NO: 378255 - DNA, 75 bp, synthetic construct
  source 1..75: mol_type = other DNA
cgtgaagaaattcgtccaggcttatcagtctgacgaagtttacgaagcagcaaacaaagtgtttaacggcggcgc

SEQ ID NO: 378256 - DNA, 75 bp, synthetic construct
  source 1..75: mol_type = other DNA
ggttattaagacgcgctaacacggaacaggtgcaaaatcggcgtattttgattacactcctgttaatccatacag

SEQ ID NO: 378257 - DNA, 75 bp, synthetic construct
  source 1..75: mol_type = other DNA
gagtacctcggcgtaaaactgaaagtgaccgtgcggcagaatatcagccagctgtttgacgacctcgataacggc

SEQ ID NO: 378258 - DNA, 75 bp, synthetic construct
  source 1..75: mol_type = other DNA
gaaaatttccctttctctcgtttctttcgcagtcgtcatctaattatctgacgcactccccttctctactgtttt

SEQ ID NO: 378259 - DNA, 75 bp, synthetic construct
  source 1..75: mol_type = other DNA
gatgatgttaaccaaaaataccgcgcaaagcctcggcattacggatcgtaccgatgccgaacagagcatcagcgg

SEQ ID NO: 378260 - DNA, 75 bp, synthetic construct
  source 1..75: mol_type = other DNA
accgggcgatcaatgatgcggagtcggtactggggacaacccggcgtcgccgtcgtccgctgggagtgaggttat

SEQ ID NO: 378261 - DNA, 75 bp, synthetic construct
  source 1..75: mol_type = other DNA
tgatcgagctggttgaagaatcaggcatctccgaactggaaatctccgaaggcgaagagtcagtacgcatcagcc

SEQ ID NO: 378262 - DNA, 75 bp, synthetic construct
  source 1..75: mol_type = other DNA
gcgacggtttagggctggactctatcgatgcactggaactgggactggcagtaaaaaatgagtacggcatcgtgc

SEQ ID NO: 378263 - DNA, 75 bp, synthetic construct
  source 1..75: mol_type = other DNA
ccgttaccgtctcttatacgcaaacagatcgctacgaccgcattgtcggtcgcgtgttcacgacgaacggcacgg

SEQ ID NO: 378264 - DNA, 75 bp, synthetic construct
  source 1..75: mol_type = other DNA
taccggctttgcaacgggaagcgcaggaacaaaagcgtggtttatgggcggacagtaatccggttccaccgtggg

SEQ ID NO: 378265 - DNA, 75 bp, synthetic construct
  source 1..75: mol_type = other DNA
accttttggacgctggtcaactagtcagcttaaaactctggttgcaggtaaacaggtgacagtctcttattcaca

SEQ ID NO: 378266 - DNA, 75 bp, synthetic construct
  source 1..75: mol_type = other DNA
aatattgatgcaccggaaaagaaacaggcttacggacgctggtcaactgaccaacttaaaagcctgattgccgga

SEQ ID NO: 378267 - DNA, 75 bp, synthetic construct
  source 1..75: mol_type = other DNA
atctccgcgcctgcgccctgcgccataacatgcgcctgctaggaccaaacagtctgggtttactggctccctggc

SEQ ID NO: 378268 - DNA, 75 bp, synthetic construct
  source 1..75: mol_type = other DNA
cctgtataattacccactgaatccgataataaggatggatcctttgggtttgtataatttatatcaattattata

SEQ ID NO: 378269 - DNA, 75 bp, synthetic construct
  source 1..75: mol_type = other DNA
acgcagacagaccgctacggacgcattatcggtcgtgtgttcacgacgaacggcacggatgccagccgctttatg

SEQ ID NO: 378270 - DNA, 75 bp, synthetic construct
  source 1..75: mol_type = other DNA
ttcagctatgagttggagggaagagtttttcggattaaattgatcaagcctgagattaaattatctcgccagcag

SEQ ID NO: 378271 - DNA, 75 bp, synthetic construct
  source 1..75: mol_type = other DNA
atgaaattgacaaaatacgttttcttttttgtcaccattttttctggttcgctgtttgcggctgaaatccagggg

SEQ ID NO: 378272 - DNA, 75 bp, synthetic construct
  source 1..75: mol_type = other DNA
tgggggctttaatatattatattgaagatgccactgtttggttgaatattaggcatatgctcttttttgaaattt

SEQ ID NO: 378273 - DNA, 75 bp, synthetic construct
  source 1..75: mol_type = other DNA
acaaaaatatcgccgatgcggttaacagtgtgctgaccgataccatcgctgatatgtctcaggacaccagtattc

SEQ ID NO: 378274 - DNA, 75 bp, synthetic construct
  source 1..75: mol_type = other DNA
gttgaaggcgctttccaggcctccaacaaaaacattgccgatgcggttaacagtgtgctgaccgacaccatcgct

SEQ ID NO: 378275 - DNA, 75 bp, synthetic construct
  source 1..75: mol_type = other DNA
tctggcgctgcatgggtatatgaacgttacaacgtggatgagtcattaccggctctgcaacgggaagcgcaggaa

SEQ ID NO: 378276 - DNA, 75 bp, synthetic construct
  source 1..75: mol_type = other DNA
ataaataaaaggggaagtggtgtaaggagacttattttgcttaatttttttagagccgaagctgagaaagcagtg

SEQ ID NO: 378277 - DNA, 75 bp, synthetic construct
  source 1..75: mol_type = other DNA
ggcggctggcaatcgcgacgctgggggtactggcgtttggatcggttgttctcgtgctcgcccgccagcgttcgg

SEQ ID NO: 378278 - DNA, 75 bp, synthetic construct
  source 1..75: mol_type = other DNA
tttggatcggttgttctcgtgctcgcccgccagcgttcggaaaatatggctcagcgttatcataaggcgcgcgag

SEQ ID NO: 378279 - DNA, 75 bp, synthetic construct
  source 1..75: mol_type = other DNA
ctgagaggactctggataaactgcgagaaatggcaccagaacttgcgaatgagctcactccgcggtttaaagaaa

SEQ ID NO: 378280 - DNA, 75 bp, synthetic construct
  source 1..75: mol_type = other DNA
aaaaagaagttgaagaggccggaaaaatgttttttgccacacgtaaacgtgaaattgaaaactatctttgcccag

SEQ ID NO: 378281 - DNA, 75 bp, synthetic construct
  source 1..75: mol_type = other DNA
acagcatcctaattatcaaattatgttaatgaatgccttattatcactatcacgtcaacctaacaggcaaattat

SEQ ID NO: 378282 - DNA, 75 bp, synthetic construct
  source 1..75: mol_type = other DNA
actcgcgacacattgctccgcgaagcagcaaaacttgatcccgccaactatacggtgcacagggccagaagtatg

SEQ ID NO: 378283 - DNA, 75 bp, synthetic construct
  source 1..75: mol_type = other DNA
atgaatttttcgcaatgggcggttacgccttttttgtctggctggcggtagcgatgaccgttattccgctggtga

SEQ ID NO: 378284 - DNA, 75 bp, synthetic construct
  source 1..75: mol_type = other DNA
tctactggcgtggtggatgcagcgaaccgatctcactttttctccggcgctaaaaaaactgatggagcaggtacg

SEQ ID NO: 378285 - DNA, 75 bp, synthetic construct
  source 1..75: mol_type = other DNA
tttagtgttgagcctattcttggtggactttgggaccatcttggggcaagagaggctcatcatctcgcagacagc

SEQ ID NO: 378286 - DNA, 75 bp, synthetic construct
  source 1..75: mol_type = other DNA
accctcgacacagccaaagagcttgcgatggttgaacgtaacgaaaaaggccgccagatacgccgctacttcatc

SEQ ID NO: 378287 - DNA, 75 bp, synthetic construct
  source 1..75: mol_type = other DNA
gtattttgctgtatcaccgtcaggaaggtcgtaacattggtctgctgaataaaattcgcgcttacgcactgcagg

SEQ ID NO: 378288 - DNA, 75 bp, synthetic construct
  source 1..75: mol_type = other DNA
ctgccagcctctctggaggacgtgaaaatagtgccagtcctcataggtgaaccgccccgggtttcctggagagtg

SEQ ID NO: 378289 - DNA, 75 bp, synthetic construct
  source 1..75: mol_type = other DNA
ccgactgcatcgtcatcaccacccagaacagccgcgagctgtggggctgcgccgaggggctgagcgtgacgcatg

SEQ ID NO: 378290 - DNA, 75 bp, synthetic construct
  source 1..75: mol_type = other DNA
aagaaattcccataacaataaatgagtataactcattcatggatttcaaaaaccgcgagtttccgttagaacaaa

SEQ ID NO: 378291 - DNA, 75 bp, synthetic construct
  source 1..75: mol_type = other DNA
atgtctgtagcccgtaatctctggcgcgttgctgatgcgccgcacattgttccggctgactccgttgagcgccag

SEQ ID NO: 378292 - DNA, 75 bp, synthetic construct
  source 1..75: mol_type = other DNA
gatcgcaattggccaattcgcacctacaatgaatcattaccgccagcgaaattcgtgcaggatcgctccggtagc

SEQ ID NO: 378293 - DNA, 75 bp, synthetic construct
  source 1..75: mol_type = other DNA
agatttgattcccaaaatcaccgaagaagggctggcctatgcgcacccgttcccgctctcttgtgtgcaatccga

SEQ ID NO: 378294 - DNA, 75 bp, synthetic construct
  source 1..75: mol_type = other DNA
gatcgcaactggccgattcgcacctacaatgaatcattgccgccagcgaaattcgttcaggatcgctccggtagc

SEQ ID NO: 378295 - DNA, 75 bp, synthetic construct
  source 1..75: mol_type = other DNA
caacctatcatgacggaacgcaggagagaagcgagctggttgagatcctgagcgacattgtatccatgacgagat

SEQ ID NO: 378296 - DNA, 75 bp, synthetic construct
  source 1..75: mol_type = other DNA
gccggattaatccctgtcgaaggcgtacgttatgttacccgaaatgaggcgggtgaacccgtagtaaaaatgccg

SEQ ID NO: 378297 - DNA, 75 bp, synthetic construct
  source 1..75: mol_type = other DNA
cgtcaccacccatgtcccggcgctggccggattaatccctgtcgaaggcgtacgttatgttacccgaaatgaggc

SEQ ID NO: 378298 - DNA, 75 bp, synthetic construct
  source 1..75: mol_type = other DNA
cagggatgcaattgtgaatgcctggaaagcatttgatgcagaggatatggggaataagtttgccgcgctgggtaa

SEQ ID NO: 378299 - DNA, 75 bp, synthetic construct
  source 1..75: mol_type = other DNA
aaactgggggccgctgatgctggagattgagtcctgggtattgagtggtattgcttctgctgtggcgctatcatt

SEQ ID NO: 378300 - DNA, 75 bp, synthetic construct
  source 1..75: mol_type = other DNA
cgagttgattatggaaacaggggccagagttatcggttatatgcggcgtagcgaagatgatatgtcggaaaatga

SEQ ID NO: 378301 - DNA, 75 bp, synthetic construct
  source 1..75: mol_type = other DNA
gcgctaaaaaaactgatggatcaggtgcgcaaaaaggtgaccattcgctgcatcaatcgccagcggtttgccgaa

SEQ ID NO: 378302 - DNA, 75 bp, synthetic construct
  source 1..75: mol_type = other DNA
gatttagatccgctggtaaaaatggccattgcgcactatcagtttgaatgcattcatcctttcccggacggtaac

SEQ ID NO: 378303 - DNA, 75 bp, synthetic construct
  source 1..75: mol_type = other DNA
acaacgatctgccgggtttacccccagatttagaatgcatagaaacacgtagcgttctgaaagcctgtatcagtg

SEQ ID NO: 378304 - DNA, 75 bp, synthetic construct
  source 1..75: mol_type = other DNA
aaccaaagaagcattgcgttatcgtacggcgctttatgatggttatacccatcttgagacctatccactttgcac

SEQ ID NO: 378305 - DNA, 75 bp, synthetic construct
  source 1..75: mol_type = other DNA
tggcttccagctcgaagcggcattgacgcaaattgccgaggaaggccgtggtattttgctgtatcaccgtcagga

SEQ ID NO: 378306 - DNA, 75 bp, synthetic construct
  source 1..75: mol_type = other DNA
ctccagataataagtacgttttatattcttgcgatgccgaaggtgaaccagcactgtatatggctaaaatccctg

SEQ ID NO: 378307 - DNA, 75 bp, synthetic construct
  source 1..75: mol_type = other DNA
actgaaggagctggagataacacctttggtggcttcctgtcccctgatgataattatcttttttatgtgaagaat

SEQ ID NO: 378308 - DNA, 75 bp, synthetic construct
  source 1..75: mol_type = other DNA
aaattctggttgaaattatggcgagtaaaatcggccagccatttgatcaaccaggtatctggaacggcccttatc

SEQ ID NO: 378309 - DNA, 75 bp, synthetic construct
  source 1..75: mol_type = other DNA
aaattctggttgaaattatggcgagtaaaatcggccagccatttgatcaacctggcgtctggaacggcccttatc

SEQ ID NO: 378310 - DNA, 75 bp, synthetic construct
  source 1..75: mol_type = other DNA
tctgaattgatgctctcaagcgatttgtttattttgctaagtcgagtagaaacttttggggttgttattattgag

SEQ ID NO: 378311 - DNA, 75 bp, synthetic construct
  source 1..75: mol_type = other DNA
ccgtagaaaacacgtctcgatggacgactgataagattgcggtcgttcgggcattgatggtagaaacgaccgagt

SEQ ID NO: 378312 - DNA, 75 bp, synthetic construct
  source 1..75: mol_type = other DNA
gccagagataggctatatgccgggtcatctcacctggtacttcggcagagctgaagaaaatgggcatgaacatta

SEQ ID NO: 378313 - DNA, 75 bp, synthetic construct
  source 1..75: mol_type = other DNA
agacagcgagtacgcagcaatttttgttcccggtggtcatggcgctctcattggcttaccggaaagcaaagaagt

SEQ ID NO: 378314 - DNA, 75 bp, synthetic construct
  source 1..75: mol_type = other DNA
ggagaaaacagacgtattccggtggatttggatgggttacggttggtttcgtttcttcctgttgataatcaataa

SEQ ID NO: 378315 - DNA, 75 bp, synthetic construct
  source 1..75: mol_type = other DNA
ccgtcatcactttatcccgacgatccaaactggataccccctttattcatagaacgcaacgagcatttgtctgcg

SEQ ID NO: 378316 - DNA, 75 bp, synthetic construct
  source 1..75: mol_type = other DNA
ctactgagggaggtaacacgtctcgacatgtcaagttccgttatccagcgggccatgccaatgctgaaaagcctg

SEQ ID NO: 378317 - DNA, 75 bp, synthetic construct
  source 1..75: mol_type = other DNA
attaatgacgtcttccacggggcgtaagcgagacacggtgtcagttattcccgatacaaagccagaagcacagag

SEQ ID NO: 378318 - DNA, 75 bp, synthetic construct
  source 1..75: mol_type = other DNA
gtcatggatcctcgaaaccaatacaggcatgaataacatgctggaacgcattggggcggagccgtacaagcgtta

SEQ ID NO: 378319 - DNA, 75 bp, synthetic construct
  source 1..75: mol_type = other DNA
atgattaaaattgaaaaagtaattaataaaaatgaccttaaggcatttatcgcttttccgtcatcactttatccc

SEQ ID NO: 378320 - DNA, 75 bp, synthetic construct
  source 1..75: mol_type = other DNA
acgagtatcagtttagccgcatcggcccggtgatcgcactgctgctgattgaagcattacgcgatccgtttgctc

SEQ ID NO: 378321 - DNA, 75 bp, synthetic construct
  source 1..75: mol_type = other DNA
ctggtggtgtttttcaaatttctaatcggtacgccttacggctgggtatgcttaatcctgtttattctttttagt

SEQ ID NO: 378322 - DNA, 75 bp, synthetic construct
  source 1..75: mol_type = other DNA
tgttcggcaagattgcaccgctcgatgaactggtgagcatggtgcgtgccggtcagaaggtttacacctccatgg

SEQ ID NO: 378323 - DNA, 75 bp, synthetic construct
  source 1..75: mol_type = other DNA
gtgcgtgctggcgtgtatgtcggagatacgtccaaacgtattcgggagatgatctggcagcaaatctcccaactg

SEQ ID NO: 378324 - DNA, 75 bp, synthetic construct
  source 1..75: mol_type = other DNA
tcattgcaggtgtattttttagaaaattaatgacgtcttccacggggcgtaagcgagacacggtgtcagttattc

SEQ ID NO: 378325 - DNA, 75 bp, synthetic construct
  source 1..75: mol_type = other DNA
ttgaagagtctgcgcgcaaatatcctaacgacgctctggctcttcaggcattgtatcgggttattaaggaaacgg

SEQ ID NO: 378326 - DNA, 75 bp, synthetic construct
  source 1..75: mol_type = other DNA
tgaacgccaaaatctagcatgtaaagaaaatggtgtgaaactttatctggaaaacgaatctaaaatcaggaagga

SEQ ID NO: 378327 - DNA, 75 bp, synthetic construct
  source 1..75: mol_type = other DNA
tccgataagaaaattggcactctaaccactatcttaagtactggagctgaagcgtctgtgtcaaatggaacgatc

SEQ ID NO: 378328 - DNA, 75 bp, synthetic construct
  source 1..75: mol_type = other DNA
ctgcaaatggcctggccgcaacagcaggggctatatcccctgacgtattatctttttttgggagtaattgctcgt

SEQ ID NO: 378329 - DNA, 75 bp, synthetic construct
  source 1..75: mol_type = other DNA
tactggcaatgctcccacagcgtaaatacacccacgtactggatgcgggttgtggacctggctggatgagccgcc

SEQ ID NO: 378330 - DNA, 75 bp, synthetic construct
  source 1..75: mol_type = other DNA
ttgcggcggcatttggtcgggctgcctcacagtatgagcaacacgcagagttacagcgtcagagcgccgatgcct

SEQ ID NO: 378331 - DNA, 75 bp, synthetic construct
  source 1..75: mol_type = other DNA
ctggaccagcgtgacagtcgcctggcaacacgccgctatgtagaaaataaacgcgtgctgaactgcttctcttat

SEQ ID NO: 378332 - DNA, 75 bp, synthetic construct
  source 1..75: mol_type = other DNA
catgctggcgattcagttgctgaatgaaggcggtgttctcctgactttctcctgttccggtctgatgaccagcga

SEQ ID NO: 378333 - DNA, 75 bp, synthetic construct
  source 1..75: mol_type = other DNA
cgcaaggctgccgatgaactgacctgtatgacagcgcgaattaaccgtggtgaggcaatacctgaaccagtaaaa

SEQ ID NO: 378334 - DNA, 75 bp, synthetic construct
  source 1..75: mol_type = other DNA
tgcgttgactgactcggaattacggcgcaaggctgccgatgaacttgcccatatgactgcgagaattaaccgtgg

SEQ ID NO: 378335 - DNA, 75 bp, synthetic construct
  source 1..75: mol_type = other DNA
taagcggtttgacctggacatatcttgacgggcgtacgctgactgacggcaactacaactatcaggtacgggtga

SEQ ID NO: 378336 - DNA, 75 bp, synthetic construct
  source 1..75: mol_type = other DNA
gtgcagttgcgaaaactcgtaccagtgtagagttgagtgatttagtgcgacgcagttatcaccagtgtcaaaaca

SEQ ID NO: 378337 - DNA, 75 bp, synthetic construct
  source 1..75: mol_type = other DNA
cgttgagctgagtttgcttgtacggcgcagctatcaccagtgtcaaaatatgttgtgcgggtactgtttcaccag

SEQ ID NO: 378338 - DNA, 75 bp, synthetic construct
  source 1..75: mol_type = other DNA
atggcaatgcgctgtcctcgctgccgtgcaatagcaaaaaccagaaccagcgttgagctgagtttgcttgtacgg

SEQ ID NO: 378339 - DNA, 75 bp, synthetic construct
  source 1..75: mol_type = other DNA
tatctaaattactcactggcgagtgcgacgttctggcctggcctgccgccagccagctcagcatattgcgtgatg

SEQ ID NO: 378340 - DNA, 75 bp, synthetic construct
  source 1..75: mol_type = other DNA
cggcgcaacctaccgcttccatctgcgtcgtgacgtacagtttcagaagactgcctggttcacccccacccgcaa

SEQ ID NO: 378341 - DNA, 75 bp, synthetic construct
  source 1..75: mol_type = other DNA
aaccagactcagccagtccccggcgcggtggttcctcaagacgttttcccgcgaagtcatcacggcgaagatcag

SEQ ID NO: 378342 - DNA, 75 bp, synthetic construct
  source 1..75: mol_type = other DNA
tgctggacaaactcccgcaggtcatggtggaaatttcagacgagcaggtgcgtgttctgattcattacatcgtta

SEQ ID NO: 378343 - DNA, 75 bp, synthetic construct
  source 1..75: mol_type = other DNA
attccaaatagaattagtgagcgcagaactagagagactgagaaaatcaaagaacgaccaagcgacacaaccaac

SEQ ID NO: 378344 - DNA, 75 bp, synthetic construct
  source 1..75: mol_type = other DNA
gtgcgacctgtccacgctgaagctggaacccgccacctttgttgagccggacctgcatcagtacgccagcgatat

SEQ ID NO: 378345 - DNA, 75 bp, synthetic construct
  source 1..75: mol_type = other DNA
gatgtttttaatcgtgaacctttaccgcctgaaagtccgctctggcaacatccacgcgtgacaataacaccacat

SEQ ID NO: 378346 - DNA, 75 bp, synthetic construct
  source 1..75: mol_type = other DNA
attgaaacaaatattacagaagaaatttttaatgataaaacagtaaatactcagttagttaaaacattagtaagt

SEQ ID NO: 378347 - DNA, 75 bp, synthetic construct
  source 1..75: mol_type = other DNA
tctaccgccagtgcgtttgtcgccgcggcctgtgggctgaaagtggcgaaacacggcaaccgtagcgtctccagt

SEQ ID NO: 378348 - DNA, 75 bp, synthetic construct
  source 1..75: mol_type = other DNA
accattgcatgttctgcctgtcacgacgagatcgaccgtcgcacgcattttgttgacgctggatatgcaaaagaa

SEQ ID NO: 378349 - DNA, 75 bp, synthetic construct
  source 1..75: mol_type = other DNA
cgcctgaaagtccgctctggcaacatccacgcgtgacgataacaccacatgtcgccgcgattacccgtcccgctg

SEQ ID NO: 378350 - DNA, 75 bp, synthetic construct
  source 1..75: mol_type = other DNA
tatataacaggtgcggtgataattgaaaaccatgtggagttaaccgaccacgccctcgttgaagcctttgatggc

SEQ ID NO: 378351 - DNA, 75 bp, synthetic construct
  source 1..75: mol_type = other DNA
atttccggtaatacgcgcatcaccggcaccagcgtgctgtggggagaggtttacgcaacggataatgtctggatc

SEQ ID NO: 378352 - DNA, 75 bp, synthetic construct
  source 1..75: mol_type = other DNA
atatttggtcacgccttaattgatcaacattctatgatcgtcgccgcgcaaggcttaacctccgaccatcaactc

SEQ ID NO: 378353 - DNA, 75 bp, synthetic construct
  source 1..75: mol_type = other DNA
ttcaaattaacaacaaaaactgattggattattgctttaattggattgattatcacagcaataataacatctgca

SEQ ID NO: 378354 - DNA, 75 bp, synthetic construct
  source 1..75: mol_type = other DNA
tcgctggaagccgagcctgttctgtatcagtcctgcactcgccccacctggaatagcggtgttccgtggacggaa

SEQ ID NO: 378355 - DNA, 75 bp, synthetic construct
  source 1..75: mol_type = other DNA
cgccgggatggaggaagatgctattcccacgcttcactacagctctcaggttgcagaacatgccattgttgaagg

SEQ ID NO: 378356 - DNA, 75 bp, synthetic construct
  source 1..75: mol_type = other DNA
aaccgcgctactggaaaacgcagcgccgttcccgcgcccggattatctgtttgctgatatcgtcggtactggcgg

SEQ ID NO: 378357 - DNA, 75 bp, synthetic construct
  source 1..75: mol_type = other DNA
aacgtgtttgaacgtggcccgcaatacgctcaggttgtttctgcaatcccaatcaaggaaacggttaaaacaccg

SEQ ID NO: 378358 - DNA, 75 bp, synthetic construct
  source 1..75: mol_type = other DNA
ccgtcgagaaaatcaatgacttagggatttttgacaagaaacagatttactaccgcatggactttagtggcttcg

SEQ ID NO: 378359 - DNA, 75 bp, synthetic construct
  source 1..75: mol_type = other DNA
attaagaagcctcagctactggcgagaattgaacgccttgaacagcacgggcaaaccgtaatccccgggctcact

SEQ ID NO: 378360 - DNA, 75 bp, synthetic construct
  source 1..75: mol_type = other DNA
tgcgctgactgacgcggaattacggcgtaaagctgccgatgagctgacctgtatgaccgcgcgaattaaccgtgg

SEQ ID NO: 378361 - DNA, 75 bp, synthetic construct
  source 1..75: mol_type = other DNA
atgatgcggatcgcgtttgtggattccagttccatccggaatccattctcaccacccagggcgctcgcctgctgg

SEQ ID NO: 378362 - DNA, 75 bp, synthetic construct
  source 1..75: mol_type = other DNA
gaaaattcgcggcgagcacccgaacgaaatcgccggggcagcaactgcccttctggaaaatgctgcgccattccc

SEQ ID NO: 378363 - DNA, 75 bp, synthetic construct
  source 1..75: mol_type = other DNA
gtgtgccgagcgaagccggttgtatgccggaactcctcacccgcctgcgcggcaagctgccaattattggcattt

SEQ ID NO: 378364 - DNA, 75 bp, synthetic construct
  source 1..75: mol_type = other DNA
cggaaacgtctgtactggcgcacattcgcctggccgggttatgtggcaccggaatcaaaccgcctgatctgattg

SEQ ID NO: 378365 - DNA, 75 bp, synthetic construct
  source 1..75: mol_type = other DNA
gcaacagcatcaatatttctaccgccagtgcgtttgtcgccgcggcctgtgggctgaaagtggcgaaacacggca

SEQ ID NO: 378366 - DNA, 75 bp, synthetic construct
  source 1..75: mol_type = other DNA
ctcgtcggatctgctggcggcattcggtattaatcttgatatgaacgccgataaatcgcgccaggcgctggatga

SEQ ID NO: 378367 - DNA, 75 bp, synthetic construct
  source 1..75: mol_type = other DNA
ctggtattccttattttcgccattatctctggcggctgggtggcagaaagcccgacttgggcaccgtactttgac

SEQ ID NO: 378368 - DNA, 75 bp, synthetic construct
  source 1..75: mol_type = other DNA
tcgcttctgccgcgcaggtggtgagtagctggggatttagcattacaccagatacgctcaaccagattgccagcg

SEQ ID NO: 378369 - DNA, 75 bp, synthetic construct
  source 1..75: mol_type = other DNA
atgaacaaatcagggaaatacctcgtctggacagtgctctctgtaatgggggcatttgctctgggatacattgct

SEQ ID NO: 378370 - DNA, 75 bp, synthetic construct
  source 1..75: mol_type = other DNA
ctccgtgtggcagagctggaagaggagcttgatgacacggatgacgctgccggtcaggacacgtctgtcagcccg

SEQ ID NO: 378371 - DNA, 75 bp, synthetic construct
  source 1..75: mol_type = other DNA
tttaccggcgtgcagctgacctggatgctggtgggttacggttttgtggcggcggtgctgccggtgtggttgctg

SEQ ID NO: 378372 - DNA, 75 bp, synthetic construct
  source 1..75: mol_type = other DNA
aacgtataccgttgcgttcaccattccgctggcgctgtttatggggatctacctgcgctatctgcgtccggggcg

SEQ ID NO: 378373 - DNA, 75 bp, synthetic construct
  source 1..75: mol_type = other DNA
ttaaatcgtggggaacagatcaacgcgctgtggattgtggtggcgtcggtctgtatctatctgatcgcttaccgt

SEQ ID NO: 378374 - DNA, 75 bp, synthetic construct
  source 1..75: mol_type = other DNA
catgaacagcccgatggcggtgctggctccggcgggtacgacggatgtggttgcttctgcggcgcaggtggtgag

SEQ ID NO: 378375 - DNA, 75 bp, synthetic construct
  source 1..75: mol_type = other DNA
tatgacgccagcggtgcgccataacgacgggctggactatgtgccgacggacaaaaaagtgctgttcggtcacca

SEQ ID NO: 378376 - DNA, 75 bp, synthetic construct
  source 1..75: mol_type = other DNA
ccaggcaatgatcgacagcggcaatattccgtcgcagtatactgagtcacagctggcgcaactggtgttcaacaa

SEQ ID NO: 378377 - DNA, 75 bp, synthetic construct
  source 1..75: mol_type = other DNA
ggtcaacaccattgagctgcgtaatcagcacgggctggtgcatctggaaaaagccagtgctcgcgggcaatacag

SEQ ID NO: 378378 - DNA, 75 bp, synthetic construct
  source 1..75: mol_type = other DNA
caggctttagagacactgcaaaatagcgaaccgtttgctgccgcactggtggattttgatctgccggatgtcgac

SEQ ID NO: 378379 - DNA, 75 bp, synthetic construct
  source 1..75: mol_type = other DNA
acgttaaccaaatgaatgaacttcgcctcagcgccctgcgggtgcagcaaatggtgatgaatctggggctggagc

SEQ ID NO: 378380 - DNA, 75 bp, synthetic construct
  source 1..75: mol_type = other DNA
gcaccgaccgtgaatttaaccctgacccgaagactctggatgggctttgccctgatggcgctgttaaccctgacc

SEQ ID NO: 378381 - DNA, 75 bp, synthetic construct
  source 1..75: mol_type = other DNA
ggtggcgagttgaccgccaccagtacgccgggggttggaagctgtttttgcttacggttaccgttacgtattgcc

SEQ ID NO: 378382 - DNA, 75 bp, synthetic construct
  source 1..75: mol_type = other DNA
gcgtttgctgttaattgaagataacccgctaacccagcgaattaccgtcgaaatgctgaacaccagtggtgcgca

SEQ ID NO: 378383 - DNA, 75 bp, synthetic construct
  source 1..75: mol_type = other DNA
cgccgggaatggcgttccgtgtctttgccggtgtggcagccggaatgacagaacgtggcctggccagaatgcaat

SEQ ID NO: 378384 - DNA, 75 bp, synthetic construct
  source 1..75: mol_type = other DNA
gctggagcgacccaggccgggatttacgatttgatcgaacaagatcagcgtcaggctgctgaaagtgcactcgat

SEQ ID NO: 378385 - DNA, 75 bp, synthetic construct
  source 1..75: mol_type = other DNA
cagcggctggacgatgcttttgtatatggcgcatgtgacagagttgtttccgatattgtcaatgaactgatggag

SEQ ID NO: 378386 - DNA, 75 bp, synthetic construct
  source 1..75: mol_type = other DNA
gtcttcaggagctgggtgagcaactgaaccgcgatgtcagcctgacgggaacgaaagaagaactggcgcttcgtg

SEQ ID NO: 378387 - DNA, 75 bp, synthetic construct
  source 1..75: mol_type = other DNA
aacgcctgaaagaactatcagagttgctgggacgtgaacctgatatgtcaggaagtgcggcagatattgcacagc

SEQ ID NO: 378388 - DNA, 75 bp, synthetic construct
  source 1..75: mol_type = other DNA
aattgtggcggatctcaaagccaaaggtctggcagtagaaagcgaaggggcgaccgtcgtattccttgatgagtt

SEQ ID NO: 378389 - DNA, 75 bp, synthetic construct
  source 1..75: mol_type = other DNA
gcgctgactggcgcaatattttcgtcgtcggcgatctgcatgggtgctacacgctgctgatgaatgagctcggaa

SEQ ID NO: 378390 - DNA, 75 bp, synthetic construct
  source 1..75: mol_type = other DNA
actcaagtttgccaaccagatgtatatcgatactagggcagtgttctgcggaaatctcacattgattcaggtaca

SEQ ID NO: 378391 - DNA, 75 bp, synthetic construct
  source 1..75: mol_type = other DNA
tatccagcagggagttcagcagggggcgcttcaaaaagcacgggaaatcgcccgggagctccggaacgcgggaat

SEQ ID NO: 378392 - DNA, 75 bp, synthetic construct
  source 1..75: mol_type = other DNA
gaaaatggggatgacacctgagcagattaagcaggctaccggactgtccgaagctgaactgaaaaaaatcattca

SEQ ID NO: 378393 - DNA, 75 bp, synthetic construct
  source 1..75: mol_type = other DNA
cggttacgctgatacccgagtcgaaacggaaacaggcctgcaatataccttcaacgaaacggttgccttgcgagt

SEQ ID NO: 378394 - DNA, 75 bp, synthetic construct
  source 1..75: mol_type = other DNA
acaggtctgcaatataccttcaacgaaacggttgctttgcgagtgaactattatctcgagcgcggcggtaatgac

SEQ ID NO: 378395 - DNA, 75 bp, synthetic construct
  source 1..75: mol_type = other DNA
cggcggagcacggctcgtcgctggtgatcagcggcaccaccaccgccccagtcgggcagacgctgaccctgacct

SEQ ID NO: 378396 - DNA, 75 bp, synthetic construct
  source 1..75: mol_type = other DNA
acatgcagtatgcatacacccgtgtattgtccgtgttccgtaaagcggaaattagcgaagagcaactggctgcag

SEQ ID NO: 378397 - DNA, 75 bp, synthetic construct
  source 1..75: mol_type = other DNA
atgaaattacgtgattcgctggctgaaaataaatctatccgcctgcaggccgaagcaaatacctggcaggaagcg

SEQ ID NO: 378398 - DNA, 75 bp, synthetic construct
  source 1..75: mol_type = other DNA
aacctacaccgcaagcgtcgccgccaacggaagctggagtgtgaacgttccggcggcagatctggcaactctgcc

SEQ ID NO: 378399 - DNA, 75 bp, synthetic construct
  source 1..75: mol_type = other DNA
atcagttgtcggaataccgcgccgggcaatatattcgcttacaacgtcatgatgatttctggcgtggtaagccgt

SEQ ID NO: 378400 - DNA, 75 bp, synthetic construct
  source 1..75: mol_type = other DNA
gcataccgatgcacttcatgccacgcgggatgcgcctgtgtcacttgtgttgcccgggaaggcattccgtgtctc

SEQ ID NO: 378401 - DNA, 75 bp, synthetic construct
  source 1..75: mol_type = other DNA
agcggcgtggcggcaatggactacgactgggacggcgcggtggatgtgctggtgaccaaacagtcgggcagcgtg

SEQ ID NO: 378402 - DNA, 75 bp, synthetic construct
  source 1..75: mol_type = other DNA
gtcttcaggagctgggtgagcaactgaaccgcgatgtcagtttgacgggaacgaaagaagaactggcgcttcgtg

SEQ ID NO: 378403 - DNA, 75 bp, synthetic construct
  source 1..75: mol_type = other DNA
gcggctatctctacaccactaccgatatcgcctgtgcgaagtatcgttatgaaacccttcatgccgatcgcgtgc

SEQ ID NO: 378404 - DNA, 75 bp, synthetic construct
  source 1..75: mol_type = other DNA
accgcaccacggactacatcttcgactgggacaacatgctggcgtttgagggtaataccgcgccatacatgcagt

SEQ ID NO: 378405 - DNA, 75 bp, synthetic construct
  source 1..75: mol_type = other DNA
tgttcagcaggcgctggcgtccgatcgtctcggtgttgctacgccagaaaaacagaccattgtggttgactactc

SEQ ID NO: 378406 - DNA, 75 bp, synthetic construct
  source 1..75: mol_type = other DNA
atattcttaataatgccgagcaggccgtcgcgcagatcatctccggacaagttagcggtgcttctcctggcgata

SEQ ID NO: 378407 - DNA, 75 bp, synthetic construct
  source 1..75: mol_type = other DNA
tcaacacctgatgcaggcgtgggcgatcgtccgtaaagcaggctatgtgccggaatccgtaccgctggaacacca

SEQ ID NO: 378408 - DNA, 75 bp, synthetic construct
  source 1..75: mol_type = other DNA
ctggcggtacagtgaaactggccgagctgctggatgaagccctggagcgtgcacgtcgtctggtggcagagaaga

SEQ ID NO: 378409 - DNA, 75 bp, synthetic construct
  source 1..75: mol_type = other DNA
ggtgagcagttatgtggaagcgaaagataaccgcgaaattatcgatattgctgagttgaatgcagagctgaaaac

SEQ ID NO: 378410 - DNA, 75 bp, synthetic construct
  source 1..75: mol_type = other DNA
aactggctatgcacgggcagacccacgttaacaaaatctacgacccggcagcaggatccggttcgctgttgttgc

SEQ ID NO: 378411 - DNA, 75 bp, synthetic construct
  source 1..75: mol_type = other DNA
tgccgtatcgaccaggtggttgaatggcaaaaccgtcctctggatgcgatttatcccattgtttatcttgactgt

SEQ ID NO: 378412 - DNA, 75 bp, synthetic construct
  source 1..75: mol_type = other DNA
ctaactatgcggcaaatgccggtaagtcaggcggcgagttctttacaccacagcacgtctctaagctgattgcac

SEQ ID NO: 378413 - DNA, 75 bp, synthetic construct
  source 1..75: mol_type = other DNA
ttgtcgcgaatgactataacctgtcggtaagcagctatgtggaagcgaaagatactcgcgaaattatcgatatcg

SEQ ID NO: 378414 - DNA, 75 bp, synthetic construct
  source 1..75: mol_type = other DNA
gacgatccggatcacccaacggtgctctattttctggatgaacctgtggcgtggaaactacacgcagcagggcgg

SEQ ID NO: 378415 - DNA, 75 bp, synthetic construct
  source 1..75: mol_type = other DNA
tctattttctagatgaaccagtggcgtggaaactgcacgccgcagggcggctggatatcgataccaccggtctgg

SEQ ID NO: 378416 - DNA, 75 bp, synthetic construct
  source 1..75: mol_type = other DNA
gtggaaactgcatgcggcagggcggctggatatcgacaccactggtctggtgctgatgaccgatgacggtcagtg

SEQ ID NO: 378417 - DNA, 75 bp, synthetic construct
  source 1..75: mol_type = other DNA
tttgatcggctgctgaaaaagctcagcgttgaagccgctctcaatgcagagatgacacaccatcctgggtatgag

SEQ ID NO: 378418 - DNA, 75 bp, synthetic construct
  source 1..75: mol_type = other DNA
agctgctgcgttcaaagaactgtatgacgcagatgtttcaccggcactgatatcaaaggttaccgatgccgtgat

SEQ ID NO: 378419 - DNA, 75 bp, synthetic construct
  source 1..75: mol_type = other DNA
tggctaacgaacaggccaaaaatctcaaaacccctgaagatctcagccagttcgatcgcctgctgaagaaaatca

SEQ ID NO: 378420 - DNA, 75 bp, synthetic construct
  source 1..75: mol_type = other DNA
ccaacgttcagtttattgacgccagcgagctattcaaaaaagagactaataacaacatcctgactgatgcccata

SEQ ID NO: 378421 - DNA, 75 bp, synthetic construct
  source 1..75: mol_type = other DNA
attaacgatgaacgttttgccccggctggcgttctggcccccaaatccaaagctgactttgcgtttgtattacat

SEQ ID NO: 378422 - DNA, 75 bp, synthetic construct
  source 1..75: mol_type = other DNA
gttctggcccccaaatccaaagctgactttgcgtttgtattacatgcgctgaactatctttcggccaaaggtcgt

SEQ ID NO: 378423 - DNA, 75 bp, synthetic construct
  source 1..75: mol_type = other DNA
ggtgatgcctatgaattcctgatttctaactatgcggcgaatgccggtaagtctggcggggagttcttcacacca

SEQ ID NO: 378424 - DNA, 75 bp, synthetic construct
  source 1..75: mol_type = other DNA
ctatgctgctaatagctggatgctcttcatcacaggattcagctaacaatcagatagatgaattaggaaaagaaa

SEQ ID NO: 378425 - DNA, 75 bp, synthetic construct
  source 1..75: mol_type = other DNA
gcaaaatctgtcgcgtttgaggccgttgtcgcgaatgactataacctgtcagtgagcagctatgtagaagtgaaa

SEQ ID NO: 378426 - DNA, 75 bp, synthetic construct
  source 1..75: mol_type = other DNA
aactggctatgcacgggcagaccagcgttaacaaaatctacgacccggcagcgggttccggctcactgttgttgc

SEQ ID NO: 378427 - DNA, 75 bp, synthetic construct
  source 1..75: mol_type = other DNA
atggaagcaggggatgagagcatacattatgcagcacttgatgacagcatcattaccgatgacatcaaagacgat

SEQ ID NO: 378428 - DNA, 75 bp, synthetic construct
  source 1..75: mol_type = other DNA
tgcttacggttatccttcagaagctgacatcaaaggtttgtttgctgatttcgataccaccagtaaccgcctggg

SEQ ID NO: 378429 - DNA, 75 bp, synthetic construct
  source 1..75: mol_type = other DNA
gtgaataaccgcctgcaactctcccgtctggagcgtgtttaccagtccgaacaggctgaaaaactgctgttagca

SEQ ID NO: 378430 - DNA, 75 bp, synthetic construct
  source 1..75: mol_type = other DNA
acctggcgcgtatgaacatgtttttgcacaacatcaactacgacaagtttgatatcaagctgggcaatacactga

SEQ ID NO: 378431 - DNA, 75 bp, synthetic construct
  source 1..75: mol_type = other DNA
cgaactgttcaaaaaagagactaacaacaatatcctgaccgatgcccatatcgaacagattatgcaggtatttgc

SEQ ID NO: 378432 - DNA, 75 bp, synthetic construct
  source 1..75: mol_type = other DNA
ccaaagttcagtttattgacgccagcgaactgttcaaaaaagagaccaacaacaatatcctgaccgatgcccata

SEQ ID NO: 378433 - DNA, 75 bp, synthetic construct
  source 1..75: mol_type = other DNA
taatttaccttttaacatgaatacctttaatcaactctggggggctattactcctcaacatgcgaaagaaattat

SEQ ID NO: 378434 - DNA, 75 bp, synthetic construct
  source 1..75: mol_type = other DNA
cgtcaggctacggcggatattcttcgtgaagcgggtgtcccggtgaccgaattgcgtgccggaataatcgttggt

SEQ ID NO: 378435 - DNA, 75 bp, synthetic construct
  source 1..75: mol_type = other DNA
acagtttgaacattttatggcggtgagcggtaagcgccgctggttgatccccatcccctccccacccgctggatt

SEQ ID NO: 378436 - DNA, 75 bp, synthetic construct
  source 1..75: mol_type = other DNA
ctggtttgtttggggctgtttgtgccaacgaattgagtaaaaaaaataaaaaagttctagttttagaaaagagaa

SEQ ID NO: 378437 - DNA, 75 bp, synthetic construct
  source 1..75: mol_type = other DNA
agcatgggcgaaggcggcgattttatcgctcaggagcgccaggtggctctcaacgtccgcgatgcgctacgcgaa

SEQ ID NO: 378438 - DNA, 75 bp, synthetic construct
  source 1..75: mol_type = other DNA
caacgtccgcgatgcgctgcgcaaagtgccggttaagcaattaatcttcctcagttcactgcaagccccgccaca

SEQ ID NO: 378439 - DNA, 75 bp, synthetic construct
  source 1..75: mol_type = other DNA
tcagttcgttgcaggccccgccacatgagcagtcggaccatctgcgcgcccgtcaggctacggcggacattcttc

SEQ ID NO: 378440 - DNA, 75 bp, synthetic construct
  source 1..75: mol_type = other DNA
cggtttaaccatcaacgcccattttaatggcatggtgatggcggtgcgtcatgatgcggatcgcgtttgtggatt

SEQ ID NO: 378441 - DNA, 75 bp, synthetic construct
  source 1..75: mol_type = other DNA
gtaacagcatcaatatttctaccgccagtgcgtttgtcgccgcggcctgcgggctgaaagtggcgaaacacggca

SEQ ID NO: 378442 - DNA, 75 bp, synthetic construct
  source 1..75: mol_type = other DNA
atgcagaaagtgactttactgaaaatgagcaaaagatagccgactttctgcaagccagggtgagcgaactgaaat

SEQ ID NO: 378443 - DNA, 75 bp, synthetic construct
  source 1..75: mol_type = other DNA
ccttgctgaatataagtattatgatatgcaccaagttatccgttcagcactgaattgtgtaaataaaatattaca

SEQ ID NO: 378444 - DNA, 75 bp, synthetic construct
  source 1..75: mol_type = other DNA
tataacgctctagcaaaaaaagaagaaaaggttatttttggtggaagactcgctgagtttcgatactacgatatg

SEQ ID NO: 378445 - DNA, 75 bp, synthetic construct
  source 1..75: mol_type = other DNA
ttgatgaggcgagtgctgaggagaatgtaacaattataacaaaagaaatacctgatgcgtgggctagagaaaaaa

SEQ ID NO: 378446 - DNA, 75 bp, synthetic construct
  source 1..75: mol_type = other DNA
tcgctcaggagcgccaggtggctctcaacgtccgcgatgcgctacgcgaagtcccagttaagcaattaatctttc

SEQ ID NO: 378447 - DNA, 75 bp, synthetic construct
  source 1..75: mol_type = other DNA
ccgacgagcagcgtcagattcaggagatcaacaccggcattctgatcgccaacggcgcagatatgaaacgctggc

SEQ ID NO: 378448 - DNA, 75 bp, synthetic construct
  source 1..75: mol_type = other DNA
accgtaacgcgcaatgttggtgaaaatgccctggcaatcagccgtgtgccgcagtcacaaaaagaaggctggcgt

SEQ ID NO: 378449 - DNA, 75 bp, synthetic construct
  source 1..75: mol_type = other DNA
atttaagaccattatcggcgacgatgtgtttgtcggttccgacactcagctggtggccccggtaacagtaggcaa

SEQ ID NO: 378450 - DNA, 75 bp, synthetic construct
  source 1..75: mol_type = other DNA
cggcaccggttgcgtgattaaaaacagcgtgattggcgatgattgcgaaattagcccatataccatcgtggaaga

SEQ ID NO: 378451 - DNA, 75 bp, synthetic construct
  source 1..75: mol_type = other DNA
gcgtgatgctaaaccgcagggcggcattggcctgttgacggtgaaactggatgacccgaccggttatggtcgtat

SEQ ID NO: 378452 - DNA, 75 bp, synthetic construct
  source 1..75: mol_type = other DNA
caggcagagcagctgggtacgggtcatgcgatgcagcaggccgcacctttctttgccgatgatgaagacatttta

SEQ ID NO: 378453 - DNA, 75 bp, synthetic construct
  source 1..75: mol_type = other DNA
gggcgagtttaaggccaaaaaaattatatatactgggccaattgatgagtattatgatttttgttttgggaaatt

SEQ ID NO: 378454 - DNA, 75 bp, synthetic construct
  source 1..75: mol_type = other DNA
cataaatatggggctcatatttttcatacaaacgataaatacatatgggattatgtaaactcattagttgaattt

SEQ ID NO: 378455 - DNA, 75 bp, synthetic construct
  source 1..75: mol_type = other DNA
ccatcccccccccccccccccgggtttttgtgtggtttttcaatttgatttctttcgtaccccccccccccgccc

SEQ ID NO: 378456 - DNA, 75 bp, synthetic construct
  source 1..75: mol_type = other DNA
atgctctacggcgatgtgccgctgatctcggtcgaaacactccagcgtctgcgtgatgcaaaaccgcagggtggg

SEQ ID NO: 378457 - DNA, 75 bp, synthetic construct
  source 1..75: mol_type = other DNA
tggcactggttgcgtgattaaaaacagcgtgattggtgatgattgcgaaatcagcccatatacagtggtggaaga

SEQ ID NO: 378458 - DNA, 75 bp, synthetic construct
  source 1..75: mol_type = other DNA
cttaccatttaatatgaatacatttaataaaatgtggggggtgacgtctccctcagcagcaaaaaataaaattga

SEQ ID NO: 378459 - DNA, 75 bp, synthetic construct
  source 1..75: mol_type = other DNA
gcgttatacctttaaaaataccaaccgcatttacctgggcaataccggatttaatctctacctgcacgcgtatgg

SEQ ID NO: 378460 - DNA, 75 bp, synthetic construct
  source 1..75: mol_type = other DNA
cgctcacctctttattagccgtacccgtaatctcccacgcagaatttaaaggtgggtttgcagatatcggcgtgc

SEQ ID NO: 378461 - DNA, 75 bp, synthetic construct
  source 1..75: mol_type = other DNA
tcaccctcaccaactggaacgagtacgagtttgatcgtgatgccacctacgcggcaggtaatggcggcaaagaag

SEQ ID NO: 378462 - DNA, 75 bp, synthetic construct
  source 1..75: mol_type = other DNA
taatgctggtggcggttggttctcaacccgtctttgctgccaaatgccagttcggggcctgcgacgccgacactg

SEQ ID NO: 378463 - DNA, 75 bp, synthetic construct
  source 1..75: mol_type = other DNA
gatagacctaaagaacgaactttaggtgtgttggttctgactacagatgttcttaccgtagagttttattcaatt

SEQ ID NO: 378464 - DNA, 75 bp, synthetic construct
  source 1..75: mol_type = other DNA
cagtgtttatgtcaacgatcaacctattattaaccaaagcattacatttattgaaattgaaggaaaaaaaaaacg

SEQ ID NO: 378465 - DNA, 75 bp, synthetic construct
  source 1..75: mol_type = other DNA
tcaggccccgaccgaagaggcggcgctgatggcgctggatgcgttcgcgggagaatgggacgataaatatccgca

SEQ ID NO: 378466 - DNA, 75 bp, synthetic construct
  source 1..75: mol_type = other DNA
tgggtatgtggctggccgaaaatgaaggcgaaaagttctggctgagtgtgctgacagagcttaaaaatcgcggtc

SEQ ID NO: 378467 - DNA, 75 bp, synthetic construct
  source 1..75: mol_type = other DNA
tgtgaagaaaaaccagacccggatcactgggatggataaccagatcctgtcgttgtacgccaaaggcctgacaac

SEQ ID NO: 378468 - DNA, 75 bp, synthetic construct
  source 1..75: mol_type = other DNA
acgggatcggctacaatttcaccggcagcggttggtggttcaaaccgttctttgcaaaacgctatacagaccaaa

SEQ ID NO: 378469 - DNA, 75 bp, synthetic construct
  source 1..75: mol_type = other DNA
gccataataaaccaggtagcgagcagcgttatacctttaaaaataccaaccgtatttacctgggtgacaccggat

SEQ ID NO: 378470 - DNA, 75 bp, synthetic construct
  source 1..75: mol_type = other DNA
cccgttgcacccgcccacgctttcgcaccatgtaccgcctgcatcaaatggtgcaggccttccaggcaaaggaaa

SEQ ID NO: 378471 - DNA, 75 bp, synthetic construct
  source 1..75: mol_type = other DNA
gttttaaaaaaaattaatgatgcatcatcccccagcgacgccatggctaaaaaggtagaatcgtatctgaataat

SEQ ID NO: 378472 - DNA, 75 bp, synthetic construct
  source 1..75: mol_type = other DNA
tcaggtcggcgtatatggcgactggtttaatgatggcaatcccacttgggatgacggtgatggcgaagacctgta

SEQ ID NO: 378473 - DNA, 75 bp, synthetic construct
  source 1..75: mol_type = other DNA
gccgtggcgtgacgctgaacggcgacgtcccctccgtcaccatcaacacctttgcgggcgatgatgtggtgaatg

SEQ ID NO: 378474 - DNA, 75 bp, synthetic construct
  source 1..75: mol_type = other DNA
tggctcggttgaaagtgcccacggacatctgaaaaggcgtatctgtcaggcgctgatactgcggggcagtaacga

SEQ ID NO: 378475 - DNA, 75 bp, synthetic construct
  source 1..75: mol_type = other DNA
tggacgcgagtaccactatcatcaagcaagggaatcaggcactggtggcagcggcgtgcgaggtggcggagcgtg

SEQ ID NO: 378476 - DNA, 75 bp, synthetic construct
  source 1..75: mol_type = other DNA
tccctggctccggttcgcaatatgtaggcatggcacggtggctgtatgagcgttatccgcaggtgcgtactctgt

SEQ ID NO: 378477 - DNA, 75 bp, synthetic construct
  source 1..75: mol_type = other DNA
tgaggcggttaaggctgttttgcgtagactggctggcaactatccggtaactccggatggttggataagctgtag

SEQ ID NO: 378478 - DNA, 75 bp, synthetic construct
  source 1..75: mol_type = other DNA
tcgtctcggcgctggcgaacggcacggtgaccattaacgccagcgtcaccgatgccgccggaaacagcggcagcg

SEQ ID NO: 378479 - DNA, 75 bp, synthetic construct
  source 1..75: mol_type = other DNA
gccccaacgaggcaactaaaagttatccggcccgaactggtaaaaaatcccgattcgcagctcgtggtagctttc

SEQ ID NO: 378480 - DNA, 75 bp, synthetic construct
  source 1..75: mol_type = other DNA
gtaaaaaaatagcaggcaagtttggggctaactcatttgcttccagtgcaccagagccagagcaaatttatcttg

SEQ ID NO: 378481 - DNA, 75 bp, synthetic construct
  source 1..75: mol_type = other DNA
cccggtctgcgaggtctgtcggactttactgaactgaaaggtgtagttgtcaccatcgccggtaagttgttggcg

SEQ ID NO: 378482 - DNA, 75 bp, synthetic construct
  source 1..75: mol_type = other DNA
atgcaacggcgggttcgcgaatggaagctacagtatggtgcagagcaggaggtcatgttccgccagcgacatcag

SEQ ID NO: 378483 - DNA, 75 bp, synthetic construct
  source 1..75: mol_type = other DNA
cagatgctgaataccccgggaaacgtggatctgcaccggctgatgcgcttcctgggtattgtagtggtcaacaaa

SEQ ID NO: 378484 - DNA, 75 bp, synthetic construct
  source 1..75: mol_type = other DNA
ggcgttggataagtttgcaggcgtctgggatgaaaaatacccgcaaatcagcaagagctggcgcacacactggga

SEQ ID NO: 378485 - DNA, 75 bp, synthetic construct
  source 1..75: mol_type = other DNA
aaaaatcagcctaaatcgggttccaatacccgcaacggctactcgacaaaaaccgtcgctactgctgatggcccg

SEQ ID NO: 378486 - DNA, 75 bp, synthetic construct
  source 1..75: mol_type = other DNA
gaaacccggggcggttcagacgaaaaacagttgcaggctctggctaacgaactggccaaaaatctcaaaacccct

SEQ ID NO: 378487 - DNA, 75 bp, synthetic construct
  source 1..75: mol_type = other DNA
atggagcaggttgtagaatggcaaaacagaccactggatgctgtttaccccattgtttatcttgactgtatcgtc

SEQ ID NO: 378488 - DNA, 75 bp, synthetic construct
  source 1..75: mol_type = other DNA
caaagttctggctgaatgtactgacggaactgaaaaatcgcagcctgaacgatatccttatcgcctgcgtggacg

SEQ ID NO: 378489 - DNA, 75 bp, synthetic construct
  source 1..75: mol_type = other DNA
acggacatccgcaaagtgatctatacgacgaatgccatcgagtcgctaaacagcgtgatccgccatgcgatcaaa

SEQ ID NO: 378490 - DNA, 75 bp, synthetic construct
  source 1..75: mol_type = other DNA
gacctgaaagcgatttatcaggctcccacggaagaggcaggccagcaggcactggaagcgttcgctgcggcctgg

SEQ ID NO: 378491 - DNA, 75 bp, synthetic construct
  source 1..75: mol_type = other DNA
aaaatcagtccagaccaggagttaactcccgcaacggttattccacaaagaccgttatcacaggcgacggtccac

SEQ ID NO: 378492 - DNA, 75 bp, synthetic construct
  source 1..75: mol_type = other DNA
ccactgtacttggtgaactgatagatctgattggcaacattgcactaggtgatgccaaagcgcggtctgctgacg

SEQ ID NO: 378493 - DNA, 75 bp, synthetic construct
  source 1..75: mol_type = other DNA
tgaagatattgcgggtttctgtgcgtcagtagacattgatgaagttgctaaacttgattatgtgctgacacctgg

SEQ ID NO: 378494 - DNA, 75 bp, synthetic construct
  source 1..75: mol_type = other DNA
ttaactatcggtgcttcagatgaatctgccgatacaatcttacctttcctgctaaatcgtgttagttcggtttat

SEQ ID NO: 378495 - DNA, 75 bp, synthetic construct
  source 1..75: mol_type = other DNA
tggagagctaccataatccgtggcaatacagcccaatgtctgctccggaaggggatgattcattgttgattgaaa

SEQ ID NO: 378496 - DNA, 75 bp, synthetic construct
  source 1..75: mol_type = other DNA
tggagagttatcacaacccgtggcaatacaacccgttgactgctcaggaaggggacgattccctgttgattgaag

SEQ ID NO: 378497 - DNA, 75 bp, synthetic construct
  source 1..75: mol_type = other DNA
ctccagttgtgcatagtacatatggtacgcaacagcctgcggttcgtggcgtggaaagactataaagcggtaacc

SEQ ID NO: 378498 - DNA, 75 bp, synthetic construct
  source 1..75: mol_type = other DNA
tcccagaaatggacgatgccgttgaaggactggcgaatggcaatgagccgctttattatcgagttcggtgaccgc

SEQ ID NO: 378499 - DNA, 75 bp, synthetic construct
  source 1..75: mol_type = other DNA
ggtaaagaaaaatcagacccgtattactgggatggataaccagatcttctcgttgtatgccaaagggatgaccac

SEQ ID NO: 378500 - DNA, 75 bp, synthetic construct
  source 1..75: mol_type = other DNA
aaagcggtatatcaggccccgacagaggaagcggcgttgatggcgttggataagtttgcaggcgtctgggatgaa

SEQ ID NO: 378501 - DNA, 75 bp, synthetic construct
  source 1..75: mol_type = other DNA
caaagttctggctgggtgtactgactgagctgaaaaatcgtggccttcaggacatcctgattgcctgcgtggacg

SEQ ID NO: 378502 - DNA, 75 bp, synthetic construct
  source 1..75: mol_type = other DNA
tggcaaaaccgaccactggatgctgtttaccccattgtttatcttgactgtatcgtcctgaaagttcggcatgac

SEQ ID NO: 378503 - DNA, 75 bp, synthetic construct
  source 1..75: mol_type = other DNA
actcggtgaaaaaagtggtgtggctggcaatccagtctgcgtcccagaaatggacgatgccgttgaaggactggc

SEQ ID NO: 378504 - DNA, 75 bp, synthetic construct
  source 1..75: mol_type = other DNA
actcgatgaaaaaagtggtgtggctggcaatccagtctgcgtcccggaaatggacgatgccgttgaaggactggc

SEQ ID NO: 378505 - DNA, 75 bp, synthetic construct
  source 1..75: mol_type = other DNA
aaacagcgtaatacgtcaggcgatcaaaaagcgtaaagtctttccaacggatgattctgtacgtaaagtgattta

SEQ ID NO: 378506 - DNA, 75 bp, synthetic construct
  source 1..75: mol_type = other DNA
gcgttcaaagaactgtatggcgcagatgtttcaccggcactgatatcaaaggttaccgatgccgtgatggagcag

SEQ ID NO: 378507 - DNA, 75 bp, synthetic construct
  source 1..75: mol_type = other DNA
aatcgaccgttggatgcactgtatcccattgtttatcttgactgtattgtggttaaggttcgtcacggcgggagg

SEQ ID NO: 378508 - DNA, 75 bp, synthetic construct
  source 1..75: mol_type = other DNA
aacaccgtctccggcgatgacattattaacgccgccgaacacggacaggcgctggtgatttccggttccagcact

SEQ ID NO: 378509 - DNA, 75 bp, synthetic construct
  source 1..75: mol_type = other DNA
aagcggcgttgatggcgttggataagtttgcaggcgtctgggatgaaaaatacccgcaaatcagcaagagctggc

SEQ ID NO: 378510 - DNA, 75 bp, synthetic construct
  source 1..75: mol_type = other DNA
ccttcaaagaataattgaagagattaactattggttgaatgataaagtcatcaatttcactaactataagttata

SEQ ID NO: 378511 - DNA, 75 bp, synthetic construct
  source 1..75: mol_type = other DNA
tttgatatcgacctggcgaaggagttgtgcaaacgcatcaatacgcaatgtacgtttgtcgaaaacccactggat

SEQ ID NO: 378512 - DNA, 75 bp, synthetic construct
  source 1..75: mol_type = other DNA
ttctctgtcgatcactgatgaacgtaaaaaagccatctctttcagtgacaaactcttcaatactcccgcattcct

SEQ ID NO: 378513 - DNA, 75 bp, synthetic construct
  source 1..75: mol_type = other DNA
aggggaaagccgacggcattaaaattatccccctcagtgaagtggcgacgaaggacgatttttttaatatcaaaa

SEQ ID NO: 378514 - DNA, 75 bp, synthetic construct
  source 1..75: mol_type = other DNA
tcgcgattacattgactcacttcgcgaaaacatggccaagtcgaaaggacgcaataactttaataatctgtttct

SEQ ID NO: 378515 - DNA, 75 bp, synthetic construct
  source 1..75: mol_type = other DNA
cgatggtagctggacaaccagcgtacccgccgccgatctcaacgcgttacgcgacggtgacgctacggtgcaggc

SEQ ID NO: 378516 - DNA, 75 bp, synthetic construct
  source 1..75: mol_type = other DNA
tgatttaattattctcgatgagtgtcatcgtttttttacatcagataaagctttgtcatctgatgcccgtatctt

SEQ ID NO: 378517 - DNA, 75 bp, synthetic construct
  source 1..75: mol_type = other DNA
cggaactatgtttttctgcgcgatacggataatcgccttcgtatggtttccgcaaataaattcagggggctgaat

SEQ ID NO: 378518 - DNA, 75 bp, synthetic construct
  source 1..75: mol_type = other DNA
acagcgcgaaatccctgttgaagattactgggattgctgtaagacggcatataaaccctatgacgtgtttgtggt

SEQ ID NO: 378519 - DNA, 75 bp, synthetic construct
  source 1..75: mol_type = other DNA
tctcaaatccacgcagatgatgagcgtgattgatgcgattggtgaagggccggtggatggtcctgaaataataat

SEQ ID NO: 378520 - DNA, 75 bp, synthetic construct
  source 1..75: mol_type = other DNA
taaatacagcaaggatgttttcagactttacagttcccatcatgtacagaatgcgcaggagtcttccgttgattc

SEQ ID NO: 378521 - DNA, 75 bp, synthetic construct
  source 1..75: mol_type = other DNA
ttaccaatatttacgggattaattatgatgaaatacttgattatgcggaaaagaaaaaactgcttaaagacggaa

SEQ ID NO: 378522 - DNA, 75 bp, synthetic construct
  source 1..75: mol_type = other DNA
ggacaggatccgcgagataaacggctggcttagcacagaggttattcaattcaaaaattactctttagacaccaa

SEQ ID NO: 378523 - DNA, 75 bp, synthetic construct
  source 1..75: mol_type = other DNA
cctcgacatttatcccgcatccgtggctttcacagcagaatttcagccgctttgtgctggactttctggtgttcg

SEQ ID NO: 378524 - DNA, 75 bp, synthetic construct
  source 1..75: mol_type = other DNA
agcagccgccgcgccccccaaaccacaccgccgcaccggcgcagagcatggaagcattcacctttggtgagccaa

SEQ ID NO: 378525 - DNA, 75 bp, synthetic construct
  source 1..75: mol_type = other DNA
gatgccgctgcagaaaaggctcagtgaattaaacaactggttggctgatgaaattatacttttttcaagctacgc

SEQ ID NO: 378526 - DNA, 75 bp, synthetic construct
  source 1..75: mol_type = other DNA
cgttggtatgagccaccagtgagtttcgacggcctggcgcgaaccttccgcgccgccgtacaccacagctcaccg

SEQ ID NO: 378527 - DNA, 75 bp, synthetic construct
  source 1..75: mol_type = other DNA
ggggatgtggagaaatcggctaaagtatttgtgcgaaatgagttattgccgttgcaaaaacgattaatagaaatt

SEQ ID NO: 378528 - DNA, 75 bp, synthetic construct
  source 1..75: mol_type = other DNA
gcgcctggcctgcggggacggtgacggttgccgtgtccggggaaagtagtgccggaaatccggtgagcatcactc

SEQ ID NO: 378529 - DNA, 75 bp, synthetic construct
  source 1..75: mol_type = other DNA
ttggaggctggttgcttggcccgttagcctggctgttagtcgccttgttaagtacgacactggcgctgttgctgt

SEQ ID NO: 378530 - DNA, 75 bp, synthetic construct
  source 1..75: mol_type = other DNA
atgagcaagaaaaaagggaaaacaccgcaacctgcggaaaaaacaatcaccgccagcgctccgaaaatggaggca

SEQ ID NO: 378531 - DNA, 75 bp, synthetic construct
  source 1..75: mol_type = other DNA
ccagccataacgtgcaggttaataccgcgctgccgggcatcaccattaatccggtggcgacggacgatattatca

SEQ ID NO: 378532 - DNA, 75 bp, synthetic construct
  source 1..75: mol_type = other DNA
gcagcggtacgcgggatatcaccattgatgccaacctgccggggctgcgggtggataccgtggcgggcgatgata

SEQ ID NO: 378533 - DNA, 75 bp, synthetic construct
  source 1..75: mol_type = other DNA
ccagcacctacatccctcacccgctactcagccagcaggctttttcgcgttttgtgcaggactatctggtttttg

SEQ ID NO: 378534 - DNA, 75 bp, synthetic construct
  source 1..75: mol_type = other DNA
ggaagctggagcataacggttccggcggcagatctggcaactctgccagacggtgcggcgaacgtgcaggccagt

SEQ ID NO: 378535 - DNA, 75 bp, synthetic construct
  source 1..75: mol_type = other DNA
atagtgttgtgtgatggtctgggtgaaaaccggctgaacgatggctcattattcaccgatgacggtgaggcactt

SEQ ID NO: 378536 - DNA, 75 bp, synthetic construct
  source 1..75: mol_type = other DNA
gcacaggctagagagatagcaaaacaatatgagcaaggggctatctcgcttgcacgtatgaatagccaaatgaaa

SEQ ID NO: 378537 - DNA, 75 bp, synthetic construct
  source 1..75: mol_type = other DNA
ttaaaactgttagacgttggatcaagcattagtgcaatgcaccgtctctctgtagcggaacaatacaaagctatt

SEQ ID NO: 378538 - DNA, 75 bp, synthetic construct
  source 1..75: mol_type = other DNA
atgagtaaagcaaatgaattcgttgctaatagttttgccaatgctgagacacaaggcgagttatatagccgcgcg

SEQ ID NO: 378539 - DNA, 75 bp, synthetic construct
  source 1..75: mol_type = other DNA
cagacctcgtcgtctgattgtctggccacgcagagtactggcagtctggggagggctaagatttatcaggcggcc

SEQ ID NO: 378540 - DNA, 75 bp, synthetic construct
  source 1..75: mol_type = other DNA
cacaggcaaggcaacagcaacaaatagcagcacgtaaggagaaagctgaactaaagcttttagacgttggatcaa

SEQ ID NO: 378541 - DNA, 75 bp, synthetic construct
  source 1..75: mol_type = other DNA
tcgttcctgaccaatataaaggcgctggaactgcaacaactacacctgataatagtcattctctttttaacacaa

SEQ ID NO: 378542 - DNA, 75 bp, synthetic construct
  source 1..75: mol_type = other DNA
tgcccttgaacgcgccgggcacaacttcccctcacaggaaatgatccttcacctgaaggcactttctgccgggga

SEQ ID NO: 378543 - DNA, 75 bp, synthetic construct
  source 1..75: mol_type = other DNA
ggttttccggtgaagaggccgcctcgcttgccgtgggcatgcgtgccggttcccttctgacggcgctggatagtc

SEQ ID NO: 378544 - DNA, 75 bp, synthetic construct
  source 1..75: mol_type = other DNA
agaaagcccgtggtgcccttgccatcacttacggtctggcggacttcgtcaccacagcaggcccctgggtgctgg

SEQ ID NO: 378545 - DNA, 75 bp, synthetic construct
  source 1..75: mol_type = other DNA
cacttacggtctggcggacttcgtcaccacagcaggcccctgggtgctgggtatgctcattgtgttttttttgct

SEQ ID NO: 378546 - DNA, 75 bp, synthetic construct
  source 1..75: mol_type = other DNA
tgaaaggccggacggtggcagcggaagtgatgaaaaccagtccggaaatcctccgcacctaccacgatgaaggcg

SEQ ID NO: 378547 - DNA, 75 bp, synthetic construct
  source 1..75: mol_type = other DNA
gtgcccgcatgacctttcaggatgccctgaaaacgctcagcgacggcggtgaggcgtggctacaggagcgtctga

SEQ ID NO: 378548 - DNA, 75 bp, synthetic construct
  source 1..75: mol_type = other DNA
gcattagtgcaatgcaccgtctctctgtagcggaacaatacaaagctattgcacaggctagagagatagcgaaac

SEQ ID NO: 378549 - DNA, 75 bp, synthetic construct
  source 1..75: mol_type = other DNA
cgacccattatgcgtcggtaatgtctgccgaatatgcgcagaaattagagaaagaagatcgtcaggaacaactcg

SEQ ID NO: 378550 - DNA, 75 bp, synthetic construct
  source 1..75: mol_type = other DNA
gcgtccgcaaactggataatcataccgttgagttccgactcgcccagccggatgcttcttttttgtggcacctgg

SEQ ID NO: 378551 - DNA, 75 bp, synthetic construct
  source 1..75: mol_type = other DNA
atgatgatttctggcgtggtaagccgttgatgccacaagtggtggtggatttaggctctggcggtacaggacgat

SEQ ID NO: 378552 - DNA, 75 bp, synthetic construct
  source 1..75: mol_type = other DNA
acgcggtgagcgttacacgccagcaactattcgcgaacgtctgacaatgcgcgattttatggatactttacgtgc

SEQ ID NO: 378553 - DNA, 75 bp, synthetic construct
  source 1..75: mol_type = other DNA
cgtgtcccaatgtaattaaagagattttgtatcgcgcggctgaacgtatgcaaatgccgctagtactggtggcta

SEQ ID NO: 378554 - DNA, 75 bp, synthetic construct
  source 1..75: mol_type = other DNA
tagtaacttcccctatttcgacagtctgcaatttgccgataacgttaaaagcgtccgcaagctggataatcatac

SEQ ID NO: 378555 - DNA, 75 bp, synthetic construct
  source 1..75: mol_type = other DNA
tggatcagatgaaagatgtgcgtgaacgtgcaaccaaatcttatgatgaagctgaatatgtagttgataagaaaa

SEQ ID NO: 378556 - DNA, 75 bp, synthetic construct
  source 1..75: mol_type = other DNA
taaagcctatgcacctgttaagggaggatcagggaatgccgccactatgggcgctctgttatttggaggtgctac

SEQ ID NO: 378557 - DNA, 75 bp, synthetic construct
  source 1..75: mol_type = other DNA
aaagactctattacaagcctaaaagaattcacagaaaatatcaagccagctaaattaaggtttgatagtgtcact

SEQ ID NO: 378558 - DNA, 75 bp, synthetic construct
  source 1..75: mol_type = other DNA
tcaggcaatcgccgcgcctgaatcccccccgcatgctgatatccgcgacagcggttttgtctattgcgtcagcgg

SEQ ID NO: 378559 - DNA, 75 bp, synthetic construct
  source 1..75: mol_type = other DNA
atggaataaaatattgggacggttctattattgcttctggggttcaaaacaaaaaaaactggaaaattaaaatag

SEQ ID NO: 378560 - DNA, 75 bp, synthetic construct
  source 1..75: mol_type = other DNA
acgtgcaaccaaatcttatgatgaagctgaatatgtagttgataagaaaactggtaaaggcgtatggaagggcgg

SEQ ID NO: 378561 - DNA, 75 bp, synthetic construct
  source 1..75: mol_type = other DNA
tccgtacactttcagaaaccggtatcgacattatgcagccggatgttggctggtgcggtggcttaaccacgctgg

SEQ ID NO: 378562 - DNA, 75 bp, synthetic construct
  source 1..75: mol_type = other DNA
tggaaattgccgcaatcgccaaatccagggggcactggtggtgccgcacggttcgtctgtttactcccaccatgc

SEQ ID NO: 378563 - DNA, 75 bp, synthetic construct
  source 1..75: mol_type = other DNA
cctgaaatggatcgaagagtgcctgccgccacagcagtatgaaggttatcgcgaactgaaacgcaacgcgccagc

SEQ ID NO: 378564 - DNA, 75 bp, synthetic construct
  source 1..75: mol_type = other DNA
ttgagatccaaatccgcaccaaacagatgcatgaagatgcagaactgggcgttgctgcgcactggaaatacaaag

SEQ ID NO: 378565 - DNA, 75 bp, synthetic construct
  source 1..75: mol_type = other DNA
cgtagtggattgttgcgtgatatcaccactattctcgccaatgagaaggtgaatgtgcttggcgttgccagccgc

SEQ ID NO: 378566 - DNA, 75 bp, synthetic construct
  source 1..75: mol_type = other DNA
tggcggatgccaacgtagtcagcgaagatgtgctgcgtgagagcgtcggtaagtcggtcgtgaatctcattcacg

SEQ ID NO: 378567 - DNA, 75 bp, synthetic construct
  source 1..75: mol_type = other DNA
aagccgttcgcttttgctgaactgctggcgcgggtgcgcaccttactgcggcgcggagcggcggtgattatcgaa

SEQ ID NO: 378568 - DNA, 75 bp, synthetic construct
  source 1..75: mol_type = other DNA
cagacatatacccgccagttggggttaaatcatattaacgttcagcaaggaccgatattcagccatagcgccatg

SEQ ID NO: 378569 - DNA, 75 bp, synthetic construct
  source 1..75: mol_type = other DNA
tgtatgttcgcctttgctgttaaccggtgataaacccttgaagacacccgaagacctggctaaacatactttgtt

SEQ ID NO: 378570 - DNA, 75 bp, synthetic construct
  source 1..75: mol_type = other DNA
ctgccgccgcagcaatatgaaggttatcgcgaactaaaacgcaacgcacctgcgggaatgatggtcaccagtggt

SEQ ID NO: 378571 - DNA, 75 bp, synthetic construct
  source 1..75: mol_type = other DNA
ttgacttacaggcctcataacaatggagaacatcatgaccctaccaaaaatcaaacaggttcgcgcctggtttac

SEQ ID NO: 378572 - DNA, 75 bp, synthetic construct
  source 1..75: mol_type = other DNA
aacaaaaattcattgaggcagcaggaaagcgatataaccgcataattgacgctatgggggatacccctgtcgatc

SEQ ID NO: 378573 - DNA, 75 bp, synthetic construct
  source 1..75: mol_type = other DNA
caacctgcaagtgctggggcgcgtgctgggtaaactcaaccaggtgccggatgttatcgacgcgcgtcggttgca

SEQ ID NO: 378574 - DNA, 75 bp, synthetic construct
  source 1..75: mol_type = other DNA
tcgagatccccacattctgggatgatgacgagggcgttgaacttataaaacaactttcctggtatatctctgcaa

SEQ ID NO: 378575 - DNA, 75 bp, synthetic construct
  source 1..75: mol_type = other DNA
aattgaatgtgaagagttgcttccttcatcttcactctctccccgcaaacttaaacgggtaatagagatgtggat

SEQ ID NO: 378576 - DNA, 75 bp, synthetic construct
  source 1..75: mol_type = other DNA
tcgtctggacgcgtggcaccactgaatccatcaacatggtggcgcaatgctatgcccgtccgcgtctgcaaccgg

SEQ ID NO: 378577 - DNA, 75 bp, synthetic construct
  source 1..75: mol_type = other DNA
gatggcggtgatgccgttcaaacataataatctgcggcttctgggactgagtaacaaaatcctgctggctgatga

SEQ ID NO: 378578 - DNA, 75 bp, synthetic construct
  source 1..75: mol_type = other DNA
aagaagttccgttcctggaaaaggatgattgtgttccccgcgccagcggggataaaccgggtaaaaacacggtct

SEQ ID NO: 378579 - DNA, 75 bp, synthetic construct
  source 1..75: mol_type = other DNA
agcggcaggcgcgtggcggaaacagtatcattttgctttctgctacgttatctcaacagcagcgcgacaaactcg

SEQ ID NO: 378580 - DNA, 75 bp, synthetic construct
  source 1..75: mol_type = other DNA
gcaccggaagcgaaagccgctgttgattttgcatcggaaagaaacctgccgttaatgaccagtgacgtactgaaa

SEQ ID NO: 378581 - DNA, 75 bp, synthetic construct
  source 1..75: mol_type = other DNA
tgatatggcaccggaagcgaaagccgctgttgattttgcatcggaaagaaacctaccgttaatgaccagtgacat

SEQ ID NO: 378582 - DNA, 75 bp, synthetic construct
  source 1..75: mol_type = other DNA
gctggcattggtggtattggtaaggggctggaaaatacagcgagtgcggtttcgagggctgttcgtggtgatatg

SEQ ID NO: 378583 - DNA, 75 bp, synthetic construct
  source 1..75: mol_type = other DNA
tccagcctgctggcctttgatttcgccggtgttcatcatagcgatatggtaacgctgctggcggagtatggcatt

SEQ ID NO: 378584 - DNA, 75 bp, synthetic construct
  source 1..75: mol_type = other DNA
aatgctgtagataaggcgactgattcggcggggaatatcagcgttgagaagtttattaacacgctacaccggaac

SEQ ID NO: 378585 - DNA, 75 bp, synthetic construct
  source 1..75: mol_type = other DNA
ccagccttgctggtggagaagatattgatccgttacaaacggtaatttctgctggcattggtggtattggtaagg

SEQ ID NO: 378586 - DNA, 75 bp, synthetic construct
  source 1..75: mol_type = other DNA
catcgtcgcatgtatatttccattgatagcgatgtttctaccagatgatgttattgttgcgggcaaacctattga

SEQ ID NO: 378587 - DNA, 75 bp, synthetic construct
  source 1..75: mol_type = other DNA
tatgcctaataatgtcggggggtttggggatgtggagaaggctagtaaggtttttgtgataaatgaattaattcc

SEQ ID NO: 378588 - DNA, 75 bp, synthetic construct
  source 1..75: mol_type = other DNA
accacgcagccgtatcagttcacgaaaggcagcatttttcacctgatggagccggatattaatcaagaaatctac

SEQ ID NO: 378589 - DNA, 75 bp, synthetic construct
  source 1..75: mol_type = other DNA
tccgcaatgaacttatcccactccagactcgtattgccgaactcaataactggttagaaaaggaagtcattaagt

SEQ ID NO: 378590 - DNA, 75 bp, synthetic construct
  source 1..75: mol_type = other DNA
tggagccggatattaatcaggagctgtacggcctgccggaatatctcagcgcccttaattctgcctggctgaatg

SEQ ID NO: 378591 - DNA, 75 bp, synthetic construct
  source 1..75: mol_type = other DNA
cgagtcgctgcgttcggccatgcgcgattcaaaggggctcgggaattttaaaaacctgtttttctacgcacccaa

SEQ ID NO: 378592 - DNA, 75 bp, synthetic construct
  source 1..75: mol_type = other DNA
ctactggtttgtgcaatacggtatgacaacccagccgtatcagttcacgaaaggcagcatctttcatctgttgga

SEQ ID NO: 378593 - DNA, 75 bp, synthetic construct
  source 1..75: mol_type = other DNA
cgccgccatacatcatagctcaccgattgcagtgaagtgcaacattctgaccagcacctacatccctcacccgct

SEQ ID NO: 378594 - DNA, 75 bp, synthetic construct
  source 1..75: mol_type = other DNA
aatgccaaataatgtcgggggatttggggatgtggagaaagccagcagggtctttgtccgtaatgagctaattcc

SEQ ID NO: 378595 - DNA, 75 bp, synthetic construct
  source 1..75: mol_type = other DNA
tacattaacggcagccatgcaggcttcatcatgtacatgaccgatgccgcgcagaaccaggaggatgtgaacaac

SEQ ID NO: 378596 - DNA, 75 bp, synthetic construct
  source 1..75: mol_type = other DNA
tccgcaatgagcttatcccgttacaggacaggatccgggaaataaacggctggctcggtcaggaggtcatccgct

SEQ ID NO: 378597 - DNA, 75 bp, synthetic construct
  source 1..75: mol_type = other DNA
atgggaaagagtaaaaaaaaccgcgtagcggcgatgaatcagatccagcataaaagccagacttcagccgaagca

SEQ ID NO: 378598 - DNA, 75 bp, synthetic construct
  source 1..75: mol_type = other DNA
ctgcggcgacgaaccagatccagcataaaagccaagcttcagccgaagcattcagcttcggtgatcccattccag

SEQ ID NO: 378599 - DNA, 75 bp, synthetic construct
  source 1..75: mol_type = other DNA
tgacattctggattacgtcgaatgcatcagtaacggcagatggtatgagccaccggtcagctttaccggtctggc

SEQ ID NO: 378600 - DNA, 75 bp, synthetic construct
  source 1..75: mol_type = other DNA
atgccgtccgcgcctggtcggctgtagataatcaggatgtcgttgccacactcattgtgaatgagtatcgggagc

SEQ ID NO: 378601 - DNA, 75 bp, synthetic construct
  source 1..75: mol_type = other DNA
aaggaactcagtgaggcaaaacaggctgtcattctcaacgcaccacgccaccagaaactgaaggaaattagtgaa

SEQ ID NO: 378602 - DNA, 75 bp, synthetic construct
  source 1..75: mol_type = other DNA
cggtatcggtctggcgctggttatcgcggatattgtggcgttaatctggctgttgaccaatcgacgtttacgcgc

SEQ ID NO: 378603 - DNA, 75 bp, synthetic construct
  source 1..75: mol_type = other DNA
ggaacagccagaacgagtgtaatgctgcggttaaggctttcaaatccattaaggccactaaaaagcatggtatct

SEQ ID NO: 378604 - DNA, 75 bp, synthetic construct
  source 1..75: mol_type = other DNA
aggaagttgaaggtggtactgtctgcctgccagaagttgcgcttttcgcagctggtcatcgtacaaataagcagg

SEQ ID NO: 378605 - DNA, 75 bp, synthetic construct
  source 1..75: mol_type = other DNA
tgatgatgtcagtcgtgcacgccagaagctgttccgcttcctcgataacaaattcgattctgaaaaataccgaaa

SEQ ID NO: 378606 - DNA, 75 bp, synthetic construct
  source 1..75: mol_type = other DNA
caccattgcacagcagaactgattccgccggatccagaaaacaccgcacacgctgggctgtggataggtaaaagc

SEQ ID NO: 378607 - DNA, 75 bp, synthetic construct
  source 1..75: mol_type = other DNA
atcgcagacgggtccgaacggtgcaagccagtcataccgctatgtcgatttcaacaaacgatggaaggcggccta

SEQ ID NO: 378608 - DNA, 75 bp, synthetic construct
  source 1..75: mol_type = other DNA
ttttcttaccgtctttccgggtttcttccgacagaccgaactgatgcacactggcgattttcggcgactttccca

SEQ ID NO: 378609 - DNA, 75 bp, synthetic construct
  source 1..75: mol_type = other DNA
ttttctgttgctgttggcgcaagtggttttactttgctggcaaccgtggctgtggctgaacggtgaatccgttag

SEQ ID NO: 378610 - DNA, 75 bp, synthetic construct
  source 1..75: mol_type = other DNA
cggtatcggtctggcgctggtagtggcggatattgtggcgttaatctggctgctgaccaatcgacgtttacgcgc

SEQ ID NO: 378611 - DNA, 75 bp, synthetic construct
  source 1..75: mol_type = other DNA
gttttactttgctggcaaccgtggctgtggctgaacggtgaatccgttagcggtatcggtctggcgctggtagtg

SEQ ID NO: 378612 - DNA, 75 bp, synthetic construct
  source 1..75: mol_type = other DNA
gtgaaagcagtgattatttcaaaaccacaattaaaactactcagctttcggaagaactactgaataaattgccac

SEQ ID NO: 378613 - DNA, 75 bp, synthetic construct
  source 1..75: mol_type = other DNA
gctttctggcatccgcacggtatgccggggctgttttactggttattgatgatccccgcgcatctgtttattttt

SEQ ID NO: 378614 - DNA, 75 bp, synthetic construct
  source 1..75: mol_type = other DNA
tacaaatcccgcatcagtcatatatcgatgcgggattttataaccgggtaacaggtgaggaaaaaacggagacgc

SEQ ID NO: 378615 - DNA, 75 bp, synthetic construct
  source 1..75: mol_type = other DNA
tatcctttttaggaaaggggggggatgacattctaagcgttcgccaatcaagattgccatctatttactctagag

SEQ ID NO: 378616 - DNA, 75 bp, synthetic construct
  source 1..75: mol_type = other DNA
ggcaaagacgtggagccgggataccgcgctccgtggaaccagtttaacagtctggcgactgagtttttccgcaaa

SEQ ID NO: 378617 - DNA, 75 bp, synthetic construct
  source 1..75: mol_type = other DNA
ttcaggtttctctggtgtgaccgcccccttgccatcagtttcagagcaaacggcaccgaaaaacagaaaagaatt

SEQ ID NO: 378618 - DNA, 75 bp, synthetic construct
  source 1..75: mol_type = other DNA
atcagatcttatgggtgaagggtgagctccaaaaagcgatcgttgagcttaagcgcgatggcctgcgtcatgcag

SEQ ID NO: 378619 - DNA, 75 bp, synthetic construct
  source 1..75: mol_type = other DNA
cgattatcttccgcacgatggacatcggcggcgataaaagcattccttatctgaatattccccaggaagagaacc

SEQ ID NO: 378620 - DNA, 75 bp, synthetic construct
  source 1..75: mol_type = other DNA
gtggccgatttacgtagtaacgcgcagatgttcgatatcgatgtttcggcgctggagcagctcagagtcgaaatc

SEQ ID NO: 378621 - DNA, 75 bp, synthetic construct
  source 1..75: mol_type = other DNA
atgaccgctaaaaatatctccctcgaccgctataaacagcgtttctttggcgactttctggagcttcccggcctg

SEQ ID NO: 378622 - DNA, 75 bp, synthetic construct
  source 1..75: mol_type = other DNA
cgggcagatgaaataaattctcgacagttttctgcgctggatgtactggtcaaagccgatttattaacagtaaaa

SEQ ID NO: 378623 - DNA, 75 bp, synthetic construct
  source 1..75: mol_type = other DNA
cttgctggcagggtgtgattcaccaaaagatgctaataagcaaaactttgaaaaagctattaatactcgactaga

SEQ ID NO: 378624 - DNA, 75 bp, synthetic construct
  source 1..75: mol_type = other DNA
ggtttggctaccagctgcactgcggcaattcgctggtgggggcacgccgtcaggtgttcaacaagagcgagctga

SEQ ID NO: 378625 - DNA, 75 bp, synthetic construct
  source 1..75: mol_type = other DNA
gctgagggcgcattttcaatttcataatgaattgagtctttttgccgaggttcatcatgcaacgatgttcagtat

SEQ ID NO: 378626 - DNA, 75 bp, synthetic construct
  source 1..75: mol_type = other DNA
cgtagattatagagtcaagtgtactggcatggggcatgcgaatcagtcattagttaatcaacttccattattaag

SEQ ID NO: 378627 - DNA, 75 bp, synthetic construct
  source 1..75: mol_type = other DNA
attatattcctaattgcgagtattccgattttctaaatcgaattccgacagtttcttgggatggtaatgtctttc

SEQ ID NO: 378628 - DNA, 75 bp, synthetic construct
  source 1..75: mol_type = other DNA
tacagttcccggtgatgcgccagtacgaagcggatacctggtacgatcaaaacggtcgcattatctttaccccaa

SEQ ID NO: 378629 - DNA, 75 bp, synthetic construct
  source 1..75: mol_type = other DNA
aatgcttatttattattcaatgaagtacatgatcaaactcggtttggtataaatgtttatgggccttaccaacaa

SEQ ID NO: 378630 - DNA, 75 bp, synthetic construct
  source 1..75: mol_type = other DNA
ggctgtgaagggatgcaaaacttcctcaatgcgcagcagaactacccggtactgcgcggggtgcagaccaacttg

SEQ ID NO: 378631 - DNA, 75 bp, synthetic construct
  source 1..75: mol_type = other DNA
agtcactgaagccgcagaacaggccactggcgatctgtttgccgacgagggcgtggtgcgtgaagagtcttcgct

SEQ ID NO: 378632 - DNA, 75 bp, synthetic construct
  source 1..75: mol_type = other DNA
catgcaagacaattgattggcgttttgaggaagtttgtcaaccagcctaaacgtcttggtaatttacaagggcaa

SEQ ID NO: 378633 - DNA, 75 bp, synthetic construct
  source 1..75: mol_type = other DNA
ggctgtggattgttgaagcacacgatcaggaagaaggaacgctggatccgctggcgctctccttactgaccgcgc

SEQ ID NO: 378634 - DNA, 75 bp, synthetic construct
  source 1..75: mol_type = other DNA
ttgatgagttacgtttgtttgcggggatatttgatgataattcaacacctgcactgcacgcaaggcttccagctt

SEQ ID NO: 378635 - DNA, 75 bp, synthetic construct
  source 1..75: mol_type = other DNA
tgggatctggagttctgcgacttgtttgccgagcgtggcggggtttttgtttttgttctggaaacccccccggcg

SEQ ID NO: 378636 - DNA, 75 bp, synthetic construct
  source 1..75: mol_type = other DNA
ggcgacttatttctgaacatggtgtttcagggttattgcaccctgatggagtttatgatgatagcaaggcggggg

SEQ ID NO: 378637 - DNA, 75 bp, synthetic construct
  source 1..75: mol_type = other DNA
agctggagcgtattgagttattggccaaaattgcccatgtgtacgaaagtgaccagcgcgagaaaacaatcgctt

SEQ ID NO: 378638 - DNA, 75 bp, synthetic construct
  source 1..75: mol_type = other DNA
tgagaacgggggcgacggtgatgcgttcgtcagggaagaacgcgaagcaatggacgttgtgttacaggcgctgga

SEQ ID NO: 378639 - DNA, 75 bp, synthetic construct
  source 1..75: mol_type = other DNA
accacgaagataacgacccggtagatatcctcatcacgatggcggcggtcgatgccaacactcaccaggaagtgg

SEQ ID NO: 378640 - DNA, 75 bp, synthetic construct
  source 1..75: mol_type = other DNA
atgaaattacgtgattcgctggcggaaaataaatccatccgcctgcaggctgaagcagagacatggcaggaagcg

SEQ ID NO: 378641 - DNA, 75 bp, synthetic construct
  source 1..75: mol_type = other DNA
cgtcggcggcggcggcggtaatgctgttgaacacatggtgcgtgagcgcattgaaggtgttgaattcttcgcggt

SEQ ID NO: 378642 - DNA, 75 bp, synthetic construct
  source 1..75: mol_type = other DNA
gacagacgatgagctggaaaccgtcatgcagcggctggacgatgcctttgaatatggtgcggatgtcagcattgt

SEQ ID NO: 378643 - DNA, 75 bp, synthetic construct
  source 1..75: mol_type = other DNA
ccagatgaatgaactgcgccttagcgctctgcgggtgcagcaaatggtgatgaatctggggctggagcagatcca

SEQ ID NO: 378644 - DNA, 75 bp, synthetic construct
  source 1..75: mol_type = other DNA
ggcaaacgcggcggcaccgggctggggctgactatcagtagccgtctggcccaggcgatgggcggcgaactgagc

SEQ ID NO: 378645 - DNA, 75 bp, synthetic construct
  source 1..75: mol_type = other DNA
aacaccgacaggcacgggcggaagcagaaaaagccagccaggcaaaatcggcgtttctggcggcgatgagccatg

SEQ ID NO: 378646 - DNA, 75 bp, synthetic construct
  source 1..75: mol_type = other DNA
ttatcgctccggggctggcgatgccgcacgggcggccggaagagggtgttaagaaaaccggttttgcgctggtga

SEQ ID NO: 378647 - DNA, 75 bp, synthetic construct
  source 1..75: mol_type = other DNA
ttaaaattttacggcgtaacccgctgattcaacagaatgaaatcgccgatattctgcaaatcagccgctcatatt

SEQ ID NO: 378648 - DNA, 75 bp, synthetic construct
  source 1..75: mol_type = other DNA
atgaactggaaaccgtcggacgatgcctttgaatatggtgcggatgtcagcgttattcacggcgttgttcgtgaa

SEQ ID NO: 378649 - DNA, 75 bp, synthetic construct
  source 1..75: mol_type = other DNA
gtctgaaatgggctacgcaatgatgggttctggtgtggcgagcggtgaagatcgtgcggaagaagctgctgaaat

SEQ ID NO: 378650 - DNA, 75 bp, synthetic construct
  source 1..75: mol_type = other DNA
aaaatgttgccaatgaggcattctgtcagacgtttacacagggaaagcggactatttcacaacaccgccttcatt

SEQ ID NO: 378651 - DNA, 75 bp, synthetic construct
  source 1..75: mol_type = other DNA
cttctggctggaccggaaaccatgctggaactgctggatgaaattaagcgccaggaagacacaaatattgatgcc

SEQ ID NO: 378652 - DNA, 75 bp, synthetic construct
  source 1..75: mol_type = other DNA
gaccttgaagagtttaaaagcgcacttagcaaggtttgtggtttccatgcaacagcagtcacatctctttcatat

SEQ ID NO: 378653 - DNA, 75 bp, synthetic construct
  source 1..75: mol_type = other DNA
aacctgtcagttaacgctttcctggttaacctgatagagaactcactaaacaatattgctaatgacggaacacag

SEQ ID NO: 378654 - DNA, 75 bp, synthetic construct
  source 1..75: mol_type = other DNA
ttcagagcgggagttcactgcctacatcggccttgtgcctaaacaaacggatacaggcggcaggattcggctccg

SEQ ID NO: 378655 - DNA, 75 bp, synthetic construct
  source 1..75: mol_type = other DNA
cagtttgaagtcgcacgccaaatggctgtagcatttgccgggctgaaaacgcgctacccgcatatcgacacactc

SEQ ID NO: 378656 - DNA, 75 bp, synthetic construct
  source 1..75: mol_type = other DNA
cataccatcgaccgtttgcgtatcgccacgcgtctcaacgatcagcgtccggcagaacttccccctcttaacgtg

SEQ ID NO: 378657 - DNA, 75 bp, synthetic construct
  source 1..75: mol_type = other DNA
tatggccttcgcggagcaggggatcactgaattgtccaagcatgtggactcactgattaccatcccgaacgataa

SEQ ID NO: 378658 - DNA, 75 bp, synthetic construct
  source 1..75: mol_type = other DNA
gactggccaggatttgacgaacagaaaaacgcagagaacaacgctcgttatatcgcagcttttaaccctgaagta

SEQ ID NO: 378659 - DNA, 75 bp, synthetic construct
  source 1..75: mol_type = other DNA
tgcgcatgacatgatttttggtgaccttgaaacagaagagccgtgggagcgccttgatgcgtatctgaagcaggt

SEQ ID NO: 378660 - DNA, 75 bp, synthetic construct
  source 1..75: mol_type = other DNA
acgggggcgacggtgacgcattcgtcagggaagaacgcgaagcgatggacgttgtgttacaggcgctggacgggg

SEQ ID NO: 378661 - DNA, 75 bp, synthetic construct
  source 1..75: mol_type = other DNA
ccgtactctggcggcttccggcatcaaagacttccgtaaaatgctggctcactgcgaagcggttacaccgattcg

SEQ ID NO: 378662 - DNA, 75 bp, synthetic construct
  source 1..75: mol_type = other DNA
aaaaggacggatagcagggaggatcgccgtgctaaaaaaatcagtctgacatctgaaggtatgttttttattcag

SEQ ID NO: 378663 - DNA, 75 bp, synthetic construct
  source 1..75: mol_type = other DNA
ttccgccagtgatctggagtcttttgataatatttatgctatctataatttgccgttcttatttaaagatcaggc

SEQ ID NO: 378664 - DNA, 75 bp, synthetic construct
  source 1..75: mol_type = other DNA
gtgacggcgggcagtccggagaaggcgtttgtggaagggcctgtaacgtcccgcaggggcggggaggtgacgcat

SEQ ID NO: 378665 - DNA, 75 bp, synthetic construct
  source 1..75: mol_type = other DNA
cccgttaccggtcttactgacccgttatgccgcccagagtctgtatgcgccgttaagaaccgtggagccggtgcc

SEQ ID NO: 378666 - DNA, 75 bp, synthetic construct
  source 1..75: mol_type = other DNA
gccggtacgggtggtgtacagcggggacgtcagcacacagcgcgacagtcagaccgtcagacgcagcgggcagac

SEQ ID NO: 378667 - DNA, 75 bp, synthetic construct
  source 1..75: mol_type = other DNA
gtggttccaccagccacccggcggtcgaggcgtatcgggcgctggaaccgggggttaatcagtctcgattactgg

SEQ ID NO: 378668 - DNA, 75 bp, synthetic construct
  source 1..75: mol_type = other DNA
cggcgaaagtttcctcgtcagtctggcgctggcgctggcgctttcggatctggtcagccataaaacgcgtattga

SEQ ID NO: 378669 - DNA, 75 bp, synthetic construct
  source 1..75: mol_type = other DNA
aatggcaacagcagttaaaccatgccgggcaaaaacttaatgcgcttccggcgatctcgttgactttaaccgctg

SEQ ID NO: 378670 - DNA, 75 bp, synthetic construct
  source 1..75: mol_type = other DNA
ggtaaaaactacaccaccacgctggacgcctccggtaactggagcgtcggcattccggcggcagatgtcacggcg

SEQ ID NO: 378671 - DNA, 75 bp, synthetic construct
  source 1..75: mol_type = other DNA
gtctgcaaaaagcccaggcgcagtttgacaccgcgctacaggccagcgtctttgacgatcagcaggcgttccttg

SEQ ID NO: 378672 - DNA, 75 bp, synthetic construct
  source 1..75: mol_type = other DNA
cacccgacagggggaaattcgccagcaactgaagcaggatgcagataatcgtcaacagcaacaggccctgatgca

SEQ ID NO: 378673 - DNA, 75 bp, synthetic construct
  source 1..75: mol_type = other DNA
atatttgatgaagattacgacgaggtggggcaatggcatcttgagcaatatgtcgaggtgttaaatgaaaattaa

SEQ ID NO: 378674 - DNA, 75 bp, synthetic construct
  source 1..75: mol_type = other DNA
tatatgtatcaggcacaaagcgatctgtcgattgcaaagtttgctgatatgaatgaggcatctaaggagtcaact

SEQ ID NO: 378675 - DNA, 75 bp, synthetic construct
  source 1..75: mol_type = other DNA
aaatacagcaaatgtcaaatacgttaaacctattaacgagtgcacgttctgatattcagtcactgcaatacagaa

SEQ ID NO: 378676 - DNA, 75 bp, synthetic construct
  source 1..75: mol_type = other DNA
aaatctcttaacaagtgctcgttccgatatgcagtcactgcaattcagaactatttcagcaatatcccttggtaa

SEQ ID NO: 378677 - DNA, 75 bp, synthetic construct
  source 1..75: mol_type = other DNA
atgcacacaattaacgtcaaaaccgccactcgtgaatcagccgaacaatttaaaacagataaattccagcgctat

SEQ ID NO: 378678 - DNA, 75 bp, synthetic construct
  source 1..75: mol_type = other DNA
ggcgacgcaagaatcttgattacctgattaccgaacgctgctacgtttctgtcaaggaagaacgcgcaaatgata

SEQ ID NO: 378679 - DNA, 75 bp, synthetic construct
  source 1..75: mol_type = other DNA
gagtagctcagacaaggataagaaagtcaaacttcctccagaagtgattgactatataaaagatcctcgtaatgg

SEQ ID NO: 378680 - DNA, 75 bp, synthetic construct
  source 1..75: mol_type = other DNA
ctgaatgcaccagatgacaaaactatcgtctggacgcgcggcaccactgaatccatcaacatggtggcacaatgc

SEQ ID NO: 378681 - DNA, 75 bp, synthetic construct
  source 1..75: mol_type = other DNA
gggtacgccttgatgcacctggtctctgatctgcatgaaccacaccaccctgcatccaacgttgaagtgttctga

SEQ ID NO: 378682 - DNA, 75 bp, synthetic construct
  source 1..75: mol_type = other DNA
aacacctgaacggtggtgaaaaactccgcgcgtggttcgggtatgaatttattgctactgccttttatttcgggc

SEQ ID NO: 378683 - DNA, 75 bp, synthetic construct
  source 1..75: mol_type = other DNA
agaacaccacgccaacctcgtcccctggctgatggtcgcccaacaaacgggggccaaagtggtgaaattgccgct

SEQ ID NO: 378684 - DNA, 75 bp, synthetic construct
  source 1..75: mol_type = other DNA
ccgacaggcatcggcgtgctgtatggcaaaccagaactgctggaagcgatgtcgccctggctgggcggcggcaaa

SEQ ID NO: 378685 - DNA, 75 bp, synthetic construct
  source 1..75: mol_type = other DNA
agcaactggatattgatttctatgctttttcaggtcacaaactgtatggcccgacaggcatcggcgtgctgtatg

SEQ ID NO: 378686 - DNA, 75 bp, synthetic construct
  source 1..75: mol_type = other DNA
aaatctccgcgatggtctttgaacagcataaatcggcccgtactgagctggagaaactgcaagcgcaggccagcg

SEQ ID NO: 378687 - DNA, 75 bp, synthetic construct
  source 1..75: mol_type = other DNA
gccgtgctaaaaaaatcagtctgacatcagatggtctgtcctttattcagaacgtcaatattgcacaaagtctgc

SEQ ID NO: 378688 - DNA, 75 bp, synthetic construct
  source 1..75: mol_type = other DNA
gctgaaagacgcttgaactatcttgtttcgacaaaagaaaaaggaatgtattatgtaacatttagtgctgaggca

SEQ ID NO: 378689 - DNA, 75 bp, synthetic construct
  source 1..75: mol_type = other DNA
gcgaacgtaatcgaacctatgcgtaatggcgatgtaaaaggaatgattcataaagctacactacgcaaactagaa

SEQ ID NO: 378690 - DNA, 75 bp, synthetic construct
  source 1..75: mol_type = other DNA
atgcgcgctgaaaaccatccgctgttcccccttgtggtggtggccgaccacatcagcatgctgtgcggactggat

SEQ ID NO: 378691 - DNA, 75 bp, synthetic construct
  source 1..75: mol_type = other DNA
cattagcagaacagatacaattagcattaaatttaggttatgaggctgtaccagatgaagaggcatatactgggg

SEQ ID NO: 378692 - DNA, 75 bp, synthetic construct
  source 1..75: mol_type = other DNA
gatggcacctggagcgtcggtgttccggcggcagatgtcacaaactggcctgcggggacggtcaatattgccgtc

SEQ ID NO: 378693 - DNA, 75 bp, synthetic construct
  source 1..75: mol_type = other DNA
tgttgtgggtacggaaccatgaaccgcagcattttgcacgtattgcgacggtgttactgccgaaagactatttgc

SEQ ID NO: 378694 - DNA, 75 bp, synthetic construct
  source 1..75: mol_type = other DNA
tttacgatgaagaaggaactccgttcattgaggcgcgtttaccagctttacactcgatacaactattaagtgtgt

SEQ ID NO: 378695 - DNA, 75 bp, synthetic construct
  source 1..75: mol_type = other DNA
tttctgttcttgaaaaatttgcagagcagcccaaacggttgggggacttgcaggggcaatatttgtctcttgaaa

SEQ ID NO: 378696 - DNA, 75 bp, synthetic construct
  source 1..75: mol_type = other DNA
aaattaaattacaggacaagatagaccgccagctagaggaaataggcggctatgaatatgagggaacatatgaag

SEQ ID NO: 378697 - DNA, 75 bp, synthetic construct
  source 1..75: mol_type = other DNA
cccgctatacttacaccgagatcgcggaaagattcggcgtagaaattagtaccgcttcgcgtatctggtcgggga

SEQ ID NO: 378698 - DNA, 75 bp, synthetic construct
  source 1..75: mol_type = other DNA
aaagtgcggcctgacgcgggcaaatatgccggaactggtggaaggttgtgatgtctctgccacgctcgaaccgtg

SEQ ID NO: 378699 - DNA, 75 bp, synthetic construct
  source 1..75: mol_type = other DNA
catcagcatgctgtgcggactggataatgactggctgcgtcttgccggtcggggagcgtttccgctctttggcct

SEQ ID NO: 378700 - DNA, 75 bp, synthetic construct
  source 1..75: mol_type = other DNA
attctggaaacgttgccgcaaagtgatgaactcccgcactgcgaagaaactgtggtattggaaaactggcggcag

SEQ ID NO: 378701 - DNA, 75 bp, synthetic construct
  source 1..75: mol_type = other DNA
ccatcggtgtgattagccacgttgaagcgatgaaagagcgtattccggtgcagatcaaagtgaagaagatcaacg

SEQ ID NO: 378702 - DNA, 75 bp, synthetic construct
  source 1..75: mol_type = other DNA
ggattacggacgtttcacccgttcgatgctgctttcgcaggggcaatttgctgccttcctcaatgctaaaccgaa

SEQ ID NO: 378703 - DNA, 75 bp, synthetic construct
  source 1..75: mol_type = other DNA
gaacactctgctgctctgacgcatactcgtcagcagattgaggaagtaaacactcgcttacaaagcacaatggcg

SEQ ID NO: 378704 - DNA, 75 bp, synthetic construct
  source 1..75: mol_type = other DNA
caacttgccgatgtcaaaaccatttgcgagcaggaagcgcgtatcaaaacgctggaagttcaacgtgcgcagtta

SEQ ID NO: 378705 - DNA, 75 bp, synthetic construct
  source 1..75: mol_type = other DNA
gcacttactcaacagtggcgagctgtcacagccagcctcaatatcaccttgcagccacagaacgacattcaaccg

SEQ ID NO: 378706 - DNA, 75 bp, synthetic construct
  source 1..75: mol_type = other DNA
agcgtgggcgcaggagtccgtttctgctaaagcgatgtcgatgcttgctgataaagccatcgtttcccgtttaac

SEQ ID NO: 378707 - DNA, 75 bp, synthetic construct
  source 1..75: mol_type = other DNA
attgtcggtttacatggcgacgaagttaaagtcgccattaccgcgccgccggttgacggccaggccaacagccat

SEQ ID NO: 378708 - DNA, 75 bp, synthetic construct
  source 1..75: mol_type = other DNA
gccgcgtttctggccacgcgaatttttcccgctgttctacgcggtgcacctggccgtcatcggactgatggtgat

SEQ ID NO: 378709 - DNA, 75 bp, synthetic construct
  source 1..75: mol_type = other DNA
ggattacgggcgcttcacccgttcgatgctgctttcgcaggggcaatttgctgccttcctgaatgccaaaccaaa

SEQ ID NO: 378710 - DNA, 75 bp, synthetic construct
  source 1..75: mol_type = other DNA
agtttgaagtgaaaggtgaagcgtaccgtgcattctggagccagaatcgggcgcgtaaccaacccgacggtaatt

SEQ ID NO: 378711 - DNA, 75 bp, synthetic construct
  source 1..75: mol_type = other DNA
gacccatgatgaacaggaactgtttgaagtcattaataaaaaattactggcgcatcttgatgatgtcaactcata

SEQ ID NO: 378712 - DNA, 75 bp, synthetic construct
  source 1..75: mol_type = other DNA
caacaaatgaccagaatacggcgcttcagcgaaatgcgctggaatgtgcaggatgtgaactgttttttgaagaca

SEQ ID NO: 378713 - DNA, 75 bp, synthetic construct
  source 1..75: mol_type = other DNA
aatcccgtaaacaaattgcactgatatttgatattggcctgtccaccctttatcgttattttcctgccgcatcct

SEQ ID NO: 378714 - DNA, 75 bp, synthetic construct
  source 1..75: mol_type = other DNA
cgtgcttgctaatcctgtcgggttgttcaacgtcttctcagcctgatgcgccaaaaccgccgtatgtcggcatgg

SEQ ID NO: 378715 - DNA, 75 bp, synthetic construct
  source 1..75: mol_type = other DNA
aagccgtcgcaaccaaccaatgctgttggtggatattgccgttccgcgcgatgttgagccggaagttggcaaact

SEQ ID NO: 378716 - DNA, 75 bp, synthetic construct
  source 1..75: mol_type = other DNA
ccacgcaaccagtcaatcaacagatttatcgtattctccgtcgcgacattgtgcattgtctgattgcaccgggta

SEQ ID NO: 378717 - DNA, 75 bp, synthetic construct
  source 1..75: mol_type = other DNA
cgtcgtccaatgatgcaatggtgggctgactttgtgaaaaaggcagatagtggtagcctcactgaagttgaattt

SEQ ID NO: 378718 - DNA, 75 bp, synthetic construct
  source 1..75: mol_type = other DNA
cgcgaatacctgattgccgcactgaaagaaatctcctgcgtggagcaggtttttgactctgaaaccaactacatt

SEQ ID NO: 378719 - DNA, 75 bp, synthetic construct
  source 1..75: mol_type = other DNA
aactggacttgcagggcatttccgacaagctggacggcgtaaaagtggtctatgtttgcagccccaacaacccga

SEQ ID NO: 378720 - DNA, 75 bp, synthetic construct
  source 1..75: mol_type = other DNA
gaacaggtgctggtcagccgtggcgcggacgaaggtattgaactgctgattcgcgctttttgcgaaccgggtaaa

SEQ ID NO: 378721 - DNA, 75 bp, synthetic construct
  source 1..75: mol_type = other DNA
tgcactttatgctggttatgctggctgcatggggcattagctggggagccagattaatcatggagcaggccgttc

SEQ ID NO: 378722 - DNA, 75 bp, synthetic construct
  source 1..75: mol_type = other DNA
gctaccggtcgttggtcagctgcgcaacgttggcgtaccgtggctggtcggtgcgatggccgtggtgtatatcgg

SEQ ID NO: 378723 - DNA, 75 bp, synthetic construct
  source 1..75: mol_type = other DNA
gtgggatcagggcattatcttacgagatcagaataaacaaccttcgttaagcggctgcctgcgaattactgtcgg

SEQ ID NO: 378724 - DNA, 75 bp, synthetic construct
  source 1..75: mol_type = other DNA
ggcgaatgcttatctttatagcgttgatgatctgcaaagcatcatttcgcacaacctggcgcaacgtaaagccgc

SEQ ID NO: 378725 - DNA, 75 bp, synthetic construct
  source 1..75: mol_type = other DNA
ggcgataaaaccggaagcggcgcggaaggcaatatcggctggctgtccgaccctcacggcttgccctgcatcccc

SEQ ID NO: 378726 - DNA, 75 bp, synthetic construct
  source 1..75: mol_type = other DNA
cattgagtgcgcggtggcgcgtcgggcggcgagcatgattaccgaaagccagtgctaccaactggaacaaaatct

SEQ ID NO: 378727 - DNA, 75 bp, synthetic construct
  source 1..75: mol_type = other DNA
cggcggacaaatcgccaccaaaacctgacgtgaaagtctataccctgccgcaaaacgccacgctaaccggatcgg

SEQ ID NO: 378728 - DNA, 75 bp, synthetic construct
  source 1..75: mol_type = other DNA
atggctatcgatgggctgaaagaggtccaggagagtgccatgcgaatcacaaccggcctcagtacgtatcagaac

SEQ ID NO: 378729 - DNA, 75 bp, synthetic construct
  source 1..75: mol_type = other DNA
ttttatcgcggtaacgcgcgagcagacgatctcgttcgcaataacggcgtcgcgtcgaacgccgtgcagctgcac

SEQ ID NO: 378730 - DNA, 75 bp, synthetic construct
  source 1..75: mol_type = other DNA
gccatcgactacgagcctgacggacggcgggtgaactaccgcacggcgggcgatcgcactggagacctggactga

SEQ ID NO: 378731 - DNA, 75 bp, synthetic construct
  source 1..75: mol_type = other DNA
ccagcagaacggtgtggaccgttattcaactgaggttgttgtgggagtgaatggtgtcatgcagatgctgggttc

SEQ ID NO: 378732 - DNA, 75 bp, synthetic construct
  source 1..75: mol_type = other DNA
atctttgaatcgctctctacggtgacggtactgctggttggcgcgggcgaaaccatcgagctggtggcacgtcat

SEQ ID NO: 378733 - DNA, 75 bp, synthetic construct
  source 1..75: mol_type = other DNA
agccggaagttggcaaactggcgaatgcttatctttatagcgttgacgatctgcaaagcatcatttcgcacaacc

SEQ ID NO: 378734 - DNA, 75 bp, synthetic construct
  source 1..75: mol_type = other DNA
atgatgccgcgccagagcattctgctgaaaatcctgctgcctgtgattatgctggtaacggtatggctgctgctg

SEQ ID NO: 378735 - DNA, 75 bp, synthetic construct
  source 1..75: mol_type = other DNA
cggcaacaaacagcaggagatcggctggctctcggataaccaggggctgccgtgtattcccggcgagcgtaaaag

SEQ ID NO: 378736 - DNA, 75 bp, synthetic construct
  source 1..75: mol_type = other DNA
ggttcacaggtgtacatcgagggccagttaaggacccggaaatggttcgatcagcagaatggtgttgatcgctac

SEQ ID NO: 378737 - DNA, 75 bp, synthetic construct
  source 1..75: mol_type = other DNA
acctgctgatgaaagtgatcgccccctacccgctctcgacaccggttgccgatattgcagcccaggcgttaagcc

SEQ ID NO: 378738 - DNA, 75 bp, synthetic construct
  source 1..75: mol_type = other DNA
tggagaaagtaaccagcggtggtgctctgacggcttcgagttcggctgtgacaacggtgaaaaactgcgggtcac

SEQ ID NO: 378739 - DNA, 75 bp, synthetic construct
  source 1..75: mol_type = other DNA
aaaccgctacggcggcctgccgggaatgtcagatccgggtagggcagaggccattatcgggagagttcaggccag

SEQ ID NO: 378740 - DNA, 75 bp, synthetic construct
  source 1..75: mol_type = other DNA
agcgcggtgaaggcggcgtatgataaagcctgtgaggcatatagcaggattaacaattcctcattccgattctat

SEQ ID NO: 378741 - DNA, 75 bp, synthetic construct
  source 1..75: mol_type = other DNA
tcgcggtcattgcagcgaaagcgatgtacaacaactggcggctgagtccggtgacgatcgcagcgtggtgattgg

SEQ ID NO: 378742 - DNA, 75 bp, synthetic construct
  source 1..75: mol_type = other DNA
accgcgaaagccctcgcccgccgtctcggtctgccgtttgttgccgttccgacgatcgccgctacctgcgccgcc

SEQ ID NO: 378743 - DNA, 75 bp, synthetic construct
  source 1..75: mol_type = other DNA
tatggcctgccgccactggcgggcagctttctgtatgaacacaagtgggacgatattcgcagggccattttgcgt

SEQ ID NO: 378744 - DNA, 75 bp, synthetic construct
  source 1..75: mol_type = other DNA
taaccgccgctggccgcgcgaagattgctgcggcgctggcggaacaaaagcagatagtgctgcaaacaatggtcg

SEQ ID NO: 378745 - DNA, 75 bp, synthetic construct
  source 1..75: mol_type = other DNA
gggagcggtggaacgccgcttcggcaacgagcttccggcgtctccagtagagtggctgacggataatggttcatg

SEQ ID NO: 378746 - DNA, 75 bp, synthetic construct
  source 1..75: mol_type = other DNA
atgctgggagcggtggaacgccgcttcggcaacgagcttccggcgtctccagtggagtggctgacggataatggt

SEQ ID NO: 378747 - DNA, 75 bp, synthetic construct
  source 1..75: mol_type = other DNA
agagatgaattaggacaagcaggtattcctggagcggcatcatatttttcctcacttactgcttccggtggtgct

SEQ ID NO: 378748 - DNA, 75 bp, synthetic construct
  source 1..75: mol_type = other DNA
tgcgacagttggtacacgtaacgtatttgaagtatctcccgatggtgcattatatgtagcacgtcgtaataatgc

SEQ ID NO: 378749 - DNA, 75 bp, synthetic construct
  source 1..75: mol_type = other DNA
attgctggataaggacggcgtactgatcgccattggcaagttcccggaaacctataagccgaagctgcctgccgg

SEQ ID NO: 378750 - DNA, 75 bp, synthetic construct
  source 1..75: mol_type = other DNA
gctaaccgtgcgactggggatcaataatgcgcaggccattcgcgacgtcttgttaaacagtagcgaacaggcgct

SEQ ID NO: 378751 - DNA, 75 bp, synthetic construct
  source 1..75: mol_type = other DNA
gcaccatgtacggcaacgcgttgctagttgccgaagaagcggaagcgattttgtccagacaagggcacaaagtga

SEQ ID NO: 378752 - DNA, 75 bp, synthetic construct
  source 1..75: mol_type = other DNA
gcgggttggcgaaatactgttgattgacgccagtgagaacccggaaccggaaacggaatcaaatccgtgggtcga

SEQ ID NO: 378753 - DNA, 75 bp, synthetic construct
  source 1..75: mol_type = other DNA
aaacgccagcgcaaaaatcgtaagcgtattaatcgtcttgtggagctctggcctgagttattcaaccgtgaaaat

SEQ ID NO: 378754 - DNA, 75 bp, synthetic construct
  source 1..75: mol_type = other DNA
tattccgcacattattgtcacctccgcaaccttgcgttcgctgaatagtttttcgcgtttgcaggagatgagtgg

SEQ ID NO: 378755 - DNA, 75 bp, synthetic construct
  source 1..75: mol_type = other DNA
ccggatcagaagtggcggcctgctgctgccggtattgctgcatatggaagctaccgcgctgggtttactgttggg

SEQ ID NO: 378756 - DNA, 75 bp, synthetic construct
  source 1..75: mol_type = other DNA
gccgtctttatccttgccccgctgaatgaggaaatcctgttccgtggtgtcatgctgaacgctgaaggatcccct

SEQ ID NO: 378757 - DNA, 75 bp, synthetic construct
  source 1..75: mol_type = other DNA
cggtggaatccattcattacctgccggtcacgctgacaccagatacgttgcgtgcagcgttcgaaaaagtggaat

SEQ ID NO: 378758 - DNA, 75 bp, synthetic construct
  source 1..75: mol_type = other DNA
acgcgtgtggcggcggcccatgccgtgcataacggtctgaccgtgctgccgcaaaccgagaagtttctccacggc

SEQ ID NO: 378759 - DNA, 75 bp, synthetic construct
  source 1..75: mol_type = other DNA
gtgacgatcgcagcgtggtgattggcgtcggcggcggcgcactactcgacaccgcgaaagccctcgcccgccgtc

SEQ ID NO: 378760 - DNA, 75 bp, synthetic construct
  source 1..75: mol_type = other DNA
gcggcgaagtgacaccacaggagcagaaagaggcagaaacccggctgatgatactgaatgagaagcgtaaacagc

SEQ ID NO: 378761 - DNA, 75 bp, synthetic construct
  source 1..75: mol_type = other DNA
aagaatttccgatcttcgctggctcaaaacccgtttccgcaatgggggcggcgacaggcctgcatgtgtatcaga

SEQ ID NO: 378762 - DNA, 75 bp, synthetic construct
  source 1..75: mol_type = other DNA
gtaaaaaatccccagtatcttctcgaagcaggtaaggcgctagaaaaagaaaatactaacgcttcccttgagcgg

SEQ ID NO: 378763 - DNA, 75 bp, synthetic construct
  source 1..75: mol_type = other DNA
caaaagcccgatgcagtgctggcgcgtgattacattgccacttttaaattgttgggtctgtacgacattgaacag

SEQ ID NO: 378764 - DNA, 75 bp, synthetic construct
  source 1..75: mol_type = other DNA
gaatatggtgacgttgtcagccaaatcacaggaatatttgacgcgagcgactcaacgatattatggtaaaacgcc

SEQ ID NO: 378765 - DNA, 75 bp, synthetic construct
  source 1..75: mol_type = other DNA
attaccgccgtgaaggataagctggatacgctgaaggccagcctgcctgaaggtgtcgagattgtcaccacctac

SEQ ID NO: 378766 - DNA, 75 bp, synthetic construct
  source 1..75: mol_type = other DNA
tcgatgattttcactatattgctaaagaagctcaagccgaactatcacgacaaataaaagatgccatagctaatg

SEQ ID NO: 378767 - DNA, 75 bp, synthetic construct
  source 1..75: mol_type = other DNA
tggcagaaattagaaaacagggcaaccgaaaagcatattcgtgttcagtttcataaccctgagcacaccatcagg

SEQ ID NO: 378768 - DNA, 75 bp, synthetic construct
  source 1..75: mol_type = other DNA
gtgattatatcgcaacctttaaactgctggggctgtatgatattgaacagtgctgggtttgtgcggcttcactac

SEQ ID NO: 378769 - DNA, 75 bp, synthetic construct
  source 1..75: mol_type = other DNA
tgcccttgtcgatcgcaacggaaaacacgacctttcagaactgcgctctctgcaggactggttcctgaaatttga

SEQ ID NO: 378770 - DNA, 75 bp, synthetic construct
  source 1..75: mol_type = other DNA
gggatcaaaagcccgataggtatcaaagtgtccgggactgttctgtccgatatcgacgcgacggcgcagagtatc

SEQ ID NO: 378771 - DNA, 75 bp, synthetic construct
  source 1..75: mol_type = other DNA
tatcgatgcaacggcacagagtatcgagacggtagccaaaaccgtgccgggcgtggtgtctgccctggctgagcg

SEQ ID NO: 378772 - DNA, 75 bp, synthetic construct
  source 1..75: mol_type = other DNA
cggtggctcatctgttgaaattgctgagtcagagtatatggtccgggccagcggttatcttcagactattgatga

SEQ ID NO: 378773 - DNA, 75 bp, synthetic construct
  source 1..75: mol_type = other DNA
cagtcgccaaccgtttccttgtgatgatggcagccctgttcctcagcgtctggggaacctggacaatcatcaata

SEQ ID NO: 378774 - DNA, 75 bp, synthetic construct
  source 1..75: mol_type = other DNA
gcgtggtgtctgccctggctgagcgacttgagggtgggcgctacatcgatatcgatatcaatcgggaaaaagcct

SEQ ID NO: 378775 - DNA, 75 bp, synthetic construct
  source 1..75: mol_type = other DNA
cggggtaactctgacttacgaggtcggatatttaatattgattttgattattgggatgaatcaaccttaaaaatt

SEQ ID NO: 378776 - DNA, 75 bp, synthetic construct
  source 1..75: mol_type = other DNA
tctgcccggcattggagagacgccgcaacatgatcaggaataccgggcgctttaccgtcagttactgccggaagt

SEQ ID NO: 378777 - DNA, 75 bp, synthetic construct
  source 1..75: mol_type = other DNA
gccagatatgatgaaatatctgcaaatcgggagccacacataactgatgatattggaatttacattgaagtcatt

SEQ ID NO: 378778 - DNA, 75 bp, synthetic construct
  source 1..75: mol_type = other DNA
aggtgtggagcctcgcagatttccggcatcatagtgcccaatacgggatacaaaaagttccctcagactggagac

SEQ ID NO: 378779 - DNA, 75 bp, synthetic construct
  source 1..75: mol_type = other DNA
cgtgatgaaatcacaaatacaattgaattatctttgctcacaacctctggcagggcaacaaatcaattgtttgaa

SEQ ID NO: 378780 - DNA, 75 bp, synthetic construct
  source 1..75: mol_type = other DNA
atgttacagcttctgcgcaaaacccgggaccgcattatccacctgctggtcacgctgtgggatcacctgttctga

SEQ ID NO: 378781 - DNA, 75 bp, synthetic construct
  source 1..75: mol_type = other DNA
ttcagtcccatatctgtgccacgcatcccctgaacggctgcacccgccaggctcatcgtcttaccctgcagatcg

SEQ ID NO: 378782 - DNA, 75 bp, synthetic construct
  source 1..75: mol_type = other DNA
tcgtctcttacgagttggtgatggtgtttttgttgattctgtgtcgctcatggtgctgccctgtaaagcaatgcg

SEQ ID NO: 378783 - DNA, 75 bp, synthetic construct
  source 1..75: mol_type = other DNA
aaaacgtgatggcgatgcggtagaacgtgcaatgacgcaacatttgcaggaaatcagcgaatccgtggccagatc

SEQ ID NO: 378784 - DNA, 75 bp, synthetic construct
  source 1..75: mol_type = other DNA
cgtgcaatgacgcaacatttgcaggaaatcagcgaatccgtgcgccagatccgccaggaaaacagcgactggttt

SEQ ID NO: 378785 - DNA, 75 bp, synthetic construct
  source 1..75: mol_type = other DNA
atgaaaacttatgccgttatcacactcattaccgcagcatcgttgctgagtggctgtaacagtgaaccctccgaa

SEQ ID NO: 378786 - DNA, 75 bp, synthetic construct
  source 1..75: mol_type = other DNA
aaatgtaatgtgacggttgttgtcaataatgataaggccaccgcagatgtcacaacggtcaaaacggatgatggc

SEQ ID NO: 378787 - DNA, 75 bp, synthetic construct
  source 1..75: mol_type = other DNA
ctcttttagctctggagaaattcgcattctgaattgtggggattgcccgtcccctttagggcttttatcgcgttt

SEQ ID NO: 378788 - DNA, 75 bp, synthetic construct
  source 1..75: mol_type = other DNA
gtcgggtaaaaatgcgcgcgacgttatcaccgctgtgagagataaactggatacgctgaaggccagcctgccgga

SEQ ID NO: 378789 - DNA, 75 bp, synthetic construct
  source 1..75: mol_type = other DNA
atggcggaaattggtatttttgtcggcactatgtacggaaattcgctgttagtggcggaagaagcagaagcaatt

SEQ ID NO: 378790 - DNA, 75 bp, synthetic construct
  source 1..75: mol_type = other DNA
gtctgcgttcgctcaccccagtcacttacttatgtaagctcctggggattcactcgcttgtcgccttcctgcaac

SEQ ID NO: 378791 - DNA, 75 bp, synthetic construct
  source 1..75: mol_type = other DNA
ttcgtttcacttccagaggacgtgaatacgaagttgacgaacgcctgattaccacaatcgacaaacaccgttcag

SEQ ID NO: 378792 - DNA, 75 bp, synthetic construct
  source 1..75: mol_type = other DNA
ccgggttgatgaagccctgctgatcctgatgagcctgccgttcgccctggttggcgggatatggttcctgtactg

SEQ ID NO: 378793 - DNA, 75 bp, synthetic construct
  source 1..75: mol_type = other DNA
cgattgacaacctcagttacaagcttcttgaagagtttatcgttgttgctgtcgtttgcgcactgttcctctggc

SEQ ID NO: 378794 - DNA, 75 bp, synthetic construct
  source 1..75: mol_type = other DNA
atcagtctgccagaagtaaaacaagctcttagctcatctaaccaggaagccggtggctcatctgttgaaattgct

SEQ ID NO: 378795 - DNA, 75 bp, synthetic construct
  source 1..75: mol_type = other DNA
atgtcgaaaagcaatccgtctgaagtgaaattagccgtaccgacatccggtggcttttctgggctgaaatcactg

SEQ ID NO: 378796 - DNA, 75 bp, synthetic construct
  source 1..75: mol_type = other DNA
ggtcggtcgccaggcattaacggctattattgttttaggcgcaatctggctgctaaatgattaccgtggcgttcc

SEQ ID NO: 378797 - DNA, 75 bp, synthetic construct
  source 1..75: mol_type = other DNA
agcaagcacagtgggttaataatattgctcagcgtatcgagcctgctataggggctaactgtgctgtaacaatac

SEQ ID NO: 378798 - DNA, 75 bp, synthetic construct
  source 1..75: mol_type = other DNA
gacggcacttacttctgcgccaccaacgtggcgcgggtgaatcttatccgacaggtacaggagccacgcagatga

SEQ ID NO: 378799 - DNA, 75 bp, synthetic construct
  source 1..75: mol_type = other DNA
atgaaagttattaatgcacctgctgcaagaagtgtgagaatcgccggagttgaaattatcgatagtgtcaaagcg

SEQ ID NO: 378800 - DNA, 75 bp, synthetic construct
  source 1..75: mol_type = other DNA
tcgtgttgttatcgttttatgggatgatcctttaaagccgcaatcgctcatggaatttcttaatttcatagttga

SEQ ID NO: 378801 - DNA, 75 bp, synthetic construct
  source 1..75: mol_type = other DNA
cacgacctttcagaactgcgttctctgcaggactggttcctgaaatttgagctgaaaaccatcccgaacgtggct

SEQ ID NO: 378802 - DNA, 75 bp, synthetic construct
  source 1..75: mol_type = other DNA
tttacgctctccttgtactgaagaaattgccgtgttccaggccttttcccgagtgattcgtgaagcgggtaagcg

SEQ ID NO: 378803 - DNA, 75 bp, synthetic construct
  source 1..75: mol_type = other DNA
aatctacgctgcaggaagtcgcccacacccatgaagaactcgccgcaattggcctgaaaaaccagtacctggtta

SEQ ID NO: 378804 - DNA, 75 bp, synthetic construct
  source 1..75: mol_type = other DNA
gaacacggtctgattatgctgatgggtaaaggtggcgtgggtaaaaccacgatggctgctgccatcgctgtcagg

SEQ ID NO: 378805 - DNA, 75 bp, synthetic construct
  source 1..75: mol_type = other DNA
gtcgggtaaaaacgcgcgtgacgtaatcacggcagtgagggataaactggagacactgaaggccagtctgccgga

SEQ ID NO: 378806 - DNA, 75 bp, synthetic construct
  source 1..75: mol_type = other DNA
ggcgaaggcgaagtggcgggcggggtggtgatcctgcgctccggcaaaaacgcccgagaagtgatcgccgccgtg

SEQ ID NO: 378807 - DNA, 75 bp, synthetic construct
  source 1..75: mol_type = other DNA
gcaggcactgcgccagttgccgatcctgacgccgatgaagcagcaaatcaccctggcagacgtggccgacgttaa

SEQ ID NO: 378808 - DNA, 75 bp, synthetic construct
  source 1..75: mol_type = other DNA
agaagtcgatgagatcattcatcaagctttaagttgcaaaagtacgcaaaattgcgattctctggcgcgtaaaac

SEQ ID NO: 378809 - DNA, 75 bp, synthetic construct
  source 1..75: mol_type = other DNA
ccggcatgacaattgacaagattattgatgaactcgacaggacagtccgtttaccgggtctggcaaacctctggg

SEQ ID NO: 378810 - DNA, 75 bp, synthetic construct
  source 1..75: mol_type = other DNA
ctgttcctctggcatgtccgttctgccctggtggcgattatttctctgccacttggcctgtgtatcgcctttatc

SEQ ID NO: 378811 - DNA, 75 bp, synthetic construct
  source 1..75: mol_type = other DNA
tactgccccaactggccacactattcgccttcttcagcttcccggagcctggagcagcttcatcgaaagtaaccc

SEQ ID NO: 378812 - DNA, 75 bp, synthetic construct
  source 1..75: mol_type = other DNA
ctaaccgtatagcgctcgttccggtactggcttctgagccagccggtattgaaaaactcagagagttggcgagtt

SEQ ID NO: 378813 - DNA, 75 bp, synthetic construct
  source 1..75: mol_type = other DNA
gatggcggcagccattgccgtcagactggccgaaatgggatttgatgtccatctgaccacctcagatccagcagc

SEQ ID NO: 378814 - DNA, 75 bp, synthetic construct
  source 1..75: mol_type = other DNA
accgtggtctcagcaaattgagccacagtatgttaacgagttaagaacattatcaggcagccgttacgatctggt

SEQ ID NO: 378815 - DNA, 75 bp, synthetic construct
  source 1..75: mol_type = other DNA
actccaggcaaagctattgttagcgcaaaagtgagtgatgtagatacagaagttaaggctactactgttgagttt

SEQ ID NO: 378816 - DNA, 75 bp, synthetic construct
  source 1..75: mol_type = other DNA
ggtgataatcagagtgcgacatatacaattagtactcctgacaagattgtaatagctgtggataaaattaatcgg

SEQ ID NO: 378817 - DNA, 75 bp, synthetic construct
  source 1..75: mol_type = other DNA
gcgggggcggcgttcacacgtatttaaaaccgactggttccagcatcccccatgcactgaagaacaggccgaatg

SEQ ID NO: 378818 - DNA, 75 bp, synthetic construct
  source 1..75: mol_type = other DNA
ctcagtctcgattatcgtcactggataatctccgtcaggcttccttactccgaacgcccaccgcgtccgtcccgc

SEQ ID NO: 378819 - DNA, 75 bp, synthetic construct
  source 1..75: mol_type = other DNA
ttatcaaaaagaactagctgatgtattcgatacatggggggcagcaaataaatataaacattatgagactcgtaa

SEQ ID NO: 378820 - DNA, 75 bp, synthetic construct
  source 1..75: mol_type = other DNA
atttgacatagttacaaaaaatgaaattcctaataatggaagtaatagtaaggtcaatgtgaacacagctaacgc

SEQ ID NO: 378821 - DNA, 75 bp, synthetic construct
  source 1..75: mol_type = other DNA
ggggcgctgccaatagttatgaaggttataaaggtaaaaatacaataacagcatggactcagcaaactgcggctg

SEQ ID NO: 378822 - DNA, 75 bp, synthetic construct
  source 1..75: mol_type = other DNA
taccaatggtagcggtaaggcgactgtaaccctgaaatcggataaaccaggccaggtcgtcgtgtctgctaaaac

SEQ ID NO: 378823 - DNA, 75 bp, synthetic construct
  source 1..75: mol_type = other DNA
gattttggggcattggataaaactaaagtaacgaccgatcagagtggttatgctactgtaaaactgtcatccagt

SEQ ID NO: 378824 - DNA, 75 bp, synthetic construct
  source 1..75: mol_type = other DNA
atttgacatagttacgcaaaatgaaattcctagtaatggaagtaatagcaaggtcgacgtgaaaaaagctaacgg

SEQ ID NO: 378825 - DNA, 75 bp, synthetic construct
  source 1..75: mol_type = other DNA
tacaggcaacagggggcaatggaaaatacacatggaaatccagtaatactaaaattgcttctgttgataactcgg

SEQ ID NO: 378826 - DNA, 75 bp, synthetic construct
  source 1..75: mol_type = other DNA
acattcaaatctgactggttccagcatgaaccatgcactgaagaacaggccgaatggctgattcagaactaccgc

SEQ ID NO: 378827 - DNA, 75 bp, synthetic construct
  source 1..75: mol_type = other DNA
gggggctgggatgacagcggaactcggggttgtttattacctgccgtttcttgcgcttattagcgtgaacttagg

SEQ ID NO: 378828 - DNA, 75 bp, synthetic construct
  source 1..75: mol_type = other DNA
gtgggccgatctctatcgccaagggggctgggatgacagcggaactcggggttgtttattacctgccgtttcttg

SEQ ID NO: 378829 - DNA, 75 bp, synthetic construct
  source 1..75: mol_type = other DNA
atagccgcaggtccggttgcaaacttcatttttgctatctttgcctactggctggtttttattattggtgtgcct

SEQ ID NO: 378830 - DNA, 75 bp, synthetic construct
  source 1..75: mol_type = other DNA
atgtcatcgccctgatccctttgggcggttatgtcaaaatgctggatgagcgtgctgaaccggttgttccggagc

SEQ ID NO: 378831 - DNA, 75 bp, synthetic construct
  source 1..75: mol_type = other DNA
catttggcagcgaccagcggcgggatgtaaagctcgatttacgtcagtgggcgtttgagccagacaaagaagatc

SEQ ID NO: 378832 - DNA, 75 bp, synthetic construct
  source 1..75: mol_type = other DNA
accgggtaatggtaaggcgattggttttgtcggtattgagccgaaagtcattcctttgccagatgagtataaagt

SEQ ID NO: 378833 - DNA, 75 bp, synthetic construct
  source 1..75: mol_type = other DNA
ggtatctgtcagtcgctttggacggcgggtacgttcgtccgcacatcctctgccgtcctccatcatgatggcgct

SEQ ID NO: 378834 - DNA, 75 bp, synthetic construct
  source 1..75: mol_type = other DNA
cagcaggcacgggcggcgttctcatgcattcaaatatgactggtaccagcatgccccatgcactgaagaacaggc

SEQ ID NO: 378835 - DNA, 75 bp, synthetic construct
  source 1..75: mol_type = other DNA
acgaacctgaggagtaagagaccaggcgggggagaatccctcgccacctctgatgtgtcaggcatcctcaacgca

SEQ ID NO: 378836 - DNA, 75 bp, synthetic construct
  source 1..75: mol_type = other DNA
agagcttcgtgaaaacgggcactgttgcaaagttagcgatgaggcagccttttgtcttattcaaaggccttacat

SEQ ID NO: 378837 - DNA, 75 bp, synthetic construct
  source 1..75: mol_type = other DNA
taccggctgaagtatggccgcgaggctacgaacatgctgaacgcaccttgctcttctggcggggagctaaatttc

SEQ ID NO: 378838 - DNA, 75 bp, synthetic construct
  source 1..75: mol_type = other DNA
gcataccggctgaagtatggccgcgagactacgaacatgctgaacgcaccttgctcttctggcggagagctaaat

SEQ ID NO: 378839 - DNA, 75 bp, synthetic construct
  source 1..75: mol_type = other DNA
tcatttaatattgtttcaggaactgcagttttaagtgccaatagtgccaataccaatggtagcggtaaggcgact

SEQ ID NO: 378840 - DNA, 75 bp, synthetic construct
  source 1..75: mol_type = other DNA
ggatgttgggacttgaaccgaagatcacggcggtgcggagtccggagagtaacggaatagcagagagcttcgtga

SEQ ID NO: 378841 - DNA, 75 bp, synthetic construct
  source 1..75: mol_type = other DNA
ttgcattaagtggaacatctgacattaactataaacatgatgttaaagattttgatggtgaaatatctttaaata

SEQ ID NO: 378842 - DNA, 75 bp, synthetic construct
  source 1..75: mol_type = other DNA
gataatctcagtcagactgccttactctgaacgcccaccgcttccgtcccgcacattccagcagcgtatctggag

SEQ ID NO: 378843 - DNA, 75 bp, synthetic construct
  source 1..75: mol_type = other DNA
ggatgttggggcttgaaccgaagatcacggcggtgcggagtccggagagtaacgggatagcagagagcttcgtga

SEQ ID NO: 378844 - DNA, 75 bp, synthetic construct
  source 1..75: mol_type = other DNA
ggatgttgggccttgaaccgaagatcacggcggtgcggagtccggagagtaacggcatagcagagagcttcgtga

SEQ ID NO: 378845 - DNA, 75 bp, synthetic construct
  source 1..75: mol_type = other DNA
ggatgttgggtcttgaaccgaagatcacggcggtgcggagtccggagagtaacggtatagcagagagcttcgtga

SEQ ID NO: 378846 - DNA, 75 bp, synthetic construct
  source 1..75: mol_type = other DNA
atatgaagaagagcatgacgaagaatttgaacgcgatttcagactggggatgcaaaaactttttgccatgcagga

SEQ ID NO: 378847 - DNA, 75 bp, synthetic construct
  source 1..75: mol_type = other DNA
aggtacaaaagccattgagtaccacatcgattgcctgcctgaggtaacccaaaaggcactgcgtgaacgctatgt

SEQ ID NO: 378848 - DNA, 75 bp, synthetic construct
  source 1..75: mol_type = other DNA
acgcctggcagaagaagacaccgaaattgagtggctgagtgatcttgagctgcgcgacatgttccgcccgatggt

SEQ ID NO: 378849 - DNA, 75 bp, synthetic construct
  source 1..75: mol_type = other DNA
ggacgtggttacgagtttcagaaagacctcagcttcgacttccgacactggataatctcagtcagactgccttac

SEQ ID NO: 378850 - DNA, 75 bp, synthetic construct
  source 1..75: mol_type = other DNA
tcacggaaaacccttcctgtattactcggataatggttccggtgaaacggcagatatgctggataaagagatcgt

SEQ ID NO: 378851 - DNA, 75 bp, synthetic construct
  source 1..75: mol_type = other DNA
atggcgcacgataccaaattacacaattctgatgattctgccgtctttgccagcaggcacgggcggcgttctcat

SEQ ID NO: 378852 - DNA, 75 bp, synthetic construct
  source 1..75: mol_type = other DNA
ggtgtaaactatactccgattcctctggtgacgatggggatcgattaccgtcatggtacgggtaatgaaaatgat

SEQ ID NO: 378853 - DNA, 75 bp, synthetic construct
  source 1..75: mol_type = other DNA
gatgcgattacctatactgttaaagtaatgaagaataaccaaccagaagcaaaccattctgttacattctcaacg

SEQ ID NO: 378854 - DNA, 75 bp, synthetic construct
  source 1..75: mol_type = other DNA
gacgtgaccaaaagcaacatgaccgatgacaaggcattaaattatgcggcacaacaggcggcgagtctcggtagc

SEQ ID NO: 378855 - DNA, 75 bp, synthetic construct
  source 1..75: mol_type = other DNA
acaaaaaatgaaatccctagtaatggcagtaatagtaaagtcaacgtgaataaagctaacgcttttgccgtctgt

SEQ ID NO: 378856 - DNA, 75 bp, synthetic construct
  source 1..75: mol_type = other DNA
tataaaaattatatctgtggagacaaaaaataaagtagtctataacgatgctgaagcaatatgtagaacgaataa

SEQ ID NO: 378857 - DNA, 75 bp, synthetic construct
  source 1..75: mol_type = other DNA
gcattgatagtaatgttaatattattggaacctctgctactggcgctttgcctaatatttggttgcaatatggtc

SEQ ID NO: 378858 - DNA, 75 bp, synthetic construct
  source 1..75: mol_type = other DNA
tgcggtggaggcatatcgcggttcaccacaactgatggtcgaacgcctcaatgccctgactgaaaaacagcgcca

SEQ ID NO: 378859 - DNA, 75 bp, synthetic construct
  source 1..75: mol_type = other DNA
ccctgtaagacgctgtgaaatacgctggctgaataatatttactacgcgcccgagctgcgtgatgagcatggccg

SEQ ID NO: 378860 - DNA, 75 bp, synthetic construct
  source 1..75: mol_type = other DNA
gcggcgttcacacgtatttaaaaccgactggttccagcatcccccatgcactgaagaacaggccgaatggctgat

SEQ ID NO: 378861 - DNA, 75 bp, synthetic construct
  source 1..75: mol_type = other DNA
aggcgcggatgcgaggttaaaaaagcccttagcctcgactaccgtcactggataatctccgtcgggcttccttac

SEQ ID NO: 378862 - DNA, 75 bp, synthetic construct
  source 1..75: mol_type = other DNA
acctgatgaagaatacgagcgtaatttccagcggggattgcagttgctggaagcgaaattaaaagaaatgacccg

SEQ ID NO: 378863 - DNA, 75 bp, synthetic construct
  source 1..75: mol_type = other DNA
ggtggctgatgcacgaattgcgattgtcagcgaggtgctgaaattcgcgcaacaacccggtttcaactgcgctaa

SEQ ID NO: 378864 - DNA, 75 bp, synthetic construct
  source 1..75: mol_type = other DNA
cgcgttcgcactgaaacagatatcggtgccagcgctgtgtctgtcgcttttgcggcttgtacgctggcgcggcag

SEQ ID NO: 378865 - DNA, 75 bp, synthetic construct
  source 1..75: mol_type = other DNA
gaggcgttcgagcattataacgaatggcatccgcatagtgcgctgggttatcgctcgccacgggaatatctgcgg

SEQ ID NO: 378866 - DNA, 75 bp, synthetic construct
  source 1..75: mol_type = other DNA
tgggagcggtggaacgccgcttcggcaacgagcttctggcgtctccagtagagtggctgacggataatggttcat

SEQ ID NO: 378867 - DNA, 75 bp, synthetic construct
  source 1..75: mol_type = other DNA
ttgggttatcgctcaccacgggaatatctacggcagcaggccagtaacggattaagtgataacaggtgtctggaa

SEQ ID NO: 378868 - DNA, 75 bp, synthetic construct
  source 1..75: mol_type = other DNA
tgcggcctgtacgctggcgcggcagatctttgaatcgctctcaacggtaacggttttgctggttggtgcgggtga

SEQ ID NO: 378869 - DNA, 75 bp, synthetic construct
  source 1..75: mol_type = other DNA
tcgcaaaaaggtcatatgaaggccagcgaactggaacgcatgttccagaaatctttctctgtagcgaaacgcgtt

SEQ ID NO: 378870 - DNA, 75 bp, synthetic construct
  source 1..75: mol_type = other DNA
ccgctttggcagcgagcttccggcgtctccagtggagtggctgacggataatggttcatgctaccgggcgaatga

SEQ ID NO: 378871 - DNA, 75 bp, synthetic construct
  source 1..75: mol_type = other DNA
agtggagtggctgacggataatggttcatgctaccgggctaatgaaacacggcagtttgcccggatgttgggtct

SEQ ID NO: 378872 - DNA, 75 bp, synthetic construct
  source 1..75: mol_type = other DNA
agtggagtggctgacggataatggttcatgctaccgggctaatgaaacacgccagtttgcccggatgctgggact

SEQ ID NO: 378873 - DNA, 75 bp, synthetic construct
  source 1..75: mol_type = other DNA
tggcattgctatgcggagccatgttaggtatggcgggggccgcgatgcaatccattgcgcgtaacggccttgccg

SEQ ID NO: 378874 - DNA, 75 bp, synthetic construct
  source 1..75: mol_type = other DNA
agtggagtggctgacggataatggttcatgctaccgggcgaatgaaacacgtcagttcgccaggatgttgggact

SEQ ID NO: 378875 - DNA, 75 bp, synthetic construct
  source 1..75: mol_type = other DNA
atacggatgtgcttctccgtatacaccatgttatcggagagctgcccacgtatggttatcgtcgggtatgggcgc

SEQ ID NO: 378876 - DNA, 75 bp, synthetic construct
  source 1..75: mol_type = other DNA
tgatcccgcaggcaaaatctcagccaccgtcgatggaaagcgcgatggtgctgcgtgatggtgcgaagtttgaag

SEQ ID NO: 378877 - DNA, 75 bp, synthetic construct
  source 1..75: mol_type = other DNA
accgatgactggatggatggccgccgcagtcgtcacactgatgatacggatgtgcttctccgtatacaccatgtt

SEQ ID NO: 378878 - DNA, 75 bp, synthetic construct
  source 1..75: mol_type = other DNA
gtttgcccggatgttggggcttgaaccgaagaacacgtcggtgcggagtccggagagtaacggcatagcagagag

SEQ ID NO: 378879 - DNA, 75 bp, synthetic construct
  source 1..75: mol_type = other DNA
gctgtgaccgtgaggcactgcactgggcggtcacaacgggtggcttcgacagtgaaacagtacaggacgtcatgc

SEQ ID NO: 378880 - DNA, 75 bp, synthetic construct
  source 1..75: mol_type = other DNA
catgttatcggagagctgcccacgtatggttatcgtcgggtatgggcgctgcttcgcagacaggccgaacttgat

SEQ ID NO: 378881 - DNA, 75 bp, synthetic construct
  source 1..75: mol_type = other DNA
acggctttacaggataatgagcgagcataacctgttgttgttgcatgacaaaccagagcgaccgaagcgtgaaca

SEQ ID NO: 378882 - DNA, 75 bp, synthetic construct
  source 1..75: mol_type = other DNA
accttgcagtggcgatcgagcactacaatgaaaaccatccgcataatgcgttgggttatcgctctccgcgagaat

SEQ ID NO: 378883 - DNA, 75 bp, synthetic construct
  source 1..75: mol_type = other DNA
tgcgaagtttgaagcgcaggcgggcgatccaacgcaggcgctggaaacctacaaagacgccatggttgcatccgg

SEQ ID NO: 378884 - DNA, 75 bp, synthetic construct
  source 1..75: mol_type = other DNA
agtggaacagcaatattcaggagctggttaatcgactgcaaagcgatcaggtgctggaaaccgctaatcgcctgc

SEQ ID NO: 378885 - DNA, 75 bp, synthetic construct
  source 1..75: mol_type = other DNA
ccataccggtgatgtggcgggagcgcacggaaaactggtcgtgggagctgggggcgtctggctcgtggtcgcatt

SEQ ID NO: 378886 - DNA, 75 bp, synthetic construct
  source 1..75: mol_type = other DNA
ctgggttatcgctcgccacgggaatatctgcggcagcaggcttgtaatgggttaagtgataacagatgtctggaa

SEQ ID NO: 378887 - DNA, 75 bp, synthetic construct
  source 1..75: mol_type = other DNA
catacaggcagagtggctgtgaaagaaagtaatcagcgatggtgctctgacgggttcgagttccgctgtgataac

SEQ ID NO: 378888 - DNA, 75 bp, synthetic construct
  source 1..75: mol_type = other DNA
gtgtcgcgtgcgcagttgcacgtaattctcagacgaaccgatgactggaaagatggtcgccgcagccgtcactca

SEQ ID NO: 378889 - DNA, 75 bp, synthetic construct
  source 1..75: mol_type = other DNA
agtggagtggctgacggataatggttcatgctaccgggctaatgaaacacgccagtttgcccggatgatgggcct

SEQ ID NO: 378890 - DNA, 75 bp, synthetic construct
  source 1..75: mol_type = other DNA
ggatatattggtcagataaatgaaatcttcattccgattatgggagcctgttttgggctttacttcgtctggaag

SEQ ID NO: 378891 - DNA, 75 bp, synthetic construct
  source 1..75: mol_type = other DNA
ggcatcacaggcgcgacgaacgccgcagggggattagcgtttaacaccgcatcaggggttggtggtattgctgct

SEQ ID NO: 378892 - DNA, 75 bp, synthetic construct
  source 1..75: mol_type = other DNA
cgggtactttttcagcgcttgaaaccgtcattcaacaaattaacgcgaacggtaagcgtattcttgaagcaacaa

SEQ ID NO: 378893 - DNA, 75 bp, synthetic construct
  source 1..75: mol_type = other DNA
gaagtcgagtatgtacgttcggaaatgcaggtgaaatttaccaatatcaccacctcaccaaacgacattgtggtt

SEQ ID NO: 378894 - DNA, 75 bp, synthetic construct
  source 1..75: mol_type = other DNA
gcaacgacgggttgtgcgcgaacgtttgcaggcgctggaaatcattaatgaacgttttgcccgacatttccgcat

SEQ ID NO: 378895 - DNA, 75 bp, synthetic construct
  source 1..75: mol_type = other DNA
tgaaggggcgaatacctataacgagccaggcgggcttattatgccggagttaccgcatcattctgatcgtagtgt

SEQ ID NO: 378896 - DNA, 75 bp, synthetic construct
  source 1..75: mol_type = other DNA
tgtgctgaccttcgctttggccgctacatcgatgcgctgggcaatgacatggttttacatcccaaacatggttat

SEQ ID NO: 378897 - DNA, 75 bp, synthetic construct
  source 1..75: mol_type = other DNA
ttaaagatgaatttgcaggcctgcttgagtggatagcgtatcaccgggttttaggcgtgaatggatttgtaattg

SEQ ID NO: 378898 - DNA, 75 bp, synthetic construct
  source 1..75: mol_type = other DNA
ggtgatgtgaagctgaacaacctcagtgggccgatctctatcgccaagggggctgggatgacagcggaactcggg

SEQ ID NO: 378899 - DNA, 75 bp, synthetic construct
  source 1..75: mol_type = other DNA
gattttgaattgcctgttaatatgctcactgatatgtataaggagttaacgcaatttatatcaagtaatctaagc

SEQ ID NO: 378900 - DNA, 75 bp, synthetic construct
  source 1..75: mol_type = other DNA
ttcaggcgtcactgcaaacgctgctttaatcacagttatggcattgtgctgtgcggctgtttttatcagttttat

SEQ ID NO: 378901 - DNA, 75 bp, synthetic construct
  source 1..75: mol_type = other DNA
ggcgtcagtgccgaagtggtctggaacggcgtgcgggttaaccactacgcggttaaatcgctggaagagttcttg

SEQ ID NO: 378902 - DNA, 75 bp, synthetic construct
  source 1..75: mol_type = other DNA
tcaacggtcagtatgcgttacggatagaacatttgattaacccgattttaggtgatgctgccaacttactgattt

SEQ ID NO: 378903 - DNA, 75 bp, synthetic construct
  source 1..75: mol_type = other DNA
cgcttcaaccagctaccgcctgaaatcgccccggagaactggcagctctatttaagtcaggataaaaccgtcatc

SEQ ID NO: 378904 - DNA, 75 bp, synthetic construct
  source 1..75: mol_type = other DNA
ttgccagcgaacaggcgtactgcgaaagagcattgggttacctgaaagccagtggtcaaactatccagtatgaaa

SEQ ID NO: 378905 - DNA, 75 bp, synthetic construct
  source 1..75: mol_type = other DNA
tggagttcctcgaacagcaactgcgagcggatctgaaattgaaagatgaccagatcgccacgctgcgcggcgatc

SEQ ID NO: 378906 - DNA, 75 bp, synthetic construct
  source 1..75: mol_type = other DNA
agtggagtggctgacggataatggttcatgctaccgggctaatgaaacacgtcagtttgcccggatggtgggtct

SEQ ID NO: 378907 - DNA, 75 bp, synthetic construct
  source 1..75: mol_type = other DNA
agtggagtggctgacggataatggttcatgctaccgggctaatgaaacacgacagtttgcccggatgctgggcct

SEQ ID NO: 378908 - DNA, 75 bp, synthetic construct
  source 1..75: mol_type = other DNA
gtctccagtagagtggctgacggataatggttcatgctaccgggctaatgaaacacggcagtttgcccggatgtt

SEQ ID NO: 378909 - DNA, 75 bp, synthetic construct
  source 1..75: mol_type = other DNA
tcgaaaacacagacacgggaaaaaccggcacccccggtaatgaccagaaacgaacaacacgggaaaacaaccgga

SEQ ID NO: 378910 - DNA, 75 bp, synthetic construct
  source 1..75: mol_type = other DNA
caaaacgggaggtggggacaggggaaaatcagataccggacatggcttcttttgccagtggtgatggatggatga

SEQ ID NO: 378911 - DNA, 75 bp, synthetic construct
  source 1..75: mol_type = other DNA
acaaccagtgctggcggcgaaagtgacattcgcccgtacgatcccaatacccaacgtcgggttgtgcgcgaacgt

SEQ ID NO: 378912 - DNA, 75 bp, synthetic construct
  source 1..75: mol_type = other DNA
gattttgccgataaaaatctggttgtccgtcgcttcaaaaaagacgtgaaagatcagatgtccggcgagttcccc

SEQ ID NO: 378913 - DNA, 75 bp, synthetic construct
  source 1..75: mol_type = other DNA
gccagcgtccggacaggcaccaccaccgatgaaacggcgcattaccgggagctcctgcgtcaggataacgatcag

SEQ ID NO: 378914 - DNA, 75 bp, synthetic construct
  source 1..75: mol_type = other DNA
cgcacaggccacgtcggagagccgacagccgacactggcgcaacttcgcgcccgacagaaaacagaggacgaatc

SEQ ID NO: 378915 - DNA, 75 bp, synthetic construct
  source 1..75: mol_type = other DNA
aaaaaacagatgttcagaatgctgagataaaattaaaagaagctaaggatgctcttgagaagagtcaggtaaaag

SEQ ID NO: 378916 - DNA, 75 bp, synthetic construct
  source 1..75: mol_type = other DNA
ggtgtgcctcttggtttctgggggattgcaattgtcacaggtattgtttcttcttacataggggatgatgagttg

SEQ ID NO: 378917 - DNA, 75 bp, synthetic construct
  source 1..75: mol_type = other DNA
ggcagaaaagcatttaacttcctgcatgggggaactccttgataatgcggagcggcattgtgggttagagcaacg

SEQ ID NO: 378918 - DNA, 75 bp, synthetic construct
  source 1..75: mol_type = other DNA
ttctggtggctccaggaatgatcttggaaagagtattcggaattccattgcgaactttagcggacataaacctaa

SEQ ID NO: 378919 - DNA, 75 bp, synthetic construct
  source 1..75: mol_type = other DNA
cctgatgaatggattgagcaaaattatcttgaagacatcatgtttagtggttctggtggctccaggaatgatctt

SEQ ID NO: 378920 - DNA, 75 bp, synthetic construct
  source 1..75: mol_type = other DNA
aaatataaagaactggatgaaagggttaaacttttatctcctagggcgaatgatccgcttcagagtcgtcctttt

SEQ ID NO: 378921 - DNA, 75 bp, synthetic construct
  source 1..75: mol_type = other DNA
caatgccgggacaggagataacattacatatagacagaagtgaaggagctaaatatgtgggtgttattgccgggt

SEQ ID NO: 378922 - DNA, 75 bp, synthetic construct
  source 1..75: mol_type = other DNA
gatgggtggtggaacaaatcattacatgcgtcactatctcctctttttaaaaagatatctatgggtaaagaaagt

SEQ ID NO: 378923 - DNA, 75 bp, synthetic construct
  source 1..75: mol_type = other DNA
attcttaaagttgataagtacatagcaatgccgggacaagatataacactacatatagacagaagtgagggggct

SEQ ID NO: 378924 - DNA, 75 bp, synthetic construct
  source 1..75: mol_type = other DNA
gcagcagagccagccggtaaattgcatgaatacaaaccagtgggatatcagcgtctggtcgatgagttaaccatg

SEQ ID NO: 378925 - DNA, 75 bp, synthetic construct
  source 1..75: mol_type = other DNA
ggctgcgttgatgattgtagatatgccagacgattgcgtcagagagattttggaaaaaaccgagacaagtaggca

SEQ ID NO: 378926 - DNA, 75 bp, synthetic construct
  source 1..75: mol_type = other DNA
gagcaggataaaatacaggccattaataatgttgatactccatttggcgctggtatgctaacttttcagatatca

SEQ ID NO: 378927 - DNA, 75 bp, synthetic construct
  source 1..75: mol_type = other DNA
agttgaatgattatgtctatcagcgttacgctcaagcaaaaaactttgagcctgggcaccagtgcataatttcag

SEQ ID NO: 378928 - DNA, 75 bp, synthetic construct
  source 1..75: mol_type = other DNA
tcacgctctacaccaaacgcaccgggtttatgtgtggttcaccgccactgctcaacatggccctgctgaacatca

SEQ ID NO: 378929 - DNA, 75 bp, synthetic construct
  source 1..75: mol_type = other DNA
cgtaagcttgataatggttatttcgccggattttcagcacaaccactggcggatatgcacggttcagtgaatatt

SEQ ID NO: 378930 - DNA, 75 bp, synthetic construct
  source 1..75: mol_type = other DNA
gggcgggcaaaatccattactgttgacacgaaaccggggcagcgcggctggctgttgctgttaatcaccgtcacg

SEQ ID NO: 378931 - DNA, 75 bp, synthetic construct
  source 1..75: mol_type = other DNA
tgctgcgctttgcccgcgccggtttggccgtcgccagcatgaaaggtaaaagctatctgtcgctggcggcgtttc

SEQ ID NO: 378932 - DNA, 75 bp, synthetic construct
  source 1..75: mol_type = other DNA
ggcggcacgctgtacatgcgccagcttggtgaggcttatctgccgcgctggccaaaagaggacaaagaggattac

SEQ ID NO: 378933 - DNA, 75 bp, synthetic construct
  source 1..75: mol_type = other DNA
caaccagaacgttggccgcgtattcgctgagccgatccaactgggcgagaacgtcccggatgcgctgcgcgagtt

SEQ ID NO: 378934 - DNA, 75 bp, synthetic construct
  source 1..75: mol_type = other DNA
gaaaccatcaccgtgcatttcaccgccaaaagaggtgacaggtgtgacttctggagtaacgaggatgtttcagtg

SEQ ID NO: 378935 - DNA, 75 bp, synthetic construct
  source 1..75: mol_type = other DNA
ataacggaaaattgcctcgcacagaatataccggcgaaacaaattacgctgaaaaaatggtgatgctgccaactt

SEQ ID NO: 378936 - DNA, 75 bp, synthetic construct
  source 1..75: mol_type = other DNA
aaactgatgctattaaggctcagggcgagaaaaaactggtttccctgatttctgatgatcagaataacccattat

SEQ ID NO: 378937 - DNA, 75 bp, synthetic construct
  source 1..75: mol_type = other DNA
ttggatcaggcgcaacgttttcttcgtcagtatccagaacacgccgacttacgcatctggggactgaatgcgttt

SEQ ID NO: 378938 - DNA, 75 bp, synthetic construct
  source 1..75: mol_type = other DNA
tctctacaacaaagtgaattctgcgtttccctgcgctcggcaaaaatcagtgacaatgtagtgcgtctgtatgcc

SEQ ID NO: 378939 - DNA, 75 bp, synthetic construct
  source 1..75: mol_type = other DNA
gtacgccggttctgcgggctatctctcattacagcaaagcgaattctgcgtttccctgcgctcagcaaaaatcag

SEQ ID NO: 378940 - DNA, 75 bp, synthetic construct
  source 1..75: mol_type = other DNA
ccgccaccgaaggccggatcggcaataaaaaagtgattctggccgggaccaataattatctcggtggtaatggtg

SEQ ID NO: 378941 - DNA, 75 bp, synthetic construct
  source 1..75: mol_type = other DNA
atcaggagccagtacagaatacgccagcgcaacaacctactactggcagtaatttttcttcactatggggtgatt

SEQ ID NO: 378942 - DNA, 75 bp, synthetic construct
  source 1..75: mol_type = other DNA
ttcaccgcgatgacgtataccaaaagtaaaacgtttaaaaccgcagctggtgcgcatcgctggttagcaagaaac

SEQ ID NO: 378943 - DNA, 75 bp, synthetic construct
  source 1..75: mol_type = other DNA
atggatactatcgagcttggcaacaacgaatctctggtatgtggagtattccccaacctggacggcacgtttacc

SEQ ID NO: 378944 - DNA, 75 bp, synthetic construct
  source 1..75: mol_type = other DNA
gatattgagcgtggcaagttggcagagacgattcgcagcaataaagctggggaaggtttaaaggcgcaaagcatt

SEQ ID NO: 378945 - DNA, 75 bp, synthetic construct
  source 1..75: mol_type = other DNA
gaaagagcaggacaacttcaggatatggatgttttgtctcttaactcacagatagcagcgacgggaattgatcct

SEQ ID NO: 378946 - DNA, 75 bp, synthetic construct
  source 1..75: mol_type = other DNA
ccagaatccagagcagctatcacacatgctgactactatgtctctcggtgcgcttggaccagaaaaggcgtttgc

SEQ ID NO: 378947 - DNA, 75 bp, synthetic construct
  source 1..75: mol_type = other DNA
tttgccagccgtattccggtagtcagcgctgtcgggcatgaaaccgatgtcaccatcgccgactttgttgccgac

SEQ ID NO: 378948 - DNA, 75 bp, synthetic construct
  source 1..75: mol_type = other DNA
gaacctgcgcaacgaatgcgacgtcttgatcgtcggtcgcggcggcggttcgctggaagatttgtggagttttaa

SEQ ID NO: 378949 - DNA, 75 bp, synthetic construct
  source 1..75: mol_type = other DNA
ggtgaaatgctaaccacacgtctggaagacggctggatagaaagtgaagtaaaaaacatccagccagtaaaaaaa

SEQ ID NO: 378950 - DNA, 75 bp, synthetic construct
  source 1..75: mol_type = other DNA
acgaatctctggtatgcggcgtgtttcccaaccaggacggtacgttcaccgcgatgacgtataccaaaagcaaaa

SEQ ID NO: 378951 - DNA, 75 bp, synthetic construct
  source 1..75: mol_type = other DNA
atggatatgctcaatcttggcaacaatgaatctctggtgtgcggcgtcttccccaaccaggacggcacgtttacc

SEQ ID NO: 378952 - DNA, 75 bp, synthetic construct
  source 1..75: mol_type = other DNA
gcgatgacgtataccaaaagcaaaacgtttaaaaccgaagctggcgcgcgtcgctggttagcaagaaactctgac

SEQ ID NO: 378953 - DNA, 75 bp, synthetic construct
  source 1..75: mol_type = other DNA
ctggcgctcaaggctcaggtagcttcgtcgcttggtccgggtgcatttggcaggttcatgatggataacgaaaag

SEQ ID NO: 378954 - DNA, 75 bp, synthetic construct
  source 1..75: mol_type = other DNA
cgaccgtgcgagaaacggtgaaaacatcgtgtctgagattaaatcactctatgcaaagcgggatgctcttcgtga

SEQ ID NO: 378955 - DNA, 75 bp, synthetic construct
  source 1..75: mol_type = other DNA
caatggcgacgtgccgacggtgaccattaataccttcgctggcgatgatattgttaacgctgcggaacattccat

SEQ ID NO: 378956 - DNA, 75 bp, synthetic construct
  source 1..75: mol_type = other DNA
atgattgatttgacagcagaacagcgacaactggcaaagatagttcatgattatgccagtcggttcccacagaca

SEQ ID NO: 378957 - DNA, 75 bp, synthetic construct
  source 1..75: mol_type = other DNA
ggcagcgttagcggcccaaggcaccggaccaccggttctcgtatggcaaacggcagttatgcgccgcacctggcg

SEQ ID NO: 378958 - DNA, 75 bp, synthetic construct
  source 1..75: mol_type = other DNA
ctggatcgctgccggtgtaggcatcgggatttgggggggagcacttttcctgttaaggaaaatggctaaatcaga

SEQ ID NO: 378959 - DNA, 75 bp, synthetic construct
  source 1..75: mol_type = other DNA
tagtgacaacgggttaacaccgtttggcacctgtattgatgaagtgtattccgccaccgaaggccggatcggcaa

SEQ ID NO: 378960 - DNA, 75 bp, synthetic construct
  source 1..75: mol_type = other DNA
aggttctcctgctcttggtgcagatattcgtagccgtgcatctggtggtgatcagaggaaactatacaacgctgc

SEQ ID NO: 378961 - DNA, 75 bp, synthetic construct
  source 1..75: mol_type = other DNA
aggtttacaggcgcaaagcattgctgttagccgtgaaaactccctgcgcactgctggaggtgctgttcctgcatc

SEQ ID NO: 378962 - DNA, 75 bp, synthetic construct
  source 1..75: mol_type = other DNA
ttcaggaatacaccaacaattacaaccaacaatataacgttaatgttggtaaatctcagcggcagcaatctcaac

SEQ ID NO: 378963 - DNA, 75 bp, synthetic construct
  source 1..75: mol_type = other DNA
catgtatgaatacctcaccaccctggttaaaggtaagccctggtacgataactgctatttctataatttcgatga

SEQ ID NO: 378964 - DNA, 75 bp, synthetic construct
  source 1..75: mol_type = other DNA
tggtaaatctcagcggcagcaatctcaacctacacaggtatcacagccagcagccagcagtaacttttcttcact

SEQ ID NO: 378965 - DNA, 75 bp, synthetic construct
  source 1..75: mol_type = other DNA
taaatctgatgtcattagttcctgacttcagactggaaggattgaaagaagctcaaacctttgccacgacacagc

SEQ ID NO: 378966 - DNA, 75 bp, synthetic construct
  source 1..75: mol_type = other DNA
ggcctgcgggaacgctgaatattaccgttagcggcgcgaacagtgccggaacgcaaaccagcattacccatccgc

SEQ ID NO: 378967 - DNA, 75 bp, synthetic construct
  source 1..75: mol_type = other DNA
atgaccaacatcaccaagagaagtttagtagcagctggcgttctggctgcgcttatggcagggaatgtcgcgctg

SEQ ID NO: 378968 - DNA, 75 bp, synthetic construct
  source 1..75: mol_type = other DNA
atgctggttaataccagtaattataatgagggagtccaaaaaacaatgaccaacatcaccaagagaagtttagta

SEQ ID NO: 378969 - DNA, 75 bp, synthetic construct
  source 1..75: mol_type = other DNA
atgtctgaattaaaaatttcccctgaattattacaaatttcccctgaattattacaaatttccccggaagtgcag

SEQ ID NO: 378970 - DNA, 75 bp, synthetic construct
  source 1..75: mol_type = other DNA
gatgccggaagaaagtattaacgctgcaattgatcaggcagttgccgaagctgaagagcaaggtgtaatcggtaa

SEQ ID NO: 378971 - DNA, 75 bp, synthetic construct
  source 1..75: mol_type = other DNA
tgggtcgtgaagggcataacgtgaccaaagttagtcgtcgcgatttaccttttgttgttgccgccggaaaaaatg

SEQ ID NO: 378972 - DNA, 75 bp, synthetic construct
  source 1..75: mol_type = other DNA
ttaatcgattggactccctcccccattcgcaccgatgccctgtatcaacaactgaccgccgatcaagcgcagcag

SEQ ID NO: 378973 - DNA, 75 bp, synthetic construct
  source 1..75: mol_type = other DNA
gacccatttttacctgtttctttctcacaaattggcgggcatccaacctggattcaggacgcggaatatcctctc

SEQ ID NO: 378974 - DNA, 75 bp, synthetic construct
  source 1..75: mol_type = other DNA
atagcatcgattatggcatgaacgtcgccgaagcgaccaatgcgccgcgtttccaccatcagtggttgccggacg

SEQ ID NO: 378975 - DNA, 75 bp, synthetic construct
  source 1..75: mol_type = other DNA
acggcaggtttcgcgtcgtgacgtgtgaatgttgcaccgcctacagcaccattttcggttacatagactcacggg

SEQ ID NO: 378976 - DNA, 75 bp, synthetic construct
  source 1..75: mol_type = other DNA
tgttgcaggttgggaattaaccgctgaagggcaaaggcgtaatctctatttatctcaatgttttcacctggagaa

SEQ ID NO: 378977 - DNA, 75 bp, synthetic construct
  source 1..75: mol_type = other DNA
cgtatttaagagaatggatctcttataatgatttggatagttattcttgcttaccttttcatcgcgcccctacgg

SEQ ID NO: 378978 - DNA, 75 bp, synthetic construct
  source 1..75: mol_type = other DNA
atagcctgaaatctaacatccagttggtgtttaacaatgccattctggcgagcgaaattgccaaagaatatcaac

SEQ ID NO: 378979 - DNA, 75 bp, synthetic construct
  source 1..75: mol_type = other DNA
gccagccgggagaaaacgaatgccacggcgctgcacctgcacagttcgattaccagtgatgattcgctggaagtg

SEQ ID NO: 378980 - DNA, 75 bp, synthetic construct
  source 1..75: mol_type = other DNA
aggcacagacgcttagccaacaagaaagccaccagctgttttcagcggtggtacgtggcgagctgaagccggaac

SEQ ID NO: 378981 - DNA, 75 bp, synthetic construct
  source 1..75: mol_type = other DNA
gtgctgatgctttctcctggccccggtgtgccgagcgaagccggttgtatgccggaactcctcacccgcttgcgt

SEQ ID NO: 378982 - DNA, 75 bp, synthetic construct
  source 1..75: mol_type = other DNA
caaaaaatcattgaggtcatcagtaaagcaccgtttatccagataacgggcctgggcgggtcggcgctggtgggg

SEQ ID NO: 378983 - DNA, 75 bp, synthetic construct
  source 1..75: mol_type = other DNA
atgttgtacctgacgaaaatacgcaatgcagaaagtgaatttaccgagaacgagcaaaaaatagctgactttctg

SEQ ID NO: 378984 - DNA, 75 bp, synthetic construct
  source 1..75: mol_type = other DNA
aagagctggcgctggagcaaacctgcgcgttgttcgactacgcgcggctgcaaaaaatcattgaggtcatcagta

SEQ ID NO: 378985 - DNA, 75 bp, synthetic construct
  source 1..75: mol_type = other DNA
gatcgtttctgtgagttaacacagtcctggcttccgatggaaaaaacagaaaaagatccggtcagtggtgtatgg

SEQ ID NO: 378986 - DNA, 75 bp, synthetic construct
  source 1..75: mol_type = other DNA
ttcgcagtgccgcacatgccttcaacgaactggatgaacactggttacagcatcttgctgcccagtttccgcctg

SEQ ID NO: 378987 - DNA, 75 bp, synthetic construct
  source 1..75: mol_type = other DNA
aaagtttttgcaaccggaggtattggtggtgtgcatcgcggagcggaacataccttcgatatttctgccgattta

SEQ ID NO: 378988 - DNA, 75 bp, synthetic construct
  source 1..75: mol_type = other DNA
cagggagattcgaaggaattactcgcaggacatcatcatcccaatgacgctcgtgcacccggactatctgactga

SEQ ID NO: 378989 - DNA, 75 bp, synthetic construct
  source 1..75: mol_type = other DNA
gcaggcagaggtaacatcgtgcggatcaataccatcacgcatcagaaagaagactttcccgcaggtgatgcgcgt

SEQ ID NO: 378990 - DNA, 75 bp, synthetic construct
  source 1..75: mol_type = other DNA
caaccacttttcacgatctcaagcttctctctgaatgcttcatagatattatcgaacgagcaaaggaagagaacg

SEQ ID NO: 378991 - DNA, 75 bp, synthetic construct
  source 1..75: mol_type = other DNA
cgttatcgctgagcaggacggtgtatttttatcgcccggatagcgggcgcgatgaaccggtgatccaggcgctga

SEQ ID NO: 378992 - DNA, 75 bp, synthetic construct
  source 1..75: mol_type = other DNA
tccaaataagccagcgtcgcatcatcttaacggaaaggttgaacgttcccaaaagacagacaaagcagagtttta

SEQ ID NO: 378993 - DNA, 75 bp, synthetic construct
  source 1..75: mol_type = other DNA
ttgcgaagtcgctctgattctggagttacgttctcagcgaaatctgggtgcaagacgtattcaaagcgagttaaa

SEQ ID NO: 378994 - DNA, 75 bp, synthetic construct
  source 1..75: mol_type = other DNA
atgaacagggaaattcagcagcggctacagtgggtaaaactctatgaaacgtccggtgatgcgggatttgtatgc

SEQ ID NO: 378995 - DNA, 75 bp, synthetic construct
  source 1..75: mol_type = other DNA
atgctgaatccacgccaggttattggatggaaatcgaaagttgaaaaagggaaagttgttctcactgatttgcgt

SEQ ID NO: 378996 - DNA, 75 bp, synthetic construct
  source 1..75: mol_type = other DNA
tggcgcatccaccgcgacgatttttgatgacagggcaaaaaatggccttgaatatgttgagcatagcggtgccgc

SEQ ID NO: 378997 - DNA, 75 bp, synthetic construct
  source 1..75: mol_type = other DNA
cttaatcttggtttgctgaatatcaagcactggcaaagccagagtgagcaggacaatattttgcatgttgcccgc

SEQ ID NO: 378998 - DNA, 75 bp, synthetic construct
  source 1..75: mol_type = other DNA
aaaggcagaggttaatgatcttaaatcaaaagttgaacatatcagaaacgctatggatgcatttgatagcgatag

SEQ ID NO: 378999 - DNA, 75 bp, synthetic construct
  source 1..75: mol_type = other DNA
ggtgatgctatcaaaaaagaacttaatgatgttatttcatttaagaaaaaaatagatcacttccaaaacactttg

SEQ ID NO: 379000 - DNA, 75 bp, synthetic construct
  source 1..75: mol_type = other DNA
atctgaattgggtattgcaaaacggaaaataaaagatgacatagaggccatctctggaaaaaaaatagccaatgc

SEQ ID NO: 379001 - DNA, 75 bp, synthetic construct
  source 1..75: mol_type = other DNA
gtattacgattggtcgagaaacaaatggtgggcagtaactgacattggagaagaacctgcatcaaaagtaaccca

SEQ ID NO: 379002 - DNA, 75 bp, synthetic construct
  source 1..75: mol_type = other DNA
tcaattacacattaccaaacactgatttcggtgaggcagagatctgtattctcacatctggaagcaacaatgctt

SEQ ID NO: 379003 - DNA, 75 bp, synthetic construct
  source 1..75: mol_type = other DNA
accggaacgtggctggcgaatggcgggatggacgtggttgatttccgcctctcgacggtgggtgtgaccgcgaac

SEQ ID NO: 379004 - DNA, 75 bp, synthetic construct
  source 1..75: mol_type = other DNA
ttcccgtccagaggaagtgatcgatgaattaaaaaatcagggcgtaacgctgatgggaatcaatgatgcaaacag

SEQ ID NO: 379005 - DNA, 75 bp, synthetic construct
  source 1..75: mol_type = other DNA
ccatgaatcgctgaataacctgacgccggaagagtaccggctgatgactgaaactccggaaatctcaaaaagtgc

SEQ ID NO: 379006 - DNA, 75 bp, synthetic construct
  source 1..75: mol_type = other DNA
cgtaccggatagaaatactggatttttatttattcagaacgctgaatgaagcacgggaaattacagagcgctggc

SEQ ID NO: 379007 - DNA, 75 bp, synthetic construct
  source 1..75: mol_type = other DNA
gaaaacagcgcctgccggtacgtaatccggctccgctggcgacgtcagaagcgatgcaccagagctggtccatcg

SEQ ID NO: 379008 - DNA, 75 bp, synthetic construct
  source 1..75: mol_type = other DNA
tggccacaccggaagcgctgaaccaaagctggtctgtcgattttatgcatgatgctctggtctgcggtcgtcgtt

SEQ ID NO: 379009 - DNA, 75 bp, synthetic construct
  source 1..75: mol_type = other DNA
tttttatctgttcagaaccctgaatgaagtgcgggaaatgacggaaagatggttgtcagaatacaacaatgaacg

SEQ ID NO: 379010 - DNA, 75 bp, synthetic construct
  source 1..75: mol_type = other DNA
aggactcagaatgaagcgcgggaaattacagagcgctggctgacagaatataacagcgagcggcctcatgaatcc

SEQ ID NO: 379011 - DNA, 75 bp, synthetic construct
  source 1..75: mol_type = other DNA
gtgatcgggtccagatggatacctgtaaaattggccccgatttgtatcagtacacatctgttgatgactgcactt

SEQ ID NO: 379012 - DNA, 75 bp, synthetic construct
  source 1..75: mol_type = other DNA
aaaaaacgcttgtctgtggctacgctacttcctgtgtatgaagaaagtattaagcaaaatattgggcgcatattt

SEQ ID NO: 379013 - DNA, 75 bp, synthetic construct
  source 1..75: mol_type = other DNA
gcgaaggtactaatggcgaatctgtctggacgcttcacgagtcatggaataccagccgtgatgatattcctctgg

SEQ ID NO: 379014 - DNA, 75 bp, synthetic construct
  source 1..75: mol_type = other DNA
ccttaagttatataacacagaggcgctgaaggcatggtcagccacaaccggtgactctgaggatgacatattact

SEQ ID NO: 379015 - DNA, 75 bp, synthetic construct
  source 1..75: mol_type = other DNA
cgctgtaacgtttgtgccggtgacggtaagctcagcgtaccaaacgtagcggctatgtctttttcagaacgacgg

SEQ ID NO: 379016 - DNA, 75 bp, synthetic construct
  source 1..75: mol_type = other DNA
gtcaatgtactggaaacagagtgccatctaccggtgcgcagtgagcaaggaacgatggcgatgacacatatggcg

SEQ ID NO: 379017 - DNA, 75 bp, synthetic construct
  source 1..75: mol_type = other DNA
cacccagatgaactctaaagccgatgacgatgtccgtaaagagcttaatgccattgctgacgtatcagccggccg

SEQ ID NO: 379018 - DNA, 75 bp, synthetic construct
  source 1..75: mol_type = other DNA
cacccagatgaactcaaaagccgatgacgaagtccgtaaagagcttaatgccattgctgacgtatcagccggccg

SEQ ID NO: 379019 - DNA, 75 bp, synthetic construct
  source 1..75: mol_type = other DNA
gagggtgaggggtggtttattggttccattcatgacacggaagacggccatgtttgtgtgtggatgagaaataag

SEQ ID NO: 379020 - DNA, 75 bp, synthetic construct
  source 1..75: mol_type = other DNA
cacccagatgaactccaaagccgatgacgacgtccgtaaagagcttaatgccattgctgacgtatcagccggccg

SEQ ID NO: 379021 - DNA, 75 bp, synthetic construct
  source 1..75: mol_type = other DNA
cacccagatgaactccaaagccgatgatgatgtccgtaaagagcttaatgccattgctgacgtatcagccggccg

SEQ ID NO: 379022 - DNA, 75 bp, synthetic construct
  source 1..75: mol_type = other DNA
cacccagatgaactccaaagccgatgaagaagtccgtaaagagcttaatgccattgctgacgtatcagccggccg

SEQ ID NO: 379023 - DNA, 75 bp, synthetic construct
  source 1..75: mol_type = other DNA
gctcctcgcgccaggcgtaccttgctaaccgtgcgcttcatgagttacagaaaaacggcacacttcctgatgatg

SEQ ID NO: 379024 - DNA, 75 bp, synthetic construct
  source 1..75: mol_type = other DNA
tactgacgggggtctgcacctcactggaagaggagctgaatgactatttcagaagcggtaaacgcaaagaacagc

SEQ ID NO: 379025 - DNA, 75 bp, synthetic construct
  source 1..75: mol_type = other DNA
tttgtgatgaagccgaccggcttttgcaactgaacattaacctgctccggcaaatggttgatgagccggatgtgt

SEQ ID NO: 379026 - DNA, 75 bp, synthetic construct
  source 1..75: mol_type = other DNA
gagggtgaaggctggtttgttggctctattcatgacactgaagatggtccggtttgtatctggctgcgtgagaag

SEQ ID NO: 379027 - DNA, 75 bp, synthetic construct
  source 1..75: mol_type = other DNA
cggaagagtttaacgcctggatggaggaaaataatcttcaatggaccatcagaactatggatgaagatgatttta

SEQ ID NO: 379028 - DNA, 75 bp, synthetic construct
  source 1..75: mol_type = other DNA
ctggacctacagcgacagcgggctggtcagcggtgcctatacctacagtgcgcgagtggtggatctggcggggaa

SEQ ID NO: 379029 - DNA, 75 bp, synthetic construct
  source 1..75: mol_type = other DNA
cacccagatgaactccaaagccgatgaggaggtccgtaaagagcttaatgccattgctgacgtatcagccggccg

SEQ ID NO: 379030 - DNA, 75 bp, synthetic construct
  source 1..75: mol_type = other DNA
ggcgctggagagacttcagcaacgaatgaatctggcgattgacagtcagattaagcggacgaataagcggcaggt

SEQ ID NO: 379031 - DNA, 75 bp, synthetic construct
  source 1..75: mol_type = other DNA
tggctggcactgaagcactggtgactacactggggatattttcagctaataaaggggtaattcatgcatttacgc

SEQ ID NO: 379032 - DNA, 75 bp, synthetic construct
  source 1..75: mol_type = other DNA
atggacactccatacattgagttatttgcaggcagtcagcaggtatccacgacgctggtacattttgccgctgat

SEQ ID NO: 379033 - DNA, 75 bp, synthetic construct
  source 1..75: mol_type = other DNA
tttccgatgaccgatggctggcatccgtcgccggattttcgacggcgggctgcattgtggggagtggctctgccg

SEQ ID NO: 379034 - DNA, 75 bp, synthetic construct
  source 1..75: mol_type = other DNA
cctcgaagcggtgagtccactctccacgctcgcacgcggttatagcgttaccagcgccgctgatggcgcggtgct

SEQ ID NO: 379035 - DNA, 75 bp, synthetic construct
  source 1..75: mol_type = other DNA
gcaagagttactgcgtcaggcgcagtctgcgcagcaacggctggaaatggcgatggattactacctcgccaaccg

SEQ ID NO: 379036 - DNA, 75 bp, synthetic construct
  source 1..75: mol_type = other DNA
atggctactcattacactgaactcatggctggcactgaagcactggttactacgctggggatattttcagccaat

SEQ ID NO: 379037 - DNA, 75 bp, synthetic construct
  source 1..75: mol_type = other DNA
atgaaagcatatagtgaagccgtaaaaggcgatgtgctggaaatgaatattcgtattctgcagccggggctttga

SEQ ID NO: 379038 - DNA, 75 bp, synthetic construct
  source 1..75: mol_type = other DNA
cacccagatgaactcgaaagccgatgacgaggtccgtaaagagcttaatgccattgctgacgtatcagccggccg

SEQ ID NO: 379039 - DNA, 75 bp, synthetic construct
  source 1..75: mol_type = other DNA
gcatgcgctgctggcgcatccccgggtgaaacgtgtcgtcattgccataagtcctggcgatagccgctttgcaca

SEQ ID NO: 379040 - DNA, 75 bp, synthetic construct
  source 1..75: mol_type = other DNA
gcccttgtctgcatcaggatgaccttgcgcgtctgttaactctgagcgaaaccagccgcacgggggggattctcg

SEQ ID NO: 379041 - DNA, 75 bp, synthetic construct
  source 1..75: mol_type = other DNA
gcttatggcacgcgctgacgccgcaatttttccctcgtgagctgttacatgactgtctgacgcgcgctctaaatg

SEQ ID NO: 379042 - DNA, 75 bp, synthetic construct
  source 1..75: mol_type = other DNA
ggcagcctgagttcacagataaaatactctccaggaaacccggggcggttcagtctcagtccggattatggggga

SEQ ID NO: 379043 - DNA, 75 bp, synthetic construct
  source 1..75: mol_type = other DNA
gtctgggggcagaacaccattaacaccttcctcagcacggcgggcagcggtggtaactcgacgtctgtctccatg

SEQ ID NO: 379044 - DNA, 75 bp, synthetic construct
  source 1..75: mol_type = other DNA
tgtcaccagcgacacgacgcttgcggtgagcggcacgctgggcgcggcgctttctgctggtgagttcgcgcaaat

SEQ ID NO: 379045 - DNA, 75 bp, synthetic construct
  source 1..75: mol_type = other DNA
ggagggaaaaccgctctgaacaggcccggaaactcgcacaacagacttttggtgatgccatcgggaaaagctttg

SEQ ID NO: 379046 - DNA, 75 bp, synthetic construct
  source 1..75: mol_type = other DNA
cgtcaccaggaactctcgctggcgacggtgacagcccgggtggcaaccctgttcccttcatcatttccggtactc

SEQ ID NO: 379047 - DNA, 75 bp, synthetic construct
  source 1..75: mol_type = other DNA
cagtaacagcccgggtggcaaccctgttcccttcatcatttccggtactctccgttgccgcgcctgtcggctgga

SEQ ID NO: 379048 - DNA, 75 bp, synthetic construct
  source 1..75: mol_type = other DNA
tttctgtttgttctcagccatgccgatcgcgtgtttcctgctgaagaatggaacggcacagaaaaatgcccgtcc

SEQ ID NO: 379049 - DNA, 75 bp, synthetic construct
  source 1..75: mol_type = other DNA
atgtcattcagccattcttccctctcctctcaagtcaaatcatatctgacgtttcttcctgaagaaattcgccag

SEQ ID NO: 379050 - DNA, 75 bp, synthetic construct
  source 1..75: mol_type = other DNA
atgtcattcagccattcttccctctcctcacaagtgaaatcacatctgacgtttcttcctgaagaaattcgccag

SEQ ID NO: 379051 - DNA, 75 bp, synthetic construct
  source 1..75: mol_type = other DNA
tttctgtttgttctcagccatgccgatcgcgtgtttcctgccggcgagtggaacgacacagaaaaatgcctgtcc

SEQ ID NO: 379052 - DNA, 75 bp, synthetic construct
  source 1..75: mol_type = other DNA
gaatgaaggcgcagatccctcgcgttttctgtttgttctcagccatgccgatcgcgtgtttcctgctgaagaatg

SEQ ID NO: 379053 - DNA, 75 bp, synthetic construct
  source 1..75: mol_type = other DNA
atgtcattcagccattcttccctctcctcgcaagtaaaatcagatctgacgtttcttcctgaagaaattcgccag

SEQ ID NO: 379054 - DNA, 75 bp, synthetic construct
  source 1..75: mol_type = other DNA
atgtcattcagccattcttccctctcctcccaagtgaaatcaaatctgacgtttcttcctgaagaaattcgccag

SEQ ID NO: 379055 - DNA, 75 bp, synthetic construct
  source 1..75: mol_type = other DNA
gatgagggctttaccgtaaaaatcagttttccggcagtcagtcagttacagacccggctcgcggtaaaaacaaat

SEQ ID NO: 379056 - DNA, 75 bp, synthetic construct
  source 1..75: mol_type = other DNA
gcatgtcagggaacactcacactgctggatacccccggccctaatgaagccggacaaccacagatggaaatgatg

SEQ ID NO: 379057 - DNA, 75 bp, synthetic construct
  source 1..75: mol_type = other DNA
cggatatccgggaaatcgcggactgtcaggagcaggtgaccgctgatgtcagaatggccatggaggagatcgatg

SEQ ID NO: 379058 - DNA, 75 bp, synthetic construct
  source 1..75: mol_type = other DNA
gttttccggcagtcagccagttacagacccggctcgcggtaaaaacaaatctgagtgcgcttatggaggaaagaa

SEQ ID NO: 379059 - DNA, 75 bp, synthetic construct
  source 1..75: mol_type = other DNA
gcactggcggttgactctgccgccgcaaaactgatgcagaatgcagaaaatatcagtgaatacctgttgttacgc

SEQ ID NO: 379060 - DNA, 75 bp, synthetic construct
  source 1..75: mol_type = other DNA
gcaggcgcaggaacggcttaccgggcgacttcaggcattaaatgaaagggttcctgagctcattactgacagtaa

SEQ ID NO: 379061 - DNA, 75 bp, synthetic construct
  source 1..75: mol_type = other DNA
tccggcaatgctgaacagcgatgtgctgcccgcctcccgcgtttatcccggatcctcacgccaggcatacctggc

SEQ ID NO: 379062 - DNA, 75 bp, synthetic construct
  source 1..75: mol_type = other DNA
aaggaagtgatgtcactgacccgggcatatttcggggagctgcaggcatccattgagcaggatattaaccagccc

SEQ ID NO: 379063 - DNA, 75 bp, synthetic construct
  source 1..75: mol_type = other DNA
gaggacgactggaaagacagcactaaggtaaataaaaaggcagaaaaactctggaatatatctctgatcgatcaa

SEQ ID NO: 379064 - DNA, 75 bp, synthetic construct
  source 1..75: mol_type = other DNA
gatcctccatctggaacatattcagcccgtccgcaatttattaagcacactgcaggaaaaactcgccaccccggc

SEQ ID NO: 379065 - DNA, 75 bp, synthetic construct
  source 1..75: mol_type = other DNA
gctgaccgggcgtcttcaggcgttaaatgaaagggttcctgagctcattactgacagtaaggcgttaagggaaga

SEQ ID NO: 379066 - DNA, 75 bp, synthetic construct
  source 1..75: mol_type = other DNA
ctgaatgactatttcagaagcggtaaacgcaaagaacagcaaatgctggaggaagaagacgcagaacaacgaagg

SEQ ID NO: 379067 - DNA, 75 bp, synthetic construct
  source 1..75: mol_type = other DNA
aaggaagtgatgtcactgacccgggcatatttcggggtgttgcaggcatccattgagcagaatattaaccagccc

SEQ ID NO: 379068 - DNA, 75 bp, synthetic construct
  source 1..75: mol_type = other DNA
agtgttacagacattgaggacggcgaattagttaaatatttcgaaggagcgaaggttcgagttttggctggttgt

SEQ ID NO: 379069 - DNA, 75 bp, synthetic construct
  source 1..75: mol_type = other DNA
ttgtgtcggtcaagggtcttcttaacctgactgacgtaacaattccggcctatcagcgcccttataaatggacgg

SEQ ID NO: 379070 - DNA, 75 bp, synthetic construct
  source 1..75: mol_type = other DNA
gaaaataataataaccgccgtaccggtaaccatgagcaagacgagctggtgaggctgttcaaggagatgaactac

SEQ ID NO: 379071 - DNA, 75 bp, synthetic construct
  source 1..75: mol_type = other DNA
cctcactgccagtccctatacggtgagcgcggcggtcagcgacaaagccggaaatccggcttcagcaacgcataa

SEQ ID NO: 379072 - DNA, 75 bp, synthetic construct
  source 1..75: mol_type = other DNA
actgcgatgacgtataccaaaagcaaaacgtttaaaaccgaatctggcgcgcgtcgctggctggaaagaaactca

SEQ ID NO: 379073 - DNA, 75 bp, synthetic construct
  source 1..75: mol_type = other DNA
aaatgataaaaagtggcctcttctttatgaatttgaacgtttaattcgaggggttaatccagagatcgttacaat

SEQ ID NO: 379074 - DNA, 75 bp, synthetic construct
  source 1..75: mol_type = other DNA
taaccgtgcgcttcatgagttacgaaaaaacggtgcgcttccggttgatgaagcctgggtcgatgattttgtcag

SEQ ID NO: 379075 - DNA, 75 bp, synthetic construct
  source 1..75: mol_type = other DNA
cggtcgcatcaatgcccgcctggaggatgagggctttaccgtaaaatcagttttccggcagtcagccagttacag

SEQ ID NO: 379076 - DNA, 75 bp, synthetic construct
  source 1..75: mol_type = other DNA
ccgccacgttcccggaaaaactgagccggtcctccatctggaacatattcagcccgtccgcaatttattaatcac

SEQ ID NO: 379077 - DNA, 75 bp, synthetic construct
  source 1..75: mol_type = other DNA
acgaatctctggtgtgcggtgtgtttcccaaccaggacggaacgttcaccgcgatgacgtataccaaaagcaaaa

SEQ ID NO: 379078 - DNA, 75 bp, synthetic construct
  source 1..75: mol_type = other DNA
acggtgttctcagcaaacagttccgctacccggcgttaagggcaaatgaggtcaacatggatacactcaatcttg

SEQ ID NO: 379079 - DNA, 75 bp, synthetic construct
  source 1..75: mol_type = other DNA
acggctgaccgggcgtcttcaggcgttaaatgaaagggttcctgagctcattactgacagtaaggcgttaaggga

SEQ ID NO: 379080 - DNA, 75 bp, synthetic construct
  source 1..75: mol_type = other DNA
ccgctaccccggcgttaaggggaaatgaggtcagcatggatactatcgatcttggcaacagcgaatctctggtat

SEQ ID NO: 379081 - DNA, 75 bp, synthetic construct
  source 1..75: mol_type = other DNA
gccatgacttataccaaaagcaaaacgtttaaaaccgaagctggcgcgcgtcgctggctggaaagaaactcaggt

SEQ ID NO: 379082 - DNA, 75 bp, synthetic construct
  source 1..75: mol_type = other DNA
cacgttcaccgcgatgacgtataccaaaagcaaaacgtttaaaaccgaaaatggtgcccgtcgctggctggaaag

SEQ ID NO: 379083 - DNA, 75 bp, synthetic construct
  source 1..75: mol_type = other DNA
caccaccaccgtacagacgggtggaagctggagctacactgttggcagtgccgatatcggcgcactggctgatgg

SEQ ID NO: 379084 - DNA, 75 bp, synthetic construct
  source 1..75: mol_type = other DNA
ggtgaaatgctaaccacacgtctggaagacggctgggtagaaagtgaagtaaaaaacatccagccggtaaaaaaa

SEQ ID NO: 379085 - DNA, 75 bp, synthetic construct
  source 1..75: mol_type = other DNA
tctggaagccgtaagccctctgtcaacgctggcacgcggttatagcgtcaccagcgccgcagatggcgcggtgtt

SEQ ID NO: 379086 - DNA, 75 bp, synthetic construct
  source 1..75: mol_type = other DNA
gccatgacgtataccaaaagcaaaacatttaaaactgaaacaggcgcacgtcgttggttgggaagacattcaggt

SEQ ID NO: 379087 - DNA, 75 bp, synthetic construct
  source 1..75: mol_type = other DNA
aatcaaatctggtatcacctgcgccctttaactgaccgtgaagcgatcatgttaggaaaaagtgtgtctggctta

SEQ ID NO: 379088 - DNA, 75 bp, synthetic construct
  source 1..75: mol_type = other DNA
acgcaagattccaaagtggtgtatcgaccgtattccttctgatgctcaaatcataggtgaaacggaattacatta

SEQ ID NO: 379089 - DNA, 75 bp, synthetic construct
  source 1..75: mol_type = other DNA
atggatactatcgatcttggcaacagcgaatctctggtatgcggcgtgtttcccaaccaggacggcacgtttacc

SEQ ID NO: 379090 - DNA, 75 bp, synthetic construct
  source 1..75: mol_type = other DNA
ccctccgttaccatcaacaccatcgccacggacgatattcttaacgccgccgaagcgggatcggcgctgaccatc

SEQ ID NO: 379091 - DNA, 75 bp, synthetic construct
  source 1..75: mol_type = other DNA
gccatgacgtataccaaaagcaagacattcaaaactgaaacgggcgcacgtcgctggcttgccagaaatacttgc

SEQ ID NO: 379092 - DNA, 75 bp, synthetic construct
  source 1..75: mol_type = other DNA
tctttttatgaatcaatctgttaaggctgattataaaaaagcgcaacaatatgttattgatagtctgagtgatgc

SEQ ID NO: 379093 - DNA, 75 bp, synthetic construct
  source 1..75: mol_type = other DNA
ccatcaacgccattgtggggcaggaaattctgcccaaccgtaaccgccccatgacctctgttccgacactcatcc

SEQ ID NO: 379094 - DNA, 75 bp, synthetic construct
  source 1..75: mol_type = other DNA
agcggaggggaaagtgtttacgcaggttcagtgggagcagaaattcgcccgtcacgtaaatcacgtcagggcgca

SEQ ID NO: 379095 - DNA, 75 bp, synthetic construct
  source 1..75: mol_type = other DNA
ccaaagatctaaaccccacacataacgcacgcgagagtgctccgaccagtgagcaggaagttttgtcgttacagg

SEQ ID NO: 379096 - DNA, 75 bp, synthetic construct
  source 1..75: mol_type = other DNA
agtagtgtggggtatggctctgcctgagccggaatttacacctgctgagcttgccgcattccgggattactggat

SEQ ID NO: 379097 - DNA, 75 bp, synthetic construct
  source 1..75: mol_type = other DNA
ggtgatacgttgaccacacgacttggtgatggtgtggtgattagtgaagttagcgccgtaacaaaaacccgcaaa

SEQ ID NO: 379098 - DNA, 75 bp, synthetic construct
  source 1..75: mol_type = other DNA
gcgaaatctctaatttcacacaaccggcttccggtcactggtactttacactcaaagacgataccgcccaggtgc

SEQ ID NO: 379099 - DNA, 75 bp, synthetic construct
  source 1..75: mol_type = other DNA
attaccgcgaagaacaggtgattgatgatgtgccacagtggttaaaaagtacggttgaaaagatgcatgataaag

SEQ ID NO: 379100 - DNA, 75 bp, synthetic construct
  source 1..75: mol_type = other DNA
ccaattatatatttgtttgcaagtagttgtgcttccagtttgtttttaagtttgagtaatctcaatatcacacta

SEQ ID NO: 379101 - DNA, 75 bp, synthetic construct
  source 1..75: mol_type = other DNA
atttcgtactacgttttaaaaagcaccatagattttgaatggcgcagtcaggttaaatgtggagagttgaatatt

SEQ ID NO: 379102 - DNA, 75 bp, synthetic construct
  source 1..75: mol_type = other DNA
tcagtgggagcagaaatttgcccgccacgtgcagcacgtcagggcacaggtaaaaccagtcagcaaggggggaag

SEQ ID NO: 379103 - DNA, 75 bp, synthetic construct
  source 1..75: mol_type = other DNA
cttcatgttaatgcaacttattatctattttgcttttttaactctgtgggctaaattaagtgtgtacaggttgtt

SEQ ID NO: 379104 - DNA, 75 bp, synthetic construct
  source 1..75: mol_type = other DNA
caaaaaatgtagaaggtatttcgtactacgttttaaaaagcaccatagattttgaatggcgtaatcagattaaat

SEQ ID NO: 379105 - DNA, 75 bp, synthetic construct
  source 1..75: mol_type = other DNA
taataaaaacaggttgaatagttgtgctgcctggtgttcacttattgcatggtttatatttttgttttttgtgct

SEQ ID NO: 379106 - DNA, 75 bp, synthetic construct
  source 1..75: mol_type = other DNA
acgctggcacgcggttatagcgtcaccagcgccgccgatggcgcagtgttgaagcaggtgaagcaggtgaaagcg

SEQ ID NO: 379107 - DNA, 75 bp, synthetic construct
  source 1..75: mol_type = other DNA
cctgccctacccccacgttaatcagcaaggcgaaattgaagctgatgccgactggtgggccactatgcaggcagc

SEQ ID NO: 379108 - DNA, 75 bp, synthetic construct
  source 1..75: mol_type = other DNA
accttattccccgaataacgagatcccttccagcaccgggcaattgcccggttttttttgcgttgaatttgtcat

SEQ ID NO: 379109 - DNA, 75 bp, synthetic construct
  source 1..75: mol_type = other DNA
tataaatccagagcttgggcagccaaatggttatacggaatgggaaccaaaggatattcagacacgaatgccggt

SEQ ID NO: 379110 - DNA, 75 bp, synthetic construct
  source 1..75: mol_type = other DNA
aattactgcaaatttcaccggaagtacaggatgccattaacagtaaaaaacctgttgttgctctcgagtcaacaa

SEQ ID NO: 379111 - DNA, 75 bp, synthetic construct
  source 1..75: mol_type = other DNA
aacgctgttgatttccgcgaaattgattacactcgcccgacctgtattttgatgggacaggagaaaacgggcatc

SEQ ID NO: 379112 - DNA, 75 bp, synthetic construct
  source 1..75: mol_type = other DNA
atgaatgcacaacgttatgcgcgtatctgcgaaatgctcgccaggcgacagcctgatctgactgtctgcatggaa

SEQ ID NO: 379113 - DNA, 75 bp, synthetic construct
  source 1..75: mol_type = other DNA
atgtgcataactcatgtagttagtttttctggcgggagaacatccgcatatcttgttcacctgatggaagaacaa

SEQ ID NO: 379114 - DNA, 75 bp, synthetic construct
  source 1..75: mol_type = other DNA
gtaaagggttaccgacctggggcgacgaagtgcgtttgtgctgggaagtggacagctgtgtggtgctgacggttt

SEQ ID NO: 379115 - DNA, 75 bp, synthetic construct
  source 1..75: mol_type = other DNA
attacatcacatggctgggtattcgtgcagacgaaccccgtaggctgaaaccgaaatcgggcgtccggtatcttg

SEQ ID NO: 379116 - DNA, 75 bp, synthetic construct
  source 1..75: mol_type = other DNA
accgtgttgcaggtcgatataaatccagagcttgggcagccaaatggttatacggaatgggaaccaaaggatatt

SEQ ID NO: 379117 - DNA, 75 bp, synthetic construct
  source 1..75: mol_type = other DNA
tgatactggttcgtgtcctgaatcatgtgaaatctggggtgatcaattggagttgaaattcgaagagatagtggc

SEQ ID NO: 379118 - DNA, 75 bp, synthetic construct
  source 1..75: mol_type = other DNA
ccgaaatcgggcgtcaggtatctcgccgagctgtctgattttgataagtcggatgttatccggtggtggcgtaaa

SEQ ID NO: 379119 - DNA, 75 bp, synthetic construct
  source 1..75: mol_type = other DNA
tggatgaaaggtaagtttgttaaacctgattgctctccttctatgaatcgtattggttggtcagaaggttgtaag

SEQ ID NO: 379120 - DNA, 75 bp, synthetic construct
  source 1..75: mol_type = other DNA
aggagctgctggagaaagcagccaatgatgaaaaaaaccaacaggagcgcgataaacaacttatcgatcgggttc

SEQ ID NO: 379121 - DNA, 75 bp, synthetic construct
  source 1..75: mol_type = other DNA
atatgtgcagaacgcccttctttctcagggatggacaccaaagaaagaagagatagtgcttgcaagcacagtcga

SEQ ID NO: 379122 - DNA, 75 bp, synthetic construct
  source 1..75: mol_type = other DNA
atgaatagtttgctgccaccgggttcaactccactggagcgccgactggcgcaaacctgcagcgggatttctgat

SEQ ID NO: 379123 - DNA, 75 bp, synthetic construct
  source 1..75: mol_type = other DNA
agagccatgataagggtaaaactttcaaagtcattatggagacccttgacgagctgggctacgaagttgccgatg

SEQ ID NO: 379124 - DNA, 75 bp, synthetic construct
  source 1..75: mol_type = other DNA
tctcccctaaactctgggagtacttatacaactatgcaaagaaacatgcggcaaaaggcaatggttttggttttg

SEQ ID NO: 379125 - DNA, 75 bp, synthetic construct
  source 1..75: mol_type = other DNA
gcggaaatgtgctggcgcaggcagaagcgtttcgcggtttaggagtagaaattaaacgcgagattaatccggatt

SEQ ID NO: 379126 - DNA, 75 bp, synthetic construct
  source 1..75: mol_type = other DNA
caacatgcacagcaaaaagccgagcaactagccgaacgtgaagagatggttgcggagttaagtgcggcaaaacaa

SEQ ID NO: 379127 - DNA, 75 bp, synthetic construct
  source 1..75: mol_type = other DNA
cagactcaagtgagtatcgaaaccgacactcgttcgcgaatgcaaccggatgtcatcgtgcggctgccgcagggc

SEQ ID NO: 379128 - DNA, 75 bp, synthetic construct
  source 1..75: mol_type = other DNA
tcccgaaaagattcagttcaacaagctggtcttcctaaagcattacagcggcaaatctcgtcgcgattttgaaga

SEQ ID NO: 379129 - DNA, 75 bp, synthetic construct
  source 1..75: mol_type = other DNA
gtgaagtgaatatcaaggagtgtccggtatgtggcagctccaactggaaggtatatttcaatctgaccagtggcg

SEQ ID NO: 379130 - DNA, 75 bp, synthetic construct
  source 1..75: mol_type = other DNA
cagatattcgatatgcgaatactgataccggtttacgatctggatggggtaatgaagacatttcagggacgagac

SEQ ID NO: 379131 - DNA, 75 bp, synthetic construct
  source 1..75: mol_type = other DNA
gccgccgcaaaagcctgtgcggaaattgaaaaaacgccggtcagtattcgtgagctgtggaacccggacacctgt

SEQ ID NO: 379132 - DNA, 75 bp, synthetic construct
  source 1..75: mol_type = other DNA
agaaaaacaggtcaacaacgccttagcccgcgtcaacaacctgacgcaatccatcctggcaaaagcgttccgtgg

SEQ ID NO: 379133 - DNA, 75 bp, synthetic construct
  source 1..75: mol_type = other DNA
tctagaatgttcagaaagtgaactaaaccgccacaaattacaaggtggagatcttttatttactcgctataacgg

SEQ ID NO: 379134 - DNA, 75 bp, synthetic construct
  source 1..75: mol_type = other DNA
ttcttgtattgatggggatcgaggtcctaattatccaaaaaaaaatgattatcttactgatggacactgtctctt

SEQ ID NO: 379135 - DNA, 75 bp, synthetic construct
  source 1..75: mol_type = other DNA
ctgaaccttgcgccggttaacttcgatgcgctgttcatgaactatttgcagcaggctggcgaaggtactgaagaa

SEQ ID NO: 379136 - DNA, 75 bp, synthetic construct
  source 1..75: mol_type = other DNA
tgatctggatacggcatcttcccaactggcagatgacgtatacgaagtggtactgcgtgttaccgtaacggcctc

SEQ ID NO: 379137 - DNA, 75 bp, synthetic construct
  source 1..75: mol_type = other DNA
cctgggcgaagaaaccgcgttcctgtgtgaggttcagcagggcggtattttctccatcgcgggtatcgaaggcac

SEQ ID NO: 379138 - DNA, 75 bp, synthetic construct
  source 1..75: mol_type = other DNA
ccaacaccaaaaaaatattgtacaaaaccaactaagattgcgtccgctggggatattttattatctgtaagagcc

SEQ ID NO: 379139 - DNA, 75 bp, synthetic construct
  source 1..75: mol_type = other DNA
aatggcaagtttgatactacggacttggtttttgtgcctaaaaatcttgttaaagaaagtcaaaaaatatctcct

SEQ ID NO: 379140 - DNA, 75 bp, synthetic construct
  source 1..75: mol_type = other DNA
gccgctgggctatctcatcaacgtgacggagtggtgggaaaccagtgacccgcccggcaccttccggcttgatat

SEQ ID NO: 379141 - DNA, 75 bp, synthetic construct
  source 1..75: mol_type = other DNA
atggctacgaccctcaccccgtcacacccgcagtttgtctttgtgtttgccgccgttcgtcgtgctgaccgtaaa

SEQ ID NO: 379142 - DNA, 75 bp, synthetic construct
  source 1..75: mol_type = other DNA
aatatcgccgcatttaaagtgttcggtgccaacccaatcccgatgccatttgctgaagtctataccggcctggaa

SEQ ID NO: 379143 - DNA, 75 bp, synthetic construct
  source 1..75: mol_type = other DNA
tcggtggtgcagatatgccagtcgtcgtgtcaatgctgaactcatactctggttgggcggcagctgcagcgggct

SEQ ID NO: 379144 - DNA, 75 bp, synthetic construct
  source 1..75: mol_type = other DNA
tggggcgattggtatccgcctggcgaagaaagttgaaatgaccgaaatgccagaactggtggcaatcctgcatag

SEQ ID NO: 379145 - DNA, 75 bp, synthetic construct
  source 1..75: mol_type = other DNA
acttgaaggctccgggaagaaactacgatgaagtttttgactatctaaagcaatttacatactgtaaatatcttg

SEQ ID NO: 379146 - DNA, 75 bp, synthetic construct
  source 1..75: mol_type = other DNA
gatccgtaccaacaatagtccaatgaatattgcggcattcaaaatcttcggtgctaacccgatcccgatgccatt

SEQ ID NO: 379147 - DNA, 75 bp, synthetic construct
  source 1..75: mol_type = other DNA
gttggttttaacagctatctgcatcacgacgcggaaatggcgccgattctggccaatattcacctgacggaagtg

SEQ ID NO: 379148 - DNA, 75 bp, synthetic construct
  source 1..75: mol_type = other DNA
ggctgggcggctgcggctgcgggctttatgctcagcaacgacctgctgattgtgaccggtgcgctggtcggttct

SEQ ID NO: 379149 - DNA, 75 bp, synthetic construct
  source 1..75: mol_type = other DNA
gaaaaatccgttgacgtggtctgctatgacgaactttcctcgttcgagccggatgtcgaaaaagagggctcgcca

SEQ ID NO: 379150 - DNA, 75 bp, synthetic construct
  source 1..75: mol_type = other DNA
actctgtcgaacaggcgctggaactgaagcgccgctaccaggatgaagccgtctggttcgccgggggcagcaaac

SEQ ID NO: 379151 - DNA, 75 bp, synthetic construct
  source 1..75: mol_type = other DNA
gcagaagtgtctgacgtcggggctgtgagcggtgcctatcaggccggcggacgctttactgcattctatcgcctt

SEQ ID NO: 379152 - DNA, 75 bp, synthetic construct
  source 1..75: mol_type = other DNA
ttctcggtgcatttgaaggcatttctgaaatccgtggctattcagaaatcgggacatcacgcatcactcataccg

SEQ ID NO: 379153 - DNA, 75 bp, synthetic construct
  source 1..75: mol_type = other DNA
tggccggtgacgagctggccgcccgccgcacccttgtccgggaatacgtgctttcccttgccgcccgtctgccgg

SEQ ID NO: 379154 - DNA, 75 bp, synthetic construct
  source 1..75: mol_type = other DNA
gatctggaactggactgggttgactgggataacggcgcattgcgtattggcgcaatgtctcgcttgcagccactg

SEQ ID NO: 379155 - DNA, 75 bp, synthetic construct
  source 1..75: mol_type = other DNA
gggataacggtgcactgcggattggcgcaatgtctcgcttgcagccactgcgtgatgcgcgatttattcctgcag

SEQ ID NO: 379156 - DNA, 75 bp, synthetic construct
  source 1..75: mol_type = other DNA
cggtattgaccccaccatcgtctacaaccgctcaaaaaaacacggtctgtttcgtgtgatccctataaagggggc

SEQ ID NO: 379157 - DNA, 75 bp, synthetic construct
  source 1..75: mol_type = other DNA
aacgccatccgtaacgacgtgctggacgccgccagcaatctcggtgccagccgctggcgcagttttaccggcgtg

SEQ ID NO: 379158 - DNA, 75 bp, synthetic construct
  source 1..75: mol_type = other DNA
cagctgccggggctacgaacgctggattacgtgctgatgtttatccctgtggaacccgcttttttactggcgctt

SEQ ID NO: 379159 - DNA, 75 bp, synthetic construct
  source 1..75: mol_type = other DNA
cgaagtgcgcagcctgcaaagtattaacacctctctggaggccgatctgcgtgaagtaaccacgcggatggaagc

SEQ ID NO: 379160 - DNA, 75 bp, synthetic construct
  source 1..75: mol_type = other DNA
caatctttacgtttcggttatgaaacatcacaaaccgactcgcaacatattgcggcgaaaaaattcaatgattta

SEQ ID NO: 379161 - DNA, 75 bp, synthetic construct
  source 1..75: mol_type = other DNA
agtgcagaagtacctttctctgacgcaccacgcctattccccgcttctggtggtgatcaacaaagcgaagtttga

SEQ ID NO: 379162 - DNA, 75 bp, synthetic construct
  source 1..75: mol_type = other DNA
atgaaattacgctctgtaacctacgcattattcattgctggcctggctgcattcagcacatcttctctggcggcg

SEQ ID NO: 379163 - DNA, 75 bp, synthetic construct
  source 1..75: mol_type = other DNA
atgaaaaacgtctacatcccctacttcatcctgggctttgttgccgccgcctggctcaagttaccggtgctggct

SEQ ID NO: 379164 - DNA, 75 bp, synthetic construct
  source 1..75: mol_type = other DNA
gagcaggatttaccgctttcgttgaccgtggtcggtattgcgccggaagagctatctacatgggctgatgcggac

SEQ ID NO: 379165 - DNA, 75 bp, synthetic construct
  source 1..75: mol_type = other DNA
cgatgtcaccaactcgcgcgcaccggttaaaacccccgccgacctgaaagggctgaaaatccgcaccaacaatag

SEQ ID NO: 379166 - DNA, 75 bp, synthetic construct
  source 1..75: mol_type = other DNA
cccgaaggttataacgatcgtcaggcggtgaacggtagcttctacaagctcaccttcgccccgacatttaaggtc

SEQ ID NO: 379167 - DNA, 75 bp, synthetic construct
  source 1..75: mol_type = other DNA
tcactggattgactctgatgtcgtgttcctcgccggtaccggtggtggtatctatgacgtgaagtggaacgacgg

SEQ ID NO: 379168 - DNA, 75 bp, synthetic construct
  source 1..75: mol_type = other DNA
gtatatggatctgaaacctgaagggtataaggaccgcaatgctgttaacggcagtttttacaagctgacgtttgc

SEQ ID NO: 379169 - DNA, 75 bp, synthetic construct
  source 1..75: mol_type = other DNA
attgtccgccggtcactggcaacggtgcctgcggccgctgtacctgtgcctgatgatgtggctgaccgggtgcgg

SEQ ID NO: 379170 - DNA, 75 bp, synthetic construct
  source 1..75: mol_type = other DNA
tgatgatgtggctgaccgggtgcggcgggccgtctgtgaaattcgtccctgtgccgccggtgccgatccccgctg

SEQ ID NO: 379171 - DNA, 75 bp, synthetic construct
  source 1..75: mol_type = other DNA
caacccgcagtcgggtatgggggttaacgacacctcggcgctggtcaacttctacgggctgaatgccggagaaac

SEQ ID NO: 379172 - DNA, 75 bp, synthetic construct
  source 1..75: mol_type = other DNA
tactcgcggcattgaacgcgtgaactatctggcactgctggcactcggcactttctattttctctgcgctttcct

SEQ ID NO: 379173 - DNA, 75 bp, synthetic construct
  source 1..75: mol_type = other DNA
cgcgccgaccgtccgcgcattgatgcctggcagaccatagtgaacggcagactggggctgcacgacccgaacgcg

SEQ ID NO: 379174 - DNA, 75 bp, synthetic construct
  source 1..75: mol_type = other DNA
gatgcagtcgaaccggctgagcgtgctgcgtatggttggccggacgtggctgaccatcaccctggtctcagtact

SEQ ID NO: 379175 - DNA, 75 bp, synthetic construct
  source 1..75: mol_type = other DNA
ccagctttgagcgggttctgatgcccgggctcgataaagaccagtacagcattctgtgggtggagcacaccgaca

SEQ ID NO: 379176 - DNA, 75 bp, synthetic construct
  source 1..75: mol_type = other DNA
tatcgtatgcaggcgttacttagcgtatttctggggtatcttgcatactatatcgtgcgtaataatttcacctta

SEQ ID NO: 379177 - DNA, 75 bp, synthetic construct
  source 1..75: mol_type = other DNA
gcatcgccttattaccagagttaacgctgaaaaccattgcagatgaattgtgttccgttcctctcgaaccaacct

SEQ ID NO: 379178 - DNA, 75 bp, synthetic construct
  source 1..75: mol_type = other DNA
cacgaccggaagctgtcctcagccatgagccaacgcacgaaagggatgctgcgtatgatcagccagacgtggctg

SEQ ID NO: 379179 - DNA, 75 bp, synthetic construct
  source 1..75: mol_type = other DNA
atgcatctctttgggatgcaaggaacgtgactgagagtctgatcactgcaaccgagcgcctggccgattaccctc

SEQ ID NO: 379180 - DNA, 75 bp, synthetic construct
  source 1..75: mol_type = other DNA
gcggagaaacagttcttaacgctgttcccggagcaaaaacggattgtgaatttacgctctcaggtgacgatggcg

SEQ ID NO: 379181 - DNA, 75 bp, synthetic construct
  source 1..75: mol_type = other DNA
gtgaatgatgaggccagtcgtgtcaatatcctggcggttgtaggccagcgtcagaatccccgattcattctttga

SEQ ID NO: 379182 - DNA, 75 bp, synthetic construct
  source 1..75: mol_type = other DNA
ggtctgccgaaagagcatccggaaagctactacagctttatgcaccgtaatttcttcgatcacgttgatattcca

SEQ ID NO: 379183 - DNA, 75 bp, synthetic construct
  source 1..75: mol_type = other DNA
tcccgctttgcgcctccgatcccatccgttggcagcaccgtaccaccgacgtggagcacggcatctggtctgacg

SEQ ID NO: 379184 - DNA, 75 bp, synthetic construct
  source 1..75: mol_type = other DNA
cgcccgcaagcagataccgactattctgcccgccttgctggaagaagagctgaaccaggatatcgatgaactgca

SEQ ID NO: 379185 - DNA, 75 bp, synthetic construct
  source 1..75: mol_type = other DNA
gagaacgataaaagcactgcacgagaatctctccggcttaccgatgtggcgtcttttatcgcagacatcacctac

SEQ ID NO: 379186 - DNA, 75 bp, synthetic construct
  source 1..75: mol_type = other DNA
tatggatggggctggctccgctggcgggcgcacagccgcctaacgtaattatcggtactatagtcggtacggcat

SEQ ID NO: 379187 - DNA, 75 bp, synthetic construct
  source 1..75: mol_type = other DNA
atggaaatcagtctgttgcaggcattcgtgttgggcattctcgcatttatcgctggcctggatatgtttaacggc

SEQ ID NO: 379188 - DNA, 75 bp, synthetic construct
  source 1..75: mol_type = other DNA
gcagcaggcgcagcaacgggagagctggcagccagagcgattgccggaatgctgtatccgggagtgaagcagtca

SEQ ID NO: 379189 - DNA, 75 bp, synthetic construct
  source 1..75: mol_type = other DNA
agcctcacagcgtcgcgtttatgcaaacaaaatttagctattaattcccagaatcggattagcacccaacgcgaa

SEQ ID NO: 379190 - DNA, 75 bp, synthetic construct
  source 1..75: mol_type = other DNA
caggcggcatcatgccagcaatcggttttgccgtgctgctgaaaatcatgatgaaaaacgtttacatcccctact

SEQ ID NO: 379191 - DNA, 75 bp, synthetic construct
  source 1..75: mol_type = other DNA
cctttcgccgtcgcggtacagatggggattaccttcctgttctcggtgatgtctggcgtgatgtcccgttgcgac

SEQ ID NO: 379192 - DNA, 75 bp, synthetic construct
  source 1..75: mol_type = other DNA
gcgtatcgaaaaagaactcgctcgggcgggcgcacggttttgcctgcgatacccagggcacgctgttctttgatg

SEQ ID NO: 379193 - DNA, 75 bp, synthetic construct
  source 1..75: mol_type = other DNA
tcatccggtgaagagattgagccgccggacagtgtgacctttcacatctggacggcgtacagcccgttcaccacc

SEQ ID NO: 379194 - DNA, 75 bp, synthetic construct
  source 1..75: mol_type = other DNA
gcagggtaataatgttgctgccggtgcagcaggcgcagcaacgggagagctggcagccagagcgattgccggaat

SEQ ID NO: 379195 - DNA, 75 bp, synthetic construct
  source 1..75: mol_type = other DNA
cactgacggaagaagccctggagcagatcggtcagttgtacgccatagaggcggatataaggggaatgccggcag

SEQ ID NO: 379196 - DNA, 75 bp, synthetic construct
  source 1..75: mol_type = other DNA
atgaacgtgctgatgggcgcgccgaatattgtgcgcggcggctcgcactccggcaacgtggcggccagtgaactg

SEQ ID NO: 379197 - DNA, 75 bp, synthetic construct
  source 1..75: mol_type = other DNA
aggtgagattccgcgaattggtgatgtctatgaagcctttaaacgctatgcgcgaaaacctggcgtaatagatag

SEQ ID NO: 379198 - DNA, 75 bp, synthetic construct
  source 1..75: mol_type = other DNA
ctacgctcttcctgcggctctatttgtttctattacccgggcaaacagggaaatgatttttgcggacactcgtct

SEQ ID NO: 379199 - DNA, 75 bp, synthetic construct
  source 1..75: mol_type = other DNA
gttttatctgccccagcagcgcgaggtagtagacagcaacgggaacacggttcttgatgctgacggcaaccctaa

SEQ ID NO: 379200 - DNA, 75 bp, synthetic construct
  source 1..75: mol_type = other DNA
ataaaaagtggctccatacgttgggtaatttaacgttaactggctataactcaagctacagcgaccgtccatttg

SEQ ID NO: 379201 - DNA, 75 bp, synthetic construct
  source 1..75: mol_type = other DNA
tttgactggcgataaattctacgcagaagagaaaatattatttgaaaacagcaagatagaactttctgaacatct

SEQ ID NO: 379202 - DNA, 75 bp, synthetic construct
  source 1..75: mol_type = other DNA
acacccgcactggtacagcgtcattggctgtgagcgtactgggttttgtcgtcacggctcccttgtggatttatg

SEQ ID NO: 379203 - DNA, 75 bp, synthetic construct
  source 1..75: mol_type = other DNA
aatccttcctcaggagcggatggtaagaagaatagtaatctgagcgcattaatttctgcggcaaaggagccagta

SEQ ID NO: 379204 - DNA, 75 bp, synthetic construct
  source 1..75: mol_type = other DNA
atgaagccgccattcgcgcccgtgccgatcgcctggccgatctcgcggttcaggtctggcaagcgcctgctcttt

SEQ ID NO: 379205 - DNA, 75 bp, synthetic construct
  source 1..75: mol_type = other DNA
cggacagagcgagcctgctggcattgattagacaaaaaccgctggcagaaaattgctctctacgcgtgaaagaga

SEQ ID NO: 379206 - DNA, 75 bp, synthetic construct
  source 1..75: mol_type = other DNA
ccaaaatgtatggctaaagatgtcacagatataggccgttggggcaatggcgatgttgaaataggtttcagcgat

SEQ ID NO: 379207 - DNA, 75 bp, synthetic construct
  source 1..75: mol_type = other DNA
gccgccagctctgggacgatgtaatacgtgccgggcagcgtgatgatatcccggcgcattttatcggctcggtgg

SEQ ID NO: 379208 - DNA, 75 bp, synthetic construct
  source 1..75: mol_type = other DNA
atgaagccgccattcgtgcccgtgccgatcgtctggccgatctcgcggttcaggtctggcaagcgccttctcttc

SEQ ID NO: 379209 - DNA, 75 bp, synthetic construct
  source 1..75: mol_type = other DNA
gtggaagagtttacgattgagcacattatgccgcagaacgaaaatttgtcggctaaatggcgtgaagagctggga

SEQ ID NO: 379210 - DNA, 75 bp, synthetic construct
  source 1..75: mol_type = other DNA
tggagttagaggcgatacacgacgcgccagcgtctttttttgtatcggcgcacacgcacacctcaacaatggtgg

SEQ ID NO: 379211 - DNA, 75 bp, synthetic construct
  source 1..75: mol_type = other DNA
tgcctccgttgttcggcaaaaatatctgtaatggattggtactttttgttcatgctgctgccctgtaaagcaatg

SEQ ID NO: 379212 - DNA, 75 bp, synthetic construct
  source 1..75: mol_type = other DNA
ttaagtaacaaccttctttgccgttgtgctttttcgcgctgtcgctcaagtatggataatgcgatttcctgtagt

SEQ ID NO: 379213 - DNA, 75 bp, synthetic construct
  source 1..75: mol_type = other DNA
cgtttgcaggtggatttcttatcgtatacgtcaggtgtcaacgacggatgaaaagtgatccacttatatctccac

SEQ ID NO: 379214 - DNA, 75 bp, synthetic construct
  source 1..75: mol_type = other DNA
catcaagggcaaatcgtttttgtgggtgttttttcactccgggaagaggcgttaactcttcgggttctgatatct

SEQ ID NO: 379215 - DNA, 75 bp, synthetic construct
  source 1..75: mol_type = other DNA
ttctgtctgtttcatagagccgcagaagaaacagcgagctatcagcctggcggtcggtttttagtggcttttaac

SEQ ID NO: 379216 - DNA, 75 bp, synthetic construct
  source 1..75: mol_type = other DNA
gctacgccgatggatctgatgtctattttgcaatcaatgcaaagtgcgggatgtctgcgggcaaaactggaaatc

SEQ ID NO: 379217 - DNA, 75 bp, synthetic construct
  source 1..75: mol_type = other DNA
actcgctgattggttatgggttggtagttggcctggatggtacgggtgaccagacgacccagacgccgtttacca

SEQ ID NO: 379218 - DNA, 75 bp, synthetic construct
  source 1..75: mol_type = other DNA
caaaccatcgatgtggtggtttcttccatgggtaatgccaaaagcttgcgtggaggtacgttgttgatgacaccg

SEQ ID NO: 379219 - DNA, 75 bp, synthetic construct
  source 1..75: mol_type = other DNA
ttcctcacatcacggcgctgatggtttctgtctgtttcatagagccgcagaagaaacagcgagctatcagcctgg

SEQ ID NO: 379220 - DNA, 75 bp, synthetic construct
  source 1..75: mol_type = other DNA
gttattgcctgttttttttcaacgaaatgtttctcatatgctgtgagatcatcttttttattctctgattgtgaa

SEQ ID NO: 379221 - DNA, 75 bp, synthetic construct
  source 1..75: mol_type = other DNA
ggcgcgaatatccgcatgatgcaggaatggcaggcaaaacaaaggcgaccacgaaagggtcgccagtggagagaa

SEQ ID NO: 379222 - DNA, 75 bp, synthetic construct
  source 1..75: mol_type = other DNA
ttaatattcggaaatatcatgatattcctgctgaaacgccgtatgcgccgggagaacgaattaagggagggcaag

SEQ ID NO: 379223 - DNA, 75 bp, synthetic construct
  source 1..75: mol_type = other DNA
cgctgatgagcaacaaacaacgtcaggaatgggatcggcaggtggcaggcgaggaaatgccgccgataacgctgg

SEQ ID NO: 379224 - DNA, 75 bp, synthetic construct
  source 1..75: mol_type = other DNA
atgtatgtacagttatgcggggcgggtatgggcggtaaagatgcaaactatcaggttgtttatagaggtgaagtg

SEQ ID NO: 379225 - DNA, 75 bp, synthetic construct
  source 1..75: mol_type = other DNA
attgatttacatgatgcggtttacggcgcggtagctggctatggggtgctgtggtgtgtttactggggcgtctgg

SEQ ID NO: 379226 - DNA, 75 bp, synthetic construct
  source 1..75: mol_type = other DNA
tgttcgcggctttgctgcatgcgagaaaagtgctttcgctccaacccgagtgcgtgcgctttgatgtttatcgca

SEQ ID NO: 379227 - DNA, 75 bp, synthetic construct
  source 1..75: mol_type = other DNA
tcagcatgggcggcgcgctggcacatccgacaatttcagtttatcggcggtgcgcctgtgacggtctaccgtgag

SEQ ID NO: 379228 - DNA, 75 bp, synthetic construct
  source 1..75: mol_type = other DNA
ccaccaaagcaggctaccgtaacagtaaatggaacggagccagcccgtcggacacgcagagttatctaaccggcc

SEQ ID NO: 379229 - DNA, 75 bp, synthetic construct
  source 1..75: mol_type = other DNA
gggttatctgctgcctttatgtgcgttaccagtcagaaatatcaggatattcctgttgaaacgccgtatgcgccg

SEQ ID NO: 379230 - DNA, 75 bp, synthetic construct
  source 1..75: mol_type = other DNA
attttttctgtccccaatgtgcgaaaatatcgggatattcctgctgaaatgtcgtatgcgccgggagaacaaatt

SEQ ID NO: 379231 - DNA, 75 bp, synthetic construct
  source 1..75: mol_type = other DNA
aactcaaaatcagaagtacagaacaagattataaatacatttccaggattactgacaggtatactggattgtcgc

SEQ ID NO: 379232 - DNA, 75 bp, synthetic construct
  source 1..75: mol_type = other DNA
cacgctcagtgttattgattttcgcactcagctcctgcccgacaaactcaccttaccgctgctctggcttggctt

SEQ ID NO: 379233 - DNA, 75 bp, synthetic construct
  source 1..75: mol_type = other DNA
ctggggcgtctggttagtttgtgtcacgaacggtgcaatagtgatccacacccaacgcctgaaatcagatccagg

SEQ ID NO: 379234 - DNA, 75 bp, synthetic construct
  source 1..75: mol_type = other DNA
ttaccagtcagaaatatcaggatattcctgttgaaacgccgtatgcgccgggagaacacattaagggagggcagc

SEQ ID NO: 379235 - DNA, 75 bp, synthetic construct
  source 1..75: mol_type = other DNA
ctggttcagtggtgatgaaccgtgaagtgacgctggacagttgcgcggtagcacaggggaatctctcggttacgg

SEQ ID NO: 379236 - DNA, 75 bp, synthetic construct
  source 1..75: mol_type = other DNA
actacatcaagcctgattacgtccatgtgctgtatcagggacgaattgtgaaatccggcgatttcacgttggtca

SEQ ID NO: 379237 - DNA, 75 bp, synthetic construct
  source 1..75: mol_type = other DNA
gcgcggattaagcctcgacgttcgtcccggcgaagttcacgccattatgggacccaatggttcggggaaaagtac

SEQ ID NO: 379238 - DNA, 75 bp, synthetic construct
  source 1..75: mol_type = other DNA
gccagtcgtagcgcccaggcggcaaaagagatcaaagccctcattgaagactccgtctcacgcgttgataccggt

SEQ ID NO: 379239 - DNA, 75 bp, synthetic construct
  source 1..75: mol_type = other DNA
aaacgttggtttttccggcggcgagaaaaagcgcaacgatattttgcaaatggcggctggaaccggagttatgca

SEQ ID NO: 379240 - DNA, 75 bp, synthetic construct
  source 1..75: mol_type = other DNA
gaagattatgaagtgacgggcggcacggttgagttcaaaggcaaagatttgcttgcgctgtcgccggaagatcgt

SEQ ID NO: 379241 - DNA, 75 bp, synthetic construct
  source 1..75: mol_type = other DNA
tcagcgtggaagataaagctatcctgcgcggattaagcctcgacgttcgtcccggcgaagttcacgccattatgg

SEQ ID NO: 379242 - DNA, 75 bp, synthetic construct
  source 1..75: mol_type = other DNA
atatggatggcacccttctgctgcccgatcacaccatttcacccgctgttaaaaacgcgattgccgcagctcgcg

SEQ ID NO: 379243 - DNA, 75 bp, synthetic construct
  source 1..75: mol_type = other DNA
gtgtggcgatggataacgctattccttcggtgaaagaagtggcgaactttgtcaccaaatccaaccttgaagatg

SEQ ID NO: 379244 - DNA, 75 bp, synthetic construct
  source 1..75: mol_type = other DNA
tcacaatttgtatgacggtaatcttcaccatctggatgttacacggctcgttgtgtgagttccggctgaatttgt

SEQ ID NO: 379245 - DNA, 75 bp, synthetic construct
  source 1..75: mol_type = other DNA
aacgcaagcggtttccgcgtttcgtctggcagccagcccactcaccaataaaccgcaaacaccatcccgtcctgc

SEQ ID NO: 379246 - DNA, 75 bp, synthetic construct
  source 1..75: mol_type = other DNA
catcatctggatgttgcacggttcgctgtgcgaaatacggatgagtttctggggagcggagtttgcggcgttctt

SEQ ID NO: 379247 - DNA, 75 bp, synthetic construct
  source 1..75: mol_type = other DNA
cgccgtacttcctcgaaatcctcgataaacgcgttaacaaaggtacgggtgtgaaatcactggccgacgtgttag

SEQ ID NO: 379248 - DNA, 75 bp, synthetic construct
  source 1..75: mol_type = other DNA
cttcgattttcaggatttgatggaagagaaaatcgccctgttgaagatgccggaagatttattaacccgttcggt

SEQ ID NO: 379249 - DNA, 75 bp, synthetic construct
  source 1..75: mol_type = other DNA
tggcttgtttttgacgttgacaggccagttgcggcgattgactggaatgatcttaatgcgcccacacctaatttt

SEQ ID NO: 379250 - DNA, 75 bp, synthetic construct
  source 1..75: mol_type = other DNA
cgatatccatagcagcgattacgttctgaacgctgatctggtgaacgaccgtacctgggatacttccaagtctaa

SEQ ID NO: 379251 - DNA, 75 bp, synthetic construct
  source 1..75: mol_type = other DNA
acgttgatcagttcgatactgaagctttccgtactgacaaactggaactgaccagcggcaacatcgctgaccata

SEQ ID NO: 379252 - DNA, 75 bp, synthetic construct
  source 1..75: mol_type = other DNA
tggtgcggttattgaacgtgaattgcccagccagtttggcgtcgggaatacccttaatttgcaacttaacgacga

SEQ ID NO: 379253 - DNA, 75 bp, synthetic construct
  source 1..75: mol_type = other DNA
cgtctgctcaatttgttaggtgtcataaaaattcgaaatgccaaagggctaaaagtctattcgctgaatccacag

SEQ ID NO: 379254 - DNA, 75 bp, synthetic construct
  source 1..75: mol_type = other DNA
gaaaaggcaaggaagttacggcttcagggattgagttatcaggcaatagcagatgcaattcaagtatcacgccgc

SEQ ID NO: 379255 - DNA, 75 bp, synthetic construct
  source 1..75: mol_type = other DNA
ttccagagtggtgtatttaacgtagcgttgaataacggctctgaatgggatacgacaggtatttcgcttgttgat

SEQ ID NO: 379256 - DNA, 75 bp, synthetic construct
  source 1..75: mol_type = other DNA
ccgggtactgtagatggtaactatgtgaattatagtggctttgtctactataacaacaccaatggtgatttcgat

SEQ ID NO: 379257 - DNA, 75 bp, synthetic construct
  source 1..75: mol_type = other DNA
tttgaagccaggcggttattatgatcgtttggatgcagatagtgatcttctggttggatatgatttttacactga

SEQ ID NO: 379258 - DNA, 75 bp, synthetic construct
  source 1..75: mol_type = other DNA
ccagagcggtgtatttaacgtagcgttgaacaacggttctgaatgggatactacaggtcgttccatcgttgatac

SEQ ID NO: 379259 - DNA, 75 bp, synthetic construct
  source 1..75: mol_type = other DNA
ctggtgaacgaccgtacctgggatacttccaagtctaactacggttacggtattgttgctatgaactctgatggt

SEQ ID NO: 379260 - DNA, 75 bp, synthetic construct
  source 1..75: mol_type = other DNA
gttctggttatggtcatttcggtaactctggtgagccgagtgattatgctggcccgggtgacgttgcattgtctt

SEQ ID NO: 379261 - DNA, 75 bp, synthetic construct
  source 1..75: mol_type = other DNA
acacttacgacggttccggcggctgggtgtacagctccggcaccggaacgtggctggcgaacggcgggatggacg

SEQ ID NO: 379262 - DNA, 75 bp, synthetic construct
  source 1..75: mol_type = other DNA
atttccgttcagcggtggcaactggatctggatgcactggcccgcgccagaagagatgaacaggacgacgatgaa

SEQ ID NO: 379263 - DNA, 75 bp, synthetic construct
  source 1..75: mol_type = other DNA
ccgttttgagatgtatgtctggggatgggcaccgggagaggaagcctttctggtggataaaatcatcattatggg

SEQ ID NO: 379264 - DNA, 75 bp, synthetic construct
  source 1..75: mol_type = other DNA
gttcgttggtacgggctataacgacaccttctttgccaccgcaggcaccgacacttacgacggttccggcggctg

SEQ ID NO: 379265 - DNA, 75 bp, synthetic construct
  source 1..75: mol_type = other DNA
gcttcaaatggtctccgggagaacctgccagcgtttactacctctgtgaacacaatgcctgtgtgattaaacaac

SEQ ID NO: 379266 - DNA, 75 bp, synthetic construct
  source 1..75: mol_type = other DNA
caactatggcaattttgattccagatatgtgaaagatgttcgacttggttcacagcaatattatggagtgaacaa

SEQ ID NO: 379267 - DNA, 75 bp, synthetic construct
  source 1..75: mol_type = other DNA
ttcgccgttctgaagaatgtcttcatatcatccctacccgagaaaatgagggggaaaatggcgatatagggccac

SEQ ID NO: 379268 - DNA, 75 bp, synthetic construct
  source 1..75: mol_type = other DNA
atgcaattacggggcttggcattatcggtgcagttgatggcgatgatccggcagtattcagaccaatacaaaaat

SEQ ID NO: 379269 - DNA, 75 bp, synthetic construct
  source 1..75: mol_type = other DNA
tgttatgacgaactctcctcgtttgaaccggatgtggaaaaagaaggttcgccaacactgcttggcgataaacgt

SEQ ID NO: 379270 - DNA, 75 bp, synthetic construct
  source 1..75: mol_type = other DNA
tagccgatgaatatctctccatgttcaaaggcccgaaccgcattgataagcggttgggtgactctgaaagaacga

SEQ ID NO: 379271 - DNA, 75 bp, synthetic construct
  source 1..75: mol_type = other DNA
ggcttaatgtccacgccgaacgtggctgagtcttaccagagcaagtttaaaggccgcaacggtctggataaggtt

SEQ ID NO: 379272 - DNA, 75 bp, synthetic construct
  source 1..75: mol_type = other DNA
gtacagatagtctgtgactggctggatgcactgaaagatcccaacggcgtgaaaacttttgtgaacaccacgctg

SEQ ID NO: 379273 - DNA, 75 bp, synthetic construct
  source 1..75: mol_type = other DNA
gggataacaaaaagcggcgtaacgaagcgctggactgcctggtgtatgcctacgcggcattacgtgtgtccgtgc

SEQ ID NO: 379274 - DNA, 75 bp, synthetic construct
  source 1..75: mol_type = other DNA
gcactgaaagatcccaacggcctgaaaacctttgtgaacaccacgctgggcgagacctgggaagaggctgtgggc

SEQ ID NO: 379275 - DNA, 75 bp, synthetic construct
  source 1..75: mol_type = other DNA
ctacaacgcggtgctgatcaaatccaccggcaccaccgccagcaatatcgaccagacggtcaacaccagctgggg

SEQ ID NO: 379276 - DNA, 75 bp, synthetic construct
  source 1..75: mol_type = other DNA
ggggatcgatggcgaaattgtctatcagaggtcaaaaaaacacggtgttttccgggtgctgccggtaaaaggtgc

SEQ ID NO: 379277 - DNA, 75 bp, synthetic construct
  source 1..75: mol_type = other DNA
gcctcaaatggatgccggatgatccctccagcgtgttttatctctgtgagcataatgcctgcgtcatccgtcagc

SEQ ID NO: 379278 - DNA, 75 bp, synthetic construct
  source 1..75: mol_type = other DNA
accattaaacctcacagaagaaatcacgcctacttatccgacaaaggcgaattatcttattcatcctgtgcgata

SEQ ID NO: 379279 - DNA, 75 bp, synthetic construct
  source 1..75: mol_type = other DNA
ttgcggtgcgcaagttattcccggcaattatggtaattttgactcacgttatgtgagagatgtccgacttggtac

SEQ ID NO: 379280 - DNA, 75 bp, synthetic construct
  source 1..75: mol_type = other DNA
tacccacgacgattatcagaactacgaatacggttattcggtttctgaccgccagcagtttgttggtgagtttac

SEQ ID NO: 379281 - DNA, 75 bp, synthetic construct
  source 1..75: mol_type = other DNA
cggcgggaacgatgaaaaatatgcgttacgctttcgcttatggcgcagatgctgtttatgcgggccagccgcgtt

SEQ ID NO: 379282 - DNA, 75 bp, synthetic construct
  source 1..75: mol_type = other DNA
acaagcgcgacccgaaccagggcacctgcaccaacgcctgccgctgggagtacaacgtccaggaagggaaagaag

SEQ ID NO: 379283 - DNA, 75 bp, synthetic construct
  source 1..75: mol_type = other DNA
aggcgatggttatactgtgtggctcccggtgccgcaggatctcgaactgaattacgcgctgctgatgcgtaattt

SEQ ID NO: 379284 - DNA, 75 bp, synthetic construct
  source 1..75: mol_type = other DNA
tggagatcgagatcttcgttcacggcgcactgtgcatggcctactccggccgctgcctgctctcgggctacatta

SEQ ID NO: 379285 - DNA, 75 bp, synthetic construct
  source 1..75: mol_type = other DNA
attatgctggtgcgtgagcacttcccggaaatgccgatccatctctcagtacaggctaacgccgtgaactgggcg

SEQ ID NO: 379286 - DNA, 75 bp, synthetic construct
  source 1..75: mol_type = other DNA
agaagcgccgcacgcgtgaatttctcaaggggctggatctcgaagatgaagacggcaaccgcatcagcctgattg

SEQ ID NO: 379287 - DNA, 75 bp, synthetic construct
  source 1..75: mol_type = other DNA
aaattttcccggcagcaccgtcacaccaggcgcaggccagacaaatactaaatcgagtcgcggggttagcagaaa

SEQ ID NO: 379288 - DNA, 75 bp, synthetic construct
  source 1..75: mol_type = other DNA
gtgaggccctgcacctgattgccggtggaaaaagctgcataaatggcaaatggtgccatggttctgcaactggtg

SEQ ID NO: 379289 - DNA, 75 bp, synthetic construct
  source 1..75: mol_type = other DNA
ttgccgcgttttgaactggtcgcaaaaaaatacgagtgtaccggtattaacagcaacgtatcagccgctgttttc

SEQ ID NO: 379290 - DNA, 75 bp, synthetic construct
  source 1..75: mol_type = other DNA
tccacggaacggatgaacaaaatgcagctatagcgaaaactattggcgagatacatctgacaaccggcataaata

SEQ ID NO: 379291 - DNA, 75 bp, synthetic construct
  source 1..75: mol_type = other DNA
gtcacaacagtctcaagccagaaagattctacgtcgcgttgcggatttagccgaagcggcaacaaaaattgatag

SEQ ID NO: 379292 - DNA, 75 bp, synthetic construct
  source 1..75: mol_type = other DNA
attcgctagaaaatcgaaggtcgtaccaaatctttctactattgtgcacgcaccgcacaggtttaccgcaaagct

SEQ ID NO: 379293 - DNA, 75 bp, synthetic construct
  source 1..75: mol_type = other DNA
gaagcggtaatgcgcctgttaagcgggcaaaaagaagatgcggaactggatgccgaaaccgcgtctatgctggtg

SEQ ID NO: 379294 - DNA, 75 bp, synthetic construct
  source 1..75: mol_type = other DNA
gggtgttgattcgccagccgctggtgttcccggaaaccttgccgttgttacctgccctggagcagttccgtaatg

SEQ ID NO: 379295 - DNA, 75 bp, synthetic construct
  source 1..75: mol_type = other DNA
taatgcccgtacccactttgcttttgtggtggatgagtttggttcggtggaggggattgtgacactcagtgacgt

SEQ ID NO: 379296 - DNA, 75 bp, synthetic construct
  source 1..75: mol_type = other DNA
acgttgcaggtggaaagccatcgcgtgcagaaggtgcagattattccgctacgtaaggatggcgagatggagtac

SEQ ID NO: 379297 - DNA, 75 bp, synthetic construct
  source 1..75: mol_type = other DNA
tggtggtttcttcctgctgttcaaagccacgatggagctgaacgaacggctggaagggaaagacagcaataaccc

SEQ ID NO: 379298 - DNA, 75 bp, synthetic construct
  source 1..75: mol_type = other DNA
ggcaaaaagaagatgcggaactggacgccgaaaccgcgtctatgctggtggatcatgataatcagcaaatcttta

SEQ ID NO: 379299 - DNA, 75 bp, synthetic construct
  source 1..75: mol_type = other DNA
ggttaatgccttacctgctgacccgtgcttacggcagaatgacggtcagtataaggggcggctgaacctggcctg

SEQ ID NO: 379300 - DNA, 75 bp, synthetic construct
  source 1..75: mol_type = other DNA
gcggtagcggtgaaaaataaattctccgttggcgacagccttgagctgatgacgccgcaaggcaacattaacttt

SEQ ID NO: 379301 - DNA, 75 bp, synthetic construct
  source 1..75: mol_type = other DNA
tggagggaaaagacagcaataaccccactcagcgacgcggtgcgaaattctggggggtagtaacgcagatagtgg

SEQ ID NO: 379302 - DNA, 75 bp, synthetic construct
  source 1..75: mol_type = other DNA
cagcctggcaaccctgacaaaagtcgggcgggatattcttgcgaaatcgaccgttgccgctgttatcgaatacct

SEQ ID NO: 379303 - DNA, 75 bp, synthetic construct
  source 1..75: mol_type = other DNA
agtattattcaaaatatacctattcgctatttgtctcgagttaggccaacgaatgctcttcgtgggcgggggcaa

SEQ ID NO: 379304 - DNA, 75 bp, synthetic construct
  source 1..75: mol_type = other DNA
tccaattgattacaaaaaatatagagctttcacgtatttatcaggatatatcttggatgacgtaactcactggat

SEQ ID NO: 379305 - DNA, 75 bp, synthetic construct
  source 1..75: mol_type = other DNA
gcgaccaaagaattcggtctggtttcttccgtgtcggtcatctttacactggtgccatatctttacacctgtgcg

SEQ ID NO: 379306 - DNA, 75 bp, synthetic construct
  source 1..75: mol_type = other DNA
aaaatgggatggttatgaatgtaattgcctgggatggcgaggctgaattcacagtgccggataaccagcaactca

SEQ ID NO: 379307 - DNA, 75 bp, synthetic construct
  source 1..75: mol_type = other DNA
ccggaagatgccgatcatattacttttattcgcgggcgtattggttttgaactgcctgactggtttatcccgaag

SEQ ID NO: 379308 - DNA, 75 bp, synthetic construct
  source 1..75: mol_type = other DNA
ccggaagatgctgaccatattccttttattcgcgggcgtattggttttgaactgcctgactggtttatcccgaag

SEQ ID NO: 379309 - DNA, 75 bp, synthetic construct
  source 1..75: mol_type = other DNA
ccggaagatgcagagcatatttcttttattcgcgggcgtattggttttgaactgcctgactggtttatcccgaag

SEQ ID NO: 379310 - DNA, 75 bp, synthetic construct
  source 1..75: mol_type = other DNA
ctgattgtagaaaatccacagcagcaactgaaacttttacgccgtttatttggcaagctgcaacaacccgatgtg

SEQ ID NO: 379311 - DNA, 75 bp, synthetic construct
  source 1..75: mol_type = other DNA
tttatctctgtgaagcatgcggaaatcctattccggaagcccggcggaaaatatttcccggtgtgacgttgtgcg

SEQ ID NO: 379312 - DNA, 75 bp, synthetic construct
  source 1..75: mol_type = other DNA
attattcactggcagcagatagcgatgtgtgtgcaggcattcagggggatgttgtcagcagaagggtgcgtatag

SEQ ID NO: 379313 - DNA, 75 bp, synthetic construct
  source 1..75: mol_type = other DNA
atcgaggctgtgacggcaacagataccagcaccgcacctgatatcatttggcctgttttccctgcaagcagataa

SEQ ID NO: 379314 - DNA, 75 bp, synthetic construct
  source 1..75: mol_type = other DNA
catgctgaaaccacccgtcttaacgctgtgttggattatatcgatgcggtgaccgcaacggataccagcactgca

SEQ ID NO: 379315 - DNA, 75 bp, synthetic construct
  source 1..75: mol_type = other DNA
caagaagctataagaaaagggcggagatcatctccgccctttttatttctgcaatccgcaattatcatcccgcag

SEQ ID NO: 379316 - DNA, 75 bp, synthetic construct
  source 1..75: mol_type = other DNA
cacgcagacatttcccgcgcctgactgagagagcgcaggaaccggaaccacaaccagttcgtgaaaccagacctg

SEQ ID NO: 379317 - DNA, 75 bp, synthetic construct
  source 1..75: mol_type = other DNA
acaaagccgtggcctgacggcgttgttgatggcactgctggctatttctttaagccgggtaaaaccgcggcaggg

SEQ ID NO: 379318 - DNA, 75 bp, synthetic construct
  source 1..75: mol_type = other DNA
gtgtaatagactcaggtgtaggtggattgacatcggtaaaggaaataattaatttgcttcctggcgaagatatta

SEQ ID NO: 379319 - DNA, 75 bp, synthetic construct
  source 1..75: mol_type = other DNA
ggaaaacgatccctctggtaaacagtggtgcaaccgatgttcacagcggcgacccggttgttgttggaaaactta

SEQ ID NO: 379320 - DNA, 75 bp, synthetic construct
  source 1..75: mol_type = other DNA
tcatcacaacgtagagcgcagcctgctatgggatgttctacaacgttatcagttttgcaacgccctggctggtat

SEQ ID NO: 379321 - DNA, 75 bp, synthetic construct
  source 1..75: mol_type = other DNA
agcatgttccggcgcttttgcaacgcccgggatggtaccgtacgtggcctgcgttaatgcaggatatttcccgcg

SEQ ID NO: 379322 - DNA, 75 bp, synthetic construct
  source 1..75: mol_type = other DNA
ccctggctggtatcgggtgtggcctgggttaatgcaggatatttcccgtgatttatgggatcaggggaatacacc

SEQ ID NO: 379323 - DNA, 75 bp, synthetic construct
  source 1..75: mol_type = other DNA
gacgtatgttgccatgctggcatcaaagatgtttatacgtgcgaaattgtcggctacgccatgggagagcgcatg

SEQ ID NO: 379324 - DNA, 75 bp, synthetic construct
  source 1..75: mol_type = other DNA
ggttgggttatggtgccgaaggagttaaccccggaaatgatgagagccgttcagattagaagtgagcttggaggg

SEQ ID NO: 379325 - DNA, 75 bp, synthetic construct
  source 1..75: mol_type = other DNA
ccgcgccgccatgcttcagggtaaatccgaacaaccacaaaacgcacaacaaaatattccggaaaatattcccgg

SEQ ID NO: 379326 - DNA, 75 bp, synthetic construct
  source 1..75: mol_type = other DNA
atggctaaaaattttgtacaggacggcaccaccattgaactggtgaatgccggggatcaaagcattctgagcggt

SEQ ID NO: 379327 - DNA, 75 bp, synthetic construct
  source 1..75: mol_type = other DNA
atggctaaaaattttgtacaggacggcaccaccattgaactagtgaatgccggggatcagaccattctgagcggt

SEQ ID NO: 379328 - DNA, 75 bp, synthetic construct
  source 1..75: mol_type = other DNA
aaccagacgttcgctcctacagcaccaaatcaggtctgggtggcagacctgacgtatgttgccacacaggaggga

SEQ ID NO: 379329 - DNA, 75 bp, synthetic construct
  source 1..75: mol_type = other DNA
gatagatattttcaactccattatctggtcactggacgcattactttacagctggatgagcacttctattctgtg

SEQ ID NO: 379330 - DNA, 75 bp, synthetic construct
  source 1..75: mol_type = other DNA
gcctgcgcgacagaccgctaccgcaggatctggtggtgtttggtgaagtcgggctggcaggggagatccgcccgg

SEQ ID NO: 379331 - DNA, 75 bp, synthetic construct
  source 1..75: mol_type = other DNA
gctgaaatgtatgcatggataaatagcgcgcagggggcaagagaacttaacttgccttctgtttatggagatgcc

SEQ ID NO: 379332 - DNA, 75 bp, synthetic construct
  source 1..75: mol_type = other DNA
tgaaactcatgattttagctatcgctccgtcattctcactctttcagagcgcggtgatgctgccaacttactgat

SEQ ID NO: 379333 - DNA, 75 bp, synthetic construct
  source 1..75: mol_type = other DNA
aaaaacgctccggcattcttatgataagagtcgccgcaggggagcgattcatgtcattagtgcgttctcaacaat

SEQ ID NO: 379334 - DNA, 75 bp, synthetic construct
  source 1..75: mol_type = other DNA
agacggataagaaatccaatgagattacagctatcccagaacttcttaacatgctggatattaaaggaaaaatca

SEQ ID NO: 379335 - DNA, 75 bp, synthetic construct
  source 1..75: mol_type = other DNA
cacggtgggcggggcggtgacggggtatctttcgctcaacgaaggttctggcgtcgatctgaacaatgacggcag

SEQ ID NO: 379336 - DNA, 75 bp, synthetic construct
  source 1..75: mol_type = other DNA
gtcgagacactaattactcttcccgaaactcagttaaaggaatacttcacaaagtatgttttagattcagacgaa

SEQ ID NO: 379337 - DNA, 75 bp, synthetic construct
  source 1..75: mol_type = other DNA
ccatttcggtgatccagattgatgatcccaataaaccaggtgaaaaagtgagtctggcaccgtttattgaaagag

SEQ ID NO: 379338 - DNA, 75 bp, synthetic construct
  source 1..75: mol_type = other DNA
cagttctgcagcggcgctggcggcaccgcaggtgattaccgtcagccgttttgaagtgggtaaagacaaatgggc

SEQ ID NO: 379339 - DNA, 75 bp, synthetic construct
  source 1..75: mol_type = other DNA
aaattcaatatcatgtacaagctgaaactgagacgtatgagcgacatcgtgactctgggaatttcttcttatttt

SEQ ID NO: 379340 - DNA, 75 bp, synthetic construct
  source 1..75: mol_type = other DNA
aaattcaacattatgtacaagctcaaacttaggcgcatgagcgatatcgtaaccctgggtatctcttcttatttt

SEQ ID NO: 379341 - DNA, 75 bp, synthetic construct
  source 1..75: mol_type = other DNA
gcaatatcacgtcgacgctcaatatttcgcaacaaacattaaagattcagaaattcaacattatgtacaagctga

SEQ ID NO: 379342 - DNA, 75 bp, synthetic construct
  source 1..75: mol_type = other DNA
ccggcctgccactgacggtttttggtgtgcctgttatctcgtttcttgtgtacttcatctggtttccgttcccgt

SEQ ID NO: 379343 - DNA, 75 bp, synthetic construct
  source 1..75: mol_type = other DNA
ttggaaatcccccatacagccgcgccagtcagcatgaggggcaatacatcaccggcatgcgttacatcatgaagc

SEQ ID NO: 379344 - DNA, 75 bp, synthetic construct
  source 1..75: mol_type = other DNA
gtgtcgctgaccgggcaagaaagtctcaatgggctaagcgtcgtcatgacgccgggttgggataacgcaaacggc

SEQ ID NO: 379345 - DNA, 75 bp, synthetic construct
  source 1..75: mol_type = other DNA
caccggctggacgcgcaactgcaatattcaaagtgacagcgcattgcagcaatgcctgcgaagatgtcttccgct

SEQ ID NO: 379346 - DNA, 75 bp, synthetic construct
  source 1..75: mol_type = other DNA
atggttatgaaaatattgatttggtccgggaatatgatgcccgctacgctggtgaagatgtgcattatgaaacat

SEQ ID NO: 379347 - DNA, 75 bp, synthetic construct
  source 1..75: mol_type = other DNA
tacgttcagaaacggtaaagatggaagagccagtctctgtggggagcagttctcctgccgtcgatactcatcccc

SEQ ID NO: 379348 - DNA, 75 bp, synthetic construct
  source 1..75: mol_type = other DNA
tattcgcgggcgtattggttttgaactgcctgtctggtttatcccgaaagacgagaagcaggtaccgacaggagc

SEQ ID NO: 379349 - DNA, 75 bp, synthetic construct
  source 1..75: mol_type = other DNA
gatggtgataacgccaaatgcgccgcgtattacactgcggaagacaacgcgctggcgcatgactggtcagaacgt

SEQ ID NO: 379350 - DNA, 75 bp, synthetic construct
  source 1..75: mol_type = other DNA
ttcattaacgatacccagatcctgaccccgcgcctgaaaacccccatgatccgtcgccagcgtggcggcaaactc

SEQ ID NO: 379351 - DNA, 75 bp, synthetic construct
  source 1..75: mol_type = other DNA
cagtggcgcacgccggacaacattttctggggaattaacaccttgtttggtccgtttgttctggatctgttcact

SEQ ID NO: 379352 - DNA, 75 bp, synthetic construct
  source 1..75: mol_type = other DNA
accgccgtagaattatgcgcactggagcatggcggattagatacctgcgacggcggcagtaacggcatcccctcg

SEQ ID NO: 379353 - DNA, 75 bp, synthetic construct
  source 1..75: mol_type = other DNA
aactgcaatattcaaagtgacagcgcattgcagcaagcctgcgaagatgtcttccgctttgatgacgccaactaa

SEQ ID NO: 379354 - DNA, 75 bp, synthetic construct
  source 1..75: mol_type = other DNA
cctaccaccacccgctatgtttctgctatgagcgtggcaaagggcgtagtgtcgctaaccgggcaagagagcctc

SEQ ID NO: 379355 - DNA, 75 bp, synthetic construct
  source 1..75: mol_type = other DNA
ccaggccccgtgctgacgcgggacctggaacgggtgctggagcgaagcggggaagccccggtctacgggccaaac

SEQ ID NO: 379356 - DNA, 75 bp, synthetic construct
  source 1..75: mol_type = other DNA
ggaagccccggtctacgggccaaacctgcgcgcctcctgccgtcgcctggaggatgccggctggctgcgcaccct

SEQ ID NO: 379357 - DNA, 75 bp, synthetic construct
  source 1..75: mol_type = other DNA
cactgcagcggagagtgctgattgtgctggctgcgcttgatgaaaaacggccgggccccgtgctgacgcgggacc

SEQ ID NO: 379358 - DNA, 75 bp, synthetic construct
  source 1..75: mol_type = other DNA
atggaccagatggcagaaaacacaccagaagttgaaatagaaaccgatacatcagagcagattcctgatgatgtc

SEQ ID NO: 379359 - DNA, 75 bp, synthetic construct
  source 1..75: mol_type = other DNA
tgatgcagaggaagctactgaaactgatgacgacgaatcagaacaggaattctactttggtgacgaaaagctgga

SEQ ID NO: 379360 - DNA, 75 bp, synthetic construct
  source 1..75: mol_type = other DNA
ctgccgctgatcccgttgtcagttccgcccgcagaaggcacttctgccaaagacctgccggtggagctggacgtg

SEQ ID NO: 379361 - DNA, 75 bp, synthetic construct
  source 1..75: mol_type = other DNA
tggcggtggggcaatcggtgccgctgtatgtgctggtcaataagttcgatcaacaggatcgtaacagtgacgacg

SEQ ID NO: 379362 - DNA, 75 bp, synthetic construct
  source 1..75: mol_type = other DNA
tcgggcgcgccatgagttagccaacaacggtaagttaccagcgccagagcaacaacgctgggtggaagattttgc

SEQ ID NO: 379363 - DNA, 75 bp, synthetic construct
  source 1..75: mol_type = other DNA
atgacgagatttatcaacgtcagcgtgaattgaaagaggaactgagcagtctgggggatttgaattcggttagga

SEQ ID NO: 379364 - DNA, 75 bp, synthetic construct
  source 1..75: mol_type = other DNA
cgatccgctggaagtggcgcagtggctgcaggcctgtcatgatgccggaataaaagttcgtgtacaggttaatga

SEQ ID NO: 379365 - DNA, 75 bp, synthetic construct
  source 1..75: mol_type = other DNA
gatctggcggtggagctgaacggcatgacgtatcaggcctgccgtggggattttgtggtgcgtctcgacggcagc

SEQ ID NO: 379366 - DNA, 75 bp, synthetic construct
  source 1..75: mol_type = other DNA
aaggcagggtggtacgcctggaaggcgatccgctggaagtggcgcagtggctgcaggcctgtcacgatgcaggaa

SEQ ID NO: 379367 - DNA, 75 bp, synthetic construct
  source 1..75: mol_type = other DNA
gcaagtaccagcaacaggagatggctcgcaagcagaaggagcaggagcttcaggctgcctatcaagagcgattat

SEQ ID NO: 379368 - DNA, 75 bp, synthetic construct
  source 1..75: mol_type = other DNA
gccggccgggccgtggcacagcctctgctgctggcagaacaggaccgcctccgggcagaacagcgtgcggcagaa

SEQ ID NO: 379369 - DNA, 75 bp, synthetic construct
  source 1..75: mol_type = other DNA
acagcgcacggcggaagttgtcgtactgccgctgatcccgttgtcagttccgcccgcagaaggcacttctgccaa

SEQ ID NO: 379370 - DNA, 75 bp, synthetic construct
  source 1..75: mol_type = other DNA
gtcgtggggattttgtggtacgtctcgacggcagcacatgtctgcagttatggaataaagaaggcagggtggtac

SEQ ID NO: 379371 - DNA, 75 bp, synthetic construct
  source 1..75: mol_type = other DNA
gcagcaaaagcgttatttgctgatccccagcagcctcgcacccgccagttcctcgagaagtttctgctgcaataa

SEQ ID NO: 379372 - DNA, 75 bp, synthetic construct
  source 1..75: mol_type = other DNA
gttcagcgttatgcccccgaaatggagaaacgcctgcgctggtactggcgaaacccttccgggttctactcatgg

SEQ ID NO: 379373 - DNA, 75 bp, synthetic construct
  source 1..75: mol_type = other DNA
tgaagaagtggcagatcccgcgattcatcaacacggataaagcgcccgcctatggtcgcgcgcttgctctgctca

SEQ ID NO: 379374 - DNA, 75 bp, synthetic construct
  source 1..75: mol_type = other DNA
cagcgtacggcagaagtcgtcgtactgccgctggtccggcagcaggtctgcccgcagacggcacttctgccactg

SEQ ID NO: 379375 - DNA, 75 bp, synthetic construct
  source 1..75: mol_type = other DNA
cgctgcaattaataatctcgacaaacttctcgaaaaagcgcgcgccaccggtgattacaccgcataccgagcggc

SEQ ID NO: 379376 - DNA, 75 bp, synthetic construct
  source 1..75: mol_type = other DNA
aggatgcagagcaggctgtacgcgaagatgttcctgttcatattcaggacatgatccttcttgagtcagagaagc

SEQ ID NO: 379377 - DNA, 75 bp, synthetic construct
  source 1..75: mol_type = other DNA
catagaacgggtgctggagcgaagcggggaagccccggtctacgggccaaacctgcgcgcctcctgccgtcgtct

SEQ ID NO: 379378 - DNA, 75 bp, synthetic construct
  source 1..75: mol_type = other DNA
gtggagctgacggacgccggccgggccgtggcacagcctcttctgctggcagaacaggaccgcctccgggcagaa

SEQ ID NO: 379379 - DNA, 75 bp, synthetic construct
  source 1..75: mol_type = other DNA
cgatcctctggaagtggcacagtggctgcaggcctgtcacgatgcaggaatggaggttcgtgtgcagattaatga

SEQ ID NO: 379380 - DNA, 75 bp, synthetic construct
  source 1..75: mol_type = other DNA
tttgaaggtgaaacggaattcgtcccgtataccgccatgcaggacgatagcgccccgacaggccagcgcatctgg

SEQ ID NO: 379381 - DNA, 75 bp, synthetic construct
  source 1..75: mol_type = other DNA
atttcgggctattaccgcgccggagaaaaaatagccgcggctgaagtggaatcggcactgctgcgtttagcggaa

SEQ ID NO: 379382 - DNA, 75 bp, synthetic construct
  source 1..75: mol_type = other DNA
agagcagatcaaccgcgccggagaaaaaatagccgcggctgaagtggaatcggcactgctgcgtttagcggaagt

SEQ ID NO: 379383 - DNA, 75 bp, synthetic construct
  source 1..75: mol_type = other DNA
gcacagaacaggaagcgcagccgttcacgttcgaatggaacggccgcacatggaacgctggccccgactcactgg

SEQ ID NO: 379384 - DNA, 75 bp, synthetic construct
  source 1..75: mol_type = other DNA
aaacgcgcggtgtggcgattgtcatggttggacacgtaaccaaagatggctcgctggctggcccgaaagtgctgg

SEQ ID NO: 379385 - DNA, 75 bp, synthetic construct
  source 1..75: mol_type = other DNA
agtgcctgtcatgcctggaacaccatcaccgaggtgcgtcttgctgcgtcgccaacggtggcgcgtaacgagcgt

SEQ ID NO: 379386 - DNA, 75 bp, synthetic construct
  source 1..75: mol_type = other DNA
actgcaaagtggcaaatggggtgagatagccccattcactgtgacaccagaaatgctggaagcggccagagaggc

SEQ ID NO: 379387 - DNA, 75 bp, synthetic construct
  source 1..75: mol_type = other DNA
ctggtgcctggcttatgttgagatgctggcgcgtgatgaaagccgtttgcaggatgcgctcaagcgtctggatgt

SEQ ID NO: 379388 - DNA, 75 bp, synthetic construct
  source 1..75: mol_type = other DNA
aagaagcattgaacgtgctgctggaggaagttcgcgccaggccacaacaaattctcgaaagcgatgctgaagata

SEQ ID NO: 379389 - DNA, 75 bp, synthetic construct
  source 1..75: mol_type = other DNA
tcgaaatccgacacagcacgggacgtcatgacgtggggtgatgcggaaaatcagcaggtaaagttgtcaatgcaa

SEQ ID NO: 379390 - DNA, 75 bp, synthetic construct
  source 1..75: mol_type = other DNA
aatcgagtttctggaccactggccgctcaccgccgtcggcaagatagacaaaaaacgcctgacggctctcgccgt

SEQ ID NO: 379391 - DNA, 75 bp, synthetic construct
  source 1..75: mol_type = other DNA
gaacttgccgcaggtctgtcatcactgggtttgcgttcgggggagcatgtaattgtgcagcttcccaacgacaac

SEQ ID NO: 379392 - DNA, 75 bp, synthetic construct
  source 1..75: mol_type = other DNA
ctcgacagcgtttctgaccgtgaccacgtgctggaactgctgtcggctgccgctatcggcatggtgcatctgtcg

SEQ ID NO: 379393 - DNA, 75 bp, synthetic construct
  source 1..75: mol_type = other DNA
cgttgctggtggagattcaggcgctggtcgatcactcgatgatggcgaatccgcgccgcgtggcggtaggtctgg

SEQ ID NO: 379394 - DNA, 75 bp, synthetic construct
  source 1..75: mol_type = other DNA
tcagcgggagatgaaagaggaactgagcagcctggatgatttacgctcaatcagagagatggcgattagcggcaa

SEQ ID NO: 379395 - DNA, 75 bp, synthetic construct
  source 1..75: mol_type = other DNA
tcagaaacgcacattatcttgaaaatggtgcggttgactgcgaggtgttatttgaaggtgaaacggagttcgtcc

SEQ ID NO: 379396 - DNA, 75 bp, synthetic construct
  source 1..75: mol_type = other DNA
gtgaaatcaccccgtttacagtcacgcctgaacttatcgcagcggcaaaagatgccaaaaagatggaaatcgagg

SEQ ID NO: 379397 - DNA, 75 bp, synthetic construct
  source 1..75: mol_type = other DNA
ggagggttacagagcggcaaatggggtgaaatcgccccgttcaacgtcacgccggaacttatcgcggcagcaaag

SEQ ID NO: 379398 - DNA, 75 bp, synthetic construct
  source 1..75: mol_type = other DNA
gaagagttgcagagcggcaaatggggcgaaatcgccccgttcaccgtcacgccggaacttatcgctgcggcaaaa

SEQ ID NO: 379399 - DNA, 75 bp, synthetic construct
  source 1..75: mol_type = other DNA
caggagctgcaaagcggtaaatggggggatatagccccgttcactgtatcacctgaaatgctggaagcagcaaaa

SEQ ID NO: 379400 - DNA, 75 bp, synthetic construct
  source 1..75: mol_type = other DNA
atcgcaacgacgagatttatcaacgtcagcgggagatgaaagagaggttgagcaacctggatgatttacgctcaa

SEQ ID NO: 379401 - DNA, 75 bp, synthetic construct
  source 1..75: mol_type = other DNA
tgaagcggcgaaacacggttttcgccgggcgattgttccggcagccaacgtgccgaaaaaagcgccggaagggat

SEQ ID NO: 379402 - DNA, 75 bp, synthetic construct
  source 1..75: mol_type = other DNA
atggtggtgtgggaaggaacgcgtccactgctggtggagattcaggcgctggtcgatcactcgatgatggcgaat

SEQ ID NO: 379403 - DNA, 75 bp, synthetic construct
  source 1..75: mol_type = other DNA
gcgaaatcgcccctttcactgtcacgccggaacttatcgccgcggcgaaggatgccaaaaagcaggaaatcgagg

SEQ ID NO: 379404 - DNA, 75 bp, synthetic construct
  source 1..75: mol_type = other DNA
cagagtggcaaatggggtgaaatcgccccgttcaccataacacctgaacttatcaccgtagcgaaagatgccaaa

SEQ ID NO: 379405 - DNA, 75 bp, synthetic construct
  source 1..75: mol_type = other DNA
ataaagtcgttttcgtctctccttcaataatcaccgggggtattgaaatcagcatctgcatccctcgtcatgcca

SEQ ID NO: 379406 - DNA, 75 bp, synthetic construct
  source 1..75: mol_type = other DNA
gaacaccgccactggatgatacctctcagaaagggagcgcaatatgaagagctcagaaaactgggtaaaggcgat

SEQ ID NO: 379407 - DNA, 75 bp, synthetic construct
  source 1..75: mol_type = other DNA
gacggacgccatgcgcttccccggaggagaaatgggggatctgtacagtcatcgctgggaaatcgaactgggata

SEQ ID NO: 379408 - DNA, 75 bp, synthetic construct
  source 1..75: mol_type = other DNA
tcgactggcatctgctggaaggcggtgacaactggcatcacggtgtccagcgtctggtacgcgatctgaaccaca

SEQ ID NO: 379409 - DNA, 75 bp, synthetic construct
  source 1..75: mol_type = other DNA
tttctgaatttttaagcgaagatagttttgtagactattgtattcgttttagcgtattttctgaagatgaactca

SEQ ID NO: 379410 - DNA, 75 bp, synthetic construct
  source 1..75: mol_type = other DNA
cgatggagtcactttaaactcacaaatgagcagttcttaaagatcatcgagttaggcaagataaatgaaagtttt

SEQ ID NO: 379411 - DNA, 75 bp, synthetic construct
  source 1..75: mol_type = other DNA
cacgaaaaaagtggccgggactgggaaatgaagtgacagcccgcctgctgaccgtgacgcgcaaaggaaaagtct

SEQ ID NO: 379412 - DNA, 75 bp, synthetic construct
  source 1..75: mol_type = other DNA
acaacttgtgaaattaccgacgagaaggggaagggccttcccgagagtggtaaaggagaggccctggaaataccc

SEQ ID NO: 379413 - DNA, 75 bp, synthetic construct
  source 1..75: mol_type = other DNA
gcaagggtgagacgatggcgctttacacaattggtgaagtggcgttgctttgtgatattaatcctgtcacgttac

SEQ ID NO: 379414 - DNA, 75 bp, synthetic construct
  source 1..75: mol_type = other DNA
tataccggagctgatgcgcgatcttgcaagtatgggacaactagtgaaattaccgacaagaagagaaagggcctt

SEQ ID NO: 379415 - DNA, 75 bp, synthetic construct
  source 1..75: mol_type = other DNA
aactggagtgtatcgactcacgcggattctttagcggcgtcattccgcgacgtaaaaactttttccgttatcaat

SEQ ID NO: 379416 - DNA, 75 bp, synthetic construct
  source 1..75: mol_type = other DNA
ggctcctggcgtcgccacaccgacaacaatttctggttgagctaccgcgagctggccgatcaactggtgccttat

SEQ ID NO: 379417 - DNA, 75 bp, synthetic construct
  source 1..75: mol_type = other DNA
atgcctggctgttatctgaaggtacgcacctgcgaccttacgaaacgctgggtgcgcatgcggataccatggatg

SEQ ID NO: 379418 - DNA, 75 bp, synthetic construct
  source 1..75: mol_type = other DNA
atatatttgtggcatgtcagatgttgaattaatgaagccaaacgatataatcgttatataccgaacatccgataa

SEQ ID NO: 379419 - DNA, 75 bp, synthetic construct
  source 1..75: mol_type = other DNA
ttgcaaaacactaaacaccgaagtatattaaacgtcatgaaaaactttggtgaaaccatccgcgaccttcgagtc

SEQ ID NO: 379420 - DNA, 75 bp, synthetic construct
  source 1..75: mol_type = other DNA
tattcctcttgaggtgatggcaacctgtgatcgtattatctctttagcgcaggagcgcttgggaaggtgcgaata

SEQ ID NO: 379421 - DNA, 75 bp, synthetic construct
  source 1..75: mol_type = other DNA
atggcaacctgtgatcgtattatctctttagcgcaggagcgcttgggaaaattacaggacagtatttatatctag

SEQ ID NO: 379422 - DNA, 75 bp, synthetic construct
  source 1..75: mol_type = other DNA
atgtcggtaggaagtactcatcatttggaaatggtttttgtgtggaaacaaaattatattctagttgatgagtac

SEQ ID NO: 379423 - DNA, 75 bp, synthetic construct
  source 1..75: mol_type = other DNA
atccagcgtgacaaatcgtcttcagcgtcaagcaaccagacttagctacgaattaccaaccgatgcctattgtgc

SEQ ID NO: 379424 - DNA, 75 bp, synthetic construct
  source 1..75: mol_type = other DNA
ttaattagcattgttgaacatcacattaccgttggaaatatcgaaccaatggaaaacgaacaaacagactttgaa

SEQ ID NO: 379425 - DNA, 75 bp, synthetic construct
  source 1..75: mol_type = other DNA
atcaaaattccccgaagcattaaaaaccgccaataatattatcaggaaagagtgttacatgtgtctgaatctggc

SEQ ID NO: 379426 - DNA, 75 bp, synthetic construct
  source 1..75: mol_type = other DNA
tgagcagatacagagcgatgagtcagacattcgacagaatgtcagtgctgcactcagtaaagtgcgcacagttaa

SEQ ID NO: 379427 - DNA, 75 bp, synthetic construct
  source 1..75: mol_type = other DNA
cttatggtatgcagagccgctaggcggtattggtcgttatgttgtccgtagttcggatggggcgatgaaggttac

SEQ ID NO: 379428 - DNA, 75 bp, synthetic construct
  source 1..75: mol_type = other DNA
gacggtcagtgcgccttatgaccttctgctgcttgccggtaaatcagcccgtgcttttgagggtagtgagacatc

SEQ ID NO: 379429 - DNA, 75 bp, synthetic construct
  source 1..75: mol_type = other DNA
gtgcgtcagaatgctgtaattgatattttacttattattgtcttttctctttctttattaatttgcggaaaagtt

SEQ ID NO: 379430 - DNA, 75 bp, synthetic construct
  source 1..75: mol_type = other DNA
caggaagcaaaatctatctacaggaagaacccatctgcggcttttggtatctcaaccgtggcgtcgtcggtttac

SEQ ID NO: 379431 - DNA, 75 bp, synthetic construct
  source 1..75: mol_type = other DNA
tattcaggcccgccagcgcctgggaagtgaggctgtccgccacgtgttcacgaaaacagcgcagctctggcataa

SEQ ID NO: 379432 - DNA, 75 bp, synthetic construct
  source 1..75: mol_type = other DNA
tcattcctacaaatcacactttccaacaataattacaaatcattagagcatctgcaaacacgagcagagaattat

SEQ ID NO: 379433 - DNA, 75 bp, synthetic construct
  source 1..75: mol_type = other DNA
ggttttgcttcagtttgctatgacgatgaaggagcgatcaacatcctgatgcaacggctactcgagttggggcat

SEQ ID NO: 379434 - DNA, 75 bp, synthetic construct
  source 1..75: mol_type = other DNA
agcatctgggcgttctgaaacgtcgtaatattgacggcgtggtgctgtttggttttaccggcataacggaagaga

SEQ ID NO: 379435 - DNA, 75 bp, synthetic construct
  source 1..75: mol_type = other DNA
atgggacaacttgtgaaattaccgacaagaagggaaagggccttcccgagagtggtaaaggagaggccctggaaa

SEQ ID NO: 379436 - DNA, 75 bp, synthetic construct
  source 1..75: mol_type = other DNA
tcagttgcttaactgactggcattacagccttgagctaccgtttttttattctgttagttgtgtaactgaagcga

SEQ ID NO: 379437 - DNA, 75 bp, synthetic construct
  source 1..75: mol_type = other DNA
ctgcgcgtcgtcaatgtgagtaccggagaggtcctctcttcggtgaacaccagtaaaacgattctttcttatgaa

SEQ ID NO: 379438 - DNA, 75 bp, synthetic construct
  source 1..75: mol_type = other DNA
gctggctccggtcatgttccgcgcccagctcaatgagcaggatttaccgctttcgctaaccgtagtcggcattgc

SEQ ID NO: 379439 - DNA, 75 bp, synthetic construct
  source 1..75: mol_type = other DNA
tacattcccggcgaatggatcagcgtctggcaggttgaactgcctgatgtcgcccgcaagcagataccgactatt

SEQ ID NO: 379440 - DNA, 75 bp, synthetic construct
  source 1..75: mol_type = other DNA
ggctggcgatgcgcaacgggttatctgccgcatcaatgagtgccggggatggagcgccgggtgggcgctggctcc

SEQ ID NO: 379441 - DNA, 75 bp, synthetic construct
  source 1..75: mol_type = other DNA
gagatcatcaccgtggatcccggatacgcggaagccgggcgacagggcgccagccagttgatcgagcagatcaac

SEQ ID NO: 379442 - DNA, 75 bp, synthetic construct
  source 1..75: mol_type = other DNA
taccggagctgatgcgcgatcttgcaagtatgggacaaccagtgaaattaccaacaagaagggaaagggccttcc

SEQ ID NO: 379443 - DNA, 75 bp, synthetic construct
  source 1..75: mol_type = other DNA
gaggctcttggctcagaggagccaaaacctggttcaccattttacggtagtcgtggactaaaattatccgacagt

SEQ ID NO: 379444 - DNA, 75 bp, synthetic construct
  source 1..75: mol_type = other DNA
ttgatacaacgcctggtaacgacgcggtgtgccccttttctccccctgaggggtgggagggggactctgcggcct

SEQ ID NO: 379445 - DNA, 75 bp, synthetic construct
  source 1..75: mol_type = other DNA
ctcgaaatgacggtctggtgtattgttggcatggcgcttgagcgtaaagaacctcttcaccagattgtgaatcgc

SEQ ID NO: 379446 - DNA, 75 bp, synthetic construct
  source 1..75: mol_type = other DNA
aacacgcagaagtttttggtaattactatggcacttcgcgtgaggccattgagcaagtactggcgaccggtgtcg

SEQ ID NO: 379447 - DNA, 75 bp, synthetic construct
  source 1..75: mol_type = other DNA
cagacacatgccgggaacccggcgctctacccgcaggtcaaaatggtctgccagatggaactgaccagccatctg

SEQ ID NO: 379448 - DNA, 75 bp, synthetic construct
  source 1..75: mol_type = other DNA
actatcgacaacgacatcaaaggcactgactacactatcggtttcttcactgcgctgagcaccgttgtagaagcg

SEQ ID NO: 379449 - DNA, 75 bp, synthetic construct
  source 1..75: mol_type = other DNA
tctgggtctgtatgaagaccgtatggtacagctagaccgttacagcgtgtctgacatgatcaaccgtggcggtac

SEQ ID NO: 379450 - DNA, 75 bp, synthetic construct
  source 1..75: mol_type = other DNA
attgaggctgtccgccgcgtgttcacgaaaacagcgcagctctggcataacgccacgccgcatccgcactggtgc

SEQ ID NO: 379451 - DNA, 75 bp, synthetic construct
  source 1..75: mol_type = other DNA
gttcagtgaggaacgtgttatacaggaacatatcgatgccggaatcacgctggctgatgccgtgaattttctggt

SEQ ID NO: 379452 - DNA, 75 bp, synthetic construct
  source 1..75: mol_type = other DNA
agaaaagcatgagttagtacgtatcgatcgcacaggatttacctcacaggaacaagcgccatatttgactgtgac

SEQ ID NO: 379453 - DNA, 75 bp, synthetic construct
  source 1..75: mol_type = other DNA
tccgttcgctgatgaggcgatgaagatcattagctcaatgaagatgaacaaggcaaagcctacagctttgtctgt

SEQ ID NO: 379454 - DNA, 75 bp, synthetic construct
  source 1..75: mol_type = other DNA
tagaacaaaccggcgataacactctgacgttaatggataaaggttattactcactgggactgttaaatgcctgga

SEQ ID NO: 379455 - DNA, 75 bp, synthetic construct
  source 1..75: mol_type = other DNA
aaatggcggaacatctgaaaggttactggccgaatcaactgagtttctcagaatcatgcggaatggtggtaagcg

SEQ ID NO: 379456 - DNA, 75 bp, synthetic construct
  source 1..75: mol_type = other DNA
cgaaaacagcgcagctctggcataacgccacgccgcatccgcaatggtgcggcctgaccctgctggccatcgatg

SEQ ID NO: 379457 - DNA, 75 bp, synthetic construct
  source 1..75: mol_type = other DNA
ctgattgcaggttctggcggcggttccccgcgtttccaggttttcggcgctgacgcaatgcgcggcccgcgcggc

SEQ ID NO: 379458 - DNA, 75 bp, synthetic construct
  source 1..75: mol_type = other DNA
ctgcgtgaaggacgctcagggatcactttctctcaagagctgaaggactccggcatgcgtagccacgtatggggc

SEQ ID NO: 379459 - DNA, 75 bp, synthetic construct
  source 1..75: mol_type = other DNA
gctacggcgcaacctctgatggctcagacatggttgctccgtctggcgaaggcccagtgcgctgcatgaagatgg

SEQ ID NO: 379460 - DNA, 75 bp, synthetic construct
  source 1..75: mol_type = other DNA
tacaaaactatcgtgaaacgtcatcttgtccgtttcagcggcacgacccgccagccctctttgttgccgccttct

SEQ ID NO: 379461 - DNA, 75 bp, synthetic construct
  source 1..75: mol_type = other DNA
tgacgcaatgcgtagcccgcgcggcctgaaagcggttggtccgtatgtggtcaccaaagcgatggcatctggcgt

SEQ ID NO: 379462 - DNA, 75 bp, synthetic construct
  source 1..75: mol_type = other DNA
tcgactccggttggcgacgtgaaagagctggcagctatccgtgaagtgttcggcgataagagcccggcgatttct

SEQ ID NO: 379463 - DNA, 75 bp, synthetic construct
  source 1..75: mol_type = other DNA
cgcaatttaacctgacggccccccttgaacgacgcatcactcacgaaagcctttctctgttaacgccggacggcg

SEQ ID NO: 379464 - DNA, 75 bp, synthetic construct
  source 1..75: mol_type = other DNA
tgttccggcaagcgagctgctggctcgctttaaaacgcatccggcagtgcgcccgcttatcaaaaacacggaatc

SEQ ID NO: 379465 - DNA, 75 bp, synthetic construct
  source 1..75: mol_type = other DNA
cctgcgttaatgcaggatatttcccgcgatttatgggatcagggtgataaacctgttccaccgctgcgccagtta

SEQ ID NO: 379466 - DNA, 75 bp, synthetic construct
  source 1..75: mol_type = other DNA
atgaaacgtgcagtgattactggcctgggcattgtttccagcatcggtaataaccagcaggaagtcctggcatct

SEQ ID NO: 379467 - DNA, 75 bp, synthetic construct
  source 1..75: mol_type = other DNA
tagtacggcttacctgcatgtggatcgttggaatgacttttcattcattacaatgttttacatgtatctgtttga

SEQ ID NO: 379468 - DNA, 75 bp, synthetic construct
  source 1..75: mol_type = other DNA
gaatctgtggtgtcatttgtggtgacgatattctccgcgcccgttatgtggtgctggcggaaggtgctaatagca

SEQ ID NO: 379469 - DNA, 75 bp, synthetic construct
  source 1..75: mol_type = other DNA
atggcgcgtggcagccttctgacaatggcgctgttgagcatggctgtcagcagtttctgccgggcgggggagcat

SEQ ID NO: 379470 - DNA, 75 bp, synthetic construct
  source 1..75: mol_type = other DNA
tattctcgcggagagcgataacccaacgcactatgcggatggttttcattgtaatgctcgatcgccactgcaagg

SEQ ID NO: 379471 - DNA, 75 bp, synthetic construct
  source 1..75: mol_type = other DNA
ctttgaattaggtgcacgatataatggtaatcagtggctgattgacagcgcagtttactactcagaagctaaaga

SEQ ID NO: 379472 - DNA, 75 bp, synthetic construct
  source 1..75: mol_type = other DNA
ggcatgacctcaagcaaatctctgaccggcttcattaataaggaaacacgaactcgctcctattatgagtcagag

SEQ ID NO: 379473 - DNA, 75 bp, synthetic construct
  source 1..75: mol_type = other DNA
tatcatatgaaacaacagagcgccgccttccatgccgctggcgcggcatatcctggacgtataggaaattgaaaa

SEQ ID NO: 379474 - DNA, 75 bp, synthetic construct
  source 1..75: mol_type = other DNA
accgattagcgctttcgcttgatgaaagagaggagatatccagagggctggtagcaaaactcagtatcagggaca

SEQ ID NO: 379475 - DNA, 75 bp, synthetic construct
  source 1..75: mol_type = other DNA
gttatccggataatcaggaaatgcatgtgtcacacgaaacgatttataaaacgctttttatacaaacccggggag

SEQ ID NO: 379476 - DNA, 75 bp, synthetic construct
  source 1..75: mol_type = other DNA
atgtttatttccctgatgaccgaacaaacagaagcaacggagataaaaatgaacatgcgtaatattaatattatt

SEQ ID NO: 379477 - DNA, 75 bp, synthetic construct
  source 1..75: mol_type = other DNA
cccgcatcctgcgccgctgttatgaggcgtcaccgggtagttggatccgtgccgccggctgttatcaccatccgg

SEQ ID NO: 379478 - DNA, 75 bp, synthetic construct
  source 1..75: mol_type = other DNA
ttccatgacctgggccgatttcgatggtgacggcgatatggatctcttcctgcccgccagccagggaagagctaa

SEQ ID NO: 379479 - DNA, 75 bp, synthetic construct
  source 1..75: mol_type = other DNA
ctatctaaaaaaaattcatttcgacgcgtatgagcagaccatccagcgccaatttgccaacgaagtaaaaacgac

SEQ ID NO: 379480 - DNA, 75 bp, synthetic construct
  source 1..75: mol_type = other DNA
ttattatggaaggaatatgttaatagtttaatgtcagtggatttatctttagtgccagaaataacctggcctgaa

SEQ ID NO: 379481 - DNA, 75 bp, synthetic construct
  source 1..75: mol_type = other DNA
aagtgaaaataacaagaacaatcttttgttatggaaggaatatgttaataatttaatgtcagtggatttgtcctt

SEQ ID NO: 379482 - DNA, 75 bp, synthetic construct
  source 1..75: mol_type = other DNA
agccgcaaaatctttttccgctttatcatcacaacgtagaacgtagcctgctgtgggatgttctacaacgttatc

SEQ ID NO: 379483 - DNA, 75 bp, synthetic construct
  source 1..75: mol_type = other DNA
atgccaaccagaaagagcacgaagaacactattaaaaattatctggctaactttgattcttacgagcaactacca

SEQ ID NO: 379484 - DNA, 75 bp, synthetic construct
  source 1..75: mol_type = other DNA
ctaattggtattgttgaacatcatattgtcgttggtaatatcagccttacgattagtgagccagactttgaattt

SEQ ID NO: 379485 - DNA, 75 bp, synthetic construct
  source 1..75: mol_type = other DNA
cggaagtgggcaatatcagccttacgattagtgaaccagatttcgagtttgacccgtatttagttacagaggaat

SEQ ID NO: 379486 - DNA, 75 bp, synthetic construct
  source 1..75: mol_type = other DNA
acaacaccgaagtcaaaaattccaaagcgactgaacgtgccactatcctgtatgacggggacggcttagaactac

SEQ ID NO: 379487 - DNA, 75 bp, synthetic construct
  source 1..75: mol_type = other DNA
atggacgattccagccggacgcatgaagatgcgccgtgaccatgtgatccctctttgcggtcaggcgatggctgt

SEQ ID NO: 379488 - DNA, 75 bp, synthetic construct
  source 1..75: mol_type = other DNA
tccaccgctgcgccagttattctggcgtcatttacgtcgtcacggcctgtggcatctggcgggcgatgttatcag

SEQ ID NO: 379489 - DNA, 75 bp, synthetic construct
  source 1..75: mol_type = other DNA
gtttgatggggtttgaagcgccgcatgaagcgaaattccgcattccggtttctgatacccaggcttatcgccagt

SEQ ID NO: 379490 - DNA, 75 bp, synthetic construct
  source 1..75: mol_type = other DNA
ctgctggacccgatggtcgaggcgaaatatatcctgacgccggtgctgtggaagtacctctatcgatatgcgaaa

SEQ ID NO: 379491 - DNA, 75 bp, synthetic construct
  source 1..75: mol_type = other DNA
gaatcactggagcgcggcaattttaaaacgtgcgctggcgaatgactcggcatggcaccgtttaagtgagaaaga

SEQ ID NO: 379492 - DNA, 75 bp, synthetic construct
  source 1..75: mol_type = other DNA
atgagagatgcagaatttagagcgatgcttcaagcatcaagggaacgtaacagacacaacggttacagctacaca

SEQ ID NO: 379493 - DNA, 75 bp, synthetic construct
  source 1..75: mol_type = other DNA
cggaagtgggcaatatcagccttacaaccaatgaaccagactttgaatttgacgtatacgcacaagcagaggaat

SEQ ID NO: 379494 - DNA, 75 bp, synthetic construct
  source 1..75: mol_type = other DNA
atgaacgacagagaatttcaaaagtttcttgaagaatccaagagacgcaacagacacaacggttacagctacaca

SEQ ID NO: 379495 - DNA, 75 bp, synthetic construct
  source 1..75: mol_type = other DNA
agaacagctaccgcaacttatgaacgatttaacgattgccagcatagaacgacagaccaaattgttgattgagtg

SEQ ID NO: 379496 - DNA, 75 bp, synthetic construct
  source 1..75: mol_type = other DNA
tgcttacccccatcaaggagcgcggcaacctggaaacactcaaacgggttttacagcgcgttaatgaggtaatgg

SEQ ID NO: 379497 - DNA, 75 bp, synthetic construct
  source 1..75: mol_type = other DNA
accagcagaaaaggaatacaccctacaggacggcggagggctttttctcctgatcaaaccgtccggatcaaaact

SEQ ID NO: 379498 - DNA, 75 bp, synthetic construct
  source 1..75: mol_type = other DNA
atacaaccggagcaactacatagaaaaacgcatcgtgcttatgcgctggtggggcgaatttgtcgaggctgcggc

SEQ ID NO: 379499 - DNA, 75 bp, synthetic construct
  source 1..75: mol_type = other DNA
ttttaagccttataaatcaggatccacatggatgggcaattctaagccgcaataatgctcacttggatgagctag

SEQ ID NO: 379500 - DNA, 75 bp, synthetic construct
  source 1..75: mol_type = other DNA
caattatttgttcataacaaccataatggtgaaagaattacatatagtaataaatctgctgaagcatatatatta

SEQ ID NO: 379501 - DNA, 75 bp, synthetic construct
  source 1..75: mol_type = other DNA
gggcactgtctgggggcgaaaggaattaatctgctgatgagtacattgcagaaccgtctggtcgatcatggttaa

SEQ ID NO: 379502 - DNA, 75 bp, synthetic construct
  source 1..75: mol_type = other DNA
atgacaacgattgttgcaggcatcgatatcgagtctacgggactggatttccttgctggtcataaaattattgaa

SEQ ID NO: 379503 - DNA, 75 bp, synthetic construct
  source 1..75: mol_type = other DNA
tgaagttagaaaagcatacaatcgttctacttatctcgtgcagcgaattgaattgatggattggtggggtgaata

SEQ ID NO: 379504 - DNA, 75 bp, synthetic construct
  source 1..75: mol_type = other DNA
agaacaactaccgcagctaatgcacgatttatcgatcgccagcatagaacggcaaaccagattgctgattgagtg

SEQ ID NO: 379505 - DNA, 75 bp, synthetic construct
  source 1..75: mol_type = other DNA
ccacagtgcagatcaaagcagccagaccagcacaaaaggagtacaccctacaggacggtggggggctttttctcc

SEQ ID NO: 379506 - DNA, 75 bp, synthetic construct
  source 1..75: mol_type = other DNA
gctttatccgtatcagcaacagaacggcagaccagattactgattgaatggcagctactgactgtaacccgtccg

SEQ ID NO: 379507 - DNA, 75 bp, synthetic construct
  source 1..75: mol_type = other DNA
aaacgcattgtgcttatgcgctggtggggcgaatttgtcgaggcggcggcaacgggcgtaacccttgccagtggt

SEQ ID NO: 379508 - DNA, 75 bp, synthetic construct
  source 1..75: mol_type = other DNA
aaataagatcgcggcttttgcgccttttgagaaggtatctctgggaagtaaactttcaggaaaagatatttcaat

SEQ ID NO: 379509 - DNA, 75 bp, synthetic construct
  source 1..75: mol_type = other DNA
ggaaagctgaccaataccgccgatctgatccgcctgattatccgcgatgaagcagtacacggttattacattggc

SEQ ID NO: 379510 - DNA, 75 bp, synthetic construct
  source 1..75: mol_type = other DNA
aaaatcgccagtgtgtttcttgaatctttttgttctattccggtttctggctgccgatgtatttttccagccgcg

SEQ ID NO: 379511 - DNA, 75 bp, synthetic construct
  source 1..75: mol_type = other DNA
gtttctccctcgacgtgcgcgaaccgcttaaccgtttcgtcggtggcgatgcagcaaatcgtcgccatttgccgg

SEQ ID NO: 379512 - DNA, 75 bp, synthetic construct
  source 1..75: mol_type = other DNA
caacctgctacccaatatgtcggttgctgataatctattcataggtcgcgaacccaaacgtttcggccttctacg

SEQ ID NO: 379513 - DNA, 75 bp, synthetic construct
  source 1..75: mol_type = other DNA
tccgcaccgaaggattaagtaaatttttccccggcgtcaaagcgttagacaacgttgatttcagcctgcgccgtg

SEQ ID NO: 379514 - DNA, 75 bp, synthetic construct
  source 1..75: mol_type = other DNA
tcctgcctggcagacattaactgtcgtagaacaacaactgacgatgcgcgtttttactggcctgacgctgctcga

SEQ ID NO: 379515 - DNA, 75 bp, synthetic construct
  source 1..75: mol_type = other DNA
ctttcaggtgagcagtttgatttattagttgagctttcttcaattcatagtcaaaaggttattttggctatgcac

SEQ ID NO: 379516 - DNA, 75 bp, synthetic construct
  source 1..75: mol_type = other DNA
gagatccacggtttccgttgggtggaagagcgcgatctgagcggctttgttgatggcacggaaaacccggcgggc

SEQ ID NO: 379517 - DNA, 75 bp, synthetic construct
  source 1..75: mol_type = other DNA
cgaaaccccgtgggctgacgatgtgaaagcgtttctctgttacaacgccaataaggctttgatgaatctgggcta

SEQ ID NO: 379518 - DNA, 75 bp, synthetic construct
  source 1..75: mol_type = other DNA
agagtttcgccttcgatttgttgctggaactctacgacaacgagttgcaatacaccgatgagctgtacgccgaaa

SEQ ID NO: 379519 - DNA, 75 bp, synthetic construct
  source 1..75: mol_type = other DNA
cgcctcatgaagaggcggtattatcgaatatcagctttatggaagcggttcatgcccgctcttacagttcgattt

SEQ ID NO: 379520 - DNA, 75 bp, synthetic construct
  source 1..75: mol_type = other DNA
ggtttcagcctggcagaaaaagggcaggaatcggacttctatcgtattgatgaccgaaaagccgcccgtatggcc

SEQ ID NO: 379521 - DNA, 75 bp, synthetic construct
  source 1..75: mol_type = other DNA
aaatcaaaagataatttccgcacaaagaatgattctgacccggctgatacaaatagcagagaccagggacagaat

SEQ ID NO: 379522 - DNA, 75 bp, synthetic construct
  source 1..75: mol_type = other DNA
aggcaagaaattcacacttataaatttaaataatctaaattttcagcttgatttactggccgacatctctcatga

SEQ ID NO: 379523 - DNA, 75 bp, synthetic construct
  source 1..75: mol_type = other DNA
acttttagcaggagaaattgacaacctaaaacatcgaatgattaagaaaagcaagctggagagaaataccagaac

SEQ ID NO: 379524 - DNA, 75 bp, synthetic construct
  source 1..75: mol_type = other DNA
gtcagaggttttcccaccgctctatcaggcgatgatccgcacgggtgaactgaccggtaagctggatgaatgctg

SEQ ID NO: 379525 - DNA, 75 bp, synthetic construct
  source 1..75: mol_type = other DNA
tggcaagctttagtggcgaatggggttggttgctggtgctattcggctttctgctggcgatagccaataagctgc

SEQ ID NO: 379526 - DNA, 75 bp, synthetic construct
  source 1..75: mol_type = other DNA
gtcagaggtatttccgccactctatcaggcgatgatccgcacgggtgaactgaccggtaagctggatgaatgctg

SEQ ID NO: 379527 - DNA, 75 bp, synthetic construct
  source 1..75: mol_type = other DNA
aggtgtttttgttcttgatccaaaaaatgacgaatgggcaccgcatctttatcgcaaagcatgtaaagatgcagg

SEQ ID NO: 379528 - DNA, 75 bp, synthetic construct
  source 1..75: mol_type = other DNA
aggaaagaaatttgttgtaattaatttaaacagaaccaaccatcaacttgacttactggctgacatatcacatga

SEQ ID NO: 379529 - DNA, 75 bp, synthetic construct
  source 1..75: mol_type = other DNA
ttctgatcttaatggcgattctgtaattggtgctgttattgaaaacgcaaaattcaagttaatctataaaatcca

SEQ ID NO: 379530 - DNA, 75 bp, synthetic construct
  source 1..75: mol_type = other DNA
atgggttcccacctgatgcaaaggctgaatgcctttgccgatgcattttccttttttcttttatggctgcaaaac

SEQ ID NO: 379531 - DNA, 75 bp, synthetic construct
  source 1..75: mol_type = other DNA
aggcttcagatttttatcgtatctctgaccgtcgcgcagccagaaatacatctgcaatttatgaaaaaggaatga

SEQ ID NO: 379532 - DNA, 75 bp, synthetic construct
  source 1..75: mol_type = other DNA
accttatcgacggtatcaccgccgaccatctggaggaattattcgtggccggtttcagtctggcggaaaaaggcg

SEQ ID NO: 379533 - DNA, 75 bp, synthetic construct
  source 1..75: mol_type = other DNA
cggcagctatgtctttgtgcagcgttgggagcacaacctgaagcaactcaaccggatgagcgttcacgatcaaga

SEQ ID NO: 379534 - DNA, 75 bp, synthetic construct
  source 1..75: mol_type = other DNA
caggggaaagcatggcctctgattgaaggcagggatatcaccactgtgctggacaaccgcctgatggggctgacg

SEQ ID NO: 379535 - DNA, 75 bp, synthetic construct
  source 1..75: mol_type = other DNA
gctggcactggagcagatggcagaacaggggaaagcatggcctctgattgaaggcagggatatcaccactgtgct

SEQ ID NO: 379536 - DNA, 75 bp, synthetic construct
  source 1..75: mol_type = other DNA
aggacggcgacagtcaccgctttatcctggcagatcgcggagcctacacgggggtaattgccagctggttgcata

SEQ ID NO: 379537 - DNA, 75 bp, synthetic construct
  source 1..75: mol_type = other DNA
ctgccagtgatcactatcacacgcaaggacggcgacagtcaccgctttaccttggcagatcgcggagcctacacg

SEQ ID NO: 379538 - DNA, 75 bp, synthetic construct
  source 1..75: mol_type = other DNA
actaagaagcagaagaaagagccagaagcgaagcagggcgattacttggtgggtacggatgaaaacgtgctggta

SEQ ID NO: 379539 - DNA, 75 bp, synthetic construct
  source 1..75: mol_type = other DNA
tagccgcacggcacaagctgaagatggcattgggtaaagacctgtctgataaacccgtggagcatatagaccaga

SEQ ID NO: 379540 - DNA, 75 bp, synthetic construct
  source 1..75: mol_type = other DNA
ctgaagggcgggccgatctctataccgaaatgcctgtaaaggtgagcggctttaagcagcctattgatgatgccg

SEQ ID NO: 379541 - DNA, 75 bp, synthetic construct
  source 1..75: mol_type = other DNA
ggcgctgggtaaagacctgacggacaaagcgctggatcacatggaccagacaaatgaaagtgatgccagtttcct

SEQ ID NO: 379542 - DNA, 75 bp, synthetic construct
  source 1..75: mol_type = other DNA
gatctggagctggacgatgccgacgggcagatcgttctgccgcgacgtggtgccgttattcatctggcgctgggg

SEQ ID NO: 379543 - DNA, 75 bp, synthetic construct
  source 1..75: mol_type = other DNA
tagccgcgcgtcacaagctgaagatggcactgggtaatgacctgtcggataagcccgtggaacatatagaccaga

SEQ ID NO: 379544 - DNA, 75 bp, synthetic construct
  source 1..75: mol_type = other DNA
gtgaaaaatcgtggcacaagaccacggtcggggaagtggtgaaggaaatagctgcgcgtcacaaactgaagatgg

SEQ ID NO: 379545 - DNA, 75 bp, synthetic construct
  source 1..75: mol_type = other DNA
ctgctcccgataacacttgatgccgaagatgttgtccctataacccccccccggtcacaacctgtagctgctgcg

SEQ ID NO: 379546 - DNA, 75 bp, synthetic construct
  source 1..75: mol_type = other DNA
tgcggttattacgctggcactgggctggaaggggcagccgcttttccctaaaggggcattcacagtggacgagat

SEQ ID NO: 379547 - DNA, 75 bp, synthetic construct
  source 1..75: mol_type = other DNA
gggaaaaagtttgacgctgcaattgttttgcaggataaagctacgggtaaacttgggtttcagttcagtaaaaaa

SEQ ID NO: 379548 - DNA, 75 bp, synthetic construct
  source 1..75: mol_type = other DNA
cacagagcgttctggtacaaaagggctgggaagcgctgggtaaggatagtgatgatgaggaagaaactgaagatg

SEQ ID NO: 379549 - DNA, 75 bp, synthetic construct
  source 1..75: mol_type = other DNA
accttaaccttgcaccagtgcaaaagtcgctggcgaatttacagcctaacgataaatttcgcggtatgacgttaa

SEQ ID NO: 379550 - DNA, 75 bp, synthetic construct
  source 1..75: mol_type = other DNA
agcctgtgaaaacgctggttatgaacaacatggaaggcaggcagaaattgcccgtcgaatgaaattaacaccaaa

SEQ ID NO: 379551 - DNA, 75 bp, synthetic construct
  source 1..75: mol_type = other DNA
gccatgacgagcgcggcaaaattcattgatgacccggtactacgaaaagcgctggaagcaaaagacgagggcagc

SEQ ID NO: 379552 - DNA, 75 bp, synthetic construct
  source 1..75: mol_type = other DNA
aaacaggaaaagcttctgccgataatatcggtggtatttattatcgaccagttcaatattgtatcaacggtacct

SEQ ID NO: 379553 - DNA, 75 bp, synthetic construct
  source 1..75: mol_type = other DNA
acaaaggcaacaaaactcccgcattcagcatcagtattgagggaaaggatatcaccactgtgctggataaccgcc

SEQ ID NO: 379554 - DNA, 75 bp, synthetic construct
  source 1..75: mol_type = other DNA
gaaaaatcgtgctgccgcgtcgtggtgcggttattacgctggcgctgggctggaaagggcagccgcttttcccga

SEQ ID NO: 379555 - DNA, 75 bp, synthetic construct
  source 1..75: mol_type = other DNA
attaattcttcatttcaatatgaacgcgggtagctgcccggctgtacaattacgcgtgaattataagaacggcgg

SEQ ID NO: 379556 - DNA, 75 bp, synthetic construct
  source 1..75: mol_type = other DNA
ctgttttaccgttcttcacgtgatggttatggctttgaggaagactggactcagatttataccaaaaaagacagc

SEQ ID NO: 379557 - DNA, 75 bp, synthetic construct
  source 1..75: mol_type = other DNA
ggtaagtggtatcccgtagtttttcgtcgttcatctggcggtaatagcgagctggcatcgagagtggttatcacg

SEQ ID NO: 379558 - DNA, 75 bp, synthetic construct
  source 1..75: mol_type = other DNA
atggagctatgaagaagaccatcgcaatgagactgtttactcaacagaaaatggcgcagctgttacagtggatta

SEQ ID NO: 379559 - DNA, 75 bp, synthetic construct
  source 1..75: mol_type = other DNA
agctgaagttacaggccggacggaaactgactcaggcagaacaacccgacttaacgccgtgctggattacattga

SEQ ID NO: 379560 - DNA, 75 bp, synthetic construct
  source 1..75: mol_type = other DNA
acttaacgccgtgctggattacattgacgcggtggaggcaacagataccagcactgcgccggatgtcatctggcc

SEQ ID NO: 379561 - DNA, 75 bp, synthetic construct
  source 1..75: mol_type = other DNA
ggtgacagattctgaggcacaacacggtgccgcagtagaagcagcagaagcacagcgccagtcgctgattgatac

SEQ ID NO: 379562 - DNA, 75 bp, synthetic construct
  source 1..75: mol_type = other DNA
gtcacgctttcaccgttaacgccatatgataaatgggatggtgagaaatgggtgacagattctgaggcacaacac

SEQ ID NO: 379563 - DNA, 75 bp, synthetic construct
  source 1..75: mol_type = other DNA
caccgttaacgccatatgataaatgggatggtgagaaatgggtgacagatactgaggcacagcataacgccgcag

SEQ ID NO: 379564 - DNA, 75 bp, synthetic construct
  source 1..75: mol_type = other DNA
cggcttaacgctgtgctggattacattgacgcggtgacggcaacagataccagcaccgcgccggatgtcatctgg

SEQ ID NO: 379565 - DNA, 75 bp, synthetic construct
  source 1..75: mol_type = other DNA
ggtgccgcagtagaagcggcagaagcacagcgccagtcactgattgatgcagcaatggcttccattagtccgatt

SEQ ID NO: 379566 - DNA, 75 bp, synthetic construct
  source 1..75: mol_type = other DNA
taagccaggcgagatatgatctatatcaatttctcatctataatgctttgttagtatctcgtcgccgacttaata

SEQ ID NO: 379567 - DNA, 75 bp, synthetic construct
  source 1..75: mol_type = other DNA
cacagcgccagtcgctgattgatgctgcaatggcttccatcagtctgattcaactgaaattacaggccggacgga

SEQ ID NO: 379568 - DNA, 75 bp, synthetic construct
  source 1..75: mol_type = other DNA
caactgaaatcacaggccggacggaagctgatgcaggcagaaacaacccggcttaacgctgtgctggattacatt

SEQ ID NO: 379569 - DNA, 75 bp, synthetic construct
  source 1..75: mol_type = other DNA
atggagccatgaagaagactatcgcaatgagactgtttactcaacagaaaatggcgcagctgttacagtggatta

SEQ ID NO: 379570 - DNA, 75 bp, synthetic construct
  source 1..75: mol_type = other DNA
agctgacgcaggcagaaacaacccgacttaacgccgtgctggattacattgacgcggtgacggcaacagatacca

SEQ ID NO: 379571 - DNA, 75 bp, synthetic construct
  source 1..75: mol_type = other DNA
agtgggcgctatcactccgattggttatcaatgatgtattcgcgaataaaattagctaggaacttgctcaaagaa

SEQ ID NO: 379572 - DNA, 75 bp, synthetic construct
  source 1..75: mol_type = other DNA
acttgatcaacgccatcgccttactgggcttttcaatcccggtgttctggctggcgcttctgttgacgctgtttt

SEQ ID NO: 379573 - DNA, 75 bp, synthetic construct
  source 1..75: mol_type = other DNA
attcgccagcaggattacgcggcgatttcagcgggcgttatggtgattggttcactggttatcatcgttaacgtc

SEQ ID NO: 379574 - DNA, 75 bp, synthetic construct
  source 1..75: mol_type = other DNA
gattggctctcaatgatttattcacggcttcgtcttgctagggggttattaaaagaagatggtgccgtctttatc

SEQ ID NO: 379575 - DNA, 75 bp, synthetic construct
  source 1..75: mol_type = other DNA
aaaagaagatggtgccatctttatctccatcaatgatgctgaatttgagaacttaaaaagtatagccagtgaagt

SEQ ID NO: 379576 - DNA, 75 bp, synthetic construct
  source 1..75: mol_type = other DNA
aacaattgcagaaatttccaaggaacgtatccgccgagctggcgcaaaaattttagagggaaagagccataaaga

SEQ ID NO: 379577 - DNA, 75 bp, synthetic construct
  source 1..75: mol_type = other DNA
tgtcgaatgatggcaaacaatatcagtcatatgtccgcgattttatatatagacaatctgatcttacccagcaat

SEQ ID NO: 379578 - DNA, 75 bp, synthetic construct
  source 1..75: mol_type = other DNA
caaatcatgccctaaatatcactcacgcaaaggaagtaaatattgcaataaaaaactggctgcagatcactcagc

SEQ ID NO: 379579 - DNA, 75 bp, synthetic construct
  source 1..75: mol_type = other DNA
cccgtttttttcggaaatgatatctctgaagcagagacatggagacaggtatggctaggccataaacctgaaaat

SEQ ID NO: 379580 - DNA, 75 bp, synthetic construct
  source 1..75: mol_type = other DNA
gatccccgttggtatgctggccggtatcacgcggaacaaatggcaggaccgctgcatcagtgcattggctctgat

SEQ ID NO: 379581 - DNA, 75 bp, synthetic construct
  source 1..75: mol_type = other DNA
aaagcaaggaaagaatacaaagattgggtaaaccagcaagatctaactgggggggaaaaggcatataatcaaatc

SEQ ID NO: 379582 - DNA, 75 bp, synthetic construct
  source 1..75: mol_type = other DNA
caattaaattatgttgtgtctgtttacgacccgaacgataccaacgttgccgtcagaggcacccacaggacagca

SEQ ID NO: 379583 - DNA, 75 bp, synthetic construct
  source 1..75: mol_type = other DNA
tctgtcggctgggctgtctcttgatcagatctcctgatcaagagacttcatcaccaggtaaccctcaaccatatc

SEQ ID NO: 379584 - DNA, 75 bp, synthetic construct
  source 1..75: mol_type = other DNA
gcaactgaaatgggagctggaagattactgcttccgttatctgcacccgaccgaatacaaacgcatcgcaaaact

SEQ ID NO: 379585 - DNA, 75 bp, synthetic construct
  source 1..75: mol_type = other DNA
atcaaactggcggagcgtattgctcatctgcgcgaagtaaaagatgcgccggaagatgaacgcgtactggcggca

SEQ ID NO: 379586 - DNA, 75 bp, synthetic construct
  source 1..75: mol_type = other DNA
ttcaccagggggtagtgcaggagattcacccagaaccagtcactcttttgaaccagtcaaagaaccagtcaatga

SEQ ID NO: 379587 - DNA, 75 bp, synthetic construct
  source 1..75: mol_type = other DNA
gacgcgggagttaatgggctactcatcaccggcactaacctgcgtgaaagccagcaggcgcaaaagctggcgcgt

SEQ ID NO: 379588 - DNA, 75 bp, synthetic construct
  source 1..75: mol_type = other DNA
tgttggtgcatctgctgatgagtctgtgcgagttcgttcaaaccgaccggaatactctccggagtttgagcaggc

SEQ ID NO: 379589 - DNA, 75 bp, synthetic construct
  source 1..75: mol_type = other DNA
tccttcatctggatggtgcaggagattcactagggggtagtgcaaataattcactatctggtgcagcaaattcac

SEQ ID NO: 379590 - DNA, 75 bp, synthetic construct
  source 1..75: mol_type = other DNA
ataattttaatcataagttgaattatctgaaacagcatgctgaatgggaccgatttactgttgcttttttgggtg

SEQ ID NO: 379591 - DNA, 75 bp, synthetic construct
  source 1..75: mol_type = other DNA
ggcatggcataaccggcgacggcaatgcgcaagatgggatgctatgggcagagagccgtgctttgctgcttatgg

SEQ ID NO: 379592 - DNA, 75 bp, synthetic construct
  source 1..75: mol_type = other DNA
cactacagcaacagatggttaccccactaagcctgaagcgaatcgccatcaattctgcgcagtggcgaggagata

SEQ ID NO: 379593 - DNA, 75 bp, synthetic construct
  source 1..75: mol_type = other DNA
gcactggatggtcatatggccactttctgtaaccgattaccgtcttgatgcgcctttgatgttccggggatcatt

SEQ ID NO: 379594 - DNA, 75 bp, synthetic construct
  source 1..75: mol_type = other DNA
acaggcagacggaagctggagcgtcggcattccggcggcaagcgtcagtgcatggcctgcggggccgttaaccgt

SEQ ID NO: 379595 - DNA, 75 bp, synthetic construct
  source 1..75: mol_type = other DNA
gctgggtatctgcgatgggtaacagcggcacacaatttgtgaaacaggctgtcacgttctttggcccggatcgtc

SEQ ID NO: 379596 - DNA, 75 bp, synthetic construct
  source 1..75: mol_type = other DNA
gctggataaactgcctggtgcggttcttcattgctttaccggcacacgcgaagagatgcaggcgtgcgtggcgcg

SEQ ID NO: 379597 - DNA, 75 bp, synthetic construct
  source 1..75: mol_type = other DNA
cctgagcgaaaacatggcgcgactttccggcgtcaaaaccagcatggcgcgtaaagtgatcaacaacttctttga

SEQ ID NO: 379598 - DNA, 75 bp, synthetic construct
  source 1..75: mol_type = other DNA
aaaacgaaattctctatcgggtggcgaaactcaacgacgttaaccgcgacgtggtggatgagctggatcgcctga

SEQ ID NO: 379599 - DNA, 75 bp, synthetic construct
  source 1..75: mol_type = other DNA
tcggttatctcgccaccaatggcctaaataatttagtccctgaattccaaattttagatggtgctgatcactatg

SEQ ID NO: 379600 - DNA, 75 bp, synthetic construct
  source 1..75: mol_type = other DNA
atggcaatatctgcaggtcgtctgacacagatgataagtgttctgaatcgggtgttaacccgtaacgctgccgga

SEQ ID NO: 379601 - DNA, 75 bp, synthetic construct
  source 1..75: mol_type = other DNA
taacgccagcgtcactgatgccggaggaaacagcggcagcaccacccatcaggtgacggtcaataccgggctgcc

SEQ ID NO: 379602 - DNA, 75 bp, synthetic construct
  source 1..75: mol_type = other DNA
ccgtatcgaacagatccgccgcgaaatcatgggcatcgcccgtgaactggaagaggcgggcgaaattcagctaca

SEQ ID NO: 379603 - DNA, 75 bp, synthetic construct
  source 1..75: mol_type = other DNA
agtgagagagtgctatggttagcattgaataattacaaaataaaacctgagattaaaaggtattatagcggacaa

SEQ ID NO: 379604 - DNA, 75 bp, synthetic construct
  source 1..75: mol_type = other DNA
tcgaaccgcatgtgccggtgtgggacaagaccgagcgcaaggacgacagcctctccagggcactgttgcaaatag

SEQ ID NO: 379605 - DNA, 75 bp, synthetic construct
  source 1..75: mol_type = other DNA
tggaactgcgagaactgttgccgttgattccggcagataaactactgattgaaactgatgcaccgtatttgctcc

SEQ ID NO: 379606 - DNA, 75 bp, synthetic construct
  source 1..75: mol_type = other DNA
ttggttatctcgccaccaatggactaaataatttagttccagacttccaaattttagataatgcagatcactatg

SEQ ID NO: 379607 - DNA, 75 bp, synthetic construct
  source 1..75: mol_type = other DNA
tgatttgcgcaaataccagattttaggatttgaagattataaccactacgtcggttatctcgccaccaatggcct

SEQ ID NO: 379608 - DNA, 75 bp, synthetic construct
  source 1..75: mol_type = other DNA
ttaagaagatcggtgattcagcttctcttctaagtaaacctaaatctattctaagacgtaaagactttaaagagc

SEQ ID NO: 379609 - DNA, 75 bp, synthetic construct
  source 1..75: mol_type = other DNA
tgtggcagtgaagcggctgcgcggcaaaatcgacaacgactttgagccgaagctgattcaaaccgtgcgcggcgt

SEQ ID NO: 379610 - DNA, 75 bp, synthetic construct
  source 1..75: mol_type = other DNA
agtcagtttcaggttgccgatttgatggtcgatctcgtcagccgcaaagtcacccgcagcggcacgcgcatcact

SEQ ID NO: 379611 - DNA, 75 bp, synthetic construct
  source 1..75: mol_type = other DNA
taagtaaaattacggcagactttactgacctgggcattattccggcattgtcaaccatgtcattgccagcggcat

SEQ ID NO: 379612 - DNA, 75 bp, synthetic construct
  source 1..75: mol_type = other DNA
tgcaggtcacgccgctgccgctcaaccactcaaaactgaccttcggttatctgctggaaacggcacacagccggg

SEQ ID NO: 379613 - DNA, 75 bp, synthetic construct
  source 1..75: mol_type = other DNA
accagaacgatgacatcgaccgtgaagatgttgcccagcgatttgatgctgacttcattctgttcacaagcgaat

SEQ ID NO: 379614 - DNA, 75 bp, synthetic construct
  source 1..75: mol_type = other DNA
aatgactcatattgaagccggaaaagttgcaacaacagttgcaatcaactggcaggaccgcgcgaccttcaggtt

SEQ ID NO: 379615 - DNA, 75 bp, synthetic construct
  source 1..75: mol_type = other DNA
ccagaccgccgctgttagtgggggtgcctgtcgcccccgcgcttttgtcattttttgcattattcatgtcgggat

SEQ ID NO: 379616 - DNA, 75 bp, synthetic construct
  source 1..75: mol_type = other DNA
ctgagtagcctgaactttgttgaactggcatcacttcataatttctatccaggaaaacgcgacaaagccccgtgg

SEQ ID NO: 379617 - DNA, 75 bp, synthetic construct
  source 1..75: mol_type = other DNA
atgaaccgtaatccgtctgaaaatctgtctgaaaacacgtcccgtcagttcctgtccctggcctcgccagcagag

SEQ ID NO: 379618 - DNA, 75 bp, synthetic construct
  source 1..75: mol_type = other DNA
gagcgttcctctccggacaatatgaagctgttgaaattgatgagtttgttaatgccatgaaactgaatgagcgaa

SEQ ID NO: 379619 - DNA, 75 bp, synthetic construct
  source 1..75: mol_type = other DNA
agattataaagactatgttgaaggtgccaaagtatcccccgaacacttcgaaataatcaggaacattgaccctga

SEQ ID NO: 379620 - DNA, 75 bp, synthetic construct
  source 1..75: mol_type = other DNA
gttccacgtatgccctattacagcttgcttggaaatctagatatatttttaagcacagatacagctcagttttct

SEQ ID NO: 379621 - DNA, 75 bp, synthetic construct
  source 1..75: mol_type = other DNA
aaatgaaaaaagtagtgcgacaggaatatctctggaaggggccacgggaaataatgtaacgctaaatggtacaac

SEQ ID NO: 379622 - DNA, 75 bp, synthetic construct
  source 1..75: mol_type = other DNA
atgacgacagcaaccagcctgaacgaactacaaaagcaaatccgcgatcgctacgatagcctgagcaaaaggctg

SEQ ID NO: 379623 - DNA, 75 bp, synthetic construct
  source 1..75: mol_type = other DNA
cccggtgttgacggtgtgagtaaagcaaagctacaggccagactgcctgctgagttgcagagactcagcgaagaa

SEQ ID NO: 379624 - DNA, 75 bp, synthetic construct
  source 1..75: mol_type = other DNA
cataatggtgaccgcgaaggaatgcgggtatgccttaatttgtccagagtcgaagtattaaaccagcgttatttc

SEQ ID NO: 379625 - DNA, 75 bp, synthetic construct
  source 1..75: mol_type = other DNA
acctggagcaaaaccggttactacatggcggcggagatcgagcgactaaaacaagccctgtcttctgtggaaagc

SEQ ID NO: 379626 - DNA, 75 bp, synthetic construct
  source 1..75: mol_type = other DNA
ccggcaacctataaacgctgggtgaaagaagctattaaacgggattgtgttattgccgggatcggcgtggaggtg

SEQ ID NO: 379627 - DNA, 75 bp, synthetic construct
  source 1..75: mol_type = other DNA
taagtgtggaaaaagaggattttgtccgtgcgataaccattttaaataacaatggcttcccgaaaaagaaatttg

SEQ ID NO: 379628 - DNA, 75 bp, synthetic construct
  source 1..75: mol_type = other DNA
ttaatgtaaaacaggctaacgaattgactgaagccgcatattatctctctttgaaggccaagcgcattctgtggc

SEQ ID NO: 379629 - DNA, 75 bp, synthetic construct
  source 1..75: mol_type = other DNA
ggcagtcttcgaaatccacggacgatccgcctttatgaaagtcttgctcaattcaaatcttcaggcttatgggtt

SEQ ID NO: 379630 - DNA, 75 bp, synthetic construct
  source 1..75: mol_type = other DNA
attagcaatacagcagaccaacagattacagccgtcacaattaatgcggcagataaagaccttaatgttactttt

SEQ ID NO: 379631 - DNA, 75 bp, synthetic construct
  source 1..75: mol_type = other DNA
tgttttatcttcgtcctggtcttaacgccagtgagcaatatgctgatgcaaaacttgagggccatccattaagag

SEQ ID NO: 379632 - DNA, 75 bp, synthetic construct
  source 1..75: mol_type = other DNA
aacaaatcaatgaaaaaacccccttaaaagcatcttactctattgatagtaatggtaaatttatattcagtgtca

SEQ ID NO: 379633 - DNA, 75 bp, synthetic construct
  source 1..75: mol_type = other DNA
ataaccaatcatgcttggctcaatgagcggttcgtgctacctgagtctcaacagaaaaatttagccgaattgaga

SEQ ID NO: 379634 - DNA, 75 bp, synthetic construct
  source 1..75: mol_type = other DNA
cgtccagtactcactccagtagtccgtcagagcaagagatatctcagcaggtgtcatctgctcaaccgttgccgg

SEQ ID NO: 379635 - DNA, 75 bp, synthetic construct
  source 1..75: mol_type = other DNA
caggacgcggaaagcgcggacaactgcgctttctggtcacgccggaatcgctacgcaatgcgatgatggaacagg

SEQ ID NO: 379636 - DNA, 75 bp, synthetic construct
  source 1..75: mol_type = other DNA
acaataatacccaacgcccgattggcgatttagcacatcactgggaaatctctgctgacgggctacgctgggatt

SEQ ID NO: 379637 - DNA, 75 bp, synthetic construct
  source 1..75: mol_type = other DNA
tgggcgacaggttaattggcgaagcgccggaatatacactggagcaatggctgcgttgcgatccactctggtcat

SEQ ID NO: 379638 - DNA, 75 bp, synthetic construct
  source 1..75: mol_type = other DNA
cgagcaacactggcggcagaaggttgtgaactaaaaatcatttttcataacgcgaaaagctgggacgatgccgct

SEQ ID NO: 379639 - DNA, 75 bp, synthetic construct
  source 1..75: mol_type = other DNA
ataacccctccgctttttgaaaaagatttgggtaccagttgtcggcatccggtacaaatcaccatcggcaaacct

SEQ ID NO: 379640 - DNA, 75 bp, synthetic construct
  source 1..75: mol_type = other DNA
tacaaccgggctttttgcccggccgtgccgagcagcatctcgccgggcaaatattttccggcctgacccgcttcg

SEQ ID NO: 379641 - DNA, 75 bp, synthetic construct
  source 1..75: mol_type = other DNA
atggtttggcagtgccatgcgtaacagtgcatttgtctatcccgatcatgggcgaatctggctgacgcagcgtgt

SEQ ID NO: 379642 - DNA, 75 bp, synthetic construct
  source 1..75: mol_type = other DNA
tcccgccccagcctggtgctggcacacagcgctcgttcgctaatggatcgctttaacacatcgctgtggtctggt

SEQ ID NO: 379643 - DNA, 75 bp, synthetic construct
  source 1..75: mol_type = other DNA
gcttcatagcgaacaagagtgtattgtgttccccgcgccagcggggataaaccgctctcggttctggggtactgt

SEQ ID NO: 379644 - DNA, 75 bp, synthetic construct
  source 1..75: mol_type = other DNA
gtgaactcacaattatttttcataacgcaaaaaactgggacgacacgaccctactggcacacgcagacctcatga

SEQ ID NO: 379645 - DNA, 75 bp, synthetic construct
  source 1..75: mol_type = other DNA
gtcggagaaaacctgatcaccgccagtcatgcattactgccaggctggactattccgcactggcaagtaccggat

SEQ ID NO: 379646 - DNA, 75 bp, synthetic construct
  source 1..75: mol_type = other DNA
gggaaatgagcgttgtcagagtgcgccgaagctggtggaaaaaacatcgggatgagttttctttactggaagggg

SEQ ID NO: 379647 - DNA, 75 bp, synthetic construct
  source 1..75: mol_type = other DNA
accagaatatacccttgaacaatggctgcgttgtgatcctctgtggccgcatgttttcactgccagcgcatatac

SEQ ID NO: 379648 - DNA, 75 bp, synthetic construct
  source 1..75: mol_type = other DNA
gtccggtcgtcggtgggctggttggtctgaccggcgggttacatcgatattcgatggggggcatgaccgcgttaa

SEQ ID NO: 379649 - DNA, 75 bp, synthetic construct
  source 1..75: mol_type = other DNA
cccagcagcagttgcccgcgtttaccctacaaccgatagtcgaaaacgccattaaacatgggacatcgcaactac

SEQ ID NO: 379650 - DNA, 75 bp, synthetic construct
  source 1..75: mol_type = other DNA
gcggtgatgggcggcttactgggcggcccggtggtgggcgggctggttggtctgaccggcgggttacatcgttac

SEQ ID NO: 379651 - DNA, 75 bp, synthetic construct
  source 1..75: mol_type = other DNA
atctattcaaacattcgggcctgcttgatttcagccacacggtggagccatttgtgatgtttgatttgcagggat

SEQ ID NO: 379652 - DNA, 75 bp, synthetic construct
  source 1..75: mol_type = other DNA
atggagttgatagcctcttattgttccaatatcattatagtcatgaatgagagcgatgaaagaatcgcaagaaaa

SEQ ID NO: 379653 - DNA, 75 bp, synthetic construct
  source 1..75: mol_type = other DNA
tatgcatcgtgcatatggtgcgcaacagtctgcgcttcgtgtcatggaaggactacaaagccgtcactcgcgacc

SEQ ID NO: 379654 - DNA, 75 bp, synthetic construct
  source 1..75: mol_type = other DNA
tttattctggaagacgtgactggcgcaggtaaaacagaagcggcgcttatcctggcgcacaggttgatggctgcg

SEQ ID NO: 379655 - DNA, 75 bp, synthetic construct
  source 1..75: mol_type = other DNA
acgccttaaccgtctttcctccaaaagcagaaaccgcacctttcaccggaattaatacgctgtttccttttattg

SEQ ID NO: 379656 - DNA, 75 bp, synthetic construct
  source 1..75: mol_type = other DNA
agtatcaacgactatggcaaccttccgccggaaagccgcaatctgtcactattggcgaactggctgaacgctgtt

SEQ ID NO: 379657 - DNA, 75 bp, synthetic construct
  source 1..75: mol_type = other DNA
atgctggagatcgaagacaatgccggtttgtatcaaccggtaaccaatgccagtgggctggggatgaatctggtg

SEQ ID NO: 379658 - DNA, 75 bp, synthetic construct
  source 1..75: mol_type = other DNA
ggaaacagcgttattttgctttctgctacgttatctcaacagcagcgcgacaaactcgtcgccgcctttgcgcgt

SEQ ID NO: 379659 - DNA, 75 bp, synthetic construct
  source 1..75: mol_type = other DNA
aaaaccgacgcggcgagaaagagggcggcgacgactatcatctactttgctggcattcgctggatgtagccgcga

SEQ ID NO: 379660 - DNA, 75 bp, synthetic construct
  source 1..75: mol_type = other DNA
tgtcactacgtctgttgcagttgcagagtttttccgcaagctgcataaaaacgtcattcaaaaaattgaagctct

SEQ ID NO: 379661 - DNA, 75 bp, synthetic construct
  source 1..75: mol_type = other DNA
cagattatggtggggcgtgcagggcagccgaaaggctggccggtttcggtagtcaccggtatttccacccctgta

SEQ ID NO: 379662 - DNA, 75 bp, synthetic construct
  source 1..75: mol_type = other DNA
cgcgcaaagaagccatcgttaaacagcgtggcggcagcgcctggcaaatcgtcagcgtagacagcacctatcact

SEQ ID NO: 379663 - DNA, 75 bp, synthetic construct
  source 1..75: mol_type = other DNA
gagactttccggttttatctggaaaaacagggatggactcttgttaaccggggcgcaattaaaaatatgactgtg

SEQ ID NO: 379664 - DNA, 75 bp, synthetic construct
  source 1..75: mol_type = other DNA
atatcaaattcactgaaaccgttcctgatggtgcaatggtctgcaccctggataccttccagttttatctggaga

SEQ ID NO: 379665 - DNA, 75 bp, synthetic construct
  source 1..75: mol_type = other DNA
tacgtctgttgcggttgcagagttcttccacaaacgacacgacaatgtgttacgtgccatcgcaaatattgaatg

SEQ ID NO: 379666 - DNA, 75 bp, synthetic construct
  source 1..75: mol_type = other DNA
gcggaactgaacggcgaaggcgaagtcgctggcggggtggtgatcctgcgttccggcaaaaacgcccgtgaagtg

SEQ ID NO: 379667 - DNA, 75 bp, synthetic construct
  source 1..75: mol_type = other DNA
tcacggcgcggtcctgcgcgtgcgcccgaaagcgatgacggtggcggtgattatcgctggtctgctgccgattct

SEQ ID NO: 379668 - DNA, 75 bp, synthetic construct
  source 1..75: mol_type = other DNA
atcggcattaaagtttccggcactgtgctggcggatatcgacgcgatggcggagcaaattgaagaagtggcgcga

SEQ ID NO: 379669 - DNA, 75 bp, synthetic construct
  source 1..75: mol_type = other DNA
gcttgaaaatttaagtctggcgatctgcacccctaccccctttacgctcaccaccgacgcggtgcaatgggtcga

SEQ ID NO: 379670 - DNA, 75 bp, synthetic construct
  source 1..75: mol_type = other DNA
cggtggaagggattgcccgttatccaattaatctgcgttatccgcaaagctggcgcgatagtccgcaggcgctgc

SEQ ID NO: 379671 - DNA, 75 bp, synthetic construct
  source 1..75: mol_type = other DNA
atctgttgaagtggggccggcgctgtttatcagtctgctgattatcacgttgtcgtttatcccgatcttcaccct

SEQ ID NO: 379672 - DNA, 75 bp, synthetic construct
  source 1..75: mol_type = other DNA
aacccggaagacaaccgcgcctacaaatgtacgttgtgcgttgaccgcgtggtggttgggcaagaaccggcctgc

SEQ ID NO: 379673 - DNA, 75 bp, synthetic construct
  source 1..75: mol_type = other DNA
gccacggtagagctcaacgagcggctggaagggaaagacagcgataaccctacccagcggcgcggcgcgcgcttc

SEQ ID NO: 379674 - DNA, 75 bp, synthetic construct
  source 1..75: mol_type = other DNA
cttattctggccatgctgatgcgccttctgctgctggcctctatttcgtggctggtcacgctcacccagccttta

SEQ ID NO: 379675 - DNA, 75 bp, synthetic construct
  source 1..75: mol_type = other DNA
ggatttaaatccatgaagacggcttacgccaccatcaaaggtattgaggtgatgcgtgcactacgcaaaggccag

SEQ ID NO: 379676 - DNA, 75 bp, synthetic construct
  source 1..75: mol_type = other DNA
ccctgcacatcgatgtatacggcactatcggtctgatcttcgatatggatccgcttcgctgtgcgcaatacatcg

SEQ ID NO: 379677 - DNA, 75 bp, synthetic construct
  source 1..75: mol_type = other DNA
cgataccgatggcaaacgtgacgcaatgttacgttttaccaaaccagtcactggcggctattactttgcaccgtc

SEQ ID NO: 379678 - DNA, 75 bp, synthetic construct
  source 1..75: mol_type = other DNA
cctgtatcggctgtaaagcctgtcaggtggcgtgttcagagtggaacgacattcgcgataccgtcggcaataacg

SEQ ID NO: 379679 - DNA, 75 bp, synthetic construct
  source 1..75: mol_type = other DNA
tgtacgatccggcaggcgtcggtggtacacacgtcatgtacgtgctgcaccatgctgacaagccaaatctgtatc

SEQ ID NO: 379680 - DNA, 75 bp, synthetic construct
  source 1..75: mol_type = other DNA
ggggacttccaggaagaagtggcgaaactcatcgacgttaccacctgtatcggctgtaaagcctgtcaggtggcg

SEQ ID NO: 379681 - DNA, 75 bp, synthetic construct
  source 1..75: mol_type = other DNA
ggtctgacctgtacggaacagaattttattaccaaatcgagcgttcagcgttatgccgcagagcatgggatcatg

SEQ ID NO: 379682 - DNA, 75 bp, synthetic construct
  source 1..75: mol_type = other DNA
tgaaagcatgtccggcggaaggcgctatcattcagtatgctaacggcattgtcgatttccagtccgagcagtgta

SEQ ID NO: 379683 - DNA, 75 bp, synthetic construct
  source 1..75: mol_type = other DNA
gtcgacttccagtccgagcagtgcattggctgcggttattgcattgcgggctgtccgttcgatattcctcgcctc

SEQ ID NO: 379684 - DNA, 75 bp, synthetic construct
  source 1..75: mol_type = other DNA
ccgggaaagcggaaaccgccaccgactccgcaccgctggagatggtagaaacgaccatccagcttaagccacagg

SEQ ID NO: 379685 - DNA, 75 bp, synthetic construct
  source 1..75: mol_type = other DNA
atgaagaagtcgattcttgctctgtctttgttagtcggtctgtccgcagcagcttccagctctgcggcactgccg

SEQ ID NO: 379686 - DNA, 75 bp, synthetic construct
  source 1..75: mol_type = other DNA
acaaaaaatacttcggtgacggcaccggtgtagggctgcgtaaagatgatgctgaactgacggcggccttcaata

SEQ ID NO: 379687 - DNA, 75 bp, synthetic construct
  source 1..75: mol_type = other DNA
tctggctgacggagacagcaacagactcttccacggacaaaaacgtcccgagcgccgtgtcgctctaacccccga

SEQ ID NO: 379688 - DNA, 75 bp, synthetic construct
  source 1..75: mol_type = other DNA
tgaaaccactgaaaccactgaaaccactgaaaccactgaaacccggcatcccgccgacaaggaaaaagcacaatg

SEQ ID NO: 379689 - DNA, 75 bp, synthetic construct
  source 1..75: mol_type = other DNA
acgcctttatccgggtcataaaaacagaagacgcacaacagtggctcaggcagcaccgttacgttcgcagcggtc

SEQ ID NO: 379690 - DNA, 75 bp, synthetic construct
  source 1..75: mol_type = other DNA
ctggtcgactgggggccatttcataactatgcagcaccacgatacaacctgcttgccatgaccggtaacaacgcc

SEQ ID NO: 379691 - DNA, 75 bp, synthetic construct
  source 1..75: mol_type = other DNA
gtaatgcagcagtacattgccatgtaagaggaaatgaaaagttgtttgttgatgtttatgccaaattcatagaac

SEQ ID NO: 379692 - DNA, 75 bp, synthetic construct
  source 1..75: mol_type = other DNA
atacttcatgtccatcgctataatcatgaaattccctcggtgctaaacattgaacaagattatcaattagttatc

SEQ ID NO: 379693 - DNA, 75 bp, synthetic construct
  source 1..75: mol_type = other DNA
ttccatccggaaagctataagcgctgggtaaaggaagctatagaacgagcctgtgttatcgcagggatcggtgtg

SEQ ID NO: 379694 - DNA, 75 bp, synthetic construct
  source 1..75: mol_type = other DNA
cagaaaatgaagcgtgtcgtctcggcctgccctgcccggaaccctgtgtggaagaagccattgaagggctgcggc

SEQ ID NO: 379695 - DNA, 75 bp, synthetic construct
  source 1..75: mol_type = other DNA
atttgcctggccctggacatttcgcggcactgttgcaaagttagcgatgaggcagccttttgtcttattcaaagg

SEQ ID NO: 379696 - DNA, 75 bp, synthetic construct
  source 1..75: mol_type = other DNA
taaacctgatggagaacgttttttacatggtggacggcgatactgtaacaatcagcttcgatggtggggaatatg

SEQ ID NO: 379697 - DNA, 75 bp, synthetic construct
  source 1..75: mol_type = other DNA
aaaatgttctgatagacgacgctcaaaatgctattaaagcagcgttggaagataattttggtcgtgattcgtcat

SEQ ID NO: 379698 - DNA, 75 bp, synthetic construct
  source 1..75: mol_type = other DNA
ggcgatcgtagtgatcccgatcctgatgggctactggatccgtggcaaaattccgccggaaagcagtaacccgct

SEQ ID NO: 379699 - DNA, 75 bp, synthetic construct
  source 1..75: mol_type = other DNA
ttgtggctcgctgttgcagcagtgttttctggtgcgggaatgattatattctactggttgctccatgcatcagaa

SEQ ID NO: 379700 - DNA, 75 bp, synthetic construct
  source 1..75: mol_type = other DNA
attatgaaatatgagctgtggcatatccctccggccctgcttgctctggcaggtgtgttgtcatggttgccgttg

SEQ ID NO: 379701 - DNA, 75 bp, synthetic construct
  source 1..75: mol_type = other DNA
gttgagattaaccgcgaaaaagccgcgcgttatggtatgacggtggcggatgtgcagttgtttgtgacatccgca

SEQ ID NO: 379702 - DNA, 75 bp, synthetic construct
  source 1..75: mol_type = other DNA
ggcgatcgtggtgatcccgatcctgatgggctactggatccgtggcaaaattccgccagaaagcagtaacccgct

SEQ ID NO: 379703 - DNA, 75 bp, synthetic construct
  source 1..75: mol_type = other DNA
gctgccgattctgtggggaacgggagcaggttcagaggtgatgagccggattgccgcgccgatgattggcggcat

SEQ ID NO: 379704 - DNA, 75 bp, synthetic construct
  source 1..75: mol_type = other DNA
agccgaaccaggcaatgctaccccgtcatttttagtgaccgataatcagggcgaccagcgcggcattctcgctac

SEQ ID NO: 379705 - DNA, 75 bp, synthetic construct
  source 1..75: mol_type = other DNA
ctttgactgctagttcggttgccccagtttgcctgacattggcattcttagcttatattaatgataattataaga

SEQ ID NO: 379706 - DNA, 75 bp, synthetic construct
  source 1..75: mol_type = other DNA
ttttttacatcagtttttcaggttcctacagtttcaacccattattatcattttggggatataaatattatgaag

SEQ ID NO: 379707 - DNA, 75 bp, synthetic construct
  source 1..75: mol_type = other DNA
tattgctggcccaggtgacagtcatgtcactgacagtgattttccttgctgctgacaggcgttttttttcatggg

SEQ ID NO: 379708 - DNA, 75 bp, synthetic construct
  source 1..75: mol_type = other DNA
ctacatgagaaaggattcaatagtgcatggattgaaatgcaacttgcacatacggacaaaaacagcattcgtggt

SEQ ID NO: 379709 - DNA, 75 bp, synthetic construct
  source 1..75: mol_type = other DNA
ggttatagcaatgaagagctataagcgaacacattaccctttcctgcttcctcctgaactaccagagtttttata

SEQ ID NO: 379710 - DNA, 75 bp, synthetic construct
  source 1..75: mol_type = other DNA
tcagctatgaacaactgacccggtttgcggaaaaacgcattcgggaatgcaatctggacagccagggcgcgattt

SEQ ID NO: 379711 - DNA, 75 bp, synthetic construct
  source 1..75: mol_type = other DNA
cattgacgccgactttcagcgcctcagaacgctcatctggccggaggatgacaggtgccgactttcagcgcctca

SEQ ID NO: 379712 - DNA, 75 bp, synthetic construct
  source 1..75: mol_type = other DNA
tcagctatgagcaactaacccgaatagcggaaaaaaatatccgtcaatgtgggctggacagccagatcgccaggt

SEQ ID NO: 379713 - DNA, 75 bp, synthetic construct
  source 1..75: mol_type = other DNA
tgcgcctgtgggtgctggaagatgaaagccggatgatcggttcgaatcacctgccggaatgtctgcgcgagcgaa

SEQ ID NO: 379714 - DNA, 75 bp, synthetic construct
  source 1..75: mol_type = other DNA
atttttcgcaggcgctggcaatccgaccggatatgcctgaagtattcaatttcttaggcatatatttaacgcagg

SEQ ID NO: 379715 - DNA, 75 bp, synthetic construct
  source 1..75: mol_type = other DNA
gatccaacttacaactacgcgcacttgaatcgcgggatcgcattatattacggcggtcgtgacaagttagcgcaa

SEQ ID NO: 379716 - DNA, 75 bp, synthetic construct
  source 1..75: mol_type = other DNA
gtggatcagaataacgagggtagatactggagttttggtacatcatttcactcgtcaccatggagaaaaaccagt

SEQ ID NO: 379717 - DNA, 75 bp, synthetic construct
  source 1..75: mol_type = other DNA
ttacagatttacatgaaaactatcccacagttaactatcactgcatgagtatgggggttgtcagaaatcgccttt

SEQ ID NO: 379718 - DNA, 75 bp, synthetic construct
  source 1..75: mol_type = other DNA
ttctaaccttgcagatccatcatttgagcaggacgctgtaaataatcgctcaatgcgtaattatgtcgatgctgc

SEQ ID NO: 379719 - DNA, 75 bp, synthetic construct
  source 1..75: mol_type = other DNA
gagcgcagtgtcctgcccgtgttcgataccaccgctcttcatgccgaggatgccgtcgcttttatgctgtcgtaa

SEQ ID NO: 379720 - DNA, 75 bp, synthetic construct
  source 1..75: mol_type = other DNA
gccaggtaaatatgttgttgtcaatgatcggactggtgaggtcactcagattagtgataagacggatcctggctg

SEQ ID NO: 379721 - DNA, 75 bp, synthetic construct
  source 1..75: mol_type = other DNA
agcagggcgatggcaaaatccgcaccggcgggccgcgataccgctccagcgtaaatactcagcagagcgttacgc

SEQ ID NO: 379722 - DNA, 75 bp, synthetic construct
  source 1..75: mol_type = other DNA
catggtgcgccacagaacaatcacgcacaggcccaacgcatcgataccgattatcagcgcctcaaaaaactcatc

SEQ ID NO: 379723 - DNA, 75 bp, synthetic construct
  source 1..75: mol_type = other DNA
aaattctgctgattaacccgacggactccgacgcagtgggtaatgctgtgaagatggctaaccaggcgaacatcc

SEQ ID NO: 379724 - DNA, 75 bp, synthetic construct
  source 1..75: mol_type = other DNA
ttccctgaaagatggcgcgcagaaagaggcggataaactcggctataacctggtggtgttggactcccagaataa

SEQ ID NO: 379725 - DNA, 75 bp, synthetic construct
  source 1..75: mol_type = other DNA
gagtactttaaaatcgttggtaagcctgtaacggataaaccatggaaaattctggcggaaaactaccatagcgaa

SEQ ID NO: 379726 - DNA, 75 bp, synthetic construct
  source 1..75: mol_type = other DNA
acacccagtattgaggtattcgctcttcaagataaaaatgcaccgaatgaacaggaaccacatacgcatggaaat

SEQ ID NO: 379727 - DNA, 75 bp, synthetic construct
  source 1..75: mol_type = other DNA
ttgcctctctggtaatcatgctcgctctgacgggatgtaacgaatcggagatcgacaaaattaccttaataggta

SEQ ID NO: 379728 - DNA, 75 bp, synthetic construct
  source 1..75: mol_type = other DNA
aagatggccaaccaggcgaacatcccggtaatcactcttgaccgccaggcaacgaaaggcgacgttgttagccac

SEQ ID NO: 379729 - DNA, 75 bp, synthetic construct
  source 1..75: mol_type = other DNA
tcgaaaaaattcgcaagaaggcaatggatgaagttacaagtgctcttcaggcgcttgaaaataagttcccgggta

SEQ ID NO: 379730 - DNA, 75 bp, synthetic construct
  source 1..75: mol_type = other DNA
tatcgtcatgaacggcgcgaagtgcaccaatccgcagtggaaagaacagggcctgaactctgaaaacttcgtcgc

SEQ ID NO: 379731 - DNA, 75 bp, synthetic construct
  source 1..75: mol_type = other DNA
aaatattgaaaatagtgcaataattgttaaccgtagtaatcatcctgctctacttgagggactttcttttatgca

SEQ ID NO: 379732 - DNA, 75 bp, synthetic construct
  source 1..75: mol_type = other DNA
tcggtgagaaacaactcagtaacgttgcggaatctatgggatggatgaacaaaagtggggagtatatatctaaaa

SEQ ID NO: 379733 - DNA, 75 bp, synthetic construct
  source 1..75: mol_type = other DNA
agaattgctgccgaaaatctcaccaaaatatatttttttgattcagggcgactaaagttctatagggccgaatta

SEQ ID NO: 379734 - DNA, 75 bp, synthetic construct
  source 1..75: mol_type = other DNA
tccttcggtgctctctatacgcttggtacaacgggagtgtcagcagcaggcataacctccgggctcgctacagca

SEQ ID NO: 379735 - DNA, 75 bp, synthetic construct
  source 1..75: mol_type = other DNA
ttgcatcaagaaagcttgaaaaagtgcaggagtccattatctaccgaaagtcattactcgagaaaagccctgatg

SEQ ID NO: 379736 - DNA, 75 bp, synthetic construct
  source 1..75: mol_type = other DNA
cattgtggggcgcagaaaatgtaccgtggtcgatgtattacctgaatggtcaggataacagtctggtgctgatct

SEQ ID NO: 379737 - DNA, 75 bp, synthetic construct
  source 1..75: mol_type = other DNA
gtcgacctgtatctgattcaccagccttacggcgatgtccatggggcatggcgtgctatggaagaactgcagcag

SEQ ID NO: 379738 - DNA, 75 bp, synthetic construct
  source 1..75: mol_type = other DNA
ctggcgaaatcggtccgcaaagaacgcatggctgagaacatcaatattctcgattttgaactcagcgctgaggat

SEQ ID NO: 379739 - DNA, 75 bp, synthetic construct
  source 1..75: mol_type = other DNA
caatccaaaagcgcgtcgatacctggcgttacgtgacctggcagatctacgacaacattgccgcgacgacctccc

SEQ ID NO: 379740 - DNA, 75 bp, synthetic construct
  source 1..75: mol_type = other DNA
cggctaaactcaacgcccggaaagcaaacaactggcgaatcaggctgatgtgctggtgcggctggtcgatgaaat

SEQ ID NO: 379741 - DNA, 75 bp, synthetic construct
  source 1..75: mol_type = other DNA
caggataacagtctggtgctgatctcaaccctgcccctcaaagatctcacctccggatttaaagaatcgaccgtc

SEQ ID NO: 379742 - DNA, 75 bp, synthetic construct
  source 1..75: mol_type = other DNA
tcgcaattccactacgtcctcgccgatggatctcagggtaatggtattccgcaactgctgccgcaactggtactg

SEQ ID NO: 379743 - DNA, 75 bp, synthetic construct
  source 1..75: mol_type = other DNA
cttccggccttgctggctggttgtgcggtgatgggcattgttaacctgctcggtggacatgttgctaccatcgga

SEQ ID NO: 379744 - DNA, 75 bp, synthetic construct
  source 1..75: mol_type = other DNA
ggctgggaaatatcatcgctccgttctttggtggtattaccgctacagctgccatcgcgcgttctgccgctaacg

SEQ ID NO: 379745 - DNA, 75 bp, synthetic construct
  source 1..75: mol_type = other DNA
ctccgtttgcagagggtaaaaatggtctgttccagcatcccgtgctaacagcaattggccagaagtacggtaaaa

SEQ ID NO: 379746 - DNA, 75 bp, synthetic construct
  source 1..75: mol_type = other DNA
ggctggggaatatcattgccccattctttggcggtattaccgctacagccgcgatcgcgcgttctgccgctaacg

SEQ ID NO: 379747 - DNA, 75 bp, synthetic construct
  source 1..75: mol_type = other DNA
gtcatgctgctttgcatgtcgctgaccgtgctgtttgatatggttattgccatcagtgtgggtatcgtactggca

SEQ ID NO: 379748 - DNA, 75 bp, synthetic construct
  source 1..75: mol_type = other DNA
caacttttcggcgcacagtatgcgatgcgtatctggctggacgccgatctgctaaacaaatataaactgacgccg

SEQ ID NO: 379749 - DNA, 75 bp, synthetic construct
  source 1..75: mol_type = other DNA
ctaattaatgcactcgaggtagaaaaaaataaagcgataaaggctaccgtagcaaaaagtcagtttctggcaacg

SEQ ID NO: 379750 - DNA, 75 bp, synthetic construct
  source 1..75: mol_type = other DNA
aacttgttcgcaccttccctaatgcgcatgaagtcacagcagaaacgaaagaaaatcgaacaatatacacacagg

SEQ ID NO: 379751 - DNA, 75 bp, synthetic construct
  source 1..75: mol_type = other DNA
cagaagtcctgttaactcaaccaataatggttgtggtgggcgatagagtgggcgcatttggtgcctaccgtgacg

SEQ ID NO: 379752 - DNA, 75 bp, synthetic construct
  source 1..75: mol_type = other DNA
aagttatcgcggtggtagcgatgatcatcttcggcgcctggctgctattcagcggcaacggcggcccgcaggcga

SEQ ID NO: 379753 - DNA, 75 bp, synthetic construct
  source 1..75: mol_type = other DNA
gactgctgcgctctccgtgtacaacagctgcgtatattgcaacagccgtatgctgtttggtctggcacaacaggg

SEQ ID NO: 379754 - DNA, 75 bp, synthetic construct
  source 1..75: mol_type = other DNA
tcaaaggttccatgaatttcacgtggagtggtgtgaaccggaacgaagagtgtgtggaattgagcagcgatccac

SEQ ID NO: 379755 - DNA, 75 bp, synthetic construct
  source 1..75: mol_type = other DNA
tttatgcctgcccgcccgtgggtggtcctgtatggccggtaacggaaatcatccagacattcagcggcctgcgcc

SEQ ID NO: 379756 - DNA, 75 bp, synthetic construct
  source 1..75: mol_type = other DNA
cagcgtcagcaatatcaacggcaatagcgcctcggcggtgcacaactacagcgtcgacagcagcgcgccaaccat

SEQ ID NO: 379757 - DNA, 75 bp, synthetic construct
  source 1..75: mol_type = other DNA
gcctcaaccagcaataaacaggttgtcggcgtgccgaaagtgcaggccaatctgttggcggaatacagtttgccg

SEQ ID NO: 379758 - DNA, 75 bp, synthetic construct
  source 1..75: mol_type = other DNA
atgactggtaaacgtaccccacctaccatgacacacgatgaaatggtagaaaaaatgttgtctaaccccgcagta

SEQ ID NO: 379759 - DNA, 75 bp, synthetic construct
  source 1..75: mol_type = other DNA
atggcggttaaaatcacgcctgaagagttcagtctgttaatccggcgactgagcgcaaaatggcgagttctggcg

SEQ ID NO: 379760 - DNA, 75 bp, synthetic construct
  source 1..75: mol_type = other DNA
gccttaaaaaaactgcgccgcagccgtccgctggacggcatcatctgggcgctgacagaagaacagagccgccag

SEQ ID NO: 379761 - DNA, 75 bp, synthetic construct
  source 1..75: mol_type = other DNA
agtgggatgccgttccggtgcttgatgctggtggtcttgatgcgttccagcgttttgtgaagcgtctgcccgaag

SEQ ID NO: 379762 - DNA, 75 bp, synthetic construct
  source 1..75: mol_type = other DNA
gccatcgcgcgttctgccgctaacgtccgtgccggggcaacttcccctatctcggcggtgatccactctattctg

SEQ ID NO: 379763 - DNA, 75 bp, synthetic construct
  source 1..75: mol_type = other DNA
ggctggttgcgcggtgatggggattgttaacctgctcggcggacatgttgctaccatcggttcgcaattccacta

SEQ ID NO: 379764 - DNA, 75 bp, synthetic construct
  source 1..75: mol_type = other DNA
tgacggtaacaacgctaagtggatcgtcggtgcggctgcaggcttcgctaaaggtgacatgaatgaccgttctgg

SEQ ID NO: 379765 - DNA, 75 bp, synthetic construct
  source 1..75: mol_type = other DNA
aatgcagcgaccaacgatatttctggtcaaacttacaatactttccatcactacaacgacgccacctatgctgat

SEQ ID NO: 379766 - DNA, 75 bp, synthetic construct
  source 1..75: mol_type = other DNA
cggcggacatgttgctaccatcggttcgcaattccactacgttctggccgatggttctcagggtaacggtattcc

SEQ ID NO: 379767 - DNA, 75 bp, synthetic construct
  source 1..75: mol_type = other DNA
tacggcattgtgcgtactgattaactatcttgctccggaatccgcatttggcctgttaatggcgctggtggtatc

SEQ ID NO: 379768 - DNA, 75 bp, synthetic construct
  source 1..75: mol_type = other DNA
agctgcgtatattgcaacagccgtatgctatttgggctggcacaacagggcaacgcgccaaaagcgctagcgtct

SEQ ID NO: 379769 - DNA, 75 bp, synthetic construct
  source 1..75: mol_type = other DNA
cgcttctggctggaactattgggtactgtacgttttagttgccatggcagaacttacggctgtgggcaaatacat

SEQ ID NO: 379770 - DNA, 75 bp, synthetic construct
  source 1..75: mol_type = other DNA
tatgtcgagatttaccatgcagccgaacctctccctatctggctaaggctggcgatggatttggccgtcgttaca

SEQ ID NO: 379771 - DNA, 75 bp, synthetic construct
  source 1..75: mol_type = other DNA
cgttcaagactgacagctaatgaatatgtcgcgatttaccatgcagccgaaccgctcccaatctggctgaggctg

SEQ ID NO: 379772 - DNA, 75 bp, synthetic construct
  source 1..75: mol_type = other DNA
tgcagggccaggcattatcctgggttacgctattgccggttttatcgcctttctgatcatgcgtcagttgggtga

SEQ ID NO: 379773 - DNA, 75 bp, synthetic construct
  source 1..75: mol_type = other DNA
acgctaagtggatcatcggtgcggcagcaggctttgctaaaggtgacatgaatgaccgtactggtcaggtggatc

SEQ ID NO: 379774 - DNA, 75 bp, synthetic construct
  source 1..75: mol_type = other DNA
ccaacaacatcaaagtgactaacgacggtattctggatgtaggtaacactgcggcgaatgctctgcaggttgata

SEQ ID NO: 379775 - DNA, 75 bp, synthetic construct
  source 1..75: mol_type = other DNA
ctaaaacgtctctgattgatactctgaacatcaacagtggttctgttgttaacgtagcagactccactctggttt

SEQ ID NO: 379776 - DNA, 75 bp, synthetic construct
  source 1..75: mol_type = other DNA
ccagcaactttgatgaaaacttcttcccgaatggtgctgacagttaccgtgacgcggatggtgatctcgacacta

SEQ ID NO: 379777 - DNA, 75 bp, synthetic construct
  source 1..75: mol_type = other DNA
gcggtcaggtgaaaggcggtactgttcgggctgatggtcgcctttatactggtgaatacttacaactggaaagaa

SEQ ID NO: 379778 - DNA, 75 bp, synthetic construct
  source 1..75: mol_type = other DNA
gcctaacggccttgtaggccgcgataatacaggggcaatactttcgtgccaatccggtacctggagaaaggtagg

SEQ ID NO: 379779 - DNA, 75 bp, synthetic construct
  source 1..75: mol_type = other DNA
ggccgcgataatacaggggcaatactttcgtgccaatccggtacgtgggggacaataggtggaaaactcaaagtt

SEQ ID NO: 379780 - DNA, 75 bp, synthetic construct
  source 1..75: mol_type = other DNA
atactaacggcaacattcacgctggtgtattcgatatccatagcagtgattacgtaatggataccgatctggtca

SEQ ID NO: 379781 - DNA, 75 bp, synthetic construct
  source 1..75: mol_type = other DNA
tggttcagagtgggatacaacaaaatcttctctgattgatactttaagtattaacagcggttcccaagttaatgt

SEQ ID NO: 379782 - DNA, 75 bp, synthetic construct
  source 1..75: mol_type = other DNA
atcactctggatcaggaagttgatctgtccatctctaataactctcacgtcgcaggtattactctgactcagggt

SEQ ID NO: 379783 - DNA, 75 bp, synthetic construct
  source 1..75: mol_type = other DNA
aagaagttgatctgtctatcaccaataactctcatgtagcaggtattaccctgactcagggttatgagtggtctg

SEQ ID NO: 379784 - DNA, 75 bp, synthetic construct
  source 1..75: mol_type = other DNA
ctgactacaacggcaacgagctgatctacgttaacgacaaaaacagcaacgcgaccttctctgctgctaacaaag

SEQ ID NO: 379785 - DNA, 75 bp, synthetic construct
  source 1..75: mol_type = other DNA
atcactctggatcaggaagttgatctgtccatctctaataactctcatgtagcaggtattacgctgactcagggt

SEQ ID NO: 379786 - DNA, 75 bp, synthetic construct
  source 1..75: mol_type = other DNA
gactgttaatggcgctggtggtatctgcactggtcatcaactgggcgatgattagcctggcgcatatgaaattcc

SEQ ID NO: 379787 - DNA, 75 bp, synthetic construct
  source 1..75: mol_type = other DNA
actgaccagcagcggtgtgcttgttggttccgccctgaatacacagtcacagaccctgaccaacagcggtctgtt

SEQ ID NO: 379788 - DNA, 75 bp, synthetic construct
  source 1..75: mol_type = other DNA
aacgtcagggcgaccacgctggatggcgatggcctgttgcagggcgccgctgcactggcgcttgcaggcgacacc

SEQ ID NO: 379789 - DNA, 75 bp, synthetic construct
  source 1..75: mol_type = other DNA
gacgcagggcaacagtgtcagcgtggatgtgcagaacgcacagcttgacggaacacaggctgccagagatatcct

SEQ ID NO: 379790 - DNA, 75 bp, synthetic construct
  source 1..75: mol_type = other DNA
tcatgcttagtgcgcaacacctcacccaggataccgggagcctgaataacgcggaccacgataccctgactatca

SEQ ID NO: 379791 - DNA, 75 bp, synthetic construct
  source 1..75: mol_type = other DNA
aataacggaggttcattgctgaccagcggcgatctgacaatcaccgcaggcagtattaccagttccggacactgg

SEQ ID NO: 379792 - DNA, 75 bp, synthetic construct
  source 1..75: mol_type = other DNA
agccagggggacaccacgctgaacgcagccaccatggacaaccggggcagtctgctttcggccggcacgctctcc

SEQ ID NO: 379793 - DNA, 75 bp, synthetic construct
  source 1..75: mol_type = other DNA
gctggggttacagcgctataacgaactcgctgcccagctggatacggcgctgacaacgcaactcaccaccggcag

SEQ ID NO: 379794 - DNA, 75 bp, synthetic construct
  source 1..75: mol_type = other DNA
ggtcagcgctcacatattgtgcaaagctggttgtatgcagcggggattgattatccgctggtggaaggcggttat

SEQ ID NO: 379795 - DNA, 75 bp, synthetic construct
  source 1..75: mol_type = other DNA
ccgctgaccaaagcacaggctgagcggatcgccgaagaaatcgaaacagcaaagcacatcgaaaaattaaggagc

SEQ ID NO: 379796 - DNA, 75 bp, synthetic construct
  source 1..75: mol_type = other DNA
gcggggacgtcagcctgaccagcaggggagatatcactctcgacgcttttaccggcacgacgggtagtctgatgt

SEQ ID NO: 379797 - DNA, 75 bp, synthetic construct
  source 1..75: mol_type = other DNA
acggaagtggccggcaaagcggcaaatgtgatggttgccaacccgtatggtatcacctgtgacggctgtggattt

SEQ ID NO: 379798 - DNA, 75 bp, synthetic construct
  source 1..75: mol_type = other DNA
tgactcaggcggcgattgcggtggtagaagatccgtttgagatccgtcttgaacgcctgaacgaagagtatttcc

SEQ ID NO: 379799 - DNA, 75 bp, synthetic construct
  source 1..75: mol_type = other DNA
cagggcaaacgggtgctgatcaccgcagacagtctggcaaacagcggggcgatccaggcggctgacagcctgact

SEQ ID NO: 379800 - DNA, 75 bp, synthetic construct
  source 1..75: mol_type = other DNA
tggctggtatcaccaggcaccggaactgcataaaagcatcggcattttgttaatgatggggctggttattcgcgt

SEQ ID NO: 379801 - DNA, 75 bp, synthetic construct
  source 1..75: mol_type = other DNA
gctatggtgttatatctgcggccttacattggctaagcgcaattattgtctacggcatgtttgctttaggtctgt

SEQ ID NO: 379802 - DNA, 75 bp, synthetic construct
  source 1..75: mol_type = other DNA
taatgatggggctggttatacgcattctgtggcgcgttatatccccaccgcctggtccattgcaaagttattcga

SEQ ID NO: 379803 - DNA, 75 bp, synthetic construct
  source 1..75: mol_type = other DNA
acaccattctggtatctgcgctggtcacagccttgtgcgtactgatcaactatctcgcaccagagtctgcattcg

SEQ ID NO: 379804 - DNA, 75 bp, synthetic construct
  source 1..75: mol_type = other DNA
tcgttagctgttctgctctcgctaatgccgtggacgcgcgttaccgccgataccagcccatttgtgctcatcttc

SEQ ID NO: 379805 - DNA, 75 bp, synthetic construct
  source 1..75: mol_type = other DNA
atgaattacgccactgaaaccgatatgcgggcgcgttaccgcgaggatttgctcaggccgttactggctgtgccc

SEQ ID NO: 379806 - DNA, 75 bp, synthetic construct
  source 1..75: mol_type = other DNA
atacggtcaccggcgcgcagctgctaacggtcgatacccaaccgccaacgcttgccatcaacaccatcgctcagg

SEQ ID NO: 379807 - DNA, 75 bp, synthetic construct
  source 1..75: mol_type = other DNA
gtgataacggtttaacgttaaacactgcctccctcagcaatccgggaaaaatcaccgctgacacgctgaacgtca

SEQ ID NO: 379808 - DNA, 75 bp, synthetic construct
  source 1..75: mol_type = other DNA
gcgggacactggttgccgggcgcgatgccacggtgaaaaccgggacattcagtaataccggtgccgtccagggga

SEQ ID NO: 379809 - DNA, 75 bp, synthetic construct
  source 1..75: mol_type = other DNA
cataaaagcatcggtattttgttaatgatggggctggttattcgcgttctgtggcgtgtcatatctccaccgccg

SEQ ID NO: 379810 - DNA, 75 bp, synthetic construct
  source 1..75: mol_type = other DNA
agcactgaaggcagaggatgacggttctgtttctgttgagctgccgggtgatgccaataaaggcgataccgtgga

SEQ ID NO: 379811 - DNA, 75 bp, synthetic construct
  source 1..75: mol_type = other DNA
atgaaaatgatttttaccggtaaggtcagcggagaaaaaaccgtgctgactgccggaggtcgtcatacagttaaa

SEQ ID NO: 379812 - DNA, 75 bp, synthetic construct
  source 1..75: mol_type = other DNA
ggcgatcaaagagtacatccgtctgaagctggaagtctcccgcgattatccgcaggcttcgcgcctgttctgtat

SEQ ID NO: 379813 - DNA, 75 bp, synthetic construct
  source 1..75: mol_type = other DNA
tgccgtgctgcggcagattctcgatatctggctggcaccgttaaaagcgtttcgagaagatttcgccccgctggc

SEQ ID NO: 379814 - DNA, 75 bp, synthetic construct
  source 1..75: mol_type = other DNA
ctgttttgcgtagactggcaggcaactctccggtaactccggatggttggataagctgtagtgagcgaatgcccc

SEQ ID NO: 379815 - DNA, 75 bp, synthetic construct
  source 1..75: mol_type = other DNA
cgcaggcttcgcgcctgttctgtatggagatgctggcaggcgcaccgttattaatggatgagctaacgggcgatt

SEQ ID NO: 379816 - DNA, 75 bp, synthetic construct
  source 1..75: mol_type = other DNA
cgcgatgaggtgtttttcaatcaaacggttgaaaacgtgcagcggattattattgaggggattcgaccacgttaa

SEQ ID NO: 379817 - DNA, 75 bp, synthetic construct
  source 1..75: mol_type = other DNA
ttccgtcaaaagaggcgctgtatatagccgtactgcggcagattctcgatatctggctggcaccgttaaaagcgt

SEQ ID NO: 379818 - DNA, 75 bp, synthetic construct
  source 1..75: mol_type = other DNA
gagctggagctgatgtcgcatatcaacgacgcggtaaacaccgatccggaaccagttatgaccccggcagaagcc

SEQ ID NO: 379819 - DNA, 75 bp, synthetic construct
  source 1..75: mol_type = other DNA
tcctccctactttaaaacccttaaggactttaccgaggacggtgactattactgggactgcccggggcatatggg

SEQ ID NO: 379820 - DNA, 75 bp, synthetic construct
  source 1..75: mol_type = other DNA
atcatcgaaaaaagcccccaatacagcgggattggtttttactgggagccagacaatccgacctttgcagaagag

SEQ ID NO: 379821 - DNA, 75 bp, synthetic construct
  source 1..75: mol_type = other DNA
tcaaaaaatcaactagcttaccgaacagcaactatcaatgctaaaggcaacgtaccagaaatgctcgagactatt

SEQ ID NO: 379822 - DNA, 75 bp, synthetic construct
  source 1..75: mol_type = other DNA
aagaggctctaaatatagcggatataatagtgattcttgttgatcataaagagtttaaaatggccaaatcagaaa

SEQ ID NO: 379823 - DNA, 75 bp, synthetic construct
  source 1..75: mol_type = other DNA
tttcggggataaaccacagttactggagagactgggggatgtgttgtttttcacgtcgctttataaccagggatg

SEQ ID NO: 379824 - DNA, 75 bp, synthetic construct
  source 1..75: mol_type = other DNA
ggcttgaaaagttcttccgtaatggaaaaacaacggcaggtattccttctgaaattattaacgcaattctgtgtc

SEQ ID NO: 379825 - DNA, 75 bp, synthetic construct
  source 1..75: mol_type = other DNA
cgacaaaaggtactagccggtgagaccagttgggaggaggtggttcgcgttactgaaagcagattgcaggaagag

SEQ ID NO: 379826 - DNA, 75 bp, synthetic construct
  source 1..75: mol_type = other DNA
taaataacccacagccgaataaagtttatcatgtagatggtgataaaatttataaaactgatgctcaggcaaggc

SEQ ID NO: 379827 - DNA, 75 bp, synthetic construct
  source 1..75: mol_type = other DNA
ataacctgctgggtggtaatgaagacactcagaccaagttcgtgcaggagcatggcaaagatattgcgtcctgct

SEQ ID NO: 379828 - DNA, 75 bp, synthetic construct
  source 1..75: mol_type = other DNA
caattgcccctttgcagatggcaccaccagcatgcagcaccggctgaagtaagagaaaaatacccctggctggtc

SEQ ID NO: 379829 - DNA, 75 bp, synthetic construct
  source 1..75: mol_type = other DNA
aagtaacatcaatatcagcaacaactcccatgttgcaggtattactctggttcaaaacgatctgggtaatgcgac

SEQ ID NO: 379830 - DNA, 75 bp, synthetic construct
  source 1..75: mol_type = other DNA
ttgatggcgacatcttcacgctgaacatcgctaattctactattgacgatgattttgacgccttctacttcaccg

SEQ ID NO: 379831 - DNA, 75 bp, synthetic construct
  source 1..75: mol_type = other DNA
tcttgccatggccgtggccgggtcgttgcgcttcttcgggtttcctgaagatgccgtgacgtttatcggcgcatc

SEQ ID NO: 379832 - DNA, 75 bp, synthetic construct
  source 1..75: mol_type = other DNA
acgtttatcggcgcatcaatcggttttatgggcgcagagaaagcacgcgacaaggttattgcagcctttaatcgc

SEQ ID NO: 379833 - DNA, 75 bp, synthetic construct
  source 1..75: mol_type = other DNA
acgtttatcggcgcactcaatcggttttatggggggcagagaaagcacgcgacaaggttattgcggcctttaatc

SEQ ID NO: 379834 - DNA, 75 bp, synthetic construct
  source 1..75: mol_type = other DNA
attcgcctggtgctcccttttaattaactgttttagcggaggatgcggaaaaaattcaactcatttgttaatttt

SEQ ID NO: 379835 - DNA, 75 bp, synthetic construct
  source 1..75: mol_type = other DNA
tggtcaatggggactaaacgtcctacaaaccgccgaccacaaagtgcaccatacttttattgaggccgtctgcct

SEQ ID NO: 379836 - DNA, 75 bp, synthetic construct
  source 1..75: mol_type = other DNA
gtaaaaatggttgataaggaggtggtgttaataacattacgtgttaatcacaaacgaagaaaaaaaggttattta

SEQ ID NO: 379837 - DNA, 75 bp, synthetic construct
  source 1..75: mol_type = other DNA
atgctggatattaaaggaaaaatcatcacaaccgatgcgatgggttgccagaaagatattgcagagaagatacaa

SEQ ID NO: 379838 - DNA, 75 bp, synthetic construct
  source 1..75: mol_type = other DNA
tgaacccgattcatgcgctctatccggcaaatccgaaaagtgccagcccatatagtccgtcatcgcgccgctggc

SEQ ID NO: 379839 - DNA, 75 bp, synthetic construct
  source 1..75: mol_type = other DNA
gtattgcctgaaagcatcggttggcgcaccgccagatatccttggcccgttagggcaaaactggggtttgccgcc

SEQ ID NO: 379840 - DNA, 75 bp, synthetic construct
  source 1..75: mol_type = other DNA
gaggaggcgcaggcctggtggcacatgccgactacgcaacaggcgctgcaacaggcgcgggatactgactgggtc

SEQ ID NO: 379841 - DNA, 75 bp, synthetic construct
  source 1..75: mol_type = other DNA
gactacagccggaagactggctggatatggcggaaccggtgaatattcctggcaccagttaccagtataaaaact

SEQ ID NO: 379842 - DNA, 75 bp, synthetic construct
  source 1..75: mol_type = other DNA
cggaaacctggtgcgaccgcgagttatattgcctgaaagcatcggttggcgcgccgccggatatcctcggcccgt

SEQ ID NO: 379843 - DNA, 75 bp, synthetic construct
  source 1..75: mol_type = other DNA
acgctgcgtggttactgggagagcggggatttaacgctgggcaaaacactggggctgtacccggatgaagtggtg

SEQ ID NO: 379844 - DNA, 75 bp, synthetic construct
  source 1..75: mol_type = other DNA
tggggcaaaactggggattgccgccgatggacccgcatattatcaccgcgcgcgcctatgaaccgtttatcgagc

SEQ ID NO: 379845 - DNA, 75 bp, synthetic construct
  source 1..75: mol_type = other DNA
aggaggcaactagttgaagctcttgagcttcgccgtgactccatcgcatggcttgttgatgctggttatgtatcc

SEQ ID NO: 379846 - DNA, 75 bp, synthetic construct
  source 1..75: mol_type = other DNA
gtcagaaagcaaaaacatgaagctcttgttcttcgttattactccattgagtggcttattgctgctggttatgta

SEQ ID NO: 379847 - DNA, 75 bp, synthetic construct
  source 1..75: mol_type = other DNA
tcggtctgaacccgattcatgcgctctatccggcaaatccggaaagtgccagcccgtatagcccgtcttctcgcc

SEQ ID NO: 379848 - DNA, 75 bp, synthetic construct
  source 1..75: mol_type = other DNA
ggggtattggggattttggcgatctcaaagcgatgctagtggatgtggcaaaacgtggcggatcgttcattggtc

SEQ ID NO: 379849 - DNA, 75 bp, synthetic construct
  source 1..75: mol_type = other DNA
acagcgtgctcactgccgggtgattgtcgcgcctaaacgttgctacgaaccgcaggcgttgctgaataaacaaaa

SEQ ID NO: 379850 - DNA, 75 bp, synthetic construct
  source 1..75: mol_type = other DNA
ccggatgaagtggtactgcgcggtctgtatcaggatcgcgaactggcgaagcaagggctgctggatgcactgcat

SEQ ID NO: 379851 - DNA, 75 bp, synthetic construct
  source 1..75: mol_type = other DNA
ttcaccccggcagaccagccaccagggcagggcactctttatctgcagccgccggtccgcctcgctcagccaggg

SEQ ID NO: 379852 - DNA, 75 bp, synthetic construct
  source 1..75: mol_type = other DNA
agtgagaaattcaccctcaccaactggaacgagtacgagtttgatcgtgatgccacctacgcggcaggtaatggc

SEQ ID NO: 379853 - DNA, 75 bp, synthetic construct
  source 1..75: mol_type = other DNA
actaatccagttaagatgagagatggggctactaagatactaaacgagactcttagaagattacctgatgccgaa

SEQ ID NO: 379854 - DNA, 75 bp, synthetic construct
  source 1..75: mol_type = other DNA
atccttttttcaaaaaaaaatacataacattaaaaatgatgttgtttttatttttagtgtcaattattttttctt

SEQ ID NO: 379855 - DNA, 75 bp, synthetic construct
  source 1..75: mol_type = other DNA
ttgcgtttggtttaatattggctttggcccataataataaaagtggagatattaacgcatacttaatgttttttc

SEQ ID NO: 379856 - DNA, 75 bp, synthetic construct
  source 1..75: mol_type = other DNA
ttccattcctttatccatgcagcgacagtttccggatttaactccgcgtcatattgatcatctgaaaactcttat

SEQ ID NO: 379857 - DNA, 75 bp, synthetic construct
  source 1..75: mol_type = other DNA
ggtgccccggtctcgaataagcgagggcaactggatctggatgcctggcgcgatttttacatatcgtatctgaga

SEQ ID NO: 379858 - DNA, 75 bp, synthetic construct
  source 1..75: mol_type = other DNA
aggcaagctcattgattctgggttctgcgttttcgctctcagcaaactggcgatggcattgtccagtacgcttga

SEQ ID NO: 379859 - DNA, 75 bp, synthetic construct
  source 1..75: mol_type = other DNA
atttcaccggcagcggttggtggttcaaaccgttctttgcaaaacgctatacagaccaaacctattataccggcg

SEQ ID NO: 379860 - DNA, 75 bp, synthetic construct
  source 1..75: mol_type = other DNA
gagtacgagtttgaccgtgacgctacctatgcagcgggtaatggcggtaaagaagggctgaatggcgcagttgca

SEQ ID NO: 379861 - DNA, 75 bp, synthetic construct
  source 1..75: mol_type = other DNA
actgaagagcaggctgtagcgcaaaaacttaagaatcaggtaactgaaggcaaactcattgattcagagttctgt

SEQ ID NO: 379862 - DNA, 75 bp, synthetic construct
  source 1..75: mol_type = other DNA
attgtaaaaccagatattcatcctacatcaggtaattattttttacagatattccctctgcatgatgaaataggt

SEQ ID NO: 379863 - DNA, 75 bp, synthetic construct
  source 1..75: mol_type = other DNA
atggtggcatgcacgggaaggagctattttccccaataaagcagatattgaacatgccacaggtgctgatatacg

SEQ ID NO: 379864 - DNA, 75 bp, synthetic construct
  source 1..75: mol_type = other DNA
attggatatgtttggtttattcaatgttactcagatggcattagaaatacccagcaccgttcctggtatctctgg

SEQ ID NO: 379865 - DNA, 75 bp, synthetic construct
  source 1..75: mol_type = other DNA
tgtttcctgaatgcgtagggaaagaattaaagttgggttataaacgaaaagttgatgtatggtgcgaagaggatg

SEQ ID NO: 379866 - DNA, 75 bp, synthetic construct
  source 1..75: mol_type = other DNA
gtacgctgctgctggcactgattgctggcttatcgattaatggtacttttgcagcgctgtttagctccattgtgc

SEQ ID NO: 379867 - DNA, 75 bp, synthetic construct
  source 1..75: mol_type = other DNA
ctgctgtacagcacggtagttcgtgcggaatatccggatatcggctctaacttcttcccggcagtactctccgtc

SEQ ID NO: 379868 - DNA, 75 bp, synthetic construct
  source 1..75: mol_type = other DNA
aaacagccagtggcagtacccggaaaagccggcttcacggtcctctggcgacgactttcgggccggtgcttgcac

SEQ ID NO: 379869 - DNA, 75 bp, synthetic construct
  source 1..75: mol_type = other DNA
tgacgatcaactctatttctcgcgagtatttaaaaaatgcaccggggccagcccgagcgagtttcgtgccggttg

SEQ ID NO: 379870 - DNA, 75 bp, synthetic construct
  source 1..75: mol_type = other DNA
atagtaaaaccagatatacatcccgcaaccgggaactatgtcttacagttatttcctgcacatgatgaaatagga

SEQ ID NO: 379871 - DNA, 75 bp, synthetic construct
  source 1..75: mol_type = other DNA
tggcaaaatacctgaatacggacacgggacgtattgcccgttttctgcagaataacctgagtggtgtgttgcgca

SEQ ID NO: 379872 - DNA, 75 bp, synthetic construct
  source 1..75: mol_type = other DNA
gttctgccggaaacggttttcgaactctccggtacgtcagcgtttacaggcaatgacgaagatgccggggatacc

SEQ ID NO: 379873 - DNA, 75 bp, synthetic construct
  source 1..75: mol_type = other DNA
gcttgccggggtggtgttcagccagccatcagccggtgatgaacgtggcgtgccgcatcactggggcatggataa

SEQ ID NO: 379874 - DNA, 75 bp, synthetic construct
  source 1..75: mol_type = other DNA
gcgtaggttcggcaaaggatgtggccgacactgtcggtgtatcgcgaccaacgttgtataactggcagcatcgat

SEQ ID NO: 379875 - DNA, 75 bp, synthetic construct
  source 1..75: mol_type = other DNA
tgaccatggtagagcgcctggagggggttgcgcaggagagttcgaacggctggaacaacgccggaaccgggcatt

SEQ ID NO: 379876 - DNA, 75 bp, synthetic construct
  source 1..75: mol_type = other DNA
cccgcaaaatgccgacggcagcatcagtattgaaaaagcagtcgccattaacgaagcattccagatttcccgcca

SEQ ID NO: 379877 - DNA, 75 bp, synthetic construct
  source 1..75: mol_type = other DNA
ggaaaaagcgtctgtaaccaaagagattttgctgccgaatgggcatgaccagatgccattgcagcaaaatatctt

SEQ ID NO: 379878 - DNA, 75 bp, synthetic construct
  source 1..75: mol_type = other DNA
gcagcagatagtacgccgaaaccgcagttgaaaccgcaacccgttcaaaaagaagtggcggatattgcgttgtaa

SEQ ID NO: 379879 - DNA, 75 bp, synthetic construct
  source 1..75: mol_type = other DNA
gttacaggaatcggggattccggaagcgaaagactacgccggtttcccggtgggcggacagttccttgtttcgga

SEQ ID NO: 379880 - DNA, 75 bp, synthetic construct
  source 1..75: mol_type = other DNA
cagaagaaatctaacttctcgctgcaactcagcagcgaagtccgcgccctaaagcgtaatgacgataacacctgg

SEQ ID NO: 379881 - DNA, 75 bp, synthetic construct
  source 1..75: mol_type = other DNA
tcacgcattctgctggtcaataatatggaagagatcctgtgccgactggaacaggacaacgaatacaaatattac

SEQ ID NO: 379882 - DNA, 75 bp, synthetic construct
  source 1..75: mol_type = other DNA
aacaccatcgccaccgatgacgtgattaacgccacggaaaaaggcgcggatctgcaaattaccggcaccagtaat

SEQ ID NO: 379883 - DNA, 75 bp, synthetic construct
  source 1..75: mol_type = other DNA
gctgctatggctatcgacgcattgatagtgccttgcgccttggtggcatgcgtgtgtccgagaaggtcgtgcgtc

SEQ ID NO: 379884 - DNA, 75 bp, synthetic construct
  source 1..75: mol_type = other DNA
tgctttctggcaaattgcgctcaatgaggatggaacgctacaactggtagataaagatagcggtgtgcgctatga

SEQ ID NO: 379885 - DNA, 75 bp, synthetic construct
  source 1..75: mol_type = other DNA
agttattttgacgtgctggaaaaagcgtctgtaaccaaagagattttgctgccgaatgggcatgaccagatgcca

SEQ ID NO: 379886 - DNA, 75 bp, synthetic construct
  source 1..75: mol_type = other DNA
gattcctttggcatgtccgggcaactgccgcatatctacaatggatttggcattacccgcaccatgttctggcgc

SEQ ID NO: 379887 - DNA, 75 bp, synthetic construct
  source 1..75: mol_type = other DNA
aagaaggctcagcaggaaaaaaagcattggatatgtttggtttattcaatgttactcagatggcattagaaatac

SEQ ID NO: 379888 - DNA, 75 bp, synthetic construct
  source 1..75: mol_type = other DNA
ggcggcaactcgcggtttgtcacgttttaccattctacgtcgccatgtactgcataacgcgttgccgcccgtcat

SEQ ID NO: 379889 - DNA, 75 bp, synthetic construct
  source 1..75: mol_type = other DNA
attacgcgccataagtggcaagataacttgatcaatgccatcgcgttgctgggcttttcaatcccggttttctgg

SEQ ID NO: 379890 - DNA, 75 bp, synthetic construct
  source 1..75: mol_type = other DNA
gatcccggtagggatgattgcagggattatgcggcataagtggcaggataacttgatcaacgccatcgccctgct

SEQ ID NO: 379891 - DNA, 75 bp, synthetic construct
  source 1..75: mol_type = other DNA
tgggtggctggaataatgcattttccgggcgttatccgtttaaaaatgtcagcagcgatgcttcgcttcccctgc

SEQ ID NO: 379892 - DNA, 75 bp, synthetic construct
  source 1..75: mol_type = other DNA
tcgtgaagaaatggactgggtactgacggatggcaggccgaaggcaccgtcaccggtatcgccggaagcactcag

SEQ ID NO: 379893 - DNA, 75 bp, synthetic construct
  source 1..75: mol_type = other DNA
aggcggaaaagcagatttcatgcggcacaatgccgatgaaatgacgttgtatcagatggcgattgagttgataaa

SEQ ID NO: 379894 - DNA, 75 bp, synthetic construct
  source 1..75: mol_type = other DNA
ccaactgcagacgaacggcgcgtaatggatgcgttagccaaactcccctgcaccgcttgctggctgcataagcac

SEQ ID NO: 379895 - DNA, 75 bp, synthetic construct
  source 1..75: mol_type = other DNA
gcctgtaatcacaaaggttttcgcggacgtactgccatccatgagctgatcgtggtggacgccacattgcgtgat

SEQ ID NO: 379896 - DNA, 75 bp, synthetic construct
  source 1..75: mol_type = other DNA
tgaacagcggctgaatgcggtctggcagcgggactcttccgaggcccgccagctgatggaagatctcggttctgc

SEQ ID NO: 379897 - DNA, 75 bp, synthetic construct
  source 1..75: mol_type = other DNA
tgtatgaccagaactatgtaaaagcggcggcgacccgcggtttgtcgcgctttactattttgcgtcgccacgttc

SEQ ID NO: 379898 - DNA, 75 bp, synthetic construct
  source 1..75: mol_type = other DNA
cgtttcagggcgtttcgatctgctctatgaagtgaaaccaattaccggttttgcgctgattgacgcctggctttc

SEQ ID NO: 379899 - DNA, 75 bp, synthetic construct
  source 1..75: mol_type = other DNA
cgaacagttaaaagaggtcttcccggcgacgatggaactgtgcatcctcgccttcggttttgcgctgattgttgg

SEQ ID NO: 379900 - DNA, 75 bp, synthetic construct
  source 1..75: mol_type = other DNA
gctgcaaccggtaactacaaagttcgtggatttgcccctatatttccagacatctgttatcacttaacccattac

SEQ ID NO: 379901 - DNA, 75 bp, synthetic construct
  source 1..75: mol_type = other DNA
ctaagttgccgacacctgcagaatgggtaaatgtaaggcgggtacgacctaaagatgccgtaaattgcgtatggt

SEQ ID NO: 379902 - DNA, 75 bp, synthetic construct
  source 1..75: mol_type = other DNA
gccgggcttggccaggagtggagtggctttgggcgcgcggtgtttgtaaatccgatggagcaggcctggcagttg

SEQ ID NO: 379903 - DNA, 75 bp, synthetic construct
  source 1..75: mol_type = other DNA
gcactgttgaaactgcgtaacttccgtctgccgggaaccatcttcaacacggtcagagtggcagcgtcaaaccag

SEQ ID NO: 379904 - DNA, 75 bp, synthetic construct
  source 1..75: mol_type = other DNA
ccgcaaatgcgcttggcgccgcaggagggtttgcagtatccaaaatccccggagtagactcaatgttagcccctc

SEQ ID NO: 379905 - DNA, 75 bp, synthetic construct
  source 1..75: mol_type = other DNA
tacctctaggatgccaagctggatttgttgttaatattccagatgatatacagcaacatgcaccggaatgcggtg

SEQ ID NO: 379906 - DNA, 75 bp, synthetic construct
  source 1..75: mol_type = other DNA
attaaagccagacgctattttatggtgggctggttctactctggggctggcagatttaaacaaagccgagaccgg

SEQ ID NO: 379907 - DNA, 75 bp, synthetic construct
  source 1..75: mol_type = other DNA
ctttgaccattcaactctgttgggtgatgtcgaatttacaagtcactggaataacgatggcgtattcttctattc

SEQ ID NO: 379908 - DNA, 75 bp, synthetic construct
  source 1..75: mol_type = other DNA
agcaattcagtaattcatgggtcaatcacttctgaactgccatttggttattacagcattacgcctgaaggttat

SEQ ID NO: 379909 - DNA, 75 bp, synthetic construct
  source 1..75: mol_type = other DNA
tcatggtcggtgttgataccaaaattgacggtaacaacgctaagtggatcgtcggtgcggctgcaggcttcgcta

SEQ ID NO: 379910 - DNA, 75 bp, synthetic construct
  source 1..75: mol_type = other DNA
tcgctgattacaaagataaagaaattatctacgtaaacgacgtcaacaccaacgcgaccttctctgctgctaaca

SEQ ID NO: 379911 - DNA, 75 bp, synthetic construct
  source 1..75: mol_type = other DNA
cttacgacagcatgcgttatgaactgggtgtagatgcaggttataccttcacctacagcgaagatcaggctctga

SEQ ID NO: 379912 - DNA, 75 bp, synthetic construct
  source 1..75: mol_type = other DNA
tgacggtgtccttgataccaacggtggttgggtagatgatgctcagaacgttgatgaactgaacattactctgaa

SEQ ID NO: 379913 - DNA, 75 bp, synthetic construct
  source 1..75: mol_type = other DNA
ctgctgttactggcaccaggaaagcgcgacgaaataaaaccggaagaaattagctggctacctgaatttctggcg

SEQ ID NO: 379914 - DNA, 75 bp, synthetic construct
  source 1..75: mol_type = other DNA
gaaagtcgaaactcggcaggatcacaaaagccggtgattcgtatctgcgaacgcttctggttcagggggctcgtt

SEQ ID NO: 379915 - DNA, 75 bp, synthetic construct
  source 1..75: mol_type = other DNA
acgctactggttcagggggctcgttcggttctgattggtgccgagaaaaggactgatttattcagtcgttgggtc

SEQ ID NO: 379916 - DNA, 75 bp, synthetic construct
  source 1..75: mol_type = other DNA
atcttgctaaaaatgtgttcgctgttcacggtgttgaccagaatggtaaaacggttctggttaaacccagagtat

SEQ ID NO: 379917 - DNA, 75 bp, synthetic construct
  source 1..75: mol_type = other DNA
atgcgattagccagttgttttggttatgctgcaaaccagatacgccgtgaccgtccactgacacatgaagagctg

SEQ ID NO: 379918 - DNA, 75 bp, synthetic construct
  source 1..75: mol_type = other DNA
tgattgttagcattgatttagacggaaatgttcgccgtatgaatgacatctatttccgtccaattcatcgaaacc

SEQ ID NO: 379919 - DNA, 75 bp, synthetic construct
  source 1..75: mol_type = other DNA
gggatggaggcgtgctccggggctcattactgggcaagactgtttctgcaatatggtcatgagccgcgtctgatg

SEQ ID NO: 379920 - DNA, 75 bp, synthetic construct
  source 1..75: mol_type = other DNA
aactggatgggcgacaccccgccgatgaaattctgcaagcgtcactacgcgcaattcacgccgcgggtgatgctg

SEQ ID NO: 379921 - DNA, 75 bp, synthetic construct
  source 1..75: mol_type = other DNA
ttatctcgggcaatcgtccgggcgaattggcgaatggatttcacagctccctgttattggcgcaccttgtgggcg

SEQ ID NO: 379922 - DNA, 75 bp, synthetic construct
  source 1..75: mol_type = other DNA
ggatggcatcttatttgcccgtattgttgattcgtcttggcattgatgaacaaacggcgtttgcgcgtaaacctg

SEQ ID NO: 379923 - DNA, 75 bp, synthetic construct
  source 1..75: mol_type = other DNA
gtctcaccctatcgcatggcgggtaagaccgggaaaaatgatgcagctgatgcaatagctatttgtgaggcagtg

SEQ ID NO: 379924 - DNA, 75 bp, synthetic construct
  source 1..75: mol_type = other DNA
aagatccttgaactggatgggcgacaccccgccgatgaaattctgcaagcgtcactacgcgcaattcacgccgcg

SEQ ID NO: 379925 - DNA, 75 bp, synthetic construct
  source 1..75: mol_type = other DNA
caacaaaaatgccaacagaacacatttatctcgggcaatcttccgggagaattggcgaatggatatcacatcttc

SEQ ID NO: 379926 - DNA, 75 bp, synthetic construct
  source 1..75: mol_type = other DNA
ttagcgaccggtgtcatgacggcgttagttggtgcgcccgtttttgtcattatggcgacgaggatgttcaaatga

SEQ ID NO: 379927 - DNA, 75 bp, synthetic construct
  source 1..75: mol_type = other DNA
tatttggaccatacgcagacattgtttgcataacagtgcacataagtcccacatctctaccagtcccctagcatt

SEQ ID NO: 379928 - DNA, 75 bp, synthetic construct
  source 1..75: mol_type = other DNA
ctgtcctctaccagcgacatcaccagcgtgagttacgctttcccgttcgacagggagatccgcctgctgacccgt

SEQ ID NO: 379929 - DNA, 75 bp, synthetic construct
  source 1..75: mol_type = other DNA
ccggataacggcgtttattccgccctcgagctgggtatgggcgcacgtccggaggcgattttgttcgccatcact

SEQ ID NO: 379930 - DNA, 75 bp, synthetic construct
  source 1..75: mol_type = other DNA
gataaacggagagcatgtccctgaaattattcttctcaactctcatgacggtacctccagctaccagatgctgcc

SEQ ID NO: 379931 - DNA, 75 bp, synthetic construct
  source 1..75: mol_type = other DNA
gatataattaaacgtatgtctgaggaagacccaaggattttgtttttagatggtaataaaaaggggggggtaaaa

SEQ ID NO: 379932 - DNA, 75 bp, synthetic construct
  source 1..75: mol_type = other DNA
tgggggggggtatttaacatgtgttgtcgctgtaatgtttgtattcgcagcgataacatccaacggtttgaatga

SEQ ID NO: 379933 - DNA, 75 bp, synthetic construct
  source 1..75: mol_type = other DNA
cgccaaccaacggtgcttgtggcattgttccggcagtgctggcttactatgaccactttattgaatcggtcagcc

SEQ ID NO: 379934 - DNA, 75 bp, synthetic construct
  source 1..75: mol_type = other DNA
atcgtcgatgaagaacatttcggtcaggatggcgcaaacgaagttagcgtgccatatccgtttaaatcagccacc

SEQ ID NO: 379935 - DNA, 75 bp, synthetic construct
  source 1..75: mol_type = other DNA
ccgctggcggcgaaagcgtccaccattgaagggactaaccccagcctggcgattgtcgatgagtaccaccttcac

SEQ ID NO: 379936 - DNA, 75 bp, synthetic construct
  source 1..75: mol_type = other DNA
actgtatcgactatgaccgcattcgtgacgatatcctgcgcgatgctgaaaccttcaatattcggctggtgggct

SEQ ID NO: 379937 - DNA, 75 bp, synthetic construct
  source 1..75: mol_type = other DNA
agaaaccagtggtactcatgaagtacgctgtacaccgaatacctgggtcaccgtgtcgccaaagctgaatatgcg

SEQ ID NO: 379938 - DNA, 75 bp, synthetic construct
  source 1..75: mol_type = other DNA
gtacgttactgatggcgggggtcagccatgacctgcgcacgccgctgacgcgtattcgcctggcgactgaaatga

SEQ ID NO: 379939 - DNA, 75 bp, synthetic construct
  source 1..75: mol_type = other DNA
ttttcctgaccggttatctcactggcatggggtatatttttctgccaaagtttacccaaactgggcagcaacgtt

SEQ ID NO: 379940 - DNA, 75 bp, synthetic construct
  source 1..75: mol_type = other DNA
cgataaattgatgactgaggaatccgttaggaagtatatcaacggcatttatggtgcaatgaagtgggctgttgc

SEQ ID NO: 379941 - DNA, 75 bp, synthetic construct
  source 1..75: mol_type = other DNA
taatcgccaaagcggcagaatgcggcgataaattgatgactgaggaatccgttaggaagtatatcaacggcattt

SEQ ID NO: 379942 - DNA, 75 bp, synthetic construct
  source 1..75: mol_type = other DNA
ttttagttttatcacggccccatcaatagctttatttgttgtttttatgtttttttcgtttaataactcaattgc

SEQ ID NO: 379943 - DNA, 75 bp, synthetic construct
  source 1..75: mol_type = other DNA
gggcttataaccgatactccttctgataaggttaacgtctgtcttttcgaaaagggcgtaccacaggatatggag

SEQ ID NO: 379944 - DNA, 75 bp, synthetic construct
  source 1..75: mol_type = other DNA
tgttagcgccccggaaattgcccgtagtggcgttttgttctcattacagatgcacctgagtctgggggccaatac

SEQ ID NO: 379945 - DNA, 75 bp, synthetic construct
  source 1..75: mol_type = other DNA
gttttggatcggcgctcaatctgaatgttcacttccacatgctgtttctcgacggtgtgtatgtcgagcaatccc

SEQ ID NO: 379946 - DNA, 75 bp, synthetic construct
  source 1..75: mol_type = other DNA
cacccagctgacgcacaccatcgcccaccgggtgggtcgctatctggaacggcaaggcctgctggaacgggatgt

SEQ ID NO: 379947 - DNA, 75 bp, synthetic construct
  source 1..75: mol_type = other DNA
gcgttggtcacgccggcaaaacggggcaggggcaacaaggtcagggtggctgatgaaccggcaacaccagcacaa

SEQ ID NO: 379948 - DNA, 75 bp, synthetic construct
  source 1..75: mol_type = other DNA
aggcaaaacagaaactgaagtgcgatacagcaaagatttaaaaccggttcacatggttgaggttgtcgaaaagat

SEQ ID NO: 379949 - DNA, 75 bp, synthetic construct
  source 1..75: mol_type = other DNA
ccccggcatactttagattgtctgttgagcgctggagtatccgaaggagaggctgcatttcgaactagtggtgat

SEQ ID NO: 379950 - DNA, 69 bp, synthetic construct
  source 1..69: mol_type = other DNA
gtacagcctgatcgggacgtgcaaactgaacggagtggagccagaaagctacctccgctatgtccttga

SEQ ID NO: 379951 - DNA, 75 bp, synthetic construct
  source 1..75: mol_type = other DNA
tgacgtattccgtcgcctgtctgcctgccacaacgtgctgtttaccgggcaccaggcattcctgacagcagaagc

SEQ ID NO: 379952 - DNA, 75 bp, synthetic construct
  source 1..75: mol_type = other DNA
actggcgcgctgttgtggccatcgccgccaaaaatgcaaggctgtgctgggcatcattgcattacggtgatgatt

SEQ ID NO: 379953 - DNA, 75 bp, synthetic construct
  source 1..75: mol_type = other DNA
atgagtatgcacatgatgactgaagcctggaaagtggaacttaacagcccgattcaaaaacttgtcttaatggct

SEQ ID NO: 379954 - DNA, 75 bp, synthetic construct
  source 1..75: mol_type = other DNA
ctgcatactgctgttgacgcattaaattcattgatccgcaaaggattcattaaacgcgctgacgaatacggcgac

SEQ ID NO: 379955 - DNA, 75 bp, synthetic construct
  source 1..75: mol_type = other DNA
gccatcagatggcgcagcaactgggaggcccgacggaagttcgcgtcgaggtcaacaagagctcgcccgtcgtct

SEQ ID NO: 379956 - DNA, 75 bp, synthetic construct
  source 1..75: mol_type = other DNA
aaaagccggtgattcgtatctgcgaacgcttctggttcagggggctcgttcagtgcttattggcgccgggaaaag

SEQ ID NO: 379957 - DNA, 75 bp, synthetic construct
  source 1..75: mol_type = other DNA
atcttgctaaaaatgtgtttgctgttcacagtgttgatcaaaatggtagaactgttctggttaagcctaaagtat

SEQ ID NO: 379958 - DNA, 75 bp, synthetic construct
  source 1..75: mol_type = other DNA
ctaagaagatctacttcagaaaagtagaactcgcgaataaatttgcatcttcaagtgatacgttcggattcgatg

SEQ ID NO: 379959 - DNA, 75 bp, synthetic construct
  source 1..75: mol_type = other DNA
aaaaggctggtctgccttagattatcttccctatgttgctaggatcttggctgtagttaagtttctacacggtga

SEQ ID NO: 379960 - DNA, 75 bp, synthetic construct
  source 1..75: mol_type = other DNA
cggagaactaccacctgctgaatgaggcagcgtttgaacagatgaaaaacggcgtaatgatcgtcaacaccagtc

SEQ ID NO: 379961 - DNA, 75 bp, synthetic construct
  source 1..75: mol_type = other DNA
gttcatacggtacatgatgccttcgccgcgttaatgcataaagggtttgtttgtcgtcttgatgcgttcagtgat

SEQ ID NO: 379962 - DNA, 75 bp, synthetic construct
  source 1..75: mol_type = other DNA
aactgcggcaagaagacttctcgatgtttgctatgcacgtagcgatgcatgggaaaaagagaacggcggcactat

SEQ ID NO: 379963 - DNA, 75 bp, synthetic construct
  source 1..75: mol_type = other DNA
gcagatgcagagctgccgttcgaaccggaattcattgatgatctggcaactaaagggctgcataccctgtttgat

SEQ ID NO: 379964 - DNA, 75 bp, synthetic construct
  source 1..75: mol_type = other DNA
ctgtttcgccaaaactgaacatgcgcggcggctatgaagtcttatcgcaggcactggagcgtgctaacgaaatta

SEQ ID NO: 379965 - DNA, 75 bp, synthetic construct
  source 1..75: mol_type = other DNA
ccggccgcagtgccagaggaaaacgtatccatacccgggccattcacagcattgacaccgacattaagctcaacc

SEQ ID NO: 379966 - DNA, 75 bp, synthetic construct
  source 1..75: mol_type = other DNA
cagatctgaacttccaaggtgaagcactagtgccagtggcaaatattgccggaatatggctaacttcatccaacc

SEQ ID NO: 379967 - DNA, 75 bp, synthetic construct
  source 1..75: mol_type = other DNA
ttttgaaaatatgttcaaaaacacagtgttagatactataacgttaccttggtccccaacatcatctagaaaata

SEQ ID NO: 379968 - DNA, 75 bp, synthetic construct
  source 1..75: mol_type = other DNA
ccagaaggaagatgctacgcgtttatgtatcgatacctgcatagcgcgcaactggcgtttgtcgatgcagacaca

SEQ ID NO: 379969 - DNA, 75 bp, synthetic construct
  source 1..75: mol_type = other DNA
agggctttcagcccttcttcgcctgtcagacccgcgtacgtgacccgggccgtcgggaatataccaaacacatgc

SEQ ID NO: 379970 - DNA, 75 bp, synthetic construct
  source 1..75: mol_type = other DNA
ggggcttacgaggtggtgggcgtgtttgaccggattgaggaaaagcgtgatgccatgcagtctctggtcttaccg

SEQ ID NO: 379971 - DNA, 75 bp, synthetic construct
  source 1..75: mol_type = other DNA
aacgtatccatacccgtgccattcacagcattgacactgacattaagctcaaccgcgcattgtgggtgatggcgg

SEQ ID NO: 379972 - DNA, 75 bp, synthetic construct
  source 1..75: mol_type = other DNA
gccgggaggattacggtaaggacctgtggagtgcttatcagatcatccaggagaatatgctgaaaggcgggattt

SEQ ID NO: 379973 - DNA, 75 bp, synthetic construct
  source 1..75: mol_type = other DNA
tgatgccatgcagtcgccggccctgccgccacccgcacgccaggcgctggcacaggcggcactgacttaccgtta

SEQ ID NO: 379974 - DNA, 75 bp, synthetic construct
  source 1..75: mol_type = other DNA
atgcgactagccagtcgttttggttatgctgcaaaccagatacgccgtgaccgtccgctgacacatgaagaactg

SEQ ID NO: 379975 - DNA, 75 bp, synthetic construct
  source 1..75: mol_type = other DNA
tgagctgcgctcggccactctgtttttgtccgaacaggacatatcaaccacacagccggtgcccatgcacggcag

SEQ ID NO: 379976 - DNA, 75 bp, synthetic construct
  source 1..75: mol_type = other DNA
gaaaagaaattcattcttttgaatttaactctcaggaatgggaatatcttaaacagacatataaaagccagtctt

SEQ ID NO: 379977 - DNA, 75 bp, synthetic construct
  source 1..75: mol_type = other DNA
aaacggagagcatgtccctgaaattattctgctcaactctcatgacggtacctccagctaccagatgctgccggg

SEQ ID NO: 379978 - DNA, 75 bp, synthetic construct
  source 1..75: mol_type = other DNA
aaatgtggtggagaaagttatggaaggggcttacgaggtggtgggtgtgtttgaccggatcgaggaaaagcgtga

SEQ ID NO: 379979 - DNA, 75 bp, synthetic construct
  source 1..75: mol_type = other DNA
tgggggaagtgcgtgttccgcatcggggatatgtggtggacagagtcattgaaggggcttacgaggtggtgggcg

SEQ ID NO: 379980 - DNA, 75 bp, synthetic construct
  source 1..75: mol_type = other DNA
gtaactggcggtaatggagatatggaaggtataccagttgtattaatggaggcaatggcctgtggtaaaatagtt

SEQ ID NO: 379981 - DNA, 75 bp, synthetic construct
  source 1..75: mol_type = other DNA
cgaaggggcttacgaggtggtgggggtttttgaccggattgaagaaaagcgtgacgccatgcagtcgctggtcct

SEQ ID NO: 379982 - DNA, 75 bp, synthetic construct
  source 1..75: mol_type = other DNA
agcccgtcaccaccgccgacattctgacaccacgacgccgggaggattacggtaaggacctgtggagtacttatc

SEQ ID NO: 379983 - DNA, 75 bp, synthetic construct
  source 1..75: mol_type = other DNA
acctccagctaccagatgctgccgggttacttccggttcgtctgccagaacgggtgcgccgtgtcggcgtggtaa

SEQ ID NO: 379984 - DNA, 75 bp, synthetic construct
  source 1..75: mol_type = other DNA
tgacgaacatcagcccgtcaccaccaccgacattctgacgccacgacgcagggaggattacggtaaggacctgtg

SEQ ID NO: 379985 - DNA, 75 bp, synthetic construct
  source 1..75: mol_type = other DNA
aaatgtggtggagaaagttatcgaaggggcttacgaggtggtgggtgtgtttgaccggatagaggacaagcgtga

SEQ ID NO: 379986 - DNA, 75 bp, synthetic construct
  source 1..75: mol_type = other DNA
aaatgtggtggagaaagttatagaaggggcttacgaggtggtgggtgtgtttgaccggatcgaggagaagcgtga

SEQ ID NO: 379987 - DNA, 75 bp, synthetic construct
  source 1..75: mol_type = other DNA
aaacgtggtggacagggtcatagaaggtgcttacgaagtggtgggcgtttttgaccggattgaggaaaagcgtga

SEQ ID NO: 379988 - DNA, 75 bp, synthetic construct
  source 1..75: mol_type = other DNA
atttcaggtcgcagcgctaaaggaaaacgtatccatacccgtgccattcacagcattgacactgacattaagctc

SEQ ID NO: 379989 - DNA, 75 bp, synthetic construct
  source 1..75: mol_type = other DNA
ccatacccgtgccattcacagcatcgacaccgacattaagctcaatcgcgcattgtgggtgatggcagaaacact

SEQ ID NO: 379990 - DNA, 75 bp, synthetic construct
  source 1..75: mol_type = other DNA
aatccttgccagagaaacggcacatgtaaaactccagccttggcaggataataagtggagcagggtgttgccata

SEQ ID NO: 379991 - DNA, 75 bp, synthetic construct
  source 1..75: mol_type = other DNA
ggcacattccaggcagagcatgaggaatttgcattcgatatgagcgacagccacaaagagcggcttgcggcgttt

SEQ ID NO: 379992 - DNA, 75 bp, synthetic construct
  source 1..75: mol_type = other DNA
ccacacccgggccattcacagcattgacaccgacattaagctcaaccgcgcattgtgggtgatgacggaaacgct

SEQ ID NO: 379993 - DNA, 75 bp, synthetic construct
  source 1..75: mol_type = other DNA
gggaggattacggtaaggacctgtggagtgcttatcagaccatccaggagaatatgctcaagggtggtcttcagg

SEQ ID NO: 379994 - DNA, 75 bp, synthetic construct
  source 1..75: mol_type = other DNA
tgccatgcagtcgctgattttaccaccaccggcacgccaggcgctggcacaggccgccctgacttaccgttatgg

SEQ ID NO: 379995 - DNA, 75 bp, synthetic construct
  source 1..75: mol_type = other DNA
tggtgacgaacatcagcccgtcaccaccgctgacattctgaccccgcgacgctgggaggattacggtgaggacct

SEQ ID NO: 379996 - DNA, 75 bp, synthetic construct
  source 1..75: mol_type = other DNA
tggtgacgaacatcagcccgtcaccaccgctgacattctgacccctcgacgcagggaggattacggtgaggacct

SEQ ID NO: 379997 - DNA, 75 bp, synthetic construct
  source 1..75: mol_type = other DNA
tggtgacgaacatcagcctgtcaccaccgctgacattctgaccccacgacgcggggaggattacggtgaggacct

SEQ ID NO: 379998 - DNA, 75 bp, synthetic construct
  source 1..75: mol_type = other DNA
ttgaccgcctggaataagtacgcagaagacgtaaaaacgggcaaaattccggcctgtaaacggctgaaacaggcc

SEQ ID NO: 379999 - DNA, 75 bp, synthetic construct
  source 1..75: mol_type = other DNA
tgtttcgcccaatcccagcaattaatgcaaaactaactataggtcaatacgatactgaatcctctattttcgact

SEQ ID NO: 380000 - DNA, 75 bp, synthetic construct
  source 1..75: mol_type = other DNA
tggtgacgaacatcagccggtcaccaccgctgacattctgaccccccgacgctgggaggattacggtgaggacct

SEQ ID NO: 380001 - DNA, 75 bp, synthetic construct
  source 1..75: mol_type = other DNA
caacaatccccaatcataaaacaattcactgataacgaactttgcacacttgcttggttgtggcgagctggggat

SEQ ID NO: 380002 - DNA, 75 bp, synthetic construct
  source 1..75: mol_type = other DNA
gggaggattacggtaaggacctgtggagtacttatcagactatccaggagaatatgctgaaaggcgggatttccg

SEQ ID NO: 380003 - DNA, 75 bp, synthetic construct
  source 1..75: mol_type = other DNA
ggggcttacgaagtggtgggggtttttgaccggattgaggaaaagcgtgatgtcatgcagtcgctggtcctgccg

SEQ ID NO: 380004 - DNA, 75 bp, synthetic construct
  source 1..75: mol_type = other DNA
atgctgaaaggcggaatttccggtcgcagtgccagaggaaaacgtatccacacccgtgccattcacagcatcgac

SEQ ID NO: 380005 - DNA, 75 bp, synthetic construct
  source 1..75: mol_type = other DNA
cacgcagttggttgtgcctcccgctttccgtcgggagatctaccgtgagctggggatctctctctactccaatga

SEQ ID NO: 380006 - DNA, 75 bp, synthetic construct
  source 1..75: mol_type = other DNA
ccgcgcctttaaccatatggcggctggcgtcaagcaactggcggatgaccgtacgttgctcatggcgggggtaag

SEQ ID NO: 380007 - DNA, 75 bp, synthetic construct
  source 1..75: mol_type = other DNA
gagcggggcgggctttccattcgcgcctggctgccattgccggtaacgcgggcgcagggtgcgacaaaagaaggg

SEQ ID NO: 380008 - DNA, 75 bp, synthetic construct
  source 1..75: mol_type = other DNA
cactatgttcccggtattttcggtgaagactggcatacttcccgcagtaaacgatatgcgtacattcccaccatc

SEQ ID NO: 380009 - DNA, 75 bp, synthetic construct
  source 1..75: mol_type = other DNA
caccatgtgcccgggattttcggggaagataaacacacctcccggagccggaactatacatacatccccaccatc

SEQ ID NO: 380010 - DNA, 75 bp, synthetic construct
  source 1..75: mol_type = other DNA
cccgctgacacgcgaagaactgatgtaccacgttccgagtatttttggtgaagaccggcacacctcccgcagtga

SEQ ID NO: 380011 - DNA, 75 bp, synthetic construct
  source 1..75: mol_type = other DNA
ctgaaaggcgggatttccggtcgcagtgccagaggaaaacgtatccatacccgtgccattcacagcatcgacacg

SEQ ID NO: 380012 - DNA, 75 bp, synthetic construct
  source 1..75: mol_type = other DNA
ggtataattccatccgccgtgaacgtcctttaacggatgatgaattaatgcagttcgtaccttcggtattttccg

SEQ ID NO: 380013 - DNA, 75 bp, synthetic construct
  source 1..75: mol_type = other DNA
aaacgtggtggacagtgtgattgaaagtgcttacgaggtggtgggggtttttgaccggattgaagaaaagcgtga

SEQ ID NO: 380014 - DNA, 75 bp, synthetic construct
  source 1..75: mol_type = other DNA
aaatggaagggtttcttcgcgggaaatgtgtaccgcgagatctgaaagtgaacgaaacaaacgctgagtacctgg

SEQ ID NO: 380015 - DNA, 75 bp, synthetic construct
  source 1..75: mol_type = other DNA
atggccgtctctgtcggcacgctcgcggctgaacaaaaaacactccacatttataactggtctgattatatcgcc

SEQ ID NO: 380016 - DNA, 75 bp, synthetic construct
  source 1..75: mol_type = other DNA
cggcaaaatgttcacactgcaagtgcaggacccgaaaattgaccgagtgcgcacccgcgcctggactaaagtgaa

SEQ ID NO: 380017 - DNA, 75 bp, synthetic construct
  source 1..75: mol_type = other DNA
cggtttaagtcgagtttctctggagaaactggttgaggcatatcgggagttggatcaggcactggtagtgcgtgg

SEQ ID NO: 380018 - DNA, 75 bp, synthetic construct
  source 1..75: mol_type = other DNA
gtggttcaggtacagcggcggtttgcaccggaagccgtcagccattcactggcactggcggcgtcactggatgcg

SEQ ID NO: 380019 - DNA, 75 bp, synthetic construct
  source 1..75: mol_type = other DNA
gccggacaactggacgatgaatggcgagtacggcagcgagttcggcggctttttccccgtccaggtccgtttctc

SEQ ID NO: 380020 - DNA, 75 bp, synthetic construct
  source 1..75: mol_type = other DNA
gtatttatcctccggcggacgttcgtgcgaagctattcactctgaaagtacaggctccgaaaatcgaccgtgtgc

SEQ ID NO: 380021 - DNA, 75 bp, synthetic construct
  source 1..75: mol_type = other DNA
agacactggcatctgacacccaggcatcaactggcagtgtcgtttgctccctttctgaacagaagatatacaccc

SEQ ID NO: 380022 - DNA, 75 bp, synthetic construct
  source 1..75: mol_type = other DNA
atgaacaaccacaccgccccgccggagacggggcggcagcaagggagataccgtgatgaaactgaactgaccctg

SEQ ID NO: 380023 - DNA, 75 bp, synthetic construct
  source 1..75: mol_type = other DNA
ctgaccatgtgttctatgccaacgcgaacaaagaagctacgccgctggtaagcgcggaagtgcgtgataaccccg

SEQ ID NO: 380024 - DNA, 75 bp, synthetic construct
  source 1..75: mol_type = other DNA
acgcgcccgtcgatagctgggacttgatcctcaagcctgaaaatctggaaaaactgaaaagctgcggtgtctctt

SEQ ID NO: 380025 - DNA, 75 bp, synthetic construct
  source 1..75: mol_type = other DNA
tgcgaagctgttcactctgaaagtacaggatccgaaaatcgaccgtgtgcgcacccgcgcgtggaccaaagtgaa

SEQ ID NO: 380026 - DNA, 75 bp, synthetic construct
  source 1..75: mol_type = other DNA
ggttacgggttgtgttttgcggtatcaaccctggtctttcatccgccggaactggttttccctttgctcatccgg

SEQ ID NO: 380027 - DNA, 75 bp, synthetic construct
  source 1..75: mol_type = other DNA
agacattaccgtttacaattatgatggtgagacacgggaatatatttccacatcaactgaatatcttgctgtggg

SEQ ID NO: 380028 - DNA, 75 bp, synthetic construct
  source 1..75: mol_type = other DNA
caactgaatatcttgctgtgggtgtcggtatccctgcatattcctgtttagatgcccctggcacatacaaagctg

SEQ ID NO: 380029 - DNA, 75 bp, synthetic construct
  source 1..75: mol_type = other DNA
gaaacggcgctgccggaacaccacccgctgccgtggagttttgtgctgtcgccgggatttttacccattggcggg

SEQ ID NO: 380030 - DNA, 75 bp, synthetic construct
  source 1..75: mol_type = other DNA
gatgcaccagttacacataaagctggttatgcaatctgccgttctgcagattttaactcatgggaatatgtgtca

SEQ ID NO: 380031 - DNA, 75 bp, synthetic construct
  source 1..75: mol_type = other DNA
gattatatagacgcgctgaacgcaatggatataaacatggcaccagatatcaacttgccgggaataccactggca

SEQ ID NO: 380032 - DNA, 75 bp, synthetic construct
  source 1..75: mol_type = other DNA
gttatgcaatctgtcgctctgtagatttaaattcatgggaatatgtgccagaccatcgcggtgaagttgtctata

SEQ ID NO: 380033 - DNA, 75 bp, synthetic construct
  source 1..75: mol_type = other DNA
gctggcgcttgccgcgacactggatgcgcagggatacagtgttaacgacatcatccatatcctgatggcagaagg

SEQ ID NO: 380034 - DNA, 75 bp, synthetic construct
  source 1..75: mol_type = other DNA
tgcagtccatgaacgcacaggaatatgaagatatccgtgctgcgggaagcgatatgcgccgtaatctcactcacg

SEQ ID NO: 380035 - DNA, 75 bp, synthetic construct
  source 1..75: mol_type = other DNA
ttcaggccatgaacgcacaggaatatgaagatatccgtgctgcgggaagcgatatgcgccgtaatctcactcacg

SEQ ID NO: 380036 - DNA, 75 bp, synthetic construct
  source 1..75: mol_type = other DNA
gctggttctggcagcagaacagcgaggggcggtatgtggatgcgttgcggctggggggggaagataaacatgaag

SEQ ID NO: 380037 - DNA, 75 bp, synthetic construct
  source 1..75: mol_type = other DNA
gcggcagtacatgtctcaccacagacagaacgctgcgggcgactggcggagcaggcagaccagctgtgggcgatg

SEQ ID NO: 380038 - DNA, 75 bp, synthetic construct
  source 1..75: mol_type = other DNA
aagtactggaaggcggtgaatcgctgatattatcggaggtcgcagagccgccagcgcaaatgattgattcactta

SEQ ID NO: 380039 - DNA, 75 bp, synthetic construct
  source 1..75: mol_type = other DNA
acgccgtgatgcgggaactggatgcgccggacaactggacgatgaacggcgagtacggcagcgagtttggcggat

SEQ ID NO: 380040 - DNA, 75 bp, synthetic construct
  source 1..75: mol_type = other DNA
ccgtcctggtattacaccctcccggcggctggactgctggtcacctggatacccctgtcaaccggcagctacggc

SEQ ID NO: 380041 - DNA, 75 bp, synthetic construct
  source 1..75: mol_type = other DNA
gatgttttactggttactaatcgcggaacaggtttttcgcaggaattcgactttgaagaaaaagacggcttcatc

SEQ ID NO: 380042 - DNA, 75 bp, synthetic construct
  source 1..75: mol_type = other DNA
gtcaagcaagcggtattactggggcttgccgcgacaatttctcatacgtctgttgtctggctcattgcgttcggc

SEQ ID NO: 380043 - DNA, 75 bp, synthetic construct
  source 1..75: mol_type = other DNA
caacgggcgctggtggtcgaaattatggcggaagggatgcgtaacccacaggtcgccgccatgcttaaaaataag

SEQ ID NO: 380044 - DNA, 75 bp, synthetic construct
  source 1..75: mol_type = other DNA
gtggtcgaaattatggcggaagggatgcgtaacccacaggtcgccgccatgcttaaaaataagcatatgacgatc

SEQ ID NO: 380045 - DNA, 75 bp, synthetic construct
  source 1..75: mol_type = other DNA
gtcagtctgcgggcataatttttatcgtgtgttttatggatggctttctgcatcaggcgtcgttcgtcacgggaa

SEQ ID NO: 380046 - DNA, 75 bp, synthetic construct
  source 1..75: mol_type = other DNA
ttactgaagaagataaccggatgttgatgctatcccagccaacaaggccaagtggttatttctacgattcgcacc

SEQ ID NO: 380047 - DNA, 75 bp, synthetic construct
  source 1..75: mol_type = other DNA
aagacctgctggaaaaagcagcaactgaaccggcgcaccgcccggcctttttccgtactctactggaatccaccg

SEQ ID NO: 380048 - DNA, 75 bp, synthetic construct
  source 1..75: mol_type = other DNA
ttagccactttattaccgaacatattgcgccattctatgaacgtcgctggggtggttttttgcgtgactttaaac

SEQ ID NO: 380049 - DNA, 75 bp, synthetic construct
  source 1..75: mol_type = other DNA
gcctgtactttgataaacgtgcttatgccaacgttcaagccgcagaggccgtaaaatctggtcgtatgagactgg

SEQ ID NO: 380050 - DNA, 75 bp, synthetic construct
  source 1..75: mol_type = other DNA
gtgatgccataaagtcagggcgtatgcggatagacagtgactctaaaacggcagagcaagcgtcaaaaatcccct

SEQ ID NO: 380051 - DNA, 75 bp, synthetic construct
  source 1..75: mol_type = other DNA
ctggttacagacctattttgtcctgtctgacaccatgttttatgagcgttcccgtaaagggatatgggaagtgct

SEQ ID NO: 380052 - DNA, 75 bp, synthetic construct
  source 1..75: mol_type = other DNA
ttcaggcgattatcttacaggaccaggagagggcgctggcccgtttccgggaaccgattgaagggattcattttg

SEQ ID NO: 380053 - DNA, 75 bp, synthetic construct
  source 1..75: mol_type = other DNA
accagcttgtcacaggctgattttgaagctcggctggaagcggtattccatcagaataccggtgagtcgcaacag

SEQ ID NO: 380054 - DNA, 75 bp, synthetic construct
  source 1..75: mol_type = other DNA
atgaataccaatgaagatattttatttactaaagacgtaatgaaaattttgcgctatggggcaatgagcgcattc

SEQ ID NO: 380055 - DNA, 75 bp, synthetic construct
  source 1..75: mol_type = other DNA
tggacgacgacatacctggcaccgtagagatgtagaagcatggttagataaacaacgagaacaagccaatcccca

SEQ ID NO: 380056 - DNA, 75 bp, synthetic construct
  source 1..75: mol_type = other DNA
gggtctgatgtttgattttgccactgcatggttacttcaaaataaggtattactgcccggagcaaccacactagt

SEQ ID NO: 380057 - DNA, 75 bp, synthetic construct
  source 1..75: mol_type = other DNA
ggctcttgcggcgtcactggatgaacgggggtattccgtcagtgacatcatccatatcctgatggcggaaggagg

SEQ ID NO: 380058 - DNA, 75 bp, synthetic construct
  source 1..75: mol_type = other DNA
aaacaatgtcgatccgttttcgcatcgacggcgttttgcggacaattttacagccaaacaaaaaactggcggcac

SEQ ID NO: 380059 - DNA, 75 bp, synthetic construct
  source 1..75: mol_type = other DNA
agattcccacgttctgattcaattgtacaaccccgggctggcttgcaaacttatatggcgcaagtctatggctgg

SEQ ID NO: 380060 - DNA, 75 bp, synthetic construct
  source 1..75: mol_type = other DNA
ttcttggcgcattaacgttgtatctggacttcatcaacctgttcctgatgttgctgcggatctttggcaaccgtc

SEQ ID NO: 380061 - DNA, 75 bp, synthetic construct
  source 1..75: mol_type = other DNA
ttcggcgctgaccggcttgacgctttccagtatttttattgtttataccgctgcgtctattgccagcacctttgt

SEQ ID NO: 380062 - DNA, 75 bp, synthetic construct
  source 1..75: mol_type = other DNA
ctgggatggtcggtcgtaatattgttgataataataattcaaacaagtatgagctattatgcccgactagttctg

SEQ ID NO: 380063 - DNA, 75 bp, synthetic construct
  source 1..75: mol_type = other DNA
tgaccgttggcttgttgctgaccgcatttgttgcctggtatgcggctaattccgcggccgtgatggagctgttgt

SEQ ID NO: 380064 - DNA, 75 bp, synthetic construct
  source 1..75: mol_type = other DNA
cgatgctctttatgctttattcggcgctgacgggtcttacgctttccagtattttcattgtctataccgctgctt

SEQ ID NO: 380065 - DNA, 75 bp, synthetic construct
  source 1..75: mol_type = other DNA
taacctcggcaacagcctggcggcagtgaagaaactggtatttgaacagggcgcgattggtcagcaacagctggc

SEQ ID NO: 380066 - DNA, 75 bp, synthetic construct
  source 1..75: mol_type = other DNA
cacaagaaaaagcgttgtcagcgggtaacttcaacaacttcgatgaagtgatggacgcgtgggacacgcaaatcc

SEQ ID NO: 380067 - DNA, 75 bp, synthetic construct
  source 1..75: mol_type = other DNA
tcttggtttctgggggattgctattatcactggtattgtttcttcttacataggggatgatgagctgaacaaact

SEQ ID NO: 380068 - DNA, 75 bp, synthetic construct
  source 1..75: mol_type = other DNA
atgcgctgtaaaacgctgactgctgcagcagcagtactattgatgttgaccgcatgctgttccactctggagcga

SEQ ID NO: 380069 - DNA, 75 bp, synthetic construct
  source 1..75: mol_type = other DNA
gtcttccgccagcaaccaggtcatgaaggtgtaacgcagcaaacgctgacgctgacctttaacagtagcggtgtg

SEQ ID NO: 380070 - DNA, 75 bp, synthetic construct
  source 1..75: mol_type = other DNA
cgtatccaaaatacgtgttggcatgacgcaacaacaagttgcgtacgcattgggtacaccgctgatgtccgatcc

SEQ ID NO: 380071 - DNA, 75 bp, synthetic construct
  source 1..75: mol_type = other DNA
attatcgatctcgctcaacgttgcggagcgcttgcagtaacggcgaaaggggcgatgacagcgctgccatgtcga

SEQ ID NO: 380072 - DNA, 75 bp, synthetic construct
  source 1..75: mol_type = other DNA
aagccaggggagactactacagtgtcctggtggggcgcctgctaatgttgcagtcggtatcgcaaggctgggggg

SEQ ID NO: 380073 - DNA, 75 bp, synthetic construct
  source 1..75: mol_type = other DNA
cggcgcaaacaccgaccctgaaatgggcctgtttgaaactggctaaactggggcgatggcatgacagcaaacgca

SEQ ID NO: 380074 - DNA, 75 bp, synthetic construct
  source 1..75: mol_type = other DNA
gcccaactgctggtgagtctatggggggaacaggggcgaatctgaatcagcaaggtggaaataataatagtaata

SEQ ID NO: 380075 - DNA, 75 bp, synthetic construct
  source 1..75: mol_type = other DNA
actaccggcagttaagcctccagttgccaaaagggagtgatccggtgtatcagaacgaggatgcgcaaaaaaaat

SEQ ID NO: 380076 - DNA, 75 bp, synthetic construct
  source 1..75: mol_type = other DNA
caggtctgtcctctacgggattatctacagatgaaagagaaatgcgacaaattatcgatctcgctcaacgttgcg

SEQ ID NO: 380077 - DNA, 75 bp, synthetic construct
  source 1..75: mol_type = other DNA
cggaggacaaagacaactcgtcggtttggcacaatcattggtccgtaatccatcgatattactactggatgagtc

SEQ ID NO: 380078 - DNA, 75 bp, synthetic construct
  source 1..75: mol_type = other DNA
ctgattaaggttgtcggttcagtgaaaacagaaacaatcaacatcagtgatatcaagaatggactgactacacgc

SEQ ID NO: 380079 - DNA, 75 bp, synthetic construct
  source 1..75: mol_type = other DNA
gctggattacaaaatgccgaccatgccggatctaccacaactggaaagcgcgttcgtcgaaatcaatgagccgca

SEQ ID NO: 380080 - DNA, 75 bp, synthetic construct
  source 1..75: mol_type = other DNA
gcggcgatacccattggtgacagcgtggatgaggaatttttggggcgtttgagtggagaagagcaggagctgttt

SEQ ID NO: 380081 - DNA, 75 bp, synthetic construct
  source 1..75: mol_type = other DNA
ctgacgcacaccatcgcccaccgggtgggtcgctatctggaacggcaaggcctgctggaacgggatgtcgaaaac

SEQ ID NO: 380082 - DNA, 75 bp, synthetic construct
  source 1..75: mol_type = other DNA
cagccgctacaggcgacggcaatctactgcgggctgaactggctgccgccgtttgccatgcactgcacctttatt

SEQ ID NO: 380083 - DNA, 75 bp, synthetic construct
  source 1..75: mol_type = other DNA
aaacattcaacgatgaagatgataaagcatttcaatggcgccatcaggccgggacggatctactccaattcagca

SEQ ID NO: 380084 - DNA, 75 bp, synthetic construct
  source 1..75: mol_type = other DNA
cgcgttctgacgggtttgtcgaaaaagtctaccccatgacgattggcgatcatgtgaagaaggggacgccactta

SEQ ID NO: 380085 - DNA, 75 bp, synthetic construct
  source 1..75: mol_type = other DNA
taccggcaaagaacagcgcgtgattactgttgatgatgaaggcaagtttgtgccgaaacagatccacgttctgca

SEQ ID NO: 380086 - DNA, 75 bp, synthetic construct
  source 1..75: mol_type = other DNA
acgcttcaggtccgtctccaggtttctaataaggatgagtttctcaagccgggcatgaatgcctatctgaaactg

SEQ ID NO: 380087 - DNA, 75 bp, synthetic construct
  source 1..75: mol_type = other DNA
actttcacatgaggaagagttggtaatgctggttaaacaattggtaagtcagttgaaaaaagcgaaaccagattg

SEQ ID NO: 380088 - DNA, 75 bp, synthetic construct
  source 1..75: mol_type = other DNA
atcagttacgacagctttttcagcagcacacatctcgctggcagcacgagctacctgacctgaccaaaccgcagt

SEQ ID NO: 380089 - DNA, 75 bp, synthetic construct
  source 1..75: mol_type = other DNA
taagcctggtatcgaacaggtggcactgatggaagcagcagtcagcaccaaagcaacgctggcagaaatgctggc

SEQ ID NO: 380090 - DNA, 75 bp, synthetic construct
  source 1..75: mol_type = other DNA
ttcagtcacagtacggcatctgatgacctggggaataccaccactaacccgaagacgcgcgggctgctggctcac

SEQ ID NO: 380091 - DNA, 75 bp, synthetic construct
  source 1..75: mol_type = other DNA
cgaagccaaagcccgcgccgatgtggtcgtcgtcagtattttcgttaacccgatgcagttcgaccgcccggaaga

SEQ ID NO: 380092 - DNA, 75 bp, synthetic construct
  source 1..75: mol_type = other DNA
tctgacggcggaacaacgcaaaattgcgcccggtctgtacaaagttttaagttcgattgccgacaaattgcaggc

SEQ ID NO: 380093 - DNA, 75 bp, synthetic construct
  source 1..75: mol_type = other DNA
cgaaatcgcgggtaataacgctgtagtgaatcaggacggcacgctggatgtcagcggcggcggtcacgggattga

SEQ ID NO: 380094 - DNA, 75 bp, synthetic construct
  source 1..75: mol_type = other DNA
ctgatgcacttgttttcatgggacagtcgcaatccaccggaagagattttggactgcgacgcgatgtacatccag

SEQ ID NO: 380095 - DNA, 75 bp, synthetic construct
  source 1..75: mol_type = other DNA
gctggaaggcgcgagccgtccggggcattttcgcggtgtgtcgactatcgtcagcaagctgttcaacctggtcca

SEQ ID NO: 380096 - DNA, 75 bp, synthetic construct
  source 1..75: mol_type = other DNA
gttcgattgccgacaaattgcaggctggtgaacgggatctcgatgaaattattgctattgccgggcaagaactga

SEQ ID NO: 380097 - DNA, 75 bp, synthetic construct
  source 1..75: mol_type = other DNA
cacagcgccagtcgctgattgatgcagcaatggcttccattagtctgattcagctgaaattacgggccggacgga

SEQ ID NO: 380098 - DNA, 75 bp, synthetic construct
  source 1..75: mol_type = other DNA
tctgcagattttaactcatgggaatatgtgccagaccatcgcggtgaaatcatctatagcaccgaaacaggagaa

SEQ ID NO: 380099 - DNA, 75 bp, synthetic construct
  source 1..75: mol_type = other DNA
tacgagccggacgccagttgacgccacaggagacggaaaaactgaacgccgtgcttgattttatagatgcgctta

SEQ ID NO: 380100 - DNA, 75 bp, synthetic construct
  source 1..75: mol_type = other DNA
aacgcggtggtgaaccaggacggcgagctggatgtgagcggcggcggtcacggtattgatatcaccggcgacagc

SEQ ID NO: 380101 - DNA, 75 bp, synthetic construct
  source 1..75: mol_type = other DNA
gaataacactgttgcccttgaaggggtgagcgcagatggcgcaacgaagtggcaatataatcataaaggtgagct

SEQ ID NO: 380102 - DNA, 75 bp, synthetic construct
  source 1..75: mol_type = other DNA
aacaataacggcagcaccaccgttgacggcaaggattccacgggcaccgagataaacggtgacaaagccatcgtc

SEQ ID NO: 380103 - DNA, 75 bp, synthetic construct
  source 1..75: mol_type = other DNA
gtcattttgtcagatgatgaactacgtggaatggcgttatcgatggagcaaaaaatgcgggaaatggctactcca

SEQ ID NO: 380104 - DNA, 75 bp, synthetic construct
  source 1..75: mol_type = other DNA
cgcatggccgaacggctgggggagatacagaaacgggtaatcactgtctgtgaccgggaggcggatatctggcat

SEQ ID NO: 380105 - DNA, 75 bp, synthetic construct
  source 1..75: mol_type = other DNA
tcgggaaaggggataccgcaccagtggccgataacagcactaaaaccggacgggcgcagaatcgccgggtggaaa

SEQ ID NO: 380106 - DNA, 75 bp, synthetic construct
  source 1..75: mol_type = other DNA
cccgacggacgtaagcaactggacgatattcgccagcaactgctgacccaactggtccagcgccgcgatccggtc

SEQ ID NO: 380107 - DNA, 75 bp, synthetic construct
  source 1..75: mol_type = other DNA
ggcagcgcttcgtggtgcgtgcagcacagaatcgccggctggaagaagcacccggcaagctcttcgaactgccgg

SEQ ID NO: 380108 - DNA, 75 bp, synthetic construct
  source 1..75: mol_type = other DNA
tgtgacgacgaaaccctcgaagggcaggcgcgccactataagcaacgtctgctggaatggcaggaggcacatcat

SEQ ID NO: 380109 - DNA, 75 bp, synthetic construct
  source 1..75: mol_type = other DNA
tgtctgcctgccacaacgtgctgtttaccgggcaccaggcattcctgacagcagaagctctgaccagtatttctc

SEQ ID NO: 380110 - DNA, 75 bp, synthetic construct
  source 1..75: mol_type = other DNA
aatattagtcctgatgatacagataagataacaggaaggaaattttcagagttaggtgagtatctttattcagga

SEQ ID NO: 380111 - DNA, 75 bp, synthetic construct
  source 1..75: mol_type = other DNA
ggagcaaccagctctgccgttggttttaacattcagctgaatgattgcgataccactgttgccacaaaagccgct

SEQ ID NO: 380112 - DNA, 75 bp, synthetic construct
  source 1..75: mol_type = other DNA
ccagaagatgaacgcgttgatagctattttgtgaaactgaagatggataacgggaaaacacgaacactatggggg

SEQ ID NO: 380113 - DNA, 75 bp, synthetic construct
  source 1..75: mol_type = other DNA
tcgggaagggggataccgtgccggtggctgataaccgcactaaaaccggacgagcgcagaatcgccgggtagaaa

SEQ ID NO: 380114 - DNA, 75 bp, synthetic construct
  source 1..75: mol_type = other DNA
caactaccggatgagtctcgccacagaagccgtacagcagcgtatcgatgccattggtaaacaccttccaccgcc

SEQ ID NO: 380115 - DNA, 75 bp, synthetic construct
  source 1..75: mol_type = other DNA
ggaaatggacagatacgttgagcgtgaacgatcaagggcacaggtcagtcagttttccggacatacgggaaattg

SEQ ID NO: 380116 - DNA, 75 bp, synthetic construct
  source 1..75: mol_type = other DNA
ccggctataaagttgctaaagcctttcgtgatatgggattgtatgctcatttcggagcatatgaagcattcaggg

SEQ ID NO: 380117 - DNA, 75 bp, synthetic construct
  source 1..75: mol_type = other DNA
gagaattataactatattacccgtactggcggttctgatacgtatttcctatatactccggctctgtttgttgat

SEQ ID NO: 380118 - DNA, 75 bp, synthetic construct
  source 1..75: mol_type = other DNA
gctcatgaccgctgggagagtcgaaatattattgcgaataaccatttccgtcctatccaggatcttctggtgggg

SEQ ID NO: 380119 - DNA, 75 bp, synthetic construct
  source 1..75: mol_type = other DNA
attagcgcaactggctgatgaagcaaaacggatgcgcgaacgtattcaggcgctggaatctattcttgatgcaga

SEQ ID NO: 380120 - DNA, 75 bp, synthetic construct
  source 1..75: mol_type = other DNA
atattgtatccggtgaagcgactgcggtgaccgctgatgccattatcaaactgatttacacgctgcgtaaggcac

SEQ ID NO: 380121 - DNA, 75 bp, synthetic construct
  source 1..75: mol_type = other DNA
ggaatttgccgaacaggaagaaatggcctttaccagtggcgacggcagcaaaaaaccaaaaggttttctggctta

SEQ ID NO: 380122 - DNA, 75 bp, synthetic construct
  source 1..75: mol_type = other DNA
gtacggcttccggatgggttggcgagactgacgcgcgctcccagactgccacttccagactggggctgattgaac

SEQ ID NO: 380123 - DNA, 75 bp, synthetic construct
  source 1..75: mol_type = other DNA
aggaaaagggaaaacttgccggagaagtggaaaacctcaacgaaaaactgactgaactggaaaacctgaaaagtg

SEQ ID NO: 380124 - DNA, 75 bp, synthetic construct
  source 1..75: mol_type = other DNA
gtgatcaccgttggcggttccgactacaaaaaactggtgaatctgggcggcacggcttccggatgggtgggggaa

SEQ ID NO: 380125 - DNA, 75 bp, synthetic construct
  source 1..75: mol_type = other DNA
gttgagtggataagcaagaattttaaagaaagaattttagattatattgatagtgatgatgcgctaaataaatta

SEQ ID NO: 380126 - DNA, 75 bp, synthetic construct
  source 1..75: mol_type = other DNA
tcttgctgtctgtgtacggcgatctgcggctactggaaaaccatcccaacaaacaagcgattgtttacggctttc

SEQ ID NO: 380127 - DNA, 75 bp, synthetic construct
  source 1..75: mol_type = other DNA
ctgaccaagctttgtgtcagtcatcctagcacccccaaaacagaggtcagattgcactttgataactgcctatcc

SEQ ID NO: 380128 - DNA, 75 bp, synthetic construct
  source 1..75: mol_type = other DNA
agtctgaggttccttccctgccccaaatccagcgacctgaaggtggccaggcttcaatgaccctgtccggacttc

SEQ ID NO: 380129 - DNA, 75 bp, synthetic construct
  source 1..75: mol_type = other DNA
ggattagtaaaacagctaaactaattcatccacttggagttaaaccatgcaagaaatgcggtaaagaaatggaat

SEQ ID NO: 380130 - DNA, 75 bp, synthetic construct
  source 1..75: mol_type = other DNA
aacctggggcgtttccgtaaaacgccgaacgaaggcacgctgttctatgtctggtgcaggatggcaacgatatgt

SEQ ID NO: 380131 - DNA, 75 bp, synthetic construct
  source 1..75: mol_type = other DNA
tatcgggcgttatcgcgattatcgtcgtcacggtgcgtcggctttcagcgcgacgctcggctgtttctggatgat

SEQ ID NO: 380132 - DNA, 75 bp, synthetic construct
  source 1..75: mol_type = other DNA
ggggatcgattatatgcagggttatcttattggtaagccgcaaccgttaattgatacgctgaatgaaatcgaacc

SEQ ID NO: 380133 - DNA, 75 bp, synthetic construct
  source 1..75: mol_type = other DNA
gttaagcaggcgcaaatcaccttgcagcatcttcaggaattaggctgccagattgcgattgatgatttcggcacc

SEQ ID NO: 380134 - DNA, 75 bp, synthetic construct
  source 1..75: mol_type = other DNA
accaatgggataaggtgttactgaatgtcggtcgtaacaacacaagcttcgccagcgtggcacagacaccgaacg

SEQ ID NO: 380135 - DNA, 75 bp, synthetic construct
  source 1..75: mol_type = other DNA
gtatgtgatcccaaacataagcacggggatgatagccgctatcaggctggtgggcaatgcaatcagtctggttca

SEQ ID NO: 380136 - DNA, 75 bp, synthetic construct
  source 1..75: mol_type = other DNA
atgaaaaaacgtatttatgaaagtttaaccaccgtgttcagcgtgctggtcgtaagcagctttctttatatctgg

SEQ ID NO: 380137 - DNA, 75 bp, synthetic construct
  source 1..75: mol_type = other DNA
aaacagacctgtacaatctgcaaatccagcagcgcaatgatacacaggcacttcagcgagaagtacagaaatcgc

SEQ ID NO: 380138 - DNA, 75 bp, synthetic construct
  source 1..75: mol_type = other DNA
atctaaacggaactggaaaggaggattaccacgcctttcattcttgtgtgttgacacgtcaattacaccccatat

SEQ ID NO: 380139 - DNA, 75 bp, synthetic construct
  source 1..75: mol_type = other DNA
taccgttatacaaaaaacaacgccccgcagtggtggctcacatacggggcgtctaaccaaaccattaattgaggt

SEQ ID NO: 380140 - DNA, 75 bp, synthetic construct
  source 1..75: mol_type = other DNA
ggtttttcaggcataaaaaaagcggccccgaaatggagccgcctttctgaacagataacccgctgcgccttatgt

SEQ ID NO: 380141 - DNA, 75 bp, synthetic construct
  source 1..75: mol_type = other DNA
tgccggatattgctgccgatgcaaaagccattgcgtttggtaacttcaaacgtggctataccatcgttgatcgca

SEQ ID NO: 380142 - DNA, 75 bp, synthetic construct
  source 1..75: mol_type = other DNA
cttcaggttcgtctgccagaacggctgcgtctgtggtctgtctctgggggaagtgcgtgttccacaccggggaga

SEQ ID NO: 380143 - DNA, 75 bp, synthetic construct
  source 1..75: mol_type = other DNA
aggaaaacgtatccatacccgggccattcacagcatcgataccgacattaagctcaaccgggcgttgtgggtgat

SEQ ID NO: 380144 - DNA, 75 bp, synthetic construct
  source 1..75: mol_type = other DNA
cacaggcggcactgacttaccgttatggcgacgaacatcagcccgtcaacaccgccgacattctgacgccgcgac

SEQ ID NO: 380145 - DNA, 75 bp, synthetic construct
  source 1..75: mol_type = other DNA
gcttcttgcggcacggcaacagccgtctctgtaccatgcatgttctcggatatgccgcgcgagcattacaaagaa

SEQ ID NO: 380146 - DNA, 75 bp, synthetic construct
  source 1..75: mol_type = other DNA
tcgcattggcgaggatgcacaccgcaacccgttaatgcaaaacgagaaacgtaaaaatctgaccatcttgatcgt

SEQ ID NO: 380147 - DNA, 75 bp, synthetic construct
  source 1..75: mol_type = other DNA
taaaatcaaacctgccacctcgcgtctgcgcagtgttcttttccgtggagccaatattctggtttctgtactgct

SEQ ID NO: 380148 - DNA, 75 bp, synthetic construct
  source 1..75: mol_type = other DNA
gaaggggcttacgaggtggtgggagtttttgaccggatggaggacaagcgtgatgccatgcagtcgctgctactg

SEQ ID NO: 380149 - DNA, 75 bp, synthetic construct
  source 1..75: mol_type = other DNA
aacggctgcgtctgtgggcagtctctgggggaagtgcgtgttccgcaccggggaaatgtcgtggacacagtaatt

SEQ ID NO: 380150 - DNA, 75 bp, synthetic construct
  source 1..75: mol_type = other DNA
aacggctgcgtctgtggccagtctctgggggaagtgcgtgttccgcaccggggaaatgtcgtggagacagtaatt

SEQ ID NO: 380151 - DNA, 75 bp, synthetic construct
  source 1..75: mol_type = other DNA
ctgccagacccgtgtgcgcgacccgggccgccggggatacacaaaacacaagctgcgtctgcggcgggccggaga

SEQ ID NO: 380152 - DNA, 75 bp, synthetic construct
  source 1..75: mol_type = other DNA
gaaggggcttacgaggtggtgggtgtgtttgaccggatggaggacaagcgtgatgccatgcagtcgctgctactg

SEQ ID NO: 380153 - DNA, 75 bp, synthetic construct
  source 1..75: mol_type = other DNA
gaaggggcttacgaggtggtgggagtgtttgaccggattgaggacaagcgtgatgccatgcagtcgctgctactg

SEQ ID NO: 380154 - DNA, 75 bp, synthetic construct
  source 1..75: mol_type = other DNA
gagctggcgcaacaccaggaaggtgtgttggatatcattcaacgggcgggtattagtgtgctgtggaatgacaac

SEQ ID NO: 380155 - DNA, 75 bp, synthetic construct
  source 1..75: mol_type = other DNA
agaagccgaaagggttcctggcgtatgaatccaccgatgaaaccgataaggtccgggcgttcggcaaacttcagc

SEQ ID NO: 380156 - DNA, 75 bp, synthetic construct
  source 1..75: mol_type = other DNA
gcacggcttccggatgggttggcgagactgacgcgcgctcccagactgccacctcaaaactgggcctgattgaac

SEQ ID NO: 380157 - DNA, 75 bp, synthetic construct
  source 1..75: mol_type = other DNA
gcctttacctccggcgatggcaccaagaagccgaaagggttcctggcgtatgaatccacggatgaaaccgataag

SEQ ID NO: 380158 - DNA, 75 bp, synthetic construct
  source 1..75: mol_type = other DNA
gctgagctggaaaatctcaaaaacgatcttgaggctgagctggctgaagtcaagcgtccggcaggtggcacgcaa

SEQ ID NO: 380159 - DNA, 75 bp, synthetic construct
  source 1..75: mol_type = other DNA
tccttacaccaacaaaccgtttgtgggcttttataccaccaaacgaaccggcggtatgctggtggattctcaggc

SEQ ID NO: 380160 - DNA, 75 bp, synthetic construct
  source 1..75: mol_type = other DNA
atggctgatgttaaagatgtggaacaggtcgcgcaggagttgcagcggaagtttgacgattttaaggcaaaaaac

SEQ ID NO: 380161 - DNA, 75 bp, synthetic construct
  source 1..75: mol_type = other DNA
ggggcgtgaagacggcctgcgtgagctggagcgtaaggcgctgcaggtgggcaatgatgaagatggcggttatgc

SEQ ID NO: 380162 - DNA, 75 bp, synthetic construct
  source 1..75: mol_type = other DNA
cctggatcaacagcgagctggcaaccgaatttgccgaacaggaagaaattgcctttaccaccggcgatggtacca

SEQ ID NO: 380163 - DNA, 75 bp, synthetic construct
  source 1..75: mol_type = other DNA
catcaataacctgcagggtgatggcgtgattgtcttacacaccatcggcagccacggcccgacctattacaaccg

SEQ ID NO: 380164 - DNA, 75 bp, synthetic construct
  source 1..75: mol_type = other DNA
gctgggtcagccttcttctctggcagggtatggcatcgttgagaatgagcagatgccggatattgccgccgatgc

SEQ ID NO: 380165 - DNA, 75 bp, synthetic construct
  source 1..75: mol_type = other DNA
aaaaaccaaaaggttttctggcttatgagtccaccgatgaagatgacaaaacccgtaagtttggcaaacttcagc

SEQ ID NO: 380166 - DNA, 75 bp, synthetic construct
  source 1..75: mol_type = other DNA
actatctgtggcgtccggggctggaactggggcagccttcttctctgctggggtacggtattgctgaaaacgaac

SEQ ID NO: 380167 - DNA, 75 bp, synthetic construct
  source 1..75: mol_type = other DNA
tggtacatcagtattcagacagaaagtgaagtatccactccggttcacccttcagcatcaatggtcgggctggat

SEQ ID NO: 380168 - DNA, 75 bp, synthetic construct
  source 1..75: mol_type = other DNA
ctattgtgtcgccgtcaatggtgctgccggaaatgatcgtgcaacagagcatggcttccggggcgtttgaagtcc

SEQ ID NO: 380169 - DNA, 75 bp, synthetic construct
  source 1..75: mol_type = other DNA
ccgaaccggtagttcggttgaatgtggaatcgcgcggtgatgtgccgctgatggaagaaaaaacaaaacttattc

SEQ ID NO: 380170 - DNA, 75 bp, synthetic construct
  source 1..75: mol_type = other DNA
ctcgctgcggttattaaaacgcgcggtaacgtcgttcaaattttcaaagtatcgaggtctaaacatggagattaa

SEQ ID NO: 380171 - DNA, 75 bp, synthetic construct
  source 1..75: mol_type = other DNA
tgtttgtgctgtgtgcagcgttcaatgcgtggttgttaccggcatggaaactctccactgtacgcacgcccgttc

SEQ ID NO: 380172 - DNA, 75 bp, synthetic construct
  source 1..75: mol_type = other DNA
ttgatgatgcaggacagtgccggtgcggtcattggcgcattgttggggagctggctgttgcaatacgactttcgc

SEQ ID NO: 380173 - DNA, 75 bp, synthetic construct
  source 1..75: mol_type = other DNA
atcccattccaggctcgctatgttgctgtaggtggtgcagctggtgctggtgttgccaacgccgacgccaccttt

SEQ ID NO: 380174 - DNA, 75 bp, synthetic construct
  source 1..75: mol_type = other DNA
atgattttgaacaattacagtcgcttgccgatcgtcggctttatctcgctaaacaggcagggcgtaatcgggttt

SEQ ID NO: 380175 - DNA, 75 bp, synthetic construct
  source 1..75: mol_type = other DNA
atcgataaaaacctcgatggtgagtatcagctctatgacagtaagctgagattattgacctcttccaatcctgac

SEQ ID NO: 380176 - DNA, 75 bp, synthetic construct
  source 1..75: mol_type = other DNA
cggtattcctaacccgctactgccggaatgtcgcgacgacacccgcaatgcggtcatcaaacacggcgcggatat

SEQ ID NO: 380177 - DNA, 75 bp, synthetic construct
  source 1..75: mol_type = other DNA
ccagcgaaaccttaaaactggcgctggcaaaaggtttacaggatgcgggcgttgacgtgctggatatcggtatgt

SEQ ID NO: 380178 - DNA, 75 bp, synthetic construct
  source 1..75: mol_type = other DNA
ggtcgctatcagcaaatcaacctgcgtgacgcttacgttgatcacctgttcggttatatcaatgtcaaaaacctc

SEQ ID NO: 380179 - DNA, 75 bp, synthetic construct
  source 1..75: mol_type = other DNA
ggatttatctgaggtcattatcaacgctgtcatgcttgctgcggttattaaaacgcgcggtaacgtcgtgcagat

SEQ ID NO: 380180 - DNA, 75 bp, synthetic construct
  source 1..75: mol_type = other DNA
atgcgtgaccagaacgttatttttggacgtaatgcggtatccactgatggtgctcaggccttgctccgtcaggac

SEQ ID NO: 380181 - DNA, 75 bp, synthetic construct
  source 1..75: mol_type = other DNA
attgttgttggaacatggcgatgtggtggtatggggcggtgaatcgcggctgttttatcacggcattcaaccgct

SEQ ID NO: 380182 - DNA, 75 bp, synthetic construct
  source 1..75: mol_type = other DNA
acagcagtacaggcatgtggattcatatgcgtgaccagaacgttattatgggacgtaatgcggtatccactgatg

SEQ ID NO: 380183 - DNA, 75 bp, synthetic construct
  source 1..75: mol_type = other DNA
aaccccctccttctttggacttgggggtggcgttaacagcgaagacggcgacacgattctggtcgttttgattac

SEQ ID NO: 380184 - DNA, 75 bp, synthetic construct
  source 1..75: mol_type = other DNA
aggctggtaacgccgtccaaaagacaggcgataccttatccggtggacttacttttgaaaacgactcaatcctcg

SEQ ID NO: 380185 - DNA, 75 bp, synthetic construct
  source 1..75: mol_type = other DNA
gaatgcctgcatatcatccctacacgagagaatgagggagaaaatggtgatatagggccactacgcccctttacg

SEQ ID NO: 380186 - DNA, 75 bp, synthetic construct
  source 1..75: mol_type = other DNA
attcctgttcgtgtcgtctatgcaatctggttacgcacgccaatggctgtggatttatctgaggtcattatcaat

SEQ ID NO: 380187 - DNA, 75 bp, synthetic construct
  source 1..75: mol_type = other DNA
ttatcaccaatgcagctatctgtactggcatagcagttcgcgttgtcactttccagcgtaacggatctcaacacc

SEQ ID NO: 380188 - DNA, 75 bp, synthetic construct
  source 1..75: mol_type = other DNA
gtgggtctgcggtcgctgttccgcgagtttgtttattccaacctgcgtgaacttactgttcaccacattgatcac

SEQ ID NO: 380189 - DNA, 75 bp, synthetic construct
  source 1..75: mol_type = other DNA
cattgcaatccgagtgcttctgttccgccgtgacgggtcacgccatcgctggtggggtggatggctcgcatacct

SEQ ID NO: 380190 - DNA, 75 bp, synthetic construct
  source 1..75: mol_type = other DNA
tcattgccaatgcggttatctgttctgcgatagcaatccgcgtcggaaccttccggcgtaatggatcgcaacacc

SEQ ID NO: 380191 - DNA, 75 bp, synthetic construct
  source 1..75: mol_type = other DNA
gtgatgttcgccgcggtgctgaagacgcgcggcaacgtcgtgcaaatcttcaagatatcgaggtcgcaacatgga

SEQ ID NO: 380192 - DNA, 75 bp, synthetic construct
  source 1..75: mol_type = other DNA
tattacggctatgtcacccaaccctggtttatcggccattcgcaacgagaaaatcgtcaccgcgcggtacgctgg

SEQ ID NO: 380193 - DNA, 75 bp, synthetic construct
  source 1..75: mol_type = other DNA
tctgacccgtgaaggtggacatagtcaccgtcgtattcttcatgccgccgacgccaccggtagagaagtagaaac

SEQ ID NO: 380194 - DNA, 75 bp, synthetic construct
  source 1..75: mol_type = other DNA
cgcgttgaggatcctgacgagctggtggtactccaacataactggcatgagctgcgtctgtttatgtgggattac

SEQ ID NO: 380195 - DNA, 75 bp, synthetic construct
  source 1..75: mol_type = other DNA
gtccgttaaactcaggctacctcagggttgtaggcgcgtgggtatggaaccgaaataaagaaacggtggaaacct

SEQ ID NO: 380196 - DNA, 75 bp, synthetic construct
  source 1..75: mol_type = other DNA
agccgaacggtaaagagagctaccatctgacgcgggaaggcgggcacagccatcgccgcattctccatgccgccg

SEQ ID NO: 380197 - DNA, 75 bp, synthetic construct
  source 1..75: mol_type = other DNA
ggccaaatggcgaagagagctaccatctgacccgtgaaggtggacatagtcaccgtcgtattcttcatgccgccg

SEQ ID NO: 380198 - DNA, 75 bp, synthetic construct
  source 1..75: mol_type = other DNA
gtgatgtgttgattattggtagcggtgccgccgggctttcactggcgctacgtctggcggataagcatcaagtca

SEQ ID NO: 380199 - DNA, 75 bp, synthetic construct
  source 1..75: mol_type = other DNA
ggaagacacattgattgccggggctggtatttgcgatcgccatgcagttgaatttgtcgccagcaatgcacgatc

SEQ ID NO: 380200 - DNA, 75 bp, synthetic construct
  source 1..75: mol_type = other DNA
acgcgcatatgcctggggccgtgtccattatttcattatcgaacatgcaccaatggctgagctggtcgctattga

SEQ ID NO: 380201 - DNA, 75 bp, synthetic construct
  source 1..75: mol_type = other DNA
agccggaagagtttaaagcagtgcgcacagtccaggatgtcgtagaggctgtagaacgcctgctacaagaagcct

SEQ ID NO: 380202 - DNA, 75 bp, synthetic construct
  source 1..75: mol_type = other DNA
tagtgattcaacataactggcacgagttacgcctgtttatgtgggattacgttgggattgtgcgcacaaccaagc

SEQ ID NO: 380203 - DNA, 75 bp, synthetic construct
  source 1..75: mol_type = other DNA
ccggtaacggaaggttcaacattttatgcccagggcggtattgccgccgtgtttgatgaaactgacagcattgac

SEQ ID NO: 380204 - DNA, 75 bp, synthetic construct
  source 1..75: mol_type = other DNA
ggcggaattgccgccgtgtttgatgaaactgacagtatcgactcgcatgtggaagatacattaattgccggtagc

SEQ ID NO: 380205 - DNA, 75 bp, synthetic construct
  source 1..75: mol_type = other DNA
gctgaatgattccaaaaagctgagcgaaaaacgccgtctggcgctctgtgaagagatcaaagagaaagcgttgag

SEQ ID NO: 380206 - DNA, 75 bp, synthetic construct
  source 1..75: mol_type = other DNA
atgaagttaaaattcatctccatggctgtattttcagctctgaccctgggtgttgcgacaagtgcgtctgccgca

SEQ ID NO: 380207 - DNA, 75 bp, synthetic construct
  source 1..75: mol_type = other DNA
cccgacggtggagcggcaattacagcggattatattctcactcgaacgggaagcccgggagaaagcggacaaagt

SEQ ID NO: 380208 - DNA, 75 bp, synthetic construct
  source 1..75: mol_type = other DNA
tgagctttcgttttcttaacgtcagcccgacggtggagcggcaattacagcggattatattctcactcgaacggg

SEQ ID NO: 380209 - DNA, 75 bp, synthetic construct
  source 1..75: mol_type = other DNA
atggaaaaccagagctggttgaaaaaactcgcacgccgcctggggcctggtcatgtcgttaatctctgctttatc

SEQ ID NO: 380210 - DNA, 75 bp, synthetic construct
  source 1..75: mol_type = other DNA
gggggtaagtagcagcgaggaaaccggtgattatgattttgaacaactccagtcactggccgaccgtcggcttta

SEQ ID NO: 380211 - DNA, 75 bp, synthetic construct
  source 1..75: mol_type = other DNA
accgcgcggtacgctggtttacttcgcaaccggaacacgccagcaatactgaaccgcaggttaccgtcagtgttc

SEQ ID NO: 380212 - DNA, 75 bp, synthetic construct
  source 1..75: mol_type = other DNA
ttactgttgaacaactacagcagagtgaatacttgcagcttccggcatttatcaccgtaccgcctcccaccttat

SEQ ID NO: 380213 - DNA, 75 bp, synthetic construct
  source 1..75: mol_type = other DNA
ctgcgtctatcctggcgaaagtgacgcgcgacgccgaaatggcggcgctggatattgttttcccgcaatatggtt

SEQ ID NO: 380214 - DNA, 75 bp, synthetic construct
  source 1..75: mol_type = other DNA
gatagccgcgtgccggaaatcagcgccgcgtctattctggcgaaagtaacgcgtgacgctgaaatggcagcgctg

SEQ ID NO: 380215 - DNA, 75 bp, synthetic construct
  source 1..75: mol_type = other DNA
gcgcttcgcacagattgaagtcaacatgggacaatggggcgtttttcactttgacgcccagttactgaccatcag

SEQ ID NO: 380216 - DNA, 75 bp, synthetic construct
  source 1..75: mol_type = other DNA
gacggtggagcggcaattacagcggattattttctctctcgagcgggaagcccgggagaaagcggacaaagtacg

SEQ ID NO: 380217 - DNA, 75 bp, synthetic construct
  source 1..75: mol_type = other DNA
gcttccgttttcttaacgtcagcccgacggtggagcggcaattacagcggattattttctctctcgagcgggaag

SEQ ID NO: 380218 - DNA, 75 bp, synthetic construct
  source 1..75: mol_type = other DNA
cgaaaagctggagtacaagaccagtagcgcccgtaaactacagacaggcgcagtcaaccagcaccatattttggc

SEQ ID NO: 380219 - DNA, 75 bp, synthetic construct
  source 1..75: mol_type = other DNA
cacgcatcagtaaagaaatcatcgatttctatatcgatcagggtgttaatcgtattggttttattggcggtgaag

SEQ ID NO: 380220 - DNA, 75 bp, synthetic construct
  source 1..75: mol_type = other DNA
tatgaaaaggctcgcgatggtcgcgcgctgccgctgttagtcttcgttcccagcaaattaaaactgcgcggcaca

SEQ ID NO: 380221 - DNA, 75 bp, synthetic construct
  source 1..75: mol_type = other DNA
cgattccattgctatcggcgtactgcgggcaattcatgaacgtggcctgaacatcccacaggatatttcgcttat

SEQ ID NO: 380222 - DNA, 75 bp, synthetic construct
  source 1..75: mol_type = other DNA
cgactgaaacaagtggtacgcgaagaggatatctggcgcggcggtttttccagttcgtcgggctatgaactggca

SEQ ID NO: 380223 - DNA, 75 bp, synthetic construct
  source 1..75: mol_type = other DNA
tcgaagctggcgtatccctggcgacagtatccagggtcttaaatgacgatccaacgctgaatgtgaaggaagaaa

SEQ ID NO: 380224 - DNA, 75 bp, synthetic construct
  source 1..75: mol_type = other DNA
ttatttatgtggatgattttgcttggcggtgtatatactgcgggtttaaaaaaacatctggccattgatttgttg

SEQ ID NO: 380225 - DNA, 75 bp, synthetic construct
  source 1..75: mol_type = other DNA
ccgtcaccaccgccgacattctgacgccgcgacgccgggaggattacggtaaggacctgtggagcgcatatcaga

SEQ ID NO: 380226 - DNA, 75 bp, synthetic construct
  source 1..75: mol_type = other DNA
ggcgctggcacaggcggcactgacttaccgttatggtgacgaacatcagcccgtcaccaccgccgacattctgac

SEQ ID NO: 380227 - DNA, 75 bp, synthetic construct
  source 1..75: mol_type = other DNA
gggaagtgcgtgttccgccccggggaaatgtggtggacagagtcattgaaggggcttacgaagtggtgggcgttt

SEQ ID NO: 380228 - DNA, 75 bp, synthetic construct
  source 1..75: mol_type = other DNA
agcatcgacaccgacattaagctcaaccgcgcattgtgggtgatggcggaaaccctgctggagagcctgcgctga

SEQ ID NO: 380229 - DNA, 75 bp, synthetic construct
  source 1..75: mol_type = other DNA
taatgcctgtcagtggggttattctggtttggtattcagtaatgaatattatcgacaactatcgtaaacggaatt

SEQ ID NO: 380230 - DNA, 75 bp, synthetic construct
  source 1..75: mol_type = other DNA
ttacgaggtggtgggcgtgtttgaccggatagaggagaagcatgatgccatgcagtcgctggtcctgtcgccacc

SEQ ID NO: 380231 - DNA, 75 bp, synthetic construct
  source 1..75: mol_type = other DNA
atgcgccatgtaccgagtatttttggggaaaaccgacatacctctcgcagtgaacactatgcgtacattcccact

SEQ ID NO: 380232 - DNA, 75 bp, synthetic construct
  source 1..75: mol_type = other DNA
accgccgacattctgaccccacgacgccgggaggattacggtaaggacctgtggagtacttatcagaccatccag

SEQ ID NO: 380233 - DNA, 75 bp, synthetic construct
  source 1..75: mol_type = other DNA
tcaccagtcagacggcgggagtcagtacagtcactgccagcatcaacagcagcagtcagagccgggatgtgacat

SEQ ID NO: 380234 - DNA, 75 bp, synthetic construct
  source 1..75: mol_type = other DNA
cacgctgcagctgcgtctggaagtcgacaacgccgacgaggcgctaaaaccgggaatgaacgcctggttgcaact

SEQ ID NO: 380235 - DNA, 75 bp, synthetic construct
  source 1..75: mol_type = other DNA
gggaaggctttcagccgttcttcgcctgccagacccgtgtgcgcgacccgggccgccggggatacaccaaacaca

SEQ ID NO: 380236 - DNA, 75 bp, synthetic construct
  source 1..75: mol_type = other DNA
agggctttcagcccttcttcgcctgtcagacccgcgtacgtgacccgggccgccgggaatacaccaaacacatgc

SEQ ID NO: 380237 - DNA, 75 bp, synthetic construct
  source 1..75: mol_type = other DNA
cacaggcggcactgacttaccgttatggtgacgaacatcagcggccacaacagcggacatccttacgcaacgacg

SEQ ID NO: 380238 - DNA, 75 bp, synthetic construct
  source 1..75: mol_type = other DNA
cacaggcggcactgacttaccgttatggtgacgaacatcagctgccacaacagcggacatcctaacgcaacgacg

SEQ ID NO: 380239 - DNA, 75 bp, synthetic construct
  source 1..75: mol_type = other DNA
accgtgctggaaagtctgcagcgggaaggttttcagcccttcttcgcctgccagacccgcgtacgtgacccgggc

SEQ ID NO: 380240 - DNA, 75 bp, synthetic construct
  source 1..75: mol_type = other DNA
agtcgttttggttatgcgaaccagatacgccgtgaccgtccgctgacacacgaagaactgatgcactatgtaccc

SEQ ID NO: 380241 - DNA, 75 bp, synthetic construct
  source 1..75: mol_type = other DNA
tccggtcgcagtgcaaaaggaaaacgtatccatacccgggccattcacagcattgataccgacattaagctcaat

SEQ ID NO: 380242 - DNA, 75 bp, synthetic construct
  source 1..75: mol_type = other DNA
gtggagtacttatcagaccattcaggagaatatgctgaaaggcgggatttccggtcgcagtgcaaaaggaaaacg

SEQ ID NO: 380243 - DNA, 75 bp, synthetic construct
  source 1..75: mol_type = other DNA
tatcagaccatccaggaaaatatgctgaaaggcgggatttccggtcgcagcgctaaaggaaaacgtatccacacc

SEQ ID NO: 380244 - DNA, 75 bp, synthetic construct
  source 1..75: mol_type = other DNA
tgagcgttatacctatatacccaccatctccctgctcgacagcctacagcgagaaggcttccagccattctttgc

SEQ ID NO: 380245 - DNA, 75 bp, synthetic construct
  source 1..75: mol_type = other DNA
gtataaaccagatacgacgtgaccggcctctaacctacgaagagctgatgagtcatgtccccagcgtgttcggga

SEQ ID NO: 380246 - DNA, 75 bp, synthetic construct
  source 1..75: mol_type = other DNA
atgccgcactgaagtatcgatttggtgaggagcaccagccggtcacggtatcgcagttgctgactccgcgtcgtc

SEQ ID NO: 380247 - DNA, 75 bp, synthetic construct
  source 1..75: mol_type = other DNA
tccctgctcgacagcctgcagcgggaaggcttccagccattttttgcctgtcagacacgggtacgtgacccccgt

SEQ ID NO: 380248 - DNA, 75 bp, synthetic construct
  source 1..75: mol_type = other DNA
gtataaatcagatacgccgtaaccgccccttgacacgtgaagaattaaagcaggtcgtccccagcgtattcgggg

SEQ ID NO: 380249 - DNA, 75 bp, synthetic construct
  source 1..75: mol_type = other DNA
gattttgtggattaaccgaccctgttaaaaaacatggcaccggcaatggaggtcatccccgttatcgctgtcagg

SEQ ID NO: 380250 - DNA, 75 bp, synthetic construct
  source 1..75: mol_type = other DNA
ctgctatcagcggtgtgctgcaagcggatgcgtacgccggttcacacgagccgttcgcaatggtcggataacgga

SEQ ID NO: 380251 - DNA, 75 bp, synthetic construct
  source 1..75: mol_type = other DNA
ggtgcttacgaagtggtgggcgtgtttgacctgattgaggaaaagcgtgatgccatgcagtcgctgatgctgccg

SEQ ID NO: 380252 - DNA, 75 bp, synthetic construct
  source 1..75: mol_type = other DNA
gtatccacacccgtgccattcacagcatcgacaccgatattaagctcaaccgcgcattgtgggtgatggcagaaa

SEQ ID NO: 380253 - DNA, 75 bp, synthetic construct
  source 1..75: mol_type = other DNA
gagaagtgcgggtatcgcataaaggcaatgtcgtcgagaaggtgattgaaggggcttacgaagtgctcggtgtct

SEQ ID NO: 380254 - DNA, 75 bp, synthetic construct
  source 1..75: mol_type = other DNA
atggagcacatttaaccgtgtccaggaaaatatgattaaaggtggtattcctgccagaacaaaaaccggaaagaa

SEQ ID NO: 380255 - DNA, 75 bp, synthetic construct
  source 1..75: mol_type = other DNA
atgacatttttcttatattccccggtaacgccagatgtcgactcgcttaaccgcatcgcggaagatgcgcactat

SEQ ID NO: 380256 - DNA, 75 bp, synthetic construct
  source 1..75: mol_type = other DNA
gggctggtctgcggcgagtcgtttggtgaagtacgggtaccgcataaaggcaatgtggtggagaaagtgattgaa

SEQ ID NO: 380257 - DNA, 75 bp, synthetic construct
  source 1..75: mol_type = other DNA
taatcatattaagtgtaaaataactaaacttaatgaagaaaggttctcttatgttccccccggaggggggtggaa

SEQ ID NO: 380258 - DNA, 75 bp, synthetic construct
  source 1..75: mol_type = other DNA
gaaaaagatatccagctggtttatggggccgccaataatacgaaaatcaatcctggcggagaacagcatatataa

SEQ ID NO: 380259 - DNA, 75 bp, synthetic construct
  source 1..75: mol_type = other DNA
ttggtgaggtacgtgtgccacataaaggcaatgtggtggagaaagtcattgacggggcttacgaagtgctgggga

SEQ ID NO: 380260 - DNA, 75 bp, synthetic construct
  source 1..75: mol_type = other DNA
ggggagacgtagtggagaaagttattgaaggggcttacgaggtggtgggcgtgtttgaccggatagaggagaagc

SEQ ID NO: 380261 - DNA, 75 bp, synthetic construct
  source 1..75: mol_type = other DNA
acgttaatccgtcgttgattaacgaagttgctgaagaaatcgcgcgccttgagaatctcattaccgctgaagagc

SEQ ID NO: 380262 - DNA, 75 bp, synthetic construct
  source 1..75: mol_type = other DNA
aactaacgtgcatcgaaagtttttgtggtgccgggggtatgtccctcggattaaaacaagcaggttttgatgtta

SEQ ID NO: 380263 - DNA, 75 bp, synthetic construct
  source 1..75: mol_type = other DNA
attctacttaacagccatgacggctcatcaagctaccagatgctgccggggctgtttcgtggcgtctgtaccaac

SEQ ID NO: 380264 - DNA, 75 bp, synthetic construct
  source 1..75: mol_type = other DNA
aaatgtggtggacagagtcattgaaggggcttacgaggtagtaggggtgtttgaccggattgaggaaaagcgtga

SEQ ID NO: 380265 - DNA, 75 bp, synthetic construct
  source 1..75: mol_type = other DNA
ggcaggatgaatccggcgatctgtggacgacctaccagcgtattcaggagaacctgatcaaaggtggtttaaacg

SEQ ID NO: 380266 - DNA, 75 bp, synthetic construct
  source 1..75: mol_type = other DNA
agtgtcaccagccagacggcgggcaccagtacagtcaccgccagcatcaacaacagcagccagagccagaatgtc

SEQ ID NO: 380267 - DNA, 75 bp, synthetic construct
  source 1..75: mol_type = other DNA
ctgccgttgtagatggcggtacaattcactttgaaggcgaactggtgaatgttgcctgttcagtgaatactgact

SEQ ID NO: 380268 - DNA, 75 bp, synthetic construct
  source 1..75: mol_type = other DNA
ccgccggcacagcaggcgtttgccagagccgccctgacgtaccgctttggggaagagcaccagccggtgacggaa

SEQ ID NO: 380269 - DNA, 75 bp, synthetic construct
  source 1..75: mol_type = other DNA
ccgtccattaacccgagaggaactgtttcgagtggtgcccagcgtattcagcgaggacaaacacgaatcccgcag

SEQ ID NO: 380270 - DNA, 75 bp, synthetic construct
  source 1..75: mol_type = other DNA
gaatgcgatgcagtcgttgctgttgccacccccggcacagcaggcactggcaaaagccgcgctgacgtaccgctt

SEQ ID NO: 380271 - DNA, 75 bp, synthetic construct
  source 1..75: mol_type = other DNA
taccggccatcaggtgccggaaatcattctacttaacagccatgacggctcatcaagctaccagatgctgccggg

SEQ ID NO: 380272 - DNA, 75 bp, synthetic construct
  source 1..75: mol_type = other DNA
atgacccgtctggcttcgcgctttggcgctgcaaatcttattcgccgtgaccgtccgttaacccgtgaagagtta

SEQ ID NO: 380273 - DNA, 75 bp, synthetic construct
  source 1..75: mol_type = other DNA
atgacccgtctggcttcgcgctttggcgcatcaaatcttatccgtcgtgaccgtccgttaacccgcgaagagcta

SEQ ID NO: 380274 - DNA, 75 bp, synthetic construct
  source 1..75: mol_type = other DNA
atgacccgtctggcttcgcgctttggcgcagcaaatcttatccgtcgtgaccgtccgttaactcatgaagagttg

SEQ ID NO: 380275 - DNA, 75 bp, synthetic construct
  source 1..75: mol_type = other DNA
gtgcataaaggctggcatattcagtacaacatcgtttcccgcgaaacgctgctggaggcgaaaaacatccggatc

SEQ ID NO: 380276 - DNA, 75 bp, synthetic construct
  source 1..75: mol_type = other DNA
ctcggtattgaaccgcaggacgcttacgactacgcagcgattggttgtatcgaaaccgccgtcggcggcaaatgg

SEQ ID NO: 380277 - DNA, 75 bp, synthetic construct
  source 1..75: mol_type = other DNA
tatcgtttggtcgtatggaccagtatctctatccgtactatcgccgcgacgttgaactcaaccagacgctggatc

SEQ ID NO: 380278 - DNA, 75 bp, synthetic construct
  source 1..75: mol_type = other DNA
ggatgcgtctgtggtcagtctctgggggaggtgcgtgttccgcatcggggaaatgtggtggacagagtcattgaa

SEQ ID NO: 380279 - DNA, 75 bp, synthetic construct
  source 1..75: mol_type = other DNA
attctgctcaactcccatgacggtacctccagctaccagatgctgccgggttacttcagattcgtctgccagaac

SEQ ID NO: 380280 - DNA, 75 bp, synthetic construct
  source 1..75: mol_type = other DNA
attactgttcttaaaaatctgcagcgtgaaggctttcagcctttctttgcctgccagacccgtgttcgtgaccct

SEQ ID NO: 380281 - DNA, 75 bp, synthetic construct
  source 1..75: mol_type = other DNA
ttgtccccgcgatgttttgcgggtgaagcaattcttcgagcgacttcatgtcgcacctacacctatatacccacc

SEQ ID NO: 380282 - DNA, 75 bp, synthetic construct
  source 1..75: mol_type = other DNA
ggaggggggctgacggaaaagtgccaatacagcaactcgtcggcagcctaccctacgtgcgtctgtggccagtct

SEQ ID NO: 380283 - DNA, 75 bp, synthetic construct
  source 1..75: mol_type = other DNA
tcgtcggcagcctaccctacatgcgtctgtggtcagtctctgggggaagtgcgtgttccgcatcggggaaatgtg

SEQ ID NO: 380284 - DNA, 75 bp, synthetic construct
  source 1..75: mol_type = other DNA
aaaaaactgctcgataacgccgcagaaccttatcgcattaaaactgtgcgtaacaaaggctatctttttgcgcct

SEQ ID NO: 380285 - DNA, 75 bp, synthetic construct
  source 1..75: mol_type = other DNA
aacggctgcgtctgtggtcagtctctgggggaagtgcgtgttccgcaccggggaaatgtcgtggaaacagttatt

SEQ ID NO: 380286 - DNA, 75 bp, synthetic construct
  source 1..75: mol_type = other DNA
aacggctgcgtctgtggacagtctctgggggaagtgcgtgttccgcaccggggaaatgtcgtggatacagttatt

SEQ ID NO: 380287 - DNA, 75 bp, synthetic construct
  source 1..75: mol_type = other DNA
aggaaaacgtatccatacccgtgccattcacagcatcgacaccgacattaagctcaaccgcgcattgtgggtgat

SEQ ID NO: 380288 - DNA, 75 bp, synthetic construct
  source 1..75: mol_type = other DNA
cacacatacccgcgctattaaggggatcgatggcgatgtgaagcttaatcgagccctgtgggtgatggcagagaa

SEQ ID NO: 380289 - DNA, 75 bp, synthetic construct
  source 1..75: mol_type = other DNA
gattactggcaaacaagtgccagaaataatcctgcttaacagccatgacggctccagttcatatcaaatgctgcc

SEQ ID NO: 380290 - DNA, 75 bp, synthetic construct
  source 1..75: mol_type = other DNA
ctgtcagaccagagtgcgtgacccaggtcgccgcgatcacacaaagcacatgctgcgcctgcgccgagaagggca

SEQ ID NO: 380291 - DNA, 75 bp, synthetic construct
  source 1..75: mol_type = other DNA
tggtggacaccactttgtctaattcgtcagattctgaccagacggttcaggctgtacgcttacgtaagtaaaaac

SEQ ID NO: 380292 - DNA, 75 bp, synthetic construct
  source 1..75: mol_type = other DNA
ggggcttacgaggtggtgggcgtttttgaccggatagaggagaagcgtgatgccatgcagtcgctggtcctgccg

SEQ ID NO: 380293 - DNA, 75 bp, synthetic construct
  source 1..75: mol_type = other DNA
tgacgaacatcaacccgtcaccactgctgacattctgacaccgcgacgccgggaggattacggtaaggacctgtg

SEQ ID NO: 380294 - DNA, 75 bp, synthetic construct
  source 1..75: mol_type = other DNA
gaccttatcgcccaccagccgccgcagacgttctggcaggcgctgcaactgtgctacttcatccagttgattttg

SEQ ID NO: 380295 - DNA, 75 bp, synthetic construct
  source 1..75: mol_type = other DNA
ttacttcagattcgtctgccagaacggctgcgtctgcggtcagtctctgggggaagtgcgtgttccacaccgggg

SEQ ID NO: 380296 - DNA, 75 bp, synthetic construct
  source 1..75: mol_type = other DNA
attattctgctcaactctcatgacggtacctccagctaccagatgttacccggatattttcgtgccatctgcacc

SEQ ID NO: 380297 - DNA, 75 bp, synthetic construct
  source 1..75: mol_type = other DNA
ccaccggcacgccaggcgctggcacaggcggcactgaattaccgttatggtgacgaacatcagcccgtcaccact

SEQ ID NO: 380298 - DNA, 75 bp, synthetic construct
  source 1..75: mol_type = other DNA
gggaaggcttccagccattcttcgcctgccagacccatgtgcgcgacccgggccgtcggagatacaccaaacaca

SEQ ID NO: 380299 - DNA, 75 bp, synthetic construct
  source 1..75: mol_type = other DNA
gagaatatgctgaaaggcgggatttccggtcgcagtgcaaaaggaaaacgtatccacacccgtgccattcacagc

SEQ ID NO: 380300 - DNA, 75 bp, synthetic construct
  source 1..75: mol_type = other DNA
caccaccgccgacattctgacaccacgacgccgggaggattacggtaaggacctgtggagtgcttatcagaccat

SEQ ID NO: 380301 - DNA, 75 bp, synthetic construct
  source 1..75: mol_type = other DNA
catccaggagaatatgctgaaaggcgggatttccggtcgcagtgccagaggaaaacgtatccatacccgggccat

SEQ ID NO: 380302 - DNA, 75 bp, synthetic construct
  source 1..75: mol_type = other DNA
tgtttgaccggatagaggagaagcttgatgccatgcagtcgctggtcctgtcgccaccggcacgccaggcgctgg

SEQ ID NO: 380303 - DNA, 75 bp, synthetic construct
  source 1..75: mol_type = other DNA
ggctgcgtctgcggtcagtctctgggggaagtgcgtgttccacaccggggaaatgtggtggacagagtcattgaa

SEQ ID NO: 380304 - DNA, 75 bp, synthetic construct
  source 1..75: mol_type = other DNA
ctggcgcggatggcgtaaaaatgcagtgtgatttattgtcgtgtcagaacgctggctggcaaggagtgacgctta

SEQ ID NO: 380305 - DNA, 75 bp, synthetic construct
  source 1..75: mol_type = other DNA
gatctccgcacagcggttgcaggctatttctggcgtcggagcctttagtttcaatacgttatataagttggtgtg

SEQ ID NO: 380306 - DNA, 75 bp, synthetic construct
  source 1..75: mol_type = other DNA
tggatggcgctctggtagataagcaaggcaatctgctctatccgatcattagctggaaatgtccgcgaacagcag

SEQ ID NO: 380307 - DNA, 75 bp, synthetic construct
  source 1..75: mol_type = other DNA
acttatcagaccatccaggagaatatgctgaaaggcgggatttccggccgcagtgcaaaaggaaaacgtatccac

SEQ ID NO: 380308 - DNA, 75 bp, synthetic construct
  source 1..75: mol_type = other DNA
tattgagcgagcgaaaagtatcaagcaaggcggcgcgaaatatgactgggtttctggcctgcaggttggcattgc

SEQ ID NO: 380309 - DNA, 75 bp, synthetic construct
  source 1..75: mol_type = other DNA
aaccaggcaagcgaagttcgcgccgcgccgatcttcccggaatatactgtctcgtggatcgaaaaagagattgat

SEQ ID NO: 380310 - DNA, 75 bp, synthetic construct
  source 1..75: mol_type = other DNA
cgttgattaacgaagttgctgaagaaatcgcgcgccttgagaatctcattaccgctgaagagcaagtgttgtcga

SEQ ID NO: 380311 - DNA, 75 bp, synthetic construct
  source 1..75: mol_type = other DNA
tgacctccggcgatgcgcacctggcggtgaatttcccgctactgctggaaaaagggcttgatggtctgcgtgaga

SEQ ID NO: 380312 - DNA, 75 bp, synthetic construct
  source 1..75: mol_type = other DNA
aaagggcttgatggtctgcgcgagaaagtggcggagcgccgcatgcgtattaacctgaccgtgctggaagatctg

SEQ ID NO: 380313 - DNA, 75 bp, synthetic construct
  source 1..75: mol_type = other DNA
gggcaaaatctggttgatggtcaaccgatggacgcggtgaatccactctcttacgcgatccttgaatcctgcggt

SEQ ID NO: 380314 - DNA, 75 bp, synthetic construct
  source 1..75: mol_type = other DNA
atgcaattagccagtcgttttggttatgcgaatcagatacgccgtgaccgtccgctgacatacgaagaactgatg

SEQ ID NO: 380315 - DNA, 75 bp, synthetic construct
  source 1..75: mol_type = other DNA
ttacttcaggttcgtctgtcagaacggatgcgtctgtggtcagtctctgggggaagtgcgtgttccacaccgggg

SEQ ID NO: 380316 - DNA, 75 bp, synthetic construct
  source 1..75: mol_type = other DNA
gggagggctttcagcccttcttcgcctgccagacccgtgtgcgcgacccgggccgccggggatacacaaaacaca

SEQ ID NO: 380317 - DNA, 75 bp, synthetic construct
  source 1..75: mol_type = other DNA
cgctggggaaatcgtttatctcccaggcggaagagtccattgaagaaacccagggcgtgcgcatgctggaacagc

SEQ ID NO: 380318 - DNA, 75 bp, synthetic construct
  source 1..75: mol_type = other DNA
gacagcggcagaatccttaaagcgtctgcaaacgcgtcaggccgaacgtcaagctcgcctggatgctgccgcaca

SEQ ID NO: 380319 - DNA, 75 bp, synthetic construct
  source 1..75: mol_type = other DNA
ccccctgcgcaacaggcgctggcaaaggcggcgctgacttaccgctttggcgaagagcaccagccggtgacggaa

SEQ ID NO: 380320 - DNA, 75 bp, synthetic construct
  source 1..75: mol_type = other DNA
gttatgagttaatcaacgccgactgcctggaatttatgcggtcgttacccgaaaattctgttgacctgatagtca

SEQ ID NO: 380321 - DNA, 75 bp, synthetic construct
  source 1..75: mol_type = other DNA
atattaatgttcagaacaatattgatctcgttgatggaaaaataaatccgaacaaagatacaaaagcattacaaa

SEQ ID NO: 380322 - DNA, 75 bp, synthetic construct
  source 1..75: mol_type = other DNA
tctccgtatcagtctccgtgccttataccgatgtctggatgcataaacccgttcagttctacccggggaaacatc

SEQ ID NO: 380323 - DNA, 75 bp, synthetic construct
  source 1..75: mol_type = other DNA
caacggctgaagtattggtttaaactggctgacccacaaacgcgaaatactttcctgcagtgggcggaaaaacaa

SEQ ID NO: 380324 - DNA, 75 bp, synthetic construct
  source 1..75: mol_type = other DNA
atgtttaatactgtaaaaatatccagttgtgagttgatcaacgctgactgcctggaatttatccggtcgttaccc

SEQ ID NO: 380325 - DNA, 75 bp, synthetic construct
  source 1..75: mol_type = other DNA
agtctttacctgttctgtggccatcgcctggcatctgacatcgaaataatgatgcgtgagcggtttaacgtactg

SEQ ID NO: 380326 - DNA, 75 bp, synthetic construct
  source 1..75: mol_type = other DNA
gacgtcgggcgattggtgttgagctggagaccggacgttttgagcagacagtcagggaagttcaggattttatca

SEQ ID NO: 380327 - DNA, 75 bp, synthetic construct
  source 1..75: mol_type = other DNA
tgatgcgcgcgctgccctggggataacggcaaaacagatagtggatgccacaggaaagaaaaacatggtgtcgca

SEQ ID NO: 380328 - DNA, 75 bp, synthetic construct
  source 1..75: mol_type = other DNA
atggttaacactgtaaaaatatccagttgtgagttaatcaacgctgattgcctgggatttatccagaccttaccg

SEQ ID NO: 380329 - DNA, 75 bp, synthetic construct
  source 1..75: mol_type = other DNA
gttgtgagttagtcaacgccgactgcctggaatttatccggtcgttacccgaaaattctgttgacctgatagtca

SEQ ID NO: 380330 - DNA, 75 bp, synthetic construct
  source 1..75: mol_type = other DNA
ctggtttggtaccagtcagtggcagttaccgaacgagggtgattacaacaaattgcaggcgttgttttgcgcgtg

SEQ ID NO: 380331 - DNA, 75 bp, synthetic construct
  source 1..75: mol_type = other DNA
ctcgctgaagtatctagaagagagtttgatgccctcagaataactggtagaaataaaaaaactactcagcctcag

SEQ ID NO: 380332 - DNA, 75 bp, synthetic construct
  source 1..75: mol_type = other DNA
ttttcatggggtcgggttcgacggtcaaagcatcgatggcgctgggacgtcgtgcaattggcgttgagctggaga

SEQ ID NO: 380333 - DNA, 75 bp, synthetic construct
  source 1..75: mol_type = other DNA
cgctgaaacgcctgttcacaaccaaccagtgctggacatccttcctggatgcgggcggtctgcgcgatatcgagg

SEQ ID NO: 380334 - DNA, 75 bp, synthetic construct
  source 1..75: mol_type = other DNA
cgtccgggagatctggttgcagattttttcatggggtcgggttcgacggtcaaagcagcgatggcgctgggacgt

SEQ ID NO: 380335 - DNA, 75 bp, synthetic construct
  source 1..75: mol_type = other DNA
accggcagaaatgctgcagcagataatcagcgcaagtagtcgtcctggtgatctggttgcggatttcttcatggg

SEQ ID NO: 380336 - DNA, 75 bp, synthetic construct
  source 1..75: mol_type = other DNA
acggcaaaacagattgctgatgccacaggaaagaaaaacatggtgtcgcactggttcagtgccagtcagtggcag

SEQ ID NO: 380337 - DNA, 75 bp, synthetic construct
  source 1..75: mol_type = other DNA
ggtggcagaaaaacaccagcgcggtgaactggagcagccacaccaccagctggtcagcacatacagcgaactgaa

SEQ ID NO: 380338 - DNA, 75 bp, synthetic construct
  source 1..75: mol_type = other DNA
gctgaaccggcagtatacggaactgctgagtgaatataaaaatttgcggcggtatttcggtgtgacggtgcaggt

SEQ ID NO: 380339 - DNA, 75 bp, synthetic construct
  source 1..75: mol_type = other DNA
aaaagcggcgatggcactggggcgttgtgcgattggtgttgagctggagaccggacgctttgaacagacagtcag

SEQ ID NO: 380340 - DNA, 75 bp, synthetic construct
  source 1..75: mol_type = other DNA
aaaagcggcattgtcgctgggccgcagggcgatgggtgttgagcttgagacggagcgttttcaacaaacactgaa

SEQ ID NO: 380341 - DNA, 75 bp, synthetic construct
  source 1..75: mol_type = other DNA
cgtgcaattggcgttgagctggagactgagcgttttgagcagacggtcaaggaagttcaggatttagtcagtcag

SEQ ID NO: 380342 - DNA, 75 bp, synthetic construct
  source 1..75: mol_type = other DNA
atacttgagtcattagttgtatgttacttaactgatgaggaaatagattatatcatgaagtctataaacatttat

SEQ ID NO: 380343 - DNA, 75 bp, synthetic construct
  source 1..75: mol_type = other DNA
caggtaagaaaaatatggtttcccactggtttggtgccagtcagtggcagttgccgaatgaggctgactatcgga

SEQ ID NO: 380344 - DNA, 75 bp, synthetic construct
  source 1..75: mol_type = other DNA
aaaagcagcactttcactgggacgtcgtgcaattggcgttgaactggaagaagagagatttaatcagactgtaac

SEQ ID NO: 380345 - DNA, 75 bp, synthetic construct
  source 1..75: mol_type = other DNA
ttctacaggggaaaaacctggtggaaaatgtaggttatgtgccatggataaaatgttgcattaagctggataata

SEQ ID NO: 380346 - DNA, 75 bp, synthetic construct
  source 1..75: mol_type = other DNA
aatcagaatttcgccaccattaccgtgaaggggaacacgatcacggtgaaaggtgttgcggcaggtaaagcacag

SEQ ID NO: 380347 - DNA, 75 bp, synthetic construct
  source 1..75: mol_type = other DNA
atctggatgatgaggatgctgactgggtatccaccgggcaggggcagaaatctgccggtgataccagttttacgc

SEQ ID NO: 380348 - DNA, 75 bp, synthetic construct
  source 1..75: mol_type = other DNA
aagcttcctaagaggcatcgagaggcgagggtttcacatgatcttagagtcgcaaaagcaagatccagcagcatt

SEQ ID NO: 380349 - DNA, 75 bp, synthetic construct
  source 1..75: mol_type = other DNA
ttgctggactctgttgcgaacgataaagctgccctgattgcgaaatctcgcgatacctttattcgtctgctgaac

SEQ ID NO: 380350 - DNA, 75 bp, synthetic construct
  source 1..75: mol_type = other DNA
gtgtctgaactgtctcaattatctccacagccgctgtgggatatttttgccaaaatttgttctattcctcacccg

SEQ ID NO: 380351 - DNA, 75 bp, synthetic construct
  source 1..75: mol_type = other DNA
aagtctgcaggagataccggttttacgctggcctggaaaccgggagaagaaggtcagaaatggcttataggctgg

SEQ ID NO: 380352 - DNA, 75 bp, synthetic construct
  source 1..75: mol_type = other DNA
ggtcagaatatcaccctgaccgtggctgttcagccggaaggggcgacggataaaaccttccgtgccacgtcggca

SEQ ID NO: 380353 - DNA, 75 bp, synthetic construct
  source 1..75: mol_type = other DNA
cggtgaaaggtgccggtaccactctgtgggtttataaggggaagggtgatgcttatgcgaacccgttttcagacg

SEQ ID NO: 380354 - DNA, 75 bp, synthetic construct
  source 1..75: mol_type = other DNA
cggtgaaaggttccggcaccacactatgggtgtacaccggcactggtgatgcttatgcaaacccgctgtcagacg

SEQ ID NO: 380355 - DNA, 75 bp, synthetic construct
  source 1..75: mol_type = other DNA
gatccctgtggtgagcggaaatggtcagttcgccgcagtggctgaagtcaccgttactgaagcgggcgctgcagg

SEQ ID NO: 380356 - DNA, 75 bp, synthetic construct
  source 1..75: mol_type = other DNA
gtagcgaacgacaaagctgcattaacggcgacatctcgcgatacctttattcgtctgctgaacgccaccccgaac

SEQ ID NO: 380357 - DNA, 75 bp, synthetic construct
  source 1..75: mol_type = other DNA
ttagccagtggggccgtagcgtttataaaaaactggggcactctgaaccctggacattacatgatctacggcgaa

SEQ ID NO: 380358 - DNA, 75 bp, synthetic construct
  source 1..75: mol_type = other DNA
gagcggcacaaagcggagctacgcaaacatatttacccttacattgggaaaatggcgctcgctgactgcgaaacc

SEQ ID NO: 380359 - DNA, 75 bp, synthetic construct
  source 1..75: mol_type = other DNA
ccgcacgttgttgaacagttgctgggccattcaatgccgggagttatggcgatttataaccgtagtctgtacttg

SEQ ID NO: 380360 - DNA, 75 bp, synthetic construct
  source 1..75: mol_type = other DNA
aatcacatcatttgggcaaaaccatcgggccgctggaatggatgtaacaaagaaagcctgcgcgcgtactttcca

SEQ ID NO: 380361 - DNA, 75 bp, synthetic construct
  source 1..75: mol_type = other DNA
agtgcgaaagaaatagctgaggcaaccggaaagaaaaacatggcgtcacactggtttggtgcaagccaatggcaa

SEQ ID NO: 380362 - DNA, 75 bp, synthetic construct
  source 1..75: mol_type = other DNA
atatccgtgtcccgcttgtctggatcgatatcgacaattcacaggcgctggatggtgcatccgcgcaaagccgaa

SEQ ID NO: 380363 - DNA, 75 bp, synthetic construct
  source 1..75: mol_type = other DNA
gtgacgccgacatccggtacggtggcaaaagggaaaacaaccaccctgacggtttcttttgagccggaaagtgca

SEQ ID NO: 380364 - DNA, 75 bp, synthetic construct
  source 1..75: mol_type = other DNA
cggatgagcaagttcatatcgaaagcgttggtcattactggacgcttctgactgaactgctgaaagaaattccgg

SEQ ID NO: 380365 - DNA, 75 bp, synthetic construct
  source 1..75: mol_type = other DNA
gaccgcaaccggacaggggcagaaatccgccggagataccagcttcacgctggcgtggattgtagtggcacagta

SEQ ID NO: 380366 - DNA, 75 bp, synthetic construct
  source 1..75: mol_type = other DNA
gtaaagctgacgaagaagcatttcttcgtgatgtagcggatatggggattacggtacttgatgccgagcagtggc

SEQ ID NO: 380367 - DNA, 75 bp, synthetic construct
  source 1..75: mol_type = other DNA
aatacgaacctgccaccgggcgttggtatgtaaggggcatcaaatcaatggtcattgaggccgctgacaacatca

SEQ ID NO: 380368 - DNA, 75 bp, synthetic construct
  source 1..75: mol_type = other DNA
ggccgctgacaatatcaccatgaaaaccagtgagtttgtactggaggctgaccgcacgcgtattaacagcgaagt

SEQ ID NO: 380369 - DNA, 75 bp, synthetic construct
  source 1..75: mol_type = other DNA
taactctgtaggtgatggtataaattttgttgctgtcaggccgcgaaatatcgcatttaattacatcgtaagggc

SEQ ID NO: 380370 - DNA, 75 bp, synthetic construct
  source 1..75: mol_type = other DNA
cagccgcatggttttttctttcttgccgtgagcgaaagcattgattgtggtcggtatccggtacgcgtgttcggg

SEQ ID NO: 380371 - DNA, 75 bp, synthetic construct
  source 1..75: mol_type = other DNA
agcacaacgtgatcgtcgacgtgaaaaaggttgcagatatggaccgttttgcacgtcacatcgaggaattccgct

SEQ ID NO: 380372 - DNA, 75 bp, synthetic construct
  source 1..75: mol_type = other DNA
ggggcatcaaatcaatggtcattgagaccgctgacaagatcaccttgaaaaccagtgagtttgtgctggaggctg

SEQ ID NO: 380373 - DNA, 75 bp, synthetic construct
  source 1..75: mol_type = other DNA
ggggcatcaaatcaatggtcattgagaccgctgacaacatcaccctgaaaaccagtgagtttgttctggaggctg

SEQ ID NO: 380374 - DNA, 75 bp, synthetic construct
  source 1..75: mol_type = other DNA
ggggcatcaaatcaatggtcattgagaccgctgacaacatcaccttgaaaaccagtgagtttgtcctggaggctg

SEQ ID NO: 380375 - DNA, 75 bp, synthetic construct
  source 1..75: mol_type = other DNA
gtccgctgacaatatcaccatgaaaaccagtgagtttgtactggaggctgaccgcacgcgaattaacagcgaagt

SEQ ID NO: 380376 - DNA, 75 bp, synthetic construct
  source 1..75: mol_type = other DNA
gaccgctgacaatatcaccttgaaaaccagtgagtttgtactggaggctgaccgcacgcgcattaacagcgaagt

SEQ ID NO: 380377 - DNA, 75 bp, synthetic construct
  source 1..75: mol_type = other DNA
ggggcatcaaatcaatggtcattgagaccgctgacaagatcaccgtgaaaaccagtgagtttgttctggaggctg

SEQ ID NO: 380378 - DNA, 75 bp, synthetic construct
  source 1..75: mol_type = other DNA
gtggtcgcaaggttgataccgggcgtgcgctactttcatttcaggaagggactatcgtatccggttttgatgata

SEQ ID NO: 380379 - DNA, 75 bp, synthetic construct
  source 1..75: mol_type = other DNA
aaacgggcgaccttgaaactaactggatcagttggctgacgctgcgtgcaggaaatgcccggacatggtggcgac

SEQ ID NO: 380380 - DNA, 75 bp, synthetic construct
  source 1..75: mol_type = other DNA
caggtggtgctgctgagtctgggcggaaatctggaaaccgcctttgcgttgcccgctgtctattcgaatcagttc

SEQ ID NO: 380381 - DNA, 75 bp, synthetic construct
  source 1..75: mol_type = other DNA
tgcgccttatcaccaacctgatccgcacaggtgtagtcaccgaagtggatcggaagaaatggctgtgccgggtga

SEQ ID NO: 380382 - DNA, 75 bp, synthetic construct
  source 1..75: mol_type = other DNA
ggctgtgccgggtgaaggtaggcgagcttgaaaccaactggattaactggctgacgttacgcgccggtggtgccc

SEQ ID NO: 380383 - DNA, 75 bp, synthetic construct
  source 1..75: mol_type = other DNA
cgctggtatgtcaggggcatcaaatccatggtcattgaggccactgacaacatcaccctgaaaaccagtgagttt

SEQ ID NO: 380384 - DNA, 75 bp, synthetic construct
  source 1..75: mol_type = other DNA
aatatgaacccgccaccggacgatggtatgtcaggggcatcaaatctatggtgatcgaggcagcagacagcgtca

SEQ ID NO: 380385 - DNA, 75 bp, synthetic construct
  source 1..75: mol_type = other DNA
catcggaaggtgagcaggtggtgctgctgagtctgggcggcaatctggaaaccgcctttgcgctgcccgctgtct

SEQ ID NO: 380386 - DNA, 75 bp, synthetic construct
  source 1..75: mol_type = other DNA
gagtcagatgcgttttacggggctgaagcggggctaccgtctggcagagcaggtcctgatgcatgagccgctggc

SEQ ID NO: 380387 - DNA, 75 bp, synthetic construct
  source 1..75: mol_type = other DNA
atgataccggagatatcagttcgctcggctctacacaatacggatttggtgacgctttaacctctaatcaactgg

SEQ ID NO: 380388 - DNA, 75 bp, synthetic construct
  source 1..75: mol_type = other DNA
aaacgggcaaccttgaaaccaactggattaactggttgacgctgcgtgccgggaatgcccgcacatggtggcgac

SEQ ID NO: 380389 - DNA, 75 bp, synthetic construct
  source 1..75: mol_type = other DNA
attcgaatcagttcgcgccaccgtcgacgtcggcggaagcctgcgtgacagaacatcctgacggaggctggtttg

SEQ ID NO: 380390 - DNA, 75 bp, synthetic construct
  source 1..75: mol_type = other DNA
gctgagtctgggcggaaatctggaaaccgcctttgcgttgcccgctgtctattcgaatcagttcgcgccaccgtc

SEQ ID NO: 380391 - DNA, 75 bp, synthetic construct
  source 1..75: mol_type = other DNA
ggggcatcaaatcaatggtcattgagaccgctgacaatatcaccgtgaaaaccagtgagtttgtactggaggctg

SEQ ID NO: 380392 - DNA, 75 bp, synthetic construct
  source 1..75: mol_type = other DNA
aaccacattatctgggcgaagccgtccggacgctggaacgggtgcaataaggaaagtttacgggcatatttcccg

SEQ ID NO: 380393 - DNA, 75 bp, synthetic construct
  source 1..75: mol_type = other DNA
tgatgcgcgtgaatcactggggataacgtcgaaacagatagcagaagccaccggaaagaaaaacatggcttcgca

SEQ ID NO: 380394 - DNA, 75 bp, synthetic construct
  source 1..75: mol_type = other DNA
gatacgtatacctcactgaaccggcagtatgcggagctgctgagtgaatataaacatctgcggcggtattttggc

SEQ ID NO: 380395 - DNA, 75 bp, synthetic construct
  source 1..75: mol_type = other DNA
ggaacattatcaggggccgtaccgcccgaaagatgatggctatgaggcgaagggcagggcactgaaacagcatgt

SEQ ID NO: 380396 - DNA, 75 bp, synthetic construct
  source 1..75: mol_type = other DNA
aagccgtccggacgctggaacgggtgcaacaaggaaagcctgagggcgtatttccccgccacagagcgcattctg

SEQ ID NO: 380397 - DNA, 75 bp, synthetic construct
  source 1..75: mol_type = other DNA
gccacaggaaagaaaaacatggtgtcgcactggttcagtgccagtcagtggcagctgccgaacgaaagcgattat

SEQ ID NO: 380398 - DNA, 75 bp, synthetic construct
  source 1..75: mol_type = other DNA
ggctggaccagtgtctggcgcagttctggcgggtactgaagcctaccggaagtctttacctgttctgtggtcatc

SEQ ID NO: 380399 - DNA, 75 bp, synthetic construct
  source 1..75: mol_type = other DNA
aacattatcagggaccgtatcgctcgaaagatgatggctatgaggcgaagggcagggcactgaaacagcatgtga

SEQ ID NO: 380400 - DNA, 75 bp, synthetic construct
  source 1..75: mol_type = other DNA
atgcttaatactgtaaaaatatccagttgtgagttaatcaacgccgactgcctggaatttatccggtcgttaccc

SEQ ID NO: 380401 - DNA, 75 bp, synthetic construct
  source 1..75: mol_type = other DNA
gaaagatgatggcgatgaggcaaagggcagcgaactaaaacagcacgtcatggccccgctgatttcttactttcg

SEQ ID NO: 380402 - DNA, 75 bp, synthetic construct
  source 1..75: mol_type = other DNA
aaccacattatctgggcgaagccgtccggacgctggaacgggtgcaacaaggaaagcctgcgggcgtattttccg

SEQ ID NO: 380403 - DNA, 75 bp, synthetic construct
  source 1..75: mol_type = other DNA
gtcagtggcagctaccgaacgaaagcgattatctgaaattacagtcgctgtttgcccgggtggcagaagagaaac

SEQ ID NO: 380404 - DNA, 75 bp, synthetic construct
  source 1..75: mol_type = other DNA
gagtataaatctttgcggcgttatttttccgtatcggctgccgttccgtatacggatgtctggacgcataaatcc

SEQ ID NO: 380405 - DNA, 75 bp, synthetic construct
  source 1..75: mol_type = other DNA
ggggcatcaaatcaatggtcattgagaccgctgacaaaatcaccatgaaaaccagtgagtttgttctggaggctg

SEQ ID NO: 380406 - DNA, 75 bp, synthetic construct
  source 1..75: mol_type = other DNA
acgatgaaaaaaaatacttgctttgcaactatagaaggatgaatgcacaactaaccgaaatcatgcgccttatca

SEQ ID NO: 380407 - DNA, 75 bp, synthetic construct
  source 1..75: mol_type = other DNA
tgcgccttatcaccaacctgatccgcactggggtagtcaccgaagtggacagggaaaactggctttgccgggtga

SEQ ID NO: 380408 - DNA, 75 bp, synthetic construct
  source 1..75: mol_type = other DNA
ggggcatcaaatcaatggtcattgagaccgctgacaatatcaccttgaaaaccagtgagtttgttctggaggctg

SEQ ID NO: 380409 - DNA, 75 bp, synthetic construct
  source 1..75: mol_type = other DNA
ggggcatcaaatcaatggtcattgagaccgctgacaatatcaccatgaaaaccagtgagtttgtgctggaggctg

SEQ ID NO: 380410 - DNA, 75 bp, synthetic construct
  source 1..75: mol_type = other DNA
ggggcatcaaatcaatggtcattgagaccgctgacaaaatcaccttgaaaaccagtgagtttgtactggaggctg

SEQ ID NO: 380411 - DNA, 75 bp, synthetic construct
  source 1..75: mol_type = other DNA
tgactgaactcagcattgccggggaaatatccctggaacaactgcattcgctgctggcagaggctgtcactgatg

SEQ ID NO: 380412 - DNA, 75 bp, synthetic construct
  source 1..75: mol_type = other DNA
tccgcccggcatgtcccttcctgaatactggggagaagaacacgtatggtgggacggcagggctgcttttcatgg

SEQ ID NO: 380413 - DNA, 75 bp, synthetic construct
  source 1..75: mol_type = other DNA
aatgcactggggcgtcgtgcaattggcgttgagctggagaccggacgttttgagcagaccgcaagggatgtacag

SEQ ID NO: 380414 - DNA, 75 bp, synthetic construct
  source 1..75: mol_type = other DNA
ggcaactcgcgcacctggtggaaaccgtctgtgggggagcaggttgtgctgttcagcctgggcggcaatctggaa

SEQ ID NO: 380415 - DNA, 75 bp, synthetic construct
  source 1..75: mol_type = other DNA
tttcatcctattgtcgatcccttatcgcggcggataatcgcttttgaagccattgtgcaaaaaatgaagatagcc

SEQ ID NO: 380416 - DNA, 75 bp, synthetic construct
  source 1..75: mol_type = other DNA
cgagatccctgccgaagactcctggctttttatcgctgacggatctgataaagaacttgattcctgtgccctttc

SEQ ID NO: 380417 - DNA, 75 bp, synthetic construct
  source 1..75: mol_type = other DNA
ctgatttccccttaattagcggtgtcgatattgacaccgctcacctgaataagaaaacacttatgtttgacatga

SEQ ID NO: 380418 - DNA, 75 bp, synthetic construct
  source 1..75: mol_type = other DNA
aatgcgatattgaccacccgactcagtcaatggctgacctggcatggttacgtgaacactttggttcactggaaa

SEQ ID NO: 380419 - DNA, 75 bp, synthetic construct
  source 1..75: mol_type = other DNA
aagggctggcgtgggcggttgaacaggcagcggcatcacaagtcatgctggcggtggagattatggacaccgcgt

SEQ ID NO: 380420 - DNA, 75 bp, synthetic construct
  source 1..75: mol_type = other DNA
gacagttggcaggtattgatctgcgataggcgcggcgaagacggactgaatctgcacggaacaaccggcttgcgg

SEQ ID NO: 380421 - DNA, 75 bp, synthetic construct
  source 1..75: mol_type = other DNA
gtttattcccacattcttattatgtgaatactttaatattacaacaaacatgggggggaatggcatcgtcctttg

SEQ ID NO: 380422 - DNA, 75 bp, synthetic construct
  source 1..75: mol_type = other DNA
tcatggattcagaacgttaaaatcgacgcagagtataccctcaagggaactctatgagacgttcgccataaactg

SEQ ID NO: 380423 - DNA, 75 bp, synthetic construct
  source 1..75: mol_type = other DNA
ttcacggttgatcgaggcaagtgaaacttccgcaccggtaattgaaacaacaaaaggagcaaatattctccagga

SEQ ID NO: 380424 - DNA, 75 bp, synthetic construct
  source 1..75: mol_type = other DNA
gaactgcgtactattgtcggccctaatggcgatgcccatgtttatgagccctctcctgctgacgcgatcgctatg

SEQ ID NO: 380425 - DNA, 75 bp, synthetic construct
  source 1..75: mol_type = other DNA
attaaggcgctggcggcgcttctggccgagtacccccgcgcccgggcgtggttctcctttaccctgcgggacagc

SEQ ID NO: 380426 - DNA, 75 bp, synthetic construct
  source 1..75: mol_type = other DNA
ctcctggccggagcggctggtgctggcaaaaagctgtggctttgattttgtcgaaatgtcggtggatgaaaccga

SEQ ID NO: 380427 - DNA, 75 bp, synthetic construct
  source 1..75: mol_type = other DNA
gatctgccactgtttaaagatatccgcgtaaaggcgttattgccggacgggcgctggcaggcgcggcaaatccgg

SEQ ID NO: 380428 - DNA, 75 bp, synthetic construct
  source 1..75: mol_type = other DNA
ggcacgggaaatcatgagtaaagcgattcgcctagcgcgcgatctcggcattcgcactattcaactggcgggcta

SEQ ID NO: 380429 - DNA, 75 bp, synthetic construct
  source 1..75: mol_type = other DNA
gccggactggtttgatccgcatagctggaaagagaccgtactcgctgcggcggagcaggcccggcagaacgtgca

SEQ ID NO: 380430 - DNA, 75 bp, synthetic construct
  source 1..75: mol_type = other DNA
atgaaagtattattgtcaataaaacctgaatttgttgaaaagatccttaatgggacaaagaagtttgaattcagg

SEQ ID NO: 380431 - DNA, 75 bp, synthetic construct
  source 1..75: mol_type = other DNA
tataaagaaccaattcctatctctgctctaggtagtaatattaagccaccacaatcatatctttacctacctgcg

SEQ ID NO: 380432 - DNA, 75 bp, synthetic construct
  source 1..75: mol_type = other DNA
aaaaattacacgatcccattcctcgtttcagcctggatattgagttttgtcagcttgcctgtgcttgcatttttg

SEQ ID NO: 380433 - DNA, 75 bp, synthetic construct
  source 1..75: mol_type = other DNA
ctttcacgtctgtctcatatggtggaaaaactcaccagaagcaacaaaggacctgttatttctgggcggatttac

SEQ ID NO: 380434 - DNA, 75 bp, synthetic construct
  source 1..75: mol_type = other DNA
tggcagcttatatagtgagatatctggaacaacaaaaaaatgttaatttatttaatattattaaacgattagtgt

SEQ ID NO: 380435 - DNA, 75 bp, synthetic construct
  source 1..75: mol_type = other DNA
aggcccttgtatcacatttgttttgctctatggaaatgcttattacagcaataacatctgatgatattgatgcca

SEQ ID NO: 380436 - DNA, 75 bp, synthetic construct
  source 1..75: mol_type = other DNA
caaaaattatttgatgcaaataatttgaactttagatcacacattctgggcaatgcactgatgaatcccctaatg

SEQ ID NO: 380437 - DNA, 75 bp, synthetic construct
  source 1..75: mol_type = other DNA
gctgtaattcaatcaaaaaacatagataattactttctgttcacgtataggaaattgaaaaaccagtcgatacca

SEQ ID NO: 380438 - DNA, 75 bp, synthetic construct
  source 1..75: mol_type = other DNA
ttatatcaatggaattgatcatgaagctgtaattcaatcaaaaaacatagataattactttctgttcataaaaca

SEQ ID NO: 380439 - DNA, 75 bp, synthetic construct
  source 1..75: mol_type = other DNA
ttcgagtgatgagctgcctattaggcatcaattgatgggagttaaggcgatcattttgtgcagcaaagagacttt

SEQ ID NO: 380440 - DNA, 75 bp, synthetic construct
  source 1..75: mol_type = other DNA
aaacacttatcctttccgctacggccaacctttcgtagacaccgtctggcaacttatgcaaagcgatcctcgtgg

SEQ ID NO: 380441 - DNA, 75 bp, synthetic construct
  source 1..75: mol_type = other DNA
gagatagatatacgcgcattaacgactgcgacgttatatgaagaatgcactgtttatttccgttctccagaaagc

SEQ ID NO: 380442 - DNA, 75 bp, synthetic construct
  source 1..75: mol_type = other DNA
cggtaaaagcgtggagctggcgcgcaaggcgcgcgaagcgtatctggctgaaaatccgcatgccggcacgctgct

SEQ ID NO: 380443 - DNA, 75 bp, synthetic construct
  source 1..75: mol_type = other DNA
ctggatcagtttgccgataaaatcccggcggagttactggcagcgttgaaatcagatgccacgccagaggttcgt

SEQ ID NO: 380444 - DNA, 75 bp, synthetic construct
  source 1..75: mol_type = other DNA
cgtataccaccgatgccaacggtcgtgggccggcatgggcgaactcgctgtttgaagataacgccgaatttggcc

SEQ ID NO: 380445 - DNA, 75 bp, synthetic construct
  source 1..75: mol_type = other DNA
ttccaaagagtttggcccggactgtgtgctggcagtatttgccgaacttaacacagccaaaccaaaaccacgatt

SEQ ID NO: 380446 - DNA, 75 bp, synthetic construct
  source 1..75: mol_type = other DNA
tggaaaacctgccacgtaacgatcagggcaaagttgatttcgacaaagatttcttcggtaaagagtcgttcctga

SEQ ID NO: 380447 - DNA, 75 bp, synthetic construct
  source 1..75: mol_type = other DNA
gtgaaaggcgtggtgacctggtttgaactcggggagaacgacaaaaaccagatgctgtacagcatgaaggtgcac

SEQ ID NO: 380448 - DNA, 75 bp, synthetic construct
  source 1..75: mol_type = other DNA
gggcaccacgcgctgggaaaaacgcaatattgccgaagagatccccatctggaaagaggaactctgtacccaatg

SEQ ID NO: 380449 - DNA, 75 bp, synthetic construct
  source 1..75: mol_type = other DNA
aatattgccgaagagatccccatctggaaagaggaactctgtacccaatgtaaccactgcgtcgccgcttgccca

SEQ ID NO: 380450 - DNA, 75 bp, synthetic construct
  source 1..75: mol_type = other DNA
agatgcgccaactcacagctaccggcttctggccgctatatcgctttgatcctcgtcgtgccgatgaaggcaaac

SEQ ID NO: 380451 - DNA, 75 bp, synthetic construct
  source 1..75: mol_type = other DNA
catcaatatgatgtcgcgtctggaacatgtggaagaagagaaaatcaattacgacttcttcctcaacttaccaga

SEQ ID NO: 380452 - DNA, 75 bp, synthetic construct
  source 1..75: mol_type = other DNA
ggaaagaggaactctgtacccaatgtaaccactgcgtcgctgcttgcccacactccgctattcgcgcaaaagtgg

SEQ ID NO: 380453 - DNA, 75 bp, synthetic construct
  source 1..75: mol_type = other DNA
acttcctggcacaaatggccggaaaagcgaaatggccggaaaagcggaaaaaagcaacaccgattaaatgcactg

SEQ ID NO: 380454 - DNA, 75 bp, synthetic construct
  source 1..75: mol_type = other DNA
ggcacctgtgaagaagtggttgatgaattgctaacccgtggcgaaaaagtcggcgtgctgaaagttcgcctgtac

SEQ ID NO: 380455 - DNA, 75 bp, synthetic construct
  source 1..75: mol_type = other DNA
agccatgctgaaatatgtcttcaaagcggttctcgaagaacgcgcagacgacatgaaattcttcgctgaacgcgt

SEQ ID NO: 380456 - DNA, 75 bp, synthetic construct
  source 1..75: mol_type = other DNA
tggggatggcagtggttgcaatgggcggcggtcgccgtcaggcatctgacaccatcgattacagcgtcggcttta

SEQ ID NO: 380457 - DNA, 75 bp, synthetic construct
  source 1..75: mol_type = other DNA
tgaagcccttgccgaagcgattgttggcgtggctaacggcgctggcgtgcgcaccaccgcgctgctcaccgatat

SEQ ID NO: 380458 - DNA, 75 bp, synthetic construct
  source 1..75: mol_type = other DNA
cagatccgcgcccagcaatcccccatgacgaagttgagcgtagaatggcagaacgcttcgctaaaatgcgcaagg

SEQ ID NO: 380459 - DNA, 75 bp, synthetic construct
  source 1..75: mol_type = other DNA
gcggggagtactcctgagcagttaaaagccatgaagcctcaggcgacacggctccagaaaatccacatccacgct

SEQ ID NO: 380460 - DNA, 75 bp, synthetic construct
  source 1..75: mol_type = other DNA
ggcgtggaggttgtaccgttgtattgtggctctgacagtgacggtaagcgggatactgcatttgaggaagtgtgc

SEQ ID NO: 380461 - DNA, 75 bp, synthetic construct
  source 1..75: mol_type = other DNA
cattgaagatgttcttatcgacagccttgagcgtgaggggatgcgagacggtgaagaggtgctttgtccggtttg

SEQ ID NO: 380462 - DNA, 75 bp, synthetic construct
  source 1..75: mol_type = other DNA
ccatctggcggaattctggatgctggagccagaagtggcgtttgctaacctgaacgatatcgccggtctggcaga

SEQ ID NO: 380463 - DNA, 75 bp, synthetic construct
  source 1..75: mol_type = other DNA
tggaaaacttgccgcgtaacgatcagggcaaagttgatttcgacaaagatttcttcggcaaagagtccttcctga

SEQ ID NO: 380464 - DNA, 75 bp, synthetic construct
  source 1..75: mol_type = other DNA
gggcaaagtcgatttcgataaggacttctttggtaaagagtctttcctgaccgtctctggtcagctgaacggcga

SEQ ID NO: 380465 - DNA, 75 bp, synthetic construct
  source 1..75: mol_type = other DNA
ctgggcagggctaattggtgtctgtacgttgaaccgccccgggtttcctggagagtgttttatctgtgaactcag

SEQ ID NO: 380466 - DNA, 75 bp, synthetic construct
  source 1..75: mol_type = other DNA
cgtttattgtggttttacccgacattaataatgaagccagtctcagacaaaatggtaaagcgatgctggcgcatg

SEQ ID NO: 380467 - DNA, 75 bp, synthetic construct
  source 1..75: mol_type = other DNA
acatgaaattcttcgctgaacgcgtagataaagatgcaatttcacgtctggagcgcttcattgaagctgacttcg

SEQ ID NO: 380468 - DNA, 75 bp, synthetic construct
  source 1..75: mol_type = other DNA
aaggtgacaccgacatccggtacggtggcaaaagggaaaacaaccaccctgacggtttcttttgagccggaaagt

SEQ ID NO: 380469 - DNA, 75 bp, synthetic construct
  source 1..75: mol_type = other DNA
tgaaagatatgacaatcacggtaaacggcgtgaagacaggaaaagtgcagtatccccgtgatgaccggaaatggt

SEQ ID NO: 380470 - DNA, 75 bp, synthetic construct
  source 1..75: mol_type = other DNA
ataaaccgatgtggcagcagtatctccattacatttggggcgtaatgcacggtgatttaggcatttccatgaaaa

SEQ ID NO: 380471 - DNA, 75 bp, synthetic construct
  source 1..75: mol_type = other DNA
atgattatcctcgtcaacttgctggtcgatctgctgtacggcgtggtgaacccgcgaattcgtcataagaagtaa

SEQ ID NO: 380472 - DNA, 75 bp, synthetic construct
  source 1..75: mol_type = other DNA
gccgcatcccggtttgggaagagttcgtgccacgcttccaggctacgctggaacttggtgtttgcgcgatgattt

SEQ ID NO: 380473 - DNA, 75 bp, synthetic construct
  source 1..75: mol_type = other DNA
cggtgaaaggttccggcaccacactatgggtgtacaccggcaaggatgatgcttatgccaacccgttgtcagacg

SEQ ID NO: 380474 - DNA, 75 bp, synthetic construct
  source 1..75: mol_type = other DNA
ccagccacaacaaaaggctccggcaccgccagcatgggcaatgatgccaccgtcgaactctctccagttgctgga

SEQ ID NO: 380475 - DNA, 75 bp, synthetic construct
  source 1..75: mol_type = other DNA
aatgagaccctatcgattatccgacttattaaaaatgcctgtttaaaattatataatttggcacataccgcaacc

SEQ ID NO: 380476 - DNA, 75 bp, synthetic construct
  source 1..75: mol_type = other DNA
tcagacatttgcagaaaaatttactgtgaccgaggaattactgcagtctttaaaaaaaacagcgttatccggaga

SEQ ID NO: 380477 - DNA, 75 bp, synthetic construct
  source 1..75: mol_type = other DNA
gccagccagtgcttccgtagtgaaagggcagagcaccatgctgaccgtggcattccagccggaaggcgtaaccga

SEQ ID NO: 380478 - DNA, 75 bp, synthetic construct
  source 1..75: mol_type = other DNA
gcgagatgacggcagaaccctacgatgataactacctggatgatgaagacgcggactggaccgcgaccgggcagg

SEQ ID NO: 380479 - DNA, 75 bp, synthetic construct
  source 1..75: mol_type = other DNA
attatcgtccatgcgctgcgtaacgcgatgctgccggtagtgaccgttatcggcctgcaggtgggaacattgctg

SEQ ID NO: 380480 - DNA, 75 bp, synthetic construct
  source 1..75: mol_type = other DNA
gattaaggtaacgccgacaggtacggttgaaaaagggaaaacaaccaccctgaccgttactgtggaaccggaaaa

SEQ ID NO: 380481 - DNA, 75 bp, synthetic construct
  source 1..75: mol_type = other DNA
ccattagcgtgaaagatatgacgattactgtgacgggggttaaggatggaaaagtcagcatccctgtgatttccg

SEQ ID NO: 380482 - DNA, 75 bp, synthetic construct
  source 1..75: mol_type = other DNA
atggcaacaccaaaccccctggcgccggtaaaaggtgccggtaccaccctgtgggtttataacggtcagggtgac

SEQ ID NO: 380483 - DNA, 75 bp, synthetic construct
  source 1..75: mol_type = other DNA
aagaagtgatcaccaggaccgtgaaaatcaccaatatcggtcgtccgtcgctggcggaagatcagggtgaaatca

SEQ ID NO: 380484 - DNA, 75 bp, synthetic construct
  source 1..75: mol_type = other DNA
attcctgtcatgagcaatggcggcgattttgctgcagtagccacagtaacggtcaccgaccctgcagcacaaccc

SEQ ID NO: 380485 - DNA, 75 bp, synthetic construct
  source 1..75: mol_type = other DNA
gaaagcggggatgtccgggcctataaaatccggttcccgaatggtacggtggatgtgttcagtggctgggtcagc

SEQ ID NO: 380486 - DNA, 75 bp, synthetic construct
  source 1..75: mol_type = other DNA
gcgtttgcgaaccctttatcggacactgactggctgcgtcttgcgatggtgaaggatctgcaacctggcgaaatg

SEQ ID NO: 380487 - DNA, 75 bp, synthetic construct
  source 1..75: mol_type = other DNA
ttgctacggcagtcggcattccggttggtgtgctggctgcggttaaacgcggttccattttcgatcacacagcgg

SEQ ID NO: 380488 - DNA, 75 bp, synthetic construct
  source 1..75: mol_type = other DNA
tttgtccacatgatcccgggcgatccggtgatgatcatggcgggcgaacgtgggatctccccagagcgtcacgca

SEQ ID NO: 380489 - DNA, 75 bp, synthetic construct
  source 1..75: mol_type = other DNA
cgtcaactctggtaactcatggtccgtgacaacaccgatggccttcatgaatttcccgctcatgacctatattaa

SEQ ID NO: 380490 - DNA, 75 bp, synthetic construct
  source 1..75: mol_type = other DNA
ggagaagatgagcctccagcgctgggaagatgcggcaaacggcaaacctgcataccagccagcctataaactgaa

SEQ ID NO: 380491 - DNA, 75 bp, synthetic construct
  source 1..75: mol_type = other DNA
gcggagagctgattaatatatctgtcggccctctcctcaccgaaaatggtggtagccgtaataccagatatcctc

SEQ ID NO: 380492 - DNA, 75 bp, synthetic construct
  source 1..75: mol_type = other DNA
tcaatcattaccgtgataacgccatcgcctacaaagaacagcgtgataaaaaagtcagtgagctgaagcaggcga

SEQ ID NO: 380493 - DNA, 75 bp, synthetic construct
  source 1..75: mol_type = other DNA
cgtggtgtgaaaactgggcgcaagaagtcgatgcccggttgacgaaagaggcgcaaagcgcgctgcgtccggtga

SEQ ID NO: 380494 - DNA, 75 bp, synthetic construct
  source 1..75: mol_type = other DNA
cattatcgtaaatggtgaggtataccttaacgagaacgcattccttgattttgttctcaatgatttcgaattaca

SEQ ID NO: 380495 - DNA, 75 bp, synthetic construct
  source 1..75: mol_type = other DNA
atcgggtaaataaagaacgtgtttattcaaaaatgatcaccgccctaaacgtttatactgatgggaatgactttt

SEQ ID NO: 380496 - DNA, 75 bp, synthetic construct
  source 1..75: mol_type = other DNA
cgtacacctctcttagccactatcacgtctcaaaaaattggcaagtattacagcgtattagcggttgcagataat

SEQ ID NO: 380497 - DNA, 75 bp, synthetic construct
  source 1..75: mol_type = other DNA
aaccgactactacttcgagttgcaccatacggttcatcagctttctgacatccctttcgagctgccggtgatccc

SEQ ID NO: 380498 - DNA, 75 bp, synthetic construct
  source 1..75: mol_type = other DNA
aagtggccgaagacgctgacattagcaaagcaaaggccgaagctgcggtaaatgcgctgatcaactcagtgacag

SEQ ID NO: 380499 - DNA, 75 bp, synthetic construct
  source 1..75: mol_type = other DNA
ttcagttttcctattgataaagagaatgtggccagaaatcttggacaaacaattgatccggcatatattcactca

SEQ ID NO: 380500 - DNA, 75 bp, synthetic construct
  source 1..75: mol_type = other DNA
gaagctgtttaagctctgttttatccgtggaagcaaatgggaaaaaacaaattttttaaatttcaccagaggttt

SEQ ID NO: 380501 - DNA, 75 bp, synthetic construct
  source 1..75: mol_type = other DNA
aatggtaaaaaactggttggctcttcctgggagatatattaaccaaatgggacggctgaatgtctctgttgatgt

SEQ ID NO: 380502 - DNA, 75 bp, synthetic construct
  source 1..75: mol_type = other DNA
aagaagcatgaaaaaacgcaggaaccctcccctgttaaagaggttaaaaatccaacctcctctaccacagttaag

SEQ ID NO: 380503 - DNA, 75 bp, synthetic construct
  source 1..75: mol_type = other DNA
tgggataatatggaagaggctctgcagcaacgctctcttttcgacgactggcggcaaacgcatacactgaagacc

SEQ ID NO: 380504 - DNA, 75 bp, synthetic construct
  source 1..75: mol_type = other DNA
aaattctggaaagaaattggcaactcgctttatggcaaacttgctcagggccttcgcgccaaaaccgcctttgat

SEQ ID NO: 380505 - DNA, 75 bp, synthetic construct
  source 1..75: mol_type = other DNA
ctgcctgtcatggtctgttaatcattaccgtgacaacgccatcacctataaagaccagcgcgataaaaaagtcag

SEQ ID NO: 380506 - DNA, 75 bp, synthetic construct
  source 1..75: mol_type = other DNA
gaacgactatcagggggcaacctatgttcagatggggacattacgtactgatgcggatggcgcgtcgaagctggg

SEQ ID NO: 380507 - DNA, 75 bp, synthetic construct
  source 1..75: mol_type = other DNA
ttcacggataataagcagtgcacgctcagcgaggcccggcatcagttgccgattactccgttccgtatgccgtca

SEQ ID NO: 380508 - DNA, 75 bp, synthetic construct
  source 1..75: mol_type = other DNA
gtgggggaatgtcggtgtgcaactaggtgataaaggctatagcgatactcagggcatgctgggagtgaaatatag

SEQ ID NO: 380509 - DNA, 75 bp, synthetic construct
  source 1..75: mol_type = other DNA
cgtcgaactctctccagttgctggacgaaacgttctcggtatccgggacggaatcatcagagaccagacagcact

SEQ ID NO: 380510 - DNA, 75 bp, synthetic construct
  source 1..75: mol_type = other DNA
aagagcagcgtgataaaaaagtcagtgagctgaagcaggcgaccgccaccattactgacatgcagcaacgccagc

SEQ ID NO: 380511 - DNA, 75 bp, synthetic construct
  source 1..75: mol_type = other DNA
cggtggatccctctaacgctggcaccacgggacttcttgatctaaccacccgtgactggaaacctgcattgctgg

SEQ ID NO: 380512 - DNA, 75 bp, synthetic construct
  source 1..75: mol_type = other DNA
tcagccgcaacccaaaccaccggcgccgccagcatgggcgatgatgccaccgtcgaactctctgcagttgctgga

SEQ ID NO: 380513 - DNA, 75 bp, synthetic construct
  source 1..75: mol_type = other DNA
ccacatcggtaaaagtgggagagcaatccattggtggactggccatgaatggcggtacgctcattttcgatacgg

SEQ ID NO: 380514 - DNA, 75 bp, synthetic construct
  source 1..75: mol_type = other DNA
atggctcgactctttaccccttcagaatcaaagtattacctgatggcgctggatgcaggcaccggaagtattcgg

SEQ ID NO: 380515 - DNA, 75 bp, synthetic construct
  source 1..75: mol_type = other DNA
tcacgcgataagtggcaggcagtttatcaggatcagctggggctggttgatcatggactgacgacgtcgttatgg

SEQ ID NO: 380516 - DNA, 75 bp, synthetic construct
  source 1..75: mol_type = other DNA
gtctatcggtttaatggccattttggtcagaggtctggggttactgatgctgggggttgcttcaacggcgggcca

SEQ ID NO: 380517 - DNA, 75 bp, synthetic construct
  source 1..75: mol_type = other DNA
atgaatgctgttttaagtgttcagggtgcttctggcccgtcaaaaagaagtcgttttttttctaaattcactcgt

SEQ ID NO: 380518 - DNA, 75 bp, synthetic construct
  source 1..75: mol_type = other DNA
atgaccgaatcaacaacctcctccccgcatgatgcggtgtttaaaacctttatgttctcgcccgaaaccgcgcgg

SEQ ID NO: 380519 - DNA, 75 bp, synthetic construct
  source 1..75: mol_type = other DNA
cgtttgatattgatcgctccttgctgttaatgctgctgggcaatttttatggtctggagtcgtctcttgaagagg

SEQ ID NO: 380520 - DNA, 75 bp, synthetic construct
  source 1..75: mol_type = other DNA
gcagcacagggccaggacttgatggcaagcggtaacaccacggttaaggcgaccttcggtaaggactccagtgtt

SEQ ID NO: 380521 - DNA, 75 bp, synthetic construct
  source 1..75: mol_type = other DNA
ccgtttatctggtcacgatcatcggaacactgtttgcactggtcggtgcaattgttaccactattccggaataca

SEQ ID NO: 380522 - DNA, 75 bp, synthetic construct
  source 1..75: mol_type = other DNA
atgcttcgcctggctcgcgctgtgatcccggctgctgttctgatgatgttcttcccgcaactggcgatggtcgct

SEQ ID NO: 380523 - DNA, 75 bp, synthetic construct
  source 1..75: mol_type = other DNA
cccatcaaaatggctgattctttcatttgtaagggttgccagaagctcgtatctattgaagcttgtgaaagagcc

SEQ ID NO: 380524 - DNA, 75 bp, synthetic construct
  source 1..75: mol_type = other DNA
attgaatggtgctctgggtataggaacatccagtgctcttggcggtaattcgattgttttgggtgataatgacac

SEQ ID NO: 380525 - DNA, 75 bp, synthetic construct
  source 1..75: mol_type = other DNA
ggcaggagggtaagattgaaggttggcaggaggggaaattggagggtttgcagaaaggcaaagtagaaggtatgc

SEQ ID NO: 380526 - DNA, 75 bp, synthetic construct
  source 1..75: mol_type = other DNA
ggtggaaaccagcgacggtgaaggctatatctactgcgtgattgaacatcaaagttccgcggaaaagaatatggc

SEQ ID NO: 380527 - DNA, 75 bp, synthetic construct
  source 1..75: mol_type = other DNA
tcagcctcgaagaaagacgcgaagttttttacaaatacgagcaactatataacgcgctaatgcatattccggtct

SEQ ID NO: 380528 - DNA, 75 bp, synthetic construct
  source 1..75: mol_type = other DNA
tcggtgcggtcatgtacatgatgaccaaaaacgtcaagttcctggccggttttgccatcatctctgtatttattg

SEQ ID NO: 380529 - DNA, 75 bp, synthetic construct
  source 1..75: mol_type = other DNA
ggcttatttttaacactaggaataacaccaaatactctaaatgggatttagctgaaatagcatcttgtttcaaat

SEQ ID NO: 380530 - DNA, 75 bp, synthetic construct
  source 1..75: mol_type = other DNA
cgtcgaaaatgcttatgctgagctggtggcacaaggatggctggtacggcgggggcaggcgggcacctttgtcag

SEQ ID NO: 380531 - DNA, 75 bp, synthetic construct
  source 1..75: mol_type = other DNA
aggattattgctctcgtttacgaatatcgttagcgaaagtatggcgcgacaggtagcacagcaattgcgcagtgc

SEQ ID NO: 380532 - DNA, 75 bp, synthetic construct
  source 1..75: mol_type = other DNA
tgatgtatcgtctttatcagttctttggcctgtttgataaggatgacgaacggcgtgaagtgcgtggaaacagca

SEQ ID NO: 380533 - DNA, 75 bp, synthetic construct
  source 1..75: mol_type = other DNA
ggtctgtctgccggccatgataaatgccggtggtacccagatgggcttcagggcggattctttctcccccatcgc

SEQ ID NO: 380534 - DNA, 75 bp, synthetic construct
  source 1..75: mol_type = other DNA
aggatttaaatatagtcgagagtatgcctttgctttattgttatatccttgtatgagtggttctgctcaagaatt

SEQ ID NO: 380535 - DNA, 75 bp, synthetic construct
  source 1..75: mol_type = other DNA
tttctggaggcatctgaagaaaatgcgtcagcactatgctcagcgtcggcagtggattgagcaggcgcttacgca

SEQ ID NO: 380536 - DNA, 75 bp, synthetic construct
  source 1..75: mol_type = other DNA
aggattgcttctctcgtttaccaatattatcagtgagagtatggcgcagcaggtggcacaacaattacgcagagc

SEQ ID NO: 380537 - DNA, 75 bp, synthetic construct
  source 1..75: mol_type = other DNA
gtgcttctgcgcccgtcgaaaagaaatcgttttttcctaaattcacgcgtctgaatatgcttcgcctggttcgtg

SEQ ID NO: 380538 - DNA, 75 bp, synthetic construct
  source 1..75: mol_type = other DNA
atgccacgttatcaggatatcgcccgtcagttaaaaacggctatcgagcaaggaaaactgaaacctggcgcaagg

SEQ ID NO: 380539 - DNA, 75 bp, synthetic construct
  source 1..75: mol_type = other DNA
ccggctttccgctgattcgcccgattgtcactcgccacggtgtggaaattttacctgtgccggttgatgacaacg

SEQ ID NO: 380540 - DNA, 75 bp, synthetic construct
  source 1..75: mol_type = other DNA
tgagcagatacatccgcaacagtctgctgtggatgtcgtggcttttgctggtgaaagtcagcagccgctgccttt

SEQ ID NO: 380541 - DNA, 75 bp, synthetic construct
  source 1..75: mol_type = other DNA
acagcgttacaggtaaagcgaccaacggtccagtactggacggaaacggcgtgactgtactcggcattctggaag

SEQ ID NO: 380542 - DNA, 75 bp, synthetic construct
  source 1..75: mol_type = other DNA
accggctaagtacaaatacatcgatgaaaacggtgaacagaagacttggactggtcaaggtcgcactcctaaagc

SEQ ID NO: 380543 - DNA, 75 bp, synthetic construct
  source 1..75: mol_type = other DNA
gtctgaccagcaaacccgatgatgaaacggatagtggcattaaaacaccggaaaaggtcagcctggaaatggcac

SEQ ID NO: 380544 - DNA, 75 bp, synthetic construct
  source 1..75: mol_type = other DNA
atgggctgcgcatgtggaagatgggattgcagcgttaagaaattatcgtagtcttcgtgatttttccatgggtat

SEQ ID NO: 380545 - DNA, 75 bp, synthetic construct
  source 1..75: mol_type = other DNA
atcttgtcagatcaaaaatgaaagaaataaagaaaggtttgaggcagagtttgaatggagaaaaccagtgccatt

SEQ ID NO: 380546 - DNA, 75 bp, synthetic construct
  source 1..75: mol_type = other DNA
gatgctggataaacgcgggatggtgctatggtcgaacttgttccatatcggcattctggggatcttcttcggtca

SEQ ID NO: 380547 - DNA, 75 bp, synthetic construct
  source 1..75: mol_type = other DNA
acgcccggccaaatactcatttactgatgaaaatggcgaaacaaaaacgtggactggacagggccgtacccccaa

SEQ ID NO: 380548 - DNA, 75 bp, synthetic construct
  source 1..75: mol_type = other DNA
attaatcaaacacttttttctgcaattattggtgtagctattgcaagagttatatgcttgtggttaagctacatt

SEQ ID NO: 380549 - DNA, 75 bp, synthetic construct
  source 1..75: mol_type = other DNA
tcacgcaaatactattagcagagcttgaggggcgggaatattttggaatcctaaatatacaaaaaagtttaggga

SEQ ID NO: 380550 - DNA, 75 bp, synthetic construct
  source 1..75: mol_type = other DNA
tgaaatcattgggttactttctgactatctggaagtgttaatcgcgatacctaacactgatcgcctgcgaagaat

SEQ ID NO: 380551 - DNA, 75 bp, synthetic construct
  source 1..75: mol_type = other DNA
tatctggctaatttgcgtgatatggatctggataatggagaagtgccacctgaaatcattgggttactttctgac

SEQ ID NO: 380552 - DNA, 75 bp, synthetic construct
  source 1..75: mol_type = other DNA
ttgacctcatcgcttactacgtatcaaccgttgaagcatcagaaatcaccccaggggaagcagacgctgtcgtta

SEQ ID NO: 380553 - DNA, 75 bp, synthetic construct
  source 1..75: mol_type = other DNA
gaaatagtttttgatggcgagattttaaaatccgcttgtgaaatcaatgactctgataagaaaattgaagttgct

SEQ ID NO: 380554 - DNA, 75 bp, synthetic construct
  source 1..75: mol_type = other DNA
gctcgtgatcaagtccgctcgattagaaaagagcaaaaatcaaaaaaacaaaagaagagtaaagttgatatggaa

SEQ ID NO: 380555 - DNA, 75 bp, synthetic construct
  source 1..75: mol_type = other DNA
tcgggcgacagcctgggaacatggaatagtttaaggccgcttaccattaataacgccagtggagctgtttctatc

SEQ ID NO: 380556 - DNA, 75 bp, synthetic construct
  source 1..75: mol_type = other DNA
gacgtttgataaggcagcatatccgaaactggctattgcctatccttctggtgttattccagatatgcgcggctg

SEQ ID NO: 380557 - DNA, 75 bp, synthetic construct
  source 1..75: mol_type = other DNA
tgccagcacagtgatggcgacgcaggattacgtcgatgacaaaatcgcagagcatgagcaatcccgccgccatcc

SEQ ID NO: 380558 - DNA, 75 bp, synthetic construct
  source 1..75: mol_type = other DNA
ccagtcaccgactctaaagatcttgctgttggctcaatagttgaagtgaaaaaacgttgtgatattgaatcgtat

SEQ ID NO: 380559 - DNA, 75 bp, synthetic construct
  source 1..75: mol_type = other DNA
gcacgtcaattgacctgaattctttaggtggcgcggaacacctgggaatatggcgcaatagcagtacatcaatag

SEQ ID NO: 380560 - DNA, 75 bp, synthetic construct
  source 1..75: mol_type = other DNA
atggaacatcagatattaacctgacgccgaaaaatattggtgcattgccaataacgggaggaactcttactggcg

SEQ ID NO: 380561 - DNA, 75 bp, synthetic construct
  source 1..75: mol_type = other DNA
gcaagaaggtaaattagaaggcttgcaggaaggcatgcatgaacaagccattaaaatcgccttgcgtatgctgga

SEQ ID NO: 380562 - DNA, 75 bp, synthetic construct
  source 1..75: mol_type = other DNA
atgaaagaagttttaaaaatcgctcgaaaaaagatcctcaacaatcgtatatcttgtcagatcaaaaaagaaaga

SEQ ID NO: 380563 - DNA, 75 bp, synthetic construct
  source 1..75: mol_type = other DNA
aggaagattaaagatactatcagctaacgaaagagattttatcaataatgccatatatgaagaaatgaaaattaa

SEQ ID NO: 380564 - DNA, 75 bp, synthetic construct
  source 1..75: mol_type = other DNA
gtggaaatcatcctttgaatcgttttactactcacatgatgacttataacggtgaatttgataagtttgctaaga

SEQ ID NO: 380565 - DNA, 75 bp, synthetic construct
  source 1..75: mol_type = other DNA
aaatggaccgaatggcgagaagtatataactccttttcgttgcctctgaatctgggcatcggtggcgcagtggca

SEQ ID NO: 380566 - DNA, 75 bp, synthetic construct
  source 1..75: mol_type = other DNA
ctgtggtcgaacttgttccatatcggcattctggggatcttcttcggtcatctgttcggcatgttaacgccgcac

SEQ ID NO: 380567 - DNA, 75 bp, synthetic construct
  source 1..75: mol_type = other DNA
tagatattgttattgacttaactgaattgctcagaggtcaaagtcaaatctttggcattttgaactacgcttcaa

SEQ ID NO: 380568 - DNA, 75 bp, synthetic construct
  source 1..75: mol_type = other DNA
agttaacaataaccaacaagggtggctaggtctgacttttggtgtatcaacagataacggctcgtcttttaagaa

SEQ ID NO: 380569 - DNA, 75 bp, synthetic construct
  source 1..75: mol_type = other DNA
gattatatgcaggatctggatggtggatggcagcctgtaccgaaggatatttttactcaggttatacccggagaa

SEQ ID NO: 380570 - DNA, 75 bp, synthetic construct
  source 1..75: mol_type = other DNA
atgttattctcaatctctaccatttcatttagctaatacaacatggttaatgatcaaagaaggttatgagaaaaa

SEQ ID NO: 380571 - DNA, 75 bp, synthetic construct
  source 1..75: mol_type = other DNA
ttttttattgaaaaatatatgaacgaagaattgcaatatccgtcagaatatctatttaataagttatcagatgac

SEQ ID NO: 380572 - DNA, 75 bp, synthetic construct
  source 1..75: mol_type = other DNA
aagaattaggatatccttccaaatatctatttaaaaaattgatagatacctcagaaagcatttgtagcccatcat

SEQ ID NO: 380573 - DNA, 75 bp, synthetic construct
  source 1..75: mol_type = other DNA
atcagcgccgtcaataacgttcaggctgttgccaagcaaatccagcagtatcagacgcagttgcagcagtatgag

SEQ ID NO: 380574 - DNA, 75 bp, synthetic construct
  source 1..75: mol_type = other DNA
atcagcgcggtcaacaacgttcaggccgttgccaaacaaattcagcagtaccagacgcagctacagctacagcaa

SEQ ID NO: 380575 - DNA, 75 bp, synthetic construct
  source 1..75: mol_type = other DNA
aatcagcgcagtcaacaacgttcaggctgtggcaaaacagatccagcagtaccagacgcagctgcagcagtatga

SEQ ID NO: 380576 - DNA, 75 bp, synthetic construct
  source 1..75: mol_type = other DNA
ttcagggatacgcgaacaggaaaaaatgtctgtacggattacggggatcgggttgtgttttaccatcacaatgac

SEQ ID NO: 380577 - DNA, 75 bp, synthetic construct
  source 1..75: mol_type = other DNA
aacggacacttcaccattactcgtccggacgtggatttgcaccgtcaacgcagtgagcagtattaccgggaatat

SEQ ID NO: 380578 - DNA, 75 bp, synthetic construct
  source 1..75: mol_type = other DNA
taattgcgccagttctgttcagccgcaacggaaagcttggttttgagccggaaggttcataccagcagtttaatg

SEQ ID NO: 380579 - DNA, 75 bp, synthetic construct
  source 1..75: mol_type = other DNA
tgaggctcatgctgctttcgatcttgaaattattaaagagaaaatagccatccaatatggtgacgtgctaaaagg

SEQ ID NO: 380580 - DNA, 75 bp, synthetic construct
  source 1..75: mol_type = other DNA
ataccgacgctgtgcggtgacaggtaaaccgctgcgccttgcgtctgccgtgctggatcattgccaccgaaccgg

SEQ ID NO: 380581 - DNA, 75 bp, synthetic construct
  source 1..75: mol_type = other DNA
aacgtgcagtgattctggtagccgcctggcttggcgatgcccgcctgatcgacaacaaaatagtcgagctggtgt

SEQ ID NO: 380582 - DNA, 75 bp, synthetic construct
  source 1..75: mol_type = other DNA
gctggaaggtgccagccgtccgggacattttcgcggcgtttcgactatcgtcagcaagctgttcaatctggtcca

SEQ ID NO: 380583 - DNA, 75 bp, synthetic construct
  source 1..75: mol_type = other DNA
ggcaggaaggacaccaaattggctggcaggaaggtatgcatgaacaagccattaaaattgctttgcgcatgctgg

SEQ ID NO: 380584 - DNA, 75 bp, synthetic construct
  source 1..75: mol_type = other DNA
ctttcggctaatgcgctatgccactgccgccatgcaacgtcatctggacaaaggctatgacagagtcccgctggt

SEQ ID NO: 380585 - DNA, 75 bp, synthetic construct
  source 1..75: mol_type = other DNA
gtcgcctagcagcatgaacgcgatgctgacgagctaccgccaacaaaaccaagggctgggcgttgtttatccggg

SEQ ID NO: 380586 - DNA, 75 bp, synthetic construct
  source 1..75: mol_type = other DNA
gtgttaattatcgaaaccctgccgctgctgcgtcagcaaattcgccgcctgcgtatggaaggtaagcgcgtggcg

SEQ ID NO: 380587 - DNA, 75 bp, synthetic construct
  source 1..75: mol_type = other DNA
aacgagctgtgattctggtagccgcctggcttggcgatgctcgcctgatcgacaacaaaatcgtcgaactggcgt

SEQ ID NO: 380588 - DNA, 75 bp, synthetic construct
  source 1..75: mol_type = other DNA
aatcctgtatttgacattcattataacgctcgtgaggccggtgcaagcatagccagccataaggcagaaaaaatc

SEQ ID NO: 380589 - DNA, 75 bp, synthetic construct
  source 1..75: mol_type = other DNA
ctttgatattgagattgtcggcgtaccgattatgcgcgccaaagacggtctggcgctgagttcccgtaacggtta

SEQ ID NO: 380590 - DNA, 75 bp, synthetic construct
  source 1..75: mol_type = other DNA
aaagattttcagcaactggcgctgatccgcaaaatggttgctgatatgggctttgatattgagattgtcggcgta

SEQ ID NO: 380591 - DNA, 75 bp, synthetic construct
  source 1..75: mol_type = other DNA
aacgtaaagtggatctggttttcgctccctcggtaaaagagatctatccgaacggtacagaaacccacacctatg

SEQ ID NO: 380592 - DNA, 75 bp, synthetic construct
  source 1..75: mol_type = other DNA
atgagtacacgtttcgttttagccgctaaaaaagcgttactggcttccttcgtggcgtcaatcatggcattaccg

SEQ ID NO: 380593 - DNA, 75 bp, synthetic construct
  source 1..75: mol_type = other DNA
aatcacaattgaagcaaaccagaccgctgattttgaagacaatgacttcagcggcaaacgctccctgatggagtc

SEQ ID NO: 380594 - DNA, 75 bp, synthetic construct
  source 1..75: mol_type = other DNA
gtactggttctgcgcattattcagctggaagcagtgcaggaagaaatggctaacgaatttcgtgatctgcttgtt

SEQ ID NO: 380595 - DNA, 75 bp, synthetic construct
  source 1..75: mol_type = other DNA
caggaagatatggctaacgaatttcgtgatctgcttgttgagaaattcaaagacagcaaagtagaaacctttatt

SEQ ID NO: 380596 - DNA, 75 bp, synthetic construct
  source 1..75: mol_type = other DNA
agggcatatcaacattaccgtgactgctggtgtgagtcgcgcatttcctgaagagcctctggatgtggtcattgg

SEQ ID NO: 380597 - DNA, 75 bp, synthetic construct
  source 1..75: mol_type = other DNA
caggaaaatgcctgttagcgtaaaagcaaaacacaaatctatccatgcaagcattcaccgccggtttactggcgg

SEQ ID NO: 380598 - DNA, 75 bp, synthetic construct
  source 1..75: mol_type = other DNA
gcatttgaatttaaatgcgttccgtttgaaggtctgaaagaacgtccgtttaaattacgcctcagcattatcact

SEQ ID NO: 380599 - DNA, 75 bp, synthetic construct
  source 1..75: mol_type = other DNA
tgatgcatcatctgtaccaggcctttgacttattcaaaaaagacgataaacggcgcgctgagctcagaaatggca

SEQ ID NO: 380600 - DNA, 75 bp, synthetic construct
  source 1..75: mol_type = other DNA
ccagcatcgatgactttacccgttattctaaagatcttgcagatgaaggcacccgctgctttatcgatgccgata

SEQ ID NO: 380601 - DNA, 75 bp, synthetic construct
  source 1..75: mol_type = other DNA
caagaaggcgtagttgcaagcctggtcatgatgctttcaggtgtattgatggtattggtttcgccgctggtggcc

SEQ ID NO: 380602 - DNA, 75 bp, synthetic construct
  source 1..75: mol_type = other DNA
cgcagataacactgccactctcaaactgaaaaagacagcaccgttctctgctctgttgtctgttaacggcgagcg

SEQ ID NO: 380603 - DNA, 75 bp, synthetic construct
  source 1..75: mol_type = other DNA
ttgaagcaaaccagaccgctgattttgaagataatgacttcagcggcaaacgctccctgatggagtctgtcgaag

SEQ ID NO: 380604 - DNA, 75 bp, synthetic construct
  source 1..75: mol_type = other DNA
gctggatgatgcattggacgttctggacgccatgctggccgttatcatccgtgacgccagaaagattgggcagaa

SEQ ID NO: 380605 - DNA, 75 bp, synthetic construct
  source 1..75: mol_type = other DNA
acgggcagacagagcaatgtacgaaggtaaacagaccggcaggaatcgttgcatgtttatcaacaaacaggatgt

SEQ ID NO: 380606 - DNA, 75 bp, synthetic construct
  source 1..75: mol_type = other DNA
gcggatgcacgccggccgaaaaggcagcgatggaagagaaccgccgcctggcgtcagagtcgcaaaagaaggcca

SEQ ID NO: 380607 - DNA, 75 bp, synthetic construct
  source 1..75: mol_type = other DNA
gcaggcacaggacactcttaattactacaaaaatcaggccgggagtctcgattcatatctgaaacgttatcagga

SEQ ID NO: 380608 - DNA, 75 bp, synthetic construct
  source 1..75: mol_type = other DNA
ctaaaaaggcgttacttgcttccttcgttgcatctgttatgaccttaccggcgcaagccggtattccggtcatcg

SEQ ID NO: 380609 - DNA, 75 bp, synthetic construct
  source 1..75: mol_type = other DNA
aacatgctcaaaaatacagtcgcacctgcagcctatatctgggatcaggccaattcgaccatcaacaaattgttg

SEQ ID NO: 380610 - DNA, 75 bp, synthetic construct
  source 1..75: mol_type = other DNA
gctttaacagcaatgttgaatgtaccgcgtctgaaattagtgcactgcgtgaagctgaacagaacagctcagggg

SEQ ID NO: 380611 - DNA, 75 bp, synthetic construct
  source 1..75: mol_type = other DNA
atgcaggcggatgctgaccgcgaagctcaatatcaagcgtctcgtgaaaggttgttcgatatgggcgagccaacc

SEQ ID NO: 380612 - DNA, 75 bp, synthetic construct
  source 1..75: mol_type = other DNA
gcaggcactggaagttaaggaagggtacaaatttttaacgtgggagctctttttgttaaagggcaggaagcggta

SEQ ID NO: 380613 - DNA, 75 bp, synthetic construct
  source 1..75: mol_type = other DNA
ttccgcattcattccactgccggtggtgccagctggtcactgccgctgaaatggataaaacggttcctggggcat

SEQ ID NO: 380614 - DNA, 75 bp, synthetic construct
  source 1..75: mol_type = other DNA
tggttctgcgcattattcagctggaggcggggcaggaagaaatggctaacgaatttcgtgatctgcttgttgaga

SEQ ID NO: 380615 - DNA, 75 bp, synthetic construct
  source 1..75: mol_type = other DNA
tacagatgaaattagcgcactgcgtaaagctgagcagaacagttctgaggcacgtaaaaaggccaatgacgccgt

SEQ ID NO: 380616 - DNA, 75 bp, synthetic construct
  source 1..75: mol_type = other DNA
atgggagaaaatatcaattatcacagccagcgcattaattattttcaacacaaaaaggaaaaagcaatgaatctg

SEQ ID NO: 380617 - DNA, 75 bp, synthetic construct
  source 1..75: mol_type = other DNA
tacatttcatggggtgttcccgggaaaacaagactgatgtttgagtcaaaggagcaggcactggaagttaaagaa

SEQ ID NO: 380618 - DNA, 75 bp, synthetic construct
  source 1..75: mol_type = other DNA
cgcaggagaaccagcgagtgatggggatcctgacatgccaggaagcgaaaggacgtgaacagcttgccacgatgc

SEQ ID NO: 380619 - DNA, 75 bp, synthetic construct
  source 1..75: mol_type = other DNA
ttcaccggcagcggtgcggggtggcgtgtcacagacgtcagcagacggtgatgcggacgtgaaaatgctcatggc

SEQ ID NO: 380620 - DNA, 75 bp, synthetic construct
  source 1..75: mol_type = other DNA
caggctgaacagctggctgcctgcccgggaatgactgtggagagcgcccgggctgtgctggctgcgggatcaggt

SEQ ID NO: 380621 - DNA, 75 bp, synthetic construct
  source 1..75: mol_type = other DNA
tgaacggttcatggcgaaccattcaccggcagcggtgcagggtggcgtgtcacaggcgtcagcagacggtgatgc

SEQ ID NO: 380622 - DNA, 75 bp, synthetic construct
  source 1..75: mol_type = other DNA
atgagtcaggctaaatcgaacaagatgggcgtcgttcagttaaccatactgacgatggtcaacatgatgggctcc

SEQ ID NO: 380623 - DNA, 75 bp, synthetic construct
  source 1..75: mol_type = other DNA
atcatgcgcccttctttagcgcggttggttcttccatcgccatgacattgtgggcttttctcggtctggagtctg

SEQ ID NO: 380624 - DNA, 75 bp, synthetic construct
  source 1..75: mol_type = other DNA
taatcaatgcgtcggatgccatcagcgtgatggctgcggcgctgaacactcatgatacaggaggcactatgccgc

SEQ ID NO: 380625 - DNA, 75 bp, synthetic construct
  source 1..75: mol_type = other DNA
tgcttcaccgcaggcggatgccggaccatcactccgtgatcagatcatggcactggatgaggcaaaaggggctga

SEQ ID NO: 380626 - DNA, 75 bp, synthetic construct
  source 1..75: mol_type = other DNA
gaagcgaaaggacgtgaacagcttgcctcgatgctggcaggacaacagggcatgagcgttgagcaggcccgggcg

SEQ ID NO: 380627 - DNA, 75 bp, synthetic construct
  source 1..75: mol_type = other DNA
aacggtcgtgaacaactggcggcaacgctggcggcgatgccggagatgacggtggaaaaagcccgcccgatcctg

SEQ ID NO: 380628 - DNA, 75 bp, synthetic construct
  source 1..75: mol_type = other DNA
atatcacgctgatttatgccggggcgcacaaggtggatggcaatcagtttgaagccttaccggcagaggtgcgtc

SEQ ID NO: 380629 - DNA, 75 bp, synthetic construct
  source 1..75: mol_type = other DNA
caggccggtgtggatatcacgctgatttactcaggggcgcacaaggtggatggcaatcagtttgaagccttaccg

SEQ ID NO: 380630 - DNA, 75 bp, synthetic construct
  source 1..75: mol_type = other DNA
gaaaggacgtgaacagcttgccacgatgctggcaggacaacagggcatgagcgttgaacaggcccgggcgattct

SEQ ID NO: 380631 - DNA, 75 bp, synthetic construct
  source 1..75: mol_type = other DNA
ccgatggattataacggcatgaagctggtgcgcgaaggggctcgcccaatcagcggtgataccggactgcgtgac

SEQ ID NO: 380632 - DNA, 75 bp, synthetic construct
  source 1..75: mol_type = other DNA
ttttaaggcattgggagtgccggtcgagttcatcaaaatccacaacacgccggatggaaatttccccaatggtat

SEQ ID NO: 380633 - DNA, 75 bp, synthetic construct
  source 1..75: mol_type = other DNA
catggcactggatgaggcaaaaggggctgaggcgcaggctgaacagctggctgcctgcccgggaatgactgtgga

SEQ ID NO: 380634 - DNA, 75 bp, synthetic construct
  source 1..75: mol_type = other DNA
gaacatatttctacagaggacacccgaacctgtccaaaatagaactactcaacgtcatattccttgaagaattct

SEQ ID NO: 380635 - DNA, 75 bp, synthetic construct
  source 1..75: mol_type = other DNA
ttttacctttccgttatcgcagatgccccgtcttcacaggcattaacccatctggtgggcggcctttgctttaca

SEQ ID NO: 380636 - DNA, 75 bp, synthetic construct
  source 1..75: mol_type = other DNA
ttaggcggtgatgtccgcctcaccagcgaaaccttaaaactggcgctggcgaaaggtttacaggatgcgggcgtc

SEQ ID NO: 380637 - DNA, 75 bp, synthetic construct
  source 1..75: mol_type = other DNA
ggtgagcgttgaacaggcgcgggcgattctggccgtggctgcaccacaacaatctgctgagtctgtacagagtga

SEQ ID NO: 380638 - DNA, 75 bp, synthetic construct
  source 1..75: mol_type = other DNA
ggcgcgcgtgatggccatcatcaattgtcccgaagctgttgggcgcgaggcgcaggcaaaagcgctcgctggcgt

SEQ ID NO: 380639 - DNA, 75 bp, synthetic construct
  source 1..75: mol_type = other DNA
cgccatgattttgcccatcaccctgtttgtcgccagtggctttgagcactgtatcgccaatttgtttgtgattcc

SEQ ID NO: 380640 - DNA, 75 bp, synthetic construct
  source 1..75: mol_type = other DNA
attacccagacatcacgtatcggctccattggtgtgatgatgagccatgtcagctatgccggtcatctggcgcag

SEQ ID NO: 380641 - DNA, 75 bp, synthetic construct
  source 1..75: mol_type = other DNA
gatacaatgtattacacggaagtatttgattgcattatagagaaatatttatattatttagcactgacaattcag

SEQ ID NO: 380642 - DNA, 75 bp, synthetic construct
  source 1..75: mol_type = other DNA
aggcaggaagagcaccaatcagattttcaatgagtgtcggcaaagcccggcgatgaaacgggtactggctgttta

SEQ ID NO: 380643 - DNA, 75 bp, synthetic construct
  source 1..75: mol_type = other DNA
ttaccattgtcatggacgtacagctgagctgctcatcctctcaattcacacaccgacaatggtagtgagctatta

SEQ ID NO: 380644 - DNA, 75 bp, synthetic construct
  source 1..75: mol_type = other DNA
gctggcggcgctagcaacacaatggcataaaccaaatagtgatccgttactgttggtgctggcagcggatcatgt

SEQ ID NO: 380645 - DNA, 75 bp, synthetic construct
  source 1..75: mol_type = other DNA
aaactgcttggtgaaaacgagtccatttatattccgctgggggcgacacactgtttggaaaacccagggaagata

SEQ ID NO: 380646 - DNA, 75 bp, synthetic construct
  source 1..75: mol_type = other DNA
acatcaccatgaaaaccagtgagtttgtgctggaggctgaccgcacgcgcattgacagcgaagtggtgatcaatg

SEQ ID NO: 380647 - DNA, 75 bp, synthetic construct
  source 1..75: mol_type = other DNA
atgattaccacggacgatgcgctggcttctttgtgtgaagccgtccgtgcctttccggcgatagccctggatact

SEQ ID NO: 380648 - DNA, 75 bp, synthetic construct
  source 1..75: mol_type = other DNA
caccgcggaaggcaacgtttgccacggcgatgtgattaatcacaaaaccgaaaacagctacgtgtatgccgaatc

SEQ ID NO: 380649 - DNA, 75 bp, synthetic construct
  source 1..75: mol_type = other DNA
caagctggtgacctttggcattgtgccggatctacctgaaaccggatatggctatattcgtcgcggtgaagtgtc

SEQ ID NO: 380650 - DNA, 75 bp, synthetic construct
  source 1..75: mol_type = other DNA
tccctatgaaacattaccgtccgctgttattaaacgacacgctatttttacgaaaactctgcgtcaccttggtaa

SEQ ID NO: 380651 - DNA, 75 bp, synthetic construct
  source 1..75: mol_type = other DNA
aacggtattgctgtactgccggtgaccggcacgctggtgcaccggctggggggtatgcggccattttccggaatg

SEQ ID NO: 380652 - DNA, 75 bp, synthetic construct
  source 1..75: mol_type = other DNA
tgccgaaaaagtggcgatgtttaccggtctgtctgttgatgccgtcacgggaacagaggccgccgtttttgaagg

SEQ ID NO: 380653 - DNA, 75 bp, synthetic construct
  source 1..75: mol_type = other DNA
ttctgtttatacaattactctatttaatatcgtataaacgtaatttcaatacaaaaagtataaatgacattttgt

SEQ ID NO: 380654 - DNA, 75 bp, synthetic construct
  source 1..75: mol_type = other DNA
cagctatgccggtcatctggcgcaggccggagtggatatcacgctgatttacgccggggcgcataaggtggatgg

SEQ ID NO: 380655 - DNA, 75 bp, synthetic construct
  source 1..75: mol_type = other DNA
ggttcgccaggacatgcagcagcgcattgatgcggcgcgccggatgtttgccgaaaaagtggcgatgtttaccgg

SEQ ID NO: 380656 - DNA, 75 bp, synthetic construct
  source 1..75: mol_type = other DNA
gcccgggctgtgctggctgcgggatcaggtaaggccgaaccggtctctgcatccacaaccgccctgtttgaacat

SEQ ID NO: 380657 - DNA, 75 bp, synthetic construct
  source 1..75: mol_type = other DNA
cacccgttacaaggtgattataaaggttacagggatgcacatatcgagcctgattggttattgatttacaaaatt

SEQ ID NO: 380658 - DNA, 75 bp, synthetic construct
  source 1..75: mol_type = other DNA
aaaaacagaaagcagttgtcagggctggcgctggagatggacccggagaataaattctccgggatgatgcagtaa

SEQ ID NO: 380659 - DNA, 75 bp, synthetic construct
  source 1..75: mol_type = other DNA
atgctggctgtgccttttgcaccgcaggccgttgcgaaaacgactgccgctaccaccgcttcgcagccggaaatc

SEQ ID NO: 380660 - DNA, 75 bp, synthetic construct
  source 1..75: mol_type = other DNA
agcgaaaggacgtgaacagcttgccacgatgctggcaggacaacagggcatgagcattgaacaggcccgggcgat

SEQ ID NO: 380661 - DNA, 75 bp, synthetic construct
  source 1..75: mol_type = other DNA
gccatcagcgtgatggctgcggcgctgaacactcatgatacaggaggcactatgccgcaattaactgcaacggaa

SEQ ID NO: 380662 - DNA, 75 bp, synthetic construct
  source 1..75: mol_type = other DNA
cgcaacttaatagccaactttgcaacggatgtggagcatgtgcagccagttgtccggtatcagccataactgcgg

SEQ ID NO: 380663 - DNA, 75 bp, synthetic construct
  source 1..75: mol_type = other DNA
cgcgaccagatttaatcccgtaataaaagatttttatacgcgactcattacagctggaaaagtgaggaaagttgc

SEQ ID NO: 380664 - DNA, 75 bp, synthetic construct
  source 1..75: mol_type = other DNA
ccgcaatgatcgtccgtcgtcgtcagttgaaccatatgctggtcgctgagcgtaatcgtctctatccttctcatc

SEQ ID NO: 380665 - DNA, 75 bp, synthetic construct
  source 1..75: mol_type = other DNA
cgcgctgcccgtctcccgtcaccatctggcagacactgctcacccaactgttggaccagcattacgctcacactg

SEQ ID NO: 380666 - DNA, 75 bp, synthetic construct
  source 1..75: mol_type = other DNA
gcgtgcctggcgtatcaggccgttgaatgccgtcgctgccaggatagctgtgaaccgatggcaattatctttcgc

SEQ ID NO: 380667 - DNA, 75 bp, synthetic construct
  source 1..75: mol_type = other DNA
tgactcattgtacccgctgcgacgcctgtattaatgcttgtgaaaacaacattttgcaacgtggtgcgggcggct

SEQ ID NO: 380668 - DNA, 75 bp, synthetic construct
  source 1..75: mol_type = other DNA
gtgtttattggttttgattacggtacagcaaactgttcagtggcggtcatgcgcgacggtaagccgcaattactg

SEQ ID NO: 380669 - DNA, 75 bp, synthetic construct
  source 1..75: mol_type = other DNA
cttaaaaccgcagcaggtagcgctgtttgaggatctggtctgcgcaatgatgttgcacattcgccaacaggcgca

SEQ ID NO: 380670 - DNA, 75 bp, synthetic construct
  source 1..75: mol_type = other DNA
cagcaaactgttcagtggcggtcatgcgtgacggtaaaccgcaattactgaaaatggaaaacgacagcacgctgc

SEQ ID NO: 380671 - DNA, 75 bp, synthetic construct
  source 1..75: mol_type = other DNA
tcaaaacgagctcgaccggatcaatgagcaaatgaaacaacacatgacagcattcttccaggagcaggccagact

SEQ ID NO: 380672 - DNA, 75 bp, synthetic construct
  source 1..75: mol_type = other DNA
gtggtggatatcggcggtggtacgactgactgttcattgctgctgatggggccgcagtggcgttcgcgtctcgat

SEQ ID NO: 380673 - DNA, 75 bp, synthetic construct
  source 1..75: mol_type = other DNA
gttgggtcacagtggttgccgtattggcggtaacgatctggatatcgcgctggcatttaaacacctgatgccgct

SEQ ID NO: 380674 - DNA, 75 bp, synthetic construct
  source 1..75: mol_type = other DNA
ggtgttactgctctgtttaagcggagagttaaccaccgccgtggcgcttccggccatttactctgacgccaaccc

SEQ ID NO: 380675 - DNA, 75 bp, synthetic construct
  source 1..75: mol_type = other DNA
atcctcgccgcattctgcggacgcccgatgtcatggggttttgcctccatggtggaagagtattccggtgttacg

SEQ ID NO: 380676 - DNA, 75 bp, synthetic construct
  source 1..75: mol_type = other DNA
ggtcaccgctaaaggcaatcttgcgcgatccttccatcaccaaatttctccatgcgggcagtgaagatctggaag

SEQ ID NO: 380677 - DNA, 75 bp, synthetic construct
  source 1..75: mol_type = other DNA
atcccttttatcttcagcagcgagaggttggctagagaaacttgcttattcagaaaatcctgcaaatttactcga

SEQ ID NO: 380678 - DNA, 75 bp, synthetic construct
  source 1..75: mol_type = other DNA
attgccggaagaggccttaccgcagccgatgcttaacctgatggacatgccgggttatcgtaaagcgtttaaagc

SEQ ID NO: 380679 - DNA, 75 bp, synthetic construct
  source 1..75: mol_type = other DNA
cgatgtcgtggggatttgcctccatggtggaagagtataccggcgttacgctggacaagagcgaatcgcgcaccg

SEQ ID NO: 380680 - DNA, 75 bp, synthetic construct
  source 1..75: mol_type = other DNA
ctggatgaatgtcgcctgatgcaaacacgtcgccaggaggtcgttgcgccggaagatgcctggcgtgatatcacc

SEQ ID NO: 380681 - DNA, 75 bp, synthetic construct
  source 1..75: mol_type = other DNA
taacggtgaatttgataagtttgctatgagtgaatttgaacgtagctggacattgaaaccattcattaccaaacc

SEQ ID NO: 380682 - DNA, 75 bp, synthetic construct
  source 1..75: mol_type = other DNA
acaggtatgcgcgttatgatcttagaaggaaaatcgaaatgcaacatgaagagtttcagaaaatgacagagcgcg

SEQ ID NO: 380683 - DNA, 75 bp, synthetic construct
  source 1..75: mol_type = other DNA
ccgcgactgcccccaaaatgacctgtaccgcaacaacctcaatcacccttgatacgccagaagtgatctgcacta

SEQ ID NO: 380684 - DNA, 75 bp, synthetic construct
  source 1..75: mol_type = other DNA
ttttctgcttctgccggtgggatatggcccagcctttccagcaatcgtcgattgttataccagtccacccacgtg

SEQ ID NO: 380685 - DNA, 75 bp, synthetic construct
  source 1..75: mol_type = other DNA
tcaccccccacgacctgcgacggacattcatcacccgcctgctggagcagagagtggacattaatgtggtgcgcc

SEQ ID NO: 380686 - DNA, 75 bp, synthetic construct
  source 1..75: mol_type = other DNA
gttcgatgcgtatattggcggtctggcaccctcggggcggcggggcatcaccagcctgttaaaccgcagcgctgg

SEQ ID NO: 380687 - DNA, 75 bp, synthetic construct
  source 1..75: mol_type = other DNA
atcgccctgccgattctgccgtggtggaatgcggttgccatcaacgacgtacctgcgcaaagtgatttctacagt

SEQ ID NO: 380688 - DNA, 75 bp, synthetic construct
  source 1..75: mol_type = other DNA
ggcaccgaagagatttatttcgccacgttccatctcggcgtggatggcggcattgaagttacggccagccataaa

SEQ ID NO: 380689 - DNA, 75 bp, synthetic construct
  source 1..75: mol_type = other DNA
ggcaccgaagagatttatttcgccacgttccatctcggcgtggatggcggcattgaagttactgccagccataat

SEQ ID NO: 380690 - DNA, 75 bp, synthetic construct
  source 1..75: mol_type = other DNA
ggcaccgaagagatttatttcgccacgttccatctcggcgtggatggcggcattgaagttacagccagccataag

SEQ ID NO: 380691 - DNA, 75 bp, synthetic construct
  source 1..75: mol_type = other DNA
cagcggggataccggactgcgcgatgtccagcgtctggcagaagcgaacgactttccccccgtcgatgaaaccaa

SEQ ID NO: 380692 - DNA, 75 bp, synthetic construct
  source 1..75: mol_type = other DNA
cagcggggataccggactgcgcgaagtccagcgtctggcagaagctaacgactttccccccgtcgatgaaaccaa

SEQ ID NO: 380693 - DNA, 75 bp, synthetic construct
  source 1..75: mol_type = other DNA
cagcggtgataccggactgcgcgacgtccagcgtctggcagaagcaaacgactttccccccgtcgatgaaaccaa

SEQ ID NO: 380694 - DNA, 75 bp, synthetic construct
  source 1..75: mol_type = other DNA
ataaacgcagctgctgaaaggcgctggatgacgccgtcaggtaaggctaatttcattaccagtaaagggctgtta

SEQ ID NO: 380695 - DNA, 75 bp, synthetic construct
  source 1..75: mol_type = other DNA
tcgatgattcatgcctcgcgtggcgtgttaaaacccgccggtgtaatgctgaaatcagagtgtgcagtggtcgcg

SEQ ID NO: 380696 - DNA, 75 bp, synthetic construct
  source 1..75: mol_type = other DNA
accgaaccggtggtgcgcttgaatgtggaatcgaaaggagatagtgaaatcgtaattaaaatgactaaatcgata

SEQ ID NO: 380697 - DNA, 75 bp, synthetic construct
  source 1..75: mol_type = other DNA
atgcccaaaaatagagtaataactagttttaaagcctatgatattcgcggaaaactaggcgaagaactgaatgaa

SEQ ID NO: 380698 - DNA, 75 bp, synthetic construct
  source 1..75: mol_type = other DNA
atgaaaaatttatcctgctttaaagcctatgatattcgcggaaaattaggcgaagaactgaatgaagatattgcc

SEQ ID NO: 380699 - DNA, 75 bp, synthetic construct
  source 1..75: mol_type = other DNA
agggagctgccggtggttggggggctgtcaaatctgtagcgaatgcagtccgtaagcagatggatatacgccagg

SEQ ID NO: 380700 - DNA, 75 bp, synthetic construct
  source 1..75: mol_type = other DNA
cagattgaatgtggaatcgaaagcagacaccaatctgatgcaaataaagacggaagatattttaaatttgttaag

SEQ ID NO: 380701 - DNA, 75 bp, synthetic construct
  source 1..75: mol_type = other DNA
gtgcccgcagtgacagaggatacgctggcgaaaatcgaacaacttaccgggtgtgggcgatcctgcgggcgttgc

SEQ ID NO: 380702 - DNA, 75 bp, synthetic construct
  source 1..75: mol_type = other DNA
agcgaaaccttaaaacgggcgctggcgaaaggtttacaggatgcgggcgtcgacgtgctggatatcggtatgtcc

SEQ ID NO: 380703 - DNA, 75 bp, synthetic construct
  source 1..75: mol_type = other DNA
cattgaagttaccgccagccataatccgatggattataacggcatgaagctggtgcgcgagggggctcgcccgat

SEQ ID NO: 380704 - DNA, 75 bp, synthetic construct
  source 1..75: mol_type = other DNA
gctatcgcctggtacgtagcgcagaagagagcaaaattgcgctttcaagcgtagcggaaacccgcgcctcactgc

SEQ ID NO: 380705 - DNA, 75 bp, synthetic construct
  source 1..75: mol_type = other DNA
caatcagtttgaatccctgccagcaaaggttcgccaggacatgcagcagcgcattgatgcggcgcgccggatgtt

SEQ ID NO: 380706 - DNA, 75 bp, synthetic construct
  source 1..75: mol_type = other DNA
gaggctaaaggtcgtgaacaactggcggcaacgctggcggctatgccggtggaaaaagcccgcccgatccttgcg

SEQ ID NO: 380707 - DNA, 75 bp, synthetic construct
  source 1..75: mol_type = other DNA
cctcacgccgctcaagctggtgatcaactcaggtaacggcgcggcgggtccggtggtggacgccatcgaagcccg

SEQ ID NO: 380708 - DNA, 75 bp, synthetic construct
  source 1..75: mol_type = other DNA
ccggacacgcctttattaaagaacgtatgcgcaaggaagacgccatctacggtggcgaaatgagcgcccaccatt

SEQ ID NO: 380709 - DNA, 75 bp, synthetic construct
  source 1..75: mol_type = other DNA
cagcggtgataccggactgcgcgatgtccagcgtctggcagaagccaacgacttccctcccgttgatgaaaccaa

SEQ ID NO: 380710 - DNA, 75 bp, synthetic construct
  source 1..75: mol_type = other DNA
tgtcggcctgctggctgaggcgttcctgcagaagcagccgggagcgaaaatcattcacgacccgcgcctgacgtg

SEQ ID NO: 380711 - DNA, 75 bp, synthetic construct
  source 1..75: mol_type = other DNA
gggcacgtgattgatgaggtggagaaacgcttcgcggcggccggggtgccggtaacctttatcaaggtgcatcac

SEQ ID NO: 380712 - DNA, 75 bp, synthetic construct
  source 1..75: mol_type = other DNA
gctggttacccagacatcccgtatcggctccattggcgtgatgatgagccatgtcagctatgccggtcatctggc

SEQ ID NO: 380713 - DNA, 75 bp, synthetic construct
  source 1..75: mol_type = other DNA
ccaccagtgcggtgcgccgtgcgacagccataccaactgtaaaaatgatggctgccacctgctgtttattcagtg

SEQ ID NO: 380714 - DNA, 75 bp, synthetic construct
  source 1..75: mol_type = other DNA
atgccttcgacccggctttagatggcttacgcctgaatatcgcgttggatgatgacgggaaatccttctgggtac

SEQ ID NO: 380715 - DNA, 75 bp, synthetic construct
  source 1..75: mol_type = other DNA
ggcggcattattgaatacgcccgcaaagcgcgggaacaaggtctgccggtccgctttattggtaaaaatttcgtt

SEQ ID NO: 380716 - DNA, 75 bp, synthetic construct
  source 1..75: mol_type = other DNA
agcgggcccggcggtattactggcctatctgttcgccggattactggtggttatgattatgcgaatgctggcgga

SEQ ID NO: 380717 - DNA, 75 bp, synthetic construct
  source 1..75: mol_type = other DNA
taccatcggctggctgtactggtggttttgggtactggttatcccgctggaagccaacatcgccgccatgatcct

SEQ ID NO: 380718 - DNA, 75 bp, synthetic construct
  source 1..75: mol_type = other DNA
caatttgatgccagtaacgtgggggaatacctgcaagcagcggaagtgaacgccatgcttgatgatcccgatgcg

SEQ ID NO: 380719 - DNA, 75 bp, synthetic construct
  source 1..75: mol_type = other DNA
ttcccggcacaggcgctggcctgcgagctgtataaagtcgccggtatccgtgcggtagaaattggctctttcctg

SEQ ID NO: 380720 - DNA, 75 bp, synthetic construct
  source 1..75: mol_type = other DNA
aaagacagtgaggctctgggggcgctgggccaggcatattcacagaaaggcgatcgcgccaatgcagtggcgaat

SEQ ID NO: 380721 - DNA, 75 bp, synthetic construct
  source 1..75: mol_type = other DNA
ctgacggacttcgggggaaaaacgagtatttttagtcatcctgtttacctctttctcagggagtttagtctccag

SEQ ID NO: 380722 - DNA, 75 bp, synthetic construct
  source 1..75: mol_type = other DNA
aattccggcagataccttccgtgagcagctgccaaaagcagtcgagatgatgcaggcacataaagataaaaaaat

SEQ ID NO: 380723 - DNA, 75 bp, synthetic construct
  source 1..75: mol_type = other DNA
aagatgtgtttatcgatttactgaccgacagcggcaccggggcggtgacgcagagtatgcaggccgcgatgatgc

SEQ ID NO: 380724 - DNA, 75 bp, synthetic construct
  source 1..75: mol_type = other DNA
aaccgttccgcattcgtgttattgagccagtaaaacgtaccactcgtgcttaccgtgaagaagcgattattaaat

SEQ ID NO: 380725 - DNA, 75 bp, synthetic construct
  source 1..75: mol_type = other DNA
aagccattggtcgctgggcgggctataccatcggctggttgtactggtggttttgggtactggttatcccgctgg

SEQ ID NO: 380726 - DNA, 75 bp, synthetic construct
  source 1..75: mol_type = other DNA
ggacggcgcggtagatattgcccgtgaagcggctgatatcatcctgctggaaaaaagcctgatggtgctggaaga

SEQ ID NO: 380727 - DNA, 75 bp, synthetic construct
  source 1..75: mol_type = other DNA
gacgccgatgcataaagaacgcattgtgaccttgctgaagcgcgaagggcatgtggttggctttatgggcgatgg

SEQ ID NO: 380728 - DNA, 75 bp, synthetic construct
  source 1..75: mol_type = other DNA
caaaggcgcattgcaggaaatcctcaatgtgtgttcgcaggtgcgtcacaatggcgagattgtgccgctcgatga

SEQ ID NO: 380729 - DNA, 75 bp, synthetic construct
  source 1..75: mol_type = other DNA
ggaaggtctgctgacgcagaacgaagaactgtgggagccgctctacgcttgctaccagtcccttcaggcgtgtgg

SEQ ID NO: 380730 - DNA, 75 bp, synthetic construct
  source 1..75: mol_type = other DNA
tcaccgcagacattacccgtcacgtacttctgctcagccgctggaaagccaccgacctgttcctgaaagatattc

SEQ ID NO: 380731 - DNA, 75 bp, synthetic construct
  source 1..75: mol_type = other DNA
ctatttcagtcgggctggtttgtggtgggattattgtcgcaaacgttgattgtgcatatgatccgcacccgtcgg

SEQ ID NO: 380732 - DNA, 75 bp, synthetic construct
  source 1..75: mol_type = other DNA
ggctttcgcgttcttctattagcgtgctgattaacggcgaatccggtaccggtaaagaactggtcgctcatgccc

SEQ ID NO: 380733 - DNA, 75 bp, synthetic construct
  source 1..75: mol_type = other DNA
atgcaaaattaatcatggactgcgtgatattactatccgtaaccagttgcctgaactcagcgctgtataccgcgt

SEQ ID NO: 380734 - DNA, 75 bp, synthetic construct
  source 1..75: mol_type = other DNA
aatggcggttgccacgcccgacacgggttcgttttccacctatgcagataaagctattggtcgttgggcgggcta

SEQ ID NO: 380735 - DNA, 75 bp, synthetic construct
  source 1..75: mol_type = other DNA
aactgtttctcgccgaatataaagcgggtcgcacgccaaacccggatattctgtgcaacaaagagatcaagttta

SEQ ID NO: 380736 - DNA, 75 bp, synthetic construct
  source 1..75: mol_type = other DNA
ggttgccgcgcgcgagctgggcgtagaagcgaagttgctgcatccggaaaccgaagccgcgctgacgcgtctggc

SEQ ID NO: 380737 - DNA, 75 bp, synthetic construct
  source 1..75: mol_type = other DNA
acggcccaacaaccgatatcatcggcgaagcaccagccatgcaggacgtgttccgaattattggtcggctttcgc

SEQ ID NO: 380738 - DNA, 75 bp, synthetic construct
  source 1..75: mol_type = other DNA
agcgcggttaataatcagggcgttctcacactttgctataccggtaatgttaagtttgatgatggcagcagaacg

SEQ ID NO: 380739 - DNA, 75 bp, synthetic construct
  source 1..75: mol_type = other DNA
gatcctcgatgaacccactgccagcctcgacactcaggaagtggaactcctgtttggcctgatgcgtcagcttcg

SEQ ID NO: 380740 - DNA, 75 bp, synthetic construct
  source 1..75: mol_type = other DNA
acgcttgagcgggaagcccgcgctaaaagggaggccgagcttctcaatgcgcaggacgacgaagagaaagacccg

SEQ ID NO: 380741 - DNA, 75 bp, synthetic construct
  source 1..75: mol_type = other DNA
tgtatccggtactgccggacagatgaaaacatttgagccaccacaactgaataaggccagtttccttgttcgtcg

SEQ ID NO: 380742 - DNA, 75 bp, synthetic construct
  source 1..75: mol_type = other DNA
gtcccggcgagatcgtcgggttggcaggtttgctgggatcaggacgtacagaaactgcggaagtgatcttcggta

SEQ ID NO: 380743 - DNA, 75 bp, synthetic construct
  source 1..75: mol_type = other DNA
cagatcgaactggtaaaaatgatgctggggcgtgaactggacacccacgcgcttcagcgtgccgggagaacattg

SEQ ID NO: 380744 - DNA, 75 bp, synthetic construct
  source 1..75: mol_type = other DNA
ggggcgtgaactcgacactcatgcgctacagcgtgccgggcgaacattgttgagcgacaaacctgttgccgagtt

SEQ ID NO: 380745 - DNA, 75 bp, synthetic construct
  source 1..75: mol_type = other DNA
agcgaaaaaaagatccaggcttccaggtgaaggcggcgaatagcgcaaaactggtggaaaaactggcaaatatgt

SEQ ID NO: 380746 - DNA, 75 bp, synthetic construct
  source 1..75: mol_type = other DNA
cgccttctgccaacgcttacgttgcgcgggcgacaatttatcgccaacgtcataatgtcccggccgcggtgagtg

SEQ ID NO: 380747 - DNA, 75 bp, synthetic construct
  source 1..75: mol_type = other DNA
aacgtcacccaggagatgcccgacttgagcgcagtctggcggctattccagttgaagtgaaaagcgttacgactg

SEQ ID NO: 380748 - DNA, 75 bp, synthetic construct
  source 1..75: mol_type = other DNA
cagtaatgccagaaaaagttgagaacttactggaaaggctggtcaaaggcttacagcgagcaatgcatccactta

SEQ ID NO: 380749 - DNA, 75 bp, synthetic construct
  source 1..75: mol_type = other DNA
ggattgacagccatttcctggtaatgttctcccctgaattgtctgtttatccagatcctgacattatcctgggct

SEQ ID NO: 380750 - DNA, 75 bp, synthetic construct
  source 1..75: mol_type = other DNA
ctggttataaatgttattgcttcaactatgacggcgctaatcacggtgattatgacggtgtaaaaataattcatc

SEQ ID NO: 380751 - DNA, 75 bp, synthetic construct
  source 1..75: mol_type = other DNA
cggctggctacgaccgatttcccgcaaagaacagcaagagattgccgaacgctttatccgccagcttggcattcg

SEQ ID NO: 380752 - DNA, 75 bp, synthetic construct
  source 1..75: mol_type = other DNA
aggtgttgttattcagctcagcggaccttcatgagtggacgagtcagggcgaaatcgccggttatggcatcaatg

SEQ ID NO: 380753 - DNA, 75 bp, synthetic construct
  source 1..75: mol_type = other DNA
cattgctgaaagatttcgcagtagaaccttcattttattttttacactcatactattacgaatgtgatgacacag

SEQ ID NO: 380754 - DNA, 75 bp, synthetic construct
  source 1..75: mol_type = other DNA
gacaacgttgatttcagcctgcgccgtggcgaaatcatggcgctgctcggtgaaaacggggcaggaaaatcaacg

SEQ ID NO: 380755 - DNA, 75 bp, synthetic construct
  source 1..75: mol_type = other DNA
taaaaattgatttagtgcttacggaagatctcatatctgaagataagctacaggaaattattcaatctgatgaca

SEQ ID NO: 380756 - DNA, 75 bp, synthetic construct
  source 1..75: mol_type = other DNA
taaaaattgatttagtgcttacagaagatatcataccagaggataagttacaggaaattattcaatctgatgata

SEQ ID NO: 380757 - DNA, 75 bp, synthetic construct
  source 1..75: mol_type = other DNA
cgatggaaatcgttctacaaaccactggggacgatattttgagcctcgattttgacggcgcattaatccttgaac

SEQ ID NO: 380758 - DNA, 75 bp, synthetic construct
  source 1..75: mol_type = other DNA
caccaggaaatcctccgcaccgaaggattaagtaaatttttccccggcgtcaaagcgttagataacgttaatttc

SEQ ID NO: 380759 - DNA, 75 bp, synthetic construct
  source 1..75: mol_type = other DNA
taggtcgcgaacccaaacgtttcggccttctacgccgtaaagagatagaaaagcgcgccaccgaactgatggcat

SEQ ID NO: 380760 - DNA, 75 bp, synthetic construct
  source 1..75: mol_type = other DNA
caggcttgctgggatccggacgtaccgaaaccgccgaagtgatcttcggtatcaaacctgctgacagcggcacgg

SEQ ID NO: 380761 - DNA, 75 bp, synthetic construct
  source 1..75: mol_type = other DNA
tcatccttgccttacaagcccagcgcggctggctacggccgatctctcgcaaagaacagcaagagattgccgaac

SEQ ID NO: 380762 - DNA, 75 bp, synthetic construct
  source 1..75: mol_type = other DNA
atgacgaccgaccaacaccaggaaatcctccgtaccgaaggattaagtaaatttttccccggcgtcaaagcgtta

SEQ ID NO: 380763 - DNA, 75 bp, synthetic construct
  source 1..75: mol_type = other DNA
tcgaagtacgccccggcgagatcgtcggcctggcaggattgctgggatcaggacgtaccgaaaccgccgaagtga

SEQ ID NO: 380764 - DNA, 75 bp, synthetic construct
  source 1..75: mol_type = other DNA
tgaaactcgactatgaaacgctgatggcagcgctgctacatgacgtgattgaagatactcccgccacctaccagg

SEQ ID NO: 380765 - DNA, 75 bp, synthetic construct
  source 1..75: mol_type = other DNA
gaagatactcccgccacctaccaggatatggaacagctttttggtaaaagcgtcaccgagctggtagagggggtg

SEQ ID NO: 380766 - DNA, 75 bp, synthetic construct
  source 1..75: mol_type = other DNA
ggttgaggtccagatccgtaccgaagatatggatcagatggcggagatgggtgttgccgcgcactgggcttataa

SEQ ID NO: 380767 - DNA, 75 bp, synthetic construct
  source 1..75: mol_type = other DNA
caatgattggtccgcacggcgtaccggttgaagtccagatccgtactgaggatatggaccagatggcggagatgg

SEQ ID NO: 380768 - DNA, 75 bp, synthetic construct
  source 1..75: mol_type = other DNA
gcgactcaaagccacgggcatctgccgattaaaggtgctgatggcgtgttgatcacctttgcgaaatgctgccgc

SEQ ID NO: 380769 - DNA, 75 bp, synthetic construct
  source 1..75: mol_type = other DNA
gtgttgccgcacactgggcttataaagagcacggcgagaccagcaccactgcgcaaatccgcgcccagcgttgga

SEQ ID NO: 380770 - DNA, 75 bp, synthetic construct
  source 1..75: mol_type = other DNA
gacacttcatttgaatgttctgtagatgatgtggaagtcgtaggacgtgcagtcaaagtaatcaagaacctctaa

SEQ ID NO: 380771 - DNA, 75 bp, synthetic construct
  source 1..75: mol_type = other DNA
tccgttcgcgcgggcgtgtcactggtgctgggaaaaaatatcctcgccgcccgtgggcgcttcagctggcgggag

SEQ ID NO: 380772 - DNA, 75 bp, synthetic construct
  source 1..75: mol_type = other DNA
aaatacgttgctccatacgttaaccgcgtagatgcccagggcggtgacggcattcgtactgtacaggagttgcaa

SEQ ID NO: 380773 - DNA, 75 bp, synthetic construct
  source 1..75: mol_type = other DNA
tgaaactcgactatgaaacgctgatggcggcgctgctgcatgacgtgattgaagatactcccgccacctaccagg

SEQ ID NO: 380774 - DNA, 75 bp, synthetic construct
  source 1..75: mol_type = other DNA
ggcaaacagagtgttacgcgacagttttcctgctgactggataattcagtgcgcactagaaaccggtgtttcgtt

SEQ ID NO: 380775 - DNA, 75 bp, synthetic construct
  source 1..75: mol_type = other DNA
aagtccagacagcaactttgcgatcacttgggcgcatcaaaaagcactatggcaaacagatacttaagagatagt

SEQ ID NO: 380776 - DNA, 75 bp, synthetic construct
  source 1..75: mol_type = other DNA
actttgtcgtcagttcgaaagcgcgcgctaaaattcgccagctgctgaaaaaccttaaacgtgatgattccgtga

SEQ ID NO: 380777 - DNA, 75 bp, synthetic construct
  source 1..75: mol_type = other DNA
ttcccagctgaatgggttatacagtgcgcccttgaaactggggtttcactgctttggttaacgactgggcaaggg

SEQ ID NO: 380778 - DNA, 75 bp, synthetic construct
  source 1..75: mol_type = other DNA
accaggacgactcatcctttgagtgttctgttgatgatgtggaagttgtcgggcgagccattaaagtaatcaaga

SEQ ID NO: 380779 - DNA, 75 bp, synthetic construct
  source 1..75: mol_type = other DNA
ctgcatacttataccattaaggagtgggaaggattgcaggataccatctttgcttctcctccttgtcgtggagcg

SEQ ID NO: 380780 - DNA, 75 bp, synthetic construct
  source 1..75: mol_type = other DNA
cccttgaaacaggtatttctcttctttggctgacaacgggccaaggggaaatgtatcctcaaacagaagaaaaaa

SEQ ID NO: 380781 - DNA, 75 bp, synthetic construct
  source 1..75: mol_type = other DNA
atcaagatgaatcatcttttgagtgcagcctggatgatatcgaggttgtaggccacgtcttaaaagttattaaga

SEQ ID NO: 380782 - DNA, 75 bp, synthetic construct
  source 1..75: mol_type = other DNA
atcaggaagaaacaacctttgaatgtgcagttgatgacgtagccgttgtagggcgtgtggtaaaagtgattaaga

SEQ ID NO: 380783 - DNA, 75 bp, synthetic construct
  source 1..75: mol_type = other DNA
caacatgcgcacgctgggctcactccgcccggacaaacgtcgccgcatcgcccgtgaaacccttgaaatatacag

SEQ ID NO: 380784 - DNA, 75 bp, synthetic construct
  source 1..75: mol_type = other DNA
ggcagcgctgctgcatgacgtgattgaagatactcccgccacctaccaggatatggaacagctttttggtaaaag

SEQ ID NO: 380785 - DNA, 75 bp, synthetic construct
  source 1..75: mol_type = other DNA
cgtgctgatcacctttgcgaaatgctgccgccctattcctggcgacccgattatcgcccacgtcagccccggtaa

SEQ ID NO: 380786 - DNA, 75 bp, synthetic construct
  source 1..75: mol_type = other DNA
gtttggccgaagcgatccctcgccagatttggctacaacagatgtacgtgatgcggccatgtttcgttcttccgc

SEQ ID NO: 380787 - DNA, 75 bp, synthetic construct
  source 1..75: mol_type = other DNA
ttattgatgaagcatggcgaatcttcggtagcgataaggatatgacggctgagaagaaatcatttattgctgaac

SEQ ID NO: 380788 - DNA, 75 bp, synthetic construct
  source 1..75: mol_type = other DNA
cagacggattctggtacttcattaacctgagtaaattaccacaggggattagtatgattatctcctcaatggcta

SEQ ID NO: 380789 - DNA, 75 bp, synthetic construct
  source 1..75: mol_type = other DNA
cgcgacgttattccgggaattgtggtgaaaattccggtaacatccgaaggtctggcagcaattaaattgctgaaa

SEQ ID NO: 380790 - DNA, 75 bp, synthetic construct
  source 1..75: mol_type = other DNA
cctgcaaaccttacacgtctggatcaactaacctggcaactgatgcaggcaggacagccacgtgaagctgccgat

SEQ ID NO: 380791 - DNA, 75 bp, synthetic construct
  source 1..75: mol_type = other DNA
catgagcaatgaagatctacttgctgccgccaataccgctcaggcggcaggaaatggcgcggctcgcgatcgctg

SEQ ID NO: 380792 - DNA, 75 bp, synthetic construct
  source 1..75: mol_type = other DNA
gtattgcagataattgcccggcgatagtccgcctgctgggcgatatgtcgccttcctacgatgctgcggcctgga

SEQ ID NO: 380793 - DNA, 75 bp, synthetic construct
  source 1..75: mol_type = other DNA
ggcgcaacatcgggctgatgacgatggaattatttaccccagcacgcgatgtgctggcgcagcgcactcttggtt

SEQ ID NO: 380794 - DNA, 75 bp, synthetic construct
  source 1..75: mol_type = other DNA
tgagcgcagtctggcggctattccagttgaagtgaaaagcgttacgactgttgaagaactgcttgcccagcaaaa

SEQ ID NO: 380795 - DNA, 75 bp, synthetic construct
  source 1..75: mol_type = other DNA
catgagcaatgaggatctgcttgctgctgccaataccgcccaggcggcaggaaatggcgcggctcgcgatcgctg

SEQ ID NO: 380796 - DNA, 75 bp, synthetic construct
  source 1..75: mol_type = other DNA
gagcaactggaagaaaacctgggctacaaactgccggtagaatttgttccggttcgttttacctcgtggatgggc

SEQ ID NO: 380797 - DNA, 75 bp, synthetic construct
  source 1..75: mol_type = other DNA
gtggaatcgctgtcgctggaactggtcctcacggctcacccaaccgaaattacccgtcgtacactgatccacaaa

SEQ ID NO: 380798 - DNA, 75 bp, synthetic construct
  source 1..75: mol_type = other DNA
tcgctttaaatacggtctgccggaaatcactgtcagcagcctgtcgctgtacaccggggcgattctggaagccaa

SEQ ID NO: 380799 - DNA, 75 bp, synthetic construct
  source 1..75: mol_type = other DNA
ctaccggacgatccggcactcatcagacaactggcttacgtgaatcagcgtctggatgatatgcctgcgacgcaa

SEQ ID NO: 380800 - DNA, 75 bp, synthetic construct
  source 1..75: mol_type = other DNA
cataatgtcccggcggcggtgagtgatttgcgcgccgcgctggaactggaaccgaataatagcaacatccaggca

SEQ ID NO: 380801 - DNA, 75 bp, synthetic construct
  source 1..75: mol_type = other DNA
gctaccagtcacttcaggcatgtggcatggggattatcgccaacggcgatctgctcgatactctgcgccgcgtga

SEQ ID NO: 380802 - DNA, 75 bp, synthetic construct
  source 1..75: mol_type = other DNA
cgccgctggttgtcgggcgcaacatcgggctgatgacgatggaattattcaccccggcacgcgatgtgctggcgc

SEQ ID NO: 380803 - DNA, 75 bp, synthetic construct
  source 1..75: mol_type = other DNA
attggagcattaatgcgaaaacttgtgcactggtgctatggtgtgctgaaaacgcagttaccattcgacgcagaa

SEQ ID NO: 380804 - DNA, 75 bp, synthetic construct
  source 1..75: mol_type = other DNA
tagcggcaacgggtgcaccggcgcaaggtagcccgatgtctttgattttgatgctggtggtattcggtctgattt

SEQ ID NO: 380805 - DNA, 75 bp, synthetic construct
  source 1..75: mol_type = other DNA
tttgaaaaatacttcatttttcttgtatatgcctcaattgttcatttgttttctacggttattacaattggcgaa

SEQ ID NO: 380806 - DNA, 75 bp, synthetic construct
  source 1..75: mol_type = other DNA
acgtcgcagaagtcgaacgtctggcacgcatattcccgattgccggggtgacaactaacccgagcattatcgctg

SEQ ID NO: 380807 - DNA, 75 bp, synthetic construct
  source 1..75: mol_type = other DNA
tcaccctacccttagatgtagcgcaacaaatgctcaacactcctgcggtagagtcggctatagagaagtttgagc

SEQ ID NO: 380808 - DNA, 75 bp, synthetic construct
  source 1..75: mol_type = other DNA
acaactaacccgagcattatcgctgccagcaaggagtccatatgggaagttctgccgcgtctgcaaaaagcgatt

SEQ ID NO: 380809 - DNA, 75 bp, synthetic construct
  source 1..75: mol_type = other DNA
gctggcgttaacccgcgccgccagagctattacccatcgtaccgtgctggtgggcaatgcggcgcaaaccctgca

SEQ ID NO: 380810 - DNA, 75 bp, synthetic construct
  source 1..75: mol_type = other DNA
cgccgcagaagattaccaactggcggcgctggggcaggttgtcgaattgcacaatgtcgggcaacggctgtttgc

SEQ ID NO: 380811 - DNA, 75 bp, synthetic construct
  source 1..75: mol_type = other DNA
gagacgctgacgggccgcgtgctggtagccgctgatggcacccattcagcgttagccactgtgtgcggcgttgac

SEQ ID NO: 380812 - DNA, 75 bp, synthetic construct
  source 1..75: mol_type = other DNA
ttgcagaaaccctgactcaggcgcaggagcgcggagaagacatgggtgattacggcgtattgtgccgttatcagc

SEQ ID NO: 380813 - DNA, 75 bp, synthetic construct
  source 1..75: mol_type = other DNA
ctgccgtgaactccaggctgcgtttggctggcgactggggcaaattactcatgccggaaaacgcagtgcttatcc

SEQ ID NO: 380814 - DNA, 75 bp, synthetic construct
  source 1..75: mol_type = other DNA
gttagccaccgcgtgcggcgttgactggcagcaggagccttatgagcaactggcggtgattgccaacgttgcgac

SEQ ID NO: 380815 - DNA, 75 bp, synthetic construct
  source 1..75: mol_type = other DNA
tggtcagcaagcgcccgaccactgaaccgttgaaagaagttcagtttaaggccggtactgacagcctgttccaga

SEQ ID NO: 380816 - DNA, 75 bp, synthetic construct
  source 1..75: mol_type = other DNA
ggttgaaggtggcgagatccgcgcacgtggcgtagaaatcgaagcgaaagcggcgctgtcggcgagtgttaacgt

SEQ ID NO: 380817 - DNA, 75 bp, synthetic construct
  source 1..75: mol_type = other DNA
atgacagataaacgcaaagatggctcaggcaaattgctgtattgctctttttgcggtaaaagccagcatgaagtg

SEQ ID NO: 380818 - DNA, 75 bp, synthetic construct
  source 1..75: mol_type = other DNA
gcgtgaaatatgtgccagaagatcgcccaattgtggtgactggcgcactgtatcagcttaccaaaactaataacc

SEQ ID NO: 380819 - DNA, 75 bp, synthetic construct
  source 1..75: mol_type = other DNA
gctgcatcagccgaagtccgtaaaagaagcgcttagctacacgccgggtgtttcagtgggtacgcgtggcgcgtc

SEQ ID NO: 380820 - DNA, 75 bp, synthetic construct
  source 1..75: mol_type = other DNA
ttgcagggcaacttctataacgatgcggtcattgacccgtatatgctggaacgcgctgaaattatgcgtggcccg

SEQ ID NO: 380821 - DNA, 75 bp, synthetic construct
  source 1..75: mol_type = other DNA
agatggggtttcgggtgctgaaaaaaatcctctatccggtgattttctcttcggattattctgccgcagaaaaac

SEQ ID NO: 380822 - DNA, 75 bp, synthetic construct
  source 1..75: mol_type = other DNA
ttgaatttcatgtacatactcattcgcataaacgctgggacaggctccctgcatcaagggctgaacagtgcaggt

SEQ ID NO: 380823 - DNA, 75 bp, synthetic construct
  source 1..75: mol_type = other DNA
agtgcgccatacactgaagaaagagtattctcatcgtgactgtgagcaactgattgcggataaccatcctgacga

SEQ ID NO: 380824 - DNA, 75 bp, synthetic construct
  source 1..75: mol_type = other DNA
tgtcgaaaaagtggtaatcgatgagtcagtgattgaaggccagagcaaaccgttgctgatttatggcaagccaga

SEQ ID NO: 380825 - DNA, 75 bp, synthetic construct
  source 1..75: mol_type = other DNA
tcattcacctaccgggcattattggcagttggggattttgacaacattgccgctggaggctggagaaagcagtaa

SEQ ID NO: 380826 - DNA, 75 bp, synthetic construct
  source 1..75: mol_type = other DNA
ggatttgcctgggatctgtttaccgcctggcagaccgctggcgcgccgtcgaaagagagttgggcgttcactgcg

SEQ ID NO: 380827 - DNA, 75 bp, synthetic construct
  source 1..75: mol_type = other DNA
tgtagttactggtgccgtgtataatctcactaaaaccaacaacgttccttcttctcggttgaaggtggcgagatc

SEQ ID NO: 380828 - DNA, 75 bp, synthetic construct
  source 1..75: mol_type = other DNA
ctcccgcctgattatgctcagcgaccagtttcattggtcccttctggttaaaatggatgaagaaacactctgctt

SEQ ID NO: 380829 - DNA, 75 bp, synthetic construct
  source 1..75: mol_type = other DNA
gtgacgactgacagagggatacgtgcgtctcaacagggcgaactggactgtctttgcggtgcttattgtgtggtt

SEQ ID NO: 380830 - DNA, 75 bp, synthetic construct
  source 1..75: mol_type = other DNA
ggcaactgcaccaccatcgccacgaataataaatttgtggtgctgaaagcggtgaagctggggcgtcgtcggtaa

SEQ ID NO: 380831 - DNA, 75 bp, synthetic construct
  source 1..75: mol_type = other DNA
ctgacagtgacggactgtgcctcttcaccaaacgccttgaaccgccccgggtttcctggagagtattttatctgt

SEQ ID NO: 380832 - DNA, 75 bp, synthetic construct
  source 1..75: mol_type = other DNA
ggcaaccttttcaacataagcaccatgagtcccgttttactcgtttctatgaagattattggttaccacgtaggt

SEQ ID NO: 380833 - DNA, 75 bp, synthetic construct
  source 1..75: mol_type = other DNA
gtttctttatctgaaatggcaagtaaaataaaggcggacgcaaagaatagtgattttgattgtattattggacta

SEQ ID NO: 380834 - DNA, 75 bp, synthetic construct
  source 1..75: mol_type = other DNA
attctgatgaaacagatgaaccaagactaattgttagaaaaaaagagtatgatctttataaatattatatactgc

SEQ ID NO: 380835 - DNA, 75 bp, synthetic construct
  source 1..75: mol_type = other DNA
atgataaaaccaatttcaccttcctttcttaacttccagaacgagccggaaaccggttattacggctggttgccg

SEQ ID NO: 380836 - DNA, 75 bp, synthetic construct
  source 1..75: mol_type = other DNA
cagatcctgagggttcattcttctcggttgaaggtggtgagatccgcgcgcgtggcgtagaaatcgaagcaaaag

SEQ ID NO: 380837 - DNA, 75 bp, synthetic construct
  source 1..75: mol_type = other DNA
cggcgtggagcctttccgctttaatgctgtgctctgcaacccgccgtttcatcagcaacatgcgctgaccgataa

SEQ ID NO: 380838 - DNA, 75 bp, synthetic construct
  source 1..75: mol_type = other DNA
tggcctgacgctgcttgataaaaacccgcaggcgaaagtggtgtttgtcgatgaatcgccgatggcggttgcttc

SEQ ID NO: 380839 - DNA, 75 bp, synthetic construct
  source 1..75: mol_type = other DNA
tgcactttcaatgaaccgccgctggccgatgcgccgcagaccgttagctggaagctggaaggtactgactggact

SEQ ID NO: 380840 - DNA, 75 bp, synthetic construct
  source 1..75: mol_type = other DNA
attctggtcatgcaggctgcgattatcgaatggcaatcgactggcgacgctaaaagcggactggcatggatttat

SEQ ID NO: 380841 - DNA, 75 bp, synthetic construct
  source 1..75: mol_type = other DNA
gcctgtacggtgctggtcgacggcactgcgatagacagttgcttattccttgcggcctgggctgaaggaaaagag

SEQ ID NO: 380842 - DNA, 75 bp, synthetic construct
  source 1..75: mol_type = other DNA
gtcccagaagtggacgatgccgttgaaggactggcgaatggcaatgagccgctttattatcgagttcggtgaccg

SEQ ID NO: 380843 - DNA, 75 bp, synthetic construct
  source 1..75: mol_type = other DNA
cagataagccggagctggcaggcaaactggaccaacctggcgatgttcttcgcttacccggcagatatccgcaaa

SEQ ID NO: 380844 - DNA, 75 bp, synthetic construct
  source 1..75: mol_type = other DNA
gcctgtacggtgctggtcgacggtactgcgatagacagttgcttataccttgccgcctgggctgaaggcaaagaa

SEQ ID NO: 380845 - DNA, 75 bp, synthetic construct
  source 1..75: mol_type = other DNA
tgccgcctgggctgaaggaaaagagatccgcacgctgggtaatgactccaacttattgatagtgttttatgttca

SEQ ID NO: 380846 - DNA, 75 bp, synthetic construct
  source 1..75: mol_type = other DNA
gcctgtacggtgctggtcgacggcacagcaatagacagttgcttataccttgccgcctgggctgaaggaaaagag

SEQ ID NO: 380847 - DNA, 75 bp, synthetic construct
  source 1..75: mol_type = other DNA
atgaaactaatcattatacctgcattgtttgtatctttatttgcattccaccctgcttatgcagtcggggcctat

SEQ ID NO: 380848 - DNA, 75 bp, synthetic construct
  source 1..75: mol_type = other DNA
acttcagccagagatgcggcggcctccaaagaggcggcaaaatcatcagaaacgaacgcctccacaagcgccagc

SEQ ID NO: 380849 - DNA, 75 bp, synthetic construct
  source 1..75: mol_type = other DNA
accagacaggcgtcagcagcgaagggcagcgccacgacggcatccacaaaggcgacagaggcagctggtagtgcg

SEQ ID NO: 380850 - DNA, 75 bp, synthetic construct
  source 1..75: mol_type = other DNA
aaggacaggtgtatggcaatgagccgctttattatcgagttcggtgactgcctgtcacttctgaaaaaaggcatt

SEQ ID NO: 380851 - DNA, 75 bp, synthetic construct
  source 1..75: mol_type = other DNA
gataaagaaacggaaagtgttcccgacagatgaatcggtgaaaaaagtggtgtggctggctatccagtcagcctc

SEQ ID NO: 380852 - DNA, 75 bp, synthetic construct
  source 1..75: mol_type = other DNA
ccttcagaatggcattaatggcgttggtagccagcaggctaataaacctgctccctctcaacaacagcaggcaca

SEQ ID NO: 380853 - DNA, 75 bp, synthetic construct
  source 1..75: mol_type = other DNA
aatagcgtcatcagacatgcgataaagaaacggaaagtgttcccgacagatgaatcggtgaaaaaattggtgtgg

SEQ ID NO: 380854 - DNA, 75 bp, synthetic construct
  source 1..75: mol_type = other DNA
cgaggatattgcgctaacggtagggaagctgcgcgttgagctggaaggcaaagacagcaaaatagccaatcttac

SEQ ID NO: 380855 - DNA, 75 bp, synthetic construct
  source 1..75: mol_type = other DNA
catccacaacacaatccgaatggatggcggctatacgccactggcagcaatccttaacgctgctaaacgcgcata

SEQ ID NO: 380856 - DNA, 75 bp, synthetic construct
  source 1..75: mol_type = other DNA
aataccatggcttcatccttcaccgaaggggcgcgaatgatgatcgcccctgccctgctggtgggtttcgccaaa

SEQ ID NO: 380857 - DNA, 75 bp, synthetic construct
  source 1..75: mol_type = other DNA
ccagcaatacataaaacgccgcgatcaggagaacgaggaaattgcgctaactgtagggaagctgcgtgttgagct

SEQ ID NO: 380858 - DNA, 75 bp, synthetic construct
  source 1..75: mol_type = other DNA
gtgtgccggttcaatggactaatggcgatgcagaaaagcatatgaccggcgctgactggctgacagcgattgaga

SEQ ID NO: 380859 - DNA, 75 bp, synthetic construct
  source 1..75: mol_type = other DNA
aggatattgcgcttacggttgggaggctgcgcgttgagctggaaggcaaagacagcaaaatagccaatcttaccg

SEQ ID NO: 380860 - DNA, 75 bp, synthetic construct
  source 1..75: mol_type = other DNA
tcgccacgcaaatcggttttgccagctcgtggatgaacccgttctgcgtggttgtcgcccaggggattgctggcg

SEQ ID NO: 380861 - DNA, 75 bp, synthetic construct
  source 1..75: mol_type = other DNA
ccgttggcatcatcatgtttatgctggtgattggcggcgcgtttggcatcgtgatgcgtacaggaaccattgata

SEQ ID NO: 380862 - DNA, 75 bp, synthetic construct
  source 1..75: mol_type = other DNA
taatgcctggtttattccagaaattgccagccagttcttcaccatgggtctggtgattggcatcatcggcgttgt

SEQ ID NO: 380863 - DNA, 75 bp, synthetic construct
  source 1..75: mol_type = other DNA
ggctgggctatgacagtattaccaccgtcctggtaacctatattgccacgcaaatcggttttgccagttcgtgga

SEQ ID NO: 380864 - DNA, 75 bp, synthetic construct
  source 1..75: mol_type = other DNA
tggacttccgtaactgggtgaaagtgggtgcgacactgcttggactgctgtttattatgtccagcgtggtggtga

SEQ ID NO: 380865 - DNA, 75 bp, synthetic construct
  source 1..75: mol_type = other DNA
tttttgttgctattttaaccagtctcgccacctgggttgttccggtgggaatgtttgacagtcaggaagtgcaat

SEQ ID NO: 380866 - DNA, 75 bp, synthetic construct
  source 1..75: mol_type = other DNA
ttatgaaaaacaacggcgaaatgccggttgatgccgacctgaatacatttggtcccgttaaggcttatctgggga

SEQ ID NO: 380867 - DNA, 75 bp, synthetic construct
  source 1..75: mol_type = other DNA
ggttgatgctgatctgaatacgtttggttctgttaaggcttattcaggtatctggtctaaagcaacgtccaccaa

SEQ ID NO: 380868 - DNA, 75 bp, synthetic construct
  source 1..75: mol_type = other DNA
tcgtgatggttacggattcgaggctgactggtctgagttttataccacaacgcgaaaacctacagcgggagatgt

SEQ ID NO: 380869 - DNA, 75 bp, synthetic construct
  source 1..75: mol_type = other DNA
ttcgctgttcaagtgtcagcgaaatattgaaatatattagtgcaataacatttcatcgggcgccgattagatacg

SEQ ID NO: 380870 - DNA, 75 bp, synthetic construct
  source 1..75: mol_type = other DNA
catccgctggtgatgttggtgctttaccgatatccggtggcactattacaggcggtttaactgttgatggggaag

SEQ ID NO: 380871 - DNA, 75 bp, synthetic construct
  source 1..75: mol_type = other DNA
gctgcattaagcgggagtgagaagggggtgcctggtattcagatgtatgaggcatataacaatggctacccttat

SEQ ID NO: 380872 - DNA, 75 bp, synthetic construct
  source 1..75: mol_type = other DNA
cctacgattttgtgccgggcagtctgataaccgttcggcttgataacatgaccaatattcccgacggtatggact

SEQ ID NO: 380873 - DNA, 75 bp, synthetic construct
  source 1..75: mol_type = other DNA
aggcacgcaacgttttatcacgagagacggcaatgtatacatgcgtaaactcgccaataagtggaatggcactga

SEQ ID NO: 380874 - DNA, 75 bp, synthetic construct
  source 1..75: mol_type = other DNA
ccgaagaccgtgaacatctgtcattaattcaacgacatggctggcagggaaccgaagaagggaaacataccggca

SEQ ID NO: 380875 - DNA, 75 bp, synthetic construct
  source 1..75: mol_type = other DNA
acggcggtattttttatcgttctgctcgtgatggttacggattcgaggctgactggtctgagttttataccacaa

SEQ ID NO: 380876 - DNA, 75 bp, synthetic construct
  source 1..75: mol_type = other DNA
cctgataaatatcactgttggccccagtgaaggtggaggtgtcgcccgttcaatgcaggtatggcgcagcacctc

SEQ ID NO: 380877 - DNA, 75 bp, synthetic construct
  source 1..75: mol_type = other DNA
tctgttgcgattggttcacatggacacaccatcaccgttaacgctgctggtaacgcggaaaacaccgttaaaaac

SEQ ID NO: 380878 - DNA, 75 bp, synthetic construct
  source 1..75: mol_type = other DNA
ccaggcagaaaatcagtcttcacgacatgagcaatgaggatctgcttgctgctgccaataccgcccaggcggcag

SEQ ID NO: 380879 - DNA, 75 bp, synthetic construct
  source 1..75: mol_type = other DNA
ctttttccttggctgacaaggctaagcgccgcacattcagcatcaatgaatttaatcgccgcaccatggtacagg

SEQ ID NO: 380880 - DNA, 75 bp, synthetic construct
  source 1..75: mol_type = other DNA
gtgtcgcgacattaagcagtgcttcatcatctactcgtttggctgcttttttacaatttgcaggttgttttctag

SEQ ID NO: 380881 - DNA, 75 bp, synthetic construct
  source 1..75: mol_type = other DNA
tattaatgatgatggttatgcctgtgagctatgcagcatgttatagtgagttatctgttcagcacaatttggttg

SEQ ID NO: 380882 - DNA, 75 bp, synthetic construct
  source 1..75: mol_type = other DNA
ttatcgatcacgaccgtgatatgaccttctcttatgctgccgttaagcagctggaaggcaaatatctggtgcaga

SEQ ID NO: 380883 - DNA, 75 bp, synthetic construct
  source 1..75: mol_type = other DNA
ggcatctggaagtggaaagcctgttggttttgaaaaacaaccgtggggttgaaggcaaccgcgtgcgtcatatgg

SEQ ID NO: 380884 - DNA, 75 bp, synthetic construct
  source 1..75: mol_type = other DNA
tgtctgttccagaattgggaagacgactgcgcgggcaaaacacgtatggagatggtcaaaggtttctatgacgtt

SEQ ID NO: 380885 - DNA, 75 bp, synthetic construct
  source 1..75: mol_type = other DNA
taaatttacattttgaatggaccaataaaaacaacattacgttgtcaaataatcagaccagtttcaccagtggtt

SEQ ID NO: 380886 - DNA, 75 bp, synthetic construct
  source 1..75: mol_type = other DNA
ggaattgtccgcattgcggaaaaattacctggcagtacagcccatatgattttgaaggctgtcgtgattacaact

SEQ ID NO: 380887 - DNA, 75 bp, synthetic construct
  source 1..75: mol_type = other DNA
caaaaccgggcgtctggcactggaaagtttaggtctggggccgtatgaagcgcgagaacgtgccgatgtgttccg

SEQ ID NO: 380888 - DNA, 75 bp, synthetic construct
  source 1..75: mol_type = other DNA
gtgtatttatcaagttctgacttgttaaccaacagcaacacaatactgaaaggtgcggaagataatggcgtagga

SEQ ID NO: 380889 - DNA, 75 bp, synthetic construct
  source 1..75: mol_type = other DNA
aacatcacggaaaatgcaggtgtatttatcaagttctgacttgttaaacaacagcaacacgatacttaaaggtgc

SEQ ID NO: 380890 - DNA, 75 bp, synthetic construct
  source 1..75: mol_type = other DNA
tgaaaggtgcggaagataatggcgtaggatttattcttgaaagtaatggttcgccagtcacacttttaaatatca

SEQ ID NO: 380891 - DNA, 75 bp, synthetic construct
  source 1..75: mol_type = other DNA
gttttgggcagataaccggacgtttactgctctccagcggggtgaaaatggtggtgctcgatcacgacccggacc

SEQ ID NO: 380892 - DNA, 75 bp, synthetic construct
  source 1..75: mol_type = other DNA
gtgcgattacgcgcctgctcgccgttttggcaaagcgggaaggaattatttgatttgcgcctgcacgagcgagat

SEQ ID NO: 380893 - DNA, 75 bp, synthetic construct
  source 1..75: mol_type = other DNA
atgggccggaaaataggtggacgttttgccctggctgcagggatgcatatcactgttcatgcctcagacaatgta

SEQ ID NO: 380894 - DNA, 75 bp, synthetic construct
  source 1..75: mol_type = other DNA
tgattttgcctgttatgccaaagcgaaactgaacgttgagcagctgctttatcttgatggcacgatttcacatat

SEQ ID NO: 380895 - DNA, 75 bp, synthetic construct
  source 1..75: mol_type = other DNA
tctgagcattctggtacaggaaaatccgctcgccaacaccaccggccatcagggctacgtcgcaccggaaaaggc

SEQ ID NO: 380896 - DNA, 75 bp, synthetic construct
  source 1..75: mol_type = other DNA
attacgcgcctgctcgccgttttggcaaagcgggaatggaattatttgatttgcgcctgcacgagcgagatgacg

SEQ ID NO: 380897 - DNA, 75 bp, synthetic construct
  source 1..75: mol_type = other DNA
agcacctcaaaaacaccatcatacactaaatcagtaagttggcagcatcaccccttatcgcggcggataatcgct

SEQ ID NO: 380898 - DNA, 75 bp, synthetic construct
  source 1..75: mol_type = other DNA
agcgtggggaacgttacatgcgctgctggcggatattaatagccaggggcaaattcagatggtgatgaacggcgg

SEQ ID NO: 380899 - DNA, 75 bp, synthetic construct
  source 1..75: mol_type = other DNA
aattaatccgcgtattctccccaacgtcgcctcgcgcaaaattcgtaatggagtagggattaataagcaagggaa

SEQ ID NO: 380900 - DNA, 75 bp, synthetic construct
  source 1..75: mol_type = other DNA
taccgtcgcagaagtgcatgcccgcatcggcattccagtagaaattgtcgagatggggtttcgggtgctgaaaaa

SEQ ID NO: 380901 - DNA, 75 bp, synthetic construct
  source 1..75: mol_type = other DNA
gcgacaaatttttatgattttgcctgctatgccaaagcgaaactggacgtagagcagctgctttatcttgatggc

SEQ ID NO: 380902 - DNA, 75 bp, synthetic construct
  source 1..75: mol_type = other DNA
cgtcctggcggcgtgttttatgtcgcgggagataaagccgctatcgttccgctgcaggcatttaaagccagtaaa

SEQ ID NO: 380903 - DNA, 75 bp, synthetic construct
  source 1..75: mol_type = other DNA
gttttatgttgcgggagataaagccgctatcgttccgctgcaggcatttaaagccagtaaagatattcagtttgc

SEQ ID NO: 380904 - DNA, 75 bp, synthetic construct
  source 1..75: mol_type = other DNA
tgtcatgcagcaggtgaaatcatcgctggaacagaaaattaaacagatgcaaatcagcctcaccggcgagccggt

SEQ ID NO: 380905 - DNA, 75 bp, synthetic construct
  source 1..75: mol_type = other DNA
tttcatggaggcagggaggctagccagcaggcatatcatgtcccgatgtttatctggtatagccccgttcttggg

SEQ ID NO: 380906 - DNA, 75 bp, synthetic construct
  source 1..75: mol_type = other DNA
tcgcattcgcaaaaaatagcgatctcgaccagattggtgctaattttgactgtctgcggctgttgataacgccag

SEQ ID NO: 380907 - DNA, 75 bp, synthetic construct
  source 1..75: mol_type = other DNA
tcttagtgccaaatctagaaaaaattacctgcataattccacgagataaagtgcaacatgcaattaacaaaacaa

SEQ ID NO: 380908 - DNA, 75 bp, synthetic construct
  source 1..75: mol_type = other DNA
aactcattaatcgcaataagccaacaactagcgacacctgttttctccatcagtgatcagcaaattcgcgattca

SEQ ID NO: 380909 - DNA, 75 bp, synthetic construct
  source 1..75: mol_type = other DNA
gcccgcaggattggtgttgcccaacaatcggtccaaaagtgggttcatggcatcacaagcccatcaacggctaat

SEQ ID NO: 380910 - DNA, 75 bp, synthetic construct
  source 1..75: mol_type = other DNA
accaccaagcgaagaagagcaagtcgtagtgcctgacacaatgaaaataggtcccagacaaagagaattgcttca

SEQ ID NO: 380911 - DNA, 75 bp, synthetic construct
  source 1..75: mol_type = other DNA
cccggttaaacgtccggcgccggtggcgcataaatggcggaataatttcagaccggaaacggaaataaaaccgga

SEQ ID NO: 380912 - DNA, 75 bp, synthetic construct
  source 1..75: mol_type = other DNA
ctttttttggcagtaataataaaatatgatgtttccttgccgacaaaaaaagtgacaggaatattattgctgatt

SEQ ID NO: 380913 - DNA, 75 bp, synthetic construct
  source 1..75: mol_type = other DNA
ccctacggcaatgaagcgattcatgtcgatgaactgaacccggcaggcaaaaacgtactgctcaataccggcggt

SEQ ID NO: 380914 - DNA, 75 bp, synthetic construct
  source 1..75: mol_type = other DNA
ctggtcagtattgtgctgatttttaccttaccgctgacacgatcctgctgggagatcactaaactgtctctggtg

SEQ ID NO: 380915 - DNA, 75 bp, synthetic construct
  source 1..75: mol_type = other DNA
atgtgtcaggtatttggtgtatccaggagcggttattacgaccgggtacagcatgccccctcagacagaaaacaa

SEQ ID NO: 380916 - DNA, 75 bp, synthetic construct
  source 1..75: mol_type = other DNA
agagattttctacaatcgtcagcgtcgtcactctcgtctggggaatatctccccggcagccttcagggaaaaata

SEQ ID NO: 380917 - DNA, 75 bp, synthetic construct
  source 1..75: mol_type = other DNA
atcgttgataaattcaaagaaggcggcaacgaaaaagttattctttgcgatcgtggcgctaacttcggttatgac

SEQ ID NO: 380918 - DNA, 75 bp, synthetic construct
  source 1..75: mol_type = other DNA
aaaagagctgacaggtaaagccctgtttatggcgctcaggagccagcgcccacctgccgggcgggctaatccacc

SEQ ID NO: 380919 - DNA, 75 bp, synthetic construct
  source 1..75: mol_type = other DNA
tacattgagattttctacaatcgtcagcgtcgtcactctcgtctggggaatatctccccggcagccttcagggaa

SEQ ID NO: 380920 - DNA, 75 bp, synthetic construct
  source 1..75: mol_type = other DNA
agatgtttatacgtgcgaaattgtcggctacgccatgggagagcgcatgacaaaagagctgacaggtaaagccct

SEQ ID NO: 380921 - DNA, 75 bp, synthetic construct
  source 1..75: mol_type = other DNA
ttgacgtgatccagcttccggcgtttctggctcgccagactgacctggtagaagctatggctaaaactggtgcgg

SEQ ID NO: 380922 - DNA, 75 bp, synthetic construct
  source 1..75: mol_type = other DNA
ccttacgtgttcaaagcctcttttgacaaagccaaccgctcctccatccactcttatcgtggaccaggcctggaa

SEQ ID NO: 380923 - DNA, 75 bp, synthetic construct
  source 1..75: mol_type = other DNA
gcgacatcaacgtagcaaatgacctgccgttcgtactgtttggcggtatgaacgtgctggaatctcgcgatctgg

SEQ ID NO: 380924 - DNA, 75 bp, synthetic construct
  source 1..75: mol_type = other DNA
taattaacgtcaagaaaccgcagtttgtcagcccgggtcagatgggtaacatcgttgataaattcaaagaaggcg

SEQ ID NO: 380925 - DNA, 75 bp, synthetic construct
  source 1..75: mol_type = other DNA
tgaagcaaacttttggcgtgaaaattatcaccgacgttcacgaaccaagccaggcacagccagttgctgatgttg

SEQ ID NO: 380926 - DNA, 75 bp, synthetic construct
  source 1..75: mol_type = other DNA
ctggtctgttcattgaagcgcatcccgacccggatcacgcgaaatgtgacggcccatccgcgctgccattagcaa

SEQ ID NO: 380927 - DNA, 75 bp, synthetic construct
  source 1..75: mol_type = other DNA
tggcatcaaagatgtttatacgtgcgaaattgtcggctacgccatgggagagcgcatgacaaaagagctgacagg

SEQ ID NO: 380928 - DNA, 75 bp, synthetic construct
  source 1..75: mol_type = other DNA
gatacgacaaattgtttaacggtacgctgccggaaggagatatggcggtggaatactggagtaccgtggcgaaaa

SEQ ID NO: 380929 - DNA, 75 bp, synthetic construct
  source 1..75: mol_type = other DNA
atgatctggcattacgacaaagacctgagtggctactcactcggtcagggcggttactacagcccgcaggaatac

SEQ ID NO: 380930 - DNA, 75 bp, synthetic construct
  source 1..75: mol_type = other DNA
tatcagaatgtgctggcgcgggagtcgaataacgccgatgccattcttggcctgacggaagtggatattgccgca

SEQ ID NO: 380931 - DNA, 75 bp, synthetic construct
  source 1..75: mol_type = other DNA
ggtttagccgctgtggactcaggcatggcaggtaaagccattcccgaactgcaacaggcggtgcgcgctaacccg

SEQ ID NO: 380932 - DNA, 75 bp, synthetic construct
  source 1..75: mol_type = other DNA
cgccggatggtcgtcaggcactgcaacaggcaagattgcaggcgactaccggtcatgcagaagaagctgtggcga

SEQ ID NO: 380933 - DNA, 75 bp, synthetic construct
  source 1..75: mol_type = other DNA
tacgataaaggtgaagcaaacggcgtctgggcatcgcttagtggcgaccagttaaccggtaaaaatgtcgaagat

SEQ ID NO: 380934 - DNA, 75 bp, synthetic construct
  source 1..75: mol_type = other DNA
agaacaaatggtagtgtccgctattgccagtacacctcagggcttgcagagtgcgagtcgacaatggattgttat

SEQ ID NO: 380935 - DNA, 75 bp, synthetic construct
  source 1..75: mol_type = other DNA
ccacttcacttgccactgtcgccagacaaattaacccgtacatcaaagtcgatataccggaaacaacgcgcggcg

SEQ ID NO: 380936 - DNA, 75 bp, synthetic construct
  source 1..75: mol_type = other DNA
cgggaatacattgagattttctacaatcgtcagcgtcgtcactctcgtctggggaatatctccccggcagccttc

SEQ ID NO: 380937 - DNA, 75 bp, synthetic construct
  source 1..75: mol_type = other DNA
aaaatgagagcctgagccactatcgttttaataaccgggatgaagccatctcagtaatacgagaatacattgaga

SEQ ID NO: 380938 - DNA, 75 bp, synthetic construct
  source 1..75: mol_type = other DNA
attactggaatctgcgaattgtcgccagttcgctatgtttaagccccagcctgctcaaaaagaaattaaaaaacg

SEQ ID NO: 380939 - DNA, 75 bp, synthetic construct
  source 1..75: mol_type = other DNA
gttggtcgtgaccgactggcacgtcttcgtaaggagctaaggctacgctgtaagcagaaacgcaagttcagagcg

SEQ ID NO: 380940 - DNA, 75 bp, synthetic construct
  source 1..75: mol_type = other DNA
tctgccagttgcgccaaatctgctgaaccagacgttcgctcctacagtaccaaatcaggtctgggtggcggacct

SEQ ID NO: 380941 - DNA, 75 bp, synthetic construct
  source 1..75: mol_type = other DNA
gtgctgatcaactgcgacgggatatggctggggcaggaggaataacaacgcctgctgaggttaagaaacctcaga

SEQ ID NO: 380942 - DNA, 75 bp, synthetic construct
  source 1..75: mol_type = other DNA
tttggctatggctcatctttccttgaggaggcctttggaggtttggtgcgtaaagggatagagcgcgaaaaattg

SEQ ID NO: 380943 - DNA, 75 bp, synthetic construct
  source 1..75: mol_type = other DNA
tccgactcagcaaaagatgcgggcgtgatggcggcatcctgggcgcaatatcaggcacaagatgcgttaatcaaa

SEQ ID NO: 380944 - DNA, 75 bp, synthetic construct
  source 1..75: mol_type = other DNA
gtaatgtaaaaaaaagcagtttttttagacttgctgaatatttacaagattcgcagaacaaacaggaacgagttg

SEQ ID NO: 380945 - DNA, 75 bp, synthetic construct
  source 1..75: mol_type = other DNA
taacccgcaaagcaaacaagagcgtgtgggtgtcattaaagcaactaattgccaatctcaggatgttcaggacgc

SEQ ID NO: 380946 - DNA, 75 bp, synthetic construct
  source 1..75: mol_type = other DNA
tggccccgatggtcttgctgtaaaagccagctctatagatcgctctctgtcccgcgcagcgcttgaaaagaaatt

SEQ ID NO: 380947 - DNA, 75 bp, synthetic construct
  source 1..75: mol_type = other DNA
gccgaaaggcgaagctgccagcaacccggaagtgatcgcccgcaccctgcgtaaactgaaaaaccagccggaact

SEQ ID NO: 380948 - DNA, 75 bp, synthetic construct
  source 1..75: mol_type = other DNA
actggataagaccattcaacaacagtttgtgaaaaaactaaaaaatgcagcgaaaatcctcatataccgtcggca

SEQ ID NO: 380949 - DNA, 75 bp, synthetic construct
  source 1..75: mol_type = other DNA
gcccaaccggtggtcatgagagcaatctcaaactgtaccgactgacagatatccttgccgagctgatgaaagctc

SEQ ID NO: 380950 - DNA, 75 bp, synthetic construct
  source 1..75: mol_type = other DNA
atgataagatggggtgtctggggtaatatgaacgaacaatattccgcattgcgtagtaatgtcagtatgctcggc

SEQ ID NO: 380951 - DNA, 75 bp, synthetic construct
  source 1..75: mol_type = other DNA
accgatctgttcctgaaagatattcaggttctggtttctgaactgtcgatggttgaagcgacccctgaactgctg

SEQ ID NO: 380952 - DNA, 75 bp, synthetic construct
  source 1..75: mol_type = other DNA
acgttgttccacggtcgcggcggttccattggtcgcggcggcgcacctgcccatgcggcgctgctgtcacaaccg

SEQ ID NO: 380953 - DNA, 75 bp, synthetic construct
  source 1..75: mol_type = other DNA
gagacaaactcaccgttaacggcagttttgaatttaaaaaacgtattgtagctgtagccgctgcgcgtgagctgg

SEQ ID NO: 380954 - DNA, 75 bp, synthetic construct
  source 1..75: mol_type = other DNA
caacgccgtttgtctatgatcttttgaatttactggagaaacaacccgctgacctttcagcgctgcgcttctttc

SEQ ID NO: 380955 - DNA, 75 bp, synthetic construct
  source 1..75: mol_type = other DNA
gttaccccgcactgcatccggtaaaatacaaaaatttttgctcagaaaagatattattcagcgattaaccgaggg

SEQ ID NO: 380956 - DNA, 75 bp, synthetic construct
  source 1..75: mol_type = other DNA
aaatattagcagccgtgaagtggaagatattttattgcagcatcctaaaattcacgatgcctgtgtggttgcaat

SEQ ID NO: 380957 - DNA, 75 bp, synthetic construct
  source 1..75: mol_type = other DNA
cgacgttgtttaaacaaacgcgtccggtagatttaatcctgccgctgcaaaatcagcttccacaactacaacaaa

SEQ ID NO: 380958 - DNA, 75 bp, synthetic construct
  source 1..75: mol_type = other DNA
aacactccgctgagtacggcaatatcaagtcacggagatgaattagcggcggtactatttacctccgggacagaa

SEQ ID NO: 380959 - DNA, 75 bp, synthetic construct
  source 1..75: mol_type = other DNA
aacaacgtcgtgcggcgtatcgtcagcaagggttatggggcgatgcttcgctggccgattactggcagcagaccg

SEQ ID NO: 380960 - DNA, 75 bp, synthetic construct
  source 1..75: mol_type = other DNA
ggagcggttattacaactgggtacagcatgaaccctcagacagaaaacaaagtgatgagcggttaaaactggaga

SEQ ID NO: 380961 - DNA, 75 bp, synthetic construct
  source 1..75: mol_type = other DNA
aagaaagcggcccgcgaacgtgaatacatccacatcccctttgagcaaagaggcaaggcccggcaagccggggcc

SEQ ID NO: 380962 - DNA, 75 bp, synthetic construct
  source 1..75: mol_type = other DNA
aagacgacaaagatatgccggaacagaacgaaccgatccaggacgagaacgaagcggcactggaaatgctactgg

SEQ ID NO: 380963 - DNA, 75 bp, synthetic construct
  source 1..75: mol_type = other DNA
tgttgttagatattttcactcctgatgcgtgtctcgcgctgcttgagcagcagcgttgcacctgtatgctaggcg

SEQ ID NO: 380964 - DNA, 75 bp, synthetic construct
  source 1..75: mol_type = other DNA
gccgcggatgcaatggtggaagatataaattacacaatgattacagatgttcagattgccgagcgaaccagaacc

SEQ ID NO: 380965 - DNA, 75 bp, synthetic construct
  source 1..75: mol_type = other DNA
tgggtggcggacctgacgtatgttgccacacaggagggatggttgtacctcgctggcatcaaagatgtttatacg

SEQ ID NO: 380966 - DNA, 75 bp, synthetic construct
  source 1..75: mol_type = other DNA
cggatttacgcgtggtgcagatgctactgggccacagcgatctttccaccacgcaaatttatacgcatgtcgcta

SEQ ID NO: 380967 - DNA, 75 bp, synthetic construct
  source 1..75: mol_type = other DNA
gactcgttgtgtgagttgagtatcagagaacgtggtatggagtttaaggcagttctcgcttacgaatcgaagaag

SEQ ID NO: 380968 - DNA, 75 bp, synthetic construct
  source 1..75: mol_type = other DNA
tatgcccttgcggcagtcatagtgctgtgtttaacggtgctgggatttacgcttctggtcggagactcgctgtgt

SEQ ID NO: 380969 - DNA, 75 bp, synthetic construct
  source 1..75: mol_type = other DNA
tgaatatgaaagcgaccgcgacgaatatctgaataattcactggatattctggaacagaacagacgtaaaaaagc

SEQ ID NO: 380970 - DNA, 75 bp, synthetic construct
  source 1..75: mol_type = other DNA
atgatggtggagtggttgcatcaccgcgggttgacgctggcgacggcgcaaagtgacgatttgcaggcattactg

SEQ ID NO: 380971 - DNA, 75 bp, synthetic construct
  source 1..75: mol_type = other DNA
tgttccccagccagcgtgcgcagcagatgacgcgacaaaccttctggcaccgcattaaacattatgccgtgctgg

SEQ ID NO: 380972 - DNA, 75 bp, synthetic construct
  source 1..75: mol_type = other DNA
gacggataatggttcatgctaccgggccaatgaaacacgacagttggccaggatgttgggccttgaaccgaagat

SEQ ID NO: 380973 - DNA, 75 bp, synthetic construct
  source 1..75: mol_type = other DNA
gacggataatggttcatgctaccgggctaatgaaacacgacagttggcccggatgttgggccttgaaccgaagac

SEQ ID NO: 380974 - DNA, 75 bp, synthetic construct
  source 1..75: mol_type = other DNA
gacggataatggttcatgctaccgggcaaatgaaacacgacagttggcctggatgttgggccttgaaccgaagag

SEQ ID NO: 380975 - DNA, 75 bp, synthetic construct
  source 1..75: mol_type = other DNA
caagtccgccatcttacatatcaaagagactaagtacgtggtcactggcaaaaaaccgcaagaactgcgcgtgac

SEQ ID NO: 380976 - DNA, 75 bp, synthetic construct
  source 1..75: mol_type = other DNA
acaatacgcctggatggtttacgtttgctgttaattgaagataacccgcttactcagcgaattacgcttgagatg

SEQ ID NO: 380977 - DNA, 75 bp, synthetic construct
  source 1..75: mol_type = other DNA
atggctggtggaagtagaagacagcggctgtggtattgatcctgcaaaactgacggacatcttccagccatttgt

SEQ ID NO: 380978 - DNA, 75 bp, synthetic construct
  source 1..75: mol_type = other DNA
accgtttctgtattactcggataatggttctggtgaaacggctgacatgctggacaaagaggtcgtgggtattct

SEQ ID NO: 380979 - DNA, 75 bp, synthetic construct
  source 1..75: mol_type = other DNA
ggattcgcgctggcgattgccgggggggaagtaccgccttcactgcgtaacgtgcggttgctgtcactggatgtt

SEQ ID NO: 380980 - DNA, 75 bp, synthetic construct
  source 1..75: mol_type = other DNA
caccatcaatatgagtgagtttcaggagtcccataccgtctccacgctgaaaggtgcgccgcccggctacgtggg

SEQ ID NO: 380981 - DNA, 75 bp, synthetic construct
  source 1..75: mol_type = other DNA
tagcgctgtcgctgcataccccaccagcgaaagtccagtatctgcgtcagcagctcaatgccgccgaactggagc

SEQ ID NO: 380982 - DNA, 75 bp, synthetic construct
  source 1..75: mol_type = other DNA
ggatccgacgctgatgcccgatcagagcggactgaaggatgcactgatgccggagctacgcaaacagttcccggc

SEQ ID NO: 380983 - DNA, 75 bp, synthetic construct
  source 1..75: mol_type = other DNA
acaccatgacgtgctgatccttgatgaggccgtgcgcgccgccgtacagctttctcaccgttacattccggcccg

SEQ ID NO: 380984 - DNA, 75 bp, synthetic construct
  source 1..75: mol_type = other DNA
tggttcggatttgaattctgcggttccgggagaaagcagccaggcattttccagtgaatcagcaggaaataaatc

SEQ ID NO: 380985 - DNA, 75 bp, synthetic construct
  source 1..75: mol_type = other DNA
ctgaaatatcagagattccatatgatggttcggatttgaattctgcggttccgggagaaagcagtcaggcatttt

SEQ ID NO: 380986 - DNA, 75 bp, synthetic construct
  source 1..75: mol_type = other DNA
ggttccggtgaaacggcagatatgctggataaagagatcgtcgggattctgccccgcctggggattaaccacccc

SEQ ID NO: 380987 - DNA, 75 bp, synthetic construct
  source 1..75: mol_type = other DNA
gtggaacccggtttgttgttggctggagtcttgaccttgccgagaacgtgttcgccgttgccggtgcgatacagc

SEQ ID NO: 380988 - DNA, 75 bp, synthetic construct
  source 1..75: mol_type = other DNA
atccgctgctgaccggcgaggcgggcgtcgggaaaacggctgtggtggaaggatttgcgctggcgattgcccggg

SEQ ID NO: 380989 - DNA, 75 bp, synthetic construct
  source 1..75: mol_type = other DNA
cggcgctggcgcgtggcagtcttcgaacgattggggcgaccacctggagtgagtataaacgccatatagagaaag

SEQ ID NO: 380990 - DNA, 75 bp, synthetic construct
  source 1..75: mol_type = other DNA
gcatcgatccagtcaccggtcgagagcacgaaattcgtactatgacggatattctgctgcgccgtcggcagaaca

SEQ ID NO: 380991 - DNA, 75 bp, synthetic construct
  source 1..75: mol_type = other DNA
ttattatcagcggtgcctgcgggatgttccgtactgatgtattgcgtaagttcggtttctctgatcgtactaaag

SEQ ID NO: 380992 - DNA, 75 bp, synthetic construct
  source 1..75: mol_type = other DNA
tctctgagcggctgcctgcgtattaccgtaggtacccatgcagagagccagcgcgtgattgacgcactgaaagcg

SEQ ID NO: 380993 - DNA, 75 bp, synthetic construct
  source 1..75: mol_type = other DNA
aaaatgtccgtcgactgacgccttatcagtctgctcgtcgcctgggcggcaacggtgatgtctggctgaacgcca

SEQ ID NO: 380994 - DNA, 75 bp, synthetic construct
  source 1..75: mol_type = other DNA
atcaaagatgtttatacgtgcgaaattgtcggctacgccatgggagagcgcatgacaaaagagctgaaaggtaaa

SEQ ID NO: 380995 - DNA, 75 bp, synthetic construct
  source 1..75: mol_type = other DNA
gttggtcgccaatggttaccgcattcgtcaggcgaatcgctgcatcgtttacccacaagagtgcaataatccact

SEQ ID NO: 380996 - DNA, 75 bp, synthetic construct
  source 1..75: mol_type = other DNA
gggccacatggcgtggtactggccatgtttccgcttatctgggtcggcgtagtttgtgttattggtgcttttagc

SEQ ID NO: 380997 - DNA, 75 bp, synthetic construct
  source 1..75: mol_type = other DNA
acaacgttcgcgccctgaccccgtatcagtcggcgcgccgccttggcggtaaaggcgacgtctggttgaacgcca

SEQ ID NO: 380998 - DNA, 75 bp, synthetic construct
  source 1..75: mol_type = other DNA
agccacgcaagcaccttaaaatcaccatcatacactaaatcagtaagttggcagcattacccgttaatcgaacaa

SEQ ID NO: 380999 - DNA, 75 bp, synthetic construct
  source 1..75: mol_type = other DNA
agctggcgaaactgcccgccaccgacaatacctcactgaatacacagcggcgcgtggcgctggtacaggcgcagc

SEQ ID NO: 381000 - DNA, 75 bp, synthetic construct
  source 1..75: mol_type = other DNA
gcgggcgatccaacgcaggcgctggaaacctacaaagacgccatggtcgcatccggtgtgaccacgacgcgtccg

SEQ ID NO: 381001 - DNA, 75 bp, synthetic construct
  source 1..75: mol_type = other DNA
agcgtattttgcacaggagtcgctgaaaaatacgcgttaatcgaacaatggcgacaacaatttcccattgaagcg

SEQ ID NO: 381002 - DNA, 75 bp, synthetic construct
  source 1..75: mol_type = other DNA
gaaacgcaagttcagagcgactacgaactcgaaccacaatctgccagttgcgccaaatctgctgaaccagacgtt

SEQ ID NO: 381003 - DNA, 75 bp, synthetic construct
  source 1..75: mol_type = other DNA
tcctcctattaccagatgatcctcaaagcggtggtgattttgctggcggtgctggtagacaacaaaaagcagtaa

SEQ ID NO: 381004 - DNA, 75 bp, synthetic construct
  source 1..75: mol_type = other DNA
ccataacctggaaaacgtaccgcgtatttaccgtcaggtacggcctggtgcagattacaactggtcgctgaagct

SEQ ID NO: 381005 - DNA, 75 bp, synthetic construct
  source 1..75: mol_type = other DNA
cgcgaatatctgattgccgcattgaaagaaatctcctgcgtggagcaggtttttgactctgaaaccaactacatt

SEQ ID NO: 381006 - DNA, 75 bp, synthetic construct
  source 1..75: mol_type = other DNA
atgactggatggatggccgccgcagtcgtcacactgatgatacggatgtgtttctccgtatacaccatgttatcg

SEQ ID NO: 381007 - DNA, 75 bp, synthetic construct
  source 1..75: mol_type = other DNA
ggacgaagaaggcaacagtgttcgcggtcaaaaaatggtggcatcggtcgctaagcaactcggctataacgtgtt

SEQ ID NO: 381008 - DNA, 75 bp, synthetic construct
  source 1..75: mol_type = other DNA
tgataacgttttttcgcttccgcacgggcaggcttgccggaggacgttcggggaatactgtggggcggcaacaga

SEQ ID NO: 381009 - DNA, 75 bp, synthetic construct
  source 1..75: mol_type = other DNA
ctgtggagcacgttttgcgggcgattcgctgtggatttacctcggtgatgatcgacggttcgctgctgccgtatg

SEQ ID NO: 381010 - DNA, 75 bp, synthetic construct
  source 1..75: mol_type = other DNA
ttttcgcaccctgctggagttaacccgcggtaaggcgattgtggttgccgatgaagcctatattgagttttgccc

SEQ ID NO: 381011 - DNA, 75 bp, synthetic construct
  source 1..75: mol_type = other DNA
aaagcccggaaataaaaattgaaactctggtacccgatttccgtggtcgtatggatcgtgcgctggatatcctga

SEQ ID NO: 381012 - DNA, 75 bp, synthetic construct
  source 1..75: mol_type = other DNA
gaaactggcgcaaaccattgccgatatggcactgcgttatgttgttatcacctctgttgaccgtgatgacctgcg

SEQ ID NO: 381013 - DNA, 75 bp, synthetic construct
  source 1..75: mol_type = other DNA
ctggcggaatgcttcaaccacggcacagcaactttcatgatcctcggcgccatttgtactcgccgttgcccgttc

SEQ ID NO: 381014 - DNA, 75 bp, synthetic construct
  source 1..75: mol_type = other DNA
tggccgtagcaatattgctatggttcctgagtacgttaaggcgtaagcccagccaaaaaaaaggttgtattgacg

SEQ ID NO: 381015 - DNA, 75 bp, synthetic construct
  source 1..75: mol_type = other DNA
tggtttcatcgttgctggttgttggtgcctttagcaccgctttccgttgtgtatgtattattagcttatgccatc

SEQ ID NO: 381016 - DNA, 75 bp, synthetic construct
  source 1..75: mol_type = other DNA
gtgatcaagtatttttaagtgatgcagatactttcgttccacctgataatgatggaatgggctatatgctggcag

SEQ ID NO: 381017 - DNA, 75 bp, synthetic construct
  source 1..75: mol_type = other DNA
atggagtctgctgctgccgctgatgctggtctttatgatcacttcactggaaaccattggcgatatcacggcgac

SEQ ID NO: 381018 - DNA, 75 bp, synthetic construct
  source 1..75: mol_type = other DNA
ttacaggctctggctaacgaactggccaaaaacctcaaaacccctgaagacctcagtctgaaccgccccgatttt

SEQ ID NO: 381019 - DNA, 75 bp, synthetic construct
  source 1..75: mol_type = other DNA
atcctcattttctgccgtcgcagacgccagctggcgctgccgtttgccccgtttctctgcgcgtccctgtatgtg

SEQ ID NO: 381020 - DNA, 75 bp, synthetic construct
  source 1..75: mol_type = other DNA
aaggctcgaatgccgcctcggctgaaattgaccgcgtatcaacgctggaaatgtgccggattatcaacgatgaag

SEQ ID NO: 381021 - DNA, 75 bp, synthetic construct
  source 1..75: mol_type = other DNA
cggtggaaggcgcggaagatagccgggaaggcggcgttaacgatctgaaaaatattaatttaacggcacaggatg

SEQ ID NO: 381022 - DNA, 75 bp, synthetic construct
  source 1..75: mol_type = other DNA
cctaccatgatggcggctttgttcggcacgttgatgctggcaagttgcaccgagatggtgatctcccgcgttctg

SEQ ID NO: 381023 - DNA, 75 bp, synthetic construct
  source 1..75: mol_type = other DNA
atcaaacctttgggtcgctggtcgttaatcatggaaatcgatgaaggctttgcggtaggcatgtcgccagccgaa

SEQ ID NO: 381024 - DNA, 75 bp, synthetic construct
  source 1..75: mol_type = other DNA
ccttggtgatgtgttcctgattgcggggatcgcaatgtggacgcaaccgcaacacactccactgataatcaccgc

SEQ ID NO: 381025 - DNA, 75 bp, synthetic construct
  source 1..75: mol_type = other DNA
ggagtaccgcaaacttggcccgtttgtggctgatattcaccggtggcaaagtctggatgactattacaaccagta

SEQ ID NO: 381026 - DNA, 75 bp, synthetic construct
  source 1..75: mol_type = other DNA
aaacaatcaccggaatgggggcaactgcaatactgccgctggtgatatttattttaggtctggtgttcagaatga

SEQ ID NO: 381027 - DNA, 75 bp, synthetic construct
  source 1..75: mol_type = other DNA
attaatacgcgcctggcctggtgaatcccagcataaacgcgccaccgttgggttggatattctcgctgctatcgg

SEQ ID NO: 381028 - DNA, 75 bp, synthetic construct
  source 1..75: mol_type = other DNA
aattgatccgctgggcaggcagaaaatgcccgagtggtcgggtaatggggctggcgaataaaggctggataaagg

SEQ ID NO: 381029 - DNA, 75 bp, synthetic construct
  source 1..75: mol_type = other DNA
caaagtgttcggcaacctgatggtcgatgtggtcgccaccaacgaaaaattgcatgtgcgccaggtcaatatcgt

SEQ ID NO: 381030 - DNA, 75 bp, synthetic construct
  source 1..75: mol_type = other DNA
aaaagtattcggcaacctgatggtcgatgtggtcgccaccaatgaaaaactacacgtgcgccaggtcaatattgt

SEQ ID NO: 381031 - DNA, 75 bp, synthetic construct
  source 1..75: mol_type = other DNA
aggtctggtcgttggtttgattgctggcggcgaatatgccatccagcacgcggtggaaggcgcggaagacagccg

SEQ ID NO: 381032 - DNA, 75 bp, synthetic construct
  source 1..75: mol_type = other DNA
gcgattgatgttatccacacccaggtgagcggcggcggtcgtctgatttatctcggcgcgggaacttccggtcgt

SEQ ID NO: 381033 - DNA, 75 bp, synthetic construct
  source 1..75: mol_type = other DNA
cggtggaaggcgcggaagatagccgggaaggtggtgttaacgatctgaaaaatattaatttaacggcacaggatg

SEQ ID NO: 381034 - DNA, 75 bp, synthetic construct
  source 1..75: mol_type = other DNA
tcgtacgccgtatgtgattgccggactggaatacgcgcgccagctcggttgccgtacagtgggaatttcctgtaa

SEQ ID NO: 381035 - DNA, 75 bp, synthetic construct
  source 1..75: mol_type = other DNA
gtcagcactacggaatgcagggcgtacacgataatgccggttggggccacgaaaatggctcggttgaaagtgccc

SEQ ID NO: 381036 - DNA, 75 bp, synthetic construct
  source 1..75: mol_type = other DNA
cgccaatcatgtccggcgtgcgtaccccgactcgtcagttcagctcctgcgtactgatcgaatgcggcgacagcc

SEQ ID NO: 381037 - DNA, 75 bp, synthetic construct
  source 1..75: mol_type = other DNA
cccgtgacggcgcagaagacgcgcaggacgatctggtgccgtcaatccaggacgatggctgcgaaagcggcgcat

SEQ ID NO: 381038 - DNA, 75 bp, synthetic construct
  source 1..75: mol_type = other DNA
agacctgatctcccgtgatgcgccggattatcagtatctcgccgcgcgcctggcgatcttccacctgcgtaaaaa

SEQ ID NO: 381039 - DNA, 75 bp, synthetic construct
  source 1..75: mol_type = other DNA
ttattgccgacgcatgggattgtttgttgaacaggttaaagaatggcgggctatctcaattcaggcgcatgaaaa

SEQ ID NO: 381040 - DNA, 75 bp, synthetic construct
  source 1..75: mol_type = other DNA
gatggttatttgcaactggtgggtatcatgcagaaattcatcgaccagtcgatctctgctaacaccaactacgat

SEQ ID NO: 381041 - DNA, 75 bp, synthetic construct
  source 1..75: mol_type = other DNA
gagcgcctgtacaccaagtatgagaaagacgacagcatccgtaaacagcgcgtgaaagcggttgagctattctcg

SEQ ID NO: 381042 - DNA, 75 bp, synthetic construct
  source 1..75: mol_type = other DNA
tgacccgctgggcaggcagaaaatgcccgagtggtcgggtcatggggctggcgaataaaggctggataaagggcg

SEQ ID NO: 381043 - DNA, 75 bp, synthetic construct
  source 1..75: mol_type = other DNA
ggcaacatatccaccactgtgggtaatgctctgtattcaggtcgcctttgcgataacgacgattttaatgctgtg

SEQ ID NO: 381044 - DNA, 75 bp, synthetic construct
  source 1..75: mol_type = other DNA
cttgtgaagtctttcggaaaaggttttgtggccccggatcttgacgagctacaaccacatgaagtgtctcatttg

SEQ ID NO: 381045 - DNA, 75 bp, synthetic construct
  source 1..75: mol_type = other DNA
acagcaatccgaagatggcccggtatttcacacgagcgcacggcagacagctactatggggaacctatcttcctt

SEQ ID NO: 381046 - DNA, 75 bp, synthetic construct
  source 1..75: mol_type = other DNA
atgtctgaaaccgcaaaaaaagtaatcgtcggcatatccggcggtgtcgattcctccgtttctgcctggctgttg

SEQ ID NO: 381047 - DNA, 75 bp, synthetic construct
  source 1..75: mol_type = other DNA
aggcaccgaagaaccgtggtatgtggtcgataaagacgtcgaaaacaacattctgattgttgcgcagggccatga

SEQ ID NO: 381048 - DNA, 75 bp, synthetic construct
  source 1..75: mol_type = other DNA
tgacataaaactggtcgactggttacaacaacggctggggcttttagagcaacgagacacggcaatgttgcaccg

SEQ ID NO: 381049 - DNA, 75 bp, synthetic construct
  source 1..75: mol_type = other DNA
gcttgatgcgcccgctgcggcggcgcttactaagtcgtggagcaaccgacaggcgattgaacaatttgtaattaa

SEQ ID NO: 381050 - DNA, 75 bp, synthetic construct
  source 1..75: mol_type = other DNA
cgggaggaagggagaccatcaaaaggctgatgaccgcctatggtttcaacactcaaatagcgttagttgaacatc

SEQ ID NO: 381051 - DNA, 75 bp, synthetic construct
  source 1..75: mol_type = other DNA
ttgaagattaatacaggtgcaaatacgggagggagagagaccatcaaaaggctgatgacagcctatggtttcaac

SEQ ID NO: 381052 - DNA, 75 bp, synthetic construct
  source 1..75: mol_type = other DNA
atgaagattttactggataatgtttatcattctgattgctatttcctgccgataagagatagccggcaaaatctt

SEQ ID NO: 381053 - DNA, 75 bp, synthetic construct
  source 1..75: mol_type = other DNA
ttatccacaacttaatgaaggaaaagacaattgtaatctcttgcgcttatcacaaatttctccgttggtgttggg

SEQ ID NO: 381054 - DNA, 75 bp, synthetic construct
  source 1..75: mol_type = other DNA
gcttgatgcgcctgctgcggcggcgctcactaagtcctggagcaaccggcaggcgattgaacagtttgtaattaa

SEQ ID NO: 381055 - DNA, 75 bp, synthetic construct
  source 1..75: mol_type = other DNA
accggcactatgcgttgcacggtaaaaacccgctatcgccagaccgatatcccttgcaccgtcaaggcgctggac

SEQ ID NO: 381056 - DNA, 75 bp, synthetic construct
  source 1..75: mol_type = other DNA
ccttctgtcgaatggagtatgaagtggactgccagcagacgcggccagtggtcaacagcatgttgaataaaacgc

SEQ ID NO: 381057 - DNA, 75 bp, synthetic construct
  source 1..75: mol_type = other DNA
tttcggcacgctgaccgggaaatatctcaatggtgcaaaacccgctggcgcacgtaatacgctctttagtcggtt

SEQ ID NO: 381058 - DNA, 75 bp, synthetic construct
  source 1..75: mol_type = other DNA
attgtcaccattcagaacccttacagtctgttaaacggggatgcggacgatttcctggactctcaggagataaaa

SEQ ID NO: 381059 - DNA, 75 bp, synthetic construct
  source 1..75: mol_type = other DNA
tcgctggtcgttaatcatggaaatcgacgaaggttttgcggtgggtatatcaccagccgaacttagcgctgagca

SEQ ID NO: 381060 - DNA, 75 bp, synthetic construct
  source 1..75: mol_type = other DNA
attcctcacgttctggaaatatcaccgacggatgctgccgcctttggtcagctttttgccgactacgaactgtta

SEQ ID NO: 381061 - DNA, 75 bp, synthetic construct
  source 1..75: mol_type = other DNA
cgatgacaccgcccgcaaactgacgccattaatacgcgcctggcctggtgaatcccagcataaacgcgccaccgt

SEQ ID NO: 381062 - DNA, 75 bp, synthetic construct
  source 1..75: mol_type = other DNA
cttgtgcatggccaggcaacgattttgaactttacagcgtcatcgagaatcttgctctgagtagtgataacgggc

SEQ ID NO: 381063 - DNA, 75 bp, synthetic construct
  source 1..75: mol_type = other DNA
cgcagtgcgatccgaatgctgaaatctcggctgaagaacgtgaatggctggatgcgccggcggctggtcaggagg

SEQ ID NO: 381064 - DNA, 75 bp, synthetic construct
  source 1..75: mol_type = other DNA
aacccgtaaatgggaacccggtatggcggaagaagaaacgcgtttctttggcttaaaaagggaatgtgggctgca

SEQ ID NO: 381065 - DNA, 75 bp, synthetic construct
  source 1..75: mol_type = other DNA
cacgcagctttttaaaaatgaaattttagacaagctaagacaaacaacagacaacattgagttattaactctgga

SEQ ID NO: 381066 - DNA, 75 bp, synthetic construct
  source 1..75: mol_type = other DNA
cccatgacagcactggtgccacactttcgtgccaatccggtgcctggaaaaaaaatgcctccgggagcactgtgt

SEQ ID NO: 381067 - DNA, 75 bp, synthetic construct
  source 1..75: mol_type = other DNA
gcggtaacactattctcgaacagtggcaatatcccgcaggcaccttcggtattgattttcgctacggctaatcat

SEQ ID NO: 381068 - DNA, 75 bp, synthetic construct
  source 1..75: mol_type = other DNA
attacaggccgctgcatatttccttgctaaagagcaggaggaagaatgtaactgccctgtctgtcagggtgatgc

SEQ ID NO: 381069 - DNA, 75 bp, synthetic construct
  source 1..75: mol_type = other DNA
tttgagatagctatggcgcttaactgtgatccggtttgcttacagtacggaactaaacgcggtaaagccgcttaa

SEQ ID NO: 381070 - DNA, 75 bp, synthetic construct
  source 1..75: mol_type = other DNA
taatctgatcatcacccgtgcatcaacaaagcgtgccggcgttcctctgattttcgggaccaatattcttgcagc

SEQ ID NO: 381071 - DNA, 75 bp, synthetic construct
  source 1..75: mol_type = other DNA
ggcagaaatttttcgccggtggccggaggaaataaagcgggttgctgaatgggaacgactggttgcgtcgtgctc

SEQ ID NO: 381072 - DNA, 75 bp, synthetic construct
  source 1..75: mol_type = other DNA
cagaacgtcgtattgaggttgtaacagtcgaggcatacggaattgaaacctaccatgactggacaatgacaacgc

SEQ ID NO: 381073 - DNA, 75 bp, synthetic construct
  source 1..75: mol_type = other DNA
cacgccgggaggcgtcaggtcactggtggagggatcgcacttgatgaaattactccgggatctcgataaggatgg

SEQ ID NO: 381074 - DNA, 75 bp, synthetic construct
  source 1..75: mol_type = other DNA
cgctggtgatgtttggtactatcgccgcatccggtgtgcgtatcgtttctcgtgagccactgaaccgtcgagcca

SEQ ID NO: 381075 - DNA, 75 bp, synthetic construct
  source 1..75: mol_type = other DNA
acctgattgcaggctgcattattggcccgtgggggctgcgactggtgaccgatgccgaatctattctgcactttg

SEQ ID NO: 381076 - DNA, 75 bp, synthetic construct
  source 1..75: mol_type = other DNA
acctgatcgcgggctgcattattggcccgtgggggctgcgactggtgaccgatgccgaatctatcctgcactttg

SEQ ID NO: 381077 - DNA, 75 bp, synthetic construct
  source 1..75: mol_type = other DNA
tgccacacaggagggatggttgtacctcgctggcatcaaagatgtttatacgtgcgaaattgtcggctacgccat

SEQ ID NO: 381078 - DNA, 75 bp, synthetic construct
  source 1..75: mol_type = other DNA
aaactattggcgatatcaccgccacctccgacgtttccgaacaaccggtttctggtccgctgtacatgaaacgcc

SEQ ID NO: 381079 - DNA, 75 bp, synthetic construct
  source 1..75: mol_type = other DNA
cgagatggtgctctcccgcgttctgcatctggcgcgccgcattattacgccgctggtttctggcgttgtggtgat

SEQ ID NO: 381080 - DNA, 75 bp, synthetic construct
  source 1..75: mol_type = other DNA
atggtgagccattatgaaaacggcgttgaggtatcccgcgaacgtctgcgtgatgattgctgtttcggcacattg

SEQ ID NO: 381081 - DNA, 75 bp, synthetic construct
  source 1..75: mol_type = other DNA
gtcagcacgctacttgactgggtgccgggtattcgcgctatcgccgtcaaatgcgatctctgctatttcgatgag

SEQ ID NO: 381082 - DNA, 75 bp, synthetic construct
  source 1..75: mol_type = other DNA
agcaaacgtaagcgtgagctgacttttaacaccgattttggcgagctcaccttgtttcagcaggctcaaagtgga

SEQ ID NO: 381083 - DNA, 75 bp, synthetic construct
  source 1..75: mol_type = other DNA
catcacccgcgttgatggggccgtgcagttgaatgaaagtctgtgcgtaagctgcaaactgtgcggcatcgcctg

SEQ ID NO: 381084 - DNA, 75 bp, synthetic construct
  source 1..75: mol_type = other DNA
gtttggttatttcatcggctctcttaccggtgggtttattggtgattactttgggcggcgcagggcgtttcgcat

SEQ ID NO: 381085 - DNA, 75 bp, synthetic construct
  source 1..75: mol_type = other DNA
ttagtgctctgtgcgctggttctctctatttttggcatcgaaacgcggaaggtgtcgctggaagagatttctgag

SEQ ID NO: 381086 - DNA, 75 bp, synthetic construct
  source 1..75: mol_type = other DNA
ctgattggcccggaaggcggtttatcggcagatgaaattgccatgactgcccgctatcaatttactgatatcctg

SEQ ID NO: 381087 - DNA, 75 bp, synthetic construct
  source 1..75: mol_type = other DNA
atctcaggatgaccgttatcagttcgaagatgatgaactggaactcatattctctgcatactggtttaaaactgg

SEQ ID NO: 381088 - DNA, 75 bp, synthetic construct
  source 1..75: mol_type = other DNA
aagaatgcccagtaacttgtatttaatgcaacgccgatacgctgccgaagatttggatcaactcatcgaaaaagc

SEQ ID NO: 381089 - DNA, 75 bp, synthetic construct
  source 1..75: mol_type = other DNA
atgattaacctgtcacttatcgaccttaaccgcatccagtttcgtgagaaatttacctggcagctactggtcaat

SEQ ID NO: 381090 - DNA, 75 bp, synthetic construct
  source 1..75: mol_type = other DNA
atcaagttagccagtgaggggaaaattcgttccagaatcgagcactttacggagattatgggtgatatgtcctta

SEQ ID NO: 381091 - DNA, 75 bp, synthetic construct
  source 1..75: mol_type = other DNA
tagccggtggcgataaatccttgaaaacggtgaatgctatccgtcaggttcccctacatccacgactgatcgaac

SEQ ID NO: 381092 - DNA, 75 bp, synthetic construct
  source 1..75: mol_type = other DNA
cgtcaggttccaattcatccgcgacttatcgaactagggctgctggagtatgtagatgcattgaaagctgccggg

SEQ ID NO: 381093 - DNA, 75 bp, synthetic construct
  source 1..75: mol_type = other DNA
attcctcgtgtttggctttggtttgctgctggaagaggtcggcttgtcgatggcgatgggcgcgtttctggcggg

SEQ ID NO: 381094 - DNA, 75 bp, synthetic construct
  source 1..75: mol_type = other DNA
tgggctacatggcgatctgcatcatgaggcactgttgcaaatagtcggtggtgataaacttatcatccccttttg

SEQ ID NO: 381095 - DNA, 75 bp, synthetic construct
  source 1..75: mol_type = other DNA
atttatatttactagtcccagtatttttacagatgaactcagccgtttgctctttatttgtcttggactttttgg

SEQ ID NO: 381096 - DNA, 75 bp, synthetic construct
  source 1..75: mol_type = other DNA
caggttatgcctgggtgggaaaaggtcaagaaacggctggatggcatggctgggatgttgttggctgatatgtag

SEQ ID NO: 381097 - DNA, 75 bp, synthetic construct
  source 1..75: mol_type = other DNA
catcaagccaggataaacgctatcacattgttgaaggcgcaaaccatatggatctttatgacggcaaagcctatg

SEQ ID NO: 381098 - DNA, 75 bp, synthetic construct
  source 1..75: mol_type = other DNA
cattgttgaaggcgcaaaccatatggatctttatgatggcaaagtctatgtggctgaagcaatttcagtattagc

SEQ ID NO: 381099 - DNA, 75 bp, synthetic construct
  source 1..75: mol_type = other DNA
cgcgccgtgcgactgcggcgcaagcggggactgtactgcacccattttgttggacgatgaaatggaatagcccct

SEQ ID NO: 381100 - DNA, 75 bp, synthetic construct
  source 1..75: mol_type = other DNA
tgcgtatcaaacactatatggcgctttatcctaacgcctggctttcagggcagcgttatttcgaactttggccgc

SEQ ID NO: 381101 - DNA, 75 bp, synthetic construct
  source 1..75: mol_type = other DNA
gttgctatattgaaattccgcccaagtagcaaagctaaagatatcgttgttgttgcgttagccgatggtatgggg

SEQ ID NO: 381102 - DNA, 75 bp, synthetic construct
  source 1..75: mol_type = other DNA
acataggtttagttaggaaagagaaccaagaccgggtagctgtattaaaatttcgtccttttagtaagaataagg

SEQ ID NO: 381103 - DNA, 75 bp, synthetic construct
  source 1..75: mol_type = other DNA
atggggcaggttatgccggggtgggaaaaggtcaagaagcgactggatggtatggctgggatgttgttggctgac

SEQ ID NO: 381104 - DNA, 75 bp, synthetic construct
  source 1..75: mol_type = other DNA
caccaacgttttgatgcacgttcaggggtattttcgtccccatcttgattccgcaaaacgtcagcaactggctgc

SEQ ID NO: 381105 - DNA, 75 bp, synthetic construct
  source 1..75: mol_type = other DNA
catggcttaacgcgcggggcactcaacgattatcacagccgctataaactcgtctttctggcccattcccagccg

SEQ ID NO: 381106 - DNA, 75 bp, synthetic construct
  source 1..75: mol_type = other DNA
gttgccgccgcatgggcaaaagaacgcggttacaaaatcacccttcagggactggaagccgcttaccggttaggg

SEQ ID NO: 381107 - DNA, 75 bp, synthetic construct
  source 1..75: mol_type = other DNA
ttatctgggctgcactgtcgctctactgggcgcagatggctaatctgatccccggcaaagcccgcgctgaatacg

SEQ ID NO: 381108 - DNA, 75 bp, synthetic construct
  source 1..75: mol_type = other DNA
aatgagcggcccggcgctggcagtgattgagaatctggagaaggcatcgacccaggagctggaagatatggccag

SEQ ID NO: 381109 - DNA, 75 bp, synthetic construct
  source 1..75: mol_type = other DNA
tctcttggtgtatctctggtcacatctgcagtaaaagatgccctttctcttgcgagaacaaaaggaagtagctat

SEQ ID NO: 381110 - DNA, 75 bp, synthetic construct
  source 1..75: mol_type = other DNA
cgctgaccctggcggtggcgctgtcgatggcagcaacgccgattctgctggtgatcctcaatcgccttgagcaat

SEQ ID NO: 381111 - DNA, 75 bp, synthetic construct
  source 1..75: mol_type = other DNA
tggccggactggctggaaagagtgaatgctggaggtcttattcgctcaatgtcccgtaaagggtgttcgcccgat

SEQ ID NO: 381112 - DNA, 75 bp, synthetic construct
  source 1..75: mol_type = other DNA
accagccccagataaccttattgccagagattttaaggcagagcaacctaatcagaaatggctgacggatatcac

SEQ ID NO: 381113 - DNA, 75 bp, synthetic construct
  source 1..75: mol_type = other DNA
gtggcagatgacctcgcctctctggtactggacgcgcgaatggagcaagagggctacgcccgtagttccattaac

SEQ ID NO: 381114 - DNA, 75 bp, synthetic construct
  source 1..75: mol_type = other DNA
tacggcggatatgattccgccgttattgttccctcggctcaagaatttatacaaccgccgcgccgagcgtctgcg

SEQ ID NO: 381115 - DNA, 75 bp, synthetic construct
  source 1..75: mol_type = other DNA
tcagctatgaacaactgacccggtttgcggaacaacgcatccgggaatgcaatctggacagccagggcgtgattt

SEQ ID NO: 381116 - DNA, 75 bp, synthetic construct
  source 1..75: mol_type = other DNA
ctcaaatttgtccattggtgttgggggatttaggtgcgggtaacagcaccatgaaagcaatatttgatggtcttt

SEQ ID NO: 381117 - DNA, 75 bp, synthetic construct
  source 1..75: mol_type = other DNA
attgatacgccagaaatattagcacagattaccccttcgatttccatgctctccagggatgtctgtggcctgccg

SEQ ID NO: 381118 - DNA, 75 bp, synthetic construct
  source 1..75: mol_type = other DNA
gtgtgaaaccgaatggcacgtggtgcgtgtaaaatgcagcaactgcgaacagagcggcaaactgcactactggtc

SEQ ID NO: 381119 - DNA, 75 bp, synthetic construct
  source 1..75: mol_type = other DNA
ctgtgctggtatgaagactcaaaattgcaaaccccgctgtttgtcggtcagtttgatggcactgccgaacaggcg

SEQ ID NO: 381120 - DNA, 75 bp, synthetic construct
  source 1..75: mol_type = other DNA
tttgatggctcagccgaacaggcacaactgcctgggaaactgtttacgcaaaatattggtgcgcacgaaagcaaa

SEQ ID NO: 381121 - DNA, 75 bp, synthetic construct
  source 1..75: mol_type = other DNA
ttttctccagtacggatatgctgtttaaagacgaccagcaggatagcgaagcgacggcgatcgcgagtgatttgt

SEQ ID NO: 381122 - DNA, 75 bp, synthetic construct
  source 1..75: mol_type = other DNA
ggactgagtgcgataccttcgaagggtattacgattggtcgagaaacaaatggtgggcagttactgacgatgggg

SEQ ID NO: 381123 - DNA, 75 bp, synthetic construct
  source 1..75: mol_type = other DNA
aggggccaggcgtggtacatggatatgatgtgtgaagcgcgtgggtccacggatctttactcccaaggcgcactt

SEQ ID NO: 381124 - DNA, 75 bp, synthetic construct
  source 1..75: mol_type = other DNA
ggccagacgtggtacatggatttaatgtgttttgcgcgtgggtctcgtgaactttatagccagtcgacgcttcaa

SEQ ID NO: 381125 - DNA, 75 bp, synthetic construct
  source 1..75: mol_type = other DNA
cagctttggcctgaaagaccgtttgcaatcctccgctgaaaaaccacttgttcgccagcgtatcgtggttagcgc

SEQ ID NO: 381126 - DNA, 75 bp, synthetic construct
  source 1..75: mol_type = other DNA
gcgtcgcgaagtgagttcccgatacggtcagtatccgaaagcgcaggcggcgcaacccgatcaattaatgtcgga

SEQ ID NO: 381127 - DNA, 75 bp, synthetic construct
  source 1..75: mol_type = other DNA
aagagatgctctcacaaatcggtcaggaaaaagataagttgaatggggcattagatggcgcagccgggttgtgtt

SEQ ID NO: 381128 - DNA, 75 bp, synthetic construct
  source 1..75: mol_type = other DNA
aaatgagcaacgacggctggcatagctttgtggcgttaaatgatgaatccgcaagcgtagatgccagtttcgatt

SEQ ID NO: 381129 - DNA, 75 bp, synthetic construct
  source 1..75: mol_type = other DNA
actttattaatgccgaagctggacgctttatctcaacaaccgcgttatgtcatgaagctggcccagatggaaccc

SEQ ID NO: 381130 - DNA, 75 bp, synthetic construct
  source 1..75: mol_type = other DNA
tgcgctttgaaatgagcaatgatggctggcgcagctttctggcgttgaatgatgaatccgccagtgttgatgcca

SEQ ID NO: 381131 - DNA, 75 bp, synthetic construct
  source 1..75: mol_type = other DNA
acgtcatcttatggataacgtggccggacaatgtggcgcaacatggcagttcgtggatggtcagcgccagatggt

SEQ ID NO: 381132 - DNA, 75 bp, synthetic construct
  source 1..75: mol_type = other DNA
atgggcagcaaaacgttgggggctttgccctgcctgacggcgaatttgctggtgcaggctatctgtgtgctgctt

SEQ ID NO: 381133 - DNA, 75 bp, synthetic construct
  source 1..75: mol_type = other DNA
aacaagaaagataagacgggcagactccaggtgctgttaccgtgaaagaatattcgctatttttccagggtactt

SEQ ID NO: 381134 - DNA, 75 bp, synthetic construct
  source 1..75: mol_type = other DNA
ccgcacggataaagtctgtggttaccgtcgacatatacacgccgtgtttcccggttactttttcctgaaagcaga

SEQ ID NO: 381135 - DNA, 75 bp, synthetic construct
  source 1..75: mol_type = other DNA
acgattttctccatctaccgccgcgttacacctgtcggtacgccggtaacggaagaagatttcctccagcctggt

SEQ ID NO: 381136 - DNA, 75 bp, synthetic construct
  source 1..75: mol_type = other DNA
tcactacggagtgcccgtcagagtcattcgttgggagccggaaacacaacgggttatctacctccgcgaaggcta

SEQ ID NO: 381137 - DNA, 75 bp, synthetic construct
  source 1..75: mol_type = other DNA
gggcagcaaaacgttggggggctttgccctgcctgacggcgaatttgctggtgcaggctattagtgtgttgctta

SEQ ID NO: 381138 - DNA, 75 bp, synthetic construct
  source 1..75: mol_type = other DNA
attcgcgaactgctggcgttgttgttgtgtctgttttccggcgggttagcgagcgctggttacgcaatgaaaaag

SEQ ID NO: 381139 - DNA, 75 bp, synthetic construct
  source 1..75: mol_type = other DNA
attcgtgaactgctggcgttgttgttgtgtctgttttccggcgggttagcgatgtatggctacttgcgctggtta

SEQ ID NO: 381140 - DNA, 75 bp, synthetic construct
  source 1..75: mol_type = other DNA
cctatattcacgagggaacaactggaactacttatccaacaaagatattagttgacgtaccaagtgatgcaaaag

SEQ ID NO: 381141 - DNA, 75 bp, synthetic construct
  source 1..75: mol_type = other DNA
tgctttcagcactctgttaaccccggttattgatgaattaaacgcggttatggaaatacacaacaagacccgcgc

SEQ ID NO: 381142 - DNA, 75 bp, synthetic construct
  source 1..75: mol_type = other DNA
atccgtccggaacgtccgatggcggcaagttctattggtgcacagatggggattatcgccagtccggtgtcggtt

SEQ ID NO: 381143 - DNA, 75 bp, synthetic construct
  source 1..75: mol_type = other DNA
tcgttttacaactggaagttcaactggaaacagtttaccacgcgattgagtttggtaagataaatggtattgaag

SEQ ID NO: 381144 - DNA, 75 bp, synthetic construct
  source 1..75: mol_type = other DNA
gattgaacttctcagccgtaccaaaccctgcctgaaaattatgctttcagagacggaactggaagttattgcagg

SEQ ID NO: 381145 - DNA, 75 bp, synthetic construct
  source 1..75: mol_type = other DNA
aatcttcacttgattcaagattataattcaaataacacagaacaacttgatgttatgggaatgaaaaatctttta

SEQ ID NO: 381146 - DNA, 75 bp, synthetic construct
  source 1..75: mol_type = other DNA
tgggtacatctaaggctatgatggaaaaagttatcgtagctaagtcaagaaacttacctaaagatattactattt

SEQ ID NO: 381147 - DNA, 75 bp, synthetic construct
  source 1..75: mol_type = other DNA
catgagcatcacaaaaatactgtgggttatatgtcaacgccctcagagtgcaaatcagagccatacccgacaaat

SEQ ID NO: 381148 - DNA, 75 bp, synthetic construct
  source 1..75: mol_type = other DNA
actctcataatactgataggttagatgttgagggaatgaaaaaattactgctaaaacttccttttatccgggcac

SEQ ID NO: 381149 - DNA, 75 bp, synthetic construct
  source 1..75: mol_type = other DNA
tgggtatttccaaagcgatgatggaaaaagtaatggtagcaaaatcgcgcaatgttgactgctctaaaacggtta

SEQ ID NO: 381150 - DNA, 75 bp, synthetic construct
  source 1..75: mol_type = other DNA
tcctgtggaggctgttaaaactaatgttcttggtacagaaaatgtgcttgaagctgctatagcgaatgaagttaa

SEQ ID NO: 381151 - DNA, 66 bp, synthetic construct
  source 1..66: mol_type = other DNA
ctgattagccaggtaacacagtgttatgacagcccgccggttcaggcgggcttttttgtggggtga

SEQ ID NO: 381152 - DNA, 75 bp, synthetic construct
  source 1..75: mol_type = other DNA
tggctacctcgatctcagcctgctggcgttcggtggcgtcggcgtgatcatggccctggtctacatccagctaaa

SEQ ID NO: 381153 - DNA, 75 bp, synthetic construct
  source 1..75: mol_type = other DNA
gcactctcgatattctgcatgtctccgcgcttggcgtgcaggcgctgcgcgttgctattccggcactgattgtct

SEQ ID NO: 381154 - DNA, 75 bp, synthetic construct
  source 1..75: mol_type = other DNA
cagattaaaagtgaaagaactaaagcaagacatgctgcagtgtttgaatggaaacgccctgattcttttcgtcgc

SEQ ID NO: 381155 - DNA, 75 bp, synthetic construct
  source 1..75: mol_type = other DNA
cgagtcaggcatatcgataattatggtcgtttgagaagagtatcattatcagaaagaaagttcataaataatgca

SEQ ID NO: 381156 - DNA, 75 bp, synthetic construct
  source 1..75: mol_type = other DNA
taaagttaaaaaagaaaggaaaccacgagtcaggcatatcgataattatggtcgtttgagaagagtatcattatc

SEQ ID NO: 381157 - DNA, 75 bp, synthetic construct
  source 1..75: mol_type = other DNA
cccaatggaggctgttaaaactaatgttttaggtactgaaaatgttctcgaagctgctatttcaaatcaggtgcg

SEQ ID NO: 381158 - DNA, 75 bp, synthetic construct
  source 1..75: mol_type = other DNA
gccggaaaatacggatggactattgctcagtgtcgttcaatgtcgactgaggacattcgccttgctctcgcaaca

SEQ ID NO: 381159 - DNA, 75 bp, synthetic construct
  source 1..75: mol_type = other DNA
atgtagttggaatagccattttgtattaagaataaccaaaatatgggtttttcacttgatttacgaatgtattgg

SEQ ID NO: 381160 - DNA, 75 bp, synthetic construct
  source 1..75: mol_type = other DNA
aagcgaccgaggatttgttgaaatcagccagggagcttgggctggaagccgaaggcgagttattccggtataacc

SEQ ID NO: 381161 - DNA, 75 bp, synthetic construct
  source 1..75: mol_type = other DNA
ctcactattctggaaagaaatattgtctttttttcagtttatataccttgtctgcttatcatgtgcttatattag

SEQ ID NO: 381162 - DNA, 75 bp, synthetic construct
  source 1..75: mol_type = other DNA
tcccgtaaacatggatggactatttcacagtgtcgtttaatgccactggatgatattcgccttgctctttcgtta

SEQ ID NO: 381163 - DNA, 75 bp, synthetic construct
  source 1..75: mol_type = other DNA
taatgagcgtacttttctggcgtggatccgtactgcactaggatttctggcggcgggggttgggcttgatcaact

SEQ ID NO: 381164 - DNA, 75 bp, synthetic construct
  source 1..75: mol_type = other DNA
ttatttataaatcaaattaaaaatggtaaccctataactattaccgatcccgatatgactcgctttatgatgacc

SEQ ID NO: 381165 - DNA, 75 bp, synthetic construct
  source 1..75: mol_type = other DNA
taatgttgagcaacatcctgttaatgttatcggaacgcgccatggtgagaaactttatgaagcgctgcttagccg

SEQ ID NO: 381166 - DNA, 75 bp, synthetic construct
  source 1..75: mol_type = other DNA
aattctaagttaaaattctacattggggatgtaagggattattccagcattctaagcgccgcacgtggcgtcgac

SEQ ID NO: 381167 - DNA, 75 bp, synthetic construct
  source 1..75: mol_type = other DNA
ggaccactgaaagccgcgccgtcactgtcctttctcgggctcgcggtgatggatgaactttgcgcccgtcacatc

SEQ ID NO: 381168 - DNA, 75 bp, synthetic construct
  source 1..75: mol_type = other DNA
actgctggaagatttaatggaagccggaccactgaaagctgccccgtcgctgtccttcctcgggctggccgtgat

SEQ ID NO: 381169 - DNA, 75 bp, synthetic construct
  source 1..75: mol_type = other DNA
atgaaaacccccttaccgcccgtcttacgcgcagccctttaccgtcgcgctgtcgcctgtgcctggctgaccgtg

SEQ ID NO: 381170 - DNA, 75 bp, synthetic construct
  source 1..75: mol_type = other DNA
tttattacaagttatcatgattattccttttttcctggctatcaatcaagataacttctggctaacacagttggt

SEQ ID NO: 381171 - DNA, 75 bp, synthetic construct
  source 1..75: mol_type = other DNA
tgaatctcctgtatttgctcaaattagggaaacaaaagcagaggaatctcgccctctaattgaagttgtacgtga

SEQ ID NO: 381172 - DNA, 75 bp, synthetic construct
  source 1..75: mol_type = other DNA
ggatactgagtgggtatcacgacgcttagcattttgtaaaaaatatttattgagaaatggaattgatacaaaata

SEQ ID NO: 381173 - DNA, 75 bp, synthetic construct
  source 1..75: mol_type = other DNA
tatcgaagacgaacgtccttcccagagtaccttagatgactggaaaaatgacgctctacgcgtaaaagcgttttt

SEQ ID NO: 381174 - DNA, 75 bp, synthetic construct
  source 1..75: mol_type = other DNA
tcgccgtggttgtttgcattatcgtcgggcttaccgctgcactatgtcagacacagggagctgtaacgcgcttac

SEQ ID NO: 381175 - DNA, 75 bp, synthetic construct
  source 1..75: mol_type = other DNA
ctggtattgatagcggcgctatccggttgcacgtcaacgccgaaccagtgcgattgctcgacaataccggaaccg

SEQ ID NO: 381176 - DNA, 75 bp, synthetic construct
  source 1..75: mol_type = other DNA
catttagttgatacaggagctttacagctcaactgcctaaggctatctggtcacccgataaaaatgaatggaagg

SEQ ID NO: 381177 - DNA, 75 bp, synthetic construct
  source 1..75: mol_type = other DNA
cccgtatcgcaagccggtttggcgtggacacccgaaagttctatgaaactttgaaggcgaccgcattcaagcagc

SEQ ID NO: 381178 - DNA, 75 bp, synthetic construct
  source 1..75: mol_type = other DNA
atggaaaaagtcaaaagcgtagatgccgtggagttcacggcagcagataagaaggcgatgacccatgcggcatac

SEQ ID NO: 381179 - DNA, 75 bp, synthetic construct
  source 1..75: mol_type = other DNA
gggcggccctgctgcgcctgttagccgaaggagaaacgcctctggcactgcccgaacatttcgaccagcagacgc

SEQ ID NO: 381180 - DNA, 75 bp, synthetic construct
  source 1..75: mol_type = other DNA
atcatgatggaagccccccacgttcaggcttgtgcgcaacacattacgcgctggctttgcgcaacctcaacgcaa

SEQ ID NO: 381181 - DNA, 75 bp, synthetic construct
  source 1..75: mol_type = other DNA
atgcgtaggactgatgagaagaaaagacggcgcctgtcactcgagcattttatagctatcaggcaggccgctgca

SEQ ID NO: 381182 - DNA, 75 bp, synthetic construct
  source 1..75: mol_type = other DNA
gatatcgccagcgtgaaatccgaagctctcgcctatcgtgaagcggactttgatattctggaatggcgtgtggac

SEQ ID NO: 381183 - DNA, 75 bp, synthetic construct
  source 1..75: mol_type = other DNA
gaagcctctattgatccttatttccttgagcgtgtggaattactccgtggcccagtatccgtactgtatggtaaa

SEQ ID NO: 381184 - DNA, 75 bp, synthetic construct
  source 1..75: mol_type = other DNA
gccggcgactcactttggaacagttcttggccatacatgcagctgctgaaccttggctgaagactgcaatggacc

SEQ ID NO: 381185 - DNA, 75 bp, synthetic construct
  source 1..75: mol_type = other DNA
aatcgcgcagccatcgacagcggtctggtcgatatgatcgatctggagttatttaccggcgatgatcaggttaaa

SEQ ID NO: 381186 - DNA, 75 bp, synthetic construct
  source 1..75: mol_type = other DNA
ggtgcggtaaaaaaagcctctgcgccagggcaaatctcggtaaatgatttgcgtacggtattaactattttacat

SEQ ID NO: 381187 - DNA, 75 bp, synthetic construct
  source 1..75: mol_type = other DNA
atttaccggcgatgatcaggttaaagaaaccgtcgcctacgcccacgcgcatgatgtgaaagttgtcatgtccaa

SEQ ID NO: 381188 - DNA, 75 bp, synthetic construct
  source 1..75: mol_type = other DNA
gaatataacctgaggatgcgccctgaaaatacaccatcgatagattcattaattcgggaatcgggagggctgaat

SEQ ID NO: 381189 - DNA, 75 bp, synthetic construct
  source 1..75: mol_type = other DNA
cgaaattagagcattagcagcgcatcttttcgatcagcaaggcattgatccacaaggacgaatggcgcatagcga

SEQ ID NO: 381190 - DNA, 75 bp, synthetic construct
  source 1..75: mol_type = other DNA
tgcaaaatcgactaaaatatacactaaaaatcatacaaactgggtagtggtaccgcatggagaaatccgtacagg

SEQ ID NO: 381191 - DNA, 75 bp, synthetic construct
  source 1..75: mol_type = other DNA
ggccaatgttcagaaccgaaaagttagcttcctgaaaaagctattctcttatgctgttgatgaatcgctaatgat

SEQ ID NO: 381192 - DNA, 75 bp, synthetic construct
  source 1..75: mol_type = other DNA
atccgcaggcaaggatggcccatagtgatgcaaaatcgacaaaaatttatacccagaatcatgttgaatgggttg

SEQ ID NO: 381193 - DNA, 75 bp, synthetic construct
  source 1..75: mol_type = other DNA
gagcagggcattttcagagctgcgggaccggataggtgtagcggcagaattacctatcaaagaaaggccaacttt

SEQ ID NO: 381194 - DNA, 75 bp, synthetic construct
  source 1..75: mol_type = other DNA
aatgagttgtttcgatggatggttatgtcatttgtattttttattatttctgtaacgtgcatgttaataagtaag

SEQ ID NO: 381195 - DNA, 75 bp, synthetic construct
  source 1..75: mol_type = other DNA
ttgattacgaaaaagtttactccctcagttcacagttattcgaaggagttgttcaatcagccgtagaagagcagg

SEQ ID NO: 381196 - DNA, 75 bp, synthetic construct
  source 1..75: mol_type = other DNA
tttgtaagtgacttgttccgtaactacgtagtctgcttcgtgggctacagcatcaacgacccggtgctacgctat

SEQ ID NO: 381197 - DNA, 75 bp, synthetic construct
  source 1..75: mol_type = other DNA
aacggaacaacactttcagaaattgagtgtgaggccttcaagcgcggtcagttcgacgccacattggatttgttg

SEQ ID NO: 381198 - DNA, 75 bp, synthetic construct
  source 1..75: mol_type = other DNA
gaagatgaagttttgattaaagtggaatatgtcggtatttgtggttcagatgtacatggtttcgaatcaggcccg

SEQ ID NO: 381199 - DNA, 75 bp, synthetic construct
  source 1..75: mol_type = other DNA
caatgattgatatacgaagtgcagcatggaacatgaatgatgcattagcaaatatcgagtcaacgttctgtaaac

SEQ ID NO: 381200 - DNA, 75 bp, synthetic construct
  source 1..75: mol_type = other DNA
atgaaaaacaaaaaagctttctttgacaacctatcaattgttttaaattatgcttatggagatgagcttgaaata

SEQ ID NO: 381201 - DNA, 75 bp, synthetic construct
  source 1..75: mol_type = other DNA
tggtatacggttcctcaaccatgctggtttacaccacgggatgtggtgttcacgcctttacctatgacccttcac

SEQ ID NO: 381202 - DNA, 75 bp, synthetic construct
  source 1..75: mol_type = other DNA
ctgtcggcaataaaactgggcgccaagattatccatagagatatcaacaaagccggactggttgatatcctgggt

SEQ ID NO: 381203 - DNA, 75 bp, synthetic construct
  source 1..75: mol_type = other DNA
acggatgcgcttcccggagaaaggcaaaacctactccatcaacgaaggaaactacattaagtttccgaacggggt

SEQ ID NO: 381204 - DNA, 75 bp, synthetic construct
  source 1..75: mol_type = other DNA
tgctgattacgtacgttcaaccctgttcgaccttgctgacgagtcatggaaatcgtccttgccatacctgttgga

SEQ ID NO: 381205 - DNA, 75 bp, synthetic construct
  source 1..75: mol_type = other DNA
ttatgttgaggcggccgtttcgctatagtgaagacgattcgagcagcactgatgagcccttgcgaatcaagcaat

SEQ ID NO: 381206 - DNA, 75 bp, synthetic construct
  source 1..75: mol_type = other DNA
cacgcctttacctatgacccttcacttggcgttttctgcctgtgccaggaacgaatgcgcttcccggagaaagga

SEQ ID NO: 381207 - DNA, 75 bp, synthetic construct
  source 1..75: mol_type = other DNA
gcgcattaacgcactatctgtgtcatccggagagctttacttacaaactgccagacaatatggacacgatggaag

SEQ ID NO: 381208 - DNA, 75 bp, synthetic construct
  source 1..75: mol_type = other DNA
gcgacgcgttcaggggctggagtttgaagaacaggccagagtcattgaagagttcacgtgtcgctacaacgtgga

SEQ ID NO: 381209 - DNA, 75 bp, synthetic construct
  source 1..75: mol_type = other DNA
tttctccagcgcagaaaggcggggcaattaatgtgcgttattttatgccgcattcttgccatcgcgcgctggcga

SEQ ID NO: 381210 - DNA, 75 bp, synthetic construct
  source 1..75: mol_type = other DNA
aaaatattttcagatatatattacctgagagaaagttttacccctcacctgtcaattcactcactggaaatttaa

SEQ ID NO: 381211 - DNA, 75 bp, synthetic construct
  source 1..75: mol_type = other DNA
ttggccttgaagtagatacgattttgtcgtactcgagagacaggtatgaagaagttaagacaacatacaggcggt

SEQ ID NO: 381212 - DNA, 75 bp, synthetic construct
  source 1..75: mol_type = other DNA
tgtggaacaataagcaaggaagacgagttcattattgttttcagtgccgtcaggatttatatcgaacaaaagact

SEQ ID NO: 381213 - DNA, 75 bp, synthetic construct
  source 1..75: mol_type = other DNA
gcgagggggatcagccacggcgaccttgcgtgggcaaccatgcttgctgtcattaacgaaccgattggcggcgaa

SEQ ID NO: 381214 - DNA, 75 bp, synthetic construct
  source 1..75: mol_type = other DNA
atcattatcaaattcattatcaggttaaaaatgctttcctgcgtgaaggggattctgatctgctaatctggaacg

SEQ ID NO: 381215 - DNA, 75 bp, synthetic construct
  source 1..75: mol_type = other DNA
tgcagcctgatggggacgctgcactgctgaactatcatattgttggcgtcacccgtgatggtattcctgaaccct

SEQ ID NO: 381216 - DNA, 75 bp, synthetic construct
  source 1..75: mol_type = other DNA
gcaatggtccaccatccgccgcctgaccgaagaggtgatgcagcggatgacggtcaaggccgccagtagcgaaac

SEQ ID NO: 381217 - DNA, 75 bp, synthetic construct
  source 1..75: mol_type = other DNA
cggtagatgtatgtttttagaattaacacgtgacaggttttttggaaaatctaaaattggtttcattgtcttctc

SEQ ID NO: 381218 - DNA, 75 bp, synthetic construct
  source 1..75: mol_type = other DNA
tggcatactggtggttattgcctctcggtagatgtatgtttttagaattaacacgtgacaggttttttggaaaat

SEQ ID NO: 381219 - DNA, 75 bp, synthetic construct
  source 1..75: mol_type = other DNA
ctattctttttcgctgctggtttttttactatcaaaaaaaatgacttatctattttcgattatatcaagtcaaag

SEQ ID NO: 381220 - DNA, 75 bp, synthetic construct
  source 1..75: mol_type = other DNA
gagggtgttgcatatggtgtttataaacaacatagcattatgcttaaagctgagaatttggatttagtttcctgg

SEQ ID NO: 381221 - DNA, 75 bp, synthetic construct
  source 1..75: mol_type = other DNA
tcgacctatttaatggaaagtgagaggctgtgtgatggtagccagtttgatcctcgcggggcaaattgccgtttt

SEQ ID NO: 381222 - DNA, 75 bp, synthetic construct
  source 1..75: mol_type = other DNA
ggggtatatacaggtacatatcaatcgcgtaactcttatatgctttttgttggcgacttagttttgattagctgg

SEQ ID NO: 381223 - DNA, 75 bp, synthetic construct
  source 1..75: mol_type = other DNA
cttaccctgcagtcgacgggcggtgtggtggagaaaacgctttcaacgtatttgatgaaagatggcaaattgtgc

SEQ ID NO: 381224 - DNA, 75 bp, synthetic construct
  source 1..75: mol_type = other DNA
tcgagctttgtctccagaagcactgctggaacaaacgccattgattccgtactggcaatgaaaaaagcaagtaat

SEQ ID NO: 381225 - DNA, 75 bp, synthetic construct
  source 1..75: mol_type = other DNA
tggtatcaagccagattaccactaaagatacgggacaaacaggggcaacatatacagggccaaaaactcataatt

SEQ ID NO: 381226 - DNA, 75 bp, synthetic construct
  source 1..75: mol_type = other DNA
tgcgatggacacggtaacaggggtggccgcgagtatcgttttcaatgttacggtgttaacaccaggggaggtcgc

SEQ ID NO: 381227 - DNA, 75 bp, synthetic construct
  source 1..75: mol_type = other DNA
ttcatgatatggtgcttcgcgtggataccacctcgcggcaacctattgattctacctgtcgattccagtacgtgc

SEQ ID NO: 381228 - DNA, 75 bp, synthetic construct
  source 1..75: mol_type = other DNA
aagatacgtgtagacacaatatcgcaacaaccgattgattcaacctgccgtttcacctacatattaaacatgtac

SEQ ID NO: 381229 - DNA, 75 bp, synthetic construct
  source 1..75: mol_type = other DNA
cccgaaggcgttaagcatggtgtgtataagaactccactactctgttgaaagtgggttatctggaaaatgttagc

SEQ ID NO: 381230 - DNA, 75 bp, synthetic construct
  source 1..75: mol_type = other DNA
agctacacgacatggtagtgcatgtcgataccagcagccgccagccgattgattccacctgccgcttccagtaca

SEQ ID NO: 381231 - DNA, 75 bp, synthetic construct
  source 1..75: mol_type = other DNA
ggggtcgacaattaccaccacgctttcgacctacctgatggaaaacggcaaactctgtgacggcagcgtttttga

SEQ ID NO: 381232 - DNA, 75 bp, synthetic construct
  source 1..75: mol_type = other DNA
tgacgcagaaaacaccgccttcctggcgcatgtggtttcgcgtaccggttcttatctctcatcaaccgccgggat

SEQ ID NO: 381233 - DNA, 75 bp, synthetic construct
  source 1..75: mol_type = other DNA
tggtggtgctaccagtaaaaagaatacagggaacactacaacgagtcttggaagccctatgctgacctgtaaaga

SEQ ID NO: 381234 - DNA, 75 bp, synthetic construct
  source 1..75: mol_type = other DNA
gtcttcgtattcagatgaccttccaaggtgtagagtttcgttcaatcgtaggtcaaacggatatttcggctgcta

SEQ ID NO: 381235 - DNA, 75 bp, synthetic construct
  source 1..75: mol_type = other DNA
ggtgaaagatggtgtaagcaccttcacagactcagctaatgagcaggcttcaaaagtgcttaagtcgggtaatgc

SEQ ID NO: 381236 - DNA, 75 bp, synthetic construct
  source 1..75: mol_type = other DNA
aagatgttggtatttcaaatggcctaagagtccagctaacttttcaggaaattaacttcaaagccattgtgggtc

SEQ ID NO: 381237 - DNA, 75 bp, synthetic construct
  source 1..75: mol_type = other DNA
gggcaaactgatatttcagcagccactggcaaaacggctaccacgaatgatggcggtgctaccagtaaaaagaat

SEQ ID NO: 381238 - DNA, 75 bp, synthetic construct
  source 1..75: mol_type = other DNA
aggtgtagagtttaaatctgtagttggacagacagatatttcagcagccactggacggacttctaccacgaatga

SEQ ID NO: 381239 - DNA, 75 bp, synthetic construct
  source 1..75: mol_type = other DNA
tgccatcgctgatgaaatctccgtctggcgcagcatttggctccgtgctgggactgatggcgtttttctacttct

SEQ ID NO: 381240 - DNA, 75 bp, synthetic construct
  source 1..75: mol_type = other DNA
gaaagaacagaagacaccaatattttattagcagccctattaggacagcaactacaacctgttgataaggtgatg

SEQ ID NO: 381241 - DNA, 75 bp, synthetic construct
  source 1..75: mol_type = other DNA
cgacattgttccccggagcagagttcccgtctaaaccttcggaatgggaaatgttgagatatgagatctattctc

SEQ ID NO: 381242 - DNA, 75 bp, synthetic construct
  source 1..75: mol_type = other DNA
acagcctcagctaatgagcaagcttcaaaggtgcttaagtcgggtaatgctttacggaagttttctgtgaatccg

SEQ ID NO: 381243 - DNA, 75 bp, synthetic construct
  source 1..75: mol_type = other DNA
gggcaaactgttacagataatgttcaaagagcacccagaacaatcactattagtggtgtcgttgtagttggctat

SEQ ID NO: 381244 - DNA, 75 bp, synthetic construct
  source 1..75: mol_type = other DNA
cgtagccttgaaaatcaggatctaatcaaactgcgtgactggctcctccctattcttatgaacggacaggtcaag

SEQ ID NO: 381245 - DNA, 75 bp, synthetic construct
  source 1..75: mol_type = other DNA
gcggcagaaaacccgccgctgccaccgcccccgctaccgggcaagtacagtctttaacgcgtggcctgaaattac

SEQ ID NO: 381246 - DNA, 75 bp, synthetic construct
  source 1..75: mol_type = other DNA
ctgcacgaactcgcagaagaactccagaacagcatccagattcgctttgaggccgaaaatgaaacaggaacataa

SEQ ID NO: 381247 - DNA, 75 bp, synthetic construct
  source 1..75: mol_type = other DNA
agatggacgagaatcagaagtggcttatcgccctcatgatatctgcaatccttgctccgctgtttattgccttgg

SEQ ID NO: 381248 - DNA, 75 bp, synthetic construct
  source 1..75: mol_type = other DNA
tgagaatcaaaaatggctcattggtctattgatttcatcgatccttgtcccgctgtttatcgcattggttacaaa

SEQ ID NO: 381249 - DNA, 75 bp, synthetic construct
  source 1..75: mol_type = other DNA
gctttggcgcttccagcctgctggcaagcctgctgaaggctctgggccacggcgacggtaagagcgccagcagct

SEQ ID NO: 381250 - DNA, 75 bp, synthetic construct
  source 1..75: mol_type = other DNA
aaatcgcgctggcagaaacccgtgcggcaatcgcctacggtgccgatgaagttgacgtggtgttcccgtaccgtg

SEQ ID NO: 381251 - DNA, 75 bp, synthetic construct
  source 1..75: mol_type = other DNA
aacggagaaaacgaaaagatgaacaagcagcagcaagccgtactcaacatggcaggattcataaaaagccagagc

SEQ ID NO: 381252 - DNA, 75 bp, synthetic construct
  source 1..75: mol_type = other DNA
tgctggtgttgctgttaggtgcgctgatgggaacgctcgccggggtgctgcgcggcgtgtttaacgtgccaagtt

SEQ ID NO: 381253 - DNA, 75 bp, synthetic construct
  source 1..75: mol_type = other DNA
acgtcatcgccgcggtcgtggtcggcggtacggcgctttccggcggtcgcggctcgttgttcggtacgctgcttg

SEQ ID NO: 381254 - DNA, 75 bp, synthetic construct
  source 1..75: mol_type = other DNA
gctgggcggacaatttctcggtgtgccggtatccgcgctgatcatgatggtgttgtttgcgctgtttgtgttcat

SEQ ID NO: 381255 - DNA, 75 bp, synthetic construct
  source 1..75: mol_type = other DNA
aaaatgatgccgatggtgacactgattcatacatgtggtttgaaacaggcgacaacggcaatgaatatttcaaat

SEQ ID NO: 381256 - DNA, 75 bp, synthetic construct
  source 1..75: mol_type = other DNA
acacgagagaatgagggagaaaatggtgatatagggccactacgcccctttacgcttaatctcagaactggtcgg

SEQ ID NO: 381257 - DNA, 75 bp, synthetic construct
  source 1..75: mol_type = other DNA
atgaatcttaaatgggatgctttgtctgtccttgttaaagcccttttcagcagtgaagtaaaaatatcgacagtc

SEQ ID NO: 381258 - DNA, 75 bp, synthetic construct
  source 1..75: mol_type = other DNA
atgaacaagcagcagcaaactgtactcaacatggcgggattcataaaaagccagagcctaacactgctcgaaaag

SEQ ID NO: 381259 - DNA, 75 bp, synthetic construct
  source 1..75: mol_type = other DNA
gggggtaaactgccaatgcatgcttccggtgcgggtaaagcgtttttatcgcaactcagtgaagagcaggtcacg

SEQ ID NO: 381260 - DNA, 75 bp, synthetic construct
  source 1..75: mol_type = other DNA
tgtaaaatcatgggcgtttcgcgtgatacgttttattgttaccgcgaactggccgatgaaggcggtgcggatgcg

SEQ ID NO: 381261 - DNA, 75 bp, synthetic construct
  source 1..75: mol_type = other DNA
tatgttgtccattcgaaagtgctgtcactgcaatcgacgggtggaacgattgagaaaacgctgcccacctttttg

SEQ ID NO: 381262 - DNA, 75 bp, synthetic construct
  source 1..75: mol_type = other DNA
ctgctaaccacgatgcaacagcagggtttcgtgcgtcaggttggcgaactgggacattgggcaatcggcgcacat

SEQ ID NO: 381263 - DNA, 75 bp, synthetic construct
  source 1..75: mol_type = other DNA
ctggacaggttcagtctttaacgcgtggcctgaaattactggagtggattgccgaatccaatggcagtgtggcac

SEQ ID NO: 381264 - DNA, 75 bp, synthetic construct
  source 1..75: mol_type = other DNA
tcggcgcacatgcctttatggtcggcagcagctttctccagagccgtaatttgttagcgattgttcaccctatcc

SEQ ID NO: 381265 - DNA, 75 bp, synthetic construct
  source 1..75: mol_type = other DNA
acctgaagcatccagacttgcaggacttacatgggatcactggcggtacagaaatgatgcctcttataacatggc

SEQ ID NO: 381266 - DNA, 75 bp, synthetic construct
  source 1..75: mol_type = other DNA
cgagaagccttgtttgcgaggctgacgcatcaggaaagccggggaaatcagtttggacgcaatggacagccactc

SEQ ID NO: 381267 - DNA, 75 bp, synthetic construct
  source 1..75: mol_type = other DNA
atgtcggtactggcagatggtgtgctggtggtgatggtgttggtcgtgctccggcctttactgcgcaaatctgaa

SEQ ID NO: 381268 - DNA, 75 bp, synthetic construct
  source 1..75: mol_type = other DNA
gcgtcgtgcagtcacccgtcttttatggtcacgcccagatggtgagctttgaagcattgcgtccgctggcggcgg

SEQ ID NO: 381269 - DNA, 75 bp, synthetic construct
  source 1..75: mol_type = other DNA
gaacgtcagttcccggttggggaaatttatgcactggcacgtaacgaaagcgcaggtgaacaactgcgctttggt

SEQ ID NO: 381270 - DNA, 75 bp, synthetic construct
  source 1..75: mol_type = other DNA
gctttcccggcacacggtcagcaccggaccagcaacaagctgcgtaaacagggcgtttttatctccggcagtggt

SEQ ID NO: 381271 - DNA, 75 bp, synthetic construct
  source 1..75: mol_type = other DNA
taagattgcagatgaagtctgtatcagtatcctgaactggctctgggaaaaagatgaagccctgctctctgaggc

SEQ ID NO: 381272 - DNA, 75 bp, synthetic construct
  source 1..75: mol_type = other DNA
accgggcgctatccgtcgtatgacatcaccaacctggcggccttcctgcaatcagactatgacatcaataatctc

SEQ ID NO: 381273 - DNA, 75 bp, synthetic construct
  source 1..75: mol_type = other DNA
ccctgcgcccggattgcgccatcattggcgagccaacgtcgctgcaaccggtacgcgcgcataaaggtcacatct

SEQ ID NO: 381274 - DNA, 75 bp, synthetic construct
  source 1..75: mol_type = other DNA
taacgccagggataaagtcccgtgccgctgcaaagtttgtgatcatgagtggtctgttagtccttacaaccttaa

SEQ ID NO: 381275 - DNA, 75 bp, synthetic construct
  source 1..75: mol_type = other DNA
aattttggttatgaagagatgttaagcgagctggaagcgatagttgccgacgccgaaacgcggttagccgaggat

SEQ ID NO: 381276 - DNA, 75 bp, synthetic construct
  source 1..75: mol_type = other DNA
tctaataaaatcgcttcgtattccgaaccttgaaaaatatgtttatgaaaacatatcatcattcattcgtgatgt

SEQ ID NO: 381277 - DNA, 75 bp, synthetic construct
  source 1..75: mol_type = other DNA
ttgctggcggggcataccgatacggtgccatttgatgacggtcgctggacgcgcgatccgtttacactgacggag

SEQ ID NO: 381278 - DNA, 75 bp, synthetic construct
  source 1..75: mol_type = other DNA
ctgctcagggacgaacagagcgacctgctcagtatggaacaaagccttgaaaaccgcgttgtcggacaaagcccg

SEQ ID NO: 381279 - DNA, 75 bp, synthetic construct
  source 1..75: mol_type = other DNA
gtcgttgcggttctacccgttcccgacggtaaatgcgaataaacaggcgacggctttctcctcgtcacagcagga

SEQ ID NO: 381280 - DNA, 75 bp, synthetic construct
  source 1..75: mol_type = other DNA
ggcgatgcatctaaccgtatttgcgcttgttgtgagttgcatatggatattcgtccgctgccaggcatgacactc

SEQ ID NO: 381281 - DNA, 75 bp, synthetic construct
  source 1..75: mol_type = other DNA
tgctctgattgccacaccttcaataagcgccacggaagaggcactcgatcaaagcaatgcagatttaatcactct

SEQ ID NO: 381282 - DNA, 75 bp, synthetic construct
  source 1..75: mol_type = other DNA
cggtgagcgaacgctggccgggtcgtctgacggtcgaagagctgcatccgccgatccctggttacgagtgcccgc

SEQ ID NO: 381283 - DNA, 75 bp, synthetic construct
  source 1..75: mol_type = other DNA
acttatcccactggcgaacagtacaggagttttctatcacccaagccgctttattgttggccggaattgatcctt

SEQ ID NO: 381284 - DNA, 75 bp, synthetic construct
  source 1..75: mol_type = other DNA
gcgtcagtgttcccgaatacctgcgccggctggctctgggaaagccgctgatcccggccatcgaccaggacatgc

SEQ ID NO: 381285 - DNA, 75 bp, synthetic construct
  source 1..75: mol_type = other DNA
aggatgcagtgattccccggattcgttgcactcaggcagagaaggaaaccatcaccgaaaaggcgaacttctttg

SEQ ID NO: 381286 - DNA, 75 bp, synthetic construct
  source 1..75: mol_type = other DNA
tgcagatttaagaaaaaatattttttctccactaattgatgctttttcgctggctcgccgtcagttagatatatc

SEQ ID NO: 381287 - DNA, 75 bp, synthetic construct
  source 1..75: mol_type = other DNA
tagctctcggctggatgaacgtcggcgcggcgcaatctccggattctgcactcgccagcataatctccgccattc

SEQ ID NO: 381288 - DNA, 75 bp, synthetic construct
  source 1..75: mol_type = other DNA
tattgtgcggggtgacttaccggaaagtgcggacattatcaaagcgattctggaaaataatccagggagcgatac

SEQ ID NO: 381289 - DNA, 75 bp, synthetic construct
  source 1..75: mol_type = other DNA
gaaagaatgcttgatgccctggatgaccaggagctggtgaaactggttactgaacgtagcactcagcctctgcat

SEQ ID NO: 381290 - DNA, 75 bp, synthetic construct
  source 1..75: mol_type = other DNA
cggtggttgattttttgcaaccctcttcggatctgaccgcgacggatacgggcaacgaatcatccgatgcccctg

SEQ ID NO: 381291 - DNA, 75 bp, synthetic construct
  source 1..75: mol_type = other DNA
ttcgctgggcgcgtccagagcagaacaacgcggcgattatgccgaggctgaaaagctgtggcgtaaggcagcaca

SEQ ID NO: 381292 - DNA, 75 bp, synthetic construct
  source 1..75: mol_type = other DNA
attaattctgaagaaacagtattgctgacttatggtcataagagcgaaggtcttgaatatgtagaagacgcaata

SEQ ID NO: 381293 - DNA, 75 bp, synthetic construct
  source 1..75: mol_type = other DNA
aatttttattattgaacaggattaatgagctaaaaaaagaaaaggaagaggtaattaaactttcaaaaataaatc

SEQ ID NO: 381294 - DNA, 75 bp, synthetic construct
  source 1..75: mol_type = other DNA
aaagcaataagaaaaatattataaagccattgagtaatattataaaaatagataatctaatgtctgcgcattaca

SEQ ID NO: 381295 - DNA, 75 bp, synthetic construct
  source 1..75: mol_type = other DNA
aacagccgaacgatgaagggcggacccagtccgtcacaccggaatgcgctgggtggggatatgttggctttgagg

SEQ ID NO: 381296 - DNA, 75 bp, synthetic construct
  source 1..75: mol_type = other DNA
aagccatgctgtacggttccatcgtgaccttccttggttggacactgtatggtctggtatcaccacgctttgaac

SEQ ID NO: 381297 - DNA, 75 bp, synthetic construct
  source 1..75: mol_type = other DNA
agcgtgagaatacccttcgacagcaccggtaccagcaacaacggacggcctgggccgaacagtatgcaaactgga

SEQ ID NO: 381298 - DNA, 75 bp, synthetic construct
  source 1..75: mol_type = other DNA
caattcgaagctcaattttaggccttatgaaaaagatagtcgttcatcttggccacagttcttctctattttaaa

SEQ ID NO: 381299 - DNA, 75 bp, synthetic construct
  source 1..75: mol_type = other DNA
tacaatgatgaagatggctgggctagggcgttgtttaatgttttaaatggcaattcgaagctcaattttaggcct

SEQ ID NO: 381300 - DNA, 75 bp, synthetic construct
  source 1..75: mol_type = other DNA
atgagacctgatatcaggaatgagtatgacgaatatataaatagctccacatctgtcccggcgatggcccatccg

SEQ ID NO: 381301 - DNA, 75 bp, synthetic construct
  source 1..75: mol_type = other DNA
taccatggggtgtttcagagtctggctatcatgcttttgatgttcagcataattatcagtatcaggcatttggcg

SEQ ID NO: 381302 - DNA, 75 bp, synthetic construct
  source 1..75: mol_type = other DNA
atgcgactcaatattatcaccgagctggaacagcggctggatgagcatgcccggatggatttcgcctttctgtac

SEQ ID NO: 381303 - DNA, 75 bp, synthetic construct
  source 1..75: mol_type = other DNA
agttaagaacggaaaaagcaccttctcagatgccgctaatgagcaagcttcaaaggtgcttaataatgctggtac

SEQ ID NO: 381304 - DNA, 75 bp, synthetic construct
  source 1..75: mol_type = other DNA
ggaaattaactttaaagctattgtggggcagactgatatctcggctgcaactggaaaagccgcgactacgaatga

SEQ ID NO: 381305 - DNA, 75 bp, synthetic construct
  source 1..75: mol_type = other DNA
ggacaaactgatgtttcggctgcaactggaaagactgctaccacaaatgatggtggcgctacttctaagaagaat

SEQ ID NO: 381306 - DNA, 75 bp, synthetic construct
  source 1..75: mol_type = other DNA
gtgcaataaagcttggaagctggactattcagacttaacagaagctgaaaaaaccaacgtcaccaatgctaatag

SEQ ID NO: 381307 - DNA, 75 bp, synthetic construct
  source 1..75: mol_type = other DNA
cagaagcaaattatctcagttgtctgtaaagatggtattaagattgacgactccattattacaagctttaaagcc

SEQ ID NO: 381308 - DNA, 75 bp, synthetic construct
  source 1..75: mol_type = other DNA
ggaaattaacttcaaagccattgtagggcaaactgatgtttcggctgcgacaggaaaaaccgctaccacaaatga

SEQ ID NO: 381309 - DNA, 75 bp, synthetic construct
  source 1..75: mol_type = other DNA
atgaagcgctggactataccccctcacgtcttgcaaccggtcagctctatgcggtggtacagtcctggatggcgc

SEQ ID NO: 381310 - DNA, 75 bp, synthetic construct
  source 1..75: mol_type = other DNA
acgtctgtaaacacgccgaagccagcgaagtgacgattattctgcgccagcagggagagatattgcacctggagg

SEQ ID NO: 381311 - DNA, 75 bp, synthetic construct
  source 1..75: mol_type = other DNA
gcatcgctaccagctcctgggactcgatacgcataatccccccttgcgtacctctttaatcatctggtgtagcct

SEQ ID NO: 381312 - DNA, 75 bp, synthetic construct
  source 1..75: mol_type = other DNA
gagttctttctttgtccagacagataaagccagtattgatgttgcataccatcatacaggtaatcaacaaaaaga

SEQ ID NO: 381313 - DNA, 75 bp, synthetic construct
  source 1..75: mol_type = other DNA
tttttcccagggggtggcattgccggatccggggaaatattatggtcgcggcatctatggtgcagcagtgaacgg

SEQ ID NO: 381314 - DNA, 75 bp, synthetic construct
  source 1..75: mol_type = other DNA
caccgtggatctgctcggcagttatcagcttccggtgggtacactcagcttcagcattgaaaacctcttcgaccg

SEQ ID NO: 381315 - DNA, 75 bp, synthetic construct
  source 1..75: mol_type = other DNA
gtacgctgaacatcgatgaatcccggcagcttcaactgataacgcagtactataaaagtcagggggacgacaatt

SEQ ID NO: 381316 - DNA, 75 bp, synthetic construct
  source 1..75: mol_type = other DNA
tgacgctggatggtgttctcctccctgatgacagaataccgctgaaggatgatggacaaaaccatacggttgaga

SEQ ID NO: 381317 - DNA, 75 bp, synthetic construct
  source 1..75: mol_type = other DNA
cggctaccagcagggattacaaaatcagattatggagttaatttatgccgggtctgaagccagtctgctggataa

SEQ ID NO: 381318 - DNA, 75 bp, synthetic construct
  source 1..75: mol_type = other DNA
tctttgaactggcctggtctcacagtctggtggtattgcgccagatgaacgccagtgaagatgatgccacgttgt

SEQ ID NO: 381319 - DNA, 75 bp, synthetic construct
  source 1..75: mol_type = other DNA
tcttgaggacagtagtctgccccaatatctcagtcagtcagttattactgaaattacaacagcattatcactatc

SEQ ID NO: 381320 - DNA, 75 bp, synthetic construct
  source 1..75: mol_type = other DNA
tgtcgttacctctgacctgggttgatcagtgccttcgggaacagggagtcaccactgacattctcataaataact

SEQ ID NO: 381321 - DNA, 75 bp, synthetic construct
  source 1..75: mol_type = other DNA
ttttggctacagcgtttttgcccatcgtgagagtggaatagacagcgagctgacggtcctggttgccgaagcgga

SEQ ID NO: 381322 - DNA, 75 bp, synthetic construct
  source 1..75: mol_type = other DNA
aggaaccgtattttcattgcgtatgctgggcatgtttatggttctgccggttctgaccacgtacggcatggctct

SEQ ID NO: 381323 - DNA, 75 bp, synthetic construct
  source 1..75: mol_type = other DNA
atgatcgatgaaaatggcgtccctttcagcatcgacattcccgtattccgactcgccgttcccacactcattcat

SEQ ID NO: 381324 - DNA, 75 bp, synthetic construct
  source 1..75: mol_type = other DNA
agatagggttgtacatactatctttaatgctgttgtttgtttttattatcatcttaagtgcaaaaattccgatgt

SEQ ID NO: 381325 - DNA, 75 bp, synthetic construct
  source 1..75: mol_type = other DNA
gtaacttactcggtaaactattacgtaccgagatttcgattattcgtagttaccgtgccttcttaatgttattgc

SEQ ID NO: 381326 - DNA, 75 bp, synthetic construct
  source 1..75: mol_type = other DNA
accgcattggtcgcaaaccattaattgtcggtgggctggcggtgtttgccgccggtagcgttatcgctgcgctct

SEQ ID NO: 381327 - DNA, 75 bp, synthetic construct
  source 1..75: mol_type = other DNA
ggtcgcaaaccattaattgtcggcggactggcggtgtttgctgttggtagcgttatcgctgcgctttccgactcc

SEQ ID NO: 381328 - DNA, 75 bp, synthetic construct
  source 1..75: mol_type = other DNA
atgaacgacagtgaatttcatcgcctggcagaccaactgtggctaaccattgaagagcgcctggacgactgggat

SEQ ID NO: 381329 - DNA, 75 bp, synthetic construct
  source 1..75: mol_type = other DNA
ctacaattttttcgtacttttgtccttgcaactgaacaatcaacctatttcgagattcctgctgaagactcctgg

SEQ ID NO: 381330 - DNA, 75 bp, synthetic construct
  source 1..75: mol_type = other DNA
tgctgtacatcacttgaaattcaagtctctgctatgggcgtggcaacaccagaagagtggatgtggcttgaatct

SEQ ID NO: 381331 - DNA, 75 bp, synthetic construct
  source 1..75: mol_type = other DNA
ctatgaaagtttgactttcttagcaacttacatagtaccttttatgggattcagttttgatgaccctcagaaaaa

SEQ ID NO: 381332 - DNA, 75 bp, synthetic construct
  source 1..75: mol_type = other DNA
agcatatcttttgcttgtagtagtaataggcattatttttattaaaacagacaagtattatgcgaatccaacttt

SEQ ID NO: 381333 - DNA, 75 bp, synthetic construct
  source 1..75: mol_type = other DNA
taggtctatacatcctatctttagctatgctttttgtttttattattatcctgactgccaaaatccccttttgct

SEQ ID NO: 381334 - DNA, 69 bp, synthetic construct
  source 1..69: mol_type = other DNA
atggataaagggatggaatcaagcgtactggataacgccattgccagcttactgagggcaaaaatacag

SEQ ID NO: 381335 - DNA, 75 bp, synthetic construct
  source 1..75: mol_type = other DNA
ttttactccgatagacaaacagtctgcaattaaggcgctggatgatcagatcgacaaactggaaatgacggatga

SEQ ID NO: 381336 - DNA, 75 bp, synthetic construct
  source 1..75: mol_type = other DNA
atcaccgcttcagaccatgcccggtattttcgttgcatcgagattaaggactactttcgggaaacggatgccgga

SEQ ID NO: 381337 - DNA, 75 bp, synthetic construct
  source 1..75: mol_type = other DNA
atcaccgcttcagatcatgcaaggtatttccgttgcatcgagatcaaggattactttcaggagactgacgccgga

SEQ ID NO: 381338 - DNA, 75 bp, synthetic construct
  source 1..75: mol_type = other DNA
tttatgaaggacctggtgaggctgctttgtactctcaacagtgagccgctcgatgattaccagaacagcctgatt

SEQ ID NO: 381339 - DNA, 75 bp, synthetic construct
  source 1..75: mol_type = other DNA
acggtagtgatgatggctaaggcttttgccgcccagcagttcggtacgccggagtctttccctccggaaaggaaa

SEQ ID NO: 381340 - DNA, 75 bp, synthetic construct
  source 1..75: mol_type = other DNA
acctactcaactatgagtcttggcgcggcttattttgctcagctacctggtaactatacgttacggccacgcctt

SEQ ID NO: 381341 - DNA, 75 bp, synthetic construct
  source 1..75: mol_type = other DNA
atttctgatgccgttgagcgcctgatgcagaggtcaaaccgctcttatccgatcagtaagttgcgaccactcatt

SEQ ID NO: 381342 - DNA, 75 bp, synthetic construct
  source 1..75: mol_type = other DNA
aatttcacgataatgatagagataatcattatcaattgattgtgtcagtaattttgacttacatcacactttcat

SEQ ID NO: 381343 - DNA, 75 bp, synthetic construct
  source 1..75: mol_type = other DNA
cggtatacgttcaatgggaggtgcttactatcgggtgaaagaaggagagccgactggctggaaccctgcggcttt

SEQ ID NO: 381344 - DNA, 75 bp, synthetic construct
  source 1..75: mol_type = other DNA
cacgtaaatgtcgctccatctctattgcataataaaaaattcatatccacctgtataaacgctgcaaaaaaaaac

SEQ ID NO: 381345 - DNA, 75 bp, synthetic construct
  source 1..75: mol_type = other DNA
aacaaactcaaaaccgcgcgtaagctggatatggtgcttgtcgtagcgacacaatcgccggatgaactaattaaa

SEQ ID NO: 381346 - DNA, 75 bp, synthetic construct
  source 1..75: mol_type = other DNA
aacgctgaaaacgattggcggggtggagagccgcataaccggcatggactcatccacaagtgaatcgcttaatga

SEQ ID NO: 381347 - DNA, 75 bp, synthetic construct
  source 1..75: mol_type = other DNA
aataccgacaccacaggtttatcccggcggctggaaaagctgatttatcccagcgcctatcacctgaaaaccgtc

SEQ ID NO: 381348 - DNA, 75 bp, synthetic construct
  source 1..75: mol_type = other DNA
atgggtaaattattccttaactgggttacagaggatgttatcagacaggtcatcaccaacctgttcgaatttgaa

SEQ ID NO: 381349 - DNA, 75 bp, synthetic construct
  source 1..75: mol_type = other DNA
ccactgatacaggtgaagagagtgccgctgccgctatcgatgacgacctggacacagttgcggaagacctcaatg

SEQ ID NO: 381350 - DNA, 75 bp, synthetic construct
  source 1..75: mol_type = other DNA
tgtctgagggatggaaatttactgggtgtgtttatcaaaacatgcagcaaaagtgacgataatcgctacaaaaac

SEQ ID NO: 381351 - DNA, 75 bp, synthetic construct
  source 1..75: mol_type = other DNA
aatgaccgtattgaaacgctggcaatgaaaaaggtcttcgctaaccacgataaactgctggtgagctccaccaaa

SEQ ID NO: 381352 - DNA, 75 bp, synthetic construct
  source 1..75: mol_type = other DNA
tgctttattttcataaggcacttttccctttttttgataattgcatatgtatctcaaaaactgtacaaaagagta

SEQ ID NO: 381353 - DNA, 75 bp, synthetic construct
  source 1..75: mol_type = other DNA
ggtaaagcccccgatgaactgattcctgccgtcgcctccgccgataaggataatcgtcagttgaatcttctgctg

SEQ ID NO: 381354 - DNA, 75 bp, synthetic construct
  source 1..75: mol_type = other DNA
aacactggccacagataatgcaggaagttcgctcccccaaaaatcctcccaataatctgtacattggtgaagaca

SEQ ID NO: 381355 - DNA, 75 bp, synthetic construct
  source 1..75: mol_type = other DNA
ctggttttcagatcgctttgcagaaggcgccacgaccaaaaatgttaatactatggctccatttctaaccctggc

SEQ ID NO: 381356 - DNA, 75 bp, synthetic construct
  source 1..75: mol_type = other DNA
tgctcacagcaccgacaacgcggagacaaagacactttctgaacctgccgggatgcagcctgttcaacaggcaac

SEQ ID NO: 381357 - DNA, 75 bp, synthetic construct
  source 1..75: mol_type = other DNA
ttgccggttacggtgaggccatcaaccgggatgctgacggccctaagcgtcctgccccacagttgatgcagtttc

SEQ ID NO: 381358 - DNA, 75 bp, synthetic construct
  source 1..75: mol_type = other DNA
gtttcacctgaagcaacaggactccccgttgtttgccgccatccacaaaccggaagagcaaccggacaagctttt

SEQ ID NO: 381359 - DNA, 75 bp, synthetic construct
  source 1..75: mol_type = other DNA
atgatatttacgctttattttgataacgatatctatgggaacaaaattatcaaagcatcgctgaacggtggagag

SEQ ID NO: 381360 - DNA, 75 bp, synthetic construct
  source 1..75: mol_type = other DNA
ttattcagaacggaaactttcaggttgattctcagggtaacctgaatattggtggcctttttagtgttacgtcgc

SEQ ID NO: 381361 - DNA, 75 bp, synthetic construct
  source 1..75: mol_type = other DNA
ggtggatggtagttaccttgcgaacggtacacggacgctgacggtgtatgacgatcacagctttgaccggcagat

SEQ ID NO: 381362 - DNA, 75 bp, synthetic construct
  source 1..75: mol_type = other DNA
ttgtgggtaatctcagggaggagacattaaaaacgattggtggcgtggaaacccgcataaccgatatggactcat

SEQ ID NO: 381363 - DNA, 75 bp, synthetic construct
  source 1..75: mol_type = other DNA
gttgtggatttccccccgaagccgctgaattttaaagcgacaggtggatttggctcggttctccttgagtgggat

SEQ ID NO: 381364 - DNA, 75 bp, synthetic construct
  source 1..75: mol_type = other DNA
caagaacgattagtggtattgaaacccgcataaccacactggattcgtcaaccagtgaatcgcttaatgaggtcg

SEQ ID NO: 381365 - DNA, 75 bp, synthetic construct
  source 1..75: mol_type = other DNA
ggggaacgaaggacgacctttcagatgctgtgctggttgccacgacaccggggcaggtttatggtgatccggttg

SEQ ID NO: 381366 - DNA, 75 bp, synthetic construct
  source 1..75: mol_type = other DNA
catggagatgcagccgcctgggcagtttatcgcgttattctgaaacagcccattactaacgatcaggccgcgatg

SEQ ID NO: 381367 - DNA, 75 bp, synthetic construct
  source 1..75: mol_type = other DNA
cacggcgatgcacaagcctgggctgtctatcgggtcatccttcaacagcccatcactaatgatcaggcggcgctg

SEQ ID NO: 381368 - DNA, 75 bp, synthetic construct
  source 1..75: mol_type = other DNA
aactctctggttgaagggatgcgcatgtcaaacctggtgaccagcgtggtcaaacatgacgaagaacgtcgtgtt

SEQ ID NO: 381369 - DNA, 75 bp, synthetic construct
  source 1..75: mol_type = other DNA
cagtcgcacataatgaattatatcgagatctaattgagggttatatgcttcgacacaaagttaaacctggaatca

SEQ ID NO: 381370 - DNA, 75 bp, synthetic construct
  source 1..75: mol_type = other DNA
gtttgtgaatgccgcaggcgttaaagggccgtggcacgcagtggcaggcgtggcagcacagacacagatatcagt

SEQ ID NO: 381371 - DNA, 75 bp, synthetic construct
  source 1..75: mol_type = other DNA
gaaggaggcagtaaagctttcctgtccatgtggtcaaagaaagccggagctgatggggtgacagccggaatcggc

SEQ ID NO: 381372 - DNA, 75 bp, synthetic construct
  source 1..75: mol_type = other DNA
ctaatttttctggttcaataacgctctattacgactgggataatgaggaagataaagcactggcgacacaatatg

SEQ ID NO: 381373 - DNA, 75 bp, synthetic construct
  source 1..75: mol_type = other DNA
tcggatataacactgacgccgaaagatattggtacgcttaactcaacaacaatgtcattcagcggtggtgctggt

SEQ ID NO: 381374 - DNA, 75 bp, synthetic construct
  source 1..75: mol_type = other DNA
gttcagcggcgtcatcggcatcatctgcgtctgattcaaaagatgaggcgaccagacaggcgtcagcagcaaagg

SEQ ID NO: 381375 - DNA, 75 bp, synthetic construct
  source 1..75: mol_type = other DNA
aaagatacttatcaatatggttatacaagctcaggtcaaaatacctggggtgtacaaggctcagtaggtatgtct

SEQ ID NO: 381376 - DNA, 75 bp, synthetic construct
  source 1..75: mol_type = other DNA
cgtttgattacggcactaaatccacgaataacactggtgcgcatacccatagtttaagtggcagcacgaatgcag

SEQ ID NO: 381377 - DNA, 75 bp, synthetic construct
  source 1..75: mol_type = other DNA
gcgcagcttcctcggcaacagcggcaggaaattccgcgaaggcggcaaaaacgtccgagacgaacgccaggtctt

SEQ ID NO: 381378 - DNA, 75 bp, synthetic construct
  source 1..75: mol_type = other DNA
agcaaattctgcgaaggcggcaaaaacgtccgagacgaacgctaagtcttctgaaacggcagcgggacagagcgc

SEQ ID NO: 381379 - DNA, 75 bp, synthetic construct
  source 1..75: mol_type = other DNA
ctacaagctcggccggagcacactcgcacgttgatggtcgcaggtttaatacaagcacttttaaagacacctatc

SEQ ID NO: 381380 - DNA, 75 bp, synthetic construct
  source 1..75: mol_type = other DNA
tgcgcatacccatagtttaagtggcagcacgaatgcagctggtaatcacagccatagagatggccgtcgatttaa

SEQ ID NO: 381381 - DNA, 75 bp, synthetic construct
  source 1..75: mol_type = other DNA
gctcaggacgctacgacagcacaaaaagggattgtccagctaagcagcgcgactaacagcgcatctgaaacgctt

SEQ ID NO: 381382 - DNA, 75 bp, synthetic construct
  source 1..75: mol_type = other DNA
ggtagtccagctcagcagtgcgaccaacagcacgtccgagtcactggctgcaaccccgaaggcggtaaaggctgt

SEQ ID NO: 381383 - DNA, 75 bp, synthetic construct
  source 1..75: mol_type = other DNA
acagcggcagctcagagcaaaagtacggcagaatctgcggcaacgcgcgccgagactgcggcaaaacgggcggag

SEQ ID NO: 381384 - DNA, 75 bp, synthetic construct
  source 1..75: mol_type = other DNA
gagaaacttgcgcaatcacaagtgcgggtagcggtcattaatgcacaaccggtcggttttattacctgcattgaa

SEQ ID NO: 381385 - DNA, 75 bp, synthetic construct
  source 1..75: mol_type = other DNA
tacctggggtgtacaaggctcagtaggtatgtctacggggtggttagcgaataccagtacagatggtaatcatag

SEQ ID NO: 381386 - DNA, 75 bp, synthetic construct
  source 1..75: mol_type = other DNA
gataaaacaacctatcccctgcttgcagcagcttatccctctggtgtactccccgatatgcgtggctggacaatc

SEQ ID NO: 381387 - DNA, 75 bp, synthetic construct
  source 1..75: mol_type = other DNA
tgcccataaccacactatcggcattggtgctcatgcccattctgtcattattggtccccacggacacaccatcac

SEQ ID NO: 381388 - DNA, 75 bp, synthetic construct
  source 1..75: mol_type = other DNA
ccggtggtggaatgcatgcaactaacacaagcaagacagcaagtaatcgcgtattaagcgcaggagctcatactc

SEQ ID NO: 381389 - DNA, 75 bp, synthetic construct
  source 1..75: mol_type = other DNA
ttcagctcagcagcgcgaccaacagcacatctgaaatgctggcggcaacgccaaagtcggtaaaggcagcctatg

SEQ ID NO: 381390 - DNA, 75 bp, synthetic construct
  source 1..75: mol_type = other DNA
cctatagtctttcgccgatctggaggcgataccgatgaattagcctcacgagttgtgataactacttattcctca

SEQ ID NO: 381391 - DNA, 75 bp, synthetic construct
  source 1..75: mol_type = other DNA
aaccacatcttcgtttgattacggtactaaatcaacgaataacacaggtgcacatacccacaatgtatctggtac

SEQ ID NO: 381392 - DNA, 75 bp, synthetic construct
  source 1..75: mol_type = other DNA
tggttcacatggacataccatcaccgttaacgctgctggtaacgcggaaaacaccgttaaaaacatcgcatttaa

SEQ ID NO: 381393 - DNA, 75 bp, synthetic construct
  source 1..75: mol_type = other DNA
cctcagcccgggatgcggcggcctcaaaagaggcagcgaaatcatcagaaacgagcgcagcctcgagcgccagta

SEQ ID NO: 381394 - DNA, 75 bp, synthetic construct
  source 1..75: mol_type = other DNA
ggtcgtgccgtattgtctcaggagcaggacggcattaaatcgcacacccacagcgccagcgcatccagtacggat

SEQ ID NO: 381395 - DNA, 75 bp, synthetic construct
  source 1..75: mol_type = other DNA
acgtcggttcacctcaacaggcaggtatatctgaacttgttttgcgtgcaggtaatggtaatccgaaggggatta

SEQ ID NO: 381396 - DNA, 75 bp, synthetic construct
  source 1..75: mol_type = other DNA
catgggtgaatacatccggtgatacctatgatgtttatgttgaaataggtaattacgccacaggtgttaatattc

SEQ ID NO: 381397 - DNA, 75 bp, synthetic construct
  source 1..75: mol_type = other DNA
atcctcgagcgccagtagcgcagcttcctcggcaacagcggcaggaaattccgcgaaggcggcaaaaacgtcaga

SEQ ID NO: 381398 - DNA, 75 bp, synthetic construct
  source 1..75: mol_type = other DNA
ggcggtcatctccgcacgcgaaatcggtaaaaccgtgctttcgactctcggcgatacaccgaaaaacgatcgccc

SEQ ID NO: 381399 - DNA, 75 bp, synthetic construct
  source 1..75: mol_type = other DNA
gcacgcgaaatcggtaaaaccgtactttcgactctcggcgatacaccgaaaaacgatcgcccttcctacatctga

SEQ ID NO: 381400 - DNA, 75 bp, synthetic construct
  source 1..75: mol_type = other DNA
taaaggcggtgccggacacggctcgttaatccttttaggtggcaacgatgtttccgacgtgaaacgcggtattga

SEQ ID NO: 381401 - DNA, 75 bp, synthetic construct
  source 1..75: mol_type = other DNA
cgattgctgctcactgctggccagcttcgccgcttcgctcccgctgcgccggccttcccaattgccacgctggac

SEQ ID NO: 381402 - DNA, 75 bp, synthetic construct
  source 1..75: mol_type = other DNA
ttgccgcccagcagttcggtacgccggagtctttccctcctgaaaggaaacacaagaaacttactaccgtatggt

SEQ ID NO: 381403 - DNA, 75 bp, synthetic construct
  source 1..75: mol_type = other DNA
taactacacgttacggccacgcctgagttctatcagcagtctgaactttgccgaaatggaaagcttccataattt

SEQ ID NO: 381404 - DNA, 75 bp, synthetic construct
  source 1..75: mol_type = other DNA
ggcattgatcgctgaaagcggtgcacaattgcagggtagcgttgaactggctcaccagcgggttacaccgctcgg

SEQ ID NO: 381405 - DNA, 75 bp, synthetic construct
  source 1..75: mol_type = other DNA
ggcgttaattgcagaaagcggtgcgcaattgcagggcagcgtagaactggctcaccagcgggttactcctctcgg

SEQ ID NO: 381406 - DNA, 75 bp, synthetic construct
  source 1..75: mol_type = other DNA
atttgctcgcaacgtggcaagttgatggtgcttattttgaatgtgtggatgacgaagatttaacgttacttactg

SEQ ID NO: 381407 - DNA, 75 bp, synthetic construct
  source 1..75: mol_type = other DNA
tgctcgatctcgcttgccaggcgcaggcattaatcgctgaaagcggtgcgcaattgcagggcagcgtggaactgg

SEQ ID NO: 381408 - DNA, 75 bp, synthetic construct
  source 1..75: mol_type = other DNA
agaatggtatcggagtgacttttttgcggcccaaccgtggcaacagtttggtgtaatcactgacgaagcgctacg

SEQ ID NO: 381409 - DNA, 75 bp, synthetic construct
  source 1..75: mol_type = other DNA
gcggcggtcttgctggattactctgcggcctgaaactgcaaaagcacggtctacgttgcgcgattgtcactcgtg

SEQ ID NO: 381410 - DNA, 75 bp, synthetic construct
  source 1..75: mol_type = other DNA
gccttaaaaagcggctccaccacattaacgtcattaacagcggtgacagatcaaaacggaatcgcgacaacaagc

SEQ ID NO: 381411 - DNA, 75 bp, synthetic construct
  source 1..75: mol_type = other DNA
gatagtacagctcagcagtgcgaccaacagcacttccgagtcacaggcggcaacgccaaaagccgttaaggccgc

SEQ ID NO: 381412 - DNA, 75 bp, synthetic construct
  source 1..75: mol_type = other DNA
gtaggtattggttctcatcagcacactgtcggtattggtgcacacacgcactccgttgcgattggctcacatgga

SEQ ID NO: 381413 - DNA, 75 bp, synthetic construct
  source 1..75: mol_type = other DNA
aaggtggaaaactttctcatgtccaactggcttatgcgaaatccggcgcagtgcaatgcgggttttgtacgccgg

SEQ ID NO: 381414 - DNA, 75 bp, synthetic construct
  source 1..75: mol_type = other DNA
gcctggcgcaccaatcccgtggccatcagataccgttccgtctggctatgccctgatgcaggggcagacttttga

SEQ ID NO: 381415 - DNA, 75 bp, synthetic construct
  source 1..75: mol_type = other DNA
caaaaggtcgggtagccgcgctgacagacaatacgcagggggcagcaggtcttgagttatacgaggtgtataaca

SEQ ID NO: 381416 - DNA, 75 bp, synthetic construct
  source 1..75: mol_type = other DNA
ctgtcgccatacataccggcccggtgacggtgaactcccgccgccgtcgccagtccgcacgattactggagaact

SEQ ID NO: 381417 - DNA, 75 bp, synthetic construct
  source 1..75: mol_type = other DNA
atatttctattattcccgattacaggcaagcctggaaagtggaacataaattgccagatattctatctgttaact

SEQ ID NO: 381418 - DNA, 75 bp, synthetic construct
  source 1..75: mol_type = other DNA
acgctggtggcaggcccggcagacgcctcaaagtcagtccttaagaacaatcggtcatcattgaaaggagacttt

SEQ ID NO: 381419 - DNA, 75 bp, synthetic construct
  source 1..75: mol_type = other DNA
ccgaagatatcgaaggacgtattaacctcaatgcgttagattccgaacacgtatcaaaaatctatctcgctatca

SEQ ID NO: 381420 - DNA, 75 bp, synthetic construct
  source 1..75: mol_type = other DNA
gcgcagcagacagtgaatacggcggtcccgccttctttaagtgcgcattgcctgaaaatggcggtgatgcccgaa

SEQ ID NO: 381421 - DNA, 75 bp, synthetic construct
  source 1..75: mol_type = other DNA
ggcactgtttgcgctttcggtcgcggtaggcttaacgccagaaatgttgccgatgattgttacctcgacgctggc

SEQ ID NO: 381422 - DNA, 75 bp, synthetic construct
  source 1..75: mol_type = other DNA
acaaccgaagccgatgagtaaagacaacctgagcgactactttgccaaagcacgggatctggctgggataattcc

SEQ ID NO: 381423 - DNA, 75 bp, synthetic construct
  source 1..75: mol_type = other DNA
tgatcaacggtggagagataatcctggcggacgagccgactggcgctctggattcgcaatccgggctagaagtgt

SEQ ID NO: 381424 - DNA, 75 bp, synthetic construct
  source 1..75: mol_type = other DNA
ggtctctgtaacggaacgaactcatgaaattggcgtacgcatggctgtcggcgcgagatacagcgacatcatgca

SEQ ID NO: 381425 - DNA, 75 bp, synthetic construct
  source 1..75: mol_type = other DNA
cctgcatattacccagggaaaaactggaatgcgtcttgcgttaccgcttacgctacgctgtgatgccatcgggat

SEQ ID NO: 381426 - DNA, 75 bp, synthetic construct
  source 1..75: mol_type = other DNA
gtttactaccagtataaaaatcctgtgactggaaaatttcacggactcgggacagacaaagtcaaggcagaaaaa

SEQ ID NO: 381427 - DNA, 75 bp, synthetic construct
  source 1..75: mol_type = other DNA
aacggctgtaccgtgcacagggtatcgatacaaaaacattactaggacataaagtccaggcaaccaccgatcgct

SEQ ID NO: 381428 - DNA, 75 bp, synthetic construct
  source 1..75: mol_type = other DNA
gctgactcgttgattaaaatttcgcggatctgggccgatttttgtcccgcaaacacatcgaatcagcctatttag

SEQ ID NO: 381429 - DNA, 75 bp, synthetic construct
  source 1..75: mol_type = other DNA
atccgcaatatatgtttgctttgataactgggatgtgaatttactctttaagaccaaaacactctcttcattaaa

SEQ ID NO: 381430 - DNA, 75 bp, synthetic construct
  source 1..75: mol_type = other DNA
aaaaacatataatcagaatgtattccgggaaaacattgcggacaaaaaagtgattaacacctatgtccagaagga

SEQ ID NO: 381431 - DNA, 75 bp, synthetic construct
  source 1..75: mol_type = other DNA
gtaaggccattttcgacaacgcagggctacaggctctggggcaaatagtctttcttggttctgtaccagcacgag

SEQ ID NO: 381432 - DNA, 75 bp, synthetic construct
  source 1..75: mol_type = other DNA
tgaaggtgccaagcagaagacactggaggagattaaaattctgggtacaaatgtggtccgcatttatcctgggcg

SEQ ID NO: 381433 - DNA, 75 bp, synthetic construct
  source 1..75: mol_type = other DNA
ccagcgctaccatttgatacctgatcttagcgcacttggtaacgtggagatcccggccatttacgccaacagcga

SEQ ID NO: 381434 - DNA, 75 bp, synthetic construct
  source 1..75: mol_type = other DNA
aaaaacactttatccgtaacgcaatgcttcttgcgattgttactggccagcgccgtgatgacatttgccacatgc

SEQ ID NO: 381435 - DNA, 75 bp, synthetic construct
  source 1..75: mol_type = other DNA
attagcattatcaatctcgatgaagacgagtggggtgcacgcggtgtggcctactgtaaatctaagcgagctata

SEQ ID NO: 381436 - DNA, 75 bp, synthetic construct
  source 1..75: mol_type = other DNA
ttatccgacctacggttctacccctgcacaggcctgataagacgcgctggcgtcacatcaggcaacggctgtcgg

SEQ ID NO: 381437 - DNA, 75 bp, synthetic construct
  source 1..75: mol_type = other DNA
tggcggcatttaccccgatggcggggacaacgttggttcagcaggatatttgcaacctgaatttctataaccagg

SEQ ID NO: 381438 - DNA, 75 bp, synthetic construct
  source 1..75: mol_type = other DNA
gtccggtgatgcgggatttgtatgccgtcgctgtggcatttctcgacccacattgcgtaaatggtggcgcagatg

SEQ ID NO: 381439 - DNA, 75 bp, synthetic construct
  source 1..75: mol_type = other DNA
acccatgcgcaaacccagcagacgcatggccgattattgaaaaatacaggattagcattatcaatctcgatgaag

SEQ ID NO: 381440 - DNA, 75 bp, synthetic construct
  source 1..75: mol_type = other DNA
aaagtttgatcgcagaactggcaaggtttactaccagtataaaaatcctgtgactggaaaatttcacggactcgg

SEQ ID NO: 381441 - DNA, 75 bp, synthetic construct
  source 1..75: mol_type = other DNA
gccgatctcgattatctccggcagttcgacagggagtgtatcgaacgaaatctcagtccaggcggcagtgccgac

SEQ ID NO: 381442 - DNA, 75 bp, synthetic construct
  source 1..75: mol_type = other DNA
tattaacggcgcaaaagaagacactattgcacgctgtcagcaatttaccgaagacatgggcgcagatattgtttt

SEQ ID NO: 381443 - DNA, 75 bp, synthetic construct
  source 1..75: mol_type = other DNA
ttacggtaaaagcagtcctggcggtctgttgaatatggtcagcaagcgtccgaccactgaaccgttgaaagaagt

SEQ ID NO: 381444 - DNA, 75 bp, synthetic construct
  source 1..75: mol_type = other DNA
atgcctttgcggcatcgggcaatgcgtgtcggatgcggcgtgaacgccttatccgacctacggctctacccctgc

SEQ ID NO: 381445 - DNA, 75 bp, synthetic construct
  source 1..75: mol_type = other DNA
caagtaaaatttggcgatgagttggtcgatcgagaatattttgccacgtggcaacaagtgcgagaagttgcgcgt

SEQ ID NO: 381446 - DNA, 75 bp, synthetic construct
  source 1..75: mol_type = other DNA
tagtgctgacttttgatgacggctaccagagtttttatacccgcgtcttcccaattcttcaggccttccagtggc

SEQ ID NO: 381447 - DNA, 75 bp, synthetic construct
  source 1..75: mol_type = other DNA
aatggataaaggactatagctccgcttattttgcatggaatatactttcaaccatgggccctaaggaaatcaatc

SEQ ID NO: 381448 - DNA, 75 bp, synthetic construct
  source 1..75: mol_type = other DNA
acggcaacaaccgcgccattcgcctgccccgcgatctggattttgagggggtgagcgagctggagatcgtccggg

SEQ ID NO: 381449 - DNA, 75 bp, synthetic construct
  source 1..75: mol_type = other DNA
acggcaataaccgcgctatccgtctgccccgcgatctggattttgaaggggtaagcgagctcgaaatcatccggg

SEQ ID NO: 381450 - DNA, 75 bp, synthetic construct
  source 1..75: mol_type = other DNA
acggcaataaccgtgctatccgtctgccccgagaactggattttgagggggtaagcgagctcgaaataatccggg

SEQ ID NO: 381451 - DNA, 75 bp, synthetic construct
  source 1..75: mol_type = other DNA
acccctgaaagaaattcagtttaaaatggggacggataatctgtttcagaccggattcgatttcagtgatgcgct

SEQ ID NO: 381452 - DNA, 75 bp, synthetic construct
  source 1..75: mol_type = other DNA
atgatctggcagcctgagttcacagataaaacactctccaggaaacccggggcggttcaaactgtatccattttt

SEQ ID NO: 381453 - DNA, 75 bp, synthetic construct
  source 1..75: mol_type = other DNA
ctcgaaaaagctgaccctgactttatggcggagcgcgaggacgttgtcagcgacgaaggacgctttgaactatga

SEQ ID NO: 381454 - DNA, 75 bp, synthetic construct
  source 1..75: mol_type = other DNA
acatttcacaaactgaaggtttttgtctttcagttgctgaggctctggcttctaatatgtatgtcattacaaatg

SEQ ID NO: 381455 - DNA, 75 bp, synthetic construct
  source 1..75: mol_type = other DNA
gccgaagagattattgcccgtttacgtaaaatgcagtccttcgacgccgatattcctaaaattgcgttgatgccg

SEQ ID NO: 381456 - DNA, 75 bp, synthetic construct
  source 1..75: mol_type = other DNA
ggagcagtatgccgatcgtccaatcatcacgatgtcgatggcaaaaactggcgtaatttctcgtctggctggtga

SEQ ID NO: 381457 - DNA, 75 bp, synthetic construct
  source 1..75: mol_type = other DNA
tttccagagtgatcccgatgcaggctattatggttggttaccgcgccagggaacagttgttccctatcaggatgc

SEQ ID NO: 381458 - DNA, 75 bp, synthetic construct
  source 1..75: mol_type = other DNA
tttgagctcgaaagagccgatccggattttatggcggagcgcgaggacgttgtcaccgacgaaggacgatttgat

SEQ ID NO: 381459 - DNA, 75 bp, synthetic construct
  source 1..75: mol_type = other DNA
acgcagctggaaaaagctgacccggactttatggcagagcgcggggacgttgtcagcgacgaaggacgggttgac

SEQ ID NO: 381460 - DNA, 75 bp, synthetic construct
  source 1..75: mol_type = other DNA
gcgcagctggacagggccgatccggactttatggcggagcgtgaggatgtggtcagcgatgaaggacgttttgag

SEQ ID NO: 381461 - DNA, 75 bp, synthetic construct
  source 1..75: mol_type = other DNA
gtaggaaacgaagtttaccagagcggtttgtttaatgtgactttgaacggtggttcagagtgggtggatttgccc

SEQ ID NO: 381462 - DNA, 75 bp, synthetic construct
  source 1..75: mol_type = other DNA
gcaccattcacggtatgatcacttctgagtgcatggcagatgattgcgctaatcgtgtagcgagtgattattcgt

SEQ ID NO: 381463 - DNA, 75 bp, synthetic construct
  source 1..75: mol_type = other DNA
gccctccgccatgacagcgcagaccacagccactcagaggtgcagacccgcgtgctgaacatgttccgcgaagcc

SEQ ID NO: 381464 - DNA, 75 bp, synthetic construct
  source 1..75: mol_type = other DNA
gggcagcacaatctgttcatcaaactggttctattgatgttgatggagatggtaaaggtgacatcgctacatacg

SEQ ID NO: 381465 - DNA, 75 bp, synthetic construct
  source 1..75: mol_type = other DNA
tggaacagatcgcctggatctgacattaaataacggtagtaaatgggtaggggcagcacaatctgttcatcaaac

SEQ ID NO: 381466 - DNA, 75 bp, synthetic construct
  source 1..75: mol_type = other DNA
ttgaaaacgatgatacaagttacagtgaattcgatcatattactggtaatcaggtttaccagagcggtctgttca

SEQ ID NO: 381467 - DNA, 75 bp, synthetic construct
  source 1..75: mol_type = other DNA
aaccgcgctaaagtgggcggtatcatgatctccgcggcactgacctcgttcctgaccggtatcaccgaaccgatc

SEQ ID NO: 381468 - DNA, 75 bp, synthetic construct
  source 1..75: mol_type = other DNA
tgcgtgacggtacgtcgttctcgcacggtctgatcgacttcatcgttctgtctggtaacagcagcaaactgtggc

SEQ ID NO: 381469 - DNA, 75 bp, synthetic construct
  source 1..75: mol_type = other DNA
tatctggcactctgctaaaccagaaaaccgcgcgaaagtgggcggtattatgatctccgcggcgctgacctcgtt

SEQ ID NO: 381470 - DNA, 75 bp, synthetic construct
  source 1..75: mol_type = other DNA
cggaaaccgggaatccggaaatacaggcattcatcaccggcctgctgcgcaccaccggtcagccggtcatccctg

SEQ ID NO: 381471 - DNA, 75 bp, synthetic construct
  source 1..75: mol_type = other DNA
actgggcgcagcgggcgtagtggttgctggttctggtgttcaggcgattttcggtactaaatccgataacctgaa

SEQ ID NO: 381472 - DNA, 75 bp, synthetic construct
  source 1..75: mol_type = other DNA
tgatctccgcggcactgacctcgttcctgaccggtatcaccgaaccgatcgagttctccttcatgttcgttgcgc

SEQ ID NO: 381473 - DNA, 75 bp, synthetic construct
  source 1..75: mol_type = other DNA
tgcagtgacggcaatcgtgacaggttcaactgacaatacgggttattacaaaaatgaaggtactgccgaaaatat

SEQ ID NO: 381474 - DNA, 75 bp, synthetic construct
  source 1..75: mol_type = other DNA
aaggcaagagctatcacggtgaatggaaacgcaagccagggtacgatcgaggcgctaatcaatgtgatctatacc

SEQ ID NO: 381475 - DNA, 75 bp, synthetic construct
  source 1..75: mol_type = other DNA
tccggcggcgttaattgcaacgctccagtttatcgccaccaccttttgtttgccggttaaaacgacgattgccac

SEQ ID NO: 381476 - DNA, 75 bp, synthetic construct
  source 1..75: mol_type = other DNA
tcgccagaagtccccgtctggccgctgcccgcgaagaaaatatgtgtagtaggaattagcggtctgatggatttt

SEQ ID NO: 381477 - DNA, 75 bp, synthetic construct
  source 1..75: mol_type = other DNA
ctggacccgcaatcacgccgatatcccgctgcgcccacgatttgcggtgcttgcgagcggcagtttctttagcgg

SEQ ID NO: 381478 - DNA, 75 bp, synthetic construct
  source 1..75: mol_type = other DNA
ggaatcatctgctgacagaactggtgatggaaataaaaagcggaaatctgcggcgttgtgaggcgctgggactga

SEQ ID NO: 381479 - DNA, 75 bp, synthetic construct
  source 1..75: mol_type = other DNA
ttaaggcaagagctatcacggtgaatggaaacgcaagccagggaacgatcgaggcgctaatcaatgtgatctaca

SEQ ID NO: 381480 - DNA, 75 bp, synthetic construct
  source 1..75: mol_type = other DNA
atgctgaatgaacattacgatgtcaccacagcagcctatgctgtcgattacaaaaatgaaggtactgccgaaaat

SEQ ID NO: 381481 - DNA, 75 bp, synthetic construct
  source 1..75: mol_type = other DNA
tcatcttagtatcagtaaatcagacatattcaccaactaactttggtacacaacgccagacagggacatttgatt

SEQ ID NO: 381482 - DNA, 75 bp, synthetic construct
  source 1..75: mol_type = other DNA
tgaaaaacggtttgcattgattattgaggaaatcaaccaacgcaaaaataaagagatggcgacagaagaaaaaac

SEQ ID NO: 381483 - DNA, 75 bp, synthetic construct
  source 1..75: mol_type = other DNA
tcgcggaaaaatattggacctaaaggaaaattcaggccgtttattttatacgcagcgattccggcggcgttaatt

SEQ ID NO: 381484 - DNA, 75 bp, synthetic construct
  source 1..75: mol_type = other DNA
atgtctgaccataatccactgacattaaaactgaatctgcgggaaaaaatcgcctatggcatgggcgacgtcggt

SEQ ID NO: 381485 - DNA, 75 bp, synthetic construct
  source 1..75: mol_type = other DNA
tactcgatctcgcttgccaggcgcaggcattaatcgctgaaagcggtgcgcaattgcagggcagcgtagaactgg

SEQ ID NO: 381486 - DNA, 75 bp, synthetic construct
  source 1..75: mol_type = other DNA
gattacgcaaagggattttatgaccactgaacgcctcactgagcgcattctgcatctggaagaaacgaacagcgc

SEQ ID NO: 381487 - DNA, 75 bp, synthetic construct
  source 1..75: mol_type = other DNA
cctgaactggtcgctgcctttaaactaggcttcgccaaccgtaccctgccttaccgtctgcccgccgttaaatca

SEQ ID NO: 381488 - DNA, 75 bp, synthetic construct
  source 1..75: mol_type = other DNA
cggatcggtgctgaactgggtgatgcagacggaaaaactcagcctgcgtaaggcggcggaacgtctgaaagcgga

SEQ ID NO: 381489 - DNA, 75 bp, synthetic construct
  source 1..75: mol_type = other DNA
aacctgaaatcaccattcagaatggtcgtgccgtcacaacatctgttgctattgcaaatttctttgacaaacgac

SEQ ID NO: 381490 - DNA, 75 bp, synthetic construct
  source 1..75: mol_type = other DNA
aacctgaaatcaccatttccaatggtcgcgctgttactacgtcctttgccgttgccgaatatttttgcaagcgac

SEQ ID NO: 381491 - DNA, 75 bp, synthetic construct
  source 1..75: mol_type = other DNA
gattcgaaaatacgcgccagcgatctgatgcatcttgagcacagtaaactcaccgttcacgtcgttgacatttaa

SEQ ID NO: 381492 - DNA, 75 bp, synthetic construct
  source 1..75: mol_type = other DNA
ggcgatgaagtgaaaaaagtgacctgtaaaaatggtgtagtgaatgaaatctggacgcgcaatcacgccgatatc

SEQ ID NO: 381493 - DNA, 75 bp, synthetic construct
  source 1..75: mol_type = other DNA
tccgtccttacctcaggatcgtgaatctgtttactgggtaaacgtcaaagcgattccttctcaaaatgaagaaaa

SEQ ID NO: 381494 - DNA, 75 bp, synthetic construct
  source 1..75: mol_type = other DNA
agttctactcgggtgatttatgacggtaataagaaagaagcatcgctaactgtacaaaacaaaaataaatcagaa

SEQ ID NO: 381495 - DNA, 75 bp, synthetic construct
  source 1..75: mol_type = other DNA
agttcctatcgttctatctgtgcatatagctgtatatatttacctacatctcctggggttgtggatcatttttta

SEQ ID NO: 381496 - DNA, 75 bp, synthetic construct
  source 1..75: mol_type = other DNA
atcgtcaatattgaagataccttacctaaagatcgtgaatccgtttactggattaatgtaaaggccattcctgcg

SEQ ID NO: 381497 - DNA, 75 bp, synthetic construct
  source 1..75: mol_type = other DNA
gccgttcgcacccgtttgaagttgttctatcgtccaaaaggtttgccgggaagcaacctcgaggccatgaaacag

SEQ ID NO: 381498 - DNA, 75 bp, synthetic construct
  source 1..75: mol_type = other DNA
ctgttcggcaagtacgccggcaccgaggtcaagctcgacggcaccgagtacctggtggtgaaggaagacgacatc

SEQ ID NO: 381499 - DNA, 75 bp, synthetic construct
  source 1..75: mol_type = other DNA
gttggatgaaatgctcaggtctgaaaaaatactatttctatatgatagagtaaaagaaatattaaaaaacaaatg

SEQ ID NO: 381500 - DNA, 75 bp, synthetic construct
  source 1..75: mol_type = other DNA
gttggatgaaatgctcaggtctgaaaaaatactatttctatatgatagagtaaaaagaatattaaaaaacaaatg

SEQ ID NO: 381501 - DNA, 75 bp, synthetic construct
  source 1..75: mol_type = other DNA
tgacatattacttaataatatgttatggagtgtgatcatagaaagtgttatcacaccatgcggctatttctttat

SEQ ID NO: 381502 - DNA, 75 bp, synthetic construct
  source 1..75: mol_type = other DNA
gcggttggttgcgtaaagcggcattaggacgcgcgctggtgagcaatccgcgcgtattgctgctcgacgaaccga

SEQ ID NO: 381503 - DNA, 75 bp, synthetic construct
  source 1..75: mol_type = other DNA
atgggattggttgaaatgaaatctgacccggttgtgttctggtttgaaaaatatcaagaaggggctacggcatga

SEQ ID NO: 381504 - DNA, 75 bp, synthetic construct
  source 1..75: mol_type = other DNA
aaggcaagaacggcaccattgatatccctaacgataatggaactacagatcgcgcagttatttacaagggtaaac

SEQ ID NO: 381505 - DNA, 75 bp, synthetic construct
  source 1..75: mol_type = other DNA
gtaatgctggtcatcatcgcggtggtggcggcatctgcgaccttgcaagcctctggcggccttgacgtcatgctg

SEQ ID NO: 381506 - DNA, 75 bp, synthetic construct
  source 1..75: mol_type = other DNA
tgccagaaagggtggtatcgcgctgggtttattaggcggtatcggtctggtcattctggtcttcgtcttccacct

SEQ ID NO: 381507 - DNA, 75 bp, synthetic construct
  source 1..75: mol_type = other DNA
aaaaaatgcgccgggagaaacgaaaaattatcccgctgtgtccgtttgcgaaacacgaatttgataaaacgcgtg

SEQ ID NO: 381508 - DNA, 75 bp, synthetic construct
  source 1..75: mol_type = other DNA
gagcactcatcagtcaattgcatttccctcatagtcttggagaggctatttcgtttttaaaatatccagtatgtg

SEQ ID NO: 381509 - DNA, 75 bp, synthetic construct
  source 1..75: mol_type = other DNA
gcaactggctggcaatgtggatcttcctcggggcaatcgccgtggtcgcgcttctcggtgctgattcagacctgc

SEQ ID NO: 381510 - DNA, 75 bp, synthetic construct
  source 1..75: mol_type = other DNA
gctatcaccatcccatctaccttgttaggaatcctggcgatcggtatcttcagttggttccgcggtaaagatctg

SEQ ID NO: 381511 - DNA, 75 bp, synthetic construct
  source 1..75: mol_type = other DNA
aaatgcaaaaccgtgtcgcggctgctgagaagttctcatttgaaatgcacggtcaagcaggtagcgctctcatga

SEQ ID NO: 381512 - DNA, 75 bp, synthetic construct
  source 1..75: mol_type = other DNA
tcctggccgcccttgctgtggccaccaacttctatggcggcgttatcgagctgaccggcagtgatgcctttaaac

SEQ ID NO: 381513 - DNA, 75 bp, synthetic construct
  source 1..75: mol_type = other DNA
tcgtcccgccggctggtaccgcgactaccggagcgccgatgacagtcccacaaactgggtattttccggcggaga

SEQ ID NO: 381514 - DNA, 75 bp, synthetic construct
  source 1..75: mol_type = other DNA
cgttctgttgcatgggtggagcatgaagttaatgaatggatagagaagaatattctcaatagaaaattaaactcc

SEQ ID NO: 381515 - DNA, 75 bp, synthetic construct
  source 1..75: mol_type = other DNA
atgaaaaaagcatttgctgcactgttcgttttgttgtctctggtagcttcaactcaggcctttgctggtcgttgt

SEQ ID NO: 381516 - DNA, 75 bp, synthetic construct
  source 1..75: mol_type = other DNA
cagcacgacagcgatactgccgctgacggctcccgctgcggtgggcgctctgcggattcccgcccaggaggaggt

SEQ ID NO: 381517 - DNA, 75 bp, synthetic construct
  source 1..75: mol_type = other DNA
ttgttctgttttctctgggttctgctacacaagcttttgctggaaactgccagcatgacagcgatacggcttcgg

SEQ ID NO: 381518 - DNA, 75 bp, synthetic construct
  source 1..75: mol_type = other DNA
tattcgtcgtcgatgcgtgacaagggggtgcgctgtaagcaaatgccgctgccactcgataaatgggatcttatc

SEQ ID NO: 381519 - DNA, 75 bp, synthetic construct
  source 1..75: mol_type = other DNA
gagcgaaggattacatgaacatatttatagatgatcgaaaggcggttagccctttctttattcgagaattggact

SEQ ID NO: 381520 - DNA, 75 bp, synthetic construct
  source 1..75: mol_type = other DNA
atgaaaaagaccgtaacaacggcagtgctgttttgtgcgttcgccgccggaactgctcatgctgagaaaaaggcc

SEQ ID NO: 381521 - DNA, 75 bp, synthetic construct
  source 1..75: mol_type = other DNA
agcagcgccggcagaacagacaccgtctccgtcagcgagtgagccagccctccctgaagatactgccggcgatga

SEQ ID NO: 381522 - DNA, 75 bp, synthetic construct
  source 1..75: mol_type = other DNA
tgtattgtgcattagttgttataacttttttatattttaatcttggaacatttaaaatagatttttcacagttaa

SEQ ID NO: 381523 - DNA, 75 bp, synthetic construct
  source 1..75: mol_type = other DNA
gctcaccagttgatgaacttaagaaagggctggatgcactccgggatgatcctgtacacaaattgcgttttcaac

SEQ ID NO: 381524 - DNA, 75 bp, synthetic construct
  source 1..75: mol_type = other DNA
ggtgctgcacggtatcgaccttgaggtgaagcctggcgaagtagtggcaattatcggtccaagtggttccggcaa

SEQ ID NO: 381525 - DNA, 75 bp, synthetic construct
  source 1..75: mol_type = other DNA
tgtcagaggtcgcagcgaaagatgagtttttgaatatcaagaacgtgagtcgggatgacatgatggcagcacatc

SEQ ID NO: 381526 - DNA, 75 bp, synthetic construct
  source 1..75: mol_type = other DNA
cgctggtatgagccgcctgtgagtttcgacggcctggcgcgaaccttccgcgccgccgtacaccacagctcaccg

SEQ ID NO: 381527 - DNA, 75 bp, synthetic construct
  source 1..75: mol_type = other DNA
tctacaacaaagaattaaagaactaaacgaatggataggcgaccatgtcatgcaatttatgaaatatacatttga

SEQ ID NO: 381528 - DNA, 75 bp, synthetic construct
  source 1..75: mol_type = other DNA
aattccccagaacatcggcggctttggggatgtaagcaaagcaagtaaggtatttgttcgtaacgaactgacgcc

SEQ ID NO: 381529 - DNA, 75 bp, synthetic construct
  source 1..75: mol_type = other DNA
gtttctgaatatcaaaaatgtcagccgcgatgacatgatggcagcacatcgcgttccgccacagatgatggggct

SEQ ID NO: 381530 - DNA, 75 bp, synthetic construct
  source 1..75: mol_type = other DNA
tctttgttcgcaacgagctgatgccgctgcagaagcgcctagaagagctaaatgactggctgggagaggaagtga

SEQ ID NO: 381531 - DNA, 75 bp, synthetic construct
  source 1..75: mol_type = other DNA
gtttcttaacatcaagaacgtgagccgggatgacatgatggcagcgcaccgtgtaccgccgcagatgatggggat

SEQ ID NO: 381532 - DNA, 75 bp, synthetic construct
  source 1..75: mol_type = other DNA
ggggatgtggaaaaagccgctcgcgtttttgtacgtaacgaactgcagccattgcagaaacgtatgtgcgaactg

SEQ ID NO: 381533 - DNA, 75 bp, synthetic construct
  source 1..75: mol_type = other DNA
ttgacggactggcgcgcaccttccgcgctgccgtgcatcacagttcaccaattgcggtgaaatgcaacattctga

SEQ ID NO: 381534 - DNA, 75 bp, synthetic construct
  source 1..75: mol_type = other DNA
ctccgcaacgcgatgaaaagcgccaaaggaccgggtaacttccgcaacctgtttatgtactcacctaacggcaaa

SEQ ID NO: 381535 - DNA, 75 bp, synthetic construct
  source 1..75: mol_type = other DNA
gcttcaaagaattatacaaggatttaacggatttattggtgacgacatcataaacttcgaaaaatataaattata

SEQ ID NO: 381536 - DNA, 75 bp, synthetic construct
  source 1..75: mol_type = other DNA
tatgcctaataatgttggagggtttggggatgtagagaaagctagtaaggtttttgttataaatgaactgatacc

SEQ ID NO: 381537 - DNA, 75 bp, synthetic construct
  source 1..75: mol_type = other DNA
ctgcgtcgacgaaccagatccagcataaaagccaaacttcagccgaagcattcagcttcggtgatcccgttcctg

SEQ ID NO: 381538 - DNA, 75 bp, synthetic construct
  source 1..75: mol_type = other DNA
gcgttccgccacagatgatggggattatgccaaataatgttgggggttttggggatgtggagaaggctagtcttg

SEQ ID NO: 381539 - DNA, 75 bp, synthetic construct
  source 1..75: mol_type = other DNA
taaaaaccagactacagccgaagcattcagcttcggcgatcccgttcctgttctggaccgccgagaactgctgga

SEQ ID NO: 381540 - DNA, 75 bp, synthetic construct
  source 1..75: mol_type = other DNA
gtttctgaatatcaaaaatgttagtcgcgatgacatgatggcggcacaccgcgtgccgccgcaaatgatggggat

SEQ ID NO: 381541 - DNA, 75 bp, synthetic construct
  source 1..75: mol_type = other DNA
tgaatttctgaacatcaagaacgtcagccgcgatgacatgatggcggctcatcgcgtaccaccacaaatgatggg

SEQ ID NO: 381542 - DNA, 75 bp, synthetic construct
  source 1..75: mol_type = other DNA
cctgcactggcaaaatacacccgacgcgggcttgaccttgaaacatactggtttgtgcaatacagcctgacgaca

SEQ ID NO: 381543 - DNA, 75 bp, synthetic construct
  source 1..75: mol_type = other DNA
cgccgccgtgcaccacagctcaccgattgcagtgaaatgcaacattctgaccagcacctacatccctcacccgct

SEQ ID NO: 381544 - DNA, 75 bp, synthetic construct
  source 1..75: mol_type = other DNA
aaacacttcttgtcccatttaaagctgaaggtccggagggtaagagaatgtattatggcatgtaccattgtgaag

SEQ ID NO: 381545 - DNA, 75 bp, synthetic construct
  source 1..75: mol_type = other DNA
aaggacggacttcagattatcccgttgtcggaagtcgcagcgaaggatgagtttctgaatatcaagaacgtgagc

SEQ ID NO: 381546 - DNA, 75 bp, synthetic construct
  source 1..75: mol_type = other DNA
taaaagccaaacttcagccgaagcattcagcttcggtgatcccgttcctgttctggaccgccgcgaactgctgga

SEQ ID NO: 381547 - DNA, 75 bp, synthetic construct
  source 1..75: mol_type = other DNA
tatttgtacgtaatgaattaatttatctacaagggcgattaaaagaagttaattcttgggtgggcgaaaaaatta

SEQ ID NO: 381548 - DNA, 75 bp, synthetic construct
  source 1..75: mol_type = other DNA
atttcttaacatcaagaacgtgagtcgggatgacatgatggcagcgcaccgcgtgccgccacaaatgatggggat

SEQ ID NO: 381549 - DNA, 75 bp, synthetic construct
  source 1..75: mol_type = other DNA
atttctgaatatcaaaaatgttagtcgcgatgacatgatggcagcacaccgcgtgccgccacagatgatggggat

SEQ ID NO: 381550 - DNA, 75 bp, synthetic construct
  source 1..75: mol_type = other DNA
aaaacgtcagcatttcttgccaatctccggggagcatgggaggacagagcgaatgcgcaacttgggctttcagcc

SEQ ID NO: 381551 - DNA, 75 bp, synthetic construct
  source 1..75: mol_type = other DNA
gaccgggcaattttcgcaatctctttatgtactcacccaatggcaaaaaagatggcatccagatcatccccctat

SEQ ID NO: 381552 - DNA, 75 bp, synthetic construct
  source 1..75: mol_type = other DNA
aacgctgttccgtcggaaatattacatcaacggcagccatgtaggcttcatcatgtacatgaccgacgctgcgca

SEQ ID NO: 381553 - DNA, 75 bp, synthetic construct
  source 1..75: mol_type = other DNA
tttatgtgcctaaaggcgtgcgctgcccgatggaactttccacctattttcgcattaacgcagaaaaaaccgggc

SEQ ID NO: 381554 - DNA, 75 bp, synthetic construct
  source 1..75: mol_type = other DNA
tttggtgatgtggaaaaggccagccgcgtctttgtccgcaacgagctgatgccgctgcagaagcgactgcaggag

SEQ ID NO: 381555 - DNA, 75 bp, synthetic construct
  source 1..75: mol_type = other DNA
tattacatcaacggcagccacgcgggtttcatcatgtacatgaccgacgcagcacagaatcaggaggacgtgaac

SEQ ID NO: 381556 - DNA, 75 bp, synthetic construct
  source 1..75: mol_type = other DNA
tacgggctgcccggctatctctccgccatcccgtcaaccctgctcaacgagtcagcaacgctgtttcgccggaag

SEQ ID NO: 381557 - DNA, 75 bp, synthetic construct
  source 1..75: mol_type = other DNA
cactcataacaaatagtgcagtgcagaaagcagttctttctgttaataatcagtcaagctatatgtatcatggct

SEQ ID NO: 381558 - DNA, 75 bp, synthetic construct
  source 1..75: mol_type = other DNA
cggcgttacttcagtcgttcagaatggtgcttcgtataacacagaacagtcgtataatccccttctgttaagtgc

SEQ ID NO: 381559 - DNA, 75 bp, synthetic construct
  source 1..75: mol_type = other DNA
tggtgccgacagaaagcatgagctggacggtgtggatttgttcacgggtgcattactgacctatacagacagcaa

SEQ ID NO: 381560 - DNA, 75 bp, synthetic construct
  source 1..75: mol_type = other DNA
caaagatgttttctcggaattgccgctggaatttgccgttgaagcacaaaaacttctcgccatcagtcttgaaca

SEQ ID NO: 381561 - DNA, 75 bp, synthetic construct
  source 1..75: mol_type = other DNA
gtgaagtttgatgtcggtgttgacggtactgttaccagaattgagtttttccgttcagaaccgcaccatctgttt

SEQ ID NO: 381562 - DNA, 75 bp, synthetic construct
  source 1..75: mol_type = other DNA
gcagccacgccttcagtggtaaaaccaaatccgtgggggagggttgtacgcttcagcactctttgattccggggc

SEQ ID NO: 381563 - DNA, 75 bp, synthetic construct
  source 1..75: mol_type = other DNA
tccgctgctgagccagcaggcattcagccgcttcgtgcaggactacctagtgtttggtaatgcctatctggagaa

SEQ ID NO: 381564 - DNA, 75 bp, synthetic construct
  source 1..75: mol_type = other DNA
tgtgggcgcggtgcctgcttttgccgcgttaatatggtcaatcattatatttcgccgctggccagtgacactcga

SEQ ID NO: 381565 - DNA, 75 bp, synthetic construct
  source 1..75: mol_type = other DNA
aattactgatctgcctgtttgtggtgtttattgccagccacgtactgtcgtttttgtcgtggagctttaccgttc

SEQ ID NO: 381566 - DNA, 75 bp, synthetic construct
  source 1..75: mol_type = other DNA
atgacaacgaatattgtttcccgcaaagtggcgtggctacgggtagttacgctggcagtcgccgcctttatcttc

SEQ ID NO: 381567 - DNA, 75 bp, synthetic construct
  source 1..75: mol_type = other DNA
ggattccacgctttcagcgtttaataaaaccctggttctttccggtaatcagtccggactgactgccgatcgtat

SEQ ID NO: 381568 - DNA, 75 bp, synthetic construct
  source 1..75: mol_type = other DNA
tgattgatgaagttatggaagatttaaaatactcttatagagagttcaaaaaaatctatcctaaacttggcatta

SEQ ID NO: 381569 - DNA, 75 bp, synthetic construct
  source 1..75: mol_type = other DNA
ggagaatgtcgggtcactaggagatattgagaaagtggcaaaggtctttgtccgcaatgaactcattccattaca

SEQ ID NO: 381570 - DNA, 75 bp, synthetic construct
  source 1..75: mol_type = other DNA
tgtttgtggtgtttatcgccagccacatactgtcgtttttatcgtggagctttaccgttctggtaatcagtcgca

SEQ ID NO: 381571 - DNA, 75 bp, synthetic construct
  source 1..75: mol_type = other DNA
ttattggcagcgtgattttcggtaaactgggtaatcagtatgcgtctgcgttggtgagtacggcgattgcgctgt

SEQ ID NO: 381572 - DNA, 75 bp, synthetic construct
  source 1..75: mol_type = other DNA
ccgccagtaagttttgacgggctggcgcgcacctaccgtgcggccgtgcatcacagctcacccattgccgttaaa

SEQ ID NO: 381573 - DNA, 75 bp, synthetic construct
  source 1..75: mol_type = other DNA
tgggatgcaggttaaagtactggcgctggcaccagatgccaccgacgttgcgatggcgctcttttccgggatatt

SEQ ID NO: 381574 - DNA, 75 bp, synthetic construct
  source 1..75: mol_type = other DNA
ttgtggggcagtatttcggttggcgaatgaccttcttcgcgattggtattggggcgcttatcacccttttgtgcc

SEQ ID NO: 381575 - DNA, 75 bp, synthetic construct
  source 1..75: mol_type = other DNA
agcgagcgcaggcattgagtttaattgccaccggcacagcactggcgatggtattaggtttacctatcgggcgca

SEQ ID NO: 381576 - DNA, 75 bp, synthetic construct
  source 1..75: mol_type = other DNA
ttcgcgctaccactgccgatgaacgcggcaacctgacttatgaacatgaaggggcttatctggggccactggaac

SEQ ID NO: 381577 - DNA, 75 bp, synthetic construct
  source 1..75: mol_type = other DNA
taacggaaaaaagaaaatatgatacgttccgtattggcaaggtcattaaaagaaagaaatttcaactatattgcg

SEQ ID NO: 381578 - DNA, 75 bp, synthetic construct
  source 1..75: mol_type = other DNA
gtatggagagatttttaatcctctttgaacgtttcgtaaaaaaactcgaagagtctggggtatcagaatcagata

SEQ ID NO: 381579 - DNA, 75 bp, synthetic construct
  source 1..75: mol_type = other DNA
cgtgcctgcccgtcctgcggaaagaaggccacagacctgtggacagcgacacagctgaatcgtcttcctgactgc

SEQ ID NO: 381580 - DNA, 75 bp, synthetic construct
  source 1..75: mol_type = other DNA
gtggaatatgcggcagctgcttctgaaagcgtggtcagaggggctggcgatgccggagtcgttgtcacatatcac

SEQ ID NO: 381581 - DNA, 75 bp, synthetic construct
  source 1..75: mol_type = other DNA
ctgtggaggtctgaataagcatggtcagtggaaaaagctgagcttcctgaaagacgcgatgcgttcgcggtggat

SEQ ID NO: 381582 - DNA, 75 bp, synthetic construct
  source 1..75: mol_type = other DNA
atatactgccggaaattcagggggatatcgaatttaaaaatgtcagatttcggtattcttctgacggtaatgtta

SEQ ID NO: 381583 - DNA, 75 bp, synthetic construct
  source 1..75: mol_type = other DNA
caaaaatgctggcgagtatggcgcgggtttcagaggccgagcttgtttatgctatcaagcatacgggcgagctgc

SEQ ID NO: 381584 - DNA, 75 bp, synthetic construct
  source 1..75: mol_type = other DNA
cgcattgatgctcttggtgtagatgggctgggtgctgcgggtattccggcatgggttgatttacatttctggcag

SEQ ID NO: 381585 - DNA, 75 bp, synthetic construct
  source 1..75: mol_type = other DNA
aatcattcacttcatcatgaagaacaaagctaatacagaaactgtttttataacggaaaaaagaaaatatgatcg

SEQ ID NO: 381586 - DNA, 75 bp, synthetic construct
  source 1..75: mol_type = other DNA
catccgggaagcacacagatgacgcgcactggtcaggtgcatcgtggtggcgaacaccggctgaacacggggcca

SEQ ID NO: 381587 - DNA, 75 bp, synthetic construct
  source 1..75: mol_type = other DNA
atggataaggttttagttcaccgggggttttcaacgttaaatgttatcacaatagcatttattatagtgatactt

SEQ ID NO: 381588 - DNA, 75 bp, synthetic construct
  source 1..75: mol_type = other DNA
tgaaaaagccaccaatagcggcttcccgactggcgcattacaacggaggagcgagcctgagcttccgttacctgg

SEQ ID NO: 381589 - DNA, 75 bp, synthetic construct
  source 1..75: mol_type = other DNA
tttttacaaatcctacgcaacgagggattaatccatattgttgactggaaaggcgaaaaagaagatggtgagctg

SEQ ID NO: 381590 - DNA, 75 bp, synthetic construct
  source 1..75: mol_type = other DNA
gtcgttctgccaatgaacgaatataaaaaaatagatgatttcaacacgccgtggctggaagtacaggatttttta

SEQ ID NO: 381591 - DNA, 75 bp, synthetic construct
  source 1..75: mol_type = other DNA
ttctgaggaattaaggagtcttcttgtcgaaataacccaagaggatgaaatctccgatgtctgtgaagccggaga

SEQ ID NO: 381592 - DNA, 75 bp, synthetic construct
  source 1..75: mol_type = other DNA
aattctatgagccaatcagttggtgataattcaactgctgtccaggctagaggtgatattaaaattgattgtata

SEQ ID NO: 381593 - DNA, 75 bp, synthetic construct
  source 1..75: mol_type = other DNA
aattctatgagtcaatcagttggtgataattcaattggtgtccaggctggcggtgatattaaaattgattgtata

SEQ ID NO: 381594 - DNA, 75 bp, synthetic construct
  source 1..75: mol_type = other DNA
atcgacataactcaggaagatgaaattgcagatgcctgcgaagatggtgatcgttaccttgacgagatctttgga

SEQ ID NO: 381595 - DNA, 75 bp, synthetic construct
  source 1..75: mol_type = other DNA
tcttccatccacatgacaaaacaccattcatgatctgtattgtaaacaaagtagaagatacagaactcggattga

SEQ ID NO: 381596 - DNA, 75 bp, synthetic construct
  source 1..75: mol_type = other DNA
gcggtggatgtggaatatgcggcagctgcttctgaaagcgtggtcagaggggatggcgatgccggagtcgttgtc

SEQ ID NO: 381597 - DNA, 75 bp, synthetic construct
  source 1..75: mol_type = other DNA
tgccggacacgctgtggccggtgttcgaaagcaaccgctggctgctgaatgacgtgtgccgtctggcggtggaaa

SEQ ID NO: 381598 - DNA, 75 bp, synthetic construct
  source 1..75: mol_type = other DNA
gctgaaccagaggccatcgctgatgcgagagctgaacggatggataaggcgcaggctgcgaagcatactctggaa

SEQ ID NO: 381599 - DNA, 75 bp, synthetic construct
  source 1..75: mol_type = other DNA
ccggagtcgataaaacggttcaaaatgcggataagagcactgaccggacgcaacacagggagaagccttgaacag

SEQ ID NO: 381600 - DNA, 75 bp, synthetic construct
  source 1..75: mol_type = other DNA
gttgtgataaaaacaggttgaaaaatatttatatccgtttggtttcagaactcacgcatatgagtgaagaaacta

SEQ ID NO: 381601 - DNA, 75 bp, synthetic construct
  source 1..75: mol_type = other DNA
tcaattaatattccacctactgcatatattaatcagggtgaattgatttcaatcatcgtaccgcgtgatacttat

SEQ ID NO: 381602 - DNA, 75 bp, synthetic construct
  source 1..75: mol_type = other DNA
cgagtacccattttacattgcaacccaaaaagcaattgttgaacagggagcgacagcagaattaatcagttttat

SEQ ID NO: 381603 - DNA, 75 bp, synthetic construct
  source 1..75: mol_type = other DNA
ctgacgctgcttcatcaacgcttggtaaacccatcgaccagttgttttggtgtgctggcagttggggccatctct

SEQ ID NO: 381604 - DNA, 75 bp, synthetic construct
  source 1..75: mol_type = other DNA
cggaagcattctccggtaagaaaatcaccgccacgatgttcaagggcagcgaatcgccattcgatgaagatgcac

SEQ ID NO: 381605 - DNA, 75 bp, synthetic construct
  source 1..75: mol_type = other DNA
gaatactggcggctgcatcatcttctgctacgcttgcttatgacggtacaattaattttaatgggaaagtcgttg

SEQ ID NO: 381606 - DNA, 75 bp, synthetic construct
  source 1..75: mol_type = other DNA
ccaactgtctctgctaattcattagattcaagcggaaaagtagtgggccttactcctttcacaatttcgctggaa

SEQ ID NO: 381607 - DNA, 75 bp, synthetic construct
  source 1..75: mol_type = other DNA
atttagaagggaaatttagccagattaatcagcactggcagcaaaagaagcgccatttttaccaacaaaaagaga

SEQ ID NO: 381608 - DNA, 75 bp, synthetic construct
  source 1..75: mol_type = other DNA
aaagacgggcttcagatcatcccgttgtcagaagtcgcggcgaaagatgaatttctgaacatcaagaacgtcagc

SEQ ID NO: 381609 - DNA, 75 bp, synthetic construct
  source 1..75: mol_type = other DNA
tgtttgttcgtaatgaacttcttcctctacaaaagaaaataattgaaattaacaattggatagataatgaggtca

SEQ ID NO: 381610 - DNA, 75 bp, synthetic construct
  source 1..75: mol_type = other DNA
aaggtccgggtaacttccgcaatctgtttatgtactcacctaatggtaaaaaagacggacttcagattatcccat

SEQ ID NO: 381611 - DNA, 75 bp, synthetic construct
  source 1..75: mol_type = other DNA
tcgaaggcattgatatctgctgggtggaggaagcggaagcggtaacgaaggaatcatgggatatcctgataccaa

SEQ ID NO: 381612 - DNA, 75 bp, synthetic construct
  source 1..75: mol_type = other DNA
gtgaacaacaaagaactgattaaagaaattaaagagcgcattggcagtcttgatgttcgggacaatattgagcgc

SEQ ID NO: 381613 - DNA, 75 bp, synthetic construct
  source 1..75: mol_type = other DNA
accagcaaagggccggtcgagcgcaaagttgtccgtatcgttacgccgggcaccatcagcgatgaagcgctgttg

SEQ ID NO: 381614 - DNA, 75 bp, synthetic construct
  source 1..75: mol_type = other DNA
ttttgagcctaatgcgaacacggattacaccactggtaatttaactaatacgacttcttctggtgcatctaatgt

SEQ ID NO: 381615 - DNA, 75 bp, synthetic construct
  source 1..75: mol_type = other DNA
tacgttggttacgccaccagtactccggataccgtcactgccggtgtggttaacagctacgcgacttacgaaatt

SEQ ID NO: 381616 - DNA, 75 bp, synthetic construct
  source 1..75: mol_type = other DNA
agcggatggcgcacgtttcacttactacgttggttacgccaccagtactccggataccgtcactgccggtgtggt

SEQ ID NO: 381617 - DNA, 75 bp, synthetic construct
  source 1..75: mol_type = other DNA
taagcagggggaggttattggtattgtcggacgttctggttcaggaaaaagcacattaactaaattaattcaacg

SEQ ID NO: 381618 - DNA, 75 bp, synthetic construct
  source 1..75: mol_type = other DNA
tgcatatgctggaggcgcgtaagcacaaagatgatccggcgcaaagtcagcagcgtctggaggcactggcggcgc

SEQ ID NO: 381619 - DNA, 75 bp, synthetic construct
  source 1..75: mol_type = other DNA
gtgcgcgccaatcgggagttgcccgtggtctggggcgtggcgaagggatcgcttatcaacaaagtgattctggtg

SEQ ID NO: 381620 - DNA, 75 bp, synthetic construct
  source 1..75: mol_type = other DNA
atggaaagaaaacagaaaaactcattatttaattatatttattcattaatggatgcaagaggtaaatttttattc

SEQ ID NO: 381621 - DNA, 75 bp, synthetic construct
  source 1..75: mol_type = other DNA
gcacattaactaaattaattcaacgtttttatattcctgaaaatggccaggtcttaattgatggacatgatcttg

SEQ ID NO: 381622 - DNA, 75 bp, synthetic construct
  source 1..75: mol_type = other DNA
acgaatcagaaaacatcatcatgcggaatatgcacaacatctgtaaaaacagaaccgtgattattattgcccatc

SEQ ID NO: 381623 - DNA, 75 bp, synthetic construct
  source 1..75: mol_type = other DNA
cttaaaagccgactggatattaagccgatcactcgcctcccctacctcactctccctctgctcgtttggcgtgat

SEQ ID NO: 381624 - DNA, 75 bp, synthetic construct
  source 1..75: mol_type = other DNA
tggaatcagtcacggcgattaacactataaaagctatggcagtctcacctcagatgacgaacatatgggacaaac

SEQ ID NO: 381625 - DNA, 75 bp, synthetic construct
  source 1..75: mol_type = other DNA
atggttgcttgctgcgaaatctttagaactaaaggtaaaacaggtaaaaaaacaattgatcgattaaactttatt

SEQ ID NO: 381626 - DNA, 75 bp, synthetic construct
  source 1..75: mol_type = other DNA
atttatgcagcgaaattagcaggcgctcatgattttatttctgatttgcgtgaggggtataacaccattgtcggg

SEQ ID NO: 381627 - DNA, 75 bp, synthetic construct
  source 1..75: mol_type = other DNA
atgaacctgcggggattgttcatcgcggggagtttgtcttcacgaaggaggcgaccagccggattggtgtcggca

SEQ ID NO: 381628 - DNA, 75 bp, synthetic construct
  source 1..75: mol_type = other DNA
accgggaaggcattcaaatcgatgtgggatgccattctggatatcggtcgtcctgagtcctcagcggatatgctc

SEQ ID NO: 381629 - DNA, 75 bp, synthetic construct
  source 1..75: mol_type = other DNA
atgcgcggctatgccaccggtggttatgtcggtggcaccggaagtccggcgcaaatgcggcgttcagagggtatc

SEQ ID NO: 381630 - DNA, 75 bp, synthetic construct
  source 1..75: mol_type = other DNA
cacgaacggtcagatagggccacaggcactgaaggctgtttatgacgtagcccgtaaggcggcaatggatgttgt

SEQ ID NO: 381631 - DNA, 75 bp, synthetic construct
  source 1..75: mol_type = other DNA
tcctctttccgtgccaacctgcagggcgcatgggatgaccgggaaaatgcccgtctggggctggcagcggccacg

SEQ ID NO: 381632 - DNA, 75 bp, synthetic construct
  source 1..75: mol_type = other DNA
aaaaccgccagtgctgttgaacagggcctgagccgccaggcgctggctgcacaaaaagccgggatttccgtcggg

SEQ ID NO: 381633 - DNA, 75 bp, synthetic construct
  source 1..75: mol_type = other DNA
tgtcttcacgaaggaggcaaccagccggattggcgtcggcaacctgtatcgtctgatgcgcgggtatgcggaagg

SEQ ID NO: 381634 - DNA, 75 bp, synthetic construct
  source 1..75: mol_type = other DNA
gaaaaagccgaagtcgtcaggcgttaaagtgtcagccggtgagcgtcaggaagaccagccgcatgccgcactgct

SEQ ID NO: 381635 - DNA, 75 bp, synthetic construct
  source 1..75: mol_type = other DNA
gaaaaagccgaagtcgtcaggcgttaaagtgtcagccggtgagcgtcaggaagaccagacgcatgccgccctgct

SEQ ID NO: 381636 - DNA, 75 bp, synthetic construct
  source 1..75: mol_type = other DNA
gggccttacaggcggcgaacgatatcgccacgaaaggctttgatgagcagacccgtcgcctgaaagaaaacatgg

SEQ ID NO: 381637 - DNA, 75 bp, synthetic construct
  source 1..75: mol_type = other DNA
gccttcgggaagctgaccactgacccgacgtcggggctgacagcgatggcacgccagttccataacgtgacggcg

SEQ ID NO: 381638 - DNA, 75 bp, synthetic construct
  source 1..75: mol_type = other DNA
gaaaaagccgaagtcgtcaggcgtgaaagtgtcagccggtgagcgtcaggaagaccagccgcatgccgctctgct

SEQ ID NO: 381639 - DNA, 75 bp, synthetic construct
  source 1..75: mol_type = other DNA
gaaaaagccgaagtcgtcaggcgtcaaagtgtcagccggtgagcgtcaggaagaccagtcgcatgccgcgctgct

SEQ ID NO: 381640 - DNA, 75 bp, synthetic construct
  source 1..75: mol_type = other DNA
caacacgctgatggcggcggcgaaaaaggattatgaatcgacgctgaaaaagccgaagtcgtcaggagtcaaagt

SEQ ID NO: 381641 - DNA, 75 bp, synthetic construct
  source 1..75: mol_type = other DNA
ggcggatgaagacatgctgcgcggtgactggctggccgggctgaagtccggctggggcgagtgggcggaaagtgc

SEQ ID NO: 381642 - DNA, 75 bp, synthetic construct
  source 1..75: mol_type = other DNA
ttctaccgaggtttgaacgtcagcgaagcttctgtactggtgactcgcgcttctgatcacaatccgctactcgtt

SEQ ID NO: 381643 - DNA, 75 bp, synthetic construct
  source 1..75: mol_type = other DNA
tctatagtaagcagttacttcctattggtgatcagatagctcaccacagcggcccggtcattatggcgggagatt

SEQ ID NO: 381644 - DNA, 75 bp, synthetic construct
  source 1..75: mol_type = other DNA
tctgtgctctccatgctgacagagatttttctgaagcaggcgatggtggggatagtcgggagtatcggcagcgcc

SEQ ID NO: 381645 - DNA, 75 bp, synthetic construct
  source 1..75: mol_type = other DNA
ttgaagagcagcagagctcgaagcaggcgccatcagtgcaaaagcccgggtctcactgaccgtcaggcgcagcgg

SEQ ID NO: 381646 - DNA, 75 bp, synthetic construct
  source 1..75: mol_type = other DNA
gccacgcagacctttgacggtattgcacagaatatggcagcgatgctgaccggcagcgaacagagctggcgtggt

SEQ ID NO: 381647 - DNA, 75 bp, synthetic construct
  source 1..75: mol_type = other DNA
taccgtctgatgcgcggctatgcggaagggggttatgtgggtggtgccggaagtccggcgcagattcggcgggcg

SEQ ID NO: 381648 - DNA, 75 bp, synthetic construct
  source 1..75: mol_type = other DNA
ggcgagtgggcggaaagtgtgacggacagtttttcgcaggtcaggagtgtagccacgcagacctttgacggtatt

SEQ ID NO: 381649 - DNA, 75 bp, synthetic construct
  source 1..75: mol_type = other DNA
cgacccgccatccttctgcggaatctcgccgctatctttataaagtgaacacggcgcaaaaatcttaccgtcgcc

SEQ ID NO: 381650 - DNA, 75 bp, synthetic construct
  source 1..75: mol_type = other DNA
acggtcaggtggtggacaacaccgggcagccgattcgctgggaaggtcgcgcgagcaacttcgcggattatctgc

SEQ ID NO: 381651 - DNA, 75 bp, synthetic construct
  source 1..75: mol_type = other DNA
tgagccgtcaggcgctggctgcacaaaaagccgggatttccgtcgggcagtataaagcggccatgcgtacgctac

SEQ ID NO: 381652 - DNA, 75 bp, synthetic construct
  source 1..75: mol_type = other DNA
ccttccagtattggggaggttcaaaactttctggctcagtattcgcagggtaaatccttcacattatcgctcgga

SEQ ID NO: 381653 - DNA, 75 bp, synthetic construct
  source 1..75: mol_type = other DNA
ggtgatgtcgatgggggtgatgctgtttcagctttacatggtggtgctggtgctgtggctggcgaaaatctttga

SEQ ID NO: 381654 - DNA, 75 bp, synthetic construct
  source 1..75: mol_type = other DNA
aagcggctgaatgagctggcacagcaggcggcgcggtttgaacagcagcaaagcgcgaagcaggcggcaatcagc

SEQ ID NO: 381655 - DNA, 75 bp, synthetic construct
  source 1..75: mol_type = other DNA
ccttataattcacacgtgaacctccaacccggcgatatccttatttcacgctcagggacaattggtaaaaatgcc

SEQ ID NO: 381656 - DNA, 75 bp, synthetic construct
  source 1..75: mol_type = other DNA
gtcgaagtattcagaggtatggccagaagtattgctacagcccttaataaaaacagtatcgatctgcctttacct

SEQ ID NO: 381657 - DNA, 75 bp, synthetic construct
  source 1..75: mol_type = other DNA
tgtcttcacgaaggaagcaaccagccggattggcgtcggcaacctgtaccgcctgatgcggggctatgcggaagg

SEQ ID NO: 381658 - DNA, 75 bp, synthetic construct
  source 1..75: mol_type = other DNA
ggcggcgtgtggagccagcctgatcggtgtgttgatgctgcgctttttcattctctacgctgggcagttgacggt

SEQ ID NO: 381659 - DNA, 75 bp, synthetic construct
  source 1..75: mol_type = other DNA
ttgaatcgctggtgtgggactggccgattgccatctacctgtttttgattggtatttctgccggtctggtgacgc

SEQ ID NO: 381660 - DNA, 75 bp, synthetic construct
  source 1..75: mol_type = other DNA
tgtatgacatggcccgtaagggggcgcaggatgaactccggctgcagttgcgtgatggcggtatgttatcaggga

SEQ ID NO: 381661 - DNA, 75 bp, synthetic construct
  source 1..75: mol_type = other DNA
cgtggggaatctctaccggctgatgcgcggctatgccaccggtggttatgtcggtacaccgggcagtctggctga

SEQ ID NO: 381662 - DNA, 75 bp, synthetic construct
  source 1..75: mol_type = other DNA
ccagagccggagccagcgccggggaaagacctcctcttttcgtgcgaaccttcagggggcatgggatgaccggga

SEQ ID NO: 381663 - DNA, 75 bp, synthetic construct
  source 1..75: mol_type = other DNA
gctgacgctctccagagccggacaggccgcagggctgacgttaaccaggcgagtgagtcactggcagccctggtg

SEQ ID NO: 381664 - DNA, 75 bp, synthetic construct
  source 1..75: mol_type = other DNA
ctttcggtggtggtgcatctgcttcctcggggacggccattcaggctgcggcggcgaacttccatttcgcgaccg

SEQ ID NO: 381665 - DNA, 75 bp, synthetic construct
  source 1..75: mol_type = other DNA
aacaacgacggcacgaacggtcagatagggccacaggcgctgaaggcggtttatgacgtagcccgtaaggcggca

SEQ ID NO: 381666 - DNA, 75 bp, synthetic construct
  source 1..75: mol_type = other DNA
cgctggcgtacgcctggtaccagggggattccacgctttcagcgtttataaaaccctggttctttccggtaatca

SEQ ID NO: 381667 - DNA, 75 bp, synthetic construct
  source 1..75: mol_type = other DNA
gctttcggtggtggtgcgtctgcctccacggggacggccattcaggctgcggcggcgaacttccatttcgcgacc

SEQ ID NO: 381668 - DNA, 75 bp, synthetic construct
  source 1..75: mol_type = other DNA
ggggaggcttgagctgcgggtagtaggggagtgttcgcgaaggcgaagcggaggttggaatttacagatcgctgg

SEQ ID NO: 381669 - DNA, 75 bp, synthetic construct
  source 1..75: mol_type = other DNA
ccggtggtcagaatccctggctcatcctgctgcaacagggcggtcaggtgaaggactccttcggcgggatgatcc

SEQ ID NO: 381670 - DNA, 75 bp, synthetic construct
  source 1..75: mol_type = other DNA
cgaacgtttttaatgatgttaatcgtcatctgtgtgacgattctgtgttttgtctggatggtgagggattcgctt

SEQ ID NO: 381671 - DNA, 75 bp, synthetic construct
  source 1..75: mol_type = other DNA
acatggcccgcaagggggcgcaggatgagctccggctgcagttgcgtgatggcggtatgttatcagggagcgggc

SEQ ID NO: 381672 - DNA, 75 bp, synthetic construct
  source 1..75: mol_type = other DNA
gcggtgtatgagatggcccgtaaaggtgcgcaggatgagattcaggcgcagatgcgtgatggcggcgtattttcc

SEQ ID NO: 381673 - DNA, 75 bp, synthetic construct
  source 1..75: mol_type = other DNA
ctggccatcgctttgtttctcagtggtatgctctttgccgcctcttcattacctcttacgactctggtatcatcg

SEQ ID NO: 381674 - DNA, 75 bp, synthetic construct
  source 1..75: mol_type = other DNA
ggaagtcgcaatatccgacatactcctggaatgaaaacagatcgtcttaaagataaaggaagtgacgacaaggac

SEQ ID NO: 381675 - DNA, 75 bp, synthetic construct
  source 1..75: mol_type = other DNA
cggttcgctggtcggcacgcgccaggatctaaccgaagccttccagtttgccgccgaaggcaaagtggtgccgaa

SEQ ID NO: 381676 - DNA, 75 bp, synthetic construct
  source 1..75: mol_type = other DNA
gacgctggaaacctgggcggataaaacaggaaaggcgttcaaatcgatgtgggatgccattctggatatcggtcg

SEQ ID NO: 381677 - DNA, 75 bp, synthetic construct
  source 1..75: mol_type = other DNA
ttgcagaggctttcggaaaactgaccactgacccgacgtcggggctgattgcgatggcgaagcagttccataacg

SEQ ID NO: 381678 - DNA, 75 bp, synthetic construct
  source 1..75: mol_type = other DNA
ccgcagctgatgaaagcggtgtatgagatggcccgcaagggggcacaggatgaactccggctgcagttgcgtgat

SEQ ID NO: 381679 - DNA, 75 bp, synthetic construct
  source 1..75: mol_type = other DNA
gcgaaaaactttgattatggcgcggcgaaccatcgccagattggtaacggtccgatgctggtgttaagcgataaa

SEQ ID NO: 381680 - DNA, 75 bp, synthetic construct
  source 1..75: mol_type = other DNA
aagtgatgcaggcgggaattcgtccaggcgatcgcgtcacctttgataccacttttcaggttctccctcaccagc

SEQ ID NO: 381681 - DNA, 75 bp, synthetic construct
  source 1..75: mol_type = other DNA
aaccgaagtcgtcaggtgcgaaggtgtctgccggtgagcgccaggaagaccgggcacatgctgccctgctggcgc

SEQ ID NO: 381682 - DNA, 75 bp, synthetic construct
  source 1..75: mol_type = other DNA
cagttcaggccagcggtcgttgaaagcgtcgcacgagggacatccgttcgtatgggaacgttggatcccctgggg

SEQ ID NO: 381683 - DNA, 75 bp, synthetic construct
  source 1..75: mol_type = other DNA
tgagccgtcaggccctggctgcacaaaaagccgggatgtccgtcgggcagtataaagcggccatgcgtatgctac

SEQ ID NO: 381684 - DNA, 75 bp, synthetic construct
  source 1..75: mol_type = other DNA
atgattggtcgcattatgttacataaaaaaacgcttcttttcgcagcattatccgccgctctctggggaggtgca

SEQ ID NO: 381685 - DNA, 75 bp, synthetic construct
  source 1..75: mol_type = other DNA
acatgcatctttggctttccccagagatagcgcgagctacagcggttgcaatccatggaaaattagtggaactta

SEQ ID NO: 381686 - DNA, 75 bp, synthetic construct
  source 1..75: mol_type = other DNA
gaagatcaccatcacggcgatttcaacatgcatctttggctttccccagagatagcgcgagctacagcggttgca

SEQ ID NO: 381687 - DNA, 75 bp, synthetic construct
  source 1..75: mol_type = other DNA
gaatcgacaggtccgaaggtgatgatctgcgcccatatggacgaagtgggatttatggtgcgtagcatctcccgc

SEQ ID NO: 381688 - DNA, 75 bp, synthetic construct
  source 1..75: mol_type = other DNA
tccagcgttggcatgacagcaaagccaatcgcgatttgatgaaaattgaatatgtgtaccagagtgcggaacagt

SEQ ID NO: 381689 - DNA, 75 bp, synthetic construct
  source 1..75: mol_type = other DNA
tttacctcaccggaagtggcgcgcaatgttgcgaaaccgctggtcagttatatcgacaaagccctggtcaccgat

SEQ ID NO: 381690 - DNA, 75 bp, synthetic construct
  source 1..75: mol_type = other DNA
ccgtggcagggatggctttgctttcttcaaatactcaggcacaggctgtaccggagggctatcagctacagcaag

SEQ ID NO: 381691 - DNA, 75 bp, synthetic construct
  source 1..75: mol_type = other DNA
cagtggcagggatggttttactctcttcgaatgcccaggcgcagaccgtgccggaaggctatcaactacagcaaa

SEQ ID NO: 381692 - DNA, 75 bp, synthetic construct
  source 1..75: mol_type = other DNA
caatgttcgcttgtagatggcaaaaatacctttagcgcgaagtatcaacaagaaccgggcgtttccgggccgctg

SEQ ID NO: 381693 - DNA, 75 bp, synthetic construct
  source 1..75: mol_type = other DNA
gaacagttacgtaatgccgatgcgttaaccctgcaggcacctgcgcagcgcgtgacgctggaattaagcggttgc

SEQ ID NO: 381694 - DNA, 75 bp, synthetic construct
  source 1..75: mol_type = other DNA
cccgatgctggtgttaagcgataaatcgctgattgcgccacccaaactcaccgcgtggattgaaaccgtggcggc

SEQ ID NO: 381695 - DNA, 75 bp, synthetic construct
  source 1..75: mol_type = other DNA
acttttcaggttctcccccaccagcgggtgatggggaaagcctttgatgaccgcctcggttgctatctgctggtg

SEQ ID NO: 381696 - DNA, 75 bp, synthetic construct
  source 1..75: mol_type = other DNA
tcgcctcggttgctatctgctggtgacgttactacgtgagctgcacgacgccgaactgcctgcggaagtgtggct

SEQ ID NO: 381697 - DNA, 75 bp, synthetic construct
  source 1..75: mol_type = other DNA
tgacgctggaattaaccggctgcccgatagatgccaacggtttttgcccgatggataagtttgataacgtgttga

SEQ ID NO: 381698 - DNA, 75 bp, synthetic construct
  source 1..75: mol_type = other DNA
ggccatgcgtaccctgcctgcacagtttacggatatcgccacgcagcttgccggtggtcagaatccctggctgat

SEQ ID NO: 381699 - DNA, 75 bp, synthetic construct
  source 1..75: mol_type = other DNA
caacactgcctgcgggaagtgatgttttatctcaacctgtcggagcaggaaaaagacgcgttttgtgaacgcttc

SEQ ID NO: 381700 - DNA, 75 bp, synthetic construct
  source 1..75: mol_type = other DNA
tgagcggtatatgagctatggcaaggcttatggcttatgcgaatggttcgaggtagagcagtttcagaatccctg

SEQ ID NO: 381701 - DNA, 75 bp, synthetic construct
  source 1..75: mol_type = other DNA
atcaccgacgcgcagataaaaaagatcattgcggtgatcgaccgcgccgcttttgatattacgcaactggattaa

SEQ ID NO: 381702 - DNA, 75 bp, synthetic construct
  source 1..75: mol_type = other DNA
agcgcgtggatcctgcaaaacagccaggcgtgtctgctggtaaccagcgcacaattttatcctatgtatcagcag

SEQ ID NO: 381703 - DNA, 75 bp, synthetic construct
  source 1..75: mol_type = other DNA
ttgatggtgcagccgccttctgtgaacgatcggcaacaccatctgcgggaagtgatgttttatctcaacctgtcg

SEQ ID NO: 381704 - DNA, 75 bp, synthetic construct
  source 1..75: mol_type = other DNA
ccacttcccggccgaaaggggtggtgattacccattacaacctgcgcttcgccggatattactccgcctggcagt

SEQ ID NO: 381705 - DNA, 75 bp, synthetic construct
  source 1..75: mol_type = other DNA
tcaacagccttatcctccgctttactttggcggatcgtcagatgctgcccaggatctggccgctgaacaggtaga

SEQ ID NO: 381706 - DNA, 75 bp, synthetic construct
  source 1..75: mol_type = other DNA
tctgggaacggaagaaggttcacgcccggttgatcacggttatctgcaacaaattgcgcaagcggcggatcgcct

SEQ ID NO: 381707 - DNA, 75 bp, synthetic construct
  source 1..75: mol_type = other DNA
gccgggacggcgctggtgggcgatggtccgacggtcgccgcgcgaatcaacgaatacgctgcacttggcatcgac

SEQ ID NO: 381708 - DNA, 75 bp, synthetic construct
  source 1..75: mol_type = other DNA
gaacccgcaaatgaagcgggcgctggataattttaaagcggtgctggatttacgcgtcaaccagagcgatatcac

SEQ ID NO: 381709 - DNA, 75 bp, synthetic construct
  source 1..75: mol_type = other DNA
atcactgatgcacaaataaaaaagatcattgcggtgatcgaccgcgccgcttttgatattacgcaactggattaa

SEQ ID NO: 381710 - DNA, 75 bp, synthetic construct
  source 1..75: mol_type = other DNA
tcagaacacgagcactgcgggcacggtcatcagcatgagcacgagcatggtcaatgctgcggtggtcgtcacggt

SEQ ID NO: 381711 - DNA, 75 bp, synthetic construct
  source 1..75: mol_type = other DNA
ctggattcatggcgtaatagttcaggccgcgtggtttgtaaaagcgtcactggaagcgttacccgaaccgccgca

SEQ ID NO: 381712 - DNA, 75 bp, synthetic construct
  source 1..75: mol_type = other DNA
ataaattaaccttttcctctgacgccggacgtgtgctacaaaacgcggtattacccgcattccccgtgcgccgtc

SEQ ID NO: 381713 - DNA, 75 bp, synthetic construct
  source 1..75: mol_type = other DNA
gcctggatttgcccctatatttccagacacctgttatcacttaacccatcactggcccactgccgcagatattcc

SEQ ID NO: 381714 - DNA, 75 bp, synthetic construct
  source 1..75: mol_type = other DNA
tcccgctatgggttgctggtgctacattagctgttgttattccaatgctgccatacgtcatgtggtttggtgtct

SEQ ID NO: 381715 - DNA, 75 bp, synthetic construct
  source 1..75: mol_type = other DNA
aatgatgctcctggacccggaatcagacccactcggcgcgggctatcacattattcagtctaaaattgctattgg

SEQ ID NO: 381716 - DNA, 75 bp, synthetic construct
  source 1..75: mol_type = other DNA
gtggatagccgccagagcgcaaaccacctttggtcgcgtcatggctggcggcttaatgctgatattattcgttta

SEQ ID NO: 381717 - DNA, 75 bp, synthetic construct
  source 1..75: mol_type = other DNA
cgcgctggtgctgatatttatgcccacgctgctggtggctgcacagcctgacctgggaacatcaatcctcgttgc

SEQ ID NO: 381718 - DNA, 75 bp, synthetic construct
  source 1..75: mol_type = other DNA
gcttatgccgccgatttatttaccgtcccggagacagacaaatcaaagctgtggtttctggatatcttattcccg

SEQ ID NO: 381719 - DNA, 75 bp, synthetic construct
  source 1..75: mol_type = other DNA
ggcagcaggtggtttctgtgccgctcaggttatggtgctgtggatgattaatcagggagtcggtctggcagatac

SEQ ID NO: 381720 - DNA, 75 bp, synthetic construct
  source 1..75: mol_type = other DNA
atgatgataaatataaagaaaaaagaagtatcgatattattagtaatattagcttgcctgttattaactcagtca

SEQ ID NO: 381721 - DNA, 75 bp, synthetic construct
  source 1..75: mol_type = other DNA
acaagccgccatcggaataggccaaaaatggcagactggtgctggtagcgtaaccagtaaaccatttgctggacc

SEQ ID NO: 381722 - DNA, 75 bp, synthetic construct
  source 1..75: mol_type = other DNA
taattttgagcttaccgcttctggctaatgcggctcccggtagtgatccgctggccgaccaatatttctctaaca

SEQ ID NO: 381723 - DNA, 75 bp, synthetic construct
  source 1..75: mol_type = other DNA
tattgccctgcagcctggtgaaaacgtcaacaacatcaacagtggtgatccgcgttttattgttgaaccctcgat

SEQ ID NO: 381724 - DNA, 75 bp, synthetic construct
  source 1..75: mol_type = other DNA
ctttatggaccgcctggaacggcatgatcgcttatttgttgatgggaacattaatggctggtgaatggctggtgc

SEQ ID NO: 381725 - DNA, 75 bp, synthetic construct
  source 1..75: mol_type = other DNA
atgatccgttcaacttcattaagcggcaaaaacaggattgtcctgatagccggcgttctaatgattgccaccaca

SEQ ID NO: 381726 - DNA, 75 bp, synthetic construct
  source 1..75: mol_type = other DNA
ctatagcgaagcacaggcgggttcactgcatggtttgctgcaactagccacagcagctcccggtttgctgatccc

SEQ ID NO: 381727 - DNA, 75 bp, synthetic construct
  source 1..75: mol_type = other DNA
ccgcgttacttttgatctgtgcaggtatcgcaattcgttctctcccttcgccttacttattatttggcggtacag

SEQ ID NO: 381728 - DNA, 75 bp, synthetic construct
  source 1..75: mol_type = other DNA
aattgggatctgggcaccgctcatattaatggcgctgcgcttaattcagggctttggtcttggtggcgagtatgg

SEQ ID NO: 381729 - DNA, 75 bp, synthetic construct
  source 1..75: mol_type = other DNA
ctggactaccgttacgccttcggcggtgaatgccgtgtggaggtcggtggcaaatatgccggacatatccctgaa

SEQ ID NO: 381730 - DNA, 75 bp, synthetic construct
  source 1..75: mol_type = other DNA
gggcgcgttgctcatgctgatgtgttttcctctgctggctctatttatatggctgccgcaatggcgtaatcaaca

SEQ ID NO: 381731 - DNA, 75 bp, synthetic construct
  source 1..75: mol_type = other DNA
caccgatatcgaccagtcagcggagcgtgtccgtgaccagttgtcagtgatggccagccccaacggtaacctgga

SEQ ID NO: 381732 - DNA, 75 bp, synthetic construct
  source 1..75: mol_type = other DNA
gccagtgggggacgcaggatgatttgacctgcgcacagtggctctggaaaaaaatcatcgccctgtacgagcagg

SEQ ID NO: 381733 - DNA, 75 bp, synthetic construct
  source 1..75: mol_type = other DNA
gagctatctgcaaagcgctacccgctgggagcagaagggacggcctaaacgtgctgactggggagcgaaaaagcg

SEQ ID NO: 381734 - DNA, 75 bp, synthetic construct
  source 1..75: mol_type = other DNA
gcgggatgatgcgaaaatggtggtgctggagctgggtggactggaagaccgtccgtccctgctggttgcggtgat

SEQ ID NO: 381735 - DNA, 75 bp, synthetic construct
  source 1..75: mol_type = other DNA
accggtgcctatatcaccatcacacagaacatcgtcgactttgactctgacaaggcctccagtgctgcccgcgcg

SEQ ID NO: 381736 - DNA, 75 bp, synthetic construct
  source 1..75: mol_type = other DNA
tgaaaccgtggctgaacaggagcctgtgccggatatgaccggtgtggtggataacctggatgaagtgcatgaagg

SEQ ID NO: 381737 - DNA, 75 bp, synthetic construct
  source 1..75: mol_type = other DNA
ggtattcatcaaaaactggcaagcccgttattgttaatcctgatgttaaaggaaccgtaacggtatttaatgctg

SEQ ID NO: 381738 - DNA, 75 bp, synthetic construct
  source 1..75: mol_type = other DNA
gcggcagaaggcaaagcgtggaaagaagagtgcggcgtgcgcaagcagattcaggtccgcgatgcgcgcccgccg

SEQ ID NO: 381739 - DNA, 75 bp, synthetic construct
  source 1..75: mol_type = other DNA
aggagtgcggcgtacgcaagcaaattcaggtaagtgatgctcgcccgccgttggtcgtcatcagccggtctcacg

SEQ ID NO: 381740 - DNA, 75 bp, synthetic construct
  source 1..75: mol_type = other DNA
agattcagggggccagtctagatcctaaggctgttgtgtggctaggggacaacacattcggtataggtagcgagg

SEQ ID NO: 381741 - DNA, 75 bp, synthetic construct
  source 1..75: mol_type = other DNA
tttaccgcgctttatggcgatatgtcgttatggaccgcctggaacggcatgattgcggtaatgactccaacttat

SEQ ID NO: 381742 - DNA, 75 bp, synthetic construct
  source 1..75: mol_type = other DNA
tacagcgcggcagaaggcaaggcctggaaagaagagtgcggtgtgcgcaagcagattcaggtccgcgatgcgcgc

SEQ ID NO: 381743 - DNA, 75 bp, synthetic construct
  source 1..75: mol_type = other DNA
aaccgattttaggtgtggtgtatgcgccggtaatgaacgtaatgtacagcgcggcagaaggcaaagcctggaaag

SEQ ID NO: 381744 - DNA, 75 bp, synthetic construct
  source 1..75: mol_type = other DNA
aataatccgtttcagaccattgaacgtcatgatgttggcgtatctctgaaggtgacgcctgttgttatggggaac

SEQ ID NO: 381745 - DNA, 75 bp, synthetic construct
  source 1..75: mol_type = other DNA
cggaaacaccaatatacgcagaacacctggcgttcgtgaagaaaaactgaaaaatattaatggagatgataagga

SEQ ID NO: 381746 - DNA, 75 bp, synthetic construct
  source 1..75: mol_type = other DNA
tttgattcagtcgctgatgtttgaaaccagtctgtcggatggtgttgatttgtcgtttgcagccggttctgcatc

SEQ ID NO: 381747 - DNA, 75 bp, synthetic construct
  source 1..75: mol_type = other DNA
gtggcggcgctggaagccgccttgcttgacctgttaggtaaggcgctgaatgttccggtctgcgaactgttaggg

SEQ ID NO: 381748 - DNA, 75 bp, synthetic construct
  source 1..75: mol_type = other DNA
aaaaattagcacctggctggagctgatgaaagctgacggaattaacccggaagagttattgggtaatagctctgc

SEQ ID NO: 381749 - DNA, 75 bp, synthetic construct
  source 1..75: mol_type = other DNA
ttcagattaaggatggccagactctcttacttggtgggttgattgattcatcatccagcaatgctgaccgttctg

SEQ ID NO: 381750 - DNA, 75 bp, synthetic construct
  source 1..75: mol_type = other DNA
aatagtggtggtggcgcaagaagcaacggtgttgcgactaaccaacaaggcggtgtaatcactgtttataatgcc

SEQ ID NO: 381751 - DNA, 75 bp, synthetic construct
  source 1..75: mol_type = other DNA
acggcattgatcggcctgcaaaacctgtcagcccgttttaattctgccatggacattcccgctcaggggctgtgc

SEQ ID NO: 381752 - DNA, 75 bp, synthetic construct
  source 1..75: mol_type = other DNA
ggagtacgcagaagccgccagcgtcacgccgcctacggtggacgatgccctgcgcgcccgactaactgcccattt

SEQ ID NO: 381753 - DNA, 75 bp, synthetic construct
  source 1..75: mol_type = other DNA
ttggcgaagatgagcattttcggccgtcgatggcagccagcgggattaactctgccacgttatcagaagagattt

SEQ ID NO: 381754 - DNA, 75 bp, synthetic construct
  source 1..75: mol_type = other DNA
attgccgcattattcctaagaaattacgcgatatgaaacgtgaagagatttgccgcttgctggcggataaagtta

SEQ ID NO: 381755 - DNA, 75 bp, synthetic construct
  source 1..75: mol_type = other DNA
ggacggcactaacggtactgggttaattggtatcaaggggaatggcagtgatacgacaattaataacgcacaaag

SEQ ID NO: 381756 - DNA, 75 bp, synthetic construct
  source 1..75: mol_type = other DNA
aatacctgggctttacaaccggatgcgaatacctgggccacattgggtacggccctttcggtgagttaggtatga

SEQ ID NO: 381757 - DNA, 75 bp, synthetic construct
  source 1..75: mol_type = other DNA
aaatcaggtgtaaaggcgaatatcctgggtttacgattggttgcgaatacttgggccgtatggggtacggccctt

SEQ ID NO: 381758 - DNA, 75 bp, synthetic construct
  source 1..75: mol_type = other DNA
agtaatttttttttatggaggcaatattggtcatgctcaggatatgatgaatttaatgaggttggttagatcagc

SEQ ID NO: 381759 - DNA, 75 bp, synthetic construct
  source 1..75: mol_type = other DNA
ggatgttggtctgcatccggaatttggtgtcctgaacagtatatctcccgaatatctgtcaaaagtcagaaaagc

SEQ ID NO: 381760 - DNA, 75 bp, synthetic construct
  source 1..75: mol_type = other DNA
catactgcttataattttcctggaaaaatattgggttatatggttaattcaataccgattttaggaagtgtgaat

SEQ ID NO: 381761 - DNA, 75 bp, synthetic construct
  source 1..75: mol_type = other DNA
tcggtgaattagggatgaatacgctggacgacgacggcgacagcaggacgcttgatcttgattctgatgatttcg

SEQ ID NO: 381762 - DNA, 75 bp, synthetic construct
  source 1..75: mol_type = other DNA
attgccgtattattcctaagaaattacgcgatatgaaacgtgaagaaatttgccgtctgttgacggataaaatta

SEQ ID NO: 381763 - DNA, 75 bp, synthetic construct
  source 1..75: mol_type = other DNA
acctctctggcctttattctcggcgtgctgccgctggttatcagtcatggtgccggttctggcgcgcaaaacgcg

SEQ ID NO: 381764 - DNA, 75 bp, synthetic construct
  source 1..75: mol_type = other DNA
aacactggttgaggctatcatcctcgtcttcctggtcatgtatctgtttttgcagaatttccgtgccacaatcat

SEQ ID NO: 381765 - DNA, 75 bp, synthetic construct
  source 1..75: mol_type = other DNA
acctggttcaggtccatcgtgtggataatgtaccggtcgggctggcgatgccactttcactgacgacccgtatcg

SEQ ID NO: 381766 - DNA, 75 bp, synthetic construct
  source 1..75: mol_type = other DNA
tgtttgcagcaacggtgctggctatttacttcgtgcctgtctttttcgtcgtcgtggaacatctctttgcccgct

SEQ ID NO: 381767 - DNA, 75 bp, synthetic construct
  source 1..75: mol_type = other DNA
gggggtgtttatgaccaccgcgcagttgccgtcaggttctacgatggttaacaccacgaaagtgctgcaacaggt

SEQ ID NO: 381768 - DNA, 75 bp, synthetic construct
  source 1..75: mol_type = other DNA
gaccttcgagacaggaacatcacccgatatcgcgcaggtccaggtacagaataaactgcagcttgccatgccatc

SEQ ID NO: 381769 - DNA, 75 bp, synthetic construct
  source 1..75: mol_type = other DNA
gggcattctgaaccatggacactgcacgatctaagacgaactttagcaacgcatatgaataatatgggtatagca

SEQ ID NO: 381770 - DNA, 75 bp, synthetic construct
  source 1..75: mol_type = other DNA
gtagtaatatggttattaaccaaggtacgattaacctggagaaaaatgaaaactatagcagtagtctgagtgcaa

SEQ ID NO: 381771 - DNA, 75 bp, synthetic construct
  source 1..75: mol_type = other DNA
cggaccttgcggcggttcgttactggcgctggtaagtcgccagacgcatttcagcctgataagtcgtgtgctgaa

SEQ ID NO: 381772 - DNA, 75 bp, synthetic construct
  source 1..75: mol_type = other DNA
aaattgccgggcttaaatcctctctaacgatgttgatgtctgcaatcaaccttatgtcttctaaagcaggttata

SEQ ID NO: 381773 - DNA, 75 bp, synthetic construct
  source 1..75: mol_type = other DNA
ccggaggtgtcggtgtttctgcggtatgtgccagacctgcgccagcaggtccttttcgataccctctggaacacg

SEQ ID NO: 381774 - DNA, 75 bp, synthetic construct
  source 1..75: mol_type = other DNA
atccctggtggcattggttgctggagagagaaaacccccgcacgttgcaggtatgcacctgacaacaccacgggg

SEQ ID NO: 381775 - DNA, 75 bp, synthetic construct
  source 1..75: mol_type = other DNA
atgattatcattcacttcgtcaaaaatacgatctaaaagataaagtcatttttttctatggcggtaatattgggc

SEQ ID NO: 381776 - DNA, 75 bp, synthetic construct
  source 1..75: mol_type = other DNA
ggcgcaggtgcattacgcgcggcagtagcgtcttatgtgcggtctccgcgctattaccgtgcgttaatggctggc

SEQ ID NO: 381777 - DNA, 75 bp, synthetic construct
  source 1..75: mol_type = other DNA
acaggaattatcccagagaaaaggtttatattttcagtcccgataatgtctccgtccataataatgatattaaag

SEQ ID NO: 381778 - DNA, 75 bp, synthetic construct
  source 1..75: mol_type = other DNA
tccacggcgattgtcatgaccatcttctttggtgccattctgctctccttcggtatcgacaccgtgcaggcgatg

SEQ ID NO: 381779 - DNA, 75 bp, synthetic construct
  source 1..75: mol_type = other DNA
cctcaatggtagacagcggctatgcatgggtataccggtttgacggtaatgccatcgtcccaaactatctgaaat

SEQ ID NO: 381780 - DNA, 75 bp, synthetic construct
  source 1..75: mol_type = other DNA
ctcagcgaaagctgacgctggtaaggaaagagtatccgaagctatttgtccactggtatttactacgtgcatcga

SEQ ID NO: 381781 - DNA, 75 bp, synthetic construct
  source 1..75: mol_type = other DNA
ggcgcaggtacattacgcgcagcagtggcgtcttatgtgcagtctccgcgctattaccgtgcgttaatggcaggt

SEQ ID NO: 381782 - DNA, 75 bp, synthetic construct
  source 1..75: mol_type = other DNA
attatagaataagaatgataaagattaagtttggtgctgagacgacacggaagctcccagttctgtttagatgtt

SEQ ID NO: 381783 - DNA, 75 bp, synthetic construct
  source 1..75: mol_type = other DNA
atagtctgcgataataataattattttttatacagtcttcttttttctggggggcctgttaagtgcatatgtgct

SEQ ID NO: 381784 - DNA, 75 bp, synthetic construct
  source 1..75: mol_type = other DNA
ttcctgatgcatgattatcagcgccagcgcgtgatgatgctgcttgacccggaatcagaccctcttggcgcgggt

SEQ ID NO: 381785 - DNA, 75 bp, synthetic construct
  source 1..75: mol_type = other DNA
attactgcaatggatttgcccctatatttccagacacctgttatcacttaacccattactggcctgctgccgcag

SEQ ID NO: 381786 - DNA, 75 bp, synthetic construct
  source 1..75: mol_type = other DNA
atggaatggttaagtgaaattcgcaaacttcgggagagcatatctgtcggtatccaggctgccaggcgtttgtta

SEQ ID NO: 381787 - DNA, 75 bp, synthetic construct
  source 1..75: mol_type = other DNA
caaaagatatttatttgaaaaatggtatcttatattttgcagaccaagatgaagagtataagtgttttgaattca

SEQ ID NO: 381788 - DNA, 75 bp, synthetic construct
  source 1..75: mol_type = other DNA
tgccgacattaatcgtccttttcccggtggcaactcttgctacccaatcatcatttgaagcgaaagtggtaaaaa

SEQ ID NO: 381789 - DNA, 75 bp, synthetic construct
  source 1..75: mol_type = other DNA
actacgcagcgatgtctttgcaagttgtggagcagtgtcaacgacggatgaaaagtgatccacttatatctccac

SEQ ID NO: 381790 - DNA, 75 bp, synthetic construct
  source 1..75: mol_type = other DNA
ttccacaatgggtaattgatgcaggaatgcttaatgctggttccccaatagaacgctactttcgtctttttgaaa

SEQ ID NO: 381791 - DNA, 75 bp, synthetic construct
  source 1..75: mol_type = other DNA
catggcgttttaaaagcgggccgctcaaggatgtaagtaaaattcagcgagcggtcaatgaaacgcttttgtcct

SEQ ID NO: 381792 - DNA, 75 bp, synthetic construct
  source 1..75: mol_type = other DNA
caaacttaatgcgccttgcgcgtaatatgatgcgttatcatgatgctcatttcctgtttatagggcagggtgatg

SEQ ID NO: 381793 - DNA, 75 bp, synthetic construct
  source 1..75: mol_type = other DNA
cgggttcattcatgttaatggtgaagatgataaactgttcgaatctgcacaattgcttcttgcagattcggcttt

SEQ ID NO: 381794 - DNA, 75 bp, synthetic construct
  source 1..75: mol_type = other DNA
gggatgaggttagactaataaaaaatattgcaactgaacagaacttgtcaaattttacgtatattccatctgttt

SEQ ID NO: 381795 - DNA, 75 bp, synthetic construct
  source 1..75: mol_type = other DNA
cgccgaagaaaatagcagcgtcgccggtccactatttaaactgtgcgaacgccgtcaggggatcgcgggtgtaaa

SEQ ID NO: 381796 - DNA, 75 bp, synthetic construct
  source 1..75: mol_type = other DNA
ccttccaccgcaaaatggcttaacgaccttaaagcctgtaagcatatcttcgccgaagaaaatagcagtgtcgct

SEQ ID NO: 381797 - DNA, 75 bp, synthetic construct
  source 1..75: mol_type = other DNA
ctcagcgaaagctgacgggtaaggaaggagtatccgaagctatttgtccactggtatttactacgtgcatcgaat

SEQ ID NO: 381798 - DNA, 75 bp, synthetic construct
  source 1..75: mol_type = other DNA
tgctcgatgcccgtttatggctaaaacgtccattatggcaacgtgtcgccgagcgactgttttacttcttcagcc

SEQ ID NO: 381799 - DNA, 75 bp, synthetic construct
  source 1..75: mol_type = other DNA
accagatgtcaatattatgccgtttgagcaggtcagcggtcatacgattcataccatcgcttccggtccgggctt

SEQ ID NO: 381800 - DNA, 75 bp, synthetic construct
  source 1..75: mol_type = other DNA
tggcaccgttaaccttgatatgcgtagtctgtggctaaatttcgagattaccctggcaatcgacgataaaggttt

SEQ ID NO: 381801 - DNA, 75 bp, synthetic construct
  source 1..75: mol_type = other DNA
aaaagcgaacctatgctcaacgacacggaaagttattttaataccgcgatcaaaaacgctgtcgcgaaaggtgat

SEQ ID NO: 381802 - DNA, 75 bp, synthetic construct
  source 1..75: mol_type = other DNA
catgaccccatcagccttcttccccagcagttatttcacctaccaggaaccaggcgtgatgagtgcagatcggct

SEQ ID NO: 381803 - DNA, 75 bp, synthetic construct
  source 1..75: mol_type = other DNA
tatttgaatataaaataaactacaaatgtaacgatattgaacagcttcttattgaagaatacaacaggaaaatcc

SEQ ID NO: 381804 - DNA, 75 bp, synthetic construct
  source 1..75: mol_type = other DNA
ctcattaatgcactgagggataaggctagaaattctgtttccatgtttcaggccattgtgagtgaggaaatctgc

SEQ ID NO: 381805 - DNA, 75 bp, synthetic construct
  source 1..75: mol_type = other DNA
ctcagacgacccaactggcgaccggcggccaacaactgaacatccctggtatcagtggcccggttgccgcataca

SEQ ID NO: 381806 - DNA, 75 bp, synthetic construct
  source 1..75: mol_type = other DNA
ggaaggggtaatgcgtctgactccggcgctggggcaacagaaactctatgtactggtctttaccaccgaaaaaga

SEQ ID NO: 381807 - DNA, 75 bp, synthetic construct
  source 1..75: mol_type = other DNA
catcgggattgtgaccatctccgcattgatggtgacgctgttcttcggtggctggcaaggcccgttgttaccgcc

SEQ ID NO: 381808 - DNA, 75 bp, synthetic construct
  source 1..75: mol_type = other DNA
ctcgctgctgctggcctttgcgattgtgccagtcagtccgggttgggtggttgccgacctgaacatcgggatttt

SEQ ID NO: 381809 - DNA, 75 bp, synthetic construct
  source 1..75: mol_type = other DNA
ttggcgaacgtcgcctgctgggtctgttccagaaccgttacggacctaaccgtgttggctggggcggttcgctcc

SEQ ID NO: 381810 - DNA, 75 bp, synthetic construct
  source 1..75: mol_type = other DNA
ggtggcccgaacaccacttatgtgtttaaagctggtgaagaagcggtgccgctagaagctggtcaccgtttttaa

SEQ ID NO: 381811 - DNA, 75 bp, synthetic construct
  source 1..75: mol_type = other DNA
ccaacgcgctgccggaaggccataaaggtgaaacccgtgagcagcgtattcgcgaactgctggtcgtcgcgccag

SEQ ID NO: 381812 - DNA, 75 bp, synthetic construct
  source 1..75: mol_type = other DNA
atgaacaggttgaacaattgctcgcagagctgctcaacatactggaaaaacataaggctccgaccgacctttccc

SEQ ID NO: 381813 - DNA, 75 bp, synthetic construct
  source 1..75: mol_type = other DNA
tcaaatcagtctggacgatgcaccacagccgtgacggattcggcattttgtttgaggtgtgcctgctggatggtg

SEQ ID NO: 381814 - DNA, 75 bp, synthetic construct
  source 1..75: mol_type = other DNA
atgatccccttccccactacagaaaaccttattctatgggcttgcagcgccatcgtactgcttgccgttgtattc

SEQ ID NO: 381815 - DNA, 75 bp, synthetic construct
  source 1..75: mol_type = other DNA
ccggatatcaataaaaaggtacaaaccggtgatggcatcaataatgatgtcgataccaaaaccgacggtaccacg

SEQ ID NO: 381816 - DNA, 75 bp, synthetic construct
  source 1..75: mol_type = other DNA
tagaaaaccttattctctgggcttgcggcgccatcgtgctgctcgccactttattctttaggcgatcagtacggc

SEQ ID NO: 381817 - DNA, 75 bp, synthetic construct
  source 1..75: mol_type = other DNA
agatcgcgtatctcaggaagatagaccctttcacctttgaggaactgttactggaggggtttgagtcgcatggct

SEQ ID NO: 381818 - DNA, 75 bp, synthetic construct
  source 1..75: mol_type = other DNA
tcgctcaacgtgctggcgccaggtgggcggctttcgatcatcagttttcattcgctggaagaccgtattgtgaaa

SEQ ID NO: 381819 - DNA, 75 bp, synthetic construct
  source 1..75: mol_type = other DNA
gagttcgagaagttgcttaaacgtcataactgtcgcggtctgttttgccataccgggaaaaccggcgcaggttca

SEQ ID NO: 381820 - DNA, 75 bp, synthetic construct
  source 1..75: mol_type = other DNA
cgtgatttaagtcagttaaccggcgtttcgcgcattacggtgcgcaaggcgatgcaggcgctggaagaagagggc

SEQ ID NO: 381821 - DNA, 75 bp, synthetic construct
  source 1..75: mol_type = other DNA
gatcgtagaaattctcaatagcgccatcgaggccgtagttgaccgtattggctccgaataccatgagctttccgg

SEQ ID NO: 381822 - DNA, 75 bp, synthetic construct
  source 1..75: mol_type = other DNA
ggtgggttagtacatccatagaaaacatttctgtaaaatgttctcagcgagttcctgcagagaacgaagaattta

SEQ ID NO: 381823 - DNA, 75 bp, synthetic construct
  source 1..75: mol_type = other DNA
gtgttgagcataataataccgtgcgtaactggctcaaaaatgcctcgattcccgttatggaaatcggtgccattc

SEQ ID NO: 381824 - DNA, 75 bp, synthetic construct
  source 1..75: mol_type = other DNA
gtacaggtaaagtcactatcgccgatgtcgcgcaactagcaggcgttggcacaatgacggtatccagggcgttac

SEQ ID NO: 381825 - DNA, 75 bp, synthetic construct
  source 1..75: mol_type = other DNA
gaagaagcggtatcgattgaggagtcgtgggttcctgcgcatttaattcatgatgttgatgccatcggtatttct

SEQ ID NO: 381826 - DNA, 75 bp, synthetic construct
  source 1..75: mol_type = other DNA
atgagttggatatcaccggaactgattgagatcctgctgaccatcctcaaagcggtggtgatcctgctggtggtt

SEQ ID NO: 381827 - DNA, 75 bp, synthetic construct
  source 1..75: mol_type = other DNA
aaatcagcgtgcaacgttccgtcagcaccgacaaagaaaaccgccagaaggccaaagaagtgatcggcgtgctgc

SEQ ID NO: 381828 - DNA, 75 bp, synthetic construct
  source 1..75: mol_type = other DNA
tggtggtggctattgcccagactgcggcccatgcgctggctattccgccgactttggagatcacgccgatgcctt

SEQ ID NO: 381829 - DNA, 75 bp, synthetic construct
  source 1..75: mol_type = other DNA
cgaagactctcaccactggcgactctctccgccagatcaacaccgataatgccagcttctggcaccgcacaaggt

SEQ ID NO: 381830 - DNA, 75 bp, synthetic construct
  source 1..75: mol_type = other DNA
cggcgaagctgggtaacaacgtatcgattggcgctaacgcggtgattgagtccggcgttgaactgggcgataacg

SEQ ID NO: 381831 - DNA, 75 bp, synthetic construct
  source 1..75: mol_type = other DNA
gctgtcgaatccgatcagggtgtgccattcgaacagtcagaagcctacctgacaaacaaggataagattgatgcg

SEQ ID NO: 381832 - DNA, 75 bp, synthetic construct
  source 1..75: mol_type = other DNA
agatccggcagtttgcagaaaaggcgaatgatacaaacgcagtgtttctcaatcttaattttgatgacacactat

SEQ ID NO: 381833 - DNA, 75 bp, synthetic construct
  source 1..75: mol_type = other DNA
atggagccgaaagagagaaaggactggtaccaatctgaaaatgaaaggatcaagctggaaaaggagcgtaaccgg

SEQ ID NO: 381834 - DNA, 75 bp, synthetic construct
  source 1..75: mol_type = other DNA
gtcagttttgtttacgataatcaactactgcatctcaaacagggcatttctgcgtctggtgcacgttacaccgac

SEQ ID NO: 381835 - DNA, 75 bp, synthetic construct
  source 1..75: mol_type = other DNA
aaacgtctttattgttacagatgaccgagcgcctcgcgctttccgacgttcattttcggcggataagtcaattga

SEQ ID NO: 381836 - DNA, 75 bp, synthetic construct
  source 1..75: mol_type = other DNA
cagaaatccagctggatcaggctatcgatatactcgagcaggttggcgactacatgaaagcaaacaatatcgctc

SEQ ID NO: 381837 - DNA, 75 bp, synthetic construct
  source 1..75: mol_type = other DNA
cgacctggcagaagccacggggtggcacagtgatcaggctggaggaatacacgggacagggcctgttgtcatacg

SEQ ID NO: 381838 - DNA, 75 bp, synthetic construct
  source 1..75: mol_type = other DNA
tcactgtcaccgtgtccggtcctgtgggcagcggtaaaagttacatattggcgcggatagaggaagtggtgaaac

SEQ ID NO: 381839 - DNA, 75 bp, synthetic construct
  source 1..75: mol_type = other DNA
ggtgaagatccctcagattggtcgcgtgattattggcgatcgcgtggagatcggcgcctgtactaccatcgatcg

SEQ ID NO: 381840 - DNA, 75 bp, synthetic construct
  source 1..75: mol_type = other DNA
gaagcgcaaaataacaacctgacaaaaattaatatttctgatagttataaactgaaatttcttaatcttgattat

SEQ ID NO: 381841 - DNA, 75 bp, synthetic construct
  source 1..75: mol_type = other DNA
tattcataatgaggataaaccttccttaggttatggtctaacatccaataattggttaagccagtcctttacaac

SEQ ID NO: 381842 - DNA, 75 bp, synthetic construct
  source 1..75: mol_type = other DNA
ctgatgcttgatgagcgtaccggactgactcacgactacacccgcaaaagcggtgtggctgaagctgtgattctg

SEQ ID NO: 381843 - DNA, 75 bp, synthetic construct
  source 1..75: mol_type = other DNA
gtgcggtaattgcgtccacggcaacggatgacaaaaacagcctcagtaccggcacgctgggctggtcggatatcc

SEQ ID NO: 381844 - DNA, 75 bp, synthetic construct
  source 1..75: mol_type = other DNA
atcttataacctggcaatcacaaatatcgataccagtgatgaacatcttgtagaagtaagcgataattccgaagg

SEQ ID NO: 381845 - DNA, 75 bp, synthetic construct
  source 1..75: mol_type = other DNA
gtcaaattcctcttctctatcctcacactcggggctaaaggacccaacgggcacacccgtctgttattatattca

SEQ ID NO: 381846 - DNA, 75 bp, synthetic construct
  source 1..75: mol_type = other DNA
aggatccgctgaagtttgaaaaggacaaaataaaaggggcgattcgtaccgattttatattgtctgcggaaatcg

SEQ ID NO: 381847 - DNA, 75 bp, synthetic construct
  source 1..75: mol_type = other DNA
gtgcgtgccaaccgggaacttcccgtggtctggggagtggcgaaaggatcgctgatcaataaagtgattctggtg

SEQ ID NO: 381848 - DNA, 75 bp, synthetic construct
  source 1..75: mol_type = other DNA
gcaccaagtgcggtgattgatgcaacggcgaagctgggtaacaacgtctcaattggcgctaacgcggtcattgag

SEQ ID NO: 381849 - DNA, 75 bp, synthetic construct
  source 1..75: mol_type = other DNA
atagttgctaatgcaaggcatatgccgttgcatcctgtcagtcctccgatggagaaagtaagaactgatgaatgg

SEQ ID NO: 381850 - DNA, 75 bp, synthetic construct
  source 1..75: mol_type = other DNA
ctggatgcggtggttccgatgcgggggttttgagagccggctttgatgtgcttatggccaacgatatcttgccgt

SEQ ID NO: 381851 - DNA, 75 bp, synthetic construct
  source 1..75: mol_type = other DNA
gccgttgcttaatcaggtgctggtgctttcaggcatcgcgctggtagtgaccgtgggcgtctacggtctggtagg

SEQ ID NO: 381852 - DNA, 75 bp, synthetic construct
  source 1..75: mol_type = other DNA
gatagtcagaaatccccgcgaatggttcacgtcagcgacctagcagagttcatcgacaaaaagagaaaggaagca

SEQ ID NO: 381853 - DNA, 75 bp, synthetic construct
  source 1..75: mol_type = other DNA
catagacaaaagacgagaagaaggacgtatcgagtgggaacaggtcagaacaagcaaacagaagggcaaagaaca

SEQ ID NO: 381854 - DNA, 75 bp, synthetic construct
  source 1..75: mol_type = other DNA
gcatcgctggatttttgctgatttatgcccgagtctgtaccacgctggttgcggccgtttttgcgcttcaggctt

SEQ ID NO: 381855 - DNA, 75 bp, synthetic construct
  source 1..75: mol_type = other DNA
tcgcatacagaacccggcacggcaggttgatgaaacggctcgcccagcaagcgaaacagccgatcgggtttatca

SEQ ID NO: 381856 - DNA, 75 bp, synthetic construct
  source 1..75: mol_type = other DNA
cttaccgggctggcagcggcggcggaaggtgacgacttcacctatagcaacgcgttggaaagtactttctttaac

SEQ ID NO: 381857 - DNA, 75 bp, synthetic construct
  source 1..75: mol_type = other DNA
tttggtatgagtccatccacggcagaagcaaaagcaaacgcttgtaagttgcccgttccaacatatcgcatcggc

SEQ ID NO: 381858 - DNA, 75 bp, synthetic construct
  source 1..75: mol_type = other DNA
actcaaagcacagtccgcagtggcaggttgctcaatgattcaggtgttgagtgccaaggttcatcaactggcgga

SEQ ID NO: 381859 - DNA, 75 bp, synthetic construct
  source 1..75: mol_type = other DNA
gtgattcagaccctttttgattttcccgtttacttcaaatttttcatcgggttatttgcgctggtcaacccggta

SEQ ID NO: 381860 - DNA, 75 bp, synthetic construct
  source 1..75: mol_type = other DNA
gttccacatggcaccgtggctggtacgagttttacgccagaccggcatcaacgtgattacgcgtattatggggct

SEQ ID NO: 381861 - DNA, 75 bp, synthetic construct
  source 1..75: mol_type = other DNA
acggctatggtgcattctggccggaaccgggctggggggctccttactacaccaatgcggtgagtcaggtaacac

SEQ ID NO: 381862 - DNA, 75 bp, synthetic construct
  source 1..75: mol_type = other DNA
ttccttgatccagtgaactatcgtaatcactttgttaccatcctcggtaccattcagggtgaacaacctggcttt

SEQ ID NO: 381863 - DNA, 75 bp, synthetic construct
  source 1..75: mol_type = other DNA
atgagacacacagttacgcgacttttgccagaggcatattccagactggcagcaatcaaagccaaataccctgat

SEQ ID NO: 381864 - DNA, 75 bp, synthetic construct
  source 1..75: mol_type = other DNA
gtacagtatcagtcaatggtactgacctaccgacaactacattcccttcgcaggggttcaccggggcgtattatc

SEQ ID NO: 381865 - DNA, 75 bp, synthetic construct
  source 1..75: mol_type = other DNA
tacgatggctgtgctaacttgtatcgcgaacaataacagtgcgcaattgttggacgaaatcgtccaacaagaggg

SEQ ID NO: 381866 - DNA, 75 bp, synthetic construct
  source 1..75: mol_type = other DNA
cgtctggctcgtggtcgcattcacgcaccaaaaccatgccgcgttatccgctgatgaatctgatcccgaccgact

SEQ ID NO: 381867 - DNA, 75 bp, synthetic construct
  source 1..75: mol_type = other DNA
atgaatagcggattcacagaaacgctaccgattagcaagctgaaagatgttaaatcattcatcaagagcctgtac

SEQ ID NO: 381868 - DNA, 75 bp, synthetic construct
  source 1..75: mol_type = other DNA
tatgggatggttgcgcggcgtcgggcatgaagttgtctagtgtcgcgatcatggctcgcctcgctgatttcagca

SEQ ID NO: 381869 - DNA, 75 bp, synthetic construct
  source 1..75: mol_type = other DNA
gccaccacagcgcgaaaaggccttgtccagctcagtagtgccaccaacagcacgtctgaaacgctcgccgcaaca

SEQ ID NO: 381870 - DNA, 75 bp, synthetic construct
  source 1..75: mol_type = other DNA
tcggtttgcaggaaacggtaaatctggcttctggcgcattacaaaaaaaacagaacggcgcggatattcctgata

SEQ ID NO: 381871 - DNA, 75 bp, synthetic construct
  source 1..75: mol_type = other DNA
tgggaaattacatgaaggaagctgatttttattcaatggtatattggtcttctaattccgcaggcgcaggccaac

SEQ ID NO: 381872 - DNA, 75 bp, synthetic construct
  source 1..75: mol_type = other DNA
aaaaatgttggagatagaaatgctgtaataatcacggcgaccccaagatcaggtggcgctatttaccaaacgcaa

SEQ ID NO: 381873 - DNA, 75 bp, synthetic construct
  source 1..75: mol_type = other DNA
tggcaggcccagcagacgcctcgcagtccatccttaagaacaaccagtcatcactgaaaggggactttaccgata

SEQ ID NO: 381874 - DNA, 75 bp, synthetic construct
  source 1..75: mol_type = other DNA
cccgaggcatcgggtcactgtacagtgaatggggagatatggggcattacacgactgacgctggttttcaatcaa

SEQ ID NO: 381875 - DNA, 75 bp, synthetic construct
  source 1..75: mol_type = other DNA
aatccgtgtgaagagttggtgggtgaactccggcgatgctttcatgatatacagccttgctgaaaatttttgcag

SEQ ID NO: 381876 - DNA, 75 bp, synthetic construct
  source 1..75: mol_type = other DNA
aatacattgtatccctggaaacagggacgcaaaacacttatcaaacgtatgaatttttttatggggcgtgttata

SEQ ID NO: 381877 - DNA, 75 bp, synthetic construct
  source 1..75: mol_type = other DNA
ggattgcgctttttcttggcgacacgattctgcaactttttggcatctcgattgattcgttccgtatcgcgggcg

SEQ ID NO: 381878 - DNA, 75 bp, synthetic construct
  source 1..75: mol_type = other DNA
gctacaccgagatcgcatggctgacggcgcaactacggtacatgtagccgctgacacgctggttgatgccagcag

SEQ ID NO: 381879 - DNA, 75 bp, synthetic construct
  source 1..75: mol_type = other DNA
caccagcgaacaggaagcacgccagcaatctcctgatggctgtgtgatggtattcgccgcccgtattcgtcaggg

SEQ ID NO: 381880 - DNA, 75 bp, synthetic construct
  source 1..75: mol_type = other DNA
atggctggaacacagcatacccaaactcaccctaaatttatatacatctttctggcgctacatcgcgatcgcata

SEQ ID NO: 381881 - DNA, 75 bp, synthetic construct
  source 1..75: mol_type = other DNA
aatcaagtacaacgaatcgaggatgttcacgcttttgatgggcatattgcctgtgatgcggcgagtaattctgaa

SEQ ID NO: 381882 - DNA, 75 bp, synthetic construct
  source 1..75: mol_type = other DNA
atgaaaattttccaacggtacaacccacttcaggtggcgaagtacgtgaagatcctgttccgtggacggttatac

SEQ ID NO: 381883 - DNA, 75 bp, synthetic construct
  source 1..75: mol_type = other DNA
aatgcccttggtttcgtgatcaccctaatcatcctctataactggattatcgtaccagtactagatgcgttcggt

SEQ ID NO: 381884 - DNA, 75 bp, synthetic construct
  source 1..75: mol_type = other DNA
tggcgttggtgggcgacgccgcgcataccattcacccgctggcggggcagggcgttaatctcggctttatggatg

SEQ ID NO: 381885 - DNA, 75 bp, synthetic construct
  source 1..75: mol_type = other DNA
aaggcattctggcttttttgccgctgagcgatccgcatctttgctcgattgtctggtcattacctcctcaggagg

SEQ ID NO: 381886 - DNA, 75 bp, synthetic construct
  source 1..75: mol_type = other DNA
cggccatattgctttacagcacgttcaggagttcgatacgttgcttaaacgacataactgtcgcggtttgttttg

SEQ ID NO: 381887 - DNA, 75 bp, synthetic construct
  source 1..75: mol_type = other DNA
gtctggctgatgttctcactgggagccgggctgtggctggtacacggtggctggctaacagaatggctaagcggc

SEQ ID NO: 381888 - DNA, 75 bp, synthetic construct
  source 1..75: mol_type = other DNA
atagcaccctacaacgcgtagcacgttacgccatgatattgctaatgctggctgaattcggagcgtggatatggt

SEQ ID NO: 381889 - DNA, 75 bp, synthetic construct
  source 1..75: mol_type = other DNA
cgcggcgctgatgctggctggtatgcagggattccgcgactggtatgcagggattccgcgatctgttttccgggg

SEQ ID NO: 381890 - DNA, 75 bp, synthetic construct
  source 1..75: mol_type = other DNA
atgcttattttaataggctggcagttcctggtaagacaaccaagtgattatataatgaacaaaacagaattttac

SEQ ID NO: 381891 - DNA, 75 bp, synthetic construct
  source 1..75: mol_type = other DNA
tttccacgaacgaagaaatgtaaatgacaactggtgggatactcagcgggtatcaaacgtacatgtgcatgtgga

SEQ ID NO: 381892 - DNA, 75 bp, synthetic construct
  source 1..75: mol_type = other DNA
aggtttcagctctaaaaaataaaatatttattagttggttggttgttgttcttgttctgtatgtatataaacact

SEQ ID NO: 381893 - DNA, 75 bp, synthetic construct
  source 1..75: mol_type = other DNA
tcacagcagctgcaacaaattcgcagccgcctggatggcacggaagtcggtgagacagccttacgtcccagccag

SEQ ID NO: 381894 - DNA, 75 bp, synthetic construct
  source 1..75: mol_type = other DNA
ttaatcaaatttttgccggatgcggcgtgaatgccttatacggcctacaacgggcaattttacggcacccgttaa

SEQ ID NO: 381895 - DNA, 75 bp, synthetic construct
  source 1..75: mol_type = other DNA
atggtaacggacccgatagggctgagaggcgggttaaacttatatcagtatgggccgaatccgctgtcatggata

SEQ ID NO: 381896 - DNA, 75 bp, synthetic construct
  source 1..75: mol_type = other DNA
cagcgcgggagacataccggtatgtgtacgatgcgctggggaggcggacagaaaaacagcacatcagccctgacg

SEQ ID NO: 381897 - DNA, 75 bp, synthetic construct
  source 1..75: mol_type = other DNA
ctgtgctggaaagtgctggagaaaaacggcgttgcggttcgtcactttggtatgccagagcaacagaccagccac

SEQ ID NO: 381898 - DNA, 75 bp, synthetic construct
  source 1..75: mol_type = other DNA
tgtcgatgagctgaaccgtactatcgatcagctgtgccgtgaaaacgacatcaacattgcctttaaccagcttga

SEQ ID NO: 381899 - DNA, 75 bp, synthetic construct
  source 1..75: mol_type = other DNA
cctgccagcccggcgaccgacgatgctgaacaggaagcggttgctgcgctggtggcgctgggctataaaccacaa

SEQ ID NO: 381900 - DNA, 75 bp, synthetic construct
  source 1..75: mol_type = other DNA
ctggtctgtggtggcagaactctccccgctgcatttgatggatgatgtgctggggcaggcgatgattttcttcaa

SEQ ID NO: 381901 - DNA, 75 bp, synthetic construct
  source 1..75: mol_type = other DNA
agtgcatctgcacaacgagaagggcgatgaggtgacggaagtaaaacgcgactacaaaggcgacgacccgacgcc

SEQ ID NO: 381902 - DNA, 75 bp, synthetic construct
  source 1..75: mol_type = other DNA
caactggtcgttaaccgacaccaccacgcgtctggtgatccgcctgggcgtggcctatggctccgatctggaaaa

SEQ ID NO: 381903 - DNA, 75 bp, synthetic construct
  source 1..75: mol_type = other DNA
tttcccgtttgtcgactacttccgtaacagtctggtggtgtcggtggtttcatccgtggtggcggtattcctcgg

SEQ ID NO: 381904 - DNA, 75 bp, synthetic construct
  source 1..75: mol_type = other DNA
gtagtcaggttaagggagtggaagccgcgctagatcggttgcggggtactaccatcaagacagtgcgcgaaagcg

SEQ ID NO: 381905 - DNA, 75 bp, synthetic construct
  source 1..75: mol_type = other DNA
tggaaaacggcctgacactggtattgaaaaacattgagtttcgtctgctggatagcgacggtgctaccagcgcga

SEQ ID NO: 381906 - DNA, 75 bp, synthetic construct
  source 1..75: mol_type = other DNA
cggcagcgcgggcacgttcaaagagttctgccgcatgatgcgccgcctgatcgacgccaacgacctacccgaata

SEQ ID NO: 381907 - DNA, 75 bp, synthetic construct
  source 1..75: mol_type = other DNA
accggtgggcctgaacgcgctgttcagtacgccagattacatctggggacggatgatggcggcctcgctggtgac

SEQ ID NO: 381908 - DNA, 75 bp, synthetic construct
  source 1..75: mol_type = other DNA
catccctgatgagatcgaagaagcggcgatgatggatggcctcaatcgtctgcaaattatcttccgtatcaccgt

SEQ ID NO: 381909 - DNA, 75 bp, synthetic construct
  source 1..75: mol_type = other DNA
acgctctgcgtgagcaacaacgtgtctggctgacccagcaagcccgcaccgctgatggtatccgtatcgaagttg

SEQ ID NO: 381910 - DNA, 75 bp, synthetic construct
  source 1..75: mol_type = other DNA
ggatatcgagacccttagcccgtggctgcaacaaacgatttatatcgacggcaacgccggggcgattgtggtcga

SEQ ID NO: 381911 - DNA, 75 bp, synthetic construct
  source 1..75: mol_type = other DNA
acccccagtcagttcctcgaactggataaaaatcacctcaaaggtctgctactgaaaagcggcggcaccacctca

SEQ ID NO: 381912 - DNA, 75 bp, synthetic construct
  source 1..75: mol_type = other DNA
gacaaacccgttgattatctaaacattccggcagaagctaacccgttcctcggttatcgcgcggtgcgtatttat

SEQ ID NO: 381913 - DNA, 75 bp, synthetic construct
  source 1..75: mol_type = other DNA
ctggcggcgcgacgccagatcaggtttacgccgcactgctggtagccgaccagtatggtcagcgtttcctgcaag

SEQ ID NO: 381914 - DNA, 75 bp, synthetic construct
  source 1..75: mol_type = other DNA
tatcagcaagaagcccgcgtacaggacgctctgcgtgagcaacagcgtgtctggctgacccaacaagcccgtacc

SEQ ID NO: 381915 - DNA, 75 bp, synthetic construct
  source 1..75: mol_type = other DNA
aatactataaagtcaggagtcaaactcaaactcgtttggcttgaacgtggtcataccaaagcagacattgttgca

SEQ ID NO: 381916 - DNA, 75 bp, synthetic construct
  source 1..75: mol_type = other DNA
atgggctttgacaccaacatggaaggcggcttcctggcgcgccgtcgccacctacaggcgctggaacaggcagcg

SEQ ID NO: 381917 - DNA, 75 bp, synthetic construct
  source 1..75: mol_type = other DNA
accgcagcgcggacagtaacccggatatggtggaaaaaatggcagccagatatcgtcatgccgccggtcagcact

SEQ ID NO: 381918 - DNA, 75 bp, synthetic construct
  source 1..75: mol_type = other DNA
ttgtgcaaggcattgttcggcagaaccggaagccagtggctggttgttgaagtttttggggagaaggggcgtcag

SEQ ID NO: 381919 - DNA, 75 bp, synthetic construct
  source 1..75: mol_type = other DNA
gctcaatgacgtgattgccgacctcgacgcagtacgcgccgaagcacgtcagggtagtctgctgcgcgaagggat

SEQ ID NO: 381920 - DNA, 75 bp, synthetic construct
  source 1..75: mol_type = other DNA
attactggcggaagaactgcgtctggcgcagcagaacttaagcgaaatcacaggagaatttacttctgacgatct

SEQ ID NO: 381921 - DNA, 75 bp, synthetic construct
  source 1..75: mol_type = other DNA
gctcaatgacgtgattgccgatctcgacgcagtacgcgccgaggctcgtcagggcagcttgttacgcgaagggat

SEQ ID NO: 381922 - DNA, 75 bp, synthetic construct
  source 1..75: mol_type = other DNA
gggaagcaccgcaacgtgcctcacgcctggctgccagcgtaaagcgttacaagacatcagaaatgctgcgcttta

SEQ ID NO: 381923 - DNA, 75 bp, synthetic construct
  source 1..75: mol_type = other DNA
gggcggcaacgctggacgaaattgaacgggtaaagcgtctgtatcaggagggaatcaaggcatccagaataaaag

SEQ ID NO: 381924 - DNA, 75 bp, synthetic construct
  source 1..75: mol_type = other DNA
ccgaagttcagaatctgattagcaaagaagatattcctcatttttcgtgtgatatcaccgatattcagggtatct

SEQ ID NO: 381925 - DNA, 75 bp, synthetic construct
  source 1..75: mol_type = other DNA
gcttgcagtgaagactttcacccacgcactaatgctgatatagccatcactcttaagcaatataatttacatttc

SEQ ID NO: 381926 - DNA, 75 bp, synthetic construct
  source 1..75: mol_type = other DNA
tgcgtaaggaattattgcagactataaatcgtgcaaaactttttattacggactcggactatactcgaagagagc

SEQ ID NO: 381927 - DNA, 75 bp, synthetic construct
  source 1..75: mol_type = other DNA
agtttttggggagaaggggcgtcagcaccgcagcgcggacagcaatccggagatggtggaaaaaatggctgccag

SEQ ID NO: 381928 - DNA, 75 bp, synthetic construct
  source 1..75: mol_type = other DNA
gggcgatacctctttacgtcaacacttactggcgggtgtcagcgagggattaagctgtgccgaagcgattgttgc

SEQ ID NO: 381929 - DNA, 75 bp, synthetic construct
  source 1..75: mol_type = other DNA
agctttactctgcaaccggtgaccagcaatgagattgacagcgatgcgctgtatctcgatgaaattacgcttacc

SEQ ID NO: 381930 - DNA, 75 bp, synthetic construct
  source 1..75: mol_type = other DNA
gtgcaggtccgctggcgtgaaccggcaaaaacggctcaacaaagtaacattccggtgaccgttgaacgccagttg

SEQ ID NO: 381931 - DNA, 75 bp, synthetic construct
  source 1..75: mol_type = other DNA
tgaccgttgaacgccaattgtatcggcttatccctggtgaagaagagatgagctttactctgcaaccggtgacca

SEQ ID NO: 381932 - DNA, 75 bp, synthetic construct
  source 1..75: mol_type = other DNA
cacgatgtttactgctgagagtggtctagctgcttggggagctgttaatgtcgcaatgagtgttgcagatggtaa

SEQ ID NO: 381933 - DNA, 75 bp, synthetic construct
  source 1..75: mol_type = other DNA
gtcgcaatggcggattggttagttactttgctgactggtatcgttgcatcttcattgtgggccgctacccatatt

SEQ ID NO: 381934 - DNA, 75 bp, synthetic construct
  source 1..75: mol_type = other DNA
attgctggaaaaagcgcgaaatgaaatgggcgaactggcctatatggtgccggtgaaagaactgacgggaacggt

SEQ ID NO: 381935 - DNA, 75 bp, synthetic construct
  source 1..75: mol_type = other DNA
cgcgccggacagctcggttaaggcgctgaaatacgccgctgcgattgaacgttcgctgtgtgagaaacttggcgc

SEQ ID NO: 381936 - DNA, 75 bp, synthetic construct
  source 1..75: mol_type = other DNA
tgtgaacgtgatgattaccaatacgatgtctggcccggttcccgctaatcttgaacgtttgtttgaccggttcta

SEQ ID NO: 381937 - DNA, 75 bp, synthetic construct
  source 1..75: mol_type = other DNA
gtatctcgcggcgggttgccgtgacgccggaacagggtaaaagcaaacatgtcatcattacggttgccacggata

SEQ ID NO: 381938 - DNA, 75 bp, synthetic construct
  source 1..75: mol_type = other DNA
tattaaatggaagtcgttccgcgataccgatgacagccgctacgtgggattagtgatgccgcgcgtgctgggccg

SEQ ID NO: 381939 - DNA, 75 bp, synthetic construct
  source 1..75: mol_type = other DNA
gattacgcctgctttttctcggcaaactccgcccagaaaccggcgctgtatgataccgctgacgccaccgccaac

SEQ ID NO: 381940 - DNA, 75 bp, synthetic construct
  source 1..75: mol_type = other DNA
cctctgaaactgcaacactcaccaccactgagtccggcggcgtttatcagtccctgtttgataaaattaatttaa

SEQ ID NO: 381941 - DNA, 75 bp, synthetic construct
  source 1..75: mol_type = other DNA
tgattctagttactcaatttcagttgacaatggttctgctgtttgtgggactgttaaattaccacaaaaacctac

SEQ ID NO: 381942 - DNA, 75 bp, synthetic construct
  source 1..75: mol_type = other DNA
aaggcatgaccgataacctgctgctggcgggccgctgccgctatccgcgtaaactggaagccgacttgtgggcgc

SEQ ID NO: 381943 - DNA, 75 bp, synthetic construct
  source 1..75: mol_type = other DNA
gcgcatcagcgtttaagccaatggctgcgcgatgaatttccccactgcgacgcgccgctggcggaagtaaaatct

SEQ ID NO: 381944 - DNA, 75 bp, synthetic construct
  source 1..75: mol_type = other DNA
aatggattggcctgtgcggtgaactgggagcaaagggttccgtgctgccactgctgattggtttaggtctggatg

SEQ ID NO: 381945 - DNA, 75 bp, synthetic construct
  source 1..75: mol_type = other DNA
atggccctgattgtggaatttatttgtgagctacctaacggcgtacatgcgcgtccggcaagccacgttgaaacg

SEQ ID NO: 381946 - DNA, 75 bp, synthetic construct
  source 1..75: mol_type = other DNA
cgccatttgtatggctgatgaactgacccccagccagttcctcgaactggataaaaatcacctcaaaggtctgtt

SEQ ID NO: 381947 - DNA, 75 bp, synthetic construct
  source 1..75: mol_type = other DNA
aaactggaagccgacttgtgggcgcgcgaggccgttttctctaccggtctgggctttagttttgccattccccac

SEQ ID NO: 381948 - DNA, 75 bp, synthetic construct
  source 1..75: mol_type = other DNA
cgagaaatatactttaagcgaagtaattaaagtcgcatttggaatatatggtgttgcgccagttgtatttatcaa

SEQ ID NO: 381949 - DNA, 75 bp, synthetic construct
  source 1..75: mol_type = other DNA
tgtcaatgttcgtaatgatgccggttgggaaggaaatatataataacagtcagaatgagaatctttcattcaata

SEQ ID NO: 381950 - DNA, 75 bp, synthetic construct
  source 1..75: mol_type = other DNA
catacaacatccgtgaaacagcaactggatacactgagcgccaccgtgagcacgcagttcagcaccacagaggcc

SEQ ID NO: 381951 - DNA, 75 bp, synthetic construct
  source 1..75: mol_type = other DNA
gcgcaccagcgtttaagccaatggctgcgcgatgaattcccccactgcgacgcaccgctggcggaagtaaaatct

SEQ ID NO: 381952 - DNA, 75 bp, synthetic construct
  source 1..75: mol_type = other DNA
gtctgaaaacacgattacgtcattgatggacgggattgttaaattccatgtaaaaatgacaccattctcacctgc

SEQ ID NO: 381953 - DNA, 75 bp, synthetic construct
  source 1..75: mol_type = other DNA
taaaaatgacaccattctcacctgccagagatattgagttcgtcatggaatataatcctgattatctgctgaact

SEQ ID NO: 381954 - DNA, 75 bp, synthetic construct
  source 1..75: mol_type = other DNA
gtggttgttttcttgctggacgatgtgggctggatggacgtcggttttaacggtggcggcgtggcggtgggtaac

SEQ ID NO: 381955 - DNA, 75 bp, synthetic construct
  source 1..75: mol_type = other DNA
ctgggaacaaatggtcagtctaaccgtaaggccgagcactacttcctcaacggtaaactttctgctgtgcgtatg

SEQ ID NO: 381956 - DNA, 75 bp, synthetic construct
  source 1..75: mol_type = other DNA
gacaatactccatccaccacggcattctgatgccgccaatgtacgggcaaccgggcggtctgcaagggttaacca

SEQ ID NO: 381957 - DNA, 75 bp, synthetic construct
  source 1..75: mol_type = other DNA
aaaagaaataatattctttatctgcgtaggggggttggtaggcggtgtcatttctagagcgttttttaatttgta

SEQ ID NO: 381958 - DNA, 75 bp, synthetic construct
  source 1..75: mol_type = other DNA
cagcgtaaagagcttaacaagcttgtatctgcggtggccgaaatcgtcgaagaagaggcatttgtcatctggcaa

SEQ ID NO: 381959 - DNA, 75 bp, synthetic construct
  source 1..75: mol_type = other DNA
atgattcagtccctaggtacaattatgagttcgtctgctgccgtaactgttctgaccggcgtaaccgtttttgtt

SEQ ID NO: 381960 - DNA, 75 bp, synthetic construct
  source 1..75: mol_type = other DNA
gttacgcgtacggctgtccggagtttcagccgaatatcattcatccctgatattaccgggtctcacggtcagtga

SEQ ID NO: 381961 - DNA, 75 bp, synthetic construct
  source 1..75: mol_type = other DNA
agccgaatatcattcatccctgatattaccgggtcatcacggtcagtgatgaacgtgatgttgccaggtcccgac

SEQ ID NO: 381962 - DNA, 75 bp, synthetic construct
  source 1..75: mol_type = other DNA
ttcactggcagggattatcgcgcaacgtctggttcgtcgcctgtgtccgcaatgccgacaattcacgcccgtatc

SEQ ID NO: 381963 - DNA, 75 bp, synthetic construct
  source 1..75: mol_type = other DNA
gtggttgttttcttgctggatgatgtgggctggatggacgttggctttaacggcggcggcgtggcggtgggtaac

SEQ ID NO: 381964 - DNA, 75 bp, synthetic construct
  source 1..75: mol_type = other DNA
aatccggaagtggccctgagtccggaccgttctgaatacatcaagcaattaccgttcagcaaagatgacgttcat

SEQ ID NO: 381965 - DNA, 75 bp, synthetic construct
  source 1..75: mol_type = other DNA
gctggatgacgtgggctggatggatgttggctttaatggtggcggtgtggcggtgggtaacccaacaccagatat

SEQ ID NO: 381966 - DNA, 75 bp, synthetic construct
  source 1..75: mol_type = other DNA
aattatcgctatcgcgccatgacccaggatggtcaaaaattgaggggatcattgatgctaacgatgaacgtcagg

SEQ ID NO: 381967 - DNA, 75 bp, synthetic construct
  source 1..75: mol_type = other DNA
cgggcagctttaccaccagaaaagcctcaacggtttcgcgcggcggctatggtcgctcctccagcgcccgtgggc

SEQ ID NO: 381968 - DNA, 75 bp, synthetic construct
  source 1..75: mol_type = other DNA
accaaaaaagcgtcaaccgtttcgcgcggcggctatggtcgttcttccagcgcccgtgggcattggggaggctaa

SEQ ID NO: 381969 - DNA, 75 bp, synthetic construct
  source 1..75: mol_type = other DNA
taatcatcaggaactgctgcagcaggcattaactcaccgcagtgccagcagtaaacataacgagcgtctggaatt

SEQ ID NO: 381970 - DNA, 75 bp, synthetic construct
  source 1..75: mol_type = other DNA
gctgacgctcaaaaagctctgaactactacaacgagaaagtcggtacccgctgccgcgacgttaaaccgtttgtc

SEQ ID NO: 381971 - DNA, 75 bp, synthetic construct
  source 1..75: mol_type = other DNA
cgcatatttacaacggcgcaggagagacggtaaacgtgtttatccctgtaagctgcgatatgcatgggtaagaga

SEQ ID NO: 381972 - DNA, 75 bp, synthetic construct
  source 1..75: mol_type = other DNA
cactggctggcgctaaaagcattgcttgaaactgcacaaacgctgatggctgacatcggtagcattgaatttgat

SEQ ID NO: 381973 - DNA, 75 bp, synthetic construct
  source 1..75: mol_type = other DNA
tgcctttggtgttcatgcctgaggcagatagcctcaagcacccgcagtcattctacttaactaagatttccccgc

SEQ ID NO: 381974 - DNA, 75 bp, synthetic construct
  source 1..75: mol_type = other DNA
tgattcgttattgccatgttaacttcggaactggtcgactgaatgacctaacacgcaaccagcttcaaatgtgtt

SEQ ID NO: 381975 - DNA, 75 bp, synthetic construct
  source 1..75: mol_type = other DNA
taattggtcaacaaagcagtaataatcgactggctgacgtgttaaatcaggtacgcagcgccatccttgaagggc

SEQ ID NO: 381976 - DNA, 75 bp, synthetic construct
  source 1..75: mol_type = other DNA
tttaggcgactctattttgagctacgttatcgccaatgcgctgtatcaccgcttcccgcgtgtggatgagggtga

SEQ ID NO: 381977 - DNA, 75 bp, synthetic construct
  source 1..75: mol_type = other DNA
caagacgtagcagttaaagctcacgtcaacgaccagtttggcaacccggttacgcatcaacccgtcacattcagt

SEQ ID NO: 381978 - DNA, 75 bp, synthetic construct
  source 1..75: mol_type = other DNA
ttctactttactctcgttttactgcaaaccttttatcccgggcgcatattacccgatatgggaactcacacatcg

SEQ ID NO: 381979 - DNA, 75 bp, synthetic construct
  source 1..75: mol_type = other DNA
tactcccggccgcaatattctgacggtagaagatcccgtggaatatgagctggaaggcattgggcaaacgcaggt

SEQ ID NO: 381980 - DNA, 75 bp, synthetic construct
  source 1..75: mol_type = other DNA
tgattaacaaggtcgctgaaaacggtgattcactccgcgtggtggatgaacgtgactctaccgaaacaccggcaa

SEQ ID NO: 381981 - DNA, 75 bp, synthetic construct
  source 1..75: mol_type = other DNA
ctccggtattaatatagtggttgaggtgtttgtgaattgccagtatggctatgatattcattgtgatgtgacctg

SEQ ID NO: 381982 - DNA, 75 bp, synthetic construct
  source 1..75: mol_type = other DNA
ctgacttaggcgtgtggatggtgaatgttcatgcctccggtggggcgcgtatgatgaccgcagcgcgtgaggcac

SEQ ID NO: 381983 - DNA, 75 bp, synthetic construct
  source 1..75: mol_type = other DNA
tcaaaaaagcggatgaaaaaggggctgatgtgttggtgctgacctctggtcagactgacaataagatccacggca

SEQ ID NO: 381984 - DNA, 75 bp, synthetic construct
  source 1..75: mol_type = other DNA
tgatttgtccgttatttttcgctcttcccgctaaggctgccgccacaaacacattactgaatagctgctttattc

SEQ ID NO: 381985 - DNA, 75 bp, synthetic construct
  source 1..75: mol_type = other DNA
gaatgcctgggcagctataacgccggtttcagcaaaaataacacagcccggcgcatgatatatgcccgaaaaatc

SEQ ID NO: 381986 - DNA, 75 bp, synthetic construct
  source 1..75: mol_type = other DNA
ggggaacatggaatacaacgtgccagtcaattttcttgggaaaggtgtgctagcgaaacaatcactgcatataaa

SEQ ID NO: 381987 - DNA, 75 bp, synthetic construct
  source 1..75: mol_type = other DNA
cccaggccacgcctccgggacgtggcggtgttggcatcctgcgcatctccggcctcaaagcccgtgaagttgccg

SEQ ID NO: 381988 - DNA, 75 bp, synthetic construct
  source 1..75: mol_type = other DNA
caaggactggcgaaggcgtggatgtgttgcgtaaccatctcaaacagagcatgggtttcgacacgaatatggaag

SEQ ID NO: 381989 - DNA, 75 bp, synthetic construct
  source 1..75: mol_type = other DNA
caggatctgaaatgggccaatgaagccagggctaagcaggctgaaaatctgtccgctctggagcaggatatcacc

SEQ ID NO: 381990 - DNA, 75 bp, synthetic construct
  source 1..75: mol_type = other DNA
ttgctactgagccaattaaatacccattaacgggcatcggtcggtattccctggagctggttaagcggctggcgg

SEQ ID NO: 381991 - DNA, 75 bp, synthetic construct
  source 1..75: mol_type = other DNA
tactcttttaaccgcatacaaccgtctacctttatctctaagacaaagggtgcctctggttataagtggctttaa

SEQ ID NO: 381992 - DNA, 75 bp, synthetic construct
  source 1..75: mol_type = other DNA
ttggtgcgttagctttcgtggttacaaacgtctatgctgcagaattaatgactaaagcagaatttgagaaagtcg

SEQ ID NO: 381993 - DNA, 75 bp, synthetic construct
  source 1..75: mol_type = other DNA
gactgaaacagagactactcagtcatatccgaaaactggctaccgatacgataattaaccatgatgaacaactag

SEQ ID NO: 381994 - DNA, 75 bp, synthetic construct
  source 1..75: mol_type = other DNA
gttatacgtgccaaaattgctgagaaagttattattctgacgcatagcctgtttttctttcaggagttactgctt

SEQ ID NO: 381995 - DNA, 75 bp, synthetic construct
  source 1..75: mol_type = other DNA
tctctgctgatgcgcgttctcagcgacctgccgctgcgtctgcgctggcagaataaaagccgcgatatcaactac

SEQ ID NO: 381996 - DNA, 75 bp, synthetic construct
  source 1..75: mol_type = other DNA
agatgtccgcgtatccacactgccatccatctatggtgaacgcgctgtgctccgcctgctggataaaaacagcct

SEQ ID NO: 381997 - DNA, 75 bp, synthetic construct
  source 1..75: mol_type = other DNA
tagcactttaaacgtcaagaccgatggtatggatgaagatagactcataatgggaggaccaactccagcatcagg

SEQ ID NO: 381998 - DNA, 75 bp, synthetic construct
  source 1..75: mol_type = other DNA
ttcatggagtgaaaatcaaataatgcaatcttatcatggaggaaagcaagatcttattagtgtggtattaagtaa

SEQ ID NO: 381999 - DNA, 75 bp, synthetic construct
  source 1..75: mol_type = other DNA
atgtcagtgtgcgaaatgatagagcttgccaaccggattgtaaacggggaacaagtcaaaaccccagcaatagaa

SEQ ID NO: 382000 - DNA, 75 bp, synthetic construct
  source 1..75: mol_type = other DNA
tatcagtggccaatggaatcctgatcgggaactttgcaaaggtcgttggacttaagcaaaacgcccttttctcat

SEQ ID NO: 382001 - DNA, 75 bp, synthetic construct
  source 1..75: mol_type = other DNA
ttaccctgcgcggtagcgatgtgattggtcggtttggcggcgatgagtttgcagtaatcatgtccggtacgccag

SEQ ID NO: 382002 - DNA, 75 bp, synthetic construct
  source 1..75: mol_type = other DNA
tcatttacaggtggcgaacgaactgttttaccgtaataaagccgcctggctggtgggcaaactaataacgccttc

SEQ ID NO: 382003 - DNA, 75 bp, synthetic construct
  source 1..75: mol_type = other DNA
atccaccagacggacgatggcgagttatttattgatacctgcctgacgacgaccgccgaagcgagcatcgtcttt

SEQ ID NO: 382004 - DNA, 75 bp, synthetic construct
  source 1..75: mol_type = other DNA
acaagtcaaaaccccagcaatagaagcatgggagattagcgaactcatttggtggatacataatcggggtaatgc

SEQ ID NO: 382005 - DNA, 75 bp, synthetic construct
  source 1..75: mol_type = other DNA
ctttcaccccgatcacggttgggaatctctgctgatgcgcgttatcagcgatctgccgctgcgtctgcgttggca

SEQ ID NO: 382006 - DNA, 75 bp, synthetic construct
  source 1..75: mol_type = other DNA
attagggcgagaaaatggaatagtggatccttgtgatagtttcattggatgggcccctccggttgccagccttcc

SEQ ID NO: 382007 - DNA, 75 bp, synthetic construct
  source 1..75: mol_type = other DNA
ctgcacgctgagtggcgaaatcccgacatgggaaaatgcgaatgagggcaacattgtctctgccgaaggcaaata

SEQ ID NO: 382008 - DNA, 75 bp, synthetic construct
  source 1..75: mol_type = other DNA
gttgctgctcggcaacatgggtatggctggtggtggcgtgaacgcgctgcgcggccactccaacattcagggtct

SEQ ID NO: 382009 - DNA, 75 bp, synthetic construct
  source 1..75: mol_type = other DNA
gctgcggatgggtaaaaaagagcagttcccgtatgtgggtacgacctaccgtctgaccgagcacttccacacctg

SEQ ID NO: 382010 - DNA, 75 bp, synthetic construct
  source 1..75: mol_type = other DNA
gtctggtcgtggagcaactgcgctgcattactaacggccaaagcacggacgcggcatttttactgcgcgttaaag

SEQ ID NO: 382011 - DNA, 75 bp, synthetic construct
  source 1..75: mol_type = other DNA
tgggcgcaggatcaagaagtcaggattggtatgccacaactgaccagctttttataccctgatgagtttaaagac

SEQ ID NO: 382012 - DNA, 75 bp, synthetic construct
  source 1..75: mol_type = other DNA
gctaatgtttgggggatggataacagtaagcaatattataagtccgttaatggcctattttgaccgatttattgt

SEQ ID NO: 382013 - DNA, 75 bp, synthetic construct
  source 1..75: mol_type = other DNA
aatggttttatggatgggggcatcattttttggtgagcctggtttggtattatcaatattactgattggctttat

SEQ ID NO: 382014 - DNA, 75 bp, synthetic construct
  source 1..75: mol_type = other DNA
atgaaattcaacacgaagattgctcttattctggctgcatccgtaatcagttgcagtgcctttgctcagagcgta

SEQ ID NO: 382015 - DNA, 75 bp, synthetic construct
  source 1..75: mol_type = other DNA
ttaaaaaaatactcgattacaacattatccccatcatggacctgctgtactgggcgcaggatgaagaggtcagga

SEQ ID NO: 382016 - DNA, 75 bp, synthetic construct
  source 1..75: mol_type = other DNA
ttcggtggaccagagaaaagactatcttccagctatgccatcaagcctgtaacacaccaagggctatgggaggtg

SEQ ID NO: 382017 - DNA, 75 bp, synthetic construct
  source 1..75: mol_type = other DNA
gcctcgcttggaggctcctgttgttgagcatattgtcaatgatgaacattattcttatttttcagttactgctct

SEQ ID NO: 382018 - DNA, 75 bp, synthetic construct
  source 1..75: mol_type = other DNA
gaacatccagaagatagcaattcacgtcgttggttgttctactggcaacactccggggtcatggatcaggtgtgg

SEQ ID NO: 382019 - DNA, 75 bp, synthetic construct
  source 1..75: mol_type = other DNA
ggtcttcgaacgcgatatggaaatgctggcaccgggttatacccagacgctggagccgcgtgcgcaatacctgta

SEQ ID NO: 382020 - DNA, 75 bp, synthetic construct
  source 1..75: mol_type = other DNA
cagtttgctactcaacgacggtgatgtttatttatcagcgcctgccacaactaacggtatctacaatacgctgac

SEQ ID NO: 382021 - DNA, 75 bp, synthetic construct
  source 1..75: mol_type = other DNA
ttgatggaactggactatctgccttcagataaagtctatgaagatgaacacccgaacgatgacagttcacgtcgt

SEQ ID NO: 382022 - DNA, 75 bp, synthetic construct
  source 1..75: mol_type = other DNA
gatcctcaaaggaccgaaaggctgggcgaatctgaacaccaaagacaccaacgtctggaaaggtgattaccagat

SEQ ID NO: 382023 - DNA, 75 bp, synthetic construct
  source 1..75: mol_type = other DNA
ctccagaaacacaaccaagctggacgaatccgttaaccgcgtaatgccgcaattcaaagttgacggcaaaatggt

SEQ ID NO: 382024 - DNA, 75 bp, synthetic construct
  source 1..75: mol_type = other DNA
taatggttctaaagggacacatgatgttgtcgaagaaccaatagttaatccttttgaggaactcccggcagagtt

SEQ ID NO: 382025 - DNA, 75 bp, synthetic construct
  source 1..75: mol_type = other DNA
ttctgcgggtgagcatagtgatgctgttaatggagaaatttcttcaagaatattggtgatgctccggcgttatga

SEQ ID NO: 382026 - DNA, 75 bp, synthetic construct
  source 1..75: mol_type = other DNA
atgcattcttttcttcagtttttacgtgatgataatccgggctcatcggaagatcatctgaattttgttccttca

SEQ ID NO: 382027 - DNA, 75 bp, synthetic construct
  source 1..75: mol_type = other DNA
cgcattctcggcggtatattccagaaagcattaaatatcagcaagattgagtcattcgtcgcggtcactaccatt

SEQ ID NO: 382028 - DNA, 75 bp, synthetic construct
  source 1..75: mol_type = other DNA
atggatgtcatgagaagtgttctgggaatggtggtattactggctattgcgtttttgctgtcagtaaacaaaaag

SEQ ID NO: 382029 - DNA, 75 bp, synthetic construct
  source 1..75: mol_type = other DNA
cgccagagcaggtagagcgcattgccgctatcgttgcgcgtgaagttgtcggcaaattaggtaaggagttgcgtg

SEQ ID NO: 382030 - DNA, 75 bp, synthetic construct
  source 1..75: mol_type = other DNA
agcatttttgatgcaggccttactcgcgcagtgatacgagaagtcgcaattgaaaaagataatgaagaaaataag

SEQ ID NO: 382031 - DNA, 75 bp, synthetic construct
  source 1..75: mol_type = other DNA
ggtgggtgctgcgtctgaagcgtgcgcgtgatgtgcagcgtgaacatatggctatagccgtggggcaggttcaga

SEQ ID NO: 382032 - DNA, 75 bp, synthetic construct
  source 1..75: mol_type = other DNA
taccgtgcgcgatattctttgctatcaagccagaattaccgactccgaagaactgcaaacgccaaacgcgctaaa

SEQ ID NO: 382033 - DNA, 75 bp, synthetic construct
  source 1..75: mol_type = other DNA
tccggcactgacgacgccagagagctgcaccgccgcaccctggaatcataccgccatctttgtgcgtgttgcctg

SEQ ID NO: 382034 - DNA, 75 bp, synthetic construct
  source 1..75: mol_type = other DNA
aacgagtatgccgaagatgtgcagcgcgttcagggcatctattcacctcacattccagattctgaagtttgcacg

SEQ ID NO: 382035 - DNA, 75 bp, synthetic construct
  source 1..75: mol_type = other DNA
atttggccaggcggcgttgatttaccgtaatggcaggttacaggagacacgaaacgagccaatgcacgagctgtg

SEQ ID NO: 382036 - DNA, 75 bp, synthetic construct
  source 1..75: mol_type = other DNA
ttctcatgcggggtagtggtttgagatttggccaggcggcgttgatttaccgtaatggcaggttacaggagacac

SEQ ID NO: 382037 - DNA, 75 bp, synthetic construct
  source 1..75: mol_type = other DNA
cgctggcaggcggctggctgttgtttgcgtttatcggtacgggcagcagttttctcgcctttgctgcactggcag

SEQ ID NO: 382038 - DNA, 75 bp, synthetic construct
  source 1..75: mol_type = other DNA
taacgaagattttgtcaaagcagttaaagcgacaggtaaaaaacaactgattattgcaggggtggtaaccgaggt

SEQ ID NO: 382039 - DNA, 75 bp, synthetic construct
  source 1..75: mol_type = other DNA
ggcaatggtcatgcttttacgcaggttaaattcaccccaaaaggtgttcagtggattgctggtctgcttgctgca

SEQ ID NO: 382040 - DNA, 75 bp, synthetic construct
  source 1..75: mol_type = other DNA
taagttggcagaggtttctggcgtggaaaatcgtacctataaccttactcctgataaaccttatccacgcccttt

SEQ ID NO: 382041 - DNA, 75 bp, synthetic construct
  source 1..75: mol_type = other DNA
ggacggtgcgctggcgcggcgcagagggcttaccgacgcgggcggctttctcgatatttctctcgattttctctt

SEQ ID NO: 382042 - DNA, 75 bp, synthetic construct
  source 1..75: mol_type = other DNA
ctggggggattaactgaaggcagcgagacgattttgctgtttgttctgagttgcctctttccagcgtatttcccg

SEQ ID NO: 382043 - DNA, 75 bp, synthetic construct
  source 1..75: mol_type = other DNA
aatttacggcttagcgcatgcttttattgcgaaatctctatcagaaaaaataagccaggcttgggcgcatagatc

SEQ ID NO: 382044 - DNA, 75 bp, synthetic construct
  source 1..75: mol_type = other DNA
gagtatcgcgcaactgcgccaacaaggaccagcgggagcatttgaacagaaacttacggtttcaactgctgacaa

SEQ ID NO: 382045 - DNA, 75 bp, synthetic construct
  source 1..75: mol_type = other DNA
cccgcgctgacaagcggccgggcatgagtaccgcgcagctgcgccagcagttacagggacgctatcaggaactga

SEQ ID NO: 382046 - DNA, 75 bp, synthetic construct
  source 1..75: mol_type = other DNA
gtacttgatgataataaatattatctcttttcgcgaagggcgaatgataatattcgaaatctatttttattatct

SEQ ID NO: 382047 - DNA, 75 bp, synthetic construct
  source 1..75: mol_type = other DNA
ctgccagccaaaaattatggctggagttacctggtaaccgcccacaacatgccgccggaacgtcggtgctgacac

SEQ ID NO: 382048 - DNA, 75 bp, synthetic construct
  source 1..75: mol_type = other DNA
aggccatcacgccagcgctacgggaaaaatcgctctctgccagccaaaaattatggctggaattacctggcaacc

SEQ ID NO: 382049 - DNA, 75 bp, synthetic construct
  source 1..75: mol_type = other DNA
tgtcgccgatcgccaaatggtggaaatcctccgcgggctgatgcgcgattcgcgaattctgatcctcgatgaacc

SEQ ID NO: 382050 - DNA, 75 bp, synthetic construct
  source 1..75: mol_type = other DNA
tcttaattttgttctgtgaaaccggtctggtggtaacgccgtttttaccgggtgattcattgctgtttgttgccg

SEQ ID NO: 382051 - DNA, 75 bp, synthetic construct
  source 1..75: mol_type = other DNA
tgggggcatccatcccccgcagaaggtctggtggatctgccgctgatttgcgactggccaaaccgcccgaaacag

SEQ ID NO: 382052 - DNA, 75 bp, synthetic construct
  source 1..75: mol_type = other DNA
acacccgtaataatgtcaccaccgatgcgggtgccgggtttgagcagacgctgaccggaatgacagtggggatcg

SEQ ID NO: 382053 - DNA, 75 bp, synthetic construct
  source 1..75: mol_type = other DNA
cgctggcaggcggctggttgttgtttgcgtttatcggcacgggcagcagttttctcgcctttgctgcactggcag

SEQ ID NO: 382054 - DNA, 75 bp, synthetic construct
  source 1..75: mol_type = other DNA
attcttgctgcaccggagcaaaatgcgctggcaggcggctggctgctgtttgcgtttatcggtacgggcagcagt

SEQ ID NO: 382055 - DNA, 75 bp, synthetic construct
  source 1..75: mol_type = other DNA
ggagattcgctgctgtttgttgccggggcgctggcctcgctgggaactaacgatctcaatgtccatatgatggta

SEQ ID NO: 382056 - DNA, 75 bp, synthetic construct
  source 1..75: mol_type = other DNA
aacacaatgaagaaaacaaaatcacaattaaaaaccctcaggataatcatttgcgagagcaccccaatatcacat

SEQ ID NO: 382057 - DNA, 75 bp, synthetic construct
  source 1..75: mol_type = other DNA
gggagctttgtgatatctggacaaaaattaaagagacagagttaacaacaaacacaatgaagaaaacgaaatcac

SEQ ID NO: 382058 - DNA, 75 bp, synthetic construct
  source 1..75: mol_type = other DNA
acgatctcgacgccctgcacgcttaccgcgcctgtatgaatatgggcacattaagcggtgcgccgaaagtgcgtg

SEQ ID NO: 382059 - DNA, 75 bp, synthetic construct
  source 1..75: mol_type = other DNA
gaggacaatccgggcttcttccgcgtcagactctttgccgtgccgcatttccagattgaagggatggatatcaac

SEQ ID NO: 382060 - DNA, 75 bp, synthetic construct
  source 1..75: mol_type = other DNA
ctttattccgctctcttactacaagaaccgggattatgcctgcttcttctccgctaactccacccagaaaccggc

SEQ ID NO: 382061 - DNA, 75 bp, synthetic construct
  source 1..75: mol_type = other DNA
gcgcagagggaatctgatattgaaaacgaaaaactccgtaaagagatcgaggatttgagggctgccagcgaatca

SEQ ID NO: 382062 - DNA, 75 bp, synthetic construct
  source 1..75: mol_type = other DNA
ttgatccaccgtcccgacccgctgatggatgccgatgaagtggcggaggcgtttaaacatctacaccagagcggt

SEQ ID NO: 382063 - DNA, 75 bp, synthetic construct
  source 1..75: mol_type = other DNA
gcggtatcgcgacgaccgcgcgtgaagaaaacgtcattggtcattacatcactgaccgcgatcacatcattaaga

SEQ ID NO: 382064 - DNA, 75 bp, synthetic construct
  source 1..75: mol_type = other DNA
cggaagaattaaatgctgcttctatcgaacaagttgtttatgcgtggatattacgtctgccgtcgcagccattgc

SEQ ID NO: 382065 - DNA, 75 bp, synthetic construct
  source 1..75: mol_type = other DNA
tcgcgcctgtatgaatatgggcacattaagcggtgcgccgaaagtgcgcgccatgcagttaattgccgaagcgga

SEQ ID NO: 382066 - DNA, 75 bp, synthetic construct
  source 1..75: mol_type = other DNA
agaaaatgaacaatcgccagattgtcgcgtgctgcgttttccgcccgtcagcactcttttggatgaagatgcccg

SEQ ID NO: 382067 - DNA, 75 bp, synthetic construct
  source 1..75: mol_type = other DNA
tgacattacagcgtaaatatccggatatttcaccatcacaccttgatgtggtgaaaactgaaatcgcaaaagcct

SEQ ID NO: 382068 - DNA, 75 bp, synthetic construct
  source 1..75: mol_type = other DNA
tgccagccggggcagtgtctggcttaacagcaataattcctgtgcaggcaccagcaactgcgaatatagagtaaa

SEQ ID NO: 382069 - DNA, 75 bp, synthetic construct
  source 1..75: mol_type = other DNA
gtgggttatagtgtgtggagattttcagataagggtatctgtacagcagacaaggttatctgtgacacatcagta

SEQ ID NO: 382070 - DNA, 75 bp, synthetic construct
  source 1..75: mol_type = other DNA
gcgaaactgccgatcaccgtggtgcgcaataaagccgatatcaccggcgaaacgctgggaatgagtgaagtgaac

SEQ ID NO: 382071 - DNA, 75 bp, synthetic construct
  source 1..75: mol_type = other DNA
gctcaataacgtaattgccgatctcgacgcggtacgcgccgaagctcgtcagggtagtttgttgcgcgaagggat

SEQ ID NO: 382072 - DNA, 75 bp, synthetic construct
  source 1..75: mol_type = other DNA
gattgatggcacgaatatactgccattccaggctcgttatattgctctcgggcagtccgtagctggtactgcaaa

SEQ ID NO: 382073 - DNA, 75 bp, synthetic construct
  source 1..75: mol_type = other DNA
atcaagaggtatctggtcatggctcttatcaggggcaggctaataatacagtcattaacggtggcagccagacaa

SEQ ID NO: 382074 - DNA, 75 bp, synthetic construct
  source 1..75: mol_type = other DNA
cgcacatggcggtgatctgtcggctgaacaacagggccgcactatcctctttagtgtgcgcctgttgatgaggtg

SEQ ID NO: 382075 - DNA, 75 bp, synthetic construct
  source 1..75: mol_type = other DNA
cctgggtcaggactccgccacaaaggttaactctggtgggcaatatacccttgggcggtcaaaagatgagtttca

SEQ ID NO: 382076 - DNA, 75 bp, synthetic construct
  source 1..75: mol_type = other DNA
gtaccacatttccaggtggaaggtatggatgtcagcctgtcactggtttcgcagatgccgaaggcaaaagcgtaa

SEQ ID NO: 382077 - DNA, 75 bp, synthetic construct
  source 1..75: mol_type = other DNA
gcgtcttttgcctttgcagccaacatggtgcgcagttttgtcaccaacggctggtgtgttcagatccgtgggcct

SEQ ID NO: 382078 - DNA, 75 bp, synthetic construct
  source 1..75: mol_type = other DNA
agaacgtcgcagagagtgtggtatctgaaacgcatgccggtgacagcgtatatgcttccctgtttgaaaaaatta

SEQ ID NO: 382079 - DNA, 75 bp, synthetic construct
  source 1..75: mol_type = other DNA
actgaataactggatccggggtctggtgacggagatgaccgatccgggtgatgaactgcaggcctcacatccgct

SEQ ID NO: 382080 - DNA, 75 bp, synthetic construct
  source 1..75: mol_type = other DNA
tgaaggttgaactgctggatatgtcaaaagaagacctgcgtcaggacttcgaagacagtccggaaatcatccaga

SEQ ID NO: 382081 - DNA, 75 bp, synthetic construct
  source 1..75: mol_type = other DNA
atctgattgaacattttagatatggaaatggcagcaattttcatagccaacaattaaatttatcttttcatgaaa

SEQ ID NO: 382082 - DNA, 75 bp, synthetic construct
  source 1..75: mol_type = other DNA
ttataccgactgttccccaaaggcccggcaaagcaagccaccaaaattgctggcctgccaaaaccagtaaaatgt

SEQ ID NO: 382083 - DNA, 75 bp, synthetic construct
  source 1..75: mol_type = other DNA
gctatctgtaccgactgttcccgaaaggcccggcaaagcaagccaccaaaattgccggcctgccgaaacccgtga

SEQ ID NO: 382084 - DNA, 75 bp, synthetic construct
  source 1..75: mol_type = other DNA
acaattatcgccgccctactcgcttaccgtgtgctgtattactttatcccgctgctgctggcgctgatctgttac

SEQ ID NO: 382085 - DNA, 75 bp, synthetic construct
  source 1..75: mol_type = other DNA
tgatcaacggcattatcggcggaattggcggctggtttggtttcgccaatgcctctctggaaagtatttttggct

SEQ ID NO: 382086 - DNA, 75 bp, synthetic construct
  source 1..75: mol_type = other DNA
ccaggaaaatgggccgtcgagcaggcggcgttaggcgtccataaagtgatgtcctacagtgacgccgggagcgcc

SEQ ID NO: 382087 - DNA, 75 bp, synthetic construct
  source 1..75: mol_type = other DNA
ttgctggttcgatgatgattggttatgccggaatgggcgtaccaattgactacctgttagcggcatcgctgatgg

SEQ ID NO: 382088 - DNA, 75 bp, synthetic construct
  source 1..75: mol_type = other DNA
tctcgtcagttgtggtggggtcaccgtatcccggcatggtacgacgaagcgggtaacgtttatgttggccgcaac

SEQ ID NO: 382089 - DNA, 75 bp, synthetic construct
  source 1..75: mol_type = other DNA
ttaacgactatgaagtcggtaaacgtcacgcgctgccgatgatcaacatcctgacctttgacggtgatatccgtg

SEQ ID NO: 382090 - DNA, 75 bp, synthetic construct
  source 1..75: mol_type = other DNA
ggtcttcgaacgtgatatggaaatgctggcgccgggttatacccaaacgctggagccgcgcgcgcaatacctgta

SEQ ID NO: 382091 - DNA, 75 bp, synthetic construct
  source 1..75: mol_type = other DNA
gctgttttttatcgcggtgattgtgttgctggtggtctacgccaaaaaagtggactgggaagaggtctggaaggt

SEQ ID NO: 382092 - DNA, 75 bp, synthetic construct
  source 1..75: mol_type = other DNA
atgacaaaggtccggtttccgttactaagatcatcgacggcgcagagctgctgatcccgatggctggcctcatca

SEQ ID NO: 382093 - DNA, 75 bp, synthetic construct
  source 1..75: mol_type = other DNA
ctgatcccgatggcaggcctcatcaacaaagaagatgagctggcacgtctggcgaaagaagtggcgaagatcgaa

SEQ ID NO: 382094 - DNA, 75 bp, synthetic construct
  source 1..75: mol_type = other DNA
tgtcattcagcgagacgccgccaaaaagctttatcgaagcggcggcgaacggtgcgatgaccgggttgaaaatcg

SEQ ID NO: 382095 - DNA, 75 bp, synthetic construct
  source 1..75: mol_type = other DNA
ttgccgccgcgctggcgatgccggaaatcccgctgccggtgttctgcctgatggttggtgcggcaattggtctgg

SEQ ID NO: 382096 - DNA, 75 bp, synthetic construct
  source 1..75: mol_type = other DNA
ggcactgatgctgcttctgcgcattatcagttgggacgacattgtcagtaataaagcggcgtggaacgttttctt

SEQ ID NO: 382097 - DNA, 75 bp, synthetic construct
  source 1..75: mol_type = other DNA
tggtgggtatatccatcatcgccattctttcgccgtggctgctgtttagcccggagcagctcgcccagccaggtt

SEQ ID NO: 382098 - DNA, 75 bp, synthetic construct
  source 1..75: mol_type = other DNA
gggaatacctgttactctcccctgactatcctgaagttaacgattctctggctaatttctcaactgaagacatga

SEQ ID NO: 382099 - DNA, 75 bp, synthetic construct
  source 1..75: mol_type = other DNA
ttattgccctgctcgtcggggccggactgttctccgtgggggcgctaatcaacagtacccagagccagtccggtc

SEQ ID NO: 382100 - DNA, 75 bp, synthetic construct
  source 1..75: mol_type = other DNA
tgctgacactggtcgccattatcaggttattggacaagtcttttttgcttcatcagataagttcagtaattcatt

SEQ ID NO: 382101 - DNA, 75 bp, synthetic construct
  source 1..75: mol_type = other DNA
aacacatttatccttatattgggaaaatggcgctcgctgactgcgaaacccgttattggcttgactgctttgaca

SEQ ID NO: 382102 - DNA, 75 bp, synthetic construct
  source 1..75: mol_type = other DNA
agtggatttgcgatctggaagatttcgacgacgacccgcaggcatcgaacgagaaaatcctcgaagcgattttgt

SEQ ID NO: 382103 - DNA, 75 bp, synthetic construct
  source 1..75: mol_type = other DNA
cgacgacgacccgcaggcatccaacgagaaaatcctcgaagcgattttgttagtctggctggacgaagccgagta

SEQ ID NO: 382104 - DNA, 75 bp, synthetic construct
  source 1..75: mol_type = other DNA
ctggcacctgtaacaccgtccaactcggcgcgcggtgcggggattatctatcccatcatccgtaacctgccgccg

SEQ ID NO: 382105 - DNA, 75 bp, synthetic construct
  source 1..75: mol_type = other DNA
gggatttcatttcatgggaatggacagttccacgggggaatagcaaaaacagtaaaaaaattgttcgcccaatac

SEQ ID NO: 382106 - DNA, 75 bp, synthetic construct
  source 1..75: mol_type = other DNA
ggtgggcgtgggagcaagttagagcgcattgttcttgggcgttaccctgacatgtcgttgaaaatggctagggag

SEQ ID NO: 382107 - DNA, 75 bp, synthetic construct
  source 1..75: mol_type = other DNA
cacgctggagacctgggcagacaggacagcacgggcattcaaatccatgtgggattcggtgctggatattggtcg

SEQ ID NO: 382108 - DNA, 75 bp, synthetic construct
  source 1..75: mol_type = other DNA
gcctgctctctgacattgcgcatagttttcacatgcaaaccgctcaggtcggcatcatgttgacaatttatgcat

SEQ ID NO: 382109 - DNA, 75 bp, synthetic construct
  source 1..75: mol_type = other DNA
ttgtgttgtggtgaggatatcacctttaatcaggtggccaaatttactgtgccactacagcctgcacagttcacc

SEQ ID NO: 382110 - DNA, 75 bp, synthetic construct
  source 1..75: mol_type = other DNA
cgcctgatgcggggctatgcggaaggtggttatgtgggcggtgccggaagtccggcgcagatgcggcgggctgaa

SEQ ID NO: 382111 - DNA, 75 bp, synthetic construct
  source 1..75: mol_type = other DNA
aggcttcaggcgcaatgacagactggttaagccgcttcggtaccgcaagaatcacgctgggcgtggatgaagatt

SEQ ID NO: 382112 - DNA, 75 bp, synthetic construct
  source 1..75: mol_type = other DNA
acatggcccgcaaaggggcgcaggatgagattcaggcgcagatgcgtgatggcggcgtattttccggaggaggtg

SEQ ID NO: 382113 - DNA, 75 bp, synthetic construct
  source 1..75: mol_type = other DNA
tgccaccggtacagcactggcaatggtattaggtttacctctcgggcgcattgtggggcagtattttggctggcg

SEQ ID NO: 382114 - DNA, 75 bp, synthetic construct
  source 1..75: mol_type = other DNA
gccggtgtgcgtggtggtgaacagtttgatgccatcaaccagagtgtcgcgcgttttgcgtctgcatccggtgtg

SEQ ID NO: 382115 - DNA, 75 bp, synthetic construct
  source 1..75: mol_type = other DNA
ggcggtacagccattcaggcagctgcggcgaaattccattttgcgaccgggggatttacgggaaccggcggcaaa

SEQ ID NO: 382116 - DNA, 75 bp, synthetic construct
  source 1..75: mol_type = other DNA
atctcagacattgttaacgactggcaggatgcagatacactggaaaaaatactgcttgtcaaactgtatctgaag

SEQ ID NO: 382117 - DNA, 75 bp, synthetic construct
  source 1..75: mol_type = other DNA
cggataaggtcggcagtgcgtttaaatccatgtgggatgcagtgctggatatcgggcgtcctgagtcatctgcag

SEQ ID NO: 382118 - DNA, 75 bp, synthetic construct
  source 1..75: mol_type = other DNA
ttcaaagttgcacaactagaccagaaagaagtatcagaaactgagtatctggcatctgagattaaagatatcaaa

SEQ ID NO: 382119 - DNA, 75 bp, synthetic construct
  source 1..75: mol_type = other DNA
caacacgctgatggcgtcggcaaaaaaggattatgagtcgacgcagaaaaagccgtccggtgtgaaggtgtctgc

SEQ ID NO: 382120 - DNA, 75 bp, synthetic construct
  source 1..75: mol_type = other DNA
ggctgtgcggtttgaacagcagcagagtgcgaagcaggctgcaatcagcgcaaaagcccgggggctgacggaccg

SEQ ID NO: 382121 - DNA, 75 bp, synthetic construct
  source 1..75: mol_type = other DNA
gggggagccattggtgggggggcgtccgcttcttccgggactgccattcaggctgcggcagcgaactttcatttt

SEQ ID NO: 382122 - DNA, 75 bp, synthetic construct
  source 1..75: mol_type = other DNA
acaccagaaacgcctgaatgagctggcggatcaggcggagaaatttgcacagcagcagagtgcaaaacaggctgc

SEQ ID NO: 382123 - DNA, 75 bp, synthetic construct
  source 1..75: mol_type = other DNA
ttacggctatatagtggctacagcgacagtaatcaggacaatccgctgctttatttttgccagcatcgctggcgc

SEQ ID NO: 382124 - DNA, 75 bp, synthetic construct
  source 1..75: mol_type = other DNA
caatgctggtgtaacagtcgttgtaattgggttgacgcgtagttttggaacgaagtgtagattatttgagcatca

SEQ ID NO: 382125 - DNA, 75 bp, synthetic construct
  source 1..75: mol_type = other DNA
ttctaatatgcacgaggtcatcggcacgctctttcgtgctatgaacactccagactatgagcgtgccgcagtagg

SEQ ID NO: 382126 - DNA, 75 bp, synthetic construct
  source 1..75: mol_type = other DNA
gccggagcatcgaataagtccgatttgggcggcgttcttcagaccaataacattcacattttggctagtgaagaa

SEQ ID NO: 382127 - DNA, 75 bp, synthetic construct
  source 1..75: mol_type = other DNA
tataggactaattgttactgaggatgtttcttttgatattggtgatttatatatcttaaagaatgattttttaaa

SEQ ID NO: 382128 - DNA, 75 bp, synthetic construct
  source 1..75: mol_type = other DNA
ttggtgaaacttacatcaaccgtgaaaacttcgaagctatgcaaggcttccacgccggatggcgtaaatccggta

SEQ ID NO: 382129 - DNA, 75 bp, synthetic construct
  source 1..75: mol_type = other DNA
ctcgcaacgacgaagtgcttgaacgcatctacatcggccgtcgctttaagaatgataccgagaggcttgagaagc

SEQ ID NO: 382130 - DNA, 75 bp, synthetic construct
  source 1..75: mol_type = other DNA
ccacgatcttagccgttaccactcccgcgccggcattggcgcggagtactggcgcgactatctaaaattaagcag

SEQ ID NO: 382131 - DNA, 75 bp, synthetic construct
  source 1..75: mol_type = other DNA
gtgaagtctgcctatgacaatgctgaaaaacgtcttcagaaagatcagaacggtgcggatattcctgataaaaga

SEQ ID NO: 382132 - DNA, 75 bp, synthetic construct
  source 1..75: mol_type = other DNA
aacgggcaaatagatttatagaattatataatataaaaagagatatcatgcaggaattaaattatgagttaccag

SEQ ID NO: 382133 - DNA, 75 bp, synthetic construct
  source 1..75: mol_type = other DNA
tgaacgccgtagaaattgaacaagccatcacggatcttgcagagcaaccctttgatcccatagagtttccttatg

SEQ ID NO: 382134 - DNA, 75 bp, synthetic construct
  source 1..75: mol_type = other DNA
ggcttggggagctaaggagtttatttctggaactcctagagcttgcctgtggttaaataaagacagtgctaaaaa

SEQ ID NO: 382135 - DNA, 75 bp, synthetic construct
  source 1..75: mol_type = other DNA
cctttggtcgttgatttttgcagccaagcatgaaatatcctttgcttatacgtccttcaaatgggcaaatcttgc

SEQ ID NO: 382136 - DNA, 75 bp, synthetic construct
  source 1..75: mol_type = other DNA
atgagtcgtcgcgcaggtacgccaacagcaaaaaaagtgacgcagttagtgaacgtggaagagcacgttgaaggg

SEQ ID NO: 382137 - DNA, 75 bp, synthetic construct
  source 1..75: mol_type = other DNA
ctgttcgtcagccgccgttaccgccgccaggtggagactttgccatcgcgttgggctggcgcttgggaaggcgta

SEQ ID NO: 382138 - DNA, 75 bp, synthetic construct
  source 1..75: mol_type = other DNA
ctgttcgtcagccgccgctaccgccgcctggtggagacttcgctattgcgctgggtctggcgcttggggagacgc

SEQ ID NO: 382139 - DNA, 75 bp, synthetic construct
  source 1..75: mol_type = other DNA
tgttaccgtggagtcgcgaactgccgcagcgccatcacatcatgttggcgtttcccgccagtcgcacattacagc

SEQ ID NO: 382140 - DNA, 75 bp, synthetic construct
  source 1..75: mol_type = other DNA
gcgttattgataaaaggtcgtgcagcacgatggccgatgagtctgcttctttggggatgcacttttggtcacagt

SEQ ID NO: 382141 - DNA, 75 bp, synthetic construct
  source 1..75: mol_type = other DNA
tccggttaaatctggcgtgcccacggactatgctgacagcagggatgaaaagaatttcacaggtactgcggacac

SEQ ID NO: 382142 - DNA, 75 bp, synthetic construct
  source 1..75: mol_type = other DNA
ctgcgcaaagcaaagaactggcagtgctgcttaccctggcagaacggttgcgtgttcacgttagcgcaatcaccc

SEQ ID NO: 382143 - DNA, 75 bp, synthetic construct
  source 1..75: mol_type = other DNA
ctggcgcaggaaagccgcgagcgccatcagatagtcgaaaatttcttgttggtgttgggcgtcagcccggaaatt

SEQ ID NO: 382144 - DNA, 75 bp, synthetic construct
  source 1..75: mol_type = other DNA
gcccgtcgtgacgcggaaggtatggaacaccatgtcagtgaagagacgctggacgcctttcgtttgtttacccag

SEQ ID NO: 382145 - DNA, 75 bp, synthetic construct
  source 1..75: mol_type = other DNA
tgagctgatttctgatttgattagagaagtgggagaagcacgtcaggttgatatggccgcccgtctgggcgtctc

SEQ ID NO: 382146 - DNA, 75 bp, synthetic construct
  source 1..75: mol_type = other DNA
agctggatatggatccggactccctgcgcttcgattacagcgaagactcactcagtcccgcctataacgtgactg

SEQ ID NO: 382147 - DNA, 75 bp, synthetic construct
  source 1..75: mol_type = other DNA
ctgtgcgtcagccgccactaccgccaccaggtggaaactttgctatcgcgctggggctggcgcttggggaggggt

SEQ ID NO: 382148 - DNA, 75 bp, synthetic construct
  source 1..75: mol_type = other DNA
gcccgtcgcgacgcggaaggcatggagcaccatgttagtgaagagacgctggatgcctttcgtttgtttacccag

SEQ ID NO: 382149 - DNA, 75 bp, synthetic construct
  source 1..75: mol_type = other DNA
ctcaacgaatccttgctggagtctgaattgttcggtcacgaaaaaggggcgtttaccggggccgacaaacgccgg

SEQ ID NO: 382150 - DNA, 75 bp, synthetic construct
  source 1..75: mol_type = other DNA
ggtagaagcactgaagaccggggcactggattatctcattaagccgctggatttcgataacttgcaggcgacgct

SEQ ID NO: 382151 - DNA, 75 bp, synthetic construct
  source 1..75: mol_type = other DNA
atcttgccgctgaggtaaaggccgggcgttttcgtcaggatctctactatcgcctgaatgtggtggcgattgaag

SEQ ID NO: 382152 - DNA, 75 bp, synthetic construct
  source 1..75: mol_type = other DNA
ctaactaccacgctaccaagccactcttttttgaccatatagatctgagcacccgcccgttgattgatgtgtcca

SEQ ID NO: 382153 - DNA, 75 bp, synthetic construct
  source 1..75: mol_type = other DNA
gcgtatgggccggtgatgtggaaacgccttcggtagaaacaccgtctgaaggcactaaattttttgggtttgata

SEQ ID NO: 382154 - DNA, 75 bp, synthetic construct
  source 1..75: mol_type = other DNA
tgccatttgtgtcggtgcggcactgattgtgctggaaggttttttgccttctaaaagcgaaaaaacaataataaa

SEQ ID NO: 382155 - DNA, 75 bp, synthetic construct
  source 1..75: mol_type = other DNA
gggtatgggcgggtggcattgaaacaccttcggtggaaaccccatcggaaggctcaaaattttttggttttgata

SEQ ID NO: 382156 - DNA, 75 bp, synthetic construct
  source 1..75: mol_type = other DNA
attgaaacaccttcggtggaaactccatcggaaggttcaaaattttttggttttgatatggataacgaattcatc

SEQ ID NO: 382157 - DNA, 75 bp, synthetic construct
  source 1..75: mol_type = other DNA
atttcttgcacatgttgatctgatgacccggccgcttattgatgttgcggctgccaccagagggctgattactgc

SEQ ID NO: 382158 - DNA, 75 bp, synthetic construct
  source 1..75: mol_type = other DNA
tgattctggcggcactggagaaaacgggcggcaacaaaaccgaagccgcccgtcagttagggatcacgcgcaaaa

SEQ ID NO: 382159 - DNA, 75 bp, synthetic construct
  source 1..75: mol_type = other DNA
ttctcgatgaaattggcgatatctcgccgatgatgcaggttcgtctgctgcgtgcgattcaggagcgcgaagttc

SEQ ID NO: 382160 - DNA, 75 bp, synthetic construct
  source 1..75: mol_type = other DNA
ccgttggtggaagtggaaaaagaggtgattctggcggcgctggagaaaacgggcggcaacaaaaccgaagccgcc

SEQ ID NO: 382161 - DNA, 75 bp, synthetic construct
  source 1..75: mol_type = other DNA
ggatatctcacagtaaaagccgccggggtgtgggcgggtggcattgaaacaccttcggtggaaaccccatcggaa

SEQ ID NO: 382162 - DNA, 75 bp, synthetic construct
  source 1..75: mol_type = other DNA
aaagaggcagccacgaaacggcagttatctgagcaggaaaaatccctgctgacccatgagaaagagacgctggag

SEQ ID NO: 382163 - DNA, 75 bp, synthetic construct
  source 1..75: mol_type = other DNA
aagccggtgaactggctaccagggaccgggccgaacgggacgcatcacagctgaagtataccggagaggcgcaga

SEQ ID NO: 382164 - DNA, 75 bp, synthetic construct
  source 1..75: mol_type = other DNA
ttttaatcagaacaacaacgtggtgattcagaatgatgccacgaacggcagtatcggtccgcaggcactggtgct

SEQ ID NO: 382165 - DNA, 75 bp, synthetic construct
  source 1..75: mol_type = other DNA
cgcgtgttaacgtggccaaggcctatcaggctcccatcacctttaccgctgcctctaacgctactgaatgcgaac

SEQ ID NO: 382166 - DNA, 75 bp, synthetic construct
  source 1..75: mol_type = other DNA
ggcaaagcggaccgttattactctgccaaagtgtctttccagaaggtgcctaagaccgaaatcaacgccgtggaa

SEQ ID NO: 382167 - DNA, 75 bp, synthetic construct
  source 1..75: mol_type = other DNA
atatgatccggactcaggttttaccgtactcagcgatgatgtttatcgattggtcttaaaagcgcagatagcgat

SEQ ID NO: 382168 - DNA, 75 bp, synthetic construct
  source 1..75: mol_type = other DNA
gtcaggcgctggctgcacaaaaagccgggatttccgtcgggcagtataaagcggccatgcgaaccctgcccgcac

SEQ ID NO: 382169 - DNA, 75 bp, synthetic construct
  source 1..75: mol_type = other DNA
acagggaaggcattcaaatcgatgtgggatgccattctggatatcggtcgtccggaatcctcagcggatatgctt

SEQ ID NO: 382170 - DNA, 75 bp, synthetic construct
  source 1..75: mol_type = other DNA
tctaaattctttgggtttgatatggataacgaatacatcggcgggttcgatgttggagcatgggggacaatactc

SEQ ID NO: 382171 - DNA, 75 bp, synthetic construct
  source 1..75: mol_type = other DNA
catcaaccagagtgtcgcgcgttttgcttctgcatccggtgtggaggtggataaagtcgctgaagccttcgggaa

SEQ ID NO: 382172 - DNA, 75 bp, synthetic construct
  source 1..75: mol_type = other DNA
cgctggaaaaacacagcggtgcgaatgagaaaatcagccagcagcgtcgcgatttatggaaagcggaaaatcagt

SEQ ID NO: 382173 - DNA, 75 bp, synthetic construct
  source 1..75: mol_type = other DNA
actggcaatccggggccaaatccgcatgggcagattatgttgattccgcttcagatgcttatggccagatgaagt

SEQ ID NO: 382174 - DNA, 75 bp, synthetic construct
  source 1..75: mol_type = other DNA
agccatctgctgtgaaggtgtctgccggtgagcgtcaggaagaccgggcgcatgcatccatgctggcgcttgaaa

SEQ ID NO: 382175 - DNA, 75 bp, synthetic construct
  source 1..75: mol_type = other DNA
cccgcggcctcaccgaccgtcaggcgcagcgggagtcggaagagcagcgccttcgtgacgtgtacggtgataatc

SEQ ID NO: 382176 - DNA, 75 bp, synthetic construct
  source 1..75: mol_type = other DNA
tataaagccgccatgcgtatgctacccatgcagttcaccgacgtggccacgcagcttgccggtggtcagaatccc

SEQ ID NO: 382177 - DNA, 75 bp, synthetic construct
  source 1..75: mol_type = other DNA
gctttcggaaagctgaccactgacccgacgtcgggactgatggcgatggcgcgccagttccgtaacgtgacggca

SEQ ID NO: 382178 - DNA, 75 bp, synthetic construct
  source 1..75: mol_type = other DNA
gagctggcacagcaggcggcgcggtttgaacagcagcagagcgcgaagcaggcggcaatcagcgcaaaagcccgc

SEQ ID NO: 382179 - DNA, 75 bp, synthetic construct
  source 1..75: mol_type = other DNA
caatgaggaggcccagcttcttcagggctggaaaaatggtggcggttcggagaacgacgctggttatcagaatga

SEQ ID NO: 382180 - DNA, 75 bp, synthetic construct
  source 1..75: mol_type = other DNA
taaaccaagatgatgtaaaagacaacaaaaatatgccacctcatatatgcggcattattatgccaattgcggaca

SEQ ID NO: 382181 - DNA, 75 bp, synthetic construct
  source 1..75: mol_type = other DNA
ggcgatgctgaccggtgcagaggcagactggcggggattcacccgttcggtgctgtccatgatgacagaaatcct

SEQ ID NO: 382182 - DNA, 75 bp, synthetic construct
  source 1..75: mol_type = other DNA
gcaagccacggcccaggcggggcagggagagcgttacgaccagatactcgcgtttgcttatcccgacaacagcct

SEQ ID NO: 382183 - DNA, 75 bp, synthetic construct
  source 1..75: mol_type = other DNA
tgacccgttacgcgacgattcttaatcaggttttgcctgtaccgacgcaagttgccagtgggcaatgtgtactgg

SEQ ID NO: 382184 - DNA, 75 bp, synthetic construct
  source 1..75: mol_type = other DNA
gcaatactggcaacagcgtcaggcacctgcgtggttagcgtctcttactacgctgaagccagaaacctcggtaac

SEQ ID NO: 382185 - DNA, 75 bp, synthetic construct
  source 1..75: mol_type = other DNA
cggtactaacccgttatgcgacggtgcttaatcgggttttgccagtgccgacgcaggttgccagtgggcaatgtg

SEQ ID NO: 382186 - DNA, 75 bp, synthetic construct
  source 1..75: mol_type = other DNA
tttagtctcaggtttcccctataccgatcggcagcagaaacggctgtttattcgtaacttctttacgcttcagga

SEQ ID NO: 382187 - DNA, 75 bp, synthetic construct
  source 1..75: mol_type = other DNA
ggagagcgttacgaccagatactcgcctttgcttatcccgacaacagccttagccgctggggagcaccacgctct

SEQ ID NO: 382188 - DNA, 75 bp, synthetic construct
  source 1..75: mol_type = other DNA
caccggaagtccggcgcaaatgcggcgttcagagggtatcagatttgagcagaacaacaacgtggtgattcagaa

SEQ ID NO: 382189 - DNA, 75 bp, synthetic construct
  source 1..75: mol_type = other DNA
cctgacacgctcactacgccgttagggagcttatggaagctgtatgtttatgcctggcttgaggatactcatcag

SEQ ID NO: 382190 - DNA, 75 bp, synthetic construct
  source 1..75: mol_type = other DNA
tgtggaagaaaggaagctccgcaattccgggcaaaaccgcctcgacgttcaacattccatctgtggcatccggtg

SEQ ID NO: 382191 - DNA, 75 bp, synthetic construct
  source 1..75: mol_type = other DNA
tcacgcgcgacgaattactgtcgcgctattttccgcagtatcatcccgtcgcgacgtttaatcatgggcttagcg

SEQ ID NO: 382192 - DNA, 75 bp, synthetic construct
  source 1..75: mol_type = other DNA
agtgggttggctgcgaatgttaaaacgtctgcgcaaagcgcgggaaccacggcctttacgcttaagtccattgca

SEQ ID NO: 382193 - DNA, 75 bp, synthetic construct
  source 1..75: mol_type = other DNA
gtgccgtttcgcagcaataatcccatcatacgcgacgaattgctgtcgtgctttttcccgcagtttcatcccgtc

SEQ ID NO: 382194 - DNA, 75 bp, synthetic construct
  source 1..75: mol_type = other DNA
tcacgcgcgacgaattattgtcgcgctatttcccgcagtatcatcccgtcgcgacgtttaatcatggacttagcg

SEQ ID NO: 382195 - DNA, 75 bp, synthetic construct
  source 1..75: mol_type = other DNA
tcattgactgggagtatgctggcgatggcgatatcgcgctggaactggcggcggtgtgggtggaaaatactgagc

SEQ ID NO: 382196 - DNA, 75 bp, synthetic construct
  source 1..75: mol_type = other DNA
tcacgcgcgacgaattgctgtcgcgctttttcccgcagtttcatcccgtcacgacgtttaatagtgggcttagtg

SEQ ID NO: 382197 - DNA, 75 bp, synthetic construct
  source 1..75: mol_type = other DNA
tgtcttatctctccgcgccgctgtggtttatgttcctcgcgctctctactgcattgcaggtagtgcatgcgttga

SEQ ID NO: 382198 - DNA, 75 bp, synthetic construct
  source 1..75: mol_type = other DNA
agcacgtctggaacaagcctggccagattcactcgctgatggacagttaattcaagacgacgaagggcgcgatca

SEQ ID NO: 382199 - DNA, 75 bp, synthetic construct
  source 1..75: mol_type = other DNA
cgcgcggtgttcctgacaggcgtaatgtcttatctttccgcgccgctgtggtttatgttcctggcgctctctacc

SEQ ID NO: 382200 - DNA, 75 bp, synthetic construct
  source 1..75: mol_type = other DNA
ccgggcaggaaaaatccctgctggcccatgagaaagagacgctggagtacaaacgccagctggctgagctgggcg

SEQ ID NO: 382201 - DNA, 75 bp, synthetic construct
  source 1..75: mol_type = other DNA
ctgccttatatgctgcaaaccggcattctgatcctcttcgctgttcttttctgttgggtgtctgccgggttctgg

SEQ ID NO: 382202 - DNA, 75 bp, synthetic construct
  source 1..75: mol_type = other DNA
attttgcttatctggtgcaaaggaacgaaagaatatggcggcttctggcgcgttacattatcgttgctgctggaa

SEQ ID NO: 382203 - DNA, 75 bp, synthetic construct
  source 1..75: mol_type = other DNA
ccgcatgatcctgatgcgccgcagttcgcgtttttgcgccagtatcgggctttatcgcaattacccgccagcctt

SEQ ID NO: 382204 - DNA, 75 bp, synthetic construct
  source 1..75: mol_type = other DNA
atgaataaccacgccactgtgcaatcttccgcgccggtttccaccgcaccgctacttcaggtgagcggcgcacta

SEQ ID NO: 382205 - DNA, 75 bp, synthetic construct
  source 1..75: mol_type = other DNA
gcgcctcgctgggcgcgcgtgaacgggtcgtagtggtcgatgtggaagatgcgcggctggtactcggcgttaccg

SEQ ID NO: 382206 - DNA, 75 bp, synthetic construct
  source 1..75: mol_type = other DNA
cttccgcgccggtttctgctgcgccactgctgcaggtcagcggcgcactcatcgccattattgccctgatcctcg

SEQ ID NO: 382207 - DNA, 75 bp, synthetic construct
  source 1..75: mol_type = other DNA
atggatggtgccgaacaaactccgggaggcggcgtgaagtggcgttactcattgcgctggaaattgccttctccc

SEQ ID NO: 382208 - DNA, 75 bp, synthetic construct
  source 1..75: mol_type = other DNA
tgcaccggcatccgttatgtcacgctgggttgccggagcagggtatgcggtctgtctggattttatttctgaccg

SEQ ID NO: 382209 - DNA, 75 bp, synthetic construct
  source 1..75: mol_type = other DNA
atgattgtgccactgactcagcacctgtttgagttgattgcccgcgatgccgcagaattagaaaaagtactgccg

SEQ ID NO: 382210 - DNA, 75 bp, synthetic construct
  source 1..75: mol_type = other DNA
tctcggagaagaagcagaacggaatataccgtatgatccggagcccgtcggccgctacaacgttgcgcccggaac

SEQ ID NO: 382211 - DNA, 75 bp, synthetic construct
  source 1..75: mol_type = other DNA
tcgggactgatggcgatggcgcgccagttccgtaacgtgacggcagagcagattgcgtatgttgcacagctgcag

SEQ ID NO: 382212 - DNA, 75 bp, synthetic construct
  source 1..75: mol_type = other DNA
gcgccagttccgtaacgtgacggcagagcagattgcgtatgttgcacagctgcagcgttccggagacgaggccgg

SEQ ID NO: 382213 - DNA, 75 bp, synthetic construct
  source 1..75: mol_type = other DNA
agacgaacagtgaaatacgtcagaaagatgcttctgccattcatcgtgagctgcatgataagtgggtgcgtaatt

SEQ ID NO: 382214 - DNA, 75 bp, synthetic construct
  source 1..75: mol_type = other DNA
tcatcagcaacgccaggggctgccgatttatttgtgatggccaaagatattgctgccagtgccagcgtaccggaa

SEQ ID NO: 382215 - DNA, 75 bp, synthetic construct
  source 1..75: mol_type = other DNA
cagtctttccgccgaagatttcacatggcaccccgtcagccgggctgttggcaatcccgggaaccagggcaggga

SEQ ID NO: 382216 - DNA, 75 bp, synthetic construct
  source 1..75: mol_type = other DNA
tccctggttcttatgaagaactgccgcctaacctgcttgatgagctaaaacgcgatcgtcgctggtgccacggta

SEQ ID NO: 382217 - DNA, 75 bp, synthetic construct
  source 1..75: mol_type = other DNA
catataacatagaaagatattttgaaataagattaattgaaagtgagatagactcgattaatgatgaaatattaa

SEQ ID NO: 382218 - DNA, 75 bp, synthetic construct
  source 1..75: mol_type = other DNA
gattggcgctatagttgttctatacatcttcaaaaaagttaaaagttatataaaggggcataggctatgcccctc

SEQ ID NO: 382219 - DNA, 75 bp, synthetic construct
  source 1..75: mol_type = other DNA
agaattgtcagtctaagtatgaaaattgttactacgacaacgttgaacagagttggatcccggtcgtttctggat

SEQ ID NO: 382220 - DNA, 75 bp, synthetic construct
  source 1..75: mol_type = other DNA
agcgaaagccatgaccgtggcgattcgcacttttttacagcaaaacgccaatcgggaaggcgattgcctgaccat

SEQ ID NO: 382221 - DNA, 75 bp, synthetic construct
  source 1..75: mol_type = other DNA
gttgctagctttatcgctgatccatcgactatcgccgccaccaacagtgatttaagtaccttaaaggcaacggtt

SEQ ID NO: 382222 - DNA, 75 bp, synthetic construct
  source 1..75: mol_type = other DNA
tgtttgcggtctgccgtttagtctcaggtttcccctataccgatcggcagcagaaacggctgtttattcgtaact

SEQ ID NO: 382223 - DNA, 75 bp, synthetic construct
  source 1..75: mol_type = other DNA
agcagtcgttgctgcggttgatgcactcggcctgctggaagaaattaaaccgcacgacctgaccgttccttacgg

SEQ ID NO: 382224 - DNA, 75 bp, synthetic construct
  source 1..75: mol_type = other DNA
gggtaacgtttatgttggccgcaacgaagacgaagtgcgtaaagaaaataacctcggtgctgatgttgccctgcg

SEQ ID NO: 382225 - DNA, 75 bp, synthetic construct
  source 1..75: mol_type = other DNA
cttcctgcaaacgctggcgcgtctggaaagtatcaccgtgctgcctgccgatgataaaggtccggtttccgttac

SEQ ID NO: 382226 - DNA, 75 bp, synthetic construct
  source 1..75: mol_type = other DNA
ctttaccaccaaaaaagcgtcaaccgtttcgcgcggcggctatggtcgttcttccagcgcccgtgggcattgggg

SEQ ID NO: 382227 - DNA, 75 bp, synthetic construct
  source 1..75: mol_type = other DNA
acgatgcgtctcaggttgatgaggcggcgctggctgacaccgagtggctgaaacaggcgatcattgcggtgcgta

SEQ ID NO: 382228 - DNA, 75 bp, synthetic construct
  source 1..75: mol_type = other DNA
tctcgtcagctgtggtggggtcaccgtatcccggcatggtatgacgaagcgggtaacgtttatgttggccgcaac

SEQ ID NO: 382229 - DNA, 75 bp, synthetic construct
  source 1..75: mol_type = other DNA
tcaatgggcgctatcgtgtgacgtttgccaatggtaaccacatgacatttgtcagccacggtgagacaacgttac

SEQ ID NO: 382230 - DNA, 75 bp, synthetic construct
  source 1..75: mol_type = other DNA
agacaatcgcaatccgctcaaacaaatcttttgaggaaatcaattccacacgaatttgctgaaattctccttatg

SEQ ID NO: 382231 - DNA, 75 bp, synthetic construct
  source 1..75: mol_type = other DNA
ccactacgagatttgcagcggtttttgcgcatctcgaacgcctgagcttttcttacttctgtccaatggaaacag

SEQ ID NO: 382232 - DNA, 75 bp, synthetic construct
  source 1..75: mol_type = other DNA
cctacaaagaaaagaaagcaaaagccgcagaactagccaaactacgccgccagcaaaaagcagcattaaccagaa

SEQ ID NO: 382233 - DNA, 75 bp, synthetic construct
  source 1..75: mol_type = other DNA
actggtcgataccgatcgtttccttgagatgaaccgtcaacgttctctcgacgatggctttatgcacgcggtgtt

SEQ ID NO: 382234 - DNA, 75 bp, synthetic construct
  source 1..75: mol_type = other DNA
cgcctgatggaagccaatccgaatgccgggattatccagtcttcaccgaaagcgtccggtatggatacgctgtat

SEQ ID NO: 382235 - DNA, 75 bp, synthetic construct
  source 1..75: mol_type = other DNA
ctaacaagatttataaaacctggcatgttcttcccctggattacgaaaatctaaatttcggtagtatactaacag

SEQ ID NO: 382236 - DNA, 75 bp, synthetic construct
  source 1..75: mol_type = other DNA
tgatatccctagcccgtctatcaccgacgtccccgttggggtgaaattcttcggcatgaaggcaccacatcaggg

SEQ ID NO: 382237 - DNA, 75 bp, synthetic construct
  source 1..75: mol_type = other DNA
atgtctgtggtaattagtgatgcatggcgtcagcgttttggtggcacagcgcgtctgtatggtgaaaaagcattg

SEQ ID NO: 382238 - DNA, 75 bp, synthetic construct
  source 1..75: mol_type = other DNA
tattggcgttggtaactctgccaacgcttgcggaggagacgccgttacaactggcgctgcgcggtgcgcagcacg

SEQ ID NO: 382239 - DNA, 75 bp, synthetic construct
  source 1..75: mol_type = other DNA
gataccgccgtgcttaaccgctggctggacgttaccgaaaaagataaaaatagccgtagtgccacgttctacaac

SEQ ID NO: 382240 - DNA, 75 bp, synthetic construct
  source 1..75: mol_type = other DNA
atgacgataccgccgtgcttaaccgctggctggacgttaccgaaaaaagataaaaatagccgtagtgccacgttc

SEQ ID NO: 382241 - DNA, 75 bp, synthetic construct
  source 1..75: mol_type = other DNA
ggtgccagaacacggcggcgcgctgaagggcgacagaatgcaagtatctggcttacgtgatatccctagcccgtc

SEQ ID NO: 382242 - DNA, 75 bp, synthetic construct
  source 1..75: mol_type = other DNA
acccgcctgacatcgcccaacgttgaggttaaagcccaacacgtcaccgtgacttccgacactgttgatgtgaaa

SEQ ID NO: 382243 - DNA, 75 bp, synthetic construct
  source 1..75: mol_type = other DNA
gtggcaaataacgaaggaacctggaacctcggaagtagtagtgagggtaacaacaccgggatgctggaagttaat

SEQ ID NO: 382244 - DNA, 75 bp, synthetic construct
  source 1..75: mol_type = other DNA
aatacgggattgctcgtctggagggtaatggttcagataccgcaggcgataacggagtgacaggcggttacagcc

SEQ ID NO: 382245 - DNA, 75 bp, synthetic construct
  source 1..75: mol_type = other DNA
agagccatcctcgcaaatgatcatcagccagaatacggtctctactaatacgcagggtgtagccgaggtcaccat

SEQ ID NO: 382246 - DNA, 75 bp, synthetic construct
  source 1..75: mol_type = other DNA
gaagtccggcgcaaatgcggcgttcagagggtatcagatttgagcagaacaacaacgtggtgattcagaacgacg

SEQ ID NO: 382247 - DNA, 75 bp, synthetic construct
  source 1..75: mol_type = other DNA
atggaagactatggcagggatatatcgctgcattttgctgttgatagttgggcttttttctcttcgttgagttat

SEQ ID NO: 382248 - DNA, 75 bp, synthetic construct
  source 1..75: mol_type = other DNA
ctgagtctgggagctaataccagtttgttggggcgaagttattccggtagtagtggcggtggcgcaggtggtggt

SEQ ID NO: 382249 - DNA, 75 bp, synthetic construct
  source 1..75: mol_type = other DNA
tgctgttgatagctgggctgcttttctcatcgctgggttacgcgaaaaacatggagattccttatcatgaagaag

SEQ ID NO: 382250 - DNA, 75 bp, synthetic construct
  source 1..75: mol_type = other DNA
gaacgcgaataataatggacggttcattaatagtggtacagttgatgttactgcaaaagcgctagcgaccagcgg

SEQ ID NO: 382251 - DNA, 75 bp, synthetic construct
  source 1..75: mol_type = other DNA
atccgggatgaggctaaaaataatgtgatcactgtttctcaggtgagtggcatgacggaggggaccggtgtgacg

SEQ ID NO: 382252 - DNA, 75 bp, synthetic construct
  source 1..75: mol_type = other DNA
ctggcgaacctgatgctgtgggatgtggatacccggcgtggcgtggtgaacgtccggcagggtaaaggccacagg

SEQ ID NO: 382253 - DNA, 75 bp, synthetic construct
  source 1..75: mol_type = other DNA
gaaggctgtttatgacgtagcccgtaaggcggcaatggatgttgtgaccgggcagatgcgcgatggtggtctgtt

SEQ ID NO: 382254 - DNA, 75 bp, synthetic construct
  source 1..75: mol_type = other DNA
gcagcgccattggtggtgctttcggtggtggcgcatccgcttccacggggacggccattcaggctgcggcggcga

SEQ ID NO: 382255 - DNA, 75 bp, synthetic construct
  source 1..75: mol_type = other DNA
cagtgccggtgtgcgtggtggtgaacagtttgatgccattaaccagagtgtggcacgttttgcgtctgcctccgg

SEQ ID NO: 382256 - DNA, 75 bp, synthetic construct
  source 1..75: mol_type = other DNA
gcagcgccattggtggtgctttcggtggtggggcgtctgcctccacggggacggccattgaggctgcggcggcga

SEQ ID NO: 382257 - DNA, 75 bp, synthetic construct
  source 1..75: mol_type = other DNA
aaccagccggattggcgtcggcaacctgtatcgtctgatgcgcgggtatgcggaaggtggttatgtgggcggtgc

SEQ ID NO: 382258 - DNA, 75 bp, synthetic construct
  source 1..75: mol_type = other DNA
cgttctgaaagcgcccgccgacaactcccattattctctatcactgatgaacctgaagcagtaaaatcaaccctg

SEQ ID NO: 382259 - DNA, 75 bp, synthetic construct
  source 1..75: mol_type = other DNA
acaggtaaccccaacgaaaacaatgtgctggcgcacacaatctatatttacaaaggagataaggtggtcgcaaac

SEQ ID NO: 382260 - DNA, 75 bp, synthetic construct
  source 1..75: mol_type = other DNA
gatgcaaaaggcaacctgctcaatgacgtcaaggtcactttcaatgttaattcagcagcagcgaaactgaaccgc

SEQ ID NO: 382261 - DNA, 75 bp, synthetic construct
  source 1..75: mol_type = other DNA
cgagccctggcggaaagtgctggtatgagcagtcgtgcagcacaacgccgcaacgaggaggcccagcttcttcag

SEQ ID NO: 382262 - DNA, 75 bp, synthetic construct
  source 1..75: mol_type = other DNA
ggcattgccagagcgaatgaagagaatgcctcccgtgaagcggtcgcagagtccgaacgtcagaaatatgccgcg

SEQ ID NO: 382263 - DNA, 75 bp, synthetic construct
  source 1..75: mol_type = other DNA
gttaagcgggtaagaaaagaagaactggatcggatgcagggcaagctatttgctgatgaacccgatgtagatacg

SEQ ID NO: 382264 - DNA, 75 bp, synthetic construct
  source 1..75: mol_type = other DNA
ttcgcgttatctggctggttgcaggtatcaccgatatgcgaaatggctttaacggcctggcatcaaaagttcaga

SEQ ID NO: 382265 - DNA, 75 bp, synthetic construct
  source 1..75: mol_type = other DNA
ccagggcgacgccacgctttcagaatttaataaaacgctggtcctttccggcaatcaggccggactgactgccga

SEQ ID NO: 382266 - DNA, 75 bp, synthetic construct
  source 1..75: mol_type = other DNA
tggcgcttgaaaccgagctccggacgctggaaaaacacagcggtgcgaatgagaaaatcagccagcagcgtcgcg

SEQ ID NO: 382267 - DNA, 75 bp, synthetic construct
  source 1..75: mol_type = other DNA
ggatctgatgcaggcgcagcaggttcgtcgctggccggggagcccactgccgttagtggacgttgatgcactgga

SEQ ID NO: 382268 - DNA, 75 bp, synthetic construct
  source 1..75: mol_type = other DNA
aaataactggctggcaggtgattgcgagctaccgcagatgccttccgtcgcctttggtgtgagctgtgcgctggc

SEQ ID NO: 382269 - DNA, 75 bp, synthetic construct
  source 1..75: mol_type = other DNA
ccaaatacgttaacccggattatcgccaccgcatcgcgtttctcgaagagccgtgcaaaacccgcgatgattcgc

SEQ ID NO: 382270 - DNA, 75 bp, synthetic construct
  source 1..75: mol_type = other DNA
gaggccacgctggaatgcaaatttccggccggtggtgaaggctcgccggcaacggatgaaatcaacagctggaac

SEQ ID NO: 382271 - DNA, 75 bp, synthetic construct
  source 1..75: mol_type = other DNA
ttcgacacgaggaaccgcgaaatgtttcttttccgcaccattgatgaactggagcaagcaaccgccagcggtcga

SEQ ID NO: 382272 - DNA, 75 bp, synthetic construct
  source 1..75: mol_type = other DNA
cccagcaaactaaaatactggactcttgaacatcgtcttttaaatcagcgagtgagaatatctctggaaagtaaa

SEQ ID NO: 382273 - DNA, 75 bp, synthetic construct
  source 1..75: mol_type = other DNA
tggcgttcatccgtgtcaatggcatggagcttgaaacgatggaaggcgcctccttcacgccttccggcatcaccc

SEQ ID NO: 382274 - DNA, 75 bp, synthetic construct
  source 1..75: mol_type = other DNA
gaaggcctggagcagtgaaccggcctcgcttgacggtggcggggagatctccgtgaagttcgccagcgccaccag

SEQ ID NO: 382275 - DNA, 75 bp, synthetic construct
  source 1..75: mol_type = other DNA
gaaggcctggagcagtgaaccggcctcgcttgacggtggcggtgatatttccgcgaagttcgccagcgccaccag

SEQ ID NO: 382276 - DNA, 75 bp, synthetic construct
  source 1..75: mol_type = other DNA
gatcctcaaacttgccgatatgccgggcgagaaagtggcgaaggtcaaagtgggattgtacgaagcggtgcgcga

SEQ ID NO: 382277 - DNA, 75 bp, synthetic construct
  source 1..75: mol_type = other DNA
ggcgtcagcgttttggcggcactgcgcgtctgtatggtgagaaagccttgcaactatttgccgatgcacatatct

SEQ ID NO: 382278 - DNA, 75 bp, synthetic construct
  source 1..75: mol_type = other DNA
aaaaaacagtaaagggaagctcggcgtggactgcgtgttctctaccgaagcactggtatacccgcagtcagacgg

SEQ ID NO: 382279 - DNA, 75 bp, synthetic construct
  source 1..75: mol_type = other DNA
ttcctgggcggcggaagctctggcgcgcacagggattggcgcaataacgcttattgatatggatgacgtgtgtgt

SEQ ID NO: 382280 - DNA, 75 bp, synthetic construct
  source 1..75: mol_type = other DNA
catctctggaagcttcccgtcaccccactactgactttctctgtgaatggccagtccgttcacgtgacaccagaa

SEQ ID NO: 382281 - DNA, 75 bp, synthetic construct
  source 1..75: mol_type = other DNA
tgccggccccacaccaccggcacgggtggcgcttcatgatgaaacgctgcaggcctttctggacgggacaccgcc

SEQ ID NO: 382282 - DNA, 75 bp, synthetic construct
  source 1..75: mol_type = other DNA
ctgccgacggaacccgcctgtggaagctgcccgtcaccccgttgttaacgttttccgttgacggtcgcaccgtca

SEQ ID NO: 382283 - DNA, 75 bp, synthetic construct
  source 1..75: mol_type = other DNA
tcaaacccacgctcacgggcagcctggataaagtacgcgagcaagtgcaggcggcgcatgcgctggggctgacgg

SEQ ID NO: 382284 - DNA, 75 bp, synthetic construct
  source 1..75: mol_type = other DNA
ggcagatccccatggacgcggggggggttctgcgcgacaggcggttaaaaacccgcgacgggctgtatgtttgcc

SEQ ID NO: 382285 - DNA, 75 bp, synthetic construct
  source 1..75: mol_type = other DNA
gttaacgccagacaccattccggggctggacacgctggatctgatgcaggcgcagcaggttcgtcgctggccggg

SEQ ID NO: 382286 - DNA, 75 bp, synthetic construct
  source 1..75: mol_type = other DNA
aaagctggtacgcagcaatatcgcttcattaaaaatgatttctacaattatttagctgatgcttttaaagcgtaa

SEQ ID NO: 382287 - DNA, 75 bp, synthetic construct
  source 1..75: mol_type = other DNA
tcgatatgattaacgacgagatcgacacgttcaccaatggcgctgttttcgatttaatgaataaagcgaaaaaag

SEQ ID NO: 382288 - DNA, 75 bp, synthetic construct
  source 1..75: mol_type = other DNA
gttttactggcgaatggttactggacgttggctgtggaaatatcctcgacctgagccgcaaaagtgtgaaaaaaa

SEQ ID NO: 382289 - DNA, 75 bp, synthetic construct
  source 1..75: mol_type = other DNA
cgcccttcaaaggcacgattgaagttattgatatcaataaacttgccgatgaaatgggtgacaaaactgttgccg

SEQ ID NO: 382290 - DNA, 75 bp, synthetic construct
  source 1..75: mol_type = other DNA
acatgaaatattttcagtacttgtcgcttctgtttaccgagatctacctggactggtacttcaatcgtaaacagc

SEQ ID NO: 382291 - DNA, 75 bp, synthetic construct
  source 1..75: mol_type = other DNA
accactcactcaggtcagagactgcgagttctgaatttaataggcagtaaaggtgaactggcattacaggttggt

SEQ ID NO: 382292 - DNA, 75 bp, synthetic construct
  source 1..75: mol_type = other DNA
ctgccggtggtgcagccgtaagggctggcgtcagaggaatcccaattatcggcaatatcgctatggcaggatacg

SEQ ID NO: 382293 - DNA, 75 bp, synthetic construct
  source 1..75: mol_type = other DNA
gataaaacagcaaaagaccgggctaatcagttcaaatcatacattctggatgatttgaataaacttgcatactgg

SEQ ID NO: 382294 - DNA, 75 bp, synthetic construct
  source 1..75: mol_type = other DNA
tgatcgcttttacaacacattgaaaaatgcttatgaaggtcagttttatgaagtcacgcaggtgaaagaagatga

SEQ ID NO: 382295 - DNA, 75 bp, synthetic construct
  source 1..75: mol_type = other DNA
atggataaactacttgagcgttttttgaactacgtgtctctggatacccaatcaaaagcgggagtgagacaggtt

SEQ ID NO: 382296 - DNA, 75 bp, synthetic construct
  source 1..75: mol_type = other DNA
ccggaaactaccgaaggttatgaaggtttttatcacctgacgagcatgaaaggcaccgttgagcgtgccgatatg

SEQ ID NO: 382297 - DNA, 75 bp, synthetic construct
  source 1..75: mol_type = other DNA
atatcgcccagcaggcgatgcgtgactgcgatattgaaccggaactgaaaccgatccgcggcggtaccgacggcg

SEQ ID NO: 382298 - DNA, 75 bp, synthetic construct
  source 1..75: mol_type = other DNA
cgaaaaaccgctgtgggtttttgtcggtaatacggtaagtggtgaagattcagacattcacgcagtattgcgttt

SEQ ID NO: 382299 - DNA, 75 bp, synthetic construct
  source 1..75: mol_type = other DNA
agatattctttctcgtttgtttaacaccactcactcaggtcagcgactgcgagttctgaatttaataggcagtaa

SEQ ID NO: 382300 - DNA, 75 bp, synthetic construct
  source 1..75: mol_type = other DNA
ctaccagcattgctggtacaagccttggcctgattaaggattttgcgtcggcgacttcgtttggttctatatctt

SEQ ID NO: 382301 - DNA, 75 bp, synthetic construct
  source 1..75: mol_type = other DNA
cggcgcggctaccagccttgctggaacaagtctggacctggtaaaggattttgcgtcggctacttcgtttggttc

SEQ ID NO: 382302 - DNA, 75 bp, synthetic construct
  source 1..75: mol_type = other DNA
gatggctcaacgcctgcaaatttctaaaggcgatttcagtcgctgcccaaatggcttacccggtgtggaaaaccg

SEQ ID NO: 382303 - DNA, 75 bp, synthetic construct
  source 1..75: mol_type = other DNA
ccgtcaccagtatggtcagagggaacggcatttcagaaagccgcactctggatctcgattaccgtgtcaccggca

SEQ ID NO: 382304 - DNA, 75 bp, synthetic construct
  source 1..75: mol_type = other DNA
cagatcgagcgagcgccctttggccccgtcaccagtatggtcagatggaacggcatttcagaaagtcgctctttg

SEQ ID NO: 382305 - DNA, 75 bp, synthetic construct
  source 1..75: mol_type = other DNA
ccattattgattttctgccctgggtggaatacctggatgaagagcagtgcctgctgctggatgacggggtgtcgg

SEQ ID NO: 382306 - DNA, 75 bp, synthetic construct
  source 1..75: mol_type = other DNA
agacccggggcgaaaagacggtgaatgccctgatggatacgttccctgaaggcaccctgttgtgcatgaccattg

SEQ ID NO: 382307 - DNA, 75 bp, synthetic construct
  source 1..75: mol_type = other DNA
tgccgccggtggccatgctgaatcaggtttgcgatcgcgttgtgtcggcactggggagcgccggggtgcgctgtc

SEQ ID NO: 382308 - DNA, 75 bp, synthetic construct
  source 1..75: mol_type = other DNA
aaaccacaagctacagctatgacgcgctgaaccggatcatcgaaacctccagcgatgtcgctggcgaatcgccaa

SEQ ID NO: 382309 - DNA, 75 bp, synthetic construct
  source 1..75: mol_type = other DNA
cggaacgttttgttgagttaaccagtgcgatgcccgccaggttgtttggcctgtggccacaaaaaggattgttag

SEQ ID NO: 382310 - DNA, 75 bp, synthetic construct
  source 1..75: mol_type = other DNA
cgattttctgcgacggagccttcacaggcaaagccggacgcggtcgtttcctgcgacgcaaaccgtttgtccctc

SEQ ID NO: 382311 - DNA, 75 bp, synthetic construct
  source 1..75: mol_type = other DNA
gacctgggaaacccacgggcagagccttactacccagtaccaatacgatggtgcaggcctcatcacgaagatcac

SEQ ID NO: 382312 - DNA, 75 bp, synthetic construct
  source 1..75: mol_type = other DNA
caacggctttggcgaagtgacccaggtccggagcccggacaccggcaccaccgacattacctatgacgaagccgg

SEQ ID NO: 382313 - DNA, 75 bp, synthetic construct
  source 1..75: mol_type = other DNA
tcagaaagccgcactctggatctcgattaccgtgtcaccggcatcgacgctgctagggtgcattcgctggtctat

SEQ ID NO: 382314 - DNA, 75 bp, synthetic construct
  source 1..75: mol_type = other DNA
gcgctggcggtattgcaacagaaaaacattccgcatggtgatattcgcgtcgcctttacgccagatgaagaagtg

SEQ ID NO: 382315 - DNA, 75 bp, synthetic construct
  source 1..75: mol_type = other DNA
taaatctcacctcagccgaggaaatatcatccgaagcaacatgggctaatcaaaatactgtgaaaaccttaacag

SEQ ID NO: 382316 - DNA, 75 bp, synthetic construct
  source 1..75: mol_type = other DNA
cggggaagggactttttgttgctgcggatgtgcaggcgaaagcacagggcgaggcactggacatggatgccgcgc

SEQ ID NO: 382317 - DNA, 75 bp, synthetic construct
  source 1..75: mol_type = other DNA
cgctgaacaacaaagataaaccagaagatgcggtttttagatgttcagggtattgcaaccgtaaccccagctatc

SEQ ID NO: 382318 - DNA, 75 bp, synthetic construct
  source 1..75: mol_type = other DNA
aatggcagcatgcggttgtttgctgagaagaagctgacgctgagttcggcaagtgatatctcctttgccgggaaa

SEQ ID NO: 382319 - DNA, 75 bp, synthetic construct
  source 1..75: mol_type = other DNA
atatctatgcccatctggacgggcaggggcgttaccgggtgaagatggactttgaccgggaggggacggaacccg

SEQ ID NO: 382320 - DNA, 75 bp, synthetic construct
  source 1..75: mol_type = other DNA
aatgcaaattgcttttcgcatgttgttaatatatcaggtggaaaatcaataacatcaaaacccgggggggcaggc

SEQ ID NO: 382321 - DNA, 75 bp, synthetic construct
  source 1..75: mol_type = other DNA
cgcgcgaaaaagacgtggtattgcaaatagctcgccgtttgcgctctctgatcgagaaagagggcaatatgaagg

SEQ ID NO: 382322 - DNA, 75 bp, synthetic construct
  source 1..75: mol_type = other DNA
tcaaggggatggcggcacaaattcgtgcagacgacccgttcatcaagtcggcgcgcgtcgggcaatttgacccgc

SEQ ID NO: 382323 - DNA, 75 bp, synthetic construct
  source 1..75: mol_type = other DNA
ttcaacttctcgctttaatgctgctgttacaaactgccctgtactttcaccaggcatttttaccgcctcaacatt

SEQ ID NO: 382324 - DNA, 75 bp, synthetic construct
  source 1..75: mol_type = other DNA
gcctgcgtccagctacacccgtgtgacggtagaatcaaatcgtcagctgaaatataagcagttcgcgttgagtaa

SEQ ID NO: 382325 - DNA, 75 bp, synthetic construct
  source 1..75: mol_type = other DNA
gcaggaagttgcagagtctatcctcgcggggattaaagcgtatttttctgatggggcgacgctggcgagaagggg

SEQ ID NO: 382326 - DNA, 75 bp, synthetic construct
  source 1..75: mol_type = other DNA
tcgctgaccattgccgacagcctgaagtttggtaaagcggtactgaataagctcggtaaaatcaacaagctgcat

SEQ ID NO: 382327 - DNA, 75 bp, synthetic construct
  source 1..75: mol_type = other DNA
gctgggcgtagtggcagggattggcgcatggaactacccgattcagattgccctgtggaaatccgccccagcgct

SEQ ID NO: 382328 - DNA, 75 bp, synthetic construct
  source 1..75: mol_type = other DNA
tcgattggtgatgacagtggcttttataaaactgcagaggagctggaaagcttcgacagtgaagctgacgatttt

SEQ ID NO: 382329 - DNA, 75 bp, synthetic construct
  source 1..75: mol_type = other DNA
cataaaaacttggcttaaagagttggtcgatgacaaggcgcaactgctggacgttaaaggcaacaatatcttcca

SEQ ID NO: 382330 - DNA, 75 bp, synthetic construct
  source 1..75: mol_type = other DNA
gcctgaacgaagagctggcaacgtatagcaaagagcaaggtgcagaaatatttcagccctatatcgctagcgatt

SEQ ID NO: 382331 - DNA, 75 bp, synthetic construct
  source 1..75: mol_type = other DNA
gacgctatagatggttacactgatacagatgcgcaaaaggcagcctttggattaagtgacgatgatgctgtatcc

SEQ ID NO: 382332 - DNA, 75 bp, synthetic construct
  source 1..75: mol_type = other DNA
ggaaaaaagccctttctgttggtgaaaaagccgctgccggaaccgctgctgctggagctggtgccgtagctgcaa

SEQ ID NO: 382333 - DNA, 75 bp, synthetic construct
  source 1..75: mol_type = other DNA
tgaagatttgcaggcattttacggctcgccaataggacgagacgctattggcgcgcggagcctatatttactgcg

SEQ ID NO: 382334 - DNA, 75 bp, synthetic construct
  source 1..75: mol_type = other DNA
ccagtgggtgaatgagcacaatggccgtaccgggatgctgacagtcagtggtgcgctgctgtcatccccgtgcac

SEQ ID NO: 382335 - DNA, 75 bp, synthetic construct
  source 1..75: mol_type = other DNA
gatgtccattctgacctacgagtcggaagacgaagtcattcgccgcgctaacgataccgactacggtctggcggc

SEQ ID NO: 382336 - DNA, 75 bp, synthetic construct
  source 1..75: mol_type = other DNA
gtactgtgcggcggcgatgtactgaaaggtgatggcttcgataacggcgcatgggttgcaccgaccgtgttcacc

SEQ ID NO: 382337 - DNA, 75 bp, synthetic construct
  source 1..75: mol_type = other DNA
cgtaccgggatgctggctgtaagtggtgcgctgctgtcatccccctgctcgctggagacgaatgaagtggagctg

SEQ ID NO: 382338 - DNA, 75 bp, synthetic construct
  source 1..75: mol_type = other DNA
gatgcagagtgccctgctgacgggagtggaggatggtgtgttgcaaccggagcagcggatggtcagtacagggcg

SEQ ID NO: 382339 - DNA, 75 bp, synthetic construct
  source 1..75: mol_type = other DNA
ccattacaaaaaagcacggaaggcatcatgacgcgttatgtgctgaagctgaatctgctggggtgtggtgacggt

SEQ ID NO: 382340 - DNA, 75 bp, synthetic construct
  source 1..75: mol_type = other DNA
aggccgccaccagcctttatggcgaccctgaaatgcttaaactctcgtgggatgccacccggcacgggctgacag

SEQ ID NO: 382341 - DNA, 75 bp, synthetic construct
  source 1..75: mol_type = other DNA
caatcactaccagtgcccatttactgaacaaactggcggaatacctgcaacgtcatggagatcgcacggtgtggg

SEQ ID NO: 382342 - DNA, 75 bp, synthetic construct
  source 1..75: mol_type = other DNA
atcagccaaaggataaattcaccgaggtaatcatttttgccgggacggatgcttacgcccatgctcaacactgga

SEQ ID NO: 382343 - DNA, 75 bp, synthetic construct
  source 1..75: mol_type = other DNA
cgtcagtatgatttacgctggattgaagacgaaagtaatcaagacgattcctacgatcgtaacttcttgcgcctg

SEQ ID NO: 382344 - DNA, 75 bp, synthetic construct
  source 1..75: mol_type = other DNA
ggggcggtgactcatgggctggtactgacctgttcatgaccaaccgtaccaacggtgttgcaacctatcgtaaca

SEQ ID NO: 382345 - DNA, 75 bp, synthetic construct
  source 1..75: mol_type = other DNA
attgatacaacggtttttaacggatatgacgatggtgatcagcacgccagagcaataaaacggtttgcatcgaat

SEQ ID NO: 382346 - DNA, 75 bp, synthetic construct
  source 1..75: mol_type = other DNA
gtggcataactacaacggacaaattaacaaaggtgaaagtatccgcgtctttccgctctctaactggactgagca

SEQ ID NO: 382347 - DNA, 75 bp, synthetic construct
  source 1..75: mol_type = other DNA
ggactgacgacggtgcaggcggcaagcctgatctctgctgctttcatctctcgttggttcggcggtctgatgctc

SEQ ID NO: 382348 - DNA, 75 bp, synthetic construct
  source 1..75: mol_type = other DNA
gttctttagtggctttggtgcggcagttggctgctgcgttggtggcttcctcggtgactggctgggaacgcgcaa

SEQ ID NO: 382349 - DNA, 75 bp, synthetic construct
  source 1..75: mol_type = other DNA
tatttcttaaaagaactatgcaatgttaactatgtacatgtcccggaattggccccaactaaggagatgttaaat

SEQ ID NO: 382350 - DNA, 75 bp, synthetic construct
  source 1..75: mol_type = other DNA
aacataccgatattatgaaaactgaaggcctgaaacaggcgctgaacaaatacggttttgatgccgccttcggtg

SEQ ID NO: 382351 - DNA, 75 bp, synthetic construct
  source 1..75: mol_type = other DNA
tccagaaggcgtggcgatggggattaacccgtttgtgcacggcagcgccaaacatactgacattatgaaaactga

SEQ ID NO: 382352 - DNA, 75 bp, synthetic construct
  source 1..75: mol_type = other DNA
agcctgcagaagcatctgcccgtgtcatggaacggatgcagtctgaaccgccccgattttcctggagagtgtttt

SEQ ID NO: 382353 - DNA, 75 bp, synthetic construct
  source 1..75: mol_type = other DNA
aatgcattctgtcatgaaaatgactaagaacggagatcagaagttacttggtgaactatttggcgatatgcaagt

SEQ ID NO: 382354 - DNA, 75 bp, synthetic construct
  source 1..75: mol_type = other DNA
aggcaaagagtcaacttgtaaggtcaggattacaaactggtgctgtagcggctggtgcatttgctgctgctaaca

SEQ ID NO: 382355 - DNA, 75 bp, synthetic construct
  source 1..75: mol_type = other DNA
atgttgcagctccttacctttcgcttaaggagtacgcaaaggtgaccggaataccctttgatacttgccggaata

SEQ ID NO: 382356 - DNA, 75 bp, synthetic construct
  source 1..75: mol_type = other DNA
gccgtcgcgcacagtctggagatgggtgtgctgaccgaagtcagtaatgaagaggaactggagcgcgccattgca

SEQ ID NO: 382357 - DNA, 75 bp, synthetic construct
  source 1..75: mol_type = other DNA
aacccgcaaacagcagcaaccgctggccagttttcagaatgagattcagccgagcacgcgacatttttatgatgc

SEQ ID NO: 382358 - DNA, 75 bp, synthetic construct
  source 1..75: mol_type = other DNA
tcatccgctgttttcagctatctggcggatgatctgcgcgagcttcagcagctctttcagcagcaaaacaaaccc

SEQ ID NO: 382359 - DNA, 75 bp, synthetic construct
  source 1..75: mol_type = other DNA
cattttcagccgtgtcctggttggtgcgcaaatctcgctggcggcgggcgtgtttgccgtgtttatcggtgcggc

SEQ ID NO: 382360 - DNA, 75 bp, synthetic construct
  source 1..75: mol_type = other DNA
ggttgcgcgaagtgatcgtgaagctcaatgactggccgtcaaaccgtgtgcatgaactgctgccctggaactgct

SEQ ID NO: 382361 - DNA, 75 bp, synthetic construct
  source 1..75: mol_type = other DNA
ttcttgccctgccggtgatatcagttgccggcaccactgtttataccgattcggcgcatccgccggttaacctgc

SEQ ID NO: 382362 - DNA, 75 bp, synthetic construct
  source 1..75: mol_type = other DNA
agccgtttcttctatcgtggtgttcttcaccatgcgtattggtacttcgataatctccgccgccagcctgtcgtt

SEQ ID NO: 382363 - DNA, 75 bp, synthetic construct
  source 1..75: mol_type = other DNA
ttttgttgcgtcacatcttaccggggacagtctcttctatcgtcgtgttcttcaccatgcgtattggcacctcga

SEQ ID NO: 382364 - DNA, 75 bp, synthetic construct
  source 1..75: mol_type = other DNA
gcaaacctttattgaatcagcgcgcagtattggtgccagcgatatgaccattttgttgcgccacatcttaccggg

SEQ ID NO: 382365 - DNA, 75 bp, synthetic construct
  source 1..75: mol_type = other DNA
atgagtactacaacccagaatatcccgtggtatcgccatcttaaccgcgcacaatggcgggcattttccgctgcc

SEQ ID NO: 382366 - DNA, 75 bp, synthetic construct
  source 1..75: mol_type = other DNA
ggttgaacatggtatcagcgagctggacgcagcgaagcgcattgcgcaccaactcgatatcgcccgtgggatcgc

SEQ ID NO: 382367 - DNA, 75 bp, synthetic construct
  source 1..75: mol_type = other DNA
accgcgccagcatgaccttctttctctccggggcgtcgctgaaaatcctcaacagccgccagcgcgacctgacgg

SEQ ID NO: 382368 - DNA, 75 bp, synthetic construct
  source 1..75: mol_type = other DNA
atccgccgtgcgccttcggtcggccatcttacaggcgaaacccgcaaaggggagaacattaacgcgctgatggat

SEQ ID NO: 382369 - DNA, 75 bp, synthetic construct
  source 1..75: mol_type = other DNA
tgactcatggtctgacgatgctgatgacagtttttctggcagcgatatgttcgaagacctgggcgatattactga

SEQ ID NO: 382370 - DNA, 75 bp, synthetic construct
  source 1..75: mol_type = other DNA
cgagcacgcacgcatcgaaggcaaaccggggttgcagtttatcggcgaaaagctggatgaagtcagcatcagtct

SEQ ID NO: 382371 - DNA, 75 bp, synthetic construct
  source 1..75: mol_type = other DNA
aacaattgattattatttagcactttcctctaccaaaggcagtggaattactaatatcatttcaattattcttca

SEQ ID NO: 382372 - DNA, 75 bp, synthetic construct
  source 1..75: mol_type = other DNA
acgccgtttcccgcccggaaggctattttctggacgatgccgtcagccatacccgctggcgtgctcagcaacgcc

SEQ ID NO: 382373 - DNA, 75 bp, synthetic construct
  source 1..75: mol_type = other DNA
gttttactgtcaggatgaggacgacaccgcaagctggctggccgcactgcatgactacgccgtaccggaagcacg

SEQ ID NO: 382374 - DNA, 75 bp, synthetic construct
  source 1..75: mol_type = other DNA
cgctcgcggcgacggcattaacgcgctgttcgacctgctgccggaaggggttattatggcgctgaccatcgtcgt

SEQ ID NO: 382375 - DNA, 75 bp, synthetic construct
  source 1..75: mol_type = other DNA
acggagaagcatgaaaaggcggaaaggatgcggattatgagagagtttgggtgtagtgagctgaaggcagcgatg

SEQ ID NO: 382376 - DNA, 75 bp, synthetic construct
  source 1..75: mol_type = other DNA
gaacctgagcgacttcccggatgatgcgaaaaaactgctcaatatgatcgagtggtgggagttactggtgatgcc

SEQ ID NO: 382377 - DNA, 75 bp, synthetic construct
  source 1..75: mol_type = other DNA
gtttggccgcgagagcggaaccgggcatcctggcgtcagctacttcaaccggggcggtgggatgttgtgctggga

SEQ ID NO: 382378 - DNA, 75 bp, synthetic construct
  source 1..75: mol_type = other DNA
cgctctcgaacgtgaaaatcgggcgatgaaaatgcagcgcacctttaaccgctccggtattcggccactgcatca

SEQ ID NO: 382379 - DNA, 75 bp, synthetic construct
  source 1..75: mol_type = other DNA
ttctgccgcagattgacgtcagggcacaggaggtttcggttgccgggtatgtgtttgaggtccagaccagtgagc

SEQ ID NO: 382380 - DNA, 75 bp, synthetic construct
  source 1..75: mol_type = other DNA
tataaagcctcaaaaatcacacttcgtgggatctttgatgtagatgaagctattacagcattaaaagctatgatt

SEQ ID NO: 382381 - DNA, 75 bp, synthetic construct
  source 1..75: mol_type = other DNA
tttgtaccgtggcgaataccggtttatgaatattgccatgaccttggtagctgctgttgctctctggttttgttt

SEQ ID NO: 382382 - DNA, 75 bp, synthetic construct
  source 1..75: mol_type = other DNA
gttctttagtggttttggtgcggcggtgggttgctgcgtcggtggcttcctcggtgactggctgggaacgcgcaa

SEQ ID NO: 382383 - DNA, 75 bp, synthetic construct
  source 1..75: mol_type = other DNA
ggttttaaaggggggaaaggcgttgccaccgcttttggtgcaatagccccgattggctgggatttaacgggcgtg

SEQ ID NO: 382384 - DNA, 75 bp, synthetic construct
  source 1..75: mol_type = other DNA
gccgttttcacgtcgtcagttcgccacaattgcgggtcagaaatggctctaaagcatcattttctgtgggatctg

SEQ ID NO: 382385 - DNA, 75 bp, synthetic construct
  source 1..75: mol_type = other DNA
ccattaaacaatttaacagtgatattaccgtgacaaaccttgatggcaccggcaaaccggcaaacggacgtagtc

SEQ ID NO: 382386 - DNA, 75 bp, synthetic construct
  source 1..75: mol_type = other DNA
gcaggcgctgaacgctgcacgtctgaaagaagcgggtgccgttgacgccaccttcgtcactaaagccatcaatga

SEQ ID NO: 382387 - DNA, 75 bp, synthetic construct
  source 1..75: mol_type = other DNA
cgttaagcaaagcgcgccagtatgtcgaagaatttgacggcaacatcgccagcttcatcttttctggcaagcccg

SEQ ID NO: 382388 - DNA, 75 bp, synthetic construct
  source 1..75: mol_type = other DNA
tattattctgttttcagtgggaactctcgcctgtgggatggcacaagggtatattacgctgttcattgcccgtct

SEQ ID NO: 382389 - DNA, 75 bp, synthetic construct
  source 1..75: mol_type = other DNA
cgatatccatctttcccgccatgccgctgaactgaaaagcgttttctgccagccgttaggcgatcgctaccgtga

SEQ ID NO: 382390 - DNA, 75 bp, synthetic construct
  source 1..75: mol_type = other DNA
accgcccagggagcagatgctgaacaggcgctgaaagccattggcgacgccatcgccgccggtcttggggagggc

SEQ ID NO: 382391 - DNA, 75 bp, synthetic construct
  source 1..75: mol_type = other DNA
tgaatcgttgctcagcgatctgattaacgattcgtggaacttagtggttgatggcctggctaaacgcgatcaaaa

SEQ ID NO: 382392 - DNA, 75 bp, synthetic construct
  source 1..75: mol_type = other DNA
aaattggcggcaagatttttatgctgtcgtcggagctacgcggcgtcccctttatcaatctgaagtccgatccac

SEQ ID NO: 382393 - DNA, 75 bp, synthetic construct
  source 1..75: mol_type = other DNA
tagattatttgcgcactcaggattttgccatgcgtcctctgcaatggcttaaattgatcagtaaaaatcgcggca

SEQ ID NO: 382394 - DNA, 75 bp, synthetic construct
  source 1..75: mol_type = other DNA
cgtactaatgaacaagctggtgacggctacggtgataacgctgaagtgtggtcattagcagccaagtatgatgca

SEQ ID NO: 382395 - DNA, 75 bp, synthetic construct
  source 1..75: mol_type = other DNA
ctgtgcaatatcaaggtaagaacagcaatcgtggcgttactaaacaaaacggtgatggctatgcgttgtctgtag

SEQ ID NO: 382396 - DNA, 75 bp, synthetic construct
  source 1..75: mol_type = other DNA
cggtgtatcccggcgatgaaatctccgaagcgttacttcacgatctgatcaacgattcatggaatttagtgatcg

SEQ ID NO: 382397 - DNA, 75 bp, synthetic construct
  source 1..75: mol_type = other DNA
acgtgaactgactgttcaggcaactaacggtactaactctgacagcgatctttcttctatccaggctgaaattac

SEQ ID NO: 382398 - DNA, 75 bp, synthetic construct
  source 1..75: mol_type = other DNA
gttgtgtatcggacattagctggtgaccttctcaaacaagaaggtgggtgtgactacatgcttacaagaggaagg

SEQ ID NO: 382399 - DNA, 75 bp, synthetic construct
  source 1..75: mol_type = other DNA
aatgctgcccggcttgcaattcagatgcgacctggcagaaccgtgataccgcttggttaattagatgcccgatgt

SEQ ID NO: 382400 - DNA, 75 bp, synthetic construct
  source 1..75: mol_type = other DNA
ttacaaactttaaaaaagctgctggcggtggtggggcgaagactggcacagtatctctgactttttcgggtgtcc

SEQ ID NO: 382401 - DNA, 75 bp, synthetic construct
  source 1..75: mol_type = other DNA
atgcagcatttctcagaaatcagctgatcagtctattgattttggacagctttcaaaaagcttccttgaggcagg

SEQ ID NO: 382402 - DNA, 75 bp, synthetic construct
  source 1..75: mol_type = other DNA
aaaatggcctgatgttaacccgcgccctgcgagaacgctcaacggtggggattattctggtggtgatgctgccaa

SEQ ID NO: 382403 - DNA, 75 bp, synthetic construct
  source 1..75: mol_type = other DNA
aggttatctattctctgtttcctgtcttgccattgctcttctttccctgtggacgagatcaaagaataaaaatta

SEQ ID NO: 382404 - DNA, 75 bp, synthetic construct
  source 1..75: mol_type = other DNA
ttggtgacagaattaacgttgaagcatttttcaaagactctgaaaattgctgtgactttgcctatcaaattaaag

SEQ ID NO: 382405 - DNA, 75 bp, synthetic construct
  source 1..75: mol_type = other DNA
tctgatttttcctatcaaattaaaggaatcaataaccaaaaaggtagtggatacaatgttactattcgtgcagca

SEQ ID NO: 382406 - DNA, 75 bp, synthetic construct
  source 1..75: mol_type = other DNA
ccagatggccaggaattaacgctacactgcccgaatactggcgcgatgaccggttgtgcaacacctggagatacc

SEQ ID NO: 382407 - DNA, 75 bp, synthetic construct
  source 1..75: mol_type = other DNA
agctagtgacggctacggtgataacgctgaagtgtggtcattagcagccaagtatgatgcaaataatatctatgc

SEQ ID NO: 382408 - DNA, 75 bp, synthetic construct
  source 1..75: mol_type = other DNA
ttggtacctggtactacttcaataagaacatgaacgtctacacagcatacaaatttaacctgctggataaagacg

SEQ ID NO: 382409 - DNA, 75 bp, synthetic construct
  source 1..75: mol_type = other DNA
gtaactacggtgttgcttatgatgccgcagcttataccgatatgttagttgaatggggtggcgattcctgggctt

SEQ ID NO: 382410 - DNA, 75 bp, synthetic construct
  source 1..75: mol_type = other DNA
gcggattcgcgtccagactgctatattgaagtgaaatcggttacgttagcggagaacgaacagggatattttccc

SEQ ID NO: 382411 - DNA, 75 bp, synthetic construct
  source 1..75: mol_type = other DNA
ccaaatgcggcattgtctgggaacgaaaagggagtttattcaacaaagttggcgatcggcagttgtataaaaacc

SEQ ID NO: 382412 - DNA, 75 bp, synthetic construct
  source 1..75: mol_type = other DNA
ataactttggcaatagtgaagttatcgtcggtcaggcgttaaaaaaactgccccgtgaacaggttgtagtagaaa

SEQ ID NO: 382413 - DNA, 75 bp, synthetic construct
  source 1..75: mol_type = other DNA
gcgccacgctggttcaacgttataaacgttttttagccgatgtgatcacaccagatggccaggaattaacgctac

SEQ ID NO: 382414 - DNA, 75 bp, synthetic construct
  source 1..75: mol_type = other DNA
aacaccttcgggagttgatgagcgtagcggctgaaggccagcgtgcggttatcttttttgccgtgctgcattcag

SEQ ID NO: 382415 - DNA, 75 bp, synthetic construct
  source 1..75: mol_type = other DNA
gtctggtattcaacttccgacaatacaaaacggaaatacccgcacacctgggaattaacccaaagccaaagcggt

SEQ ID NO: 382416 - DNA, 75 bp, synthetic construct
  source 1..75: mol_type = other DNA
gattgcgctcaatatattcatatgcctgggtaaataaagaacctacaatcgcgttcgagacatgtattggtcgag

SEQ ID NO: 382417 - DNA, 75 bp, synthetic construct
  source 1..75: mol_type = other DNA
tgtaaagggaagaacgggaaggaaaccaacgaagcatgggcgaacgccacaataaaccactgggcgcttttgggg

SEQ ID NO: 382418 - DNA, 75 bp, synthetic construct
  source 1..75: mol_type = other DNA
ttttccgacttaatagagcagcaaatttattagaaatagaagtcgatgatcttctacttatgggagtatcaggct

SEQ ID NO: 382419 - DNA, 75 bp, synthetic construct
  source 1..75: mol_type = other DNA
ttttcgctcctgatgttcccggctggcatcacgccggataattgtctgccatctcgtgactgctccccgccctgt

SEQ ID NO: 382420 - DNA, 75 bp, synthetic construct
  source 1..75: mol_type = other DNA
tgacataatttctccagaggctcttttaatacttggggatacaaatagtgcactagtttctattgcagctaaaag

SEQ ID NO: 382421 - DNA, 75 bp, synthetic construct
  source 1..75: mol_type = other DNA
cgagctgtgctttcagatagcggtactatcactgaagagtcatccatcatgaatttcccagcggtaaacatccgg

SEQ ID NO: 382422 - DNA, 75 bp, synthetic construct
  source 1..75: mol_type = other DNA
tgtgggcaggctaccaggcgggatttggtgaaaaccggggcgacatcagcaacagcggggcgtattttgagcagc

SEQ ID NO: 382423 - DNA, 75 bp, synthetic construct
  source 1..75: mol_type = other DNA
gctggcgtgtcagtgcgtaaaaccgccgagagctttaatgttgctccttcaacggtgcaacgtatcaagaaggaa

SEQ ID NO: 382424 - DNA, 75 bp, synthetic construct
  source 1..75: mol_type = other DNA
gcgctggcggtattgcaacaaaaaaacattccgcatggtgatattcgcgtcgcctttaccccggatgaagaagtg

SEQ ID NO: 382425 - DNA, 75 bp, synthetic construct
  source 1..75: mol_type = other DNA
atggcggattctaatctcaatgtgccggtaatcattcaggctacacggctcgacacatcagtccttccacgcaat

SEQ ID NO: 382426 - DNA, 75 bp, synthetic construct
  source 1..75: mol_type = other DNA
attaagcccgcagccaggttgggcagagcgcgatatggcagaactgtggcaatgctgcatggctgtcattcgcga

SEQ ID NO: 382427 - DNA, 75 bp, synthetic construct
  source 1..75: mol_type = other DNA
gccgcactgaccggtctgaaagcgggtacgcccgttgtcggcggcctgtttgatgtggtttccaccgcactctgt

SEQ ID NO: 382428 - DNA, 75 bp, synthetic construct
  source 1..75: mol_type = other DNA
cgggctgcgtatcgaactgccgcaggtggaagaaaccggctgttttggcgcggcgcttgccgcccgcgtcggcac

SEQ ID NO: 382429 - DNA, 75 bp, synthetic construct
  source 1..75: mol_type = other DNA
tgtagattctcctgaaaaattaaaaatttttattaacattcttaataaaatatcggataaatatgatttgccaat

SEQ ID NO: 382430 - DNA, 75 bp, synthetic construct
  source 1..75: mol_type = other DNA
ttcaccctaatatctctttcatgaagccattcggatttattgactatatcactttacagttgcatgccagagctg

SEQ ID NO: 382431 - DNA, 75 bp, synthetic construct
  source 1..75: mol_type = other DNA
gtagaggactacaaacccgataacgtatcagagaaagttctcaggattattatgagctatactgattttgttaat

SEQ ID NO: 382432 - DNA, 75 bp, synthetic construct
  source 1..75: mol_type = other DNA
acaatgtttcaattaaaattcttagaattattatgagctatacaaactttattaatcaaaaggtttggaaaaaat

SEQ ID NO: 382433 - DNA, 75 bp, synthetic construct
  source 1..75: mol_type = other DNA
gtgataataattttttcaattacgggatgcggttgatatctgatattaacaaaacatttcgatgcatagatttta

SEQ ID NO: 382434 - DNA, 75 bp, synthetic construct
  source 1..75: mol_type = other DNA
ccattgcgcgactggcgatgctggatatgttcccacacacgggacatctggaatcgatggtacttttctcgcgcg

SEQ ID NO: 382435 - DNA, 75 bp, synthetic construct
  source 1..75: mol_type = other DNA
gctcctaatgtttcagaaaagatcgttcgtataatttattcttatactgactacgtaaatcgagttgtgtggaaa

SEQ ID NO: 382436 - DNA, 75 bp, synthetic construct
  source 1..75: mol_type = other DNA
caagaagtcagaggttgtttactctggcgtatctgtaaccatcccgacagcgccgaccaaccttgttagcctgct

SEQ ID NO: 382437 - DNA, 75 bp, synthetic construct
  source 1..75: mol_type = other DNA
acggctttcttgccacaaatggcagcacgttaaccattcagtcgaatggcgcggcgtttactgccacaaccatca

SEQ ID NO: 382438 - DNA, 75 bp, synthetic construct
  source 1..75: mol_type = other DNA
gtgttgagcccactccatgacgtaaacccactgattgccttgaatgaaagcgatattgcatcgcttgataccaga

SEQ ID NO: 382439 - DNA, 75 bp, synthetic construct
  source 1..75: mol_type = other DNA
acgtcaggtcagtgactatagtatgccaaatgtttcagataaagttgtgcgtattatccattcatatactgacta

SEQ ID NO: 382440 - DNA, 75 bp, synthetic construct
  source 1..75: mol_type = other DNA
ttaacaacaagatggttgtgttcaacgagaacaaaaccctgttcttcaagctgtcgattgtcgggacgtggccca

SEQ ID NO: 382441 - DNA, 75 bp, synthetic construct
  source 1..75: mol_type = other DNA
gaaaacgctcacgccgtcatccggcacgttggcaccattcttcgacaccgttaacaacaagatggttgtgttcaa

SEQ ID NO: 382442 - DNA, 75 bp, synthetic construct
  source 1..75: mol_type = other DNA
tgcaagggtgactataggttctgaaactaagattcttagcgaaaatgaatctgtttacatacctcttggtgtaat

SEQ ID NO: 382443 - DNA, 75 bp, synthetic construct
  source 1..75: mol_type = other DNA
tggatggtgacaaccatgatgttgttgtacatacctcaatcaacaaagcgatccccaccatgcccgatgtcggca

SEQ ID NO: 382444 - DNA, 75 bp, synthetic construct
  source 1..75: mol_type = other DNA
caatggcaaaaagcatcgccgacgcgagtttactttaaggttaatattgattcatctctaaatcctccaagtgac

SEQ ID NO: 382445 - DNA, 75 bp, synthetic construct
  source 1..75: mol_type = other DNA
gttgcgcctttcttttatcaggtcgtggccgcagtgctgatcatgagcgagagggaccgcatcgagcagtatgcc

SEQ ID NO: 382446 - DNA, 75 bp, synthetic construct
  source 1..75: mol_type = other DNA
atgtcccagccgctgaatgccgatcaggaactggtctctgatgttgtcgcttgccagttggtaatcaaacaaatt

SEQ ID NO: 382447 - DNA, 75 bp, synthetic construct
  source 1..75: mol_type = other DNA
ttgccagttggttatcaaacaaattctcgacgttctcgatgtaatcgcgcccgttgaagttcgtgaaaaaatgtc

SEQ ID NO: 382448 - DNA, 75 bp, synthetic construct
  source 1..75: mol_type = other DNA
gctacgcgctgccttgcgcgatgccggggtgctggcgaactatgaaacgccgaagcgtccggttgtgcatgtatt

SEQ ID NO: 382449 - DNA, 75 bp, synthetic construct
  source 1..75: mol_type = other DNA
accggacaggtgacctggttgcgggaagatggtttcaaattccgtccgacacgcaacaatatctcgtggatggtg

SEQ ID NO: 382450 - DNA, 75 bp, synthetic construct
  source 1..75: mol_type = other DNA
ggtgaactgcatgttgaagttgccgataccaacgaaagcaaagagttactgaaattctgccgtaaatttactgtt

SEQ ID NO: 382451 - DNA, 75 bp, synthetic construct
  source 1..75: mol_type = other DNA
agcgggtatatatatcagtcaattgataatgctgtaataccctcatcaggctctgttgatgtgcagtttgtcaac

SEQ ID NO: 382452 - DNA, 75 bp, synthetic construct
  source 1..75: mol_type = other DNA
cgggggggctggcgaactatgaaacgccgaagcgtccggtagtgcatgtattcttcattgcaccaggctgctgct

SEQ ID NO: 382453 - DNA, 75 bp, synthetic construct
  source 1..75: mol_type = other DNA
ggggtgctggcgaactatgaaacgccgaagcgtccggttgtgcatgtattctttattgcaccaggctgctgctat

SEQ ID NO: 382454 - DNA, 75 bp, synthetic construct
  source 1..75: mol_type = other DNA
aagatctgtgatccggcgaagctgaaaggctttcaccgcctgaaaacagaaacccgtcgtctcctgttgaaattc

SEQ ID NO: 382455 - DNA, 75 bp, synthetic construct
  source 1..75: mol_type = other DNA
ttgccgggttgaaatataaagatttgggttctttcgattatggtcgtaacctgggggcgttgtatgacgtggaag

SEQ ID NO: 382456 - DNA, 75 bp, synthetic construct
  source 1..75: mol_type = other DNA
gtgctacatattatttcaacaaaaatatgtcagcgtttgttgattataaaatcaaccaactggatagcgataaca

SEQ ID NO: 382457 - DNA, 75 bp, synthetic construct
  source 1..75: mol_type = other DNA
atgtgtatccaccttaacttaatgatttttaccaaaatcattaggggattcatcagggcgttgtatgacgtggaa

SEQ ID NO: 382458 - DNA, 75 bp, synthetic construct
  source 1..75: mol_type = other DNA
gataatgttttggtcaattctttatcggtcattgtgttgtcctgcatagcaatgcgccgtaataccttacaccac

SEQ ID NO: 382459 - DNA, 75 bp, synthetic construct
  source 1..75: mol_type = other DNA
gttgccatacctgcaatgagcgcttttccctgtactctttaaggaattgctcaagggcaaaagcacatggcgcga

SEQ ID NO: 382460 - DNA, 75 bp, synthetic construct
  source 1..75: mol_type = other DNA
actgacatatgactttggcggcagtgatttcgctatcagcggtgcctataccaactctgatcgtaccaacgagca

SEQ ID NO: 382461 - DNA, 75 bp, synthetic construct
  source 1..75: mol_type = other DNA
atatgtagaagaatttgaggggaacatcgccagttttattttctctggaaaaccaggcactggcaaaaaccattt

SEQ ID NO: 382462 - DNA, 75 bp, synthetic construct
  source 1..75: mol_type = other DNA
agagctatgaaaatgcaaaggacttttaaccggtcagggatacgtcctctgcatcagaattgttcatttgataac

SEQ ID NO: 382463 - DNA, 75 bp, synthetic construct
  source 1..75: mol_type = other DNA
aatctgtaacaagctgaatgagatcagctttcagttcaaccaactgaaacaggacttcatcaacggttacaacaa

SEQ ID NO: 382464 - DNA, 75 bp, synthetic construct
  source 1..75: mol_type = other DNA
aacgaaaaccgtgatgtgaaaaagcaaaacggtgatggattcggtacttcactgagttatgactttggcggcagc

SEQ ID NO: 382465 - DNA, 75 bp, synthetic construct
  source 1..75: mol_type = other DNA
tacagcgtcagctattgcatggggtactcgtgcctcaagttttttggattttccattaactgctttcgttgccat

SEQ ID NO: 382466 - DNA, 75 bp, synthetic construct
  source 1..75: mol_type = other DNA
cgtaataccttacaccacggcgctgatggtgattactctggttctttggccttgcggcgctggcgatattcaact

SEQ ID NO: 382467 - DNA, 75 bp, synthetic construct
  source 1..75: mol_type = other DNA
ccgctgatttaacccgaatcctgcttgaggatgctcttcataatatgtttatgcctgcggataacaccacaggaa

SEQ ID NO: 382468 - DNA, 75 bp, synthetic construct
  source 1..75: mol_type = other DNA
cgaaggcggaacaggaagaagcgcagcgtcaggaggatgccagaacgttccgggatgtggccggggaatatctgg

SEQ ID NO: 382469 - DNA, 75 bp, synthetic construct
  source 1..75: mol_type = other DNA
tcgttgaccattgccgacagcctgaagtttggtaaggccgtgctaaataagctggggaaaatcaacaaactgcat

SEQ ID NO: 382470 - DNA, 75 bp, synthetic construct
  source 1..75: mol_type = other DNA
ccatcatttatcctgtactttctttatcacctgtaagaatgaataaggaaaaagaaaactggtttcacactgccc

SEQ ID NO: 382471 - DNA, 75 bp, synthetic construct
  source 1..75: mol_type = other DNA
ggtgttcacgggcgaccagggcggagaaatccgccaccggctgatgcgtgatgcggcgggccggctcaccgcaaa

SEQ ID NO: 382472 - DNA, 75 bp, synthetic construct
  source 1..75: mol_type = other DNA
aggtgaagtgtttagaaccgatggaacttgggggacattcaaatcagatgccaatggtgctcatatcccccttga

SEQ ID NO: 382473 - DNA, 75 bp, synthetic construct
  source 1..75: mol_type = other DNA
agctcagtacggaagaagggcgttctgaaatggtggatggcgtgacacattttgtgtcggaactatggcagccca

SEQ ID NO: 382474 - DNA, 75 bp, synthetic construct
  source 1..75: mol_type = other DNA
attgattccagtgggcatatttttattgccgaaggcggtaacgagtatgatggcgcgaagtgttgggtagttttg

SEQ ID NO: 382475 - DNA, 75 bp, synthetic construct
  source 1..75: mol_type = other DNA
gatttattgatggaggcctttcctgatgctcaaaaagtaagagggagcggttcgcaggatgccgccggtattaga

SEQ ID NO: 382476 - DNA, 75 bp, synthetic construct
  source 1..75: mol_type = other DNA
ctccatgtgctgttagtaaccaaaaagcgaatcgtttattagatagtagtgaaaccaaagttactgttaggtcta

SEQ ID NO: 382477 - DNA, 75 bp, synthetic construct
  source 1..75: mol_type = other DNA
ccgggtttaaagagcgtctggtgatggacctctatccggccaatgcacaggatatgcaggacccgctgctggcgc

SEQ ID NO: 382478 - DNA, 75 bp, synthetic construct
  source 1..75: mol_type = other DNA
tgatattccctccattctggtcgaaacggcgtttatcagtaacgttgaggaagagcgcaaactgaaaacggcaag

SEQ ID NO: 382479 - DNA, 75 bp, synthetic construct
  source 1..75: mol_type = other DNA
taatcagccgtcgtcgtttactgcaaggtgcgggcgccatgtggctattgagcgtaagtcaggtcagcctggctg

SEQ ID NO: 382480 - DNA, 75 bp, synthetic construct
  source 1..75: mol_type = other DNA
tgtcaaaaattaatttagatcgaagattttcaactcaaaatggcggcagaacagtgaggacaagaggttgtggct

SEQ ID NO: 382481 - DNA, 75 bp, synthetic construct
  source 1..75: mol_type = other DNA
acagcgcgggggacataccggtatgtgtacgatgcgctggggaggcggacggaaaaacagcacatcagccctgac

SEQ ID NO: 382482 - DNA, 75 bp, synthetic construct
  source 1..75: mol_type = other DNA
tacatctatgatgcggcagaccagctactggaaatccgccgccagcggtcggatgccggggaaacggatgcaccg

SEQ ID NO: 382483 - DNA, 75 bp, synthetic construct
  source 1..75: mol_type = other DNA
agaacgcagcgccatctgtactacggcagcggccatctccagcagataaatctggaccgggaggtcatcagcgag

SEQ ID NO: 382484 - DNA, 75 bp, synthetic construct
  source 1..75: mol_type = other DNA
gcgctgaaagcattgatcgagcagcgtctggaaggcgtcaccgccgaagtggtcaaagtccgctcccatatgccg

SEQ ID NO: 382485 - DNA, 75 bp, synthetic construct
  source 1..75: mol_type = other DNA
gaaatcctgcaatggcagcgtgagcgtctggtcgcgaagctggaagatgctcaggtgcaactggaaaacaaccgt

SEQ ID NO: 382486 - DNA, 75 bp, synthetic construct
  source 1..75: mol_type = other DNA
tggctaaacagctggtaactgccgcgaactgggtaaaaatgcagagtgacgaaggggaaatcaacccggttgata

SEQ ID NO: 382487 - DNA, 75 bp, synthetic construct
  source 1..75: mol_type = other DNA
actttgaagaaaagtagtcatgctttacaacggcatcgtgaaggtcgacctattggtgctgttattaatgatctt

SEQ ID NO: 382488 - DNA, 75 bp, synthetic construct
  source 1..75: mol_type = other DNA
actatgatccggatgtcgggcggttcatggtaacggacccgatagggctggcggggggactgaatctctatcaat

SEQ ID NO: 382489 - DNA, 75 bp, synthetic construct
  source 1..75: mol_type = other DNA
ccaaatccagtaagctggatagatccgcttgggttaaataccacctgcttaaaagccgagaatggttactcaaga

SEQ ID NO: 382490 - DNA, 75 bp, synthetic construct
  source 1..75: mol_type = other DNA
aacaggttttccaggaaatgttattgagccaatagataagagtcgcactgattcacgaggtagatctcattatag

SEQ ID NO: 382491 - DNA, 75 bp, synthetic construct
  source 1..75: mol_type = other DNA
ctgcatgacgctgcaccgccagccgggcggcgaagggtattattaccagtggggctggtatgaagggccggatga

SEQ ID NO: 382492 - DNA, 75 bp, synthetic construct
  source 1..75: mol_type = other DNA
taaaagatccttctgtaacaaaaccttcatatagagtgtcaggtcatggaccaggaaatcctgatggtgatttac

SEQ ID NO: 382493 - DNA, 75 bp, synthetic construct
  source 1..75: mol_type = other DNA
tggcatagctcaggatgaagaagcacagctcaagaaaattgcacaggcccttcagttaccactggagcagtatct

SEQ ID NO: 382494 - DNA, 75 bp, synthetic construct
  source 1..75: mol_type = other DNA
atgtttggtatttttaaaaagaaaacccgcaaggccattaccgaagtgaagaagatggagaaccgcgacgcagtg

SEQ ID NO: 382495 - DNA, 75 bp, synthetic construct
  source 1..75: mol_type = other DNA
cattgggccggaggaagaagtacagctcaagaaaattgctcaggcgcttcagttaccgctggagcagtacctgtg

SEQ ID NO: 382496 - DNA, 75 bp, synthetic construct
  source 1..75: mol_type = other DNA
tgtcagaaaataataatgcgcaggtaacgctgttaaatacacagttaagcgagtttgccccaaccatgccccata

SEQ ID NO: 382497 - DNA, 75 bp, synthetic construct
  source 1..75: mol_type = other DNA
cattgctccggaggaagaagcgcaactcaagaaaattgcacaggcgcttcagcttccactggagcagtatctgtg

SEQ ID NO: 382498 - DNA, 75 bp, synthetic construct
  source 1..75: mol_type = other DNA
gagaaaaccattgcagcactccctgcctttgcgccgttctccggtgagattgcacaaatgagcgccaatattcgc

SEQ ID NO: 382499 - DNA, 75 bp, synthetic construct
  source 1..75: mol_type = other DNA
tgcccaaatgagcgccaatatccgtgctcgttacgaagcgtcccctcgttctgctaatgcacaggctattcgtga

SEQ ID NO: 382500 - DNA, 75 bp, synthetic construct
  source 1..75: mol_type = other DNA
tattggcgaacaagaggagctggtgctgaaaaagattgcccaggcacttcagttgtcgctggatgcttatctcca

SEQ ID NO: 382501 - DNA, 75 bp, synthetic construct
  source 1..75: mol_type = other DNA
atgttaggtttattcaaaaagaaaactcgtaaagctgttatcgaggtcaaaaaaatggagaaccgagatgcggtt

SEQ ID NO: 382502 - DNA, 75 bp, synthetic construct
  source 1..75: mol_type = other DNA
gagaaaacaattgcagctctgcctgcgttttctccgtttgctggtgagattgcccaaatgagcgccaatatccgt

SEQ ID NO: 382503 - DNA, 75 bp, synthetic construct
  source 1..75: mol_type = other DNA
ctggagaaaaccattgcagcacttcctgcctttgcgccgttctccggtgagattgcacaaatgagtgcaaatatc

SEQ ID NO: 382504 - DNA, 75 bp, synthetic construct
  source 1..75: mol_type = other DNA
atgtttggtattttcaaaaagaaaacccgcaaggccattactgaagtgaagaagatggagaatcgcgatgcagtg

SEQ ID NO: 382505 - DNA, 75 bp, synthetic construct
  source 1..75: mol_type = other DNA
caacccgggagatcggctgttaccgtaaataattacatgacaaatctttacgccgtgttccagtttggtgttgat

SEQ ID NO: 382506 - DNA, 75 bp, synthetic construct
  source 1..75: mol_type = other DNA
tgacggactggcgcggctttacgtcagcctttgcccgaatatgcgtttaattttcgccaaccatgaagatcagct

SEQ ID NO: 382507 - DNA, 75 bp, synthetic construct
  source 1..75: mol_type = other DNA
gtttcctttaaaccgacaagacagggtatcgggaattgcggctgaacgttatgcgcggaccctaaggaataaact

SEQ ID NO: 382508 - DNA, 75 bp, synthetic construct
  source 1..75: mol_type = other DNA
catggcattcttataatgcggcgtcgtgaggacgatgtatgggcagtgctacgctgggagtcagattcatatagt

SEQ ID NO: 382509 - DNA, 75 bp, synthetic construct
  source 1..75: mol_type = other DNA
cgaagtagtggacacggaagagtttgccgttattcgtgataatgcaaaagagattgttacccgctttaatgattt

SEQ ID NO: 382510 - DNA, 75 bp, synthetic construct
  source 1..75: mol_type = other DNA
tacgccggaaactttggtgaagtgctggaagcgatgtggcaggacggcgatgacgggctggcgcggctgtatgtc

SEQ ID NO: 382511 - DNA, 75 bp, synthetic construct
  source 1..75: mol_type = other DNA
gattccggtaattttggcgaagttctggaagccacctggaaagatggtgacgatggactagcgcgtttatatgtc

SEQ ID NO: 382512 - DNA, 75 bp, synthetic construct
  source 1..75: mol_type = other DNA
agtcagatgacattaacgagactgagcaaagagcatatcattgatgttcacctcagagagtatggcagaacagaa

SEQ ID NO: 382513 - DNA, 75 bp, synthetic construct
  source 1..75: mol_type = other DNA
tgtgtgcacttggatgggaggacatagatctgaaaaatggaacaatgatgatcaggagaaatttagcaaaagatc

SEQ ID NO: 382514 - DNA, 75 bp, synthetic construct
  source 1..75: mol_type = other DNA
attaagccagcaatcgacgctctccggagtcagatgacattaacgagactgagcaaagagcatatcattgatgtt

SEQ ID NO: 382515 - DNA, 75 bp, synthetic construct
  source 1..75: mol_type = other DNA
aaccaggggaaacaaagaaatactgctttgagctgggaattgttgatggcgatgctgaaattagcgcgttgaaag

SEQ ID NO: 382516 - DNA, 75 bp, synthetic construct
  source 1..75: mol_type = other DNA
ctgggggcagaagtcatgagccagcgtatccgtgaaatatctgataacgatccgcgcgtggtggcgctggtcatt

SEQ ID NO: 382517 - DNA, 75 bp, synthetic construct
  source 1..75: mol_type = other DNA
ttacctggcagcagaaagaaggctgtattaccgtcgatcataaacgctgtattggctgtagcgcctgtactacgg

SEQ ID NO: 382518 - DNA, 75 bp, synthetic construct
  source 1..75: mol_type = other DNA
cattggtccggatgaagaagcacagctcaagaaaattgcacaggcgttgcagttgccgctggagcagtacctgtg

SEQ ID NO: 382519 - DNA, 75 bp, synthetic construct
  source 1..75: mol_type = other DNA
ttctctgtggatcgctgggacgagggctggacagaaagcgtcaaacgtcaggtggtgaaggatgctttttatatt

SEQ ID NO: 382520 - DNA, 75 bp, synthetic construct
  source 1..75: mol_type = other DNA
tgcgcgatcgtatcgcaggagccggagccaccaccacggctgcagggctggcaatgggcgcgccagtgatggcgg

SEQ ID NO: 382521 - DNA, 75 bp, synthetic construct
  source 1..75: mol_type = other DNA
cctttggcacttcccgcgaaaggcggcgaagcgatggtgagtcgtgcagccactgtgccgcccgttcaacggatt

SEQ ID NO: 382522 - DNA, 75 bp, synthetic construct
  source 1..75: mol_type = other DNA
gcatctgctgccttatctcgcctgggcgttttccgttgaccgctgggatcgcaactggccggaagagacaaagcg

SEQ ID NO: 382523 - DNA, 75 bp, synthetic construct
  source 1..75: mol_type = other DNA
taagtgaagagctgcatgaagaaatggagcgtctgattgccgatgcgcgccccgtcagccgccacctcgtggggc

SEQ ID NO: 382524 - DNA, 75 bp, synthetic construct
  source 1..75: mol_type = other DNA
tgctgccgcactgcatgtgcacggtgtgcaacgcgtggagataatcgaacccacacagaatatggccatcagcgg

SEQ ID NO: 382525 - DNA, 75 bp, synthetic construct
  source 1..75: mol_type = other DNA
agcaacctgcgacggtgaatgcagacggtaaagtgatgataccatcgggtggttttccttcatggggatatggct

SEQ ID NO: 382526 - DNA, 75 bp, synthetic construct
  source 1..75: mol_type = other DNA
agcaacctgcgacggtgaatgcagacggaaaagtgatgattccatcgggtggttttccttcatggggatatggct

SEQ ID NO: 382527 - DNA, 75 bp, synthetic construct
  source 1..75: mol_type = other DNA
gcccgttaagtcgacctctgctgaactgcagagcgcagcggcaatggggcaacgattcggggaggcactggcgga

SEQ ID NO: 382528 - DNA, 75 bp, synthetic construct
  source 1..75: mol_type = other DNA
gctgccgttgttgccggaatgatgggcgttgctgccgcgcctgcagagcttccaccgttacatcctttggcactt

SEQ ID NO: 382529 - DNA, 75 bp, synthetic construct
  source 1..75: mol_type = other DNA
agcaacctgcgacggtgaatgcagacgggaaagtgatgatcccatcgggtggttttccatcatggggatatggct

SEQ ID NO: 382530 - DNA, 75 bp, synthetic construct
  source 1..75: mol_type = other DNA
agcaacctgcgacggtgaatgcagacggcaaagtgatgatgccatcgggtggttttccatcatggggatatggct

SEQ ID NO: 382531 - DNA, 75 bp, synthetic construct
  source 1..75: mol_type = other DNA
acctatctggaacttgagcgactgataagcgatgccaaaccatgtagccgtcacatgatcggcatgtccatcaat

SEQ ID NO: 382532 - DNA, 75 bp, synthetic construct
  source 1..75: mol_type = other DNA
agcaaggggcaccgaatttctcctggagtgccgcgcatttgtttatgttgtataacgattttttccgtaagcaat

SEQ ID NO: 382533 - DNA, 75 bp, synthetic construct
  source 1..75: mol_type = other DNA
tgcgcttcgccacgccgcgcacatcactactggaaaccaaaatcaccagcgataaaccgctggatctggtgtggg

SEQ ID NO: 382534 - DNA, 75 bp, synthetic construct
  source 1..75: mol_type = other DNA
cgtcggtgaccgggcgctggttctccggcaatcagacctggccgtgggatacctggaagcaggcgtttgcgatgg

SEQ ID NO: 382535 - DNA, 75 bp, synthetic construct
  source 1..75: mol_type = other DNA
tattggtccggatgaagaagcacagctcaagaaaattgctcaggcgctgcagctaccactggagcagtacctgtg

SEQ ID NO: 382536 - DNA, 75 bp, synthetic construct
  source 1..75: mol_type = other DNA
ggtggcctatcacgactggtggttacgtaaccgcgatcataacggcaacggggtgccggaatatggcgcgacccg

SEQ ID NO: 382537 - DNA, 75 bp, synthetic construct
  source 1..75: mol_type = other DNA
gggccggaaggctggtcaccgctgtttaacggtgcggcaacgcaggccaacgccgacgcggtggtgaaggtgatg

SEQ ID NO: 382538 - DNA, 75 bp, synthetic construct
  source 1..75: mol_type = other DNA
ccgaagaacaagcgacaaacagtgcttcaatctctgcttgtcacgctcagggaatgttaacggatttgctgttca

SEQ ID NO: 382539 - DNA, 75 bp, synthetic construct
  source 1..75: mol_type = other DNA
gctgctcatcccggggcgaggctctcccactaaaaggaaacgtcacgatgtttggtattttcaaaaagaaaacct

SEQ ID NO: 382540 - DNA, 75 bp, synthetic construct
  source 1..75: mol_type = other DNA
aatttataccgtagatgtattagagaagcatgatgatggttggtgtaagcttccctttaaaggaattgtaggtga

SEQ ID NO: 382541 - DNA, 75 bp, synthetic construct
  source 1..75: mol_type = other DNA
atccggatatcgccaaagagaatatccgcgcggtcttctcctggcagatccagccaggcgaccgcgtgcgtccgc

SEQ ID NO: 382542 - DNA, 75 bp, synthetic construct
  source 1..75: mol_type = other DNA
ctcgctattgcaggagtcggtggatcaggccagctatatgtacagcgataaccattatctggcggagatggcaac

SEQ ID NO: 382543 - DNA, 75 bp, synthetic construct
  source 1..75: mol_type = other DNA
caggcgtttgcgatggcgcatttcaatccggacatcgccaaagagaatatccgcgcggtcttctcctggcagatc

SEQ ID NO: 382544 - DNA, 75 bp, synthetic construct
  source 1..75: mol_type = other DNA
cataaataccctggcttacgcggcacactacaaaccgcatccactgactgcgacacaattgtggaagctgcagca

SEQ ID NO: 382545 - DNA, 75 bp, synthetic construct
  source 1..75: mol_type = other DNA
cccctgaactggagcagcggttgcagaaactggtgcaatccggttcttcggtgatgtttattgcaattgacatgg

SEQ ID NO: 382546 - DNA, 75 bp, synthetic construct
  source 1..75: mol_type = other DNA
atgggcttcccttctcctgcggcggattatgttgagagccgtatttctcttgatcagcagataattagacatcct

SEQ ID NO: 382547 - DNA, 75 bp, synthetic construct
  source 1..75: mol_type = other DNA
acgcggcacactacaaaccgcatccactgactgcgacacaattgtggaagctgcagcactattacccgcttttga

SEQ ID NO: 382548 - DNA, 75 bp, synthetic construct
  source 1..75: mol_type = other DNA
aaagcaaataaatgacaccctcggtcatcaggagggggatttagcgattacgttattagctcaggcgattaaaca

SEQ ID NO: 382549 - DNA, 75 bp, synthetic construct
  source 1..75: mol_type = other DNA
gtgataacaggtgtctggaaatataggggcaaatccagtgcctatctgcgctatatcgtgcagaaagcagactcc

SEQ ID NO: 382550 - DNA, 75 bp, synthetic construct
  source 1..75: mol_type = other DNA
ctcgtgattagccagacaaaattactacgcggcagaatattatctgaagatgaacagtctgctcttgacgcctgg

SEQ ID NO: 382551 - DNA, 75 bp, synthetic construct
  source 1..75: mol_type = other DNA
atgaacgaggaaaaatatcaatccctgcgtaaaaagtcaataagtaagggggggaatatggcttgtattgttatg

SEQ ID NO: 382552 - DNA, 75 bp, synthetic construct
  source 1..75: mol_type = other DNA
gactttggggatgttgtttataagtataaaggcggtgacaagagcgatacggtttttggtgccggccttgcggtg

SEQ ID NO: 382553 - DNA, 75 bp, synthetic construct
  source 1..75: mol_type = other DNA
gattcctcgcttactccagttgatggttcgctgcttgtgtgcgctatggagggtgaatatcgcataaagagatac

SEQ ID NO: 382554 - DNA, 75 bp, synthetic construct
  source 1..75: mol_type = other DNA
gcacgaagcgagccgtccgttggtgttctcgtcaacctactatcagactcgtcaaaacctgctggatatcgaaag

SEQ ID NO: 382555 - DNA, 75 bp, synthetic construct
  source 1..75: mol_type = other DNA
tagatattaacgggaactggatgtttgacggaaaaaatgtggttgaaagagtaagaaccgcagatgagttaaaag

SEQ ID NO: 382556 - DNA, 75 bp, synthetic construct
  source 1..75: mol_type = other DNA
ttcagcggccttatcattaaagctcagggtcatgttgtggcgggtcaaacgccgctgtatgaaatcaaaaagtaa

SEQ ID NO: 382557 - DNA, 75 bp, synthetic construct
  source 1..75: mol_type = other DNA
atgactcagagaggtaaataccatgattcacctgttcaaaacctgcatgattaccgccttcattctggggttaac

SEQ ID NO: 382558 - DNA, 75 bp, synthetic construct
  source 1..75: mol_type = other DNA
cggcgaaaaccattcagtaccacggtgcctggtaggtataacgttggcgtgagcatcttcacgccaacgtgctgt

SEQ ID NO: 382559 - DNA, 75 bp, synthetic construct
  source 1..75: mol_type = other DNA
caacctgaaaacgccgggtcgtgaagataaagaagacgagatcgttactgaagaagccaacagcaacactgaaga

SEQ ID NO: 382560 - DNA, 75 bp, synthetic construct
  source 1..75: mol_type = other DNA
gtcagtctgccgttatcggttttcaatccccaggactaccatccactgctgattaccgtttccggaaaaaatgtt

SEQ ID NO: 382561 - DNA, 75 bp, synthetic construct
  source 1..75: mol_type = other DNA
aggctggaaacttaccggtggaacatgtactcctgagacattcacactgatttacgaacgacagcctggaggaac

SEQ ID NO: 382562 - DNA, 75 bp, synthetic construct
  source 1..75: mol_type = other DNA
aacagcgagtcccttctcatcagaaacacaagccccatgtaaaatccagacggcttacctctctgaaagtgactg

SEQ ID NO: 382563 - DNA, 75 bp, synthetic construct
  source 1..75: mol_type = other DNA
gtggagatcttctctgccgctttttttttcatcaatcatccccataatccttgttagattatcaattttaaaaaa

SEQ ID NO: 382564 - DNA, 75 bp, synthetic construct
  source 1..75: mol_type = other DNA
cgcagggacaatcgtgaaaatcttcaacaccaaccacgcgttctgcctggaaaccgaaaaaggcgcggagatcgt

SEQ ID NO: 382565 - DNA, 75 bp, synthetic construct
  source 1..75: mol_type = other DNA
ggcaaccaactatattgctgcggttggcggtactgacaacctgaaagcgattgacgcctgtatcacccgtctgcg

SEQ ID NO: 382566 - DNA, 75 bp, synthetic construct
  source 1..75: mol_type = other DNA
gtcaacgatgcgatgtgtaaacgtctgggggcttctggggtagtgaaactgaacaaacagactattcaggtgatt

SEQ ID NO: 382567 - DNA, 75 bp, synthetic construct
  source 1..75: mol_type = other DNA
accaaacgcggtgtctgtcgcggagctggtatcgccgattaccggtgatgttgtggcactggatcaggttcctga

SEQ ID NO: 382568 - DNA, 75 bp, synthetic construct
  source 1..75: mol_type = other DNA
ccgtggtccggtagccgctgcgtcagctgaaactgcgcctgcaactgccgcgcctgtagcaaaaccgcaggctat

SEQ ID NO: 382569 - DNA, 75 bp, synthetic construct
  source 1..75: mol_type = other DNA
tagtggaaaacaagttgctgttttaggtccggcctttaaggatgaaaaaactggaaagataacaggtgcaattca

SEQ ID NO: 382570 - DNA, 75 bp, synthetic construct
  source 1..75: mol_type = other DNA
atgagtagcaaaatcctaggtaatgtctgggatgcatgtgcagcatatggcatcaaaggtgcaaaactgatgatt

SEQ ID NO: 382571 - DNA, 75 bp, synthetic construct
  source 1..75: mol_type = other DNA
cagggttgcggtgtcccagaggctctgcgcgacaaaatatttgagcagggcgtcagtacgcgtgctgatgaaccc

SEQ ID NO: 382572 - DNA, 75 bp, synthetic construct
  source 1..75: mol_type = other DNA
cgcacgcgtggtccgtcagcaagaggcgctgtttagttcggtttatgaagggctgattgcggtggatccgcatgg

SEQ ID NO: 382573 - DNA, 75 bp, synthetic construct
  source 1..75: mol_type = other DNA
tgctggcaggtaacaagctgagcaatgacgaactgaacatgcttggcgagatgatcggcgagcaggatatcgagc

SEQ ID NO: 382574 - DNA, 75 bp, synthetic construct
  source 1..75: mol_type = other DNA
ggcgtgaccgcctgctggaaatccactccaacggtggcgaaaaagcccaggcactggcagaaagcattgaagagc

SEQ ID NO: 382575 - DNA, 75 bp, synthetic construct
  source 1..75: mol_type = other DNA
atactattaccagccatgacggctggcagatgcaagtcgaagaagtaaaagaagaaaatggcttgctgacctata

SEQ ID NO: 382576 - DNA, 75 bp, synthetic construct
  source 1..75: mol_type = other DNA
attaccaggtgcggcgcagattgtcagacacgcggttaacgcgtggcttgataagaatggttttgcatctggggg

SEQ ID NO: 382577 - DNA, 75 bp, synthetic construct
  source 1..75: mol_type = other DNA
tcatctggatgcgcagaccgttatgcgccttaagcagtacaggatcgaccatataaatcatcatcctgaccaacc

SEQ ID NO: 382578 - DNA, 75 bp, synthetic construct
  source 1..75: mol_type = other DNA
acacaggtacaaaaaaagccgcccttgagcgactcgatttgcatacgatgtggtgcgaaggccggactcaaacat

SEQ ID NO: 382579 - DNA, 75 bp, synthetic construct
  source 1..75: mol_type = other DNA
atgaatcaatatatttattccccttcggaaaatgcattttatgctgttaatttaaaaaatacttatgaagtaaat

SEQ ID NO: 382580 - DNA, 75 bp, synthetic construct
  source 1..75: mol_type = other DNA
ttacaaacgaatttttcccttactcccttaaggatagctacctggcaagcgggcaatggcctgatgagggagtcg

SEQ ID NO: 382581 - DNA, 75 bp, synthetic construct
  source 1..75: mol_type = other DNA
attgcccggagtggcacaggtagtccggcacgcagtcaacgcatggcttgatgaaaatggcttcgctgtaacgga

SEQ ID NO: 382582 - DNA, 75 bp, synthetic construct
  source 1..75: mol_type = other DNA
cgcgagctgcacaccattaagctgccgctgccgacgcagtatcagacggctattaaagtctccggcattatgggc

SEQ ID NO: 382583 - DNA, 75 bp, synthetic construct
  source 1..75: mol_type = other DNA
cgccgggcgcgacccgcaaacggaagatctggcgcagacgcagcgttgcttgataaagggggatgtgctttatgg

SEQ ID NO: 382584 - DNA, 75 bp, synthetic construct
  source 1..75: mol_type = other DNA
ctgatatttttgatagtgttccctttagaggtgcaatgctccgttccgatgaaagtatggttccttatagtcagt

SEQ ID NO: 382585 - DNA, 75 bp, synthetic construct
  source 1..75: mol_type = other DNA
ctcagactctactgacaactttgcatggagccttggggctggtgtccgttatgacgtaaccccggatatcgctct

SEQ ID NO: 382586 - DNA, 75 bp, synthetic construct
  source 1..75: mol_type = other DNA
ttcagaccagcgtttcctgtcaggagatgaggaagaaacgtcaaagtataaaggcggcgatgaccatgatacggt

SEQ ID NO: 382587 - DNA, 75 bp, synthetic construct
  source 1..75: mol_type = other DNA
gtaacgatagcgcattcacaccatgggtatcggtggggattggttatgcccgaattcatcagaaagcaaccggta

SEQ ID NO: 382588 - DNA, 75 bp, synthetic construct
  source 1..75: mol_type = other DNA
accgtaaactcgtcattaaacctgtcgccggacgtaacccgcaaacgaaagatctggcgctgacacagcgttgtt

SEQ ID NO: 382589 - DNA, 75 bp, synthetic construct
  source 1..75: mol_type = other DNA
gcaactggagcaagtactgcgcgaacgtgaaggtattcgcgctgcggtgttccacgaaggtatgtcgattatcga

SEQ ID NO: 382590 - DNA, 75 bp, synthetic construct
  source 1..75: mol_type = other DNA
ctggtgatttgctcgctggattttgcccgccgtagcaaacagcgtctggaacatctctgtgaagccgagtgggac

SEQ ID NO: 382591 - DNA, 75 bp, synthetic construct
  source 1..75: mol_type = other DNA
caacgatctgattaactatctggcttcaccggatcaaaccgaaggctttgacgatctgatcaaaaactgccgcga

SEQ ID NO: 382592 - DNA, 75 bp, synthetic construct
  source 1..75: mol_type = other DNA
cagttcagtatcccggttcgtacggaactggagttttatgctcgcggaaaagctgacacaaaatacaatctttat

SEQ ID NO: 382593 - DNA, 75 bp, synthetic construct
  source 1..75: mol_type = other DNA
gttacgccgaagcccagcacgatgcctacaacccgttcgacaccgaacagctggtgatttgctcgctggattttg

SEQ ID NO: 382594 - DNA, 75 bp, synthetic construct
  source 1..75: mol_type = other DNA
gtcgatgaagcgcatcacctggtgtggagcgaagatgcgccaagccgtgaatatcaggccattgaacaactggca

SEQ ID NO: 382595 - DNA, 75 bp, synthetic construct
  source 1..75: mol_type = other DNA
agtccatcagctcaacggaggtctacacgaaggtgtttgcgctggatgtggctgcacggcaccgggtgcagtttg

SEQ ID NO: 382596 - DNA, 75 bp, synthetic construct
  source 1..75: mol_type = other DNA
ccgccgctgccgctgatggtgtgacgttctctgtcccggtcacgccacatacgttccgccattcctatgcgatgc

SEQ ID NO: 382597 - DNA, 75 bp, synthetic construct
  source 1..75: mol_type = other DNA
ctgcaaagcctgatgggacataagtccatcagttcaacggaagtctacacgaaggtttttgcgctggatgtggct

SEQ ID NO: 382598 - DNA, 75 bp, synthetic construct
  source 1..75: mol_type = other DNA
cgttctcttctcggccgggacgctggcctgcggctttgcgccaggctacatcaccatgtttatcgcgcgtctggt

SEQ ID NO: 382599 - DNA, 75 bp, synthetic construct
  source 1..75: mol_type = other DNA
ggcgctatgggtgaccgctacgggcgtcgtctggcaatggtcaccagcatcgttctcttctcggccgggacgctg

SEQ ID NO: 382600 - DNA, 75 bp, synthetic construct
  source 1..75: mol_type = other DNA
tggttgggatatctgcttgacggttttgatttcgttttaatcgccctggtactcaccgaagtacaaggtgaattc

SEQ ID NO: 382601 - DNA, 75 bp, synthetic construct
  source 1..75: mol_type = other DNA
ctggcggccatgctctggtttgttgctgccccggtggtgacgtatatcttctgtgcattagtggtattgttggca

SEQ ID NO: 382602 - DNA, 75 bp, synthetic construct
  source 1..75: mol_type = other DNA
cgagctggtggaagagagtgcgcaggtgtcggcgatggtgaaacaccgcgccagccgactggaagacgcggtgac

SEQ ID NO: 382603 - DNA, 75 bp, synthetic construct
  source 1..75: mol_type = other DNA
cgaaggtgtttgcgctggatgtggctgcacggcaccgggtgcagtttttgatgcctgagtccgatgcggtcacaa

SEQ ID NO: 382604 - DNA, 75 bp, synthetic construct
  source 1..75: mol_type = other DNA
ctgcagagcctgatggggcataagtccatcagctcaacggaggtctacacgaaggtgtttgcgctggatgtggct

SEQ ID NO: 382605 - DNA, 75 bp, synthetic construct
  source 1..75: mol_type = other DNA
tcataaaggcctggtggtgcgtaaaggctggctgggaaaactgccttcattaccgcttcgctggcgggcgcgtgg

SEQ ID NO: 382606 - DNA, 75 bp, synthetic construct
  source 1..75: mol_type = other DNA
ccaggcgctgaaggtggcgaccggtgagtgtaacagtgttgatcatctgaatcgcagtgatgaactggggttgac

SEQ ID NO: 382607 - DNA, 75 bp, synthetic construct
  source 1..75: mol_type = other DNA
atgagtactacaatccagaatatcccgtggtatcgccatctcaaccgcgcacaatggcgggcattttccgctgcc

SEQ ID NO: 382608 - DNA, 75 bp, synthetic construct
  source 1..75: mol_type = other DNA
atttctttgccggtatccgcgatatcgtcggcggtcgttcaggggcttacgaaaaggaactgcgcaaagcccggg

SEQ ID NO: 382609 - DNA, 75 bp, synthetic construct
  source 1..75: mol_type = other DNA
gccgtagtcggtattgatatcgactacgaaacggtcgggcaaaacggcagtatgctgatggttagcgtcagcggt

SEQ ID NO: 382610 - DNA, 75 bp, synthetic construct
  source 1..75: mol_type = other DNA
caccgattgccgaccgctggcgcgatgcggcaaaactgattggtgtggatattctcaccatgcctggcgttgcgg

SEQ ID NO: 382611 - DNA, 75 bp, synthetic construct
  source 1..75: mol_type = other DNA
gggggcattgtcgcctggtcgggtggcgttaatctggcgaaccgtctttccgaaacgtttgctgtgatgaatgcg

SEQ ID NO: 382612 - DNA, 75 bp, synthetic construct
  source 1..75: mol_type = other DNA
ccgtttttagatgccaaagcgcagggtaaaatcagcgattccttcaaacgctttgccgatatccatctttcccgc

SEQ ID NO: 382613 - DNA, 75 bp, synthetic construct
  source 1..75: mol_type = other DNA
ataacgtggcgttgagtgaaccgacgctcgatctggcgcagttaccgacggaagtctggccaaacggtgagttac

SEQ ID NO: 382614 - DNA, 75 bp, synthetic construct
  source 1..75: mol_type = other DNA
aattaattgctgaaagcatttctttaaaagatacctcagatgaagatggcggcaactttatcttaggaaggagaa

SEQ ID NO: 382615 - DNA, 75 bp, synthetic construct
  source 1..75: mol_type = other DNA
aaggtgtttgcactggatgtggctgcacggcaccgggtgcagttttcgatgcctgagtccgatgcggtgtctatg

SEQ ID NO: 382616 - DNA, 75 bp, synthetic construct
  source 1..75: mol_type = other DNA
cactggagcgcagaaacaaacgaaccggaagaatggagaaggcgcgcatctgggaaatcaccgaccgcacagttc

SEQ ID NO: 382617 - DNA, 75 bp, synthetic construct
  source 1..75: mol_type = other DNA
ctgaatattctgttcaaaacaccgattgccgaccgctggcgcgaggcggcaaaactgattggtgtggatattctc

SEQ ID NO: 382618 - DNA, 75 bp, synthetic construct
  source 1..75: mol_type = other DNA
attctggaaaagctgaagatcacgccggagccgcgtgatgagtcaatccgtctggataaacccgttatgctcggt

SEQ ID NO: 382619 - DNA, 75 bp, synthetic construct
  source 1..75: mol_type = other DNA
ggggagattgcacaaaacacatacctttcacgcgaacgctgtcagttaatactgacccagttggttatggcgggg

SEQ ID NO: 382620 - DNA, 75 bp, synthetic construct
  source 1..75: mol_type = other DNA
acgaaggtttttgcgctggatgtggctgcccggcaccgggtgcagtttgcgatgccggagtctgatgcggttgcg

SEQ ID NO: 382621 - DNA, 75 bp, synthetic construct
  source 1..75: mol_type = other DNA
attggtgaattcaccaacgcggcgggtacggttttccacggcgacattaaccgcttctatgccggtgacggcacc

SEQ ID NO: 382622 - DNA, 75 bp, synthetic construct
  source 1..75: mol_type = other DNA
aaaccgaaaaaggcgcggagatcgtcgtccatatgggtatcgacaccgtagcgctggaaggtaaaggctttaaac

SEQ ID NO: 382623 - DNA, 75 bp, synthetic construct
  source 1..75: mol_type = other DNA
attagcccggtggtttgcagcaatatcgacgatttcagcggccttatcattaaagctcagggccatgttgtggcg

SEQ ID NO: 382624 - DNA, 75 bp, synthetic construct
  source 1..75: mol_type = other DNA
actactgatgctggcggtggtggttatcggcatattactcgcgcatcgtacccgttttggtaatcaggtatacgc

SEQ ID NO: 382625 - DNA, 75 bp, synthetic construct
  source 1..75: mol_type = other DNA
gtggacgaaaatcgccatcggtattttgttgtttatttttatagcattacagcgtggattaacggtgctgtggga

SEQ ID NO: 382626 - DNA, 75 bp, synthetic construct
  source 1..75: mol_type = other DNA
tcagtggtaattggcggtacgcttttgagtggtggcgttggaacggtattagggacgctttttggcgtggcgatt

SEQ ID NO: 382627 - DNA, 75 bp, synthetic construct
  source 1..75: mol_type = other DNA
gcccataaggcatggaagcagttacagggcgggaagattaaagggaaaacgtgccgggtgcggttattaaaataa

SEQ ID NO: 382628 - DNA, 75 bp, synthetic construct
  source 1..75: mol_type = other DNA
gcttctcgccagacgctcttattttcagcgacctggccggaagccattgccgcgataagcggacgtgttcagcgc

SEQ ID NO: 382629 - DNA, 75 bp, synthetic construct
  source 1..75: mol_type = other DNA
aaaaaagattgtcaggctgtgtgtgacgcgctgaatgaagtagggcaaagtgcattgtcgttacatggcgatctg

SEQ ID NO: 382630 - DNA, 75 bp, synthetic construct
  source 1..75: mol_type = other DNA
cgggaaatttttgagcgcgggcacgccgcagtcttgctaccctttgacccagtgcgtgatgaagttgtgctgatt

SEQ ID NO: 382631 - DNA, 75 bp, synthetic construct
  source 1..75: mol_type = other DNA
gctgtagagtcgcaaccgggtatcaaagacgcacgtcttttggcctcggttttccagacgctgcgcgcatattaa

SEQ ID NO: 382632 - DNA, 75 bp, synthetic construct
  source 1..75: mol_type = other DNA
attcgacaacggtcagggcgggagcggacaacgtttcgactggtcactattaaatggtcaatcgcttggcaacgt

SEQ ID NO: 382633 - DNA, 75 bp, synthetic construct
  source 1..75: mol_type = other DNA
ggaaatggttgccgggatgattgaagagggtgaaagtgtggaagatgtcgcccgccgggaagcggttgaggaggc

SEQ ID NO: 382634 - DNA, 75 bp, synthetic construct
  source 1..75: mol_type = other DNA
tgatcgttttcgacgatgcagacctcgatctcgccgccgatatcgccatgatggcgaacttcttcagctccggcc

SEQ ID NO: 382635 - DNA, 75 bp, synthetic construct
  source 1..75: mol_type = other DNA
tgctggcgaccgtgcaggccgccgggcgcgaggatgtcgatcgcgccgtgaaaagcgcccagcaggggcaaaaaa

SEQ ID NO: 382636 - DNA, 75 bp, synthetic construct
  source 1..75: mol_type = other DNA
attcgcgcgggcgacgttttcgatccgcaaactaacttcggcccgctggtcagcttcccgcatcgcgataacgtg

SEQ ID NO: 382637 - DNA, 75 bp, synthetic construct
  source 1..75: mol_type = other DNA
cctacgcgatgcatatgctgtatgctggtattccgctgaaggtgctgcagagcctgatggggcacaagtcgatta

SEQ ID NO: 382638 - DNA, 75 bp, synthetic construct
  source 1..75: mol_type = other DNA
acatgctgtatgccggtataccgctgaaggtcctgcagagcctgatggggcataagtccatcagctcaacggagg

SEQ ID NO: 382639 - DNA, 75 bp, synthetic construct
  source 1..75: mol_type = other DNA
cgctgggcgtagtggcagggattggcgcatggaactacccgatccagattgccctgtggaaatccgccccggcgc

SEQ ID NO: 382640 - DNA, 75 bp, synthetic construct
  source 1..75: mol_type = other DNA
atgaaggataataccgttccactgaaattaatcgcgctgttagcgaatggtgaatttcactctggcgagcagttg

SEQ ID NO: 382641 - DNA, 75 bp, synthetic construct
  source 1..75: mol_type = other DNA
tcgccgggggcggaaatggttttcgccttttggcgcaaacttatatttgtcgatgttctggcgtctggaacaagg

SEQ ID NO: 382642 - DNA, 75 bp, synthetic construct
  source 1..75: mol_type = other DNA
ctggatggcggcagtgtagccgtgctgccggttattgactccacgaatcaatatctccttgaccgtatcggagag

SEQ ID NO: 382643 - DNA, 75 bp, synthetic construct
  source 1..75: mol_type = other DNA
gtgatgacgctccagagttacacccaagtgaagtccatccaggttgagatggctaaattccagtccatattctaa

SEQ ID NO: 382644 - DNA, 75 bp, synthetic construct
  source 1..75: mol_type = other DNA
caaaggcaaagaggaaggcgcgcgcgtactgtgcggcggcgatgtactgaaaggcgatggcctcgataacggcgc

SEQ ID NO: 382645 - DNA, 75 bp, synthetic construct
  source 1..75: mol_type = other DNA
atgggttgcgccgaccgtgttcaccgattgcagcgacgagatgaccattgtgcgcgaagagattttcgggccggt

SEQ ID NO: 382646 - DNA, 75 bp, synthetic construct
  source 1..75: mol_type = other DNA
ccagtagcggtcaatgggatgattattctcagtcaaaaatctatatccgtagtgatggtaaacctgtcggaaata

SEQ ID NO: 382647 - DNA, 75 bp, synthetic construct
  source 1..75: mol_type = other DNA
acatcgcggcagcagacccgcatacccagtacgcaccgaaagccagcccgacattcaccggcacgccaacagcgc

SEQ ID NO: 382648 - DNA, 75 bp, synthetic construct
  source 1..75: mol_type = other DNA
atgcctcaatctctcccggacactacgccgtcgaaaaggcgctttcgctggccaacgggaatgccgcagctggcg

SEQ ID NO: 382649 - DNA, 75 bp, synthetic construct
  source 1..75: mol_type = other DNA
cactatcgtctccggttttgatgataatgatactggggatatcagttcactcagctcaacacaatacggatttgg

SEQ ID NO: 382650 - DNA, 75 bp, synthetic construct
  source 1..75: mol_type = other DNA
tatttgatgcatccagtaaaggtgcccaaaaatatgactggtgggcttatgtatcagctcgtccgcgtaatattg

SEQ ID NO: 382651 - DNA, 75 bp, synthetic construct
  source 1..75: mol_type = other DNA
gggtgaatttatccgtggctgggatgacggacgtggcgtggatgcggggcgaacattactgggtgctcaggattt

SEQ ID NO: 382652 - DNA, 75 bp, synthetic construct
  source 1..75: mol_type = other DNA
gggaatgaacaccggaattttgctttctggctttccgccggagatgaaccaggtcgtaaaagcggtggtggtgct

SEQ ID NO: 382653 - DNA, 75 bp, synthetic construct
  source 1..75: mol_type = other DNA
acgtaatgcccgcaaaggactggctacgctttgtatcggcgggggccagggcgtggcattgaccattgaacgtga

SEQ ID NO: 382654 - DNA, 75 bp, synthetic construct
  source 1..75: mol_type = other DNA
gtgattctcgggcaggtcctgaccgctggggcagggcaaaatccggcacgacagtcggctattaaaggtggcctt

SEQ ID NO: 382655 - DNA, 75 bp, synthetic construct
  source 1..75: mol_type = other DNA
aggagccacaactgccgcgatgacggtggcgggattcagcctgccgattgttttgctaagcgcccttggcaccgg

SEQ ID NO: 382656 - DNA, 75 bp, synthetic construct
  source 1..75: mol_type = other DNA
ctggttcggcagtggatcgctgttgttcctgccaacgccagtcattattgcggtgctgacgcttctcctgttctg

SEQ ID NO: 382657 - DNA, 75 bp, synthetic construct
  source 1..75: mol_type = other DNA
tgtgtgcggcgattgcgggcattatcgtggcggcggatattcgcggtgccgatgccaacaacgccggattatggc

SEQ ID NO: 382658 - DNA, 75 bp, synthetic construct
  source 1..75: mol_type = other DNA
gacattcgacgcatctcgctcagttcgcacagcatctgaaacccgctcccgtaacatcgcctttaattatattgt

SEQ ID NO: 382659 - DNA, 75 bp, synthetic construct
  source 1..75: mol_type = other DNA
atgccatcaggtggtttcccatcatggggatatggttttgcggggatgtatgacagcggtgggtatatcccgcgc

SEQ ID NO: 382660 - DNA, 75 bp, synthetic construct
  source 1..75: mol_type = other DNA
atgaactgtcagaaagactggggaaaatcgcccagctctacaaaatacctacccgcaatattgaacagctcggcg

SEQ ID NO: 382661 - DNA, 75 bp, synthetic construct
  source 1..75: mol_type = other DNA
gtcgcaaaccctgacgacagctgggaagaccagaaacgtgaccttttggcctttgccagcacggcagcaaaggcg

SEQ ID NO: 382662 - DNA, 75 bp, synthetic construct
  source 1..75: mol_type = other DNA
gccagcagagcttccaccgttgcaccctttggcacttccagcgaaaggtggagaagcgatggtgagtcgcgcagc

SEQ ID NO: 382663 - DNA, 75 bp, synthetic construct
  source 1..75: mol_type = other DNA
tgcgtgatcgtattgcaggtgccggagccactaccacggcggcagggttggcaatgggcgcgccagtgatggcgg

SEQ ID NO: 382664 - DNA, 75 bp, synthetic construct
  source 1..75: mol_type = other DNA
gttacggcagcagtaactcgaaccagcagcgcgttgtcctggctggctggcgcgccactggcactgctgcgacgc

SEQ ID NO: 382665 - DNA, 75 bp, synthetic construct
  source 1..75: mol_type = other DNA
agcagtctggacagcttccgaaagctgcaggcagaaaatcagaaattaagcgacaggctgaactatgcccgccag

SEQ ID NO: 382666 - DNA, 75 bp, synthetic construct
  source 1..75: mol_type = other DNA
gcagctgagccaattctgtcagcctttgcgccattgatgcccatatttcaatgggtaggggataaggtccgggag

SEQ ID NO: 382667 - DNA, 75 bp, synthetic construct
  source 1..75: mol_type = other DNA
tcctgcggagattgaaaagcagatgaccaccgatgccatgggcaccattcagcgggttctggagaaggtcaacaa

SEQ ID NO: 382668 - DNA, 75 bp, synthetic construct
  source 1..75: mol_type = other DNA
ggggatatggctttgcggggatgtatgacagcggcggctatatcccgcgcgggcagtttggcatcgtcggtgaaa

SEQ ID NO: 382669 - DNA, 75 bp, synthetic construct
  source 1..75: mol_type = other DNA
gaaattgttaacggcccggcaaacgtgaccagccggagaaatacagctgcactggctgccgttgtcgccggaatg

SEQ ID NO: 382670 - DNA, 75 bp, synthetic construct
  source 1..75: mol_type = other DNA
aacgtaacaccatcgccaaagatatgcgtgccctgcatgaccaaattggtgataccccctggaccgatgaacagc

SEQ ID NO: 382671 - DNA, 75 bp, synthetic construct
  source 1..75: mol_type = other DNA
caggcagcgcccctgagacgctggatacgctcaaagagctggctgatgccctcggcaacgatccgaattttgcga

SEQ ID NO: 382672 - DNA, 75 bp, synthetic construct
  source 1..75: mol_type = other DNA
atgcgcagatggttttccaggtttacggaaaatggatgtcagaaaataacgatgctcaggttgcgcttctgaact

SEQ ID NO: 382673 - DNA, 75 bp, synthetic construct
  source 1..75: mol_type = other DNA
ccagatccgctcacacgagacgaatttattcgttttattgatgcctgtcaccatcaacaaacgaaaaacctgtgg

SEQ ID NO: 382674 - DNA, 75 bp, synthetic construct
  source 1..75: mol_type = other DNA
atgaaagataacaatatcgggcaaatagaactactcaataagcagttgacggagagtgtcccatacatgccccat

SEQ ID NO: 382675 - DNA, 75 bp, synthetic construct
  source 1..75: mol_type = other DNA
cctgaggccgtagcgcaggccattaaaacgcgctttctgctttggtacgggcagtggtttctggacaccacagaa

SEQ ID NO: 382676 - DNA, 75 bp, synthetic construct
  source 1..75: mol_type = other DNA
atgcgataccgtcgagaagatgacgatggggattacaccttcggtcagggcgatgatacctggctggttaactcc

SEQ ID NO: 382677 - DNA, 75 bp, synthetic construct
  source 1..75: mol_type = other DNA
attcttgatggttttaccaaacaggggacgcatcaggcgatggatgatatccgtgaatcggtggcggagctggct

SEQ ID NO: 382678 - DNA, 75 bp, synthetic construct
  source 1..75: mol_type = other DNA
ttaactctttacgacataaaatatcacatggaaaagatgttctttttaaagacaaatattatctattcaacttag

SEQ ID NO: 382679 - DNA, 75 bp, synthetic construct
  source 1..75: mol_type = other DNA
agaggagctgacagaagcttggtcggtggcaaaagtactgggtgtggaagacaaagtggagttaccactatttgt

SEQ ID NO: 382680 - DNA, 75 bp, synthetic construct
  source 1..75: mol_type = other DNA
gcgtgttccgcaatcacgatattgccgatgtgttggacaaagctaaggtgttatcactggcggcagtgcaactgc

SEQ ID NO: 382681 - DNA, 75 bp, synthetic construct
  source 1..75: mol_type = other DNA
tgcctgttgggcattatcggcaggagcgaatccaagcttcatagcaaaccaaatgggccatgcaaatgcacaaat

SEQ ID NO: 382682 - DNA, 75 bp, synthetic construct
  source 1..75: mol_type = other DNA
ctggtgaaaaaatgccagcaagtcggtcaccactataaagcagattccatcagagattcctgggcatctgcatta

SEQ ID NO: 382683 - DNA, 75 bp, synthetic construct
  source 1..75: mol_type = other DNA
tcaataaggcagatgtgggacgcagcgataaaacgtgccggactccgccatcgaaaatcatatcagtcgagacat

SEQ ID NO: 382684 - DNA, 75 bp, synthetic construct
  source 1..75: mol_type = other DNA
cgatgatacctggctgattaactcaccagaggccgtggcgcaggccgtgaaaacgcgattcgaattatggtacgg

SEQ ID NO: 382685 - DNA, 75 bp, synthetic construct
  source 1..75: mol_type = other DNA
cctatatcagcccctggcaaggattgctttttcttactgtagcagtaataaccattgcagccggatgtattttca

SEQ ID NO: 382686 - DNA, 75 bp, synthetic construct
  source 1..75: mol_type = other DNA
gatgaatgatgacgatgctgcggcgaaaaaaggcgcagacgttgatcttcaggctgaaaagctctctcataaaga

SEQ ID NO: 382687 - DNA, 75 bp, synthetic construct
  source 1..75: mol_type = other DNA
tgccaggtctgcgcgcgctgtgcgacgaatttggcgcattgctgatcatcgatgaagtaatgactggcttccgcg

SEQ ID NO: 382688 - DNA, 75 bp, synthetic construct
  source 1..75: mol_type = other DNA
cctgttccgtggccctcagccacacccccaactggatggctgaaatgtaacggtgcagcattttcttctgaaatg

SEQ ID NO: 382689 - DNA, 75 bp, synthetic construct
  source 1..75: mol_type = other DNA
cctgttccgtggccctcagccacacctccaacggggtggctgaaatgtaacggtgcagcattttcttctgaaatg

SEQ ID NO: 382690 - DNA, 75 bp, synthetic construct
  source 1..75: mol_type = other DNA
cctgttccgtggccctcagccacaccaccaacgggttggctgaaatgtaacggtgcagcattttcttctgaaatg

SEQ ID NO: 382691 - DNA, 75 bp, synthetic construct
  source 1..75: mol_type = other DNA
ggaccgtgaatatgccaccgcacccgtttgtgcgcccggcgtttgatgtgcgcagtgaacaggcagctcaggtgg

SEQ ID NO: 382692 - DNA, 75 bp, synthetic construct
  source 1..75: mol_type = other DNA
cattttggcaaatacgatcgctacgacgacaaatacacctatccggcaatgatgaacggttacatccagtatgac

SEQ ID NO: 382693 - DNA, 75 bp, synthetic construct
  source 1..75: mol_type = other DNA
atgcctttatatttttataattacaacgataaaagactgtactttttctttagctcatggattaacacaatgaaa

SEQ ID NO: 382694 - DNA, 75 bp, synthetic construct
  source 1..75: mol_type = other DNA
gagctgacaacacgtctggcagaaggtctgctggaagcggcagaagaagccggaattccgctggtggtaaaccac

SEQ ID NO: 382695 - DNA, 75 bp, synthetic construct
  source 1..75: mol_type = other DNA
ctatcaggctggtacgctttccggtaacccaattgcgatggcagcaggtttcgcctgtctgaatgaagtcgcgca

SEQ ID NO: 382696 - DNA, 75 bp, synthetic construct
  source 1..75: mol_type = other DNA
atgatcgaaaccctgctggatttttcggggctggaggacatcagccgcgatttgcagcttctgagtggtgcagaa

SEQ ID NO: 382697 - DNA, 75 bp, synthetic construct
  source 1..75: mol_type = other DNA
cggaatgcatgctgttgtgtgcggaaaccgatgacggcagtgaaagcgtgctgttaacgccggagcggatgatgc

SEQ ID NO: 382698 - DNA, 75 bp, synthetic construct
  source 1..75: mol_type = other DNA
tgggaaaaacggtggtggtcttatgcaatctgttaacatctgttgttattttgcacggtttttgtcgggtatgga

SEQ ID NO: 382699 - DNA, 75 bp, synthetic construct
  source 1..75: mol_type = other DNA
gatattacaaaccgcagtttaagaaagaatatgaaatgattaattataatgatggttggtattatgttcttgctc

SEQ ID NO: 382700 - DNA, 75 bp, synthetic construct
  source 1..75: mol_type = other DNA
tctgacagattactgggctgactactggacacagccgactgagccggagaaggcgctggttcacatgactgactg

SEQ ID NO: 382701 - DNA, 75 bp, synthetic construct
  source 1..75: mol_type = other DNA
tggtttaaaggtgatattgcggaacgttatgattttcgtcagactgcaagtaagacttcacgcggtttgatggat

SEQ ID NO: 382702 - DNA, 75 bp, synthetic construct
  source 1..75: mol_type = other DNA
tggtttaagggtgatgttgtggaacgttatgattttcgtcagactgcaagtaagacttctcgcggtttgatggat

SEQ ID NO: 382703 - DNA, 75 bp, synthetic construct
  source 1..75: mol_type = other DNA
ttggattttaaacatcttactcgatttaaagatataattgaactggacaaacgccctgttaaaattgaagaacgg

SEQ ID NO: 382704 - DNA, 75 bp, synthetic construct
  source 1..75: mol_type = other DNA
atgatgacactgtcttcatacattatactggtataactaagccatggcatgattgggcgaactacgcctctgcag

SEQ ID NO: 382705 - DNA, 75 bp, synthetic construct
  source 1..75: mol_type = other DNA
tccttcattctcgaccattgggtggtgggcacctattttgctggtgacactgcgtgccattcagggatttgccgt

SEQ ID NO: 382706 - DNA, 75 bp, synthetic construct
  source 1..75: mol_type = other DNA
tttcagaatgtatttttgatggtgaaggctcatgtcaccttacaactacgaggctgaaacttgtgctcaaagtgt

SEQ ID NO: 382707 - DNA, 75 bp, synthetic construct
  source 1..75: mol_type = other DNA
gaaggaaggcacatcaagacgggactggattctggaacctgacgagttacgtatgttgggggaaatttgtgtatt

SEQ ID NO: 382708 - DNA, 75 bp, synthetic construct
  source 1..75: mol_type = other DNA
tttacggttttctgagtgcaaacggaactgaaactttcgtgattgcacaagatggaaatcaatatataggtctga

SEQ ID NO: 382709 - DNA, 75 bp, synthetic construct
  source 1..75: mol_type = other DNA
acatatgttttctcctaacaattatagctattgcttatttgttcggagacaaatatacgtatgcagatataaaag

SEQ ID NO: 382710 - DNA, 75 bp, synthetic construct
  source 1..75: mol_type = other DNA
cagctcccagaagcattaatgaaccttatgtatgtatcgcgacacaatccacttgtcaggcgaaatactggaaca

SEQ ID NO: 382711 - DNA, 75 bp, synthetic construct
  source 1..75: mol_type = other DNA
cgatacgtctttaaattttaaccataaagattttatgtggtgtcccagacataaaaatacagaacggcaatttga

SEQ ID NO: 382712 - DNA, 75 bp, synthetic construct
  source 1..75: mol_type = other DNA
catgccagcttcttcattggcctgcccagcggcctgtcatggctggcatgggctaccggtattccagttgtgctg

SEQ ID NO: 382713 - DNA, 75 bp, synthetic construct
  source 1..75: mol_type = other DNA
aaggcgtggcggtcgccagcggcgagcacctgcaactggctgcggtgaaaaacctccagataaatgcgggaaaca

SEQ ID NO: 382714 - DNA, 75 bp, synthetic construct
  source 1..75: mol_type = other DNA
ggaaacaacgccgatatcggcgtggtgaagaatatgtttatcggcgtagggcgggcgctgagcgtgtttgtgcgc

SEQ ID NO: 382715 - DNA, 75 bp, synthetic construct
  source 1..75: mol_type = other DNA
caagctgtttgccaataaaggggcggtctcggtacaggcacagaacgatctgatggaactgttggcacagaaatc

SEQ ID NO: 382716 - DNA, 75 bp, synthetic construct
  source 1..75: mol_type = other DNA
ttatgtgtgcatcgccacacaatccacctgccaggcaaaatactggaataacggcaccggctggagtgaggtcgt

SEQ ID NO: 382717 - DNA, 75 bp, synthetic construct
  source 1..75: mol_type = other DNA
atgcagaagccgttagcaacgttttttatttctcctccggagattcccactcagcacggccccgacaacatcctg

SEQ ID NO: 382718 - DNA, 75 bp, synthetic construct
  source 1..75: mol_type = other DNA
cgtttattcatgtattccaggtcgcaggcaaaatcttcctcgacatgatgaccgggcttatcccgatgctcatct

SEQ ID NO: 382719 - DNA, 75 bp, synthetic construct
  source 1..75: mol_type = other DNA
gggaagcaggtaaacggcgtcatcgacaaacttcatgcctctctggcagaacaaagtagtattggtatgaatcat

SEQ ID NO: 382720 - DNA, 75 bp, synthetic construct
  source 1..75: mol_type = other DNA
cagtggttagcgagttttcgtcagcatcgctgggatctggaagaagaagcggaaaacttaattcaggaacaaagt

SEQ ID NO: 382721 - DNA, 75 bp, synthetic construct
  source 1..75: mol_type = other DNA
tggataaaggctgggtaaccagcagtaagaaatatttcgtgcgctttcgtattcaggtattccgtcagggtgaag

SEQ ID NO: 382722 - DNA, 75 bp, synthetic construct
  source 1..75: mol_type = other DNA
gggactggcatagcgtcgccatttatttgctggctggatgcctgatttccgcaatgaccgctttgttgatgaaag

SEQ ID NO: 382723 - DNA, 75 bp, synthetic construct
  source 1..75: mol_type = other DNA
cgttatcacgggatgacggaggagagttcgtgctgggtgagggtgtcacaggcgtgggcggggccggggttcggt

SEQ ID NO: 382724 - DNA, 75 bp, synthetic construct
  source 1..75: mol_type = other DNA
agattgtaccgggccgatatgcctgccccggatgaatacatgaaccgtgcagaatctcgtctctcgcaggtactc

SEQ ID NO: 382725 - DNA, 75 bp, synthetic construct
  source 1..75: mol_type = other DNA
acttaattgatgatgattccattgtaaatattgaacttccctgccttctatctgaaatagaggtagagttattat

SEQ ID NO: 382726 - DNA, 75 bp, synthetic construct
  source 1..75: mol_type = other DNA
acgaatgaccggacggtgagcgtgagtaatgatgacggcctgtacgtcagaaatgaccgtaaagtgacggtggaa

SEQ ID NO: 382727 - DNA, 75 bp, synthetic construct
  source 1..75: mol_type = other DNA
tattcagaaacccgctacattgccttctttgaggatggcacgcagacccgcggagaaacggatgaagaggggtat

SEQ ID NO: 382728 - DNA, 75 bp, synthetic construct
  source 1..75: mol_type = other DNA
acagtctgtatgtcagaaatgaccgctgggtgacggtgaaagggaagctggagcacaggacgacggggaaccata

SEQ ID NO: 382729 - DNA, 75 bp, synthetic construct
  source 1..75: mol_type = other DNA
tttcgtgcgcagccggtgtttccggcgaacgtgaaggcgggggaatacacgggggctctgacctttgtggtcacg

SEQ ID NO: 382730 - DNA, 75 bp, synthetic construct
  source 1..75: mol_type = other DNA
ttctgcttctggcagggggcggggtttctcacgccgctgttcagaaaaccgtattcagtgctgacgtggtggcct

SEQ ID NO: 382731 - DNA, 75 bp, synthetic construct
  source 1..75: mol_type = other DNA
ccacgggggcgtctgtgcctccgcgtgacttcactgtgcgtctgtatgagtccggtgccacggttcagggctgct

SEQ ID NO: 382732 - DNA, 75 bp, synthetic construct
  source 1..75: mol_type = other DNA
ctgggtatccggcttccgccattaccctttatgccgttctggcaggtcacgctgttgatggggctctgtgggaat

SEQ ID NO: 382733 - DNA, 75 bp, synthetic construct
  source 1..75: mol_type = other DNA
tcctcttctgcgtattctctggcggctgggtatccggcttccgccattaccctttatgccgttctggcaggtcac

SEQ ID NO: 382734 - DNA, 75 bp, synthetic construct
  source 1..75: mol_type = other DNA
gatggacagcaaaaagatgtggcggagcaattatgcccctcctcttctgcgtattctctggcggctgggtatccg

SEQ ID NO: 382735 - DNA, 75 bp, synthetic construct
  source 1..75: mol_type = other DNA
aatgaccggacggtgagcgtgagtaatgatgacggcctgtacgtcagaaatgaccgtaaagtgacggtggaaggg

SEQ ID NO: 382736 - DNA, 75 bp, synthetic construct
  source 1..75: mol_type = other DNA
cctttcctgtttagcatcgtactggtactgggagcattgtgggtgcgtaatggcatggaggagtccgcggaattt

SEQ ID NO: 382737 - DNA, 75 bp, synthetic construct
  source 1..75: mol_type = other DNA
gctttcctgaagattattgcactacgcctgtgcgagttgctgacaatgtatatcgttaccgcctttgcacttaac

SEQ ID NO: 382738 - DNA, 75 bp, synthetic construct
  source 1..75: mol_type = other DNA
atgagaatgaccagccgcaaaaaagagatactcagttactttgagccggatagcctcgattgggtgacgggtgag

SEQ ID NO: 382739 - DNA, 75 bp, synthetic construct
  source 1..75: mol_type = other DNA
tcatggcgctcgaggctcaatccattttctggatagtcttcttctccattatgctggcgaatattgcgcatgaca

SEQ ID NO: 382740 - DNA, 75 bp, synthetic construct
  source 1..75: mol_type = other DNA
ggaactggcatagcgtcgctatttatttgttggctggctgcctgatttccgcaataaccgctttattgatgaaag

SEQ ID NO: 382741 - DNA, 75 bp, synthetic construct
  source 1..75: mol_type = other DNA
gactgtgcgagttgctgacgatgtacatcgttaccgcctttgcacttaattattcaacccagaatatggggttac

SEQ ID NO: 382742 - DNA, 75 bp, synthetic construct
  source 1..75: mol_type = other DNA
gtgataccggcggaccggacgtggcgtccacggcagcaaagcaaaccgaaggtggacgggccacagagcgccatt

SEQ ID NO: 382743 - DNA, 75 bp, synthetic construct
  source 1..75: mol_type = other DNA
taccatgaggacaaccgttcgccggggagtctgccggggacgaagacgcagatgacgatacggtcgaagacctat

SEQ ID NO: 382744 - DNA, 75 bp, synthetic construct
  source 1..75: mol_type = other DNA
atcacgggatgacggaggagagttcgtgctgggtgagggtgtcacaggcgtgggcggggccggggttcggtaacc

SEQ ID NO: 382745 - DNA, 75 bp, synthetic construct
  source 1..75: mol_type = other DNA
cagctcgaatcaacccggcgtacgctcgaaagcatggttgccggtggactgcttgagcgaatgacagtgtatgaa

SEQ ID NO: 382746 - DNA, 75 bp, synthetic construct
  source 1..75: mol_type = other DNA
tgggataccgtctgcgaatggggcaaggtcaccacgctggtgcatactgccgatgtgatcctcgaatttagcggc

SEQ ID NO: 382747 - DNA, 75 bp, synthetic construct
  source 1..75: mol_type = other DNA
aaatcttcctcggcagggatgaccatcgtcagctcctgagcgaacaggtcaacgctttccatgctctggcggcat

SEQ ID NO: 382748 - DNA, 75 bp, synthetic construct
  source 1..75: mol_type = other DNA
gtggaatacgggcgcacgagctgtcccgggataaagtacagcgtctggctgagctgcagagagggatcagccaga

SEQ ID NO: 382749 - DNA, 75 bp, synthetic construct
  source 1..75: mol_type = other DNA
ttaaaagaacagtttgtgaagtggcagtataatgcttataagcatggaatggaagaacaccagttgaatgaagat

SEQ ID NO: 382750 - DNA, 75 bp, synthetic construct
  source 1..75: mol_type = other DNA
cccgataaaatcctgctcggtaatcgctcatattcgccaggcaaatcggggcgaggtggcgctggaaaatactca

SEQ ID NO: 382751 - DNA, 75 bp, synthetic construct
  source 1..75: mol_type = other DNA
cgctttccatgatgaccacgccgctgctgatgaagctggtcgataaatggctatcccgccagtttaacggaccgg

SEQ ID NO: 382752 - DNA, 75 bp, synthetic construct
  source 1..75: mol_type = other DNA
tgaaagtggtaatgtggtagcagtttatgatgaagtgcattcaacttcagcatatcctcctttcagcacgagcat

SEQ ID NO: 382753 - DNA, 75 bp, synthetic construct
  source 1..75: mol_type = other DNA
taccagcatcctgccgcaggctgttgaggtgacgctggttatggatgattttgctgaacttacccgtctgtttct

SEQ ID NO: 382754 - DNA, 75 bp, synthetic construct
  source 1..75: mol_type = other DNA
aactacccgatttgagacaggaaaagggaagaatactcctgcaaccacctgtctcaagcggggattctgctaaat

SEQ ID NO: 382755 - DNA, 75 bp, synthetic construct
  source 1..75: mol_type = other DNA
actcaaggtgtatcaacagataccattgatggcttttctatcgaaagagcagagaagctggcaaaaacattgcgg

SEQ ID NO: 382756 - DNA, 75 bp, synthetic construct
  source 1..75: mol_type = other DNA
ttttgccaactatgctgtacaaactgaaaattggcagcaaaatgcgttacaagcattaaggtctgataaagaggg

SEQ ID NO: 382757 - DNA, 75 bp, synthetic construct
  source 1..75: mol_type = other DNA
cgtaactggacttatgcccataacggacaactgacgggctacaaatcactggaaaccggcaacttccgcccggtc

SEQ ID NO: 382758 - DNA, 75 bp, synthetic construct
  source 1..75: mol_type = other DNA
aggtaaaggctgtcgcacatttaaagatccacaacccagctttaattcccccatcgccaaacttgtccaggacta

SEQ ID NO: 382759 - DNA, 75 bp, synthetic construct
  source 1..75: mol_type = other DNA
tatatcctgctatcaaaggccaatttgatagacacatatactgggttgcttctggtttatgtaaccggttcattg

SEQ ID NO: 382760 - DNA, 75 bp, synthetic construct
  source 1..75: mol_type = other DNA
caaccagcaccaaaatcatcaacgatgtgtcagatgatggtgaactggataagctccgtgaagagtacgaattgc

SEQ ID NO: 382761 - DNA, 75 bp, synthetic construct
  source 1..75: mol_type = other DNA
ctatgaacagcgcctacagtccgattgttgttggcagtgaagacacactggacgtgtttggcgttgttactttca

SEQ ID NO: 382762 - DNA, 75 bp, synthetic construct
  source 1..75: mol_type = other DNA
tgaatagccggatgtcaccgatctatctgaaagaaggcgaagaactggccatttttggcgtggtgaccttcatcg

SEQ ID NO: 382763 - DNA, 75 bp, synthetic construct
  source 1..75: mol_type = other DNA
acgttatatcgatgaactcaaaggcaaggttgatttgaccgtcgccctgatccacgaaggtgttccggcccgcca

SEQ ID NO: 382764 - DNA, 75 bp, synthetic construct
  source 1..75: mol_type = other DNA
aaaacaatacatttttcagtattacaggtatagatgagtctctctatgaaaagcatataatctttatcactctta

SEQ ID NO: 382765 - DNA, 75 bp, synthetic construct
  source 1..75: mol_type = other DNA
aatagttctcgggaataagacattgtatccatcagaagaacttgtaaaattcataagcacctcaaaagaatattt

SEQ ID NO: 382766 - DNA, 75 bp, synthetic construct
  source 1..75: mol_type = other DNA
atactccaatatctgactcattttcatatttatatgataattttcagatcgttgatagtgatgtgcatattaagc

SEQ ID NO: 382767 - DNA, 75 bp, synthetic construct
  source 1..75: mol_type = other DNA
tgccgctgcggcgggcaccatgctgttactggtgcgggtattcgatgccttcgccgacgtctttgccggacgagt

SEQ ID NO: 382768 - DNA, 75 bp, synthetic construct
  source 1..75: mol_type = other DNA
gtattcttgtattgcaaatgtttcctgcatttttatcaatgactgccatttatatcctgctatcaaaggccaatt

SEQ ID NO: 382769 - DNA, 75 bp, synthetic construct
  source 1..75: mol_type = other DNA
gggactgcctgaaaaggtgttcccggcggatatcgtccggggtgcgccagtccggttgcaggtgggagacgaaac

SEQ ID NO: 382770 - DNA, 75 bp, synthetic construct
  source 1..75: mol_type = other DNA
gaagtttaaagctgtcggccagggctttgctggcgggttatctgcactggcaacccagcacggcgtgaatattta

SEQ ID NO: 382771 - DNA, 75 bp, synthetic construct
  source 1..75: mol_type = other DNA
ttgccatatctgcgcttgcggtgacttctgcgtgggctgcacctgtacaggtgggcgaagcggcagggtcagcag

SEQ ID NO: 382772 - DNA, 75 bp, synthetic construct
  source 1..75: mol_type = other DNA
atgctgttactggtgcgggtattcgatgccttcgccgacgtctttgccggacgagtggtggacagtgtgaatacc

SEQ ID NO: 382773 - DNA, 75 bp, synthetic construct
  source 1..75: mol_type = other DNA
cggatggatttgaacaaaagctcaccggctaccgaaccctcgtcctcgccctcggacgatacgggatcagtgaac

SEQ ID NO: 382774 - DNA, 75 bp, synthetic construct
  source 1..75: mol_type = other DNA
cgaaagtggatgtttctgcggtcaccgacagaatagtgattcaggacgtactggaggccagcgatatcccctatc

SEQ ID NO: 382775 - DNA, 75 bp, synthetic construct
  source 1..75: mol_type = other DNA
tcgactttgaccgcgatacgtggaaaccgggttatgaaagcctgtgggtacgccagtcgcgcccgtatgcgggag

SEQ ID NO: 382776 - DNA, 75 bp, synthetic construct
  source 1..75: mol_type = other DNA
atgaaacaccctttagaaaccttgactaccgcagcaggcattttgctgatggctttcctctcttgcctgctgctg

SEQ ID NO: 382777 - DNA, 75 bp, synthetic construct
  source 1..75: mol_type = other DNA
atgacaacgtctacagataccaaacagaatatacccgtcgtagcgtgcaaagtcagtattacgactgcattcact

SEQ ID NO: 382778 - DNA, 75 bp, synthetic construct
  source 1..75: mol_type = other DNA
ttgtcgatagcagtagcggtgggcgtacgacttacaaaaatgctggaaagacccgtcgtcaaggcgctgaactgg

SEQ ID NO: 382779 - DNA, 75 bp, synthetic construct
  source 1..75: mol_type = other DNA
gtttcggcggtaatggcgaactttccgggcacaaccttggaaacctgatgctgaaggcactggatcaccttagcg

SEQ ID NO: 382780 - DNA, 75 bp, synthetic construct
  source 1..75: mol_type = other DNA
agtacggcggcaagagccagctaaacctcggccatctggtggatgccggaaaacagcagcgcggggaaggttttg

SEQ ID NO: 382781 - DNA, 75 bp, synthetic construct
  source 1..75: mol_type = other DNA
atttcagcgaagaaaaaaataacgattaatggcggtggaagttatatccggattgagggtagcggcattgagcca

SEQ ID NO: 382782 - DNA, 75 bp, synthetic construct
  source 1..75: mol_type = other DNA
cattacaagcgatgatggtcgatcagaaatatttttttctgataaggatggggaaatattaatacatctatttgt

SEQ ID NO: 382783 - DNA, 75 bp, synthetic construct
  source 1..75: mol_type = other DNA
attaatggtggtgggagttatatccggatagagggtagcggcattgagccgggaacgccgggggattataacgtc

SEQ ID NO: 382784 - DNA, 75 bp, synthetic construct
  source 1..75: mol_type = other DNA
ggtctaccttatgccaacacaaaatatattgcatgtttttctgatggcactcaaaaagaaggtattactgatgag

SEQ ID NO: 382785 - DNA, 75 bp, synthetic construct
  source 1..75: mol_type = other DNA
aagtcgctgtccactgatgcgcagacggcgaatgccgatccggcagatctgtcatcacagatagcgctgttgcag

SEQ ID NO: 382786 - DNA, 75 bp, synthetic construct
  source 1..75: mol_type = other DNA
tgagaaacagcagacatatgccgcaggtgtgatgatgggcagggatattttgtccctgcaggcggcaaatgcgtt

SEQ ID NO: 382787 - DNA, 75 bp, synthetic construct
  source 1..75: mol_type = other DNA
aatactggatgcgtcatgcgctgacgctggcgaaacgtgcctgggacgagcgggaagtgccggtcggcgcggtat

SEQ ID NO: 382788 - DNA, 75 bp, synthetic construct
  source 1..75: mol_type = other DNA
cagaaacaagatggtctggcggtattcctcgatcatgagaacagttttgacgttggcctggctgtagccaatggc

SEQ ID NO: 382789 - DNA, 75 bp, synthetic construct
  source 1..75: mol_type = other DNA
atgggatgacggtggatgcgatacctcaagttcatccagttactcaggatcatgttgtgactaaggtggttgtat

SEQ ID NO: 382790 - DNA, 75 bp, synthetic construct
  source 1..75: mol_type = other DNA
ggtgagttccgccagggtcagatggttccggcattcgataaagtggttttctcttgtccggtactggagccaacc

SEQ ID NO: 382791 - DNA, 75 bp, synthetic construct
  source 1..75: mol_type = other DNA
atggcaaaaacagcagcagcactgcatatccttgttaaagaagagaaactggctctggatcttctggagcagatt

SEQ ID NO: 382792 - DNA, 75 bp, synthetic construct
  source 1..75: mol_type = other DNA
agcgatgatccacagccgtattggtcgcgtggtctttggcgcgcgtgatgcgaaaactggcgccgccggatcatt

SEQ ID NO: 382793 - DNA, 75 bp, synthetic construct
  source 1..75: mol_type = other DNA
ggtcgtgctttacaggcgatggaagccaataaatacgacgaggcgcgtaaaacgctgcaaccgttactggcggca

SEQ ID NO: 382794 - DNA, 75 bp, synthetic construct
  source 1..75: mol_type = other DNA
aacgaaagtcaactggcttcagttatggcgcacgaaatctcccacgtcacccaacgtcacctggcgcgagcgatg

SEQ ID NO: 382795 - DNA, 75 bp, synthetic construct
  source 1..75: mol_type = other DNA
cgccggttcggtggggacggagggggcgatattttatcgtctgcggatgtggcggatgtcatggtggatgatgcc

SEQ ID NO: 382796 - DNA, 75 bp, synthetic construct
  source 1..75: mol_type = other DNA
aaaactggcggatcttgtacgccaaccagtcggtgaatcatcgattgcattaactcgtgcctacggtgagtcatc

SEQ ID NO: 382797 - DNA, 75 bp, synthetic construct
  source 1..75: mol_type = other DNA
cagaaggggcaaggcagggaatgacacatcatcagcgaaaaattagagaacttttggaagaagaaactgctatat

SEQ ID NO: 382798 - DNA, 75 bp, synthetic construct
  source 1..75: mol_type = other DNA
gaccattggtcaggtagccccggcgtttgccgatagcgcagacaccttgccggatatgggaacctccgcaggaag

SEQ ID NO: 382799 - DNA, 75 bp, synthetic construct
  source 1..75: mol_type = other DNA
gctcttcccgccgattcaacagccttatcctccgctttactttggcggatcgtcagacgtcgcccaggagctggc

SEQ ID NO: 382800 - DNA, 75 bp, synthetic construct
  source 1..75: mol_type = other DNA
gtttttaccggtgggcatcgtggcggtgtggcaactggcctcctcagttggctggctgtcgacgcgtattttgcc

SEQ ID NO: 382801 - DNA, 75 bp, synthetic construct
  source 1..75: mol_type = other DNA
ccaacagccgtatcctcctctttactttggcggatcgtccgacgtcgctcaggatctggctgccgaacaggttga

SEQ ID NO: 382802 - DNA, 75 bp, synthetic construct
  source 1..75: mol_type = other DNA
ggaacaaaatttcagctggctatgatcatactttcaccttcggaacatggaaatcgtatctgaactggaacgaga

SEQ ID NO: 382803 - DNA, 75 bp, synthetic construct
  source 1..75: mol_type = other DNA
gtggggtgaccacgggatataaggcgcccagcatggggcagttacataaggggatcagcggtgtgtccggtcagg

SEQ ID NO: 382804 - DNA, 75 bp, synthetic construct
  source 1..75: mol_type = other DNA
tccaacaagattgtctcttattccattgatgataacaccaatagctatacaaacagcggaaaggcccgcttgcat

SEQ ID NO: 382805 - DNA, 75 bp, synthetic construct
  source 1..75: mol_type = other DNA
aaggtgcaccgctgagttatacccctgaacacatggtgaatgcgaaactgaactggcagatcaccgaagaggtgg

SEQ ID NO: 382806 - DNA, 75 bp, synthetic construct
  source 1..75: mol_type = other DNA
gattactggactgtgaaaggtggtgtaagtaccggttacaaggcaccatcaatgagtcagttacataaaggtatc

SEQ ID NO: 382807 - DNA, 75 bp, synthetic construct
  source 1..75: mol_type = other DNA
ctatttccagactgcctcttctactactggatatgttatacctgaacgtaattactggttgtctctaaattatca

SEQ ID NO: 382808 - DNA, 75 bp, synthetic construct
  source 1..75: mol_type = other DNA
aagaagcgtttgcccggacggattccgtaggtcaacaacgaatggcggcgctgcataacggtaagcgcgacaacc

SEQ ID NO: 382809 - DNA, 75 bp, synthetic construct
  source 1..75: mol_type = other DNA
tcattctttcaccttcggtacctggaaatcgtatctgaactggaacgagacggaaaataaaggtcgtgaacttgt

SEQ ID NO: 382810 - DNA, 75 bp, synthetic construct
  source 1..75: mol_type = other DNA
cgtcaatgcagggctgaatctgcaggaaagcaacaaatggggtaacagcagccagtttaatttctggaccagtgg

SEQ ID NO: 382811 - DNA, 75 bp, synthetic construct
  source 1..75: mol_type = other DNA
agcgtacggaatttgttatatatattaatccattttggtgtcagagtccttccttcaaatatatttaaacttgta

SEQ ID NO: 382812 - DNA, 75 bp, synthetic construct
  source 1..75: mol_type = other DNA
tgtcagcccgttttaattctgccatggacattcccgctcaggggctgtgccgtattcctgaaaacgttcttaagg

SEQ ID NO: 382813 - DNA, 75 bp, synthetic construct
  source 1..75: mol_type = other DNA
gtatcatgcccaaaccagacgggttaacggcagcaaagaaccttgcagaggcgttcgagcattataacgaatggc

SEQ ID NO: 382814 - DNA, 75 bp, synthetic construct
  source 1..75: mol_type = other DNA
ctgctggagtgccagctacgtgaaaccggcgcgtcatttacttccagccatgctgtccgcgactggctgcgcctg

SEQ ID NO: 382815 - DNA, 75 bp, synthetic construct
  source 1..75: mol_type = other DNA
gtgcaagactggcattgggataaattcaacagcaaggaagggaaaacagatcttaataatattgaaaaatatact

SEQ ID NO: 382816 - DNA, 75 bp, synthetic construct
  source 1..75: mol_type = other DNA
gaagtgttttcgataatccgattcagcgcctgattatgttgcgtgttttgatgtcgggttcttcagacggtgaag

SEQ ID NO: 382817 - DNA, 75 bp, synthetic construct
  source 1..75: mol_type = other DNA
atgggtttaccgccgcttagcaaaattcctttgattttacgtccgcaggcgtggctgcatcgtcgccattatggc

SEQ ID NO: 382818 - DNA, 75 bp, synthetic construct
  source 1..75: mol_type = other DNA
gtacactggcgggaacgcgccaggggatgatcagtttcacccagcaaaatgaacaggaagcggaccgcattggta

SEQ ID NO: 382819 - DNA, 75 bp, synthetic construct
  source 1..75: mol_type = other DNA
agctacgcggcagcgcgccgttaattaatgatccactattaacgcagtacattaattcactaggaatgcgtctgg

SEQ ID NO: 382820 - DNA, 75 bp, synthetic construct
  source 1..75: mol_type = other DNA
agcagtttcttatccggaaagggatgcttcggcaaagtgatgtggcaggattcaataacatgatggaacttgaac

SEQ ID NO: 382821 - DNA, 75 bp, synthetic construct
  source 1..75: mol_type = other DNA
ttgtgggtgtgcgtctcctggaccacctcgttatcggcggaatggatatcgtctcgtttgctgaacggggctggt

SEQ ID NO: 382822 - DNA, 75 bp, synthetic construct
  source 1..75: mol_type = other DNA
acaggcgatggaagccaataaatacgacgaggcgcgtaaaacgctgcaaccgttactggcggcagaacctggcaa

SEQ ID NO: 382823 - DNA, 75 bp, synthetic construct
  source 1..75: mol_type = other DNA
ctcgaaaaattactcgatcaggcgcgttactcctcgcgcccaccagaaattctgctcactcacccactaccggaa

SEQ ID NO: 382824 - DNA, 75 bp, synthetic construct
  source 1..75: mol_type = other DNA
gaattcattactgctgacccctctgggagaatctcatctggttacggtggggggcgagtttcagagctcgtccat

SEQ ID NO: 382825 - DNA, 75 bp, synthetic construct
  source 1..75: mol_type = other DNA
atgataacgaccttatttgttgaatcagatgaacctcttgtgtgtgccgccggaatgccgctctgtggcggaacg

SEQ ID NO: 382826 - DNA, 75 bp, synthetic construct
  source 1..75: mol_type = other DNA
ctttgtgccaaagctttcaagttggggcacgaatttgcagtatcttcccatggacttgatgagttgtgccctaat

SEQ ID NO: 382827 - DNA, 75 bp, synthetic construct
  source 1..75: mol_type = other DNA
ggaacctcaggagtgcccgagcttgaagatgatgccaggcggatcttggctgataaatttcgctggatttggcgt

SEQ ID NO: 382828 - DNA, 75 bp, synthetic construct
  source 1..75: mol_type = other DNA
tgacttggatcgctgtttggctcttttagatgaccccgacatcatgccgtcaatgtatggacaaattctttgggg

SEQ ID NO: 382829 - DNA, 75 bp, synthetic construct
  source 1..75: mol_type = other DNA
gccttgaagatgaggacggacaggtgacgcactggtgccatatttcagctttaccggaattacgggaggtgaatg

SEQ ID NO: 382830 - DNA, 75 bp, synthetic construct
  source 1..75: mol_type = other DNA
gccttgaagatgaggacggacaggtgacgcactggtgccatatttcagctttaccggaattacaggagacgccca

SEQ ID NO: 382831 - DNA, 75 bp, synthetic construct
  source 1..75: mol_type = other DNA
catcaccgtcagcgccacctatccgggcgctgatgcgcaaacagtagaagactcggtcactcaggtgattgagca

SEQ ID NO: 382832 - DNA, 75 bp, synthetic construct
  source 1..75: mol_type = other DNA
gctggctgccggagcgaatgcccttgatacctcgcgggcggtaaaagcggagttaaaccgattatcagcctattt

SEQ ID NO: 382833 - DNA, 75 bp, synthetic construct
  source 1..75: mol_type = other DNA
cggcaggcaatgcttccatcaccctgacctttgaaacgggaacatcgcccgatattgcgcaggttcaggtgcaga

SEQ ID NO: 382834 - DNA, 75 bp, synthetic construct
  source 1..75: mol_type = other DNA
ctagtccagatgcagctaccgatgaactggaaatattgggtgtgctctctgggtatcccaaaatccagttattca

SEQ ID NO: 382835 - DNA, 75 bp, synthetic construct
  source 1..75: mol_type = other DNA
gcagaccagcaactgaacgcctcgatcattgtgcagacgcgtctgcaaacgccggaagaatttggcaaaatcctg

SEQ ID NO: 382836 - DNA, 75 bp, synthetic construct
  source 1..75: mol_type = other DNA
tcgccctcgccgcgctgtatgaaagctggtcaattccgttctcggtgatgttagttgtaccgttgggtgtcattg

SEQ ID NO: 382837 - DNA, 75 bp, synthetic construct
  source 1..75: mol_type = other DNA
actttgaacgatgcattaagctcttaatccgtatcgcagaccaggaaagcgcgagcaataattatgattcggctc

SEQ ID NO: 382838 - DNA, 75 bp, synthetic construct
  source 1..75: mol_type = other DNA
tgttgcgcgcggtcgatctcgacgacagcgtgctcgacaagcgcccaccgcagttaagcggcggccagctccagc

SEQ ID NO: 382839 - DNA, 75 bp, synthetic construct
  source 1..75: mol_type = other DNA
cctgctgaaaaagctacaacagcagtttggcaccgcctgcctgtttatcacccacgacttacgtctggtggagcg

SEQ ID NO: 382840 - DNA, 75 bp, synthetic construct
  source 1..75: mol_type = other DNA
atgctggattggtgttttaataaaagcatgcaatattttggtgattctgaaaagataaagtatgcatgctctgtg

SEQ ID NO: 382841 - DNA, 75 bp, synthetic construct
  source 1..75: mol_type = other DNA
atgactttacttaacgtctccgacctttcccatcactatgcgcacggtggatttagcggaaaacatcagcaccag

SEQ ID NO: 382842 - DNA, 75 bp, synthetic construct
  source 1..75: mol_type = other DNA
gaacaactggcgcgcgccagcgaaatgctgaaggcggtcgatctcgatgacagcgtgctcgacaaacgcccaccg

SEQ ID NO: 382843 - DNA, 75 bp, synthetic construct
  source 1..75: mol_type = other DNA
gcgagatcctgcgtgaaccgatgcgccacctgctatcgctgaaaaaagccgaacaactggcacgcgccagcgaaa

SEQ ID NO: 382844 - DNA, 75 bp, synthetic construct
  source 1..75: mol_type = other DNA
ctgataaatttcgctggatttggcgtcatggaggaataaggtcaaaattaattgatgcggctcgtaagttacatg

SEQ ID NO: 382845 - DNA, 75 bp, synthetic construct
  source 1..75: mol_type = other DNA
cacttaatagtattccgattgatcaacttagaacgacctttgaagctccggatcggcaacgattattgatgtcgt

SEQ ID NO: 382846 - DNA, 75 bp, synthetic construct
  source 1..75: mol_type = other DNA
gcttcgcttgccagcaaagtatcagccgcagggaaagaagtaagtctcatcacgatcgagtacgacattagggat

SEQ ID NO: 382847 - DNA, 75 bp, synthetic construct
  source 1..75: mol_type = other DNA
gaagaaaagatgggtaatgaattaaaaattagaacaagaatgatgaaaatcctccggaatggcaaaatcaatata

SEQ ID NO: 382848 - DNA, 75 bp, synthetic construct
  source 1..75: mol_type = other DNA
gttgcgtatgtcaatgattttaacttaagcaatcaagaaaaatcacgcttaatactaaggttatttgatgatgtt

SEQ ID NO: 382849 - DNA, 75 bp, synthetic construct
  source 1..75: mol_type = other DNA
ttctggagtggtgttttaatcaaagtatgcaatattctgatgatactacaaagataaagcatgcccgctccgtga

SEQ ID NO: 382850 - DNA, 75 bp, synthetic construct
  source 1..75: mol_type = other DNA
ggggtatttaatgccctcagcggaaatgtcgacgatgttaacaggatgaatgctctgcttgctgatcttattgcc

SEQ ID NO: 382851 - DNA, 75 bp, synthetic construct
  source 1..75: mol_type = other DNA
agcgaactttttcgtcacaagctaatcggtatgaatattaaagttgccgctttacgctggttgcgtgataacaaa

SEQ ID NO: 382852 - DNA, 75 bp, synthetic construct
  source 1..75: mol_type = other DNA
aacagataatttatttcttaaggatgttatgtctggtaaaggcccggaaaaaacattctcattccatcttgataa

SEQ ID NO: 382853 - DNA, 75 bp, synthetic construct
  source 1..75: mol_type = other DNA
gttatgtctggtaaaggtccggaaaaaacattctcattccatcttgataacgttaataatattgttgaacgactc

SEQ ID NO: 382854 - DNA, 75 bp, synthetic construct
  source 1..75: mol_type = other DNA
aggtgactttgataaagggctggcaggtgaactttttcgtcacgagttaattgatacaaatattaaagttggcgc

SEQ ID NO: 382855 - DNA, 75 bp, synthetic construct
  source 1..75: mol_type = other DNA
tgaaaaataatatttccagtctggagtcattgaggaccgaaattctttccggaactgtagctgatatagcagaaa

SEQ ID NO: 382856 - DNA, 75 bp, synthetic construct
  source 1..75: mol_type = other DNA
aaatgttcccggtggtcaacatgcttccagcactccttctggcaatgccgctttccgcagcctggaccgcctggt

SEQ ID NO: 382857 - DNA, 75 bp, synthetic construct
  source 1..75: mol_type = other DNA
tctgacagaattaattataaccccaatgataacaaagtatcttatttgtttggacatatcaacaaactattctca

SEQ ID NO: 382858 - DNA, 75 bp, synthetic construct
  source 1..75: mol_type = other DNA
gaggggctcaatggctgcctacgcacgctagcattttatgcttctactcaatctgctcctcatactctgaacatt

SEQ ID NO: 382859 - DNA, 75 bp, synthetic construct
  source 1..75: mol_type = other DNA
accggattacgcatctgtggtattaaaatgttcccggtggtcaacatgcttccagcactccttctggcaatgccg

SEQ ID NO: 382860 - DNA, 75 bp, synthetic construct
  source 1..75: mol_type = other DNA
tggtggcggactaccacaagaacagttccctggcaaaagctgggcggaatcgtggcacgacgattcaggacattg

SEQ ID NO: 382861 - DNA, 75 bp, synthetic construct
  source 1..75: mol_type = other DNA
cttcggtcgtcagttgcctgacacgctgccactgctggcattcgataagcagcctttgaataaacctcttgaaat

SEQ ID NO: 382862 - DNA, 75 bp, synthetic construct
  source 1..75: mol_type = other DNA
aaaaatgggtacgggacgtgatgaacacaaaattgtgattactccggtacgcggtgtccgtgatgaggagtttta

SEQ ID NO: 382863 - DNA, 75 bp, synthetic construct
  source 1..75: mol_type = other DNA
aagtgatgatgcgcggcaccttcgccaatattcgcatccgtaatgaaatggtgcctggcgttgaaggggggatga

SEQ ID NO: 382864 - DNA, 75 bp, synthetic construct
  source 1..75: mol_type = other DNA
aaaatctacaacccggtgcgacggttccggtgacgcttacgcgcgcggatggtagccaggaggtcgtaccctgcc

SEQ ID NO: 382865 - DNA, 75 bp, synthetic construct
  source 1..75: mol_type = other DNA
cccacacaaaaaaccaacgcatgaatcatttattcagaattttgtggcgattatcgtcctgttctgtgccagcgg

SEQ ID NO: 382866 - DNA, 75 bp, synthetic construct
  source 1..75: mol_type = other DNA
cccgcggtgccggtgatggtattcgcgtggatgtacgggcggtggatgcggaagctgattatcgcgggcgtctga

SEQ ID NO: 382867 - DNA, 75 bp, synthetic construct
  source 1..75: mol_type = other DNA
actctggcctgagttattcaaccgggaaaaaccccaaccgcttaaagttgagatacctgacgacctgatacagga

SEQ ID NO: 382868 - DNA, 75 bp, synthetic construct
  source 1..75: mol_type = other DNA
gccagtggcccgaaccagaagtgggcgggagacatcacgtattgtgtgcccggagttcagggcgagcatggaggc

SEQ ID NO: 382869 - DNA, 75 bp, synthetic construct
  source 1..75: mol_type = other DNA
gaccgtgaatgtcagaaggtgatttgtgaaccgctgggccgtaattaccgcgtcagtatgccgcttatagccttt

SEQ ID NO: 382870 - DNA, 75 bp, synthetic construct
  source 1..75: mol_type = other DNA
ggttgtctgccaggttcagggacgtactcataccctgagttatccgctggtggcttttcagtccgggaaaatgtt

SEQ ID NO: 382871 - DNA, 75 bp, synthetic construct
  source 1..75: mol_type = other DNA
gttttttgaagtgttgaaagataatacactttcagtttcatatattccaggtgatgtgggagacgagaagtgttc

SEQ ID NO: 382872 - DNA, 75 bp, synthetic construct
  source 1..75: mol_type = other DNA
accggcttacgcatctgcggcattaaactatttccggtggtcaacatgcttccagcactacttctggcaatgcct

SEQ ID NO: 382873 - DNA, 75 bp, synthetic construct
  source 1..75: mol_type = other DNA
ttcaccgtttacttcagcgtaaaaaaatatcaattcctacagttgggcagtggtacaccacgcctgcagggcatg

SEQ ID NO: 382874 - DNA, 75 bp, synthetic construct
  source 1..75: mol_type = other DNA
ttctacgtgtcagcctggttgaccgtgaatgtcagaaggtgatttgtgaaccgctgggccgtaattaccgcgtca

SEQ ID NO: 382875 - DNA, 75 bp, synthetic construct
  source 1..75: mol_type = other DNA
gtgagctattacatatcaatgctcgtcgttttcgttataccacgggcacacgagctgcccgagaagggtttggtg

SEQ ID NO: 382876 - DNA, 75 bp, synthetic construct
  source 1..75: mol_type = other DNA
gccgacctaatgaagactgacccggagttcaagaagtctattgaaaccgccatgtcctggaatggactggttggt

SEQ ID NO: 382877 - DNA, 75 bp, synthetic construct
  source 1..75: mol_type = other DNA
ctcagctacgctgacattgccgaaacggtggtcagccacgtcgagggcgcgcgttttgcactggtggaacgcgtg

SEQ ID NO: 382878 - DNA, 75 bp, synthetic construct
  source 1..75: mol_type = other DNA
tccatgaaagatggggttgtccttgccagcacaggtgaaactttccggcagaaaagctggtcggtatttgctgag

SEQ ID NO: 382879 - DNA, 75 bp, synthetic construct
  source 1..75: mol_type = other DNA
ctggaatcagaccgattttgtgaaagtgaagaaatttgcgggttactggcagcccggtctgcccaaactggacag

SEQ ID NO: 382880 - DNA, 75 bp, synthetic construct
  source 1..75: mol_type = other DNA
catcgacagcatgccacctggacgccagagcgtcttctggaatgggcggggcacataggcagtgtgaaccgcccc

SEQ ID NO: 382881 - DNA, 75 bp, synthetic construct
  source 1..75: mol_type = other DNA
cgtggccatctggaaccaccagtctctgaacgggtgtgctttcggtgatatctacatggttgacaaagatgaatt

SEQ ID NO: 382882 - DNA, 75 bp, synthetic construct
  source 1..75: mol_type = other DNA
actcaaacagctcaagtcggtgctgaccagtggccgcgaccaactgcccgcaagcccgctgagctacccagagtt

SEQ ID NO: 382883 - DNA, 75 bp, synthetic construct
  source 1..75: mol_type = other DNA
cgggggaaaagctctttatcgactactgcgggcccacggtgcccatcgtgtcgccgactacgggtgaggtccgtc

SEQ ID NO: 382884 - DNA, 75 bp, synthetic construct
  source 1..75: mol_type = other DNA
gcggcagtagtctcgccatcaacaacccgacgccgttctacattaccgtcagccgtatttcccgcgacggcggta

SEQ ID NO: 382885 - DNA, 75 bp, synthetic construct
  source 1..75: mol_type = other DNA
cagttacacgctgatactgattgatggtgtccgtcagggcgggagcggggacgtgacgcctaacggtttttctgc

SEQ ID NO: 382886 - DNA, 75 bp, synthetic construct
  source 1..75: mol_type = other DNA
acgggtaaaaccggtgggctggaaatcagcatccgaggaatgccagccagttacacgctgatactgattgatggt

SEQ ID NO: 382887 - DNA, 75 bp, synthetic construct
  source 1..75: mol_type = other DNA
cctctggccgccattgagcgtattgaggttatcagggggccgatgtccacactgtatggctctgatgcgatgggc

SEQ ID NO: 382888 - DNA, 75 bp, synthetic construct
  source 1..75: mol_type = other DNA
ttctccgcgtttataaatattcttgcccatccggcgacagcgatgatttctccggcggcgctggaaaaatatggc

SEQ ID NO: 382889 - DNA, 75 bp, synthetic construct
  source 1..75: mol_type = other DNA
acatccagattgcagctgtgcttgatcgtagcatcattgcagtggcagacgtgatcatgcgttgtgctaaacgtc

SEQ ID NO: 382890 - DNA, 75 bp, synthetic construct
  source 1..75: mol_type = other DNA
gctgcccgtgaaggttttggcgagttggtaatagcggaactgcttgaccatacggacacccaaaacgcaggtgtt

SEQ ID NO: 382891 - DNA, 75 bp, synthetic construct
  source 1..75: mol_type = other DNA
gggcgattttacttacagatctctatactgaaaaggcatttgagcgctccggtaggaaatcacgaagagccctgt

SEQ ID NO: 382892 - DNA, 75 bp, synthetic construct
  source 1..75: mol_type = other DNA
attcagatctcgctgcttcgtgtggtcgatgtcctttgtggtaaaaatggaaagggagagcccttctatgtgttg

SEQ ID NO: 382893 - DNA, 75 bp, synthetic construct
  source 1..75: mol_type = other DNA
tcttcgatcctggcacgaactgggctatcccggcatcagtaaggaggtgaaccgcttgctagatggctggacgct

SEQ ID NO: 382894 - DNA, 75 bp, synthetic construct
  source 1..75: mol_type = other DNA
taccagcagcagatataaccgagacactccagtacatcgtagaaaagtccgatatccggtcggaacggaccggcg

SEQ ID NO: 382895 - DNA, 75 bp, synthetic construct
  source 1..75: mol_type = other DNA
cttctgccttggactcctgaaccttcataaaaaatacagtaatgaaccgccccgggaatcctggagactaaactc

SEQ ID NO: 382896 - DNA, 75 bp, synthetic construct
  source 1..75: mol_type = other DNA
aaagtgattggtcaccttgcgagcggtaatctggaatataagcacccatacctggaagaacgcgacgttaaacgc

SEQ ID NO: 382897 - DNA, 75 bp, synthetic construct
  source 1..75: mol_type = other DNA
cagaagttgaaggtaaagggcaaaaagagagcggcgtgcggatgttctacactggctggtcggcttcaaccggcg

SEQ ID NO: 382898 - DNA, 75 bp, synthetic construct
  source 1..75: mol_type = other DNA
gttggttggcgaaggtactgacgaacgtcattctaatggtgcactcggcgctgttcatgcaatatatgaggcttt

SEQ ID NO: 382899 - DNA, 75 bp, synthetic construct
  source 1..75: mol_type = other DNA
gatctctgcttgtatatcggaaaatatatgtttgaccctgacttcactcttgcagcccgtttgaaggttgaggag

SEQ ID NO: 382900 - DNA, 75 bp, synthetic construct
  source 1..75: mol_type = other DNA
aggttaaaggaataggaagtaatccgttggttggtgaaggtactgacgaacgtcattctaatggtgcactcggcg

SEQ ID NO: 382901 - DNA, 75 bp, synthetic construct
  source 1..75: mol_type = other DNA
tcccgcgatgctgtggaacgtcagatgagccatcaggagcgtaatggtgtacgtgctgcgtatatccataaagca

SEQ ID NO: 382902 - DNA, 75 bp, synthetic construct
  source 1..75: mol_type = other DNA
acgggtgaacatgaattgatcctaacgggcgctcataatccctttaaacccatgagtgaaaatacagtcaataaa

SEQ ID NO: 382903 - DNA, 75 bp, synthetic construct
  source 1..75: mol_type = other DNA
gccgattttctggatgcaaacagagaaaaatttatcagtccatttgaatatgcaaaaattaacaatccattaaaa

SEQ ID NO: 382904 - DNA, 75 bp, synthetic construct
  source 1..75: mol_type = other DNA
actctggcacttggtgtgtatccagaagtatctctctccgaagctcgtacaaaacgggatgaggcccgaaaactg

SEQ ID NO: 382905 - DNA, 75 bp, synthetic construct
  source 1..75: mol_type = other DNA
aaccaatcagtgaaaatactgtaaataaagccctgagggtgatggggtatgacacaacccaggatgtctgtggcc

SEQ ID NO: 382906 - DNA, 75 bp, synthetic construct
  source 1..75: mol_type = other DNA
tcgtgctgcagaagctaaacaaatttatgaaatcgccagtcgtctgcagcaaagaatatctgccgtaatgcgtta

SEQ ID NO: 382907 - DNA, 75 bp, synthetic construct
  source 1..75: mol_type = other DNA
gatgggatatgacacaacccgggaagtctgtggccatggattccgggcgatggcatgcagtgcattgattgaatc

SEQ ID NO: 382908 - DNA, 75 bp, synthetic construct
  source 1..75: mol_type = other DNA
gctggtctgaaattgatattgacaatgctatgtggactattccagccgaacgcaaacctctgccaggggtaaaat

SEQ ID NO: 382909 - DNA, 75 bp, synthetic construct
  source 1..75: mol_type = other DNA
tactggtttttattcgttccagtgaactcagatacgcccgctggtctgaaattgatattgacaatgccatgtgga

SEQ ID NO: 382910 - DNA, 75 bp, synthetic construct
  source 1..75: mol_type = other DNA
ccagcatcgccctgctctggagctttcacgcctgcctgaacttctgtcgcgtattgacggttataaaggccagcc

SEQ ID NO: 382911 - DNA, 75 bp, synthetic construct
  source 1..75: mol_type = other DNA
cgaacaccacatcttgtgccactcagcaaacaggctgtagccatactgacagaacttcagacatgggcaggtgaa

SEQ ID NO: 382912 - DNA, 75 bp, synthetic construct
  source 1..75: mol_type = other DNA
gccatactggcagaacttcagacatgggcaggtgaaaatggtctgatctttacgggagcacatgacccacgtaaa

SEQ ID NO: 382913 - DNA, 75 bp, synthetic construct
  source 1..75: mol_type = other DNA
agcgtaatggtgtacgtgctgcgtatatccataaagcagaacatctggaagaacggcgactgatgctacagtggt

SEQ ID NO: 382914 - DNA, 75 bp, synthetic construct
  source 1..75: mol_type = other DNA
ctagccgttatgctgaatttactggtttttattcgttccagtgaactcagataagcccgatggtctgaaattgat

SEQ ID NO: 382915 - DNA, 75 bp, synthetic construct
  source 1..75: mol_type = other DNA
gcattgaccacggtaaaacgccagcatcgccctgctctggatctttcccgcctgcctgaacttttgtcgcgtatt

SEQ ID NO: 382916 - DNA, 75 bp, synthetic construct
  source 1..75: mol_type = other DNA
gcattgaccacggtaaaacgccagcatcgccctgctctggatctttctcgcctgcctgaacttctgtcgcgtatt

SEQ ID NO: 382917 - DNA, 75 bp, synthetic construct
  source 1..75: mol_type = other DNA
ctcgcggttatgctgaatttactggtttttattcgttccagtgaactcagataagcccggtggtctgaaattgat

SEQ ID NO: 382918 - DNA, 75 bp, synthetic construct
  source 1..75: mol_type = other DNA
ctcgccgttatgctgaatttactggtttttattcgttccagtgaactcagataagcccgctggtctgaaattgat

SEQ ID NO: 382919 - DNA, 75 bp, synthetic construct
  source 1..75: mol_type = other DNA
ctcgcagttatgctgaatttactggtttttattcgttccagtgaactcagataagcccgatggtctgaaattgat

SEQ ID NO: 382920 - DNA, 75 bp, synthetic construct
  source 1..75: mol_type = other DNA
acattcataaagcagaacatctggaagaacgccgcttgatgctacaatggtgggccgattttctggatgcaaaca

SEQ ID NO: 382921 - DNA, 75 bp, synthetic construct
  source 1..75: mol_type = other DNA
ttcccctcagcaagcaggctgtaccttcccttcctcctgcatttcctgtcagaatgactgtacagcgcgcagatt

SEQ ID NO: 382922 - DNA, 75 bp, synthetic construct
  source 1..75: mol_type = other DNA
tgggctggtgaaaatggtttgatctttacgggagcacatgacccacgtaaaccaatcagtgaaaacaccgtaaat

SEQ ID NO: 382923 - DNA, 75 bp, synthetic construct
  source 1..75: mol_type = other DNA
caagatgcgaacaccacatcttgtgccactcagccaacaggctgtagccatactggcagaacttcagacatgggc

SEQ ID NO: 382924 - DNA, 75 bp, synthetic construct
  source 1..75: mol_type = other DNA
cagtgaaaataccgtaaataaggccctcagagtgatggggtatgacacaaccaaggaagtctgtggccatggatt

SEQ ID NO: 382925 - DNA, 75 bp, synthetic construct
  source 1..75: mol_type = other DNA
acgccagcatcgccccgctcttgatctttctcgcctgcctgaacttttgtcgcgtattagcagttacaaggggca

SEQ ID NO: 382926 - DNA, 75 bp, synthetic construct
  source 1..75: mol_type = other DNA
ccgatatggcgacaacacggtctttcagaaatggatacattcatctatcctccgctagaaatggggcagatagtt

SEQ ID NO: 382927 - DNA, 75 bp, synthetic construct
  source 1..75: mol_type = other DNA
acgcgccgtatcgactttcgtcaactgcggcaaagcgttgccggaacatggtattgaaatccgcaatgaagcagg

SEQ ID NO: 382928 - DNA, 75 bp, synthetic construct
  source 1..75: mol_type = other DNA
gtgcgaagcggttgttatcgctgaacctgaaaaaaggcgatcgcgtggcactgattgccgaaacgagtagcgggt

SEQ ID NO: 382929 - DNA, 75 bp, synthetic construct
  source 1..75: mol_type = other DNA
cgttacgggtcatggggtatgatacaaaagtagaggtttgtggtcatggctttcgaacaatggcctgtagttcat

SEQ ID NO: 382930 - DNA, 75 bp, synthetic construct
  source 1..75: mol_type = other DNA
ctcaggtttactcacggtccggtctttatgaggcgctgaaaagtccatcgctgaaacagacacaacatctgacgg

SEQ ID NO: 382931 - DNA, 75 bp, synthetic construct
  source 1..75: mol_type = other DNA
agaagattgtcggtgataaggggctggtggcgcgaatgggcggcgaagaatttgctgttgcagtgccgtcggtga

SEQ ID NO: 382932 - DNA, 75 bp, synthetic construct
  source 1..75: mol_type = other DNA
atttactggtttttattcgctccagtgaactcagatatgcccgctggtctgaaattgatattgacaatgccatgt

SEQ ID NO: 382933 - DNA, 75 bp, synthetic construct
  source 1..75: mol_type = other DNA
agacccggtggtcaacaggagcgtgaaatgaggcgcttcgcaggcgcatgtcgtttcgttttcaatcgtgctctg

SEQ ID NO: 382934 - DNA, 75 bp, synthetic construct
  source 1..75: mol_type = other DNA
ccatactgacagaactacagacatgggctggtgaaaatggtctgatctttacgggagcacatgacccgcgtaaac

SEQ ID NO: 382935 - DNA, 75 bp, synthetic construct
  source 1..75: mol_type = other DNA
cacaacccaggatgtctgtggtcatggattccgggcgatggcatgtagtgcgttaatagaatcaggtttgtggtc

SEQ ID NO: 382936 - DNA, 75 bp, synthetic construct
  source 1..75: mol_type = other DNA
tggtcgagggatgcagtagagcggcagatgagtcatcaggaacgtagctcagtacgggcggcttatatccataag

SEQ ID NO: 382937 - DNA, 75 bp, synthetic construct
  source 1..75: mol_type = other DNA
cgtgcagtgcattgattgaatcaggtttgtggtcccgcgatgctgtggaacgtcagatgagccatcaggaacgta

SEQ ID NO: 382938 - DNA, 75 bp, synthetic construct
  source 1..75: mol_type = other DNA
gtacagtctggcataatcagatataacccggctctggatatggctggtgcattgaccacggtaaaacgccagcat

SEQ ID NO: 382939 - DNA, 75 bp, synthetic construct
  source 1..75: mol_type = other DNA
tgtcgatggtctgctaatggcggaaaaaatccgtaaaggcgttgaactgcaaccattcacctggcaacaaaaaac

SEQ ID NO: 382940 - DNA, 75 bp, synthetic construct
  source 1..75: mol_type = other DNA
ggccatggattccgggcgatggcgtgcagtgcattgattgaatccggcttatggtcaagagatgcggttgaacgt

SEQ ID NO: 382941 - DNA, 75 bp, synthetic construct
  source 1..75: mol_type = other DNA
ggcgatggcgtgcagtgcattgattgaatcaggtttgtggtcccgcgatgctgtggaacgtcagatgagccatca

SEQ ID NO: 382942 - DNA, 75 bp, synthetic construct
  source 1..75: mol_type = other DNA
aagaacgtcgacttatgctacagtggtgggcagattttctggatgcgaacagagaacaatgtatcagcccgtttg

SEQ ID NO: 382943 - DNA, 75 bp, synthetic construct
  source 1..75: mol_type = other DNA
tggtgggcagattttctggatgcgaacagagaacaatgtatcagcccgtttgaatatgcaaagattaacaatcca

SEQ ID NO: 382944 - DNA, 75 bp, synthetic construct
  source 1..75: mol_type = other DNA
atgtttttgctcgttcaccctaacggctcgcgctactggcgactccgctaccggtttctgggcaaagagaaaacg

SEQ ID NO: 382945 - DNA, 75 bp, synthetic construct
  source 1..75: mol_type = other DNA
cggctctggatatggctggtgcattgaccacggtaaaacgccagcatcgccccgctcttgatctttctcgcctgc

SEQ ID NO: 382946 - DNA, 75 bp, synthetic construct
  source 1..75: mol_type = other DNA
tgggttctccgttctccattccacaaatgttttccgcgcgactggggattgccacgatggccatttgcccgatta

SEQ ID NO: 382947 - DNA, 75 bp, synthetic construct
  source 1..75: mol_type = other DNA
tcatgctgcttgatatcgactatttcaaaagcattaacgataactatggacatgaatgtggcgataaagtgttaa

SEQ ID NO: 382948 - DNA, 75 bp, synthetic construct
  source 1..75: mol_type = other DNA
ggtggcaaattcggtgattgatatctcggtcggttcgccgttctccattccggaaatgttctccgcacgtctcgg

SEQ ID NO: 382949 - DNA, 75 bp, synthetic construct
  source 1..75: mol_type = other DNA
ctggatatggctggcgcattgactacggtaaaacgccagcatcgccccgctcttgatctttctcgcctgcctgaa

SEQ ID NO: 382950 - DNA, 75 bp, synthetic construct
  source 1..75: mol_type = other DNA
tgcttatccctgttcgtgctgcagaagctaaacaaatttatgaaatcgccagtcgtctgcagcaaagaatatctg

SEQ ID NO: 382951 - DNA, 75 bp, synthetic construct
  source 1..75: mol_type = other DNA
attgtgtcggttattgcctcggtcgccattggcggagcggggagtctggcgttcccgctgcccgcattaatctgg

SEQ ID NO: 382952 - DNA, 75 bp, synthetic construct
  source 1..75: mol_type = other DNA
atagtctccagtcatacggtggcatttctgtttattataatcaaataataaaagcaataaaagccacaaatattg

SEQ ID NO: 382953 - DNA, 75 bp, synthetic construct
  source 1..75: mol_type = other DNA
tcagataaaaataagcaacgctaatagcgaagctatagcaattactaaagacgctcgcgatgcacgcctgaaagc

SEQ ID NO: 382954 - DNA, 75 bp, synthetic construct
  source 1..75: mol_type = other DNA
acgcttagctttagagcaaaaaatagctgaactacagttaaaatatgaagaagctgaagctaaaaatcaacgagc

SEQ ID NO: 382955 - DNA, 75 bp, synthetic construct
  source 1..75: mol_type = other DNA
tgatgtagatttatcctcctttgttgagcaagctaaagcctctgcaatgtatgaaatgataaaaaataattgtag

SEQ ID NO: 382956 - DNA, 75 bp, synthetic construct
  source 1..75: mol_type = other DNA
ccatgctgaagggactgacatgatgatcggtttcagggtttctgatggcaagatcctcaaatctcccacctacag

SEQ ID NO: 382957 - DNA, 75 bp, synthetic construct
  source 1..75: mol_type = other DNA
aatttcatgctttttattggttcgagaaaagcatataaaaactttcaacttgcagttgaagcaataaacaaatta

SEQ ID NO: 382958 - DNA, 75 bp, synthetic construct
  source 1..75: mol_type = other DNA
tatgtgtatcggaccataaaaagaatggagagaatattccgttagagattgaaatttccgataacggtattaaga

SEQ ID NO: 382959 - DNA, 75 bp, synthetic construct
  source 1..75: mol_type = other DNA
gtatcagtatcaacaagttccaatccaggaataattccaggacttgttgtccctaccgtatccgtcagagaaagg

SEQ ID NO: 382960 - DNA, 75 bp, synthetic construct
  source 1..75: mol_type = other DNA
acggattcaaatccaggtattattccaaatattccagtacctcaggtgagtgttcgtcagagaattaatgctttt

SEQ ID NO: 382961 - DNA, 75 bp, synthetic construct
  source 1..75: mol_type = other DNA
aaaatcatctgcataaagtcttcaacgaaaagcaggtcaataaaattaactcacgaaaagagttttttaacgtaa

SEQ ID NO: 382962 - DNA, 75 bp, synthetic construct
  source 1..75: mol_type = other DNA
cgtctggcatagtggccagtcgacagaagaacgtaatgaaatgaagtcgcgactggcatccggcgagcagcgagc

SEQ ID NO: 382963 - DNA, 75 bp, synthetic construct
  source 1..75: mol_type = other DNA
gagcgggcgtggtgggcgtgacggttatgcttcattggcacaactgatttaccgggacgatcaggtctctctggc

SEQ ID NO: 382964 - DNA, 75 bp, synthetic construct
  source 1..75: mol_type = other DNA
atgtgctggccgggcagtttcgtaatacggcgctacgtctggagcggctggcaccacagggagcggaaaccacta

SEQ ID NO: 382965 - DNA, 75 bp, synthetic construct
  source 1..75: mol_type = other DNA
ggataagccacagacctactatctggatttggcgaaggatttcgaaataccgacaggagacgcggcgcagtttag

SEQ ID NO: 382966 - DNA, 75 bp, synthetic construct
  source 1..75: mol_type = other DNA
ccattctcggtttgcgcaacccatcggataagccacagacctactatctggatttggcgaaggatttcgaaatac

SEQ ID NO: 382967 - DNA, 75 bp, synthetic construct
  source 1..75: mol_type = other DNA
gggttcgaaaccgtggacggcaaactggcgctgtcgggagcgaactactttaaaaacttcaatgagcggatcatc

SEQ ID NO: 382968 - DNA, 75 bp, synthetic construct
  source 1..75: mol_type = other DNA
ctacaggtttacagcaggcgcggcagcgcatcaaagcactggaagacgccttacgaacacatggattaatcaact

SEQ ID NO: 382969 - DNA, 75 bp, synthetic construct
  source 1..75: mol_type = other DNA
ttattgcctggtcgcgaatttatcttggcgtacactggcctctggacatgctcggtggtttgctggcaggtatga

SEQ ID NO: 382970 - DNA, 75 bp, synthetic construct
  source 1..75: mol_type = other DNA
gtagaactgaaaactccaattcagccagagacgccggttagctttaccacctggttcggtactttcccggaaacc

SEQ ID NO: 382971 - DNA, 75 bp, synthetic construct
  source 1..75: mol_type = other DNA
ggcagcctgagttcacagataaaacactctccaggaaacccggggcggttcagcttggtacgctgtccaacctgt

SEQ ID NO: 382972 - DNA, 75 bp, synthetic construct
  source 1..75: mol_type = other DNA
atgttgcagtggtgggtcgattttctggatgccaatcgggaaagagcgattacgccgtttgactatgcgaagatc

SEQ ID NO: 382973 - DNA, 75 bp, synthetic construct
  source 1..75: mol_type = other DNA
ggcatccggcagtcgttaaaggagccgccgctggaagaactgcttcggcaactggaagagcaaaaacagaccgga

SEQ ID NO: 382974 - DNA, 75 bp, synthetic construct
  source 1..75: mol_type = other DNA
gtggctacaacaaaccgcgcgacgttcgcgtttcgcatgcaaaagagtatgggttcgaaaccgtggacggcaaac

SEQ ID NO: 382975 - DNA, 75 bp, synthetic construct
  source 1..75: mol_type = other DNA
tggctgatgactatattcagcaacgtcgcctttgccattatggtgatggatacgctgaattatttcttacctggt

SEQ ID NO: 382976 - DNA, 75 bp, synthetic construct
  source 1..75: mol_type = other DNA
taatcacatcgtctaatcataatgttcttatagtgtgggactcagcttctgaagttgatggttttttaaataaac

SEQ ID NO: 382977 - DNA, 75 bp, synthetic construct
  source 1..75: mol_type = other DNA
atccgtggtgattcatgtgctgctggatcaagggatagcgcattcattgctactacatcagatataagtgaaaca

SEQ ID NO: 382978 - DNA, 75 bp, synthetic construct
  source 1..75: mol_type = other DNA
atgctgaatttgcaacgctgtcagcaatattcgcagacaaaattgaatcactggcagcagaagccgagatggaag

SEQ ID NO: 382979 - DNA, 75 bp, synthetic construct
  source 1..75: mol_type = other DNA
gatgatattcaggatgagcctaatttatttcaggccagctactactacggtctgaataactatctaacgggttaa

SEQ ID NO: 382980 - DNA, 75 bp, synthetic construct
  source 1..75: mol_type = other DNA
agaagccccgtaaccaacatacgcctgaatttcgtaacgaagccctgaaactcgctgaacacatcggtgtggccg

SEQ ID NO: 382981 - DNA, 75 bp, synthetic construct
  source 1..75: mol_type = other DNA
ctcggtcgtccggtacaaaaaatggcggcgccggtcgtggcagtaatgatcaccggcatcctgctgaatgtactt

SEQ ID NO: 382982 - DNA, 75 bp, synthetic construct
  source 1..75: mol_type = other DNA
agcgaagtgtcgatcttcaccctggagaaagcgtattccgcaggcgtaacgccggaacaatcacaaacgctgatc

SEQ ID NO: 382983 - DNA, 75 bp, synthetic construct
  source 1..75: mol_type = other DNA
atgaagctctccttccatcagcacattgcgctgttctggatgatcggtgctccgggcgtcttcgcgcccgtgatc

SEQ ID NO: 382984 - DNA, 75 bp, synthetic construct
  source 1..75: mol_type = other DNA
gagcgcacgtcttgatcgcgatgtacgccttgataacgatgccaactgttttgccctttctgaagcctgggatga

SEQ ID NO: 382985 - DNA, 75 bp, synthetic construct
  source 1..75: mol_type = other DNA
acaccacatcttgtgccactcagcaaacaggctgtagccatactgacagaacttcagacatgggctggtgaaaat

SEQ ID NO: 382986 - DNA, 75 bp, synthetic construct
  source 1..75: mol_type = other DNA
ctggccgttatgctgaatttactggtttttattcgttccagtgaactcagataagcccggtggtctgaaattgat

SEQ ID NO: 382987 - DNA, 75 bp, synthetic construct
  source 1..75: mol_type = other DNA
cctgtatgaatcacagctctatgcgtggcgcagcaaactgcagcaacaaatgagttcgtcagagcgtgaaagtga

SEQ ID NO: 382988 - DNA, 75 bp, synthetic construct
  source 1..75: mol_type = other DNA
gcagcccgtgaactcagcctgtatgaatctcagctttatgcctggcgcattaaacagcagcaacaaatgagttcg

SEQ ID NO: 382989 - DNA, 75 bp, synthetic construct
  source 1..75: mol_type = other DNA
attaccggcgagtttggtcatatgcgtctgccggtcgatgcgttaaccatgatggggcttgatttcccattacgc

SEQ ID NO: 382990 - DNA, 75 bp, synthetic construct
  source 1..75: mol_type = other DNA
tccgtaacgccatgaatatgctgatggaagtggcgttgctggtcggttcgattttcgcagcaattaaaatggcgg

SEQ ID NO: 382991 - DNA, 75 bp, synthetic construct
  source 1..75: mol_type = other DNA
tcccggcacgacgactgcgccgttctcgcacccattctttcagtcgccgtctggtcgctgaaaatcagctgaccg

SEQ ID NO: 382992 - DNA, 75 bp, synthetic construct
  source 1..75: mol_type = other DNA
caatcgggacagagataacagggaaataattgatagtgtaagtttttatgatgccaggctggtgattagcgactt

SEQ ID NO: 382993 - DNA, 75 bp, synthetic construct
  source 1..75: mol_type = other DNA
aaaacatacggttttactattcgtttgatcacgatcttttgtacatggaagatgttgaaaataacagaccattaa

SEQ ID NO: 382994 - DNA, 75 bp, synthetic construct
  source 1..75: mol_type = other DNA
acggattctaatccgggagtaatccctaatattcctgtccctcaggtaagtgtacgggaaaggattaatgcgttc

SEQ ID NO: 382995 - DNA, 75 bp, synthetic construct
  source 1..75: mol_type = other DNA
gtaccgatatagaataagagccaataacgctttttattcacttgctccatcagtacaacaattgagagaacgggg

SEQ ID NO: 382996 - DNA, 75 bp, synthetic construct
  source 1..75: mol_type = other DNA
acgtttgtaaatccaggtgttatacctcaattagttgtaccaactgtgtcagttagagaaagaatcaatgcattt

SEQ ID NO: 382997 - DNA, 75 bp, synthetic construct
  source 1..75: mol_type = other DNA
ttgtcggagcgctgatcgctgctgttgccagtatgaaaatttttgctggtagcgaagtgtcgatcttcacccttg

SEQ ID NO: 382998 - DNA, 75 bp, synthetic construct
  source 1..75: mol_type = other DNA
tggtggcgtgcctgaccggtatgacatcacttctggcacatcgctcggcggccgtatttcatgatggtattcgcc

SEQ ID NO: 382999 - DNA, 75 bp, synthetic construct
  source 1..75: mol_type = other DNA
gctcgccggtggtttcagcttttgcactgttcccgttggtggcgattttctaccagtttggctggaagcaaagtc

SEQ ID NO: 383000 - DNA, 75 bp, synthetic construct
  source 1..75: mol_type = other DNA
cgctgtttattgtcgaaaatggatttggtgcggttgaccagagacaagctgacggcacggtgaacgatcactatc

SEQ ID NO: 383001 - DNA, 75 bp, synthetic construct
  source 1..75: mol_type = other DNA
gcaaaagttcgatttattcaacaaagccggaatgaaggaggaaaaggcatcagtatcgctgatgtgatgactgct

SEQ ID NO: 383002 - DNA, 75 bp, synthetic construct
  source 1..75: mol_type = other DNA
aacgaagggaagggaacgctggaacggatacgtaaagcgtcgttttactggtatcgggatctcatcgccaacaat

SEQ ID NO: 383003 - DNA, 75 bp, synthetic construct
  source 1..75: mol_type = other DNA
tctctcttaaagcccgcactgtttacatcaccgatgaacagtatgcggcgatatatgcggaagcaattccacagt

SEQ ID NO: 383004 - DNA, 75 bp, synthetic construct
  source 1..75: mol_type = other DNA
gcctgagtcgagtatacgggtggggatatgagcgtgggtatgtgaagaataacccatgcaaaggagtcagaaaat

SEQ ID NO: 383005 - DNA, 75 bp, synthetic construct
  source 1..75: mol_type = other DNA
atgattaacgctcagatcgtaccaactaccgcagaacacatcgaagccatgcttccacgtgtccgccaggctgat

SEQ ID NO: 383006 - DNA, 75 bp, synthetic construct
  source 1..75: mol_type = other DNA
tcaccacatcgccaataccattatcgaacatcgccataatgaagcctggctgcgccagcacatccacaatgacgc

SEQ ID NO: 383007 - DNA, 75 bp, synthetic construct
  source 1..75: mol_type = other DNA
gtgatcaacacaaccaagggcgggaaggtcatagctaaaacgctaaacaactggtggaaccaagctaaacacgca

SEQ ID NO: 383008 - DNA, 75 bp, synthetic construct
  source 1..75: mol_type = other DNA
ctggtggaatcaggctaaacgtgcagccgagcaaaaagccggcgttccgtttgggtgcaacttccatgacataaa

SEQ ID NO: 383009 - DNA, 75 bp, synthetic construct
  source 1..75: mol_type = other DNA
cggtgatcgaagaagccctgaaacaaggtattccacaaaacgtgattgacgctgcccagcgttcgcctgtctaca

SEQ ID NO: 383010 - DNA, 75 bp, synthetic construct
  source 1..75: mol_type = other DNA
ggaaggcgttactgatactcgtgccatcgacgaagtaggcctgagcgtcgcccaggtcgaagagatgtatcgcta

SEQ ID NO: 383011 - DNA, 75 bp, synthetic construct
  source 1..75: mol_type = other DNA
agccaaacgggtcgtcgtttcccttggtcctcagggggcgctgggggttgatagtgaaagctgcattcaggtcgt

SEQ ID NO: 383012 - DNA, 75 bp, synthetic construct
  source 1..75: mol_type = other DNA
ttcaccatcgatgaacctcagccatacggcattaaaaacctaccgtttcaccgtttccacatggagagaaaataa

SEQ ID NO: 383013 - DNA, 75 bp, synthetic construct
  source 1..75: mol_type = other DNA
atctcgccaatatgttgagtgccggcgataccggtccggtactgcgggcgctgaaacggatgatggcgatgcgcc

SEQ ID NO: 383014 - DNA, 75 bp, synthetic construct
  source 1..75: mol_type = other DNA
gtcgcatccggtatctgggcgtgctgctttacgacgccgaccgcatcgaggaagcggcgagcaccgagcgcgaag

SEQ ID NO: 383015 - DNA, 75 bp, synthetic construct
  source 1..75: mol_type = other DNA
aagcagttaagcatgcgatggatgtgaatgtgagtacacgaaccagttcttattttgcagatcgtctaatccaga

SEQ ID NO: 383016 - DNA, 75 bp, synthetic construct
  source 1..75: mol_type = other DNA
ccagggaaaccgttcttcgctgctgcaggcgtggattgatgatggcgatacgtcattaccaccagaaaaaattca

SEQ ID NO: 383017 - DNA, 75 bp, synthetic construct
  source 1..75: mol_type = other DNA
attagaaagccagagtgttaacgtcaaaactaataatacgaataactggcatttgaccattattgatgatgatgg

SEQ ID NO: 383018 - DNA, 75 bp, synthetic construct
  source 1..75: mol_type = other DNA
tctcttctatgattcttcctgcacatgctggaattgttatctacgggacgcgtattatttatccggcagaaaata

SEQ ID NO: 383019 - DNA, 75 bp, synthetic construct
  source 1..75: mol_type = other DNA
tcgtggtctgcatattccggcagtgacgcacgtgtttaactacgatttgcccgatgactgtgaagattacgttca

SEQ ID NO: 383020 - DNA, 75 bp, synthetic construct
  source 1..75: mol_type = other DNA
attaaagatatccgctggctgttccgccgtatgccgcctgcaaaccagcgcctcaacatgctgttctccgccacg

SEQ ID NO: 383021 - DNA, 75 bp, synthetic construct
  source 1..75: mol_type = other DNA
ccattcaggcactggcccttccgctgacgctggcgggtcgtgacgtagccgggcaggcgcaaaccggtaccggga

SEQ ID NO: 383022 - DNA, 75 bp, synthetic construct
  source 1..75: mol_type = other DNA
ttagatatttctcaggtaatggggaaattatcagggatcagtaaaatatacggagactcatctcttggtgtatct

SEQ ID NO: 383023 - DNA, 75 bp, synthetic construct
  source 1..75: mol_type = other DNA
gttatggttataggcggtggcgcagaattaatatgcgatgcagtaaaaaaacactcacagattcgtgatgaacgt

SEQ ID NO: 383024 - DNA, 75 bp, synthetic construct
  source 1..75: mol_type = other DNA
gcgaagcattcactatccgtaacgtgcgggttatgcctgaatccattccggctggctttaaggcactggctgaca

SEQ ID NO: 383025 - DNA, 75 bp, synthetic construct
  source 1..75: mol_type = other DNA
atgaaaggattattacctttactcattttttctatggtcattcctgcccatgccggaattgtcatctacgggaca

SEQ ID NO: 383026 - DNA, 75 bp, synthetic construct
  source 1..75: mol_type = other DNA
ggttcctttcatgttaacgccaccagtggcaaaaataggagcaaattccgggcagcaagtaaaaatcaaaattat

SEQ ID NO: 383027 - DNA, 75 bp, synthetic construct
  source 1..75: mol_type = other DNA
cgtattatttacccggcagaaaaaaaagaagtgatggtacagttgatgaatcagggtgatcgctcttcgctgctt

SEQ ID NO: 383028 - DNA, 75 bp, synthetic construct
  source 1..75: mol_type = other DNA
atggtacgtatctatacgttgacacttgcgccctctcttgatagcgcaacaattaccccgcaaatttatcccgaa

SEQ ID NO: 383029 - DNA, 75 bp, synthetic construct
  source 1..75: mol_type = other DNA
atgtttgattttgtctgcaaccatatgtcggcaaaaagtgaatggtttaaaaactatttacaacaaacttcctcg

SEQ ID NO: 383030 - DNA, 75 bp, synthetic construct
  source 1..75: mol_type = other DNA
cttaaagatctggatgcgcaaatatcagaagcagaagccaagctctccagcttaaaccaccgtaagaagcaaatc

SEQ ID NO: 383031 - DNA, 75 bp, synthetic construct
  source 1..75: mol_type = other DNA
gtaccgctatatgaaggcaggagtcatgctggctgatttcacaccatcgggtatagcgcagccgggattatttga

SEQ ID NO: 383032 - DNA, 75 bp, synthetic construct
  source 1..75: mol_type = other DNA
gcccgaagcgtaccgctgttgcgattgattcgctgctggggttctggcttggccaacaattattacaaggaaaac

SEQ ID NO: 383033 - DNA, 75 bp, synthetic construct
  source 1..75: mol_type = other DNA
cccggaggatgggtgcttcgccgcgcgcaattcgatgcgttatgcggtggattatgcggcaatgaacgaccacag

SEQ ID NO: 383034 - DNA, 75 bp, synthetic construct
  source 1..75: mol_type = other DNA
acttacttcgtcaaagcaagtggtgattctatgattgatggtggaattagtgacggtgatttactgattgtcgat

SEQ ID NO: 383035 - DNA, 75 bp, synthetic construct
  source 1..75: mol_type = other DNA
gaccagggtccggtaccggttgaaatcactgcggttgaagacgatcacgtcgtggttgatggtaaccacatgctg

SEQ ID NO: 383036 - DNA, 75 bp, synthetic construct
  source 1..75: mol_type = other DNA
ttagaggtaaaaaataaaaatagttataagttaagtaaatttacatgggaaacgtatggtgatatcgtagtatca

SEQ ID NO: 383037 - DNA, 75 bp, synthetic construct
  source 1..75: mol_type = other DNA
aaaaaatatatttccctaatcggacttgataagttgtcattcaatattgatgtttttagacaagcattagaggta

SEQ ID NO: 383038 - DNA, 75 bp, synthetic construct
  source 1..75: mol_type = other DNA
tgaaatccagccccgtaaaaacagtgaaaagttaatgaaaacactcgatgaactgaaccagtcgggaaaagggaa

SEQ ID NO: 383039 - DNA, 75 bp, synthetic construct
  source 1..75: mol_type = other DNA
tttgaatggcaaaccgattgaagatgcgacggtttaccacattgccactcagagtttccttgctgatggtggaga

SEQ ID NO: 383040 - DNA, 75 bp, synthetic construct
  source 1..75: mol_type = other DNA
ttgaagttgtggcgattcgcgaagcgaccgaagaagaactggctcatggtcacgttcacggcgcgcacgatcatc

SEQ ID NO: 383041 - DNA, 75 bp, synthetic construct
  source 1..75: mol_type = other DNA
gcgcttggggcttcatggggaattccatttattttattggtcccattatccattattgcagcactggctctgggg

SEQ ID NO: 383042 - DNA, 75 bp, synthetic construct
  source 1..75: mol_type = other DNA
aaaaatccagcgtgaaaccagactgcagaggttattggctaaaaaagatgttacatacgacaaagttaagactgg

SEQ ID NO: 383043 - DNA, 75 bp, synthetic construct
  source 1..75: mol_type = other DNA
tggatgtcgctgtcacggaaaccgcaagtgacctggtacggctgggacggcgaccgcctgaccacaatacagaac

SEQ ID NO: 383044 - DNA, 75 bp, synthetic construct
  source 1..75: mol_type = other DNA
gccgagcaaaaagttggcgttccgttcgggtgcaattttcacgacataaaagctaaggggatctcagattacgaa

SEQ ID NO: 383045 - DNA, 75 bp, synthetic construct
  source 1..75: mol_type = other DNA
ggcctgacgaccggatgccgtcaggcagccgggagccgaagtgggcgcaacaaaaaacagccagaaacggtgaca

SEQ ID NO: 383046 - DNA, 75 bp, synthetic construct
  source 1..75: mol_type = other DNA
cgggtgcgcaagcagctgcctgtcgtagtcgggcctgacgaccggatgccgccaggcagccgggagccgaagtgg

SEQ ID NO: 383047 - DNA, 75 bp, synthetic construct
  source 1..75: mol_type = other DNA
agccaaacctcttgataattacgattcgatagagaaccaccggaaggccaagcgcattcatcgcgccacacgcct

SEQ ID NO: 383048 - DNA, 75 bp, synthetic construct
  source 1..75: mol_type = other DNA
cgctggcaatcggtaaatttaatgagctgtatcccaatattaaagtgcggattctggaacaaggcacgggtaatg

SEQ ID NO: 383049 - DNA, 75 bp, synthetic construct
  source 1..75: mol_type = other DNA
atgaaaacactgattaaagtactgggtattaccggcagccttctgctctgtgtgggcgctcaggctcagccttat

SEQ ID NO: 383050 - DNA, 75 bp, synthetic construct
  source 1..75: mol_type = other DNA
gggaggcaccagcctgaacggcggctatggaacggtggtggggacggtaatcggggcattaaccatcggcgttat

SEQ ID NO: 383051 - DNA, 75 bp, synthetic construct
  source 1..75: mol_type = other DNA
gtgagtaaactctcagtcagaggtgactcacatgacaaaaacagtatcaaccacgtaaaaacccgtaaacagcat

SEQ ID NO: 383052 - DNA, 75 bp, synthetic construct
  source 1..75: mol_type = other DNA
ccagccagtgcggaaaaacatcactcacacaatgcctgtgcggagagaatattcattatcagaaaacgcaggcta

SEQ ID NO: 383053 - DNA, 75 bp, synthetic construct
  source 1..75: mol_type = other DNA
ttagccagcatggaacaaatatctttggtgaaatgttggttacgggaagctggagcgcacaacgtgttagtaacc

SEQ ID NO: 383054 - DNA, 75 bp, synthetic construct
  source 1..75: mol_type = other DNA
ctgctggccgacattcactgtatgctgaacatcgttattctgcggctattcgttccggcgatttgctgtttgttt

SEQ ID NO: 383055 - DNA, 75 bp, synthetic construct
  source 1..75: mol_type = other DNA
ctcaccacggatttaacagcactggcagaaggctcaacgccatctattacaggagaaacatcaacctctcttgca

SEQ ID NO: 383056 - DNA, 75 bp, synthetic construct
  source 1..75: mol_type = other DNA
tccagcagcactaattatcaacaacttaccttcacctccaaaaatagggttttcaccgttccaccccataaataa

SEQ ID NO: 383057 - DNA, 75 bp, synthetic construct
  source 1..75: mol_type = other DNA
cttgcagttatgctgaatttactggtttttattcgttccagtgaactcagatacgcccgttggtctgaaattgat

SEQ ID NO: 383058 - DNA, 75 bp, synthetic construct
  source 1..75: mol_type = other DNA
attaataattcagttatcgatatgtcttcttataatgtgacctttaaaacatctaaatttaataaacttgatata

SEQ ID NO: 383059 - DNA, 75 bp, synthetic construct
  source 1..75: mol_type = other DNA
gatgttacgagctttcataccgatccagaaaaacaatttgaagacatcatgacggtgaaaaatgaaatatttagc

SEQ ID NO: 383060 - DNA, 75 bp, synthetic construct
  source 1..75: mol_type = other DNA
tgaatatggttttaaatatggtttgttcgatgtaaaggaaacatcaactactgaaagggcgacgataatatctac

SEQ ID NO: 383061 - DNA, 75 bp, synthetic construct
  source 1..75: mol_type = other DNA
aacgcgaaaaatagcgaaacagccgcaaagacgagcgaaaccaatgcaaagtccagccagacggcagcgaagacc

SEQ ID NO: 383062 - DNA, 75 bp, synthetic construct
  source 1..75: mol_type = other DNA
gtgacgtggtaataatgccaataagactgaactggtcaacacctccgttaagcgttcttatggaagttaatatca

SEQ ID NO: 383063 - DNA, 75 bp, synthetic construct
  source 1..75: mol_type = other DNA
ttttttatccttaccttttccagcagcactaattatcaacaacttaccttcacctccaaaaatagggttttcacc

SEQ ID NO: 383064 - DNA, 75 bp, synthetic construct
  source 1..75: mol_type = other DNA
tacggcagtgaactcaaatactacacgtttagcccgttgttaataaagcaaaaccatctcaatctcctgctgcca

SEQ ID NO: 383065 - DNA, 75 bp, synthetic construct
  source 1..75: mol_type = other DNA
cggcggcaaagaaatccgaaacagcagcggcatcatcgaagaacgcggcgaaaacctcagaaacgaacgcagcta

SEQ ID NO: 383066 - DNA, 75 bp, synthetic construct
  source 1..75: mol_type = other DNA
cataaagcagaacatctggaagaacgccgcttgatgctacaatggtgggccgattttctggatgcaaacagagaa

SEQ ID NO: 383067 - DNA, 75 bp, synthetic construct
  source 1..75: mol_type = other DNA
gctgcagaagctaaacaaatttatgaaatcgccagtcgtctgcagcaaagaatatctgctgtaatgcgttatgcc

SEQ ID NO: 383068 - DNA, 75 bp, synthetic construct
  source 1..75: mol_type = other DNA
aatccctgaacagaatagtaaaactgtaacgccgggtctccactacgctgctgatggattcaggctgagtggtgg

SEQ ID NO: 383069 - DNA, 75 bp, synthetic construct
  source 1..75: mol_type = other DNA
caaccaaggaagtctgtggccatggattccgggcgatggcgtgcagtgcattgattgaatccggtttatggtcaa

SEQ ID NO: 383070 - DNA, 75 bp, synthetic construct
  source 1..75: mol_type = other DNA
cctactgtgacgcttgctcaggcaagagcaaagcgcgacgaagctaaaaagcttttagtgcagggcattgatcca

SEQ ID NO: 383071 - DNA, 75 bp, synthetic construct
  source 1..75: mol_type = other DNA
tgagttgcgtttcgctcgctgggatgaattcgacttcgataaatctctttggcgtataccggcaaaacgagaaga

SEQ ID NO: 383072 - DNA, 75 bp, synthetic construct
  source 1..75: mol_type = other DNA
cagcaaacaggctgtagccatactgacagaactacagacatgggctggtgaaaatggtctgatctttacgggagc

SEQ ID NO: 383073 - DNA, 75 bp, synthetic construct
  source 1..75: mol_type = other DNA
tgggctggtgaaaatggtctgatatttacgggtgcacatgacccgcgtaaaccaatcagtgaaaatactgtaaat

SEQ ID NO: 383074 - DNA, 75 bp, synthetic construct
  source 1..75: mol_type = other DNA
actctaacttgagcatttttcatggtgttatatctggaaatataaacgtaaatattgacggaaaaaatactaatg

SEQ ID NO: 383075 - DNA, 75 bp, synthetic construct
  source 1..75: mol_type = other DNA
tgtggccatggattccgggcgatggcgtgcagtgcattgattgaatcaggtttgtggtcccgcgatgctgtggaa

SEQ ID NO: 383076 - DNA, 75 bp, synthetic construct
  source 1..75: mol_type = other DNA
actaaattgaacatcaaaaaatcaatcaaggatgtttcggaattgagtggggagttgcgaaatcgtcaatatgtt

SEQ ID NO: 383077 - DNA, 75 bp, synthetic construct
  source 1..75: mol_type = other DNA
ttccagccgaacgcaaacctctgccaggcgtaaaattctcacaccggggctccaagatgcgaacaccacatcttg

SEQ ID NO: 383078 - DNA, 75 bp, synthetic construct
  source 1..75: mol_type = other DNA
gtgcagtgcattgattgaatcaggtttgtggtcccgcgatgctgtggaacgtcagatgagccatcaggagcgtaa

SEQ ID NO: 383079 - DNA, 75 bp, synthetic construct
  source 1..75: mol_type = other DNA
tgtctttttattattctggttcaaagtttatatgaagtaggttatattcaaaatgattgcgagacgataaaaaaa

SEQ ID NO: 383080 - DNA, 75 bp, synthetic construct
  source 1..75: mol_type = other DNA
atgcctgtattgcagtggggaatgttatgtgttcgtgttctgtcacttctcctttctattggcttcctcgcttta

SEQ ID NO: 383081 - DNA, 75 bp, synthetic construct
  source 1..75: mol_type = other DNA
ctacctcgccaccagtcccggcgggcttgataccgtggcggtcatcgccgcagggagcaatgccgatatggcgct

SEQ ID NO: 383082 - DNA, 75 bp, synthetic construct
  source 1..75: mol_type = other DNA
ttattggtgcgctatagctcactgcctgggaataccggtgcatggggttcctcccccggcggcgcagcggcaatg

SEQ ID NO: 383083 - DNA, 75 bp, synthetic construct
  source 1..75: mol_type = other DNA
atgccagttttgcagtggggaatgttatgtgtgctttcacttctcctttctattggcttcctcgcggtacatctt

SEQ ID NO: 383084 - DNA, 75 bp, synthetic construct
  source 1..75: mol_type = other DNA
gctttccagcgccatcgtgggttggttattggtgcgctatagctcattgcctggaaataccggtgcctggggttc

SEQ ID NO: 383085 - DNA, 75 bp, synthetic construct
  source 1..75: mol_type = other DNA
ccagtctggcgatgtcatgactattgaacttccagaatggctgctgacgatagcttatatggcgattggctggag

SEQ ID NO: 383086 - DNA, 75 bp, synthetic construct
  source 1..75: mol_type = other DNA
atgaaaccatgttgcaacgtatgctgggcagtggctggggagtgttgctgccgggattgctgattgcagggctga

SEQ ID NO: 383087 - DNA, 75 bp, synthetic construct
  source 1..75: mol_type = other DNA
gcgttgacattctgattggcaccacggggcgtttaattgactacgccaagcagaaccacattaacctcggtgcca

SEQ ID NO: 383088 - DNA, 75 bp, synthetic construct
  source 1..75: mol_type = other DNA
tttgcctgctattgaaacctatattggtcactcaattccggtaagcaaatacaatccggacgcattgatgaccga

SEQ ID NO: 383089 - DNA, 75 bp, synthetic construct
  source 1..75: mol_type = other DNA
gctttccagcgccatcgtgggctggttattggtgcgctatagctcactgcccggaaataccggtgcctggggctc

SEQ ID NO: 383090 - DNA, 75 bp, synthetic construct
  source 1..75: mol_type = other DNA
tgatcgccgggatcatctttagtatgcgcggaattactttacaactcccccgctccgcttttctcgccgcgcagg

SEQ ID NO: 383091 - DNA, 75 bp, synthetic construct
  source 1..75: mol_type = other DNA
cgctccgcttttctcgccgcccaggccattcttggctgcatgattgcgcaaaacctcactggttcgattctcacc

SEQ ID NO: 383092 - DNA, 75 bp, synthetic construct
  source 1..75: mol_type = other DNA
ccattcttggctgcatgattgcgcaaaacctcactggctcgatcctcactactctggccgttaactggccaattg

SEQ ID NO: 383093 - DNA, 75 bp, synthetic construct
  source 1..75: mol_type = other DNA
gctacgctgtcggcggtctggctgtgggtgagccgaaagcagatatgcaccgtattctggagcatgtatgcccgc

SEQ ID NO: 383094 - DNA, 75 bp, synthetic construct
  source 1..75: mol_type = other DNA
aagtcgatggagattcagtacgatcttggttcggatatcgtcatgatctttgatgagtgtacgccgtatcctgct

SEQ ID NO: 383095 - DNA, 75 bp, synthetic construct
  source 1..75: mol_type = other DNA
gtatcgatatgtttgactgcgtaatgccaacccgtaacgcccgaaatggtcatttgttcgtgaccgatggcgtgg

SEQ ID NO: 383096 - DNA, 75 bp, synthetic construct
  source 1..75: mol_type = other DNA
aatggttatggggatgcgtgtaaagtcagagcagtctacgtgctcagtaagtaacgggcatatatccagcgaaac

SEQ ID NO: 383097 - DNA, 75 bp, synthetic construct
  source 1..75: mol_type = other DNA
catcactcatcgcgaagtgatggccaatctacgtgccatcagccacgatggcattaaattacgcccaggcgatcg

SEQ ID NO: 383098 - DNA, 75 bp, synthetic construct
  source 1..75: mol_type = other DNA
agccgtcgcaccgaacacaggaacgcgcgctgtatcgactttcgtcaactgcggtaaagcattgccggaacatgg

SEQ ID NO: 383099 - DNA, 75 bp, synthetic construct
  source 1..75: mol_type = other DNA
tttctggcccggcgctggaaccagagtacccgttttggcgctttccttgatccggtagcggataaagtgctggtc

SEQ ID NO: 383100 - DNA, 75 bp, synthetic construct
  source 1..75: mol_type = other DNA
cgtgaaattattatttctgcgctacgcgaatggatggcggagttgggtaaacgcagtagcgtggctgtctcctgg

SEQ ID NO: 383101 - DNA, 75 bp, synthetic construct
  source 1..75: mol_type = other DNA
tatggcgatgcagaccctgcgcctgttcagcgtcttgctgacgggacctgccattgcgcggtttatttcaacgta

SEQ ID NO: 383102 - DNA, 75 bp, synthetic construct
  source 1..75: mol_type = other DNA
cagttacggcattatgttttgttgccatcgtgcctggcgctaattgcgagcgtcatactgatgataacgagctgg

SEQ ID NO: 383103 - DNA, 75 bp, synthetic construct
  source 1..75: mol_type = other DNA
ccggatcagtggcggattgtgattctgatgggattagtgttgacgccggtgatgctgtatcacaaacaattacgg

SEQ ID NO: 383104 - DNA, 75 bp, synthetic construct
  source 1..75: mol_type = other DNA
tttctggcgcgtcgctggaatcagagtacccgctttggcgctttccttgatccagtagcagataaagtgctggtt

SEQ ID NO: 383105 - DNA, 75 bp, synthetic construct
  source 1..75: mol_type = other DNA
tcctttttccctgagtgacctgctgtatgtttctgccacccataattttccacattacgggggtaagggcagtaa

SEQ ID NO: 383106 - DNA, 75 bp, synthetic construct
  source 1..75: mol_type = other DNA
atgacacagacagaatcagtgattctggcacacacccggcggtgtgtgcctgcggagtcgtgcggctttgtggta

SEQ ID NO: 383107 - DNA, 75 bp, synthetic construct
  source 1..75: mol_type = other DNA
cggcggcggatgtcacggcgctgggtagcggcccgcaaaccatcaccgccagcctgagcgatcgcgcgggcaaca

SEQ ID NO: 383108 - DNA, 75 bp, synthetic construct
  source 1..75: mol_type = other DNA
gccgatggcagctggagcgtcggcgttccggcggcagatgtcacaaactggcctgcggggacggtcaatattgcc

SEQ ID NO: 383109 - DNA, 75 bp, synthetic construct
  source 1..75: mol_type = other DNA
cgacgcgctgaagctggcaaatgaaggtaaagtaaaagaagcgcaggctgccgcagagcaactgaaaacgacccg

SEQ ID NO: 383110 - DNA, 75 bp, synthetic construct
  source 1..75: mol_type = other DNA
gggatttgccagcgaagaactacgtcgtgagaaagctgcaattgatgtaatgagcgataagcggacattctggtc

SEQ ID NO: 383111 - DNA, 75 bp, synthetic construct
  source 1..75: mol_type = other DNA
attttagtaagtgtatcattatttctttctcaattttgggtggttagcgaacgatatcaatacgtttctgtttta

SEQ ID NO: 383112 - DNA, 75 bp, synthetic construct
  source 1..75: mol_type = other DNA
gcagccgaaaggtttaggcatcggctggagtgcaacgctcggcgcagtactggcgttagttacgggcgtggtcca

SEQ ID NO: 383113 - DNA, 75 bp, synthetic construct
  source 1..75: mol_type = other DNA
gggacccgatcgagaaagacgaaatgaatcgtgttttcgtgttcggcaaggtgatcggcagcatgccgcagacgt

SEQ ID NO: 383114 - DNA, 75 bp, synthetic construct
  source 1..75: mol_type = other DNA
gcgctgcccaggttaaaagccaggatactgatgcattcaggattgatgtgctggaccttatggttagtgccgggc

SEQ ID NO: 383115 - DNA, 75 bp, synthetic construct
  source 1..75: mol_type = other DNA
ggcgtgaattttatagtccaaatttatcagcgttagaacgattaaaactacgttggattacatctatcggtagta

SEQ ID NO: 383116 - DNA, 75 bp, synthetic construct
  source 1..75: mol_type = other DNA
gagaaagacgagatgaaccgggtgtttatcttcgggaaagttattgggagcatgccgcagacctacaggaagcat

SEQ ID NO: 383117 - DNA, 75 bp, synthetic construct
  source 1..75: mol_type = other DNA
tatcttctggcgttggaaatatgtcagacagtacagtgcaaccaatacaaacaactgtcagccattccaaatact

SEQ ID NO: 383118 - DNA, 75 bp, synthetic construct
  source 1..75: mol_type = other DNA
gcaaatgaaggtaaagtaaaagaagcgcaggctgccgcagagcaactgaaaacgacccgcaacgcctatcaccag

SEQ ID NO: 383119 - DNA, 75 bp, synthetic construct
  source 1..75: mol_type = other DNA
aaagatcatttagctgcctatgagcaatcgaaagcttctggcacttcaacccttaaaccagcccgccaggcgcca

SEQ ID NO: 383120 - DNA, 75 bp, synthetic construct
  source 1..75: mol_type = other DNA
atgcttaatggaattagtcacgctgtttctacactagggcggcatcttactggtgttgcaagtcgggtgagttct

SEQ ID NO: 383121 - DNA, 75 bp, synthetic construct
  source 1..75: mol_type = other DNA
tactgagcgtattttgcgctaatgcggcaaagttgccagctgaagatgtcatcaaaaaacgtctgacagaaaaag

SEQ ID NO: 383122 - DNA, 75 bp, synthetic construct
  source 1..75: mol_type = other DNA
ccttacacaaaaggcgcttggggatttggtcggggttagccaggctgctattcagaaaatcgaaacagggaaagc

SEQ ID NO: 383123 - DNA, 75 bp, synthetic construct
  source 1..75: mol_type = other DNA
atctttcgacggcgacgggatttatgcgttcctttacgacgatacggcccatgttaagcgccttcaaatgatgaa

SEQ ID NO: 383124 - DNA, 75 bp, synthetic construct
  source 1..75: mol_type = other DNA
ctgacaggacggcgctttgagcacggggtgacggactgttacacgctgttccgggatgcataccatctggcggga

SEQ ID NO: 383125 - DNA, 75 bp, synthetic construct
  source 1..75: mol_type = other DNA
caaagattacaactacgatccccattttggtcgttatgattcgtcggcgacgctcgatgagatgaagcaatacac

SEQ ID NO: 383126 - DNA, 75 bp, synthetic construct
  source 1..75: mol_type = other DNA
agtccggtcagcgccctgctctccgccgtattgctgaactgcgcgctgttggtgctgattcgctattacatcatt

SEQ ID NO: 383127 - DNA, 75 bp, synthetic construct
  source 1..75: mol_type = other DNA
cgggatgcgtaccatctggcggggattacgctgcctgattttcatcgtgaggatgactggtggcgtcacggtcag

SEQ ID NO: 383128 - DNA, 75 bp, synthetic construct
  source 1..75: mol_type = other DNA
cacgacctgcctgcacaacgtagcacctggcatgatttttttgccttcaggcaccgcatctgtttcggagaaaca

SEQ ID NO: 383129 - DNA, 75 bp, synthetic construct
  source 1..75: mol_type = other DNA
aaaacatcaggagccgctgtatcaaagtattgcggttgaatgcctgacggaaatgaaatttgaagatttgcgtgg

SEQ ID NO: 383130 - DNA, 75 bp, synthetic construct
  source 1..75: mol_type = other DNA
gtcggcgaaatataataatctaagacacttgaggcagttctttcttgatgtacaacgcatcatttcccttttggg

SEQ ID NO: 383131 - DNA, 75 bp, synthetic construct
  source 1..75: mol_type = other DNA
ggtaaaacatttgaagtaacgtcagatttacatagtgcttgtaagatttttttgaacgtaattagtagtttgcat

SEQ ID NO: 383132 - DNA, 75 bp, synthetic construct
  source 1..75: mol_type = other DNA
agaaccagactgaccgaagaatacaactggttgattagcctaaaagagatagctgtagatttcactcaaaacgca

SEQ ID NO: 383133 - DNA, 75 bp, synthetic construct
  source 1..75: mol_type = other DNA
gtgcagggctggctgctattgcactggctgccggaggcggtggtggaagcagtcgtcataagcgtacagctgaag

SEQ ID NO: 383134 - DNA, 75 bp, synthetic construct
  source 1..75: mol_type = other DNA
aagcatgatgcggtcgtggcagcgaagaccccggccgaggctgcggtgaacaacctgccggaaggaccggagaaa

SEQ ID NO: 383135 - DNA, 75 bp, synthetic construct
  source 1..75: mol_type = other DNA
aggcggtcaggaggctggaaaaacagatgtatcatccacaggctcaattgagccggaaagtggaaacctctctgg

SEQ ID NO: 383136 - DNA, 75 bp, synthetic construct
  source 1..75: mol_type = other DNA
tctacccccgttccggttttgtcagccagaccgatgatgacaaagcggctgccctggtggcccagcgggtggcgg

SEQ ID NO: 383137 - DNA, 75 bp, synthetic construct
  source 1..75: mol_type = other DNA
atgacgggtctgcgaacacgacgttatgccggtgctctgctgctgtgtacggcgaccgtctctgtggctgacgct

SEQ ID NO: 383138 - DNA, 75 bp, synthetic construct
  source 1..75: mol_type = other DNA
ccagacagatgatgataaagctgctgcggtggtggcccagcgggtggctgacattatcacccgcaccggtgaacc

SEQ ID NO: 383139 - DNA, 75 bp, synthetic construct
  source 1..75: mol_type = other DNA
gacagcggcgaaagccgatgcccagcaggcggtggatggtctgcaggatggtccggtcaagacgggcttcagtga

SEQ ID NO: 383140 - DNA, 75 bp, synthetic construct
  source 1..75: mol_type = other DNA
gtggtgggtaaagctgaagccgagcgtctgacggagctgaatgctgcggtgacagcgaagccgcggaagatgaac

SEQ ID NO: 383141 - DNA, 75 bp, synthetic construct
  source 1..75: mol_type = other DNA
ggtcagccggaccgcaggtggcccggagaatgccatcactgacggcctgtccgggctgagtgccggcgggggaaa

SEQ ID NO: 383142 - DNA, 75 bp, synthetic construct
  source 1..75: mol_type = other DNA
gttgtctccgggtgtcgcgtgcgcagttgcacgtcattctcagacgaaccgatgactggaaagatggtcgccgca

SEQ ID NO: 383143 - DNA, 75 bp, synthetic construct
  source 1..75: mol_type = other DNA
gaagttgccgccgatgatgaaattggtgggcgtaaagtagaaatcacaggtacagtccaggaaatagctaaggat

SEQ ID NO: 383144 - DNA, 75 bp, synthetic construct
  source 1..75: mol_type = other DNA
tcatgctcttttcagtcacggccttctctgaagtcgttcccaccacaaatgtacagccatacccagagtatctgg

SEQ ID NO: 383145 - DNA, 75 bp, synthetic construct
  source 1..75: mol_type = other DNA
tattccgtataaaacaacgtgacgctaaaattccaacctttggagatctttctaaagatgaaaatccagctaatg

SEQ ID NO: 383146 - DNA, 75 bp, synthetic construct
  source 1..75: mol_type = other DNA
ccagtgacaaagaagcggaaaaaataaaacatcaggagccgctgtatcaaagtattgcagttgaatgcctgacgg

SEQ ID NO: 383147 - DNA, 75 bp, synthetic construct
  source 1..75: mol_type = other DNA
gggatcggcgctgaccatcagcggcaccagcaccgcagaagccgggcagacagtgaccgtgacgctaaacggcgt

SEQ ID NO: 383148 - DNA, 75 bp, synthetic construct
  source 1..75: mol_type = other DNA
cggcgttcctgcgacggatgtcagtaactggcctgcgggaacgctgaatattaccgttagcggcgcgaacagtgc

SEQ ID NO: 383149 - DNA, 75 bp, synthetic construct
  source 1..75: mol_type = other DNA
atggatagcgcatgcgcccttgttgccaacggacaaggaataaccctggtaagccgtattctgggcgtgtcgcgt

SEQ ID NO: 383150 - DNA, 75 bp, synthetic construct
  source 1..75: mol_type = other DNA
gttgtgggtgaaaatggtcaggtaactgaagctgtcctgacccaggatggccctgtactggagaatttcactgca

SEQ ID NO: 383151 - DNA, 75 bp, synthetic construct
  source 1..75: mol_type = other DNA
ggagagtaacggcatagcagagagcttcgtgaaaacgataaagcgtgattacatcagtatcatgcccaaaccaga

SEQ ID NO: 383152 - DNA, 75 bp, synthetic construct
  source 1..75: mol_type = other DNA
gataaaaatggttttattcgatgcttcatatccggtttatgggctgttgattatgaatataaagatctgttagtt

SEQ ID NO: 383153 - DNA, 75 bp, synthetic construct
  source 1..75: mol_type = other DNA
tggctggcaattgactggctgaaaacgcaatacggcgcgccgctacgtacggtcgaagtggtggcgggtgatgct

SEQ ID NO: 383154 - DNA, 75 bp, synthetic construct
  source 1..75: mol_type = other DNA
ctggactgttgcgatcgtgaagccatagactgggccgcaagcacgagggttatgacaaagcaacgctgcaggatg

SEQ ID NO: 383155 - DNA, 75 bp, synthetic construct
  source 1..75: mol_type = other DNA
tgctattggtggcagtgttggtggtccatggggagcagcaattggtgcaggtgtaggcgctctcggctctcttct

SEQ ID NO: 383156 - DNA, 75 bp, synthetic construct
  source 1..75: mol_type = other DNA
atgattatacatcatatcgctaataaacatttaaataatgccgtttactgcaaaggtggcagtgatggcggctct

SEQ ID NO: 383157 - DNA, 75 bp, synthetic construct
  source 1..75: mol_type = other DNA
agagcgccttgggtggagcggcagcaggtgcagctgcaggtactgcaatcatgcctggttggggtacagcaattg

SEQ ID NO: 383158 - DNA, 75 bp, synthetic construct
  source 1..75: mol_type = other DNA
aaagcccaggcacgcgcaactgaaaagggcatcgaactgcagcgtgaaatgtggcaaacgaacatgcagaacctt

SEQ ID NO: 383159 - DNA, 75 bp, synthetic construct
  source 1..75: mol_type = other DNA
ggcatcaggggcgatgattggctctgtggtgccaggaataggtacagctgttggcgctattggtggcggtattat

SEQ ID NO: 383160 - DNA, 75 bp, synthetic construct
  source 1..75: mol_type = other DNA
caggcaaacgccgggcagaactatgccaacaacgtcagccaattgtatcaacagcaggcggcagcatctgcggcg

SEQ ID NO: 383161 - DNA, 75 bp, synthetic construct
  source 1..75: mol_type = other DNA
aggctacgggaggacttggttcgacagccacaagcaatcaactggccacgattgccccgactctcggtcagtctt

SEQ ID NO: 383162 - DNA, 75 bp, synthetic construct
  source 1..75: mol_type = other DNA
cacatcttaccgcgcggcgctttgagcacggggtgacggactgttacacgctgttccgggatgcataccatctgg

SEQ ID NO: 383163 - DNA, 75 bp, synthetic construct
  source 1..75: mol_type = other DNA
gcagggggagattgtggcactggtccacagtcatcccggtggtctgccctggctgagcgaggccgaccggcggct

SEQ ID NO: 383164 - DNA, 75 bp, synthetic construct
  source 1..75: mol_type = other DNA
gaccatcagcaatgcaatctgctattggcggaggtgcgtctggtgctattgctggggccggacttgcgaaattaa

SEQ ID NO: 383165 - DNA, 75 bp, synthetic construct
  source 1..75: mol_type = other DNA
gctggagcacaacttggcagcattgttcctggtattggtacaggtattggtgccgctgttggcggcggtcttggt

SEQ ID NO: 383166 - DNA, 75 bp, synthetic construct
  source 1..75: mol_type = other DNA
ggatgctgctgcttctcacggcgttaagacattaacactatatgaatttcttccaagatacgctagtcataattt

SEQ ID NO: 383167 - DNA, 75 bp, synthetic construct
  source 1..75: mol_type = other DNA
caacaatctggcaaacgttgggcttggtgcgctgcaaggtcaggcaaacgccgggcagacgtacgccaacaacat

SEQ ID NO: 383168 - DNA, 75 bp, synthetic construct
  source 1..75: mol_type = other DNA
ggatgactggtggcgtcacggtcagaatctctatcttgacaatatggaggcgacgggtttttaccgtgtcgcact

SEQ ID NO: 383169 - DNA, 75 bp, synthetic construct
  source 1..75: mol_type = other DNA
tggcatgctgcctgccgtatggcggaacaactggccaccctgcgttaccggtttggtctgcaggctgatgaaagc

SEQ ID NO: 383170 - DNA, 75 bp, synthetic construct
  source 1..75: mol_type = other DNA
gccagcttgagcttccaaatgatcagcaaattgatgtccttgctgcgattctcgacaatgagaacgaacaggcga

SEQ ID NO: 383171 - DNA, 75 bp, synthetic construct
  source 1..75: mol_type = other DNA
ttgatagtaatgtcttcatagaggcaaaaaactttgcatataacttcaattattgcaaaatattttgggattttc

SEQ ID NO: 383172 - DNA, 75 bp, synthetic construct
  source 1..75: mol_type = other DNA
atgtttacctatgaaggtctgggaaccggcgtgcaggagtttatcctgacggtatacggaacgtgcatgccaatg

SEQ ID NO: 383173 - DNA, 75 bp, synthetic construct
  source 1..75: mol_type = other DNA
acaactatcagaaccttgcaaacatcggtcttggcgcattgcagggtcaggccaacgccggacagtcatacgcaa

SEQ ID NO: 383174 - DNA, 75 bp, synthetic construct
  source 1..75: mol_type = other DNA
tgcatttgattgggcacggtttcgtgtgctggtcagcaagggacaacatgacgctatttacaaccttactggtgt

SEQ ID NO: 383175 - DNA, 75 bp, synthetic construct
  source 1..75: mol_type = other DNA
caacaatatggcaaacattggccttggtgcgctgcaaggtcaggcgaacgccgggcagacatacgccaacaacat

SEQ ID NO: 383176 - DNA, 75 bp, synthetic construct
  source 1..75: mol_type = other DNA
actggcgctgctcttggctctattgtccccggacttggtactggattaggagcggcaattggtggcgggcttggc

SEQ ID NO: 383177 - DNA, 75 bp, synthetic construct
  source 1..75: mol_type = other DNA
gaccgtcagcattgcagcagggggttagtggtgctgcatccggtgcacttttgggtggtggcatagccagtgctc

SEQ ID NO: 383178 - DNA, 75 bp, synthetic construct
  source 1..75: mol_type = other DNA
aactggctgtcaggtcagatgaacaactacaacaatctggcaaatatcggccttggtgctcttacaggtcaggca

SEQ ID NO: 383179 - DNA, 75 bp, synthetic construct
  source 1..75: mol_type = other DNA
gcataccatctggcggggataacgctgccggattttgtgcgtgaggatgactggtggcgcaacggtcagaacctt

SEQ ID NO: 383180 - DNA, 75 bp, synthetic construct
  source 1..75: mol_type = other DNA
gtgccggatgagtgcttcaccgcagagcgtgaactggtgcgggcaagctggcagaagtggctggtggaagaatga

SEQ ID NO: 383181 - DNA, 75 bp, synthetic construct
  source 1..75: mol_type = other DNA
ttcttcactgccggggcatcaatggcgttatggggttcagccctggcagccggtggtttttctgccaccacgatg

SEQ ID NO: 383182 - DNA, 75 bp, synthetic construct
  source 1..75: mol_type = other DNA
attccgctgtcagatgaacgaaggctggtaccagatacgtattgccggtgaggataccgcgccggaggcggtgta

SEQ ID NO: 383183 - DNA, 75 bp, synthetic construct
  source 1..75: mol_type = other DNA
cgcatggggcagcggctgattaaagtgctggatcaaccgacgcaagatggctttgtctatcgcgtggatatgcga

SEQ ID NO: 383184 - DNA, 75 bp, synthetic construct
  source 1..75: mol_type = other DNA
attgaatttatcgtccaggtgttccagcttattcgcggcgggcgtgaaccgtcgctgcaatcgcgctctttactg

SEQ ID NO: 383185 - DNA, 75 bp, synthetic construct
  source 1..75: mol_type = other DNA
agcaggcgtgggttcaaatggtggcccgctacggtaagccaaatcacctcaacgatcgcgaaggccgtggttttg

SEQ ID NO: 383186 - DNA, 75 bp, synthetic construct
  source 1..75: mol_type = other DNA
gtatattgctctggacgcatacagtacagtcaggatcctggaagacgaattaggggagtttttaacaatgggatt

SEQ ID NO: 383187 - DNA, 75 bp, synthetic construct
  source 1..75: mol_type = other DNA
tcggcaactcgttgatgtttattttcggtgcagcgggcgcggcggcactggggatggcggatatctctgatgtga

SEQ ID NO: 383188 - DNA, 75 bp, synthetic construct
  source 1..75: mol_type = other DNA
tgaaatgaaactcaccactggctcgcgcgttattgcattgatcaaagcatcagccatcctgattgccaccaaagc

SEQ ID NO: 383189 - DNA, 75 bp, synthetic construct
  source 1..75: mol_type = other DNA
gtcatccacattgtgccgcgactggccggggccggaaagggtggactgcagattgtgctgggggcggcagccatc

SEQ ID NO: 383190 - DNA, 75 bp, synthetic construct
  source 1..75: mol_type = other DNA
gagctttcccccgttacgctgtgcgattactacggtttcttccatctgtttttgttcaccatgctgctggttgtt

SEQ ID NO: 383191 - DNA, 75 bp, synthetic construct
  source 1..75: mol_type = other DNA
acggggcggataaaaacgatattttgtttgatgtacatcgtctttatcataaacaatcctcccggcctgaaacgc

SEQ ID NO: 383192 - DNA, 75 bp, synthetic construct
  source 1..75: mol_type = other DNA
gcggctgccagagcctttagccgaggaatcacttagtgcacaggcgaagtcagtacttactttcagtgattttgt

SEQ ID NO: 383193 - DNA, 75 bp, synthetic construct
  source 1..75: mol_type = other DNA
gtcagtttttgagtttcttgacgatggctgtgtattgagtcctttaagaagaaaaaaagcaaaatatacatctgc

SEQ ID NO: 383194 - DNA, 75 bp, synthetic construct
  source 1..75: mol_type = other DNA
aaagtgattgaaagaatacaacgtcaattagatgtatgtgaagatcgtgacatatacctcaaagtagctccctgg

SEQ ID NO: 383195 - DNA, 75 bp, synthetic construct
  source 1..75: mol_type = other DNA
atggctgtttatgcatatactcgagtttcaaaagctgatactgagaatggaactactgataatcagattcatttg

SEQ ID NO: 383196 - DNA, 75 bp, synthetic construct
  source 1..75: mol_type = other DNA
ttccgctgtgtgccgcacctgaccggacggcgctttgcgcacggggtgacggactgttacaccctgttccgggat

SEQ ID NO: 383197 - DNA, 75 bp, synthetic construct
  source 1..75: mol_type = other DNA
ttgatgaacacaatagcataagcacaggatatatgtcattagctgataaaaatgaacccgaaagattatatatgg

SEQ ID NO: 383198 - DNA, 75 bp, synthetic construct
  source 1..75: mol_type = other DNA
aactctgcaaacggaagtgcgggaaatgcgcgagaaaatgcgcgctcatctcggcaataaacatcgcgatcgctt

SEQ ID NO: 383199 - DNA, 75 bp, synthetic construct
  source 1..75: mol_type = other DNA
gtgccgcatcgccgatgattgccagccagctagcgcgttatccattattgctggacgaactgctcgatccaaaca

SEQ ID NO: 383200 - DNA, 75 bp, synthetic construct
  source 1..75: mol_type = other DNA
ccagacgcttccttctgatgagcttaaccgtgcgcggctggcgtgggcgatggactttgctgactggccgcaatt

SEQ ID NO: 383201 - DNA, 75 bp, synthetic construct
  source 1..75: mol_type = other DNA
attaccgatatcgaatttattacccaatatctggtgttgcgctacgctcatgaaaaaccgaagttaacgcgctgg

SEQ ID NO: 383202 - DNA, 75 bp, synthetic construct
  source 1..75: mol_type = other DNA
agctacgtcgctggacatatgctggcggtaagcaatggaaagggctgatgactcgccgtgagattgagcgtgaag

SEQ ID NO: 383203 - DNA, 75 bp, synthetic construct
  source 1..75: mol_type = other DNA
gtatgtcacggacacaccggaaaagacatcatgctcggtaaaacgtataccaaagcagaatgcaaagcactcttg

SEQ ID NO: 383204 - DNA, 75 bp, synthetic construct
  source 1..75: mol_type = other DNA
cgctgaccgaaccccagaaagcggggatcgcgtcattctgtccgtataacattggccccggtaagtgtttcccgt

SEQ ID NO: 383205 - DNA, 75 bp, synthetic construct
  source 1..75: mol_type = other DNA
ggcatgaagctgtcgaaggaaaaatgcgaccgggttaacgccattgagcgtgataaggcgctggcatgggtggag

SEQ ID NO: 383206 - DNA, 75 bp, synthetic construct
  source 1..75: mol_type = other DNA
gatcgacctggttcagcacaccttcaacctgaacaactattacacgctgtcttcgctcatcaaccaggggaatgg

SEQ ID NO: 383207 - DNA, 75 bp, synthetic construct
  source 1..75: mol_type = other DNA
cggggctattgctatagcatctgtgttaatcactgggccaagtggtaacgatggtctggaaggtgtcagctacat

SEQ ID NO: 383208 - DNA, 75 bp, synthetic construct
  source 1..75: mol_type = other DNA
atgcctccatcattacgaaaagctgttgcagctgctattggtggcggggctattgctatagcatcagtgttaatc

SEQ ID NO: 383209 - DNA, 75 bp, synthetic construct
  source 1..75: mol_type = other DNA
gacgcttcttcgcaaaataaaccagggcgatatcaaaggcgcatgtgatggatttgcccctatatttccagacat

SEQ ID NO: 383210 - DNA, 75 bp, synthetic construct
  source 1..75: mol_type = other DNA
cccggtaagtgtttcccgtcgacgttttataagcggctgaatgctggtgatcgtaaaggtgcatgcgaagcgatt

SEQ ID NO: 383211 - DNA, 75 bp, synthetic construct
  source 1..75: mol_type = other DNA
agaaagcggggatcgcgtcattctgtccgtacaacattggtcccggtaagtgtttcccgtcgacgttttataaac

SEQ ID NO: 383212 - DNA, 75 bp, synthetic construct
  source 1..75: mol_type = other DNA
caggtgatcgaaaaggtgcctgcgaagcgattcgctggtggattaaggacggtggcagagactgccgtattcgtt

SEQ ID NO: 383213 - DNA, 75 bp, synthetic construct
  source 1..75: mol_type = other DNA
atgaacaccaaaatcaaatacggcctgtcggctgccgttctggcgctgattgccgcaggggcgcctgcgcctgat

SEQ ID NO: 383214 - DNA, 75 bp, synthetic construct
  source 1..75: mol_type = other DNA
cgctgaccgaaccccagaaagcggggatcgcgtcattctgtccgtacaacattggccccggtaagtgcttcccgt

SEQ ID NO: 383215 - DNA, 75 bp, synthetic construct
  source 1..75: mol_type = other DNA
gaccaggttaacgccattgagcgtgacaaggcgctggcatgggtggagaaaaacatcaaagtgccgctgaccgaa

SEQ ID NO: 383216 - DNA, 75 bp, synthetic construct
  source 1..75: mol_type = other DNA
ccgtgatggtgcggggatctggaccatctgccgcggtgccatcctggtggatggtaaacctgtcgtcccgggcat

SEQ ID NO: 383217 - DNA, 75 bp, synthetic construct
  source 1..75: mol_type = other DNA
atctgtcggggtaccacagtggtggatggaaaaaacgtttttcccaatatgaaactgtcgaaggaaaaatgcgac

SEQ ID NO: 383218 - DNA, 75 bp, synthetic construct
  source 1..75: mol_type = other DNA
ggcggtatcgccggtctgcaaagctgcatggacgtgatgttcgatgaagcggtacagaaacgcggtatgtctctg

SEQ ID NO: 383219 - DNA, 75 bp, synthetic construct
  source 1..75: mol_type = other DNA
gtatcgccggtctgcaaagctgcatggacgtgatgttcgatgaagcggtacagaaacgcggtatgtctctgccaa

SEQ ID NO: 383220 - DNA, 75 bp, synthetic construct
  source 1..75: mol_type = other DNA
atggtggatggtaagcctgtgattcctggcatgaagctgtcgaaggaaaaatgcgaccgggttaacgctatcgaa

SEQ ID NO: 383221 - DNA, 75 bp, synthetic construct
  source 1..75: mol_type = other DNA
atctgccgcggtgccacccgagtggatggtaagcctgtcgtcccgggtatgaagttatcgaaggaaaagtgcgac

SEQ ID NO: 383222 - DNA, 75 bp, synthetic construct
  source 1..75: mol_type = other DNA
cagaatgcaaagccctcctgaataaagaccttgccacggtcgccagacaaattaacccgtacatcaaagtcgata

SEQ ID NO: 383223 - DNA, 75 bp, synthetic construct
  source 1..75: mol_type = other DNA
tgctgcaggcgcgtctgctcctcagatacttgaccagtttctggacgaaaaagagggtaaccacacaacggcata

SEQ ID NO: 383224 - DNA, 75 bp, synthetic construct
  source 1..75: mol_type = other DNA
ccgcgatggttccggcatatggaccatctgtcgaggggccacgatggtggatggtaaacctgttattcctggcat

SEQ ID NO: 383225 - DNA, 75 bp, synthetic construct
  source 1..75: mol_type = other DNA
aagaaggtaaccacacaatggcataccgcgatggttctggcatatggaccatctgtcggggtgccacagtggtgg

SEQ ID NO: 383226 - DNA, 75 bp, synthetic construct
  source 1..75: mol_type = other DNA
atctgtcggggtgccacgatagtggatggaaaacccgtttttcccggtatgaaactgtcgaaggaaaaatgcgac

SEQ ID NO: 383227 - DNA, 75 bp, synthetic construct
  source 1..75: mol_type = other DNA
gagcgcaatattaaagtaccactgaccgaaccacaaaaagcgggtatcgcgtcattttgtccctataacattggc

SEQ ID NO: 383228 - DNA, 75 bp, synthetic construct
  source 1..75: mol_type = other DNA
gaaactgtcgaaggaaaaatgcgaccaggttaacgccattgaacgggataaggcgctggcatgggtggagcgcaa

SEQ ID NO: 383229 - DNA, 75 bp, synthetic construct
  source 1..75: mol_type = other DNA
tgccgctggtgcgcctacgcctgacattctcgaccagtttctggatgaaaaggaaggtaaccacaccacggcata

SEQ ID NO: 383230 - DNA, 75 bp, synthetic construct
  source 1..75: mol_type = other DNA
ctccaccggtaacgcgctggatctggcgattaacgacgacggcttttttgttacctgcgacagcgcgggcaacat

SEQ ID NO: 383231 - DNA, 75 bp, synthetic construct
  source 1..75: mol_type = other DNA
atgtcgccatcattacgcaaggctgttgctgctgctattggtggtggggcaattgctatagcatctgtgttaatc

SEQ ID NO: 383232 - DNA, 75 bp, synthetic construct
  source 1..75: mol_type = other DNA
acattatgctcggtaaaacgtataccgaagcagaatgcaaagccctcctgaataaagaccttgccactgtcgcca

SEQ ID NO: 383233 - DNA, 75 bp, synthetic construct
  source 1..75: mol_type = other DNA
aagagggtaaccacacaaaggcataccgcgatggttccggcatatggaccatttgccggggtgccacggtggtgg

SEQ ID NO: 383234 - DNA, 75 bp, synthetic construct
  source 1..75: mol_type = other DNA
tcgaacacggtcaggcgcaggtgatcaccggcagcagttccggttttgcggcaggtgcggcgttgacggtggtga

SEQ ID NO: 383235 - DNA, 75 bp, synthetic construct
  source 1..75: mol_type = other DNA
ccattgcgggcattagcgatgacaccggtttaagcagcagcgattttgttacccgtgacacgacgctgaccgtgc

SEQ ID NO: 383236 - DNA, 75 bp, synthetic construct
  source 1..75: mol_type = other DNA
gtcaacggcaacagcgccacagccacgcatgaatacagcgtcgatagcgccgcgccaacggtcaccatcaacacc

SEQ ID NO: 383237 - DNA, 75 bp, synthetic construct
  source 1..75: mol_type = other DNA
tggcgttcccggctccggcacctgcggcacgctgtcgtcgggcgtgctcgaaagctctaacgtcgatatcaccag

SEQ ID NO: 383238 - DNA, 75 bp, synthetic construct
  source 1..75: mol_type = other DNA
tacagcaacggcgagcgcatgttgcagggccaggtggtgctggcgaccttcccgaatgaaaacggcctcgaagcg

SEQ ID NO: 383239 - DNA, 75 bp, synthetic construct
  source 1..75: mol_type = other DNA
ctggatgaaaaagaaggtaaccacacaacggcataccgcgatggttccggcatctggaccatctgtcggggtgcc

SEQ ID NO: 383240 - DNA, 75 bp, synthetic construct
  source 1..75: mol_type = other DNA
ggcgatatcaaaggcgcatgtgaccagctacgtcgctggatatacgctggcggtgtagtggtcaacaaaaactgg

SEQ ID NO: 383241 - DNA, 75 bp, synthetic construct
  source 1..75: mol_type = other DNA
aactggagcgtcacggttccggcatcggcggtaaccgcattaggccaggccaactacacggtaacggcagcggtg

SEQ ID NO: 383242 - DNA, 75 bp, synthetic construct
  source 1..75: mol_type = other DNA
ccgtacatcaacgtcgatataccggaaacaacgcgcggcgctctttactcgttcgtttacaacgtgggcgctggc

SEQ ID NO: 383243 - DNA, 75 bp, synthetic construct
  source 1..75: mol_type = other DNA
ctattacgttgggcggcaatacctatacgactaccgtccaggctggtttaagctggagtgtgagcgttccggcag

SEQ ID NO: 383244 - DNA, 75 bp, synthetic construct
  source 1..75: mol_type = other DNA
tgcgccattgaccctcaccggtagcactcaacaagctgagccaggacaaacggttacagtaaccctcgccggaca

SEQ ID NO: 383245 - DNA, 75 bp, synthetic construct
  source 1..75: mol_type = other DNA
gaagctgtcgaaggaaaaatgcgaccaggttaacgccattgaacgggataaggcgctggcatgggtggagaaaaa

SEQ ID NO: 383246 - DNA, 75 bp, synthetic construct
  source 1..75: mol_type = other DNA
agctacgtcgctgggcatacgctggcggtaagcaatggaaaggcctgatgactcgtcgtgagattgagcgtgagg

SEQ ID NO: 383247 - DNA, 75 bp, synthetic construct
  source 1..75: mol_type = other DNA
actggcccaagtggtaacgatggtctggaaggcgtcagctacataccatataaagatatcgttggtgtatggact

SEQ ID NO: 383248 - DNA, 75 bp, synthetic construct
  source 1..75: mol_type = other DNA
tgtcggctgccgttctggcgctgattggtgcaggtgcgtctgcgcctgaaatcctcgaccagtttcttgacgaaa

SEQ ID NO: 383249 - DNA, 75 bp, synthetic construct
  source 1..75: mol_type = other DNA
tgggaagaagcattctcccgtattgcgaagctgatgaaagctgaccgtgacgctaactttattgaaaagaacgag

SEQ ID NO: 383250 - DNA, 75 bp, synthetic construct
  source 1..75: mol_type = other DNA
tatcggctgccgttctggcgctgattgccgcaggtgcctctgcgcctgaaatccttgaccagtttctggatgaaa

SEQ ID NO: 383251 - DNA, 75 bp, synthetic construct
  source 1..75: mol_type = other DNA
tgccgcaggggcttctgcgcctgaaatcctcgaccagtttctggatgaaaaggaaggcaaccacaccacggcata

SEQ ID NO: 383252 - DNA, 75 bp, synthetic construct
  source 1..75: mol_type = other DNA
tgatcgcaggggagcgtgtgaggcgattcgctggtggattaaggacggtggcagagactgccgtattcgttcaaa

SEQ ID NO: 383253 - DNA, 75 bp, synthetic construct
  source 1..75: mol_type = other DNA
tatcctgacaccgataagtttgctgggctaacacggtttattgatgagtccggccgtaatgtattttttgtggat

SEQ ID NO: 383254 - DNA, 75 bp, synthetic construct
  source 1..75: mol_type = other DNA
gtggggatgttaattcaaaaaacacgtttggtggatatacagggaaaaagccatattttgtttatttggaagttg

SEQ ID NO: 383255 - DNA, 75 bp, synthetic construct
  source 1..75: mol_type = other DNA
tgaggcgattcgctggtggattaaggacggtggcagagactgccgtattcgctcaaacaactgctacggtcaggt

SEQ ID NO: 383256 - DNA, 75 bp, synthetic construct
  source 1..75: mol_type = other DNA
cgatgcggtgatcaaagcctaccgtttataccttgaacagtgcccacaagcagaagaaggaccactgctggcatt

SEQ ID NO: 383257 - DNA, 75 bp, synthetic construct
  source 1..75: mol_type = other DNA
atgcctatttggtccgcctcatgggtgctacccgctggatttaaaggtgctcgcgatgcccgttacgccatgtgg

SEQ ID NO: 383258 - DNA, 75 bp, synthetic construct
  source 1..75: mol_type = other DNA
agatgttcggcaagcaattggcgatgctgttagggaaggccttaatttgagagagggatcagatgctgacatgta

SEQ ID NO: 383259 - DNA, 75 bp, synthetic construct
  source 1..75: mol_type = other DNA
tcaaataactgttacggtcagatatcccgtcgtgaccaggagagcgcgctggcgtgctggggaatcgacagataa

SEQ ID NO: 383260 - DNA, 75 bp, synthetic construct
  source 1..75: mol_type = other DNA
ggtgcgcagtttgatccttacctgaccgacaatatcaggacaatgtggaatcaatgctccgcagttgccctggct

SEQ ID NO: 383261 - DNA, 75 bp, synthetic construct
  source 1..75: mol_type = other DNA
atacgcagcctcgcattctggttgaagccagcccggtggataaaatctgggggattggccttgcaaaagatcatc

SEQ ID NO: 383262 - DNA, 75 bp, synthetic construct
  source 1..75: mol_type = other DNA
atgaatgctaatatcaaatacggcctgtcagcagccgttctggcgctgattgctgcaggcgcgtctgctcctcaa

SEQ ID NO: 383263 - DNA, 75 bp, synthetic construct
  source 1..75: mol_type = other DNA
atgcttcacctcaacgttttaccggaaactgaacgcaggagaccggaaaggtgcatgtgctgaaatccgccgatg

SEQ ID NO: 383264 - DNA, 75 bp, synthetic construct
  source 1..75: mol_type = other DNA
agcgtgtgaggcgattcgctggtggattaaggacggtggcagagactgccgtatccgttcaaacaactgttacgg

SEQ ID NO: 383265 - DNA, 75 bp, synthetic construct
  source 1..75: mol_type = other DNA
aaaaagacgtaaactttctcaagaccctgccgatattatccctcaactgctggatgaacagagagtacaggctgt

SEQ ID NO: 383266 - DNA, 75 bp, synthetic construct
  source 1..75: mol_type = other DNA
cacggaaaacaccggcacgcgcaatcacaaatggcagcggctggctccccacatgacacagtcctgtgccgtctt

SEQ ID NO: 383267 - DNA, 75 bp, synthetic construct
  source 1..75: mol_type = other DNA
gcatacctatgtgcccctgaaaggacatcgccgggatggctactggccgccggaggcagtgacggagaataccgg

SEQ ID NO: 383268 - DNA, 75 bp, synthetic construct
  source 1..75: mol_type = other DNA
cggaaacagtgaacagaagtttgaggcaaaacgtaaaaccgccctgcactttttttatgcggatgccatcggtca

SEQ ID NO: 383269 - DNA, 75 bp, synthetic construct
  source 1..75: mol_type = other DNA
agcattcccgggtattcgtgtgagtctgctgccacaccactgaggccttattttctcagcacactggacagcctt

SEQ ID NO: 383270 - DNA, 75 bp, synthetic construct
  source 1..75: mol_type = other DNA
gcggtaatccctggcgggaaattgctctggtcagtcagacatccggcggtgtggagaacgccatcagcagcggga

SEQ ID NO: 383271 - DNA, 75 bp, synthetic construct
  source 1..75: mol_type = other DNA
gtctggcggaccggaatgcctgaatccctgtatccggaagccctcgttcccggtaaacgtgaaatcggcagtcag

SEQ ID NO: 383272 - DNA, 75 bp, synthetic construct
  source 1..75: mol_type = other DNA
ggactgcgagaagtcagcaaagacggtgatatgtggggcaatgtctatccgcgagccggggcgctcagccagacg

SEQ ID NO: 383273 - DNA, 75 bp, synthetic construct
  source 1..75: mol_type = other DNA
aaatcctgcggatatgaaagctcagggagagcgtcgttcggccattcgttttaaatatgccgacgcgctggggca

SEQ ID NO: 383274 - DNA, 75 bp, synthetic construct
  source 1..75: mol_type = other DNA
atggcctgtctggtgaatatgcggagaaatcccttgaagaatgggcggaacagattcgcaaaggagctgacaagt

SEQ ID NO: 383275 - DNA, 75 bp, synthetic construct
  source 1..75: mol_type = other DNA
tctatccgcgcagcggttttgtcacccagcaggacggggataaagcggcagcggtggttgcgcagcgcgtggcag

SEQ ID NO: 383276 - DNA, 75 bp, synthetic construct
  source 1..75: mol_type = other DNA
cggatccggtggaggaaaatacgggtacccggaaccataaatggcagagactgacgccttcagtctccacgtcct

SEQ ID NO: 383277 - DNA, 75 bp, synthetic construct
  source 1..75: mol_type = other DNA
cggtcaccatcgccacggtggcgggtgacgatattatcaacaacgccgagcagcttgccgggcagaccatcagcg

SEQ ID NO: 383278 - DNA, 75 bp, synthetic construct
  source 1..75: mol_type = other DNA
tggaccactggcgcataccgttagctacgattatacggatgccagaaatgctttaactgacaaaccgttagaacg

SEQ ID NO: 383279 - DNA, 75 bp, synthetic construct
  source 1..75: mol_type = other DNA
acacggtgccgaccgcgcctgcagaagacgcaccgcgcgccctgcaaagcatgtgggaaacctggcaggagatgc

SEQ ID NO: 383280 - DNA, 75 bp, synthetic construct
  source 1..75: mol_type = other DNA
aagctgaacgcctgaacgttgttccgcgtctgggtgtgcgcgcgcgtctggcctcacaaggttctggcaaatggc

SEQ ID NO: 383281 - DNA, 75 bp, synthetic construct
  source 1..75: mol_type = other DNA
tcagaaatcgccattgtgctggatgaagctgaacgcctgaacgttgttccgcgtctgggtgtgcgcgcgcgtctg

SEQ ID NO: 383282 - DNA, 75 bp, synthetic construct
  source 1..75: mol_type = other DNA
cacaacctgttcggtgataccgaagcggttgacgtattcgtcttcccggatggcagcgtagaagtggaactgtct

SEQ ID NO: 383283 - DNA, 75 bp, synthetic construct
  source 1..75: mol_type = other DNA
tttctatgtggaactgcacaagctgggcgtcaatattcagtgctttgatgtcggcggcggtctgggtgtggacta

SEQ ID NO: 383284 - DNA, 75 bp, synthetic construct
  source 1..75: mol_type = other DNA
atgctgaattgcaacaacagttccttgaagagttcgaggcagggttgtacggatatacctatcttgaagatgaat

SEQ ID NO: 383285 - DNA, 75 bp, synthetic construct
  source 1..75: mol_type = other DNA
ctctatctgagcatgtgccatgaagtgcaaaagcagctggatccgcaaaaccgtgctcatcgtccgattatcgac

SEQ ID NO: 383286 - DNA, 75 bp, synthetic construct
  source 1..75: mol_type = other DNA
ggtctatctggtcattgagaagatgtcagaaatcgccattgtgctggatgaagcagaacgtctgaatgtcgttcc

SEQ ID NO: 383287 - DNA, 75 bp, synthetic construct
  source 1..75: mol_type = other DNA
gtcaggatctgggcgatgcaaaagaagttatggatgcgtctggtctggtggtttctccaggcatggttgatgcgc

SEQ ID NO: 383288 - DNA, 75 bp, synthetic construct
  source 1..75: mol_type = other DNA
tggcacatgctggcatgacccgtagcgtcatcgtctgcaacggttataaggaccgcgaatatatccgcctggcat

SEQ ID NO: 383289 - DNA, 75 bp, synthetic construct
  source 1..75: mol_type = other DNA
gagtacgatccggagaatccgccgatgctcggtttctttatggtcggtgcctatcaggagatcctcggcaacatg

SEQ ID NO: 383290 - DNA, 75 bp, synthetic construct
  source 1..75: mol_type = other DNA
tgctgcaatatgtacagctcgatccgaaaacgctgttaacccagttccgcgatcaagtgaagaaaaccgatcttg

SEQ ID NO: 383291 - DNA, 75 bp, synthetic construct
  source 1..75: mol_type = other DNA
atgctcggtaaaacgtataccaaagcagaatgcaaaacactcttgaataaagaccttgccacggtcgccagacaa

SEQ ID NO: 383292 - DNA, 75 bp, synthetic construct
  source 1..75: mol_type = other DNA
ccatcctggtggatggtaaacctgtcgttccgggcatgaagttgtcgaaggaaaaatgcgaccgggttaacgcta

SEQ ID NO: 383293 - DNA, 75 bp, synthetic construct
  source 1..75: mol_type = other DNA
tgggtggagaaaaacatcaaagtgccgctgaccgaaccccagaaagcggggatcgcgtcattctgtccgtataac

SEQ ID NO: 383294 - DNA, 75 bp, synthetic construct
  source 1..75: mol_type = other DNA
agctacgtcgctggacatacgctggcggtaagcaatggaaagggctgatgactcgtcgtgagattgagcgtgaag

SEQ ID NO: 383295 - DNA, 75 bp, synthetic construct
  source 1..75: mol_type = other DNA
gcagctccatcagcaaaaagggatgataagtttatcaccaccgactatttgcaacagtgccctggaaagtcaggg

SEQ ID NO: 383296 - DNA, 75 bp, synthetic construct
  source 1..75: mol_type = other DNA
cccgtgtaacacttcttggcgattatacctatactagggggtttgatgctgttgcctatggcagtacagggatgc

SEQ ID NO: 383297 - DNA, 75 bp, synthetic construct
  source 1..75: mol_type = other DNA
atagcgttatcgctgccgtcggcggtggcgccatagccattgcttctgcgctcatcactgggccaactggtaatg

SEQ ID NO: 383298 - DNA, 75 bp, synthetic construct
  source 1..75: mol_type = other DNA
gctggtggggccggatctcgatgccgatgggttgctggagcctgcgcggcaactggcgaccaaacgtgtggtggt

SEQ ID NO: 383299 - DNA, 75 bp, synthetic construct
  source 1..75: mol_type = other DNA
ccgtgatggtgtgggtatctggaccatctgccgtggagccacccgggtggatggtaagcctgtgattcctggcat

SEQ ID NO: 383300 - DNA, 75 bp, synthetic construct
  source 1..75: mol_type = other DNA
atgcgaccaggtcaacgccattgagcgtgataaggcgctggcatgggtggagaaaaacatcaaagtgccattgag

SEQ ID NO: 383301 - DNA, 75 bp, synthetic construct
  source 1..75: mol_type = other DNA
cacgcctccagcctgacggcgctgaccgatattactccgcgcccgcaggtggtctatctcgacccgatgttcccg

SEQ ID NO: 383302 - DNA, 75 bp, synthetic construct
  source 1..75: mol_type = other DNA
gtgaaaatctgcttaattgatgaaacaggcaccggagacggcgccttatctgttctggcggcccgctgggggctg

SEQ ID NO: 383303 - DNA, 75 bp, synthetic construct
  source 1..75: mol_type = other DNA
ctggcgaatgtcgccacgccaaacgcggttgtcaccaaagggcatcgctttgatatttatgcaggtacgccggtg

SEQ ID NO: 383304 - DNA, 75 bp, synthetic construct
  source 1..75: mol_type = other DNA
gatgagcagccggcagacattctacatcctgatatggtgcaaccgttgcgtgtgaaagtggatcgcgaagcacgc

SEQ ID NO: 383305 - DNA, 75 bp, synthetic construct
  source 1..75: mol_type = other DNA
tactgcgtgtggggcggtacggataaaatcgtcccggtagatgtctacattccgggttgcccgccaacgcctgcc

SEQ ID NO: 383306 - DNA, 75 bp, synthetic construct
  source 1..75: mol_type = other DNA
cacggattgggcgtcgtaatccgctgtacagcaccgcgattggtaaaggtactgctggcatggcgcgatctcgat

SEQ ID NO: 383307 - DNA, 75 bp, synthetic construct
  source 1..75: mol_type = other DNA
taaccactgtgaacagggcaaaattgttattccccggatgcgcgttgagccttccatcgacaacgaagagcagca

SEQ ID NO: 383308 - DNA, 75 bp, synthetic construct
  source 1..75: mol_type = other DNA
ctctgactaagacagaagcttatgcagtcaaaaaacaacttcatgagcttcgtttaagcctgataacttctcgtc

SEQ ID NO: 383309 - DNA, 75 bp, synthetic construct
  source 1..75: mol_type = other DNA
ccgccacgctgtacggctttgcgatggcgctcggcctgctggagcagaaaattcacgcccgtgggccgggtgagc

SEQ ID NO: 383310 - DNA, 75 bp, synthetic construct
  source 1..75: mol_type = other DNA
caagatctgatggtgcaggtggtgaaagatccgcttggcactaagggtgcgcgcctgaccaccgatatcacgctg

SEQ ID NO: 383311 - DNA, 75 bp, synthetic construct
  source 1..75: mol_type = other DNA
ataaagtctcccaggccacccgtaatcgggttgaaaaagcggcccgggaagtgggttatttaccgcagcctatgg

SEQ ID NO: 383312 - DNA, 75 bp, synthetic construct
  source 1..75: mol_type = other DNA
tttcagccgccgcgcgggggaaatggcccgttattctgcagatgctgcgtattgatgtacctgaaaacggcaggc

SEQ ID NO: 383313 - DNA, 75 bp, synthetic construct
  source 1..75: mol_type = other DNA
ctgaagagcgtttgcaggagtacgtagctatgttgcatacggccgcacgtaaaatttcctcgcaaatggggtatc

SEQ ID NO: 383314 - DNA, 75 bp, synthetic construct
  source 1..75: mol_type = other DNA
atgagacaagttaaaaataataaaagcagtaatggaaaatttcactttgataaaaaagataaggatattgagact

SEQ ID NO: 383315 - DNA, 75 bp, synthetic construct
  source 1..75: mol_type = other DNA
tctgtaagcagaataacaaagtcccagctaaatcattgcgaacccattgtgttagtgttcgttttaatcaagatg

SEQ ID NO: 383316 - DNA, 75 bp, synthetic construct
  source 1..75: mol_type = other DNA
gcagcgctttctcgactatgtgacggatttacgcctgatgctgctggtgcagggcgatcagccgcgttatcgctt

SEQ ID NO: 383317 - DNA, 75 bp, synthetic construct
  source 1..75: mol_type = other DNA
ggacacaaagcctctcggcgatggactttttgagatccgcacaatggggacagacattgccaggggcatctgggt

SEQ ID NO: 383318 - DNA, 75 bp, synthetic construct
  source 1..75: mol_type = other DNA
aatgggggacccgcgcgccagccagatgacacgaaaattcgtgattgagtatcgctcggataagttgcaggcggg

SEQ ID NO: 383319 - DNA, 75 bp, synthetic construct
  source 1..75: mol_type = other DNA
gaacgggaagtctcgttcggttccggtgtctgatgccgtgctctcgctgattaaaacccgccgaaccgggccgct

SEQ ID NO: 383320 - DNA, 75 bp, synthetic construct
  source 1..75: mol_type = other DNA
aagccagggaagaagctacagtattacccgtaaaaatcagggtgaagtttgaccgtctcatcggcaaactggagt

SEQ ID NO: 383321 - DNA, 75 bp, synthetic construct
  source 1..75: mol_type = other DNA
ttttgcctggtgctgaaaagggttaaacccgatttgccaaaaggacaggcggcgcatgtgttgcgacatacgttc

SEQ ID NO: 383322 - DNA, 75 bp, synthetic construct
  source 1..75: mol_type = other DNA
aagccagggaagaagccacagcattacccgtaaaaatcagggtgaagtttgaccgtctcatcggcaaactggagt

SEQ ID NO: 383323 - DNA, 75 bp, synthetic construct
  source 1..75: mol_type = other DNA
ggatgtggtactggctgacagggccaccacggcagccaccggcaaagtgaccgcgtccacgacagcaacaggcag

SEQ ID NO: 383324 - DNA, 75 bp, synthetic construct
  source 1..75: mol_type = other DNA
tcagcgttcgctgccccgtcaagggcatcccattgcctaaagagggtgctgaagtacctgacaatattttctggc

SEQ ID NO: 383325 - DNA, 75 bp, synthetic construct
  source 1..75: mol_type = other DNA
tatttccgatagagcaaccggaagtccctgaaggtatagttaaaaagaaagaaaaaacgaaatccccacgccgtc

SEQ ID NO: 383326 - DNA, 75 bp, synthetic construct
  source 1..75: mol_type = other DNA
tctatttcaagagaaattacaatcgttgatataaagaataaaaaaacaccgcaggcaatagaaagaatcttttgg

SEQ ID NO: 383327 - DNA, 75 bp, synthetic construct
  source 1..75: mol_type = other DNA
ccagcttcgccaccgtgctatcgctgggcggcggtccgcaggcgaccactatcgagctggcaatctatcaggcgc

SEQ ID NO: 383328 - DNA, 75 bp, synthetic construct
  source 1..75: mol_type = other DNA
tgtggtggaacgcgccgcagggtgactgggtggcagtctggcaggacagctacctgtggcatgtggtgcgcttct

SEQ ID NO: 383329 - DNA, 75 bp, synthetic construct
  source 1..75: mol_type = other DNA
tgagccaccggagtggttcgcagaagaaaatctccctctcgccacgatcatgtggcaactgacaaccaaagaact

SEQ ID NO: 383330 - DNA, 75 bp, synthetic construct
  source 1..75: mol_type = other DNA
gcgctacgccagttgatgtcgtgggactggccgggcaacgtgcgcgagctggaaaacgtgattgagcgagcggta

SEQ ID NO: 383331 - DNA, 75 bp, synthetic construct
  source 1..75: mol_type = other DNA
gagggggcggtcatccatattgtgccgcgactggccggtgcagggaaaggcggactgcagattgtgctgggggcg

SEQ ID NO: 383332 - DNA, 75 bp, synthetic construct
  source 1..75: mol_type = other DNA
caacgatggcgttgtggggcgcagccctgagtgccggagggctgactgccaccacgatgctgttctcactgggtg

SEQ ID NO: 383333 - DNA, 75 bp, synthetic construct
  source 1..75: mol_type = other DNA
atgttatttaatgcggagaatgagatcgaattgcttttgtatacagttgaggaagagcaattggttagttctgta

SEQ ID NO: 383334 - DNA, 75 bp, synthetic construct
  source 1..75: mol_type = other DNA
tttcggccactatcctggctatttacttcgtgccgctgttctttgtgctggtgcgccgccgcttcccgctgaagc

SEQ ID NO: 383335 - DNA, 75 bp, synthetic construct
  source 1..75: mol_type = other DNA
gtacaacttattgaactgcatgttctcaaaagcaacttctattaccgctaccatgatgatggcagcgatgtgacg

SEQ ID NO: 383336 - DNA, 75 bp, synthetic construct
  source 1..75: mol_type = other DNA
cgcgactggccggagccggaaagggcggactgcagattgtgctgggggcggcggccatcgtggggtcgttcttca

SEQ ID NO: 383337 - DNA, 75 bp, synthetic construct
  source 1..75: mol_type = other DNA
gggtggtgtggcccagatgctggccccgaaggcaaagacgccggagtacaaaagcacggataacggcagacagaa

SEQ ID NO: 383338 - DNA, 75 bp, synthetic construct
  source 1..75: mol_type = other DNA
ctggtggcgcaatggtcagaacctgtacctggacaatatggaggcgactggtttttacaggatttccctgccttc

SEQ ID NO: 383339 - DNA, 75 bp, synthetic construct
  source 1..75: mol_type = other DNA
ctcccgccgtatatccctggacatcagcacccgtgatgaaggcgggggcggaaaggtcgtggttatcgggcggca

SEQ ID NO: 383340 - DNA, 75 bp, synthetic construct
  source 1..75: mol_type = other DNA
cctcactggataacatgattgcccagggtaacccgatgccggtgccttacggtgaaatgctggttggctcccggc

SEQ ID NO: 383341 - DNA, 75 bp, synthetic construct
  source 1..75: mol_type = other DNA
gtgagggaacggtcatccacattgtgccgcgactggccggggccggaaaaggtggactgcagattgtgctggggg

SEQ ID NO: 383342 - DNA, 75 bp, synthetic construct
  source 1..75: mol_type = other DNA
ttctgacatcaatcagaccatttcaacggcgttgggtgggacttacgttaacgacttcatcgaccgtggtcgcgt

SEQ ID NO: 383343 - DNA, 75 bp, synthetic construct
  source 1..75: mol_type = other DNA
tgtggcaactgacaactaaagaactctgcggtcagggcctgctgtgcgtgactgacctcgcggtgcttgagcggt

SEQ ID NO: 383344 - DNA, 75 bp, synthetic construct
  source 1..75: mol_type = other DNA
atggctgagatgaacagcactacacaggccgcatcagcgttaaccggcgtcagcgatgttctgagtccggtattt

SEQ ID NO: 383345 - DNA, 75 bp, synthetic construct
  source 1..75: mol_type = other DNA
ggctccctgacgctgacgggaacacctcaactggcagcaggcaacaaaattgaactggtgagttttgggcagtta

SEQ ID NO: 383346 - DNA, 75 bp, synthetic construct
  source 1..75: mol_type = other DNA
ggtggtgcgtggcctatgagttctggcgacgtgccgtgaaaaatattgccagacagggcaacaccatcaccggtg

SEQ ID NO: 383347 - DNA, 75 bp, synthetic construct
  source 1..75: mol_type = other DNA
cagggcaacaccatcaccggtgcaatgggcggcatggtcaaaaatccggagctgaccgccaaaaaagaacaggag

SEQ ID NO: 383348 - DNA, 75 bp, synthetic construct
  source 1..75: mol_type = other DNA
cagggcaataccatcaccggcgcaatgggcggcagggtcaaaaatccggagctgacagccaaaaagaacaggagt

SEQ ID NO: 383349 - DNA, 75 bp, synthetic construct
  source 1..75: mol_type = other DNA
gcaaaccggcaaaaacacagacgctgacggtgtataaagcggatggctccacctcaacggtaataaaggagaaaa

SEQ ID NO: 383350 - DNA, 75 bp, synthetic construct
  source 1..75: mol_type = other DNA
cacattctccattgatgaaatcgaagtcagtgcaccgccctctgttgtgtccgtcaggggtgtggccacgtctgt

SEQ ID NO: 383351 - DNA, 75 bp, synthetic construct
  source 1..75: mol_type = other DNA
tcaacaccggcgtcacggatgtcctgagtccggtatttacactgtggtatcttcagaaaaatatcaccacggata

SEQ ID NO: 383352 - DNA, 75 bp, synthetic construct
  source 1..75: mol_type = other DNA
aatcttgacgggttcggagtgctctccggggagtggcttatcaccagcgcccgccattcgttcgaccgttcatca

SEQ ID NO: 383353 - DNA, 75 bp, synthetic construct
  source 1..75: mol_type = other DNA
tccgggccatggctgataactactgcccgccatgcgtttgaccgtaacagcggctacatcaccgaactggaagtg

SEQ ID NO: 383354 - DNA, 75 bp, synthetic construct
  source 1..75: mol_type = other DNA
cattaaccgtatctacaaaaatgccaccgtacagcatcaaaatagtaagaaaaaagaactggttatctacaccca

SEQ ID NO: 383355 - DNA, 75 bp, synthetic construct
  source 1..75: mol_type = other DNA
aacgtgcgcaacgcgcgctattttacgccggcgctgaccacgaacgtgcgcacgcgcgcttcttacgccggcgct

SEQ ID NO: 383356 - DNA, 75 bp, synthetic construct
  source 1..75: mol_type = other DNA
agattactttattaataaggcggctaaagtcctttatctggatgcagatatcatttgtcaggggactattgagcc

SEQ ID NO: 383357 - DNA, 75 bp, synthetic construct
  source 1..75: mol_type = other DNA
taatggtaatcgactccgctcattaccaagtaccaagaactggacatacgcaatctattttcgctttgtcattgc

SEQ ID NO: 383358 - DNA, 75 bp, synthetic construct
  source 1..75: mol_type = other DNA
cggcgcaggccgccttgccggttttatgaaggcgatggaagaagcgatgatcaaagtgccggaaagctggattgt

SEQ ID NO: 383359 - DNA, 75 bp, synthetic construct
  source 1..75: mol_type = other DNA
gtccattgaagtgcatccgcggttgattgaacgccgctccgtggctgacggcccgttccgcgactatcgtcgtta

SEQ ID NO: 383360 - DNA, 75 bp, synthetic construct
  source 1..75: mol_type = other DNA
atgaaggcgatggaagaagcaatgatcaaggtgccggaaagctggattgtgcagggtgactttgaacctgaatcc

SEQ ID NO: 383361 - DNA, 75 bp, synthetic construct
  source 1..75: mol_type = other DNA
ccaatgggcagttgagcaggtttctgcacgagccattgcaatgttaaatgatccggagatagtaaaaaaaataac

SEQ ID NO: 383362 - DNA, 75 bp, synthetic construct
  source 1..75: mol_type = other DNA
aatcaatggacgaatgagcgggtttctgcacgggccattgcaatgttaagtgatccagagatagtcaaaaaataa

SEQ ID NO: 383363 - DNA, 75 bp, synthetic construct
  source 1..75: mol_type = other DNA
aacggtgcgccattcattatgacggtgcagaagaggcgatgcgttggcaatctcgcgaggtgactaccgtcgttg

SEQ ID NO: 383364 - DNA, 75 bp, synthetic construct
  source 1..75: mol_type = other DNA
gggattgttaatggttattttaactccggctttttactgatcaatactaatcaatggatgactgagcaggtttct

SEQ ID NO: 383365 - DNA, 75 bp, synthetic construct
  source 1..75: mol_type = other DNA
acgatactatttttatccattatatcggaccaaccaagccctggcatgattgggcctgggattatcctgtatcac

SEQ ID NO: 383366 - DNA, 75 bp, synthetic construct
  source 1..75: mol_type = other DNA
ggaattgctaaaggttactttaactcgggttttttattgattaatactgcccaatgggcggctcagcaggtttct

SEQ ID NO: 383367 - DNA, 75 bp, synthetic construct
  source 1..75: mol_type = other DNA
agtatggtttcaccccaggcactggaagccagacgtaaggtcatcaaagagacaatccttagctggcttttggtt

SEQ ID NO: 383368 - DNA, 75 bp, synthetic construct
  source 1..75: mol_type = other DNA
cttgatgataacagccagaccaccttctacctggctgcgtccaaaggctccgatacgattgaagtggcttatctc

SEQ ID NO: 383369 - DNA, 75 bp, synthetic construct
  source 1..75: mol_type = other DNA
aatgatgccgttcaggatgatgccagagctacagctagtgcttatcttgaatatggtcagcaacctgtagaaatt

SEQ ID NO: 383370 - DNA, 75 bp, synthetic construct
  source 1..75: mol_type = other DNA
ggcgtggtacggcaaactgacgggcgataagtcgctgaattcaccgaaacaacctgttgatatcgcaaccgatct

SEQ ID NO: 383371 - DNA, 75 bp, synthetic construct
  source 1..75: mol_type = other DNA
gcaacaagaagggtccgggttttctctttaaacatacccaaaaacggtaatgttaccaatattgggaatataccc

SEQ ID NO: 383372 - DNA, 75 bp, synthetic construct
  source 1..75: mol_type = other DNA
gcattgtgatcaccaaagacggcccgcaggtaaaaaaacttcaccagacagagcggatgtgggtcgtcggcaaaa

SEQ ID NO: 383373 - DNA, 75 bp, synthetic construct
  source 1..75: mol_type = other DNA
aatctaaataacatttcgtcaaaagctattgaaatgttgcgtgacccagattgggtaagtaaaatcacccacctt

SEQ ID NO: 383374 - DNA, 75 bp, synthetic construct
  source 1..75: mol_type = other DNA
ttttacttgggattattacatcaataatccgtggtttttaaaaattgtccatagtgaaaaccaaagtaagggtgt

SEQ ID NO: 383375 - DNA, 75 bp, synthetic construct
  source 1..75: mol_type = other DNA
ttgaagtactggaatatacctggaacgatattcgacaaaaagaaaaggcccttgatttctcagatcttccgccac

SEQ ID NO: 383376 - DNA, 75 bp, synthetic construct
  source 1..75: mol_type = other DNA
tagtaaacagacggtttatcatcactttggtaataaagaaaatttatttattgaagtactggaatatacctggaa

SEQ ID NO: 383377 - DNA, 75 bp, synthetic construct
  source 1..75: mol_type = other DNA
ccgccggttttacgcgtctggcggacgttccggcagacgatatcgacggtgaaagcatcaaagttttttactacg

SEQ ID NO: 383378 - DNA, 75 bp, synthetic construct
  source 1..75: mol_type = other DNA
atggcaacaacacaacaatctggatttgcacctgctgcatcacctctcgcttcgaccatcgttcagaccccggat

SEQ ID NO: 383379 - DNA, 75 bp, synthetic construct
  source 1..75: mol_type = other DNA
cgggtttttcactacttcaacgctgtttgctcgatgacgaccgcgacgctgtacgagcgttaccggggcgttgat

SEQ ID NO: 383380 - DNA, 75 bp, synthetic construct
  source 1..75: mol_type = other DNA
actggcgctgcataccgtgagcagacacgaagttcattatccgcaggatcgggaaatcagcgaagtcttgctaca

SEQ ID NO: 383381 - DNA, 75 bp, synthetic construct
  source 1..75: mol_type = other DNA
ggtgattttttggtttcgcccgaacagtatacttcgccttctgttcgttttcttaaagaggtttgtatacgtaaa

SEQ ID NO: 383382 - DNA, 75 bp, synthetic construct
  source 1..75: mol_type = other DNA
acatgcatatattgagctgcaaggacttggttttcacccattacaggttagcgcatttgccagattaagaagatt

SEQ ID NO: 383383 - DNA, 75 bp, synthetic construct
  source 1..75: mol_type = other DNA
agctatgacagggcaccaggtatggacatctttacacgctaacagtgcccttgccatttttgatagactaaaaga

SEQ ID NO: 383384 - DNA, 75 bp, synthetic construct
  source 1..75: mol_type = other DNA
cgatctctttgatgtagaaaatgaaattcagcgggcgctggagcgcaaagttgagctgaagtccggtggctatct

SEQ ID NO: 383385 - DNA, 75 bp, synthetic construct
  source 1..75: mol_type = other DNA
gggtgctgcattcgctggagcaggcgttgagtaaagaccgggtgaaaaccagcgtcaacggcttctctgcgctgg

SEQ ID NO: 383386 - DNA, 75 bp, synthetic construct
  source 1..75: mol_type = other DNA
ccaaccgaaaccggagcatggaaagacgctgttgactgggtgctcaaagaggcttgccaagctgtaaacattgac

SEQ ID NO: 383387 - DNA, 75 bp, synthetic construct
  source 1..75: mol_type = other DNA
gttattgaaggatatggagataaagtcaggtttgccaacacccgcgggtgttcttcatgtaaatcaggatataaa

SEQ ID NO: 383388 - DNA, 75 bp, synthetic construct
  source 1..75: mol_type = other DNA
agattttctaagattcaggaagaatatatctgatattgtaactgttaagggggggttaattgaaacgaccgatga

SEQ ID NO: 383389 - DNA, 75 bp, synthetic construct
  source 1..75: mol_type = other DNA
aagccaaggaagaggccactgcattacccgttaaaatcagggtaaagtttgaccgtctcatcggcaaactggagt

SEQ ID NO: 383390 - DNA, 75 bp, synthetic construct
  source 1..75: mol_type = other DNA
gttgaaacagaggaagaacgagggagggaatacagaaaggctattattgctgcactacgttcagatcctgatatt

SEQ ID NO: 383391 - DNA, 75 bp, synthetic construct
  source 1..75: mol_type = other DNA
atcttaatggcaacaataacagcgtgacgctggcggcaaaagatctaaaagtggtcgggcagaaagcgacgggca

SEQ ID NO: 383392 - DNA, 75 bp, synthetic construct
  source 1..75: mol_type = other DNA
atgagcaatttattaggcccccgtgacgccaacggcattccggtcccgatgacggtggatgaatccatcgccagc

SEQ ID NO: 383393 - DNA, 75 bp, synthetic construct
  source 1..75: mol_type = other DNA
cttggcctggtttatcacatcagtatggtttcaccgcaggcactggaagccaggcgtaaggtcatcaaagagacg

SEQ ID NO: 383394 - DNA, 75 bp, synthetic construct
  source 1..75: mol_type = other DNA
gaatggaaagttactcctcatgggttaagaccagatctttatccccatcctgaagatgcaatccctgatttgtta

SEQ ID NO: 383395 - DNA, 75 bp, synthetic construct
  source 1..75: mol_type = other DNA
aggatgtcgccgggctcctctttttactgcgccggctgacgcggcgcggcaggaacgctgcctgtggtcagtgtc

SEQ ID NO: 383396 - DNA, 75 bp, synthetic construct
  source 1..75: mol_type = other DNA
gctccctgttgtggtgatcgctgagtcagtaggctatgccagcgaatcatcttttcacaaggcgggtaatgactc

SEQ ID NO: 383397 - DNA, 75 bp, synthetic construct
  source 1..75: mol_type = other DNA
atgagtatcctggtcacccgcccgtctcccgctggagaagagttagtgagccgtctgcggacactggggcaggtg

SEQ ID NO: 383398 - DNA, 75 bp, synthetic construct
  source 1..75: mol_type = other DNA
ccgtcgcaatatgatcaacgtcgcgctgaataacggtactctgcaacaccctgttaaaggtgctcacacgggttc

SEQ ID NO: 383399 - DNA, 75 bp, synthetic construct
  source 1..75: mol_type = other DNA
ttaacgtggttcgtgcaactatcgatggcctggaaaatatgaattccccagaaatggtcgctgccaagcgtggta

SEQ ID NO: 383400 - DNA, 75 bp, synthetic construct
  source 1..75: mol_type = other DNA
atgcagaatctgaaaataacagatgtcagaacgatccttactgcaccaggtgggatcgatctggccgttgtaaaa

SEQ ID NO: 383401 - DNA, 75 bp, synthetic construct
  source 1..75: mol_type = other DNA
atggaatattcagatcatgattttttttcgtgctttacagggagttgctggcgcatccatgatccctttagtttt

SEQ ID NO: 383402 - DNA, 75 bp, synthetic construct
  source 1..75: mol_type = other DNA
tggtttcaccgcaggcactggaagccaggcgtaaggtcatcaaagagacgatccttagctggcttctggttgacc

SEQ ID NO: 383403 - DNA, 75 bp, synthetic construct
  source 1..75: mol_type = other DNA
ggaaatgcaggtatggccagtggcggcatgggcgatgtgctctctggtattattggcgcattgttagggcagaaa

SEQ ID NO: 383404 - DNA, 75 bp, synthetic construct
  source 1..75: mol_type = other DNA
aattcatttcgcttaaaacgtctagaggtactctagcagttttttgttgtgacttgttgttggttgtacctgttg

SEQ ID NO: 383405 - DNA, 75 bp, synthetic construct
  source 1..75: mol_type = other DNA
aagcggcaaaaaaaataattaacacctgtaatgagtatcagaaaagacacggtaagaagacactctttgaggtat

SEQ ID NO: 383406 - DNA, 63 bp, synthetic construct
  source 1..63: mol_type = other DNA
atggtggtgggggaaggattactcagcgctgcgcgcttcgcccttcgggtcgttgcctgcggc

SEQ ID NO: 383407 - DNA, 75 bp, synthetic construct
  source 1..75: mol_type = other DNA
tgacgggacggcgctttgagcacggggtgacggactgttacacgctgttccgggatgcctaccatctggcgggaa

SEQ ID NO: 383408 - DNA, 75 bp, synthetic construct
  source 1..75: mol_type = other DNA
gaaatctggaacgaatgtaacgaactgctggcgcaggataacttctccgcgcgcggcatcatgcagcagatgaac

SEQ ID NO: 383409 - DNA, 75 bp, synthetic construct
  source 1..75: mol_type = other DNA
aatttgacgcctgggcggcgactgttccgcacactatcggcaacccgttataccactggacgcacctcgaactgc

SEQ ID NO: 383410 - DNA, 75 bp, synthetic construct
  source 1..75: mol_type = other DNA
gttggctcccggcgaatctcccaggacatcagcacccgtgatgaaggcgggggcgggaaggtggtggttatcggg

SEQ ID NO: 383411 - DNA, 75 bp, synthetic construct
  source 1..75: mol_type = other DNA
tgccgattttgagcgtgaggatgactggtggcgcaacggtcagaacctttacctggacaatatggcggtcaccgg

SEQ ID NO: 383412 - DNA, 75 bp, synthetic construct
  source 1..75: mol_type = other DNA
tgaacaggcgacctttaacgactacatggcgaagctgggcgaagtttccgataccgacattcgccgctttgctga

SEQ ID NO: 383413 - DNA, 75 bp, synthetic construct
  source 1..75: mol_type = other DNA
ccgcaggcattactggcaacgctggtgtcgacaaccatcgcggcggtcggggcattgttgattgccctgctggtg

SEQ ID NO: 383414 - DNA, 75 bp, synthetic construct
  source 1..75: mol_type = other DNA
tgccggattttgagcgtgaggatgactggtggcgcaacggtcagaacctttacctggacaatatggcggtcacag

SEQ ID NO: 383415 - DNA, 75 bp, synthetic construct
  source 1..75: mol_type = other DNA
tgaacacggcagcggaagccatccgggcgctgtcgttacaggtgccgggctttcgccgtcagatgaacgaaggct

SEQ ID NO: 383416 - DNA, 75 bp, synthetic construct
  source 1..75: mol_type = other DNA
tatcggcgtgctgccgcccgtcgatagcgtaactggctaccaggtaaccccagtggtcggcattatcccgcccga

SEQ ID NO: 383417 - DNA, 75 bp, synthetic construct
  source 1..75: mol_type = other DNA
aaggctaaagtaccggagtacaaaagcacggataacggcagacagaacacgtacttttcctcgctggataacatg

SEQ ID NO: 383418 - DNA, 75 bp, synthetic construct
  source 1..75: mol_type = other DNA
ggaaataatccagatacgctggcggaagactacagtttggcgcagatggcagaggaactgcatcaggcgctgatg

SEQ ID NO: 383419 - DNA, 75 bp, synthetic construct
  source 1..75: mol_type = other DNA
cttatgctgatgcgcccgtagtggtgttgatttcgggtcttggcggtagcggcagttactggttaccgcaactgg

SEQ ID NO: 383420 - DNA, 75 bp, synthetic construct
  source 1..75: mol_type = other DNA
tggcacatgcccggcggtgtgcgcctgcggagtcgtgcggcttcgtgataagcacgccggagggggagcggtata

SEQ ID NO: 383421 - DNA, 75 bp, synthetic construct
  source 1..75: mol_type = other DNA
ataccggacagcctgcccgccgtggaatggctgacctacggcagcggctggctgtcaggcatgaaactcggcgac

SEQ ID NO: 383422 - DNA, 75 bp, synthetic construct
  source 1..75: mol_type = other DNA
gttttcaggttcgcgaacgattactgtatagcggcggcgcgcaggcatgggtggaagcgcagccgttgttcctct

SEQ ID NO: 383423 - DNA, 75 bp, synthetic construct
  source 1..75: mol_type = other DNA
cgcatcatcctgccgtaaaaaaacatatcgatcacatcttcaaacgtgccggttacaatcccgccgaagttcgtg

SEQ ID NO: 383424 - DNA, 75 bp, synthetic construct
  source 1..75: mol_type = other DNA
gtctgggtgatgcctcccgtattagcacccgtctggttaaatggaaaatccgcgccaaatccaaagccgccaccg

SEQ ID NO: 383425 - DNA, 75 bp, synthetic construct
  source 1..75: mol_type = other DNA
gggttgagtgggctgataaatatttttatctccctgagggctccagccacatcgctggccactggacgactcagc

SEQ ID NO: 383426 - DNA, 75 bp, synthetic construct
  source 1..75: mol_type = other DNA
aaggcaaaaacaccggattaccgcgcaacggataacggcagacagaacacgtacttttcctcactggacaacatg

SEQ ID NO: 383427 - DNA, 75 bp, synthetic construct
  source 1..75: mol_type = other DNA
ggcggtgtgtgcctgcggagtcgtgcggcttcgtggtgagaacgccggagggggagcggtatatcccttgtgtga

SEQ ID NO: 383428 - DNA, 75 bp, synthetic construct
  source 1..75: mol_type = other DNA
actgagtaaacgggagaggtattccgaaaaatggcaacgacgaacgcattctgtctggcgtcaccgccactggca

SEQ ID NO: 383429 - DNA, 75 bp, synthetic construct
  source 1..75: mol_type = other DNA
ggcgcagaatgtgtggataacctacaaaggaaagctaccaggaagaattactggttctctgaagactcctccgga

SEQ ID NO: 383430 - DNA, 75 bp, synthetic construct
  source 1..75: mol_type = other DNA
cagcagccagaaggagcatcagacaggtcttcctggatgttgctgccgggttatgtgaaggggatgagcagtcgc

SEQ ID NO: 383431 - DNA, 75 bp, synthetic construct
  source 1..75: mol_type = other DNA
gcatttttactatcgcgatctcgaaaaaatggagctcgcggggcgctggatagcagaggactgcacctggacgcg

SEQ ID NO: 383432 - DNA, 75 bp, synthetic construct
  source 1..75: mol_type = other DNA
ctgctgtgctgctttgcctcatcggtaccgaaccatgcggcgatttactgcggtaacggtgagctgcaacagata

SEQ ID NO: 383433 - DNA, 75 bp, synthetic construct
  source 1..75: mol_type = other DNA
ctcagtgattgcgtttgaagtgttgaagtgggcaggagcagcttatttgatttggctgggtatccagcagtggcg

SEQ ID NO: 383434 - DNA, 75 bp, synthetic construct
  source 1..75: mol_type = other DNA
ttccgccgtcagatgaacgaagggtggtaccagatacgtattcgcggtgaggacacggcaccggaggtggtgtat

SEQ ID NO: 383435 - DNA, 75 bp, synthetic construct
  source 1..75: mol_type = other DNA
acaccctataaccaaaaaaccttgcaaaaagcctgctgggggctggcgttttattgaggaaacaatgaaacataa

SEQ ID NO: 383436 - DNA, 75 bp, synthetic construct
  source 1..75: mol_type = other DNA
tggtcgtctgtatttgattgcacctaattttactagcgaagcattgaaagcgttacttcaaaagctggattcaga

SEQ ID NO: 383437 - DNA, 75 bp, synthetic construct
  source 1..75: mol_type = other DNA
atacgggtaaagatggattcgtctataacgatgatcgcaagtttacaccagaacagctttctgaactggcaggta

SEQ ID NO: 383438 - DNA, 75 bp, synthetic construct
  source 1..75: mol_type = other DNA
agcgggaagcactaagcgccgctaatgagatcgccagccgcatggctgaaatgctggggacggaatgcgaagccc

SEQ ID NO: 383439 - DNA, 75 bp, synthetic construct
  source 1..75: mol_type = other DNA
cttcgaaagtgcgaaacagatggaactcaatgaagcactacaaagttatgctaataaaaaatctattgatttaga

SEQ ID NO: 383440 - DNA, 75 bp, synthetic construct
  source 1..75: mol_type = other DNA
ggttcgtctataatgatgatcgcaagttcacgcctgaacagctttctgaactggctgttatcgaccttgatgaag

SEQ ID NO: 383441 - DNA, 75 bp, synthetic construct
  source 1..75: mol_type = other DNA
cggggattgagatgccggattttcatcgcgggtatgactggtggcgtaacggtcagaatctctatcttgacaata

SEQ ID NO: 383442 - DNA, 75 bp, synthetic construct
  source 1..75: mol_type = other DNA
tggctgagcgaggccgaccggcggctgcagataaaaagtgcactgtcctggtggctggtctgccgggggggaaat

SEQ ID NO: 383443 - DNA, 75 bp, synthetic construct
  source 1..75: mol_type = other DNA
attagagcatcggaggttgaactctctaaagaatcatacagtttaaactggctgggtaaatcttatgcccgtttg

SEQ ID NO: 383444 - DNA, 75 bp, synthetic construct
  source 1..75: mol_type = other DNA
ggtgggcaagacgctgttagattggcaattgaattctgcgctgacaaaaattatatccgtagagatataggagca

SEQ ID NO: 383445 - DNA, 75 bp, synthetic construct
  source 1..75: mol_type = other DNA
aatgataagagcgcttgcgttcgagctacggcaatcgagtcaacggctcagcgatgcaagaaaaaccaaatttat

SEQ ID NO: 383446 - DNA, 75 bp, synthetic construct
  source 1..75: mol_type = other DNA
ccggaagactggctgcaggcagagatgcagggggtgattgtggcgctggtccacagtcatcccggcggtctgccc

SEQ ID NO: 383447 - DNA, 75 bp, synthetic construct
  source 1..75: mol_type = other DNA
tgtgacggactgttacaccctgttccgggatgcataccatctggcggggataacgctgccggattttgagcgtga

SEQ ID NO: 383448 - DNA, 75 bp, synthetic construct
  source 1..75: mol_type = other DNA
gccggaggcgtattttcgtatcgccccggaagactggctgcgggcagagatgcagggggagattgtggcgctggt

SEQ ID NO: 383449 - DNA, 75 bp, synthetic construct
  source 1..75: mol_type = other DNA
cactgggtgccagcatgatactgggcggtgtggcccagatgctggcaccgaaggcaaaaacaccggattaccgcg

SEQ ID NO: 383450 - DNA, 75 bp, synthetic construct
  source 1..75: mol_type = other DNA
tgctggttggctcccggcgaatctcccaggacatcagtacccgtgatgaaggcgggggcggaaaggtcgtggtta

SEQ ID NO: 383451 - DNA, 75 bp, synthetic construct
  source 1..75: mol_type = other DNA
cacggcaccggaggcggtgtatgcccgccttcacgaacaactgggtgagggaacggtcatccatattgtgccgcg

SEQ ID NO: 383452 - DNA, 75 bp, synthetic construct
  source 1..75: mol_type = other DNA
tcccggcgaatctcccaggacatcagtacccgtgatgaaggcggtggcggaaaggtcgtggttatcgggcggcag

SEQ ID NO: 383453 - DNA, 75 bp, synthetic construct
  source 1..75: mol_type = other DNA
gggcttttaccgggtgcccctgtcctctgcacaggcgggcgatattctgctgtgctgctttggtgcttcggtacc

SEQ ID NO: 383454 - DNA, 75 bp, synthetic construct
  source 1..75: mol_type = other DNA
gcctgaggcatattttcgtattgccccggaagactggctgcgggcagagatgcagggggagattgtggcactggt

SEQ ID NO: 383455 - DNA, 75 bp, synthetic construct
  source 1..75: mol_type = other DNA
gccggaggagtattttcgtatcgcaccggaagactggctgcgggcagagatgcagggggagattgtggccctggt

SEQ ID NO: 383456 - DNA, 75 bp, synthetic construct
  source 1..75: mol_type = other DNA
cgggatgcataccatctggcggggattgagatgccggattttcatcgcgaggatgagtggtggcgcaacggccag

SEQ ID NO: 383457 - DNA, 75 bp, synthetic construct
  source 1..75: mol_type = other DNA
ctggatattaatttgctgattgccgtttccggtttactgatgaccgtcaccgtcttctttggcatttcggcgctg

SEQ ID NO: 383458 - DNA, 75 bp, synthetic construct
  source 1..75: mol_type = other DNA
gcgtctggcgggagctaaaagtggcggtgtttttcaggcagtgctgggtgcggcgctgattgcggtggcatggtg

SEQ ID NO: 383459 - DNA, 75 bp, synthetic construct
  source 1..75: mol_type = other DNA
acggggatttacaacgatttggccgccgcctcagcctgtatgtgaacacggcagcggaagccattcgcgccctgt

SEQ ID NO: 383460 - DNA, 75 bp, synthetic construct
  source 1..75: mol_type = other DNA
cggcggtttttctgccaccacgatgctgttttcactgggtgccagcatgatactgggtggtgtggctcagatgct

SEQ ID NO: 383461 - DNA, 75 bp, synthetic construct
  source 1..75: mol_type = other DNA
agggaacggtcatccacattgtgccgcgactggccggggccggaaagggaggactgcagattgtgctgggggcag

SEQ ID NO: 383462 - DNA, 75 bp, synthetic construct
  source 1..75: mol_type = other DNA
cacaaattccgctgtgtgccacacctgaccgggcgacgttttgcgcacggggtgacggactgttacaccctgttc

SEQ ID NO: 383463 - DNA, 75 bp, synthetic construct
  source 1..75: mol_type = other DNA
gactggctgcaggcagagatgcagggggtgattgtggcgctggtccacagtcatccctgtggtctgccctggctg

SEQ ID NO: 383464 - DNA, 75 bp, synthetic construct
  source 1..75: mol_type = other DNA
agggaacggtcatccacattgtgccgcgactggccggagccggaaaggggggactgcagattgtgctgggggcag

SEQ ID NO: 383465 - DNA, 75 bp, synthetic construct
  source 1..75: mol_type = other DNA
agggaacggtcatccacattgtgccgcgactggccggagccggaaagggtggactgcagattgtgctgggggctg

SEQ ID NO: 383466 - DNA, 75 bp, synthetic construct
  source 1..75: mol_type = other DNA
agggaacggtcatccacattgtgccgcgactggccggagccggaaagggaggactgcagattgtgctgggggcgg

SEQ ID NO: 383467 - DNA, 75 bp, synthetic construct
  source 1..75: mol_type = other DNA
agggaacggtcatccacattgtgccgcgactggccggcgccggaaagggcggactgcagattgtgctgggggccg

SEQ ID NO: 383468 - DNA, 75 bp, synthetic construct
  source 1..75: mol_type = other DNA
agggaacggtcatccacattgtgccgcgactggccggtgccggaaagggtggactgcagattgtgctgggggcag

SEQ ID NO: 383469 - DNA, 75 bp, synthetic construct
  source 1..75: mol_type = other DNA
agggaacggtcatccacattgtgccgcgactggccggtgccggaaagggaggactgcagattgtgctgggggctg

SEQ ID NO: 383470 - DNA, 75 bp, synthetic construct
  source 1..75: mol_type = other DNA
ccacagtcatcccggtggtctgccctggctgagcgaggcggaccggcgactgcagataaagagtgccctgtcctg

SEQ ID NO: 383471 - DNA, 75 bp, synthetic construct
  source 1..75: mol_type = other DNA
cgcaacggtcagaacctttacctggacaatatggcggtcaccggcttttaccgggtgcccctgtcctctgcacag

SEQ ID NO: 383472 - DNA, 75 bp, synthetic construct
  source 1..75: mol_type = other DNA
agcacggggtgacggactgttacacgctgttccgggatgcttaccatctggcggggattgagatgccggattttc

SEQ ID NO: 383473 - DNA, 75 bp, synthetic construct
  source 1..75: mol_type = other DNA
gtccggtgcacaggcgggagacattctgctgtgctgttttggttcatcggtacccaatcatgctgccatttactg

SEQ ID NO: 383474 - DNA, 75 bp, synthetic construct
  source 1..75: mol_type = other DNA
tcccttgtgtgaatatttctgcagagccggaggcgtattttcgtatcgcaccggaagactggctgcgggcagaga

SEQ ID NO: 383475 - DNA, 75 bp, synthetic construct
  source 1..75: mol_type = other DNA
tggctcccgccgtatatcccaggacatcagcacccgtgatgaaggcgggggcggaacggtcgtggttgtcgggcg

SEQ ID NO: 383476 - DNA, 75 bp, synthetic construct
  source 1..75: mol_type = other DNA
cgcacacactccctctggcgtcacctggcatggcccgcatctgcctttacggggatttccaacgatttggccgcc

SEQ ID NO: 383477 - DNA, 75 bp, synthetic construct
  source 1..75: mol_type = other DNA
tggaggcaacgggtttttaccgtgtcgtactgacagaggcgcagcctggcgatgtgctgctgtgctgttttggtt

SEQ ID NO: 383478 - DNA, 75 bp, synthetic construct
  source 1..75: mol_type = other DNA
atggctccggaggactggctgcaggcagagatgcagggtgagattgtggcactggtccacagccaccccggtggt

SEQ ID NO: 383479 - DNA, 75 bp, synthetic construct
  source 1..75: mol_type = other DNA
cgaatctcccaggacatcagtacccgtgatgaaggcggtgacgggaaggtggtggttatcgggcggcaggggtaa

SEQ ID NO: 383480 - DNA, 75 bp, synthetic construct
  source 1..75: mol_type = other DNA
attaccggggagatgaatgcgggtataacggtcctgcggtggcggatgagttcgacaaacccccctaccacggga

SEQ ID NO: 383481 - DNA, 75 bp, synthetic construct
  source 1..75: mol_type = other DNA
atgcccggcggtgtgcgcctgcggagtcgtgcggcttcgtggtgagaacgccggagggggagcggtatatccctt

SEQ ID NO: 383482 - DNA, 75 bp, synthetic construct
  source 1..75: mol_type = other DNA
accggaggcggtgtacgcccgtcttcacgaacagctgggtgagggaacggtcatccacattgtgccgcgactggc

SEQ ID NO: 383483 - DNA, 75 bp, synthetic construct
  source 1..75: mol_type = other DNA
gttggctcccggcgaatctcccaggacatcagcacccgtgatgaaggcgggggcggaaggtcgtggttatcgggc

SEQ ID NO: 383484 - DNA, 75 bp, synthetic construct
  source 1..75: mol_type = other DNA
ggactgcagattgtgctgggggcggcagccatcgtgggctctttcttcactgccggggcatcaatggcgttatgg

SEQ ID NO: 383485 - DNA, 75 bp, synthetic construct
  source 1..75: mol_type = other DNA
tgccttacggtgaaatgctggttggctcccggcgaatctctcaggacatcagtacccgtgatgaaggcggtgacg

SEQ ID NO: 383486 - DNA, 75 bp, synthetic construct
  source 1..75: mol_type = other DNA
actggacaacatgattgcccaggggaacccgatgccggtgccttacggtgaaatgctggttggctcccggcgaat

SEQ ID NO: 383487 - DNA, 75 bp, synthetic construct
  source 1..75: mol_type = other DNA
cgcaaaacggcgcagttatggcgctggtcggtggttttgatttcaatcagagcaagtttaaccgcgccacccagg

SEQ ID NO: 383488 - DNA, 75 bp, synthetic construct
  source 1..75: mol_type = other DNA
ttaaagatcagatctcgggttatgaaggtggagcgaagagcgcgcagccagcatgggatgcttatatgaaagccg

SEQ ID NO: 383489 - DNA, 75 bp, synthetic construct
  source 1..75: mol_type = other DNA
acgttgaagatgtggctatctcccgcgaacaacaaaatgtttccgttccgatgccgcaactggaacaggcaaacc

SEQ ID NO: 383490 - DNA, 75 bp, synthetic construct
  source 1..75: mol_type = other DNA
gcgcgccagcttttcgatacagcttctcaggtctgtgaaattgtcgacggtgttcggcagtgtctgcagaactga

SEQ ID NO: 383491 - DNA, 75 bp, synthetic construct
  source 1..75: mol_type = other DNA
aataaggcgagccggctttttgacgctgcttctcaggtctgtgaaattgtcgatggtatccgacagtgtacgcag

SEQ ID NO: 383492 - DNA, 75 bp, synthetic construct
  source 1..75: mol_type = other DNA
gaatacaagtgtgttctctaacatagccacattaatgccaaataatctcgtgcttaaacaatttcacaaaataac

SEQ ID NO: 383493 - DNA, 75 bp, synthetic construct
  source 1..75: mol_type = other DNA
gggcattggttaacaagtggacacatgtcaacatcccgctggttgtctctcgcattactgaccagacgggcaaag

SEQ ID NO: 383494 - DNA, 75 bp, synthetic construct
  source 1..75: mol_type = other DNA
cgtgctaatggcgcagagatcgacgacggtgctatcaacggtatcaaagtcggtttgatggggccgctggctggt

SEQ ID NO: 383495 - DNA, 75 bp, synthetic construct
  source 1..75: mol_type = other DNA
aggtatatggaaaaaattgatggtaatgactccaacttattgatagtgttttatgttcagataatgcccgatgac

SEQ ID NO: 383496 - DNA, 75 bp, synthetic construct
  source 1..75: mol_type = other DNA
tcgcctgcaaattccgatgcagatatacagcgccgatggcgagctcattgctcaatacggtgaaaagcgtcgtat

SEQ ID NO: 383497 - DNA, 75 bp, synthetic construct
  source 1..75: mol_type = other DNA
tccttgcagtctgttgcattctgctgggagcaggctcgatttatggcctataccgctacatcgagccacaactgc

SEQ ID NO: 383498 - DNA, 75 bp, synthetic construct
  source 1..75: mol_type = other DNA
ttaacccgctgtggattatcgttggcttcttcgtcattggtatcgctggttacgcttgcggcctgctgggactgt

SEQ ID NO: 383499 - DNA, 75 bp, synthetic construct
  source 1..75: mol_type = other DNA
gcgtcagcctggataaggcgcgccagcttttcgatacggcttctcaggtctgccagcttatcgatggcgttcggc

SEQ ID NO: 383500 - DNA, 75 bp, synthetic construct
  source 1..75: mol_type = other DNA
gacctgctggttgggcgcgagaaagcccatgaagtggcatcacaactggtgatggcggcagggatttataattat

SEQ ID NO: 383501 - DNA, 75 bp, synthetic construct
  source 1..75: mol_type = other DNA
gagagtgggttaaccgaccgcgtgctcgacgacccgcaccatccgtatacccagctgctggtgtcatcggttttg

SEQ ID NO: 383502 - DNA, 75 bp, synthetic construct
  source 1..75: mol_type = other DNA
cacctggcgactgtcgaaattacggatgtcatgcgactgacccgcgctgtgaaaaatacctggcgtcacaattct

SEQ ID NO: 383503 - DNA, 75 bp, synthetic construct
  source 1..75: mol_type = other DNA
agacgcttctcctcttgatgccgttccggagttctttaatcagatggcggcttccggtgagggagagccccttaa

SEQ ID NO: 383504 - DNA, 75 bp, synthetic construct
  source 1..75: mol_type = other DNA
tggcatttacccatcaggaagcgaagcagttttttgattgccgtctgtcatcgccgattgaagccgcagaaagca

SEQ ID NO: 383505 - DNA, 75 bp, synthetic construct
  source 1..75: mol_type = other DNA
gtcggcgctatgccggttcatgggagaagtgtcttgctgcgggtaccagcatggtcatgattggcaattgtggta

SEQ ID NO: 383506 - DNA, 75 bp, synthetic construct
  source 1..75: mol_type = other DNA
atcacgcatcgtatcggcctgtcgcaatggcgcgaagggtttgatgcgatggtcgataaaactgcaatcaaagtg

SEQ ID NO: 383507 - DNA, 75 bp, synthetic construct
  source 1..75: mol_type = other DNA
gtaaaaaatcctcgaaatgtgtgttatgcggtgaatgcgcaaacgcctgcccaacaggggcgttaaaaattatcg

SEQ ID NO: 383508 - DNA, 75 bp, synthetic construct
  source 1..75: mol_type = other DNA
agctggagtgccaccgttcccgcagccgatctggcggcgttacccgatggcagcgcctccgcgcaggccagcgtc

SEQ ID NO: 383509 - DNA, 75 bp, synthetic construct
  source 1..75: mol_type = other DNA
ctcactgccataccgggcacttcagtgaggagggagtggctgaatgaacggtataaaaacggggctggggatgac

SEQ ID NO: 383510 - DNA, 75 bp, synthetic construct
  source 1..75: mol_type = other DNA
atgaatattaatgaaattcgtggaaatatgactgaagcggccctgagtgtggaatgtgttatgcgtggataccca

SEQ ID NO: 383511 - DNA, 75 bp, synthetic construct
  source 1..75: mol_type = other DNA
ccttcaatagcacatcattttcttgaaaatggagaggttaaaagtatagtgcctgactttcatccgtatacatct

SEQ ID NO: 383512 - DNA, 75 bp, synthetic construct
  source 1..75: mol_type = other DNA
gatctgtatacacgttttgagcactggttacaggagcaggatatttccaggcaggataaagtcaatctggacagc

SEQ ID NO: 383513 - DNA, 75 bp, synthetic construct
  source 1..75: mol_type = other DNA
ccgtacggacctaacctacaggaatattctcgaagcgcttgacggcattgacggctggtcggcggaagatcgtaa

SEQ ID NO: 383514 - DNA, 75 bp, synthetic construct
  source 1..75: mol_type = other DNA
cctgaacgttaaagacgctcgcactaacgtgttctgggctgacgatgctattcgtattgtgtctcagcctattcc

SEQ ID NO: 383515 - DNA, 75 bp, synthetic construct
  source 1..75: mol_type = other DNA
cgaatgacggtcacgttaaccggccagcacaacgacactggccagccactttcgttaaccatccctgtgagttga

SEQ ID NO: 383516 - DNA, 75 bp, synthetic construct
  source 1..75: mol_type = other DNA
tgcggatctgcaaatttccggcaccagtaatcagccagcaggcaccacgattacgctgacgcttaacgggcaaaa

SEQ ID NO: 383517 - DNA, 75 bp, synthetic construct
  source 1..75: mol_type = other DNA
atcggcgatatcctgtgcacaccggtcggctcacgggtgatgcgtcgtgattacggctcgttgctggcgtcaatg

SEQ ID NO: 383518 - DNA, 75 bp, synthetic construct
  source 1..75: mol_type = other DNA
gccggggttgaagctcctcgattacttagcgaagacttgagtgggacgtcggtctggctggtcgattttaccgat

SEQ ID NO: 383519 - DNA, 75 bp, synthetic construct
  source 1..75: mol_type = other DNA
gagcactccgtgatcctgatccgtggtggtcgtgttaaagacctcccgggtgttcgttaccataccgtacgtggt

SEQ ID NO: 383520 - DNA, 75 bp, synthetic construct
  source 1..75: mol_type = other DNA
gtaggtgatgttgataagaacaagaatttattcgaaatagaaagtttcgaataccaagctaaaattgacataata

SEQ ID NO: 383521 - DNA, 75 bp, synthetic construct
  source 1..75: mol_type = other DNA
ttacactggcggtggatgagattattgaaaccatctccgcaatcactccaatggcgcagaaagccaagaaataca

SEQ ID NO: 383522 - DNA, 75 bp, synthetic construct
  source 1..75: mol_type = other DNA
ttgcaaggttggggacagccaacgccgacaacgactcatctctatatgaagatgttgaccaaccgtaatgccttg

SEQ ID NO: 383523 - DNA, 75 bp, synthetic construct
  source 1..75: mol_type = other DNA
tgaagtcgcggccatgtccgaagtggatttggtgcttcccgaccttcatacagcactgatgaaagaatgtcagtg

SEQ ID NO: 383524 - DNA, 75 bp, synthetic construct
  source 1..75: mol_type = other DNA
gatgcagagcgcctgatgttctcccgcgaactcaaccgcgatatgggcatcagttacttcctgaaccctgacgat

SEQ ID NO: 383525 - DNA, 75 bp, synthetic construct
  source 1..75: mol_type = other DNA
aattttgataccatatatctaatcttcgtttcactgttaacattgatgtttgtatttggaaatttatcactaatt

SEQ ID NO: 383526 - DNA, 75 bp, synthetic construct
  source 1..75: mol_type = other DNA
gtaaaacgctcaattttgtactacttgaaataatatttttactcgtattcattgcaggcgtgggcattttaattt

SEQ ID NO: 383527 - DNA, 75 bp, synthetic construct
  source 1..75: mol_type = other DNA
gcagtgtatctaaagtagagaaagttgaagccgagtttgtaatttggatgtttggtgttatccctagcgcaaaag

SEQ ID NO: 383528 - DNA, 75 bp, synthetic construct
  source 1..75: mol_type = other DNA
atccagcgcgaccatcttgttatctgcaacggcggcggtggtgtgccagttgtggaaaaggctaacggctatcgc

SEQ ID NO: 383529 - DNA, 75 bp, synthetic construct
  source 1..75: mol_type = other DNA
acctggcaaaaacactggcagcagaaaaaggttgggggtttaaggccgacggcagctacttccgtcgcgtggtgc

SEQ ID NO: 383530 - DNA, 75 bp, synthetic construct
  source 1..75: mol_type = other DNA
atcgcccacgatcatctggtgatatgtaatggtggcggtggtgttccggtggttgaaaaagccgatggataccac

SEQ ID NO: 383531 - DNA, 75 bp, synthetic construct
  source 1..75: mol_type = other DNA
cactactgtggaagctaacggtagctggacggtgaatgtgccgccagccgatcttgctgcgctgccggatggcgc

SEQ ID NO: 383532 - DNA, 75 bp, synthetic construct
  source 1..75: mol_type = other DNA
gatgcagagcgcctgatgttctcccgtgagctaaaccgcgacatgggcatcagttacttcctgaaccctgacgat

SEQ ID NO: 383533 - DNA, 75 bp, synthetic construct
  source 1..75: mol_type = other DNA
tcctgaagaagcgtatcgcaacggtactattcagcgtcagattgctggctttgatgaaattcttcgctcaccgaa

SEQ ID NO: 383534 - DNA, 75 bp, synthetic construct
  source 1..75: mol_type = other DNA
gacagtgaatatcatattggaagtgtttctcgtaatagtgacacttcttttcttgaagaacgctggtttctacca

SEQ ID NO: 383535 - DNA, 75 bp, synthetic construct
  source 1..75: mol_type = other DNA
atcgcagtgatggtctgactgtcactgaccttgagcatatcagccagagtatcggcgatatcctgcgcacgccgg

SEQ ID NO: 383536 - DNA, 75 bp, synthetic construct
  source 1..75: mol_type = other DNA
cgaactccgcgctgcgtaaagtatgccgtgttcgtctgactaacggtttcgaagtgacttcctacatcggtggtg

SEQ ID NO: 383537 - DNA, 75 bp, synthetic construct
  source 1..75: mol_type = other DNA
tcaagattaagaactttggccgtgaccggaaatttcgttcggttgatgagcttcaaggcactttgtctgaacagt

SEQ ID NO: 383538 - DNA, 75 bp, synthetic construct
  source 1..75: mol_type = other DNA
attttcatgtcaataatggcatgagtcggaatgaagcggaggctttagtatcgatggatttaggtcatggagatg

SEQ ID NO: 383539 - DNA, 75 bp, synthetic construct
  source 1..75: mol_type = other DNA
ttcccgccgaacaatggcaggacaagcgcgtcgtctgggatgcacgggtaaaattgctgaccagccaggggccgg

SEQ ID NO: 383540 - DNA, 75 bp, synthetic construct
  source 1..75: mol_type = other DNA
cgtaacgaaaaaacagcctccgttaccggacagcaaggaggctgaatggagtttacaggatttgcttttttataa

SEQ ID NO: 383541 - DNA, 75 bp, synthetic construct
  source 1..75: mol_type = other DNA
gttgaggaaagaacgccgctacgcgatgcagtaaacatgctggtaggaaagaaaggacttcgctatgacgatgca

SEQ ID NO: 383542 - DNA, 75 bp, synthetic construct
  source 1..75: mol_type = other DNA
atgatgccggtggcataaatgagacttacggaaagcagtctccagtcgattttaatgccatcaaagatgagctgt

SEQ ID NO: 383543 - DNA, 75 bp, synthetic construct
  source 1..75: mol_type = other DNA
atgaaactcgccgcctgttttctgacactccttcctggcttcgccgttgccgccagctggacttctccggggttt

SEQ ID NO: 383544 - DNA, 75 bp, synthetic construct
  source 1..75: mol_type = other DNA
atcagccttttaaggatgcactaacagcctcagttattgtaggtttttcaacgtgtataacacgtgaacagtgtt

SEQ ID NO: 383545 - DNA, 75 bp, synthetic construct
  source 1..75: mol_type = other DNA
cgaatggggatggcaaattgatccggcagggctacgttattcactcaactggttctgggatcatttccagttgcc

SEQ ID NO: 383546 - DNA, 75 bp, synthetic construct
  source 1..75: mol_type = other DNA
ggtccgtgaatgcccgaaatgggatggattaccgctcacgctggatgtcagcgccacttttccggagggagccgc

SEQ ID NO: 383547 - DNA, 75 bp, synthetic construct
  source 1..75: mol_type = other DNA
tggattcgacgatctcaccatgtcgctggcctttttaccggatataaagaccgaatctaccaccgcttcaggtct

SEQ ID NO: 383548 - DNA, 75 bp, synthetic construct
  source 1..75: mol_type = other DNA
gattatcaggagcaggcggctaaagcagtcgattgtctggcgcagatggatacgacctggcagcaaatggcggag

SEQ ID NO: 383549 - DNA, 75 bp, synthetic construct
  source 1..75: mol_type = other DNA
cagtgaacacctcttacgtgccattcaacggtcagcaaattatcaccgccatggctgccggagttgcatatgttg

SEQ ID NO: 383550 - DNA, 75 bp, synthetic construct
  source 1..75: mol_type = other DNA
aaatcaccactgaacagcaggaagctattaaacagctcgtcatgagtcgcggtcagtctctgccaaaagaaaaac

SEQ ID NO: 383551 - DNA, 75 bp, synthetic construct
  source 1..75: mol_type = other DNA
acccgctttttcctgaacaccattttgggaatgggcggttttattgatgttgctgggatggcgaacccgaaactg

SEQ ID NO: 383552 - DNA, 75 bp, synthetic construct
  source 1..75: mol_type = other DNA
gatattgatattaatgagccagacggaccaacgaatctttctgcatggctaagacttaagaacaaagaattacct

SEQ ID NO: 383553 - DNA, 75 bp, synthetic construct
  source 1..75: mol_type = other DNA
atgctgatgccaaaactgacgccgaacaagcgcaagagttggcacgcattgcaaaagccgcgacctttgccgcaa

SEQ ID NO: 383554 - DNA, 75 bp, synthetic construct
  source 1..75: mol_type = other DNA
tatgggattatgctaaccgttcacaggcattattccgcgaactgtatccggcattaaaacaaattcaatcgaact

SEQ ID NO: 383555 - DNA, 75 bp, synthetic construct
  source 1..75: mol_type = other DNA
aaaaacaggcgaaggcgatgatcactatgtggtcgtcactgaaatctcattttggctgttcgtacaaagaaatca

SEQ ID NO: 383556 - DNA, 75 bp, synthetic construct
  source 1..75: mol_type = other DNA
gaactgtatccggcattaaaacaaattcaatcgaactattccggcagatgctacgactacggtcatgaattctcg

SEQ ID NO: 383557 - DNA, 75 bp, synthetic construct
  source 1..75: mol_type = other DNA
tggtatagactggactggtcaatctgttaagttgcgtaaaatgaaggacaaattcaactgtagagatatctctat

SEQ ID NO: 383558 - DNA, 75 bp, synthetic construct
  source 1..75: mol_type = other DNA
cggacgacgttgagcgccttgtggtgccgaaactactgaaaactttcccgcagctaaagggcgtgaaaattgatt

SEQ ID NO: 383559 - DNA, 75 bp, synthetic construct
  source 1..75: mol_type = other DNA
aggcattattccgcgaactgtatccggcgctaaaacaaattcaatcgaactattccggcagatgctacgactacg

SEQ ID NO: 383560 - DNA, 75 bp, synthetic construct
  source 1..75: mol_type = other DNA
cgagatgttgatatcaatgagccagacggaccaacgaatctttctgcatggataagacttaagaacaaagaatta

SEQ ID NO: 383561 - DNA, 75 bp, synthetic construct
  source 1..75: mol_type = other DNA
ctactatcaatgtaccattccacggcgcagagctttatgttgtcaatcacaacggcgaaccgtacaccccaatga

SEQ ID NO: 383562 - DNA, 75 bp, synthetic construct
  source 1..75: mol_type = other DNA
ttgtcgaaaatggatttggtgcggttgaccagagacaagctgacggcacggtgaacgatcactatcgcattgatt

SEQ ID NO: 383563 - DNA, 75 bp, synthetic construct
  source 1..75: mol_type = other DNA
gatgagaaaatggccttcactcatactgaattagaaaaaatgatggtcacgctgattatatctaagctttgcaga

SEQ ID NO: 383564 - DNA, 75 bp, synthetic construct
  source 1..75: mol_type = other DNA
ctataccgcggacacctgccgtcaatgcaaagagccgcaatgcactgagagatcccctcataatttccccaaaac

SEQ ID NO: 383565 - DNA, 75 bp, synthetic construct
  source 1..75: mol_type = other DNA
tgcaaagagccgcaatgcatgaacgtctgcccgattggtgcgattacctggcagcagaaagaaggctgtattacc

SEQ ID NO: 383566 - DNA, 75 bp, synthetic construct
  source 1..75: mol_type = other DNA
gctgatgctattcatcaggctaaatatgtatctgcaattttctcccgtcttgtaaaagggcaaggagaatcgtaa

SEQ ID NO: 383567 - DNA, 75 bp, synthetic construct
  source 1..75: mol_type = other DNA
tcgctggcggtgaatatattgccggtatttatcactttcgatcccctggaaagtcttgttgatttcctgaagcgt

SEQ ID NO: 383568 - DNA, 75 bp, synthetic construct
  source 1..75: mol_type = other DNA
ttgacgggggttccactcagcccgtttgctgattttctcgcagaagagcagcactacgcgcgcagcaaaaagtgt

SEQ ID NO: 383569 - DNA, 75 bp, synthetic construct
  source 1..75: mol_type = other DNA
tgcgccggtacggtgagccggtatcaaccgcgtttgtggaatccacgatcaatgaagtgatcgccagacgaatgg

SEQ ID NO: 383570 - DNA, 75 bp, synthetic construct
  source 1..75: mol_type = other DNA
gcggttaacgtcggcggtgcgtttaacctgttccagcaaaccatgaaccagtttcgccgtcagcggggcggggcg

SEQ ID NO: 383571 - DNA, 75 bp, synthetic construct
  source 1..75: mol_type = other DNA
accacctggcgcgcggagctggatggtaaacctgttatcgtctgctctaccggtatcggcggcccgtctacttct

SEQ ID NO: 383572 - DNA, 75 bp, synthetic construct
  source 1..75: mol_type = other DNA
tatcaaaatccatcgcaattatttctttggcgacaacggggttggctctggcggcggcctgtatggcgatctcaa

SEQ ID NO: 383573 - DNA, 75 bp, synthetic construct
  source 1..75: mol_type = other DNA
gggtaaccggcgcggggaaaggcatcggctatgccacggcgctggcgtttgttgacgcgggagcaaaagtcacag

SEQ ID NO: 383574 - DNA, 75 bp, synthetic construct
  source 1..75: mol_type = other DNA
attacgcatcgtatcggcctgtcgcaatggcgcgaagggtttgatgcgatggtcgataaaaccgcaatcaaagtg

SEQ ID NO: 383575 - DNA, 75 bp, synthetic construct
  source 1..75: mol_type = other DNA
cagtgtttttttctccagaaagtgaggaattaggtcctactttttatgtgccagtgaatctcagaagctcgatgt

SEQ ID NO: 383576 - DNA, 75 bp, synthetic construct
  source 1..75: mol_type = other DNA
tgtgggtatggggattaagcgtagagataccgcagactcaactttctttacacccaataatactgacaaatttga

SEQ ID NO: 383577 - DNA, 75 bp, synthetic construct
  source 1..75: mol_type = other DNA
ccgattgcagcaatggttactcaaagatttttaccacacttacaggtgcatctgtttcaggtaagttgattgtca

SEQ ID NO: 383578 - DNA, 75 bp, synthetic construct
  source 1..75: mol_type = other DNA
ccctgcgtgaaacaaccgcgggcgcgggacagattggtgattttaaagccaaagctacgtttagtttcacctacg

SEQ ID NO: 383579 - DNA, 75 bp, synthetic construct
  source 1..75: mol_type = other DNA
gaagaacgggcaatgttggattgcgaatctagcgagtcatcggcacagttcgttgatgcgctatttgacaccaat

SEQ ID NO: 383580 - DNA, 75 bp, synthetic construct
  source 1..75: mol_type = other DNA
tcgctgctgtgtgagtcggtcgcggacgctgtgggagcacctggcggtattaaatatgaaatcacaacagagcct

SEQ ID NO: 383581 - DNA, 75 bp, synthetic construct
  source 1..75: mol_type = other DNA
ttgccctgcgcgaaactacagcagggacaggaaatatcggtaatttccgtgcgaaagccacctttaacttcacct

SEQ ID NO: 383582 - DNA, 75 bp, synthetic construct
  source 1..75: mol_type = other DNA
actggccgatgcactcaacagcgttgaccagaacaccgtccagaactggttacaggtcggtaaatatatggcaat

SEQ ID NO: 383583 - DNA, 75 bp, synthetic construct
  source 1..75: mol_type = other DNA
ctgggaaaaaaacgtccggggcgctgatgcggtcagtaacatgatggacaggctgtattcacagttcgcagtggg

SEQ ID NO: 383584 - DNA, 75 bp, synthetic construct
  source 1..75: mol_type = other DNA
ccctatctgaactgagccatttcattaatcagcatgcagacaatacaaaatatttaaaagtctggggtaacgggg

SEQ ID NO: 383585 - DNA, 75 bp, synthetic construct
  source 1..75: mol_type = other DNA
gacgaagcgattgccgccgcgctgcagcgggtagcgatgctggagaaaagcgaacagggatggttaagcctctcc

SEQ ID NO: 383586 - DNA, 75 bp, synthetic construct
  source 1..75: mol_type = other DNA
tatcgaaccagaaagatattcgtattgatgcctctgcgcttggtcagggggccagcgaacttctggggaaaaccg

SEQ ID NO: 383587 - DNA, 75 bp, synthetic construct
  source 1..75: mol_type = other DNA
ctcccgcaacccacgtgggccaaagacgccagcgctggttacaccacaaacggcatcaggatttaatctccttga

SEQ ID NO: 383588 - DNA, 75 bp, synthetic construct
  source 1..75: mol_type = other DNA
gcacatcgagacggagaaaatgctggctgattctggcatcgtttacaccctgctgcgcaacggctggtacagcga

SEQ ID NO: 383589 - DNA, 75 bp, synthetic construct
  source 1..75: mol_type = other DNA
gctgactacggcgatgaagccgcactgacatctgcgctacagggcgtggaaaaactgctgctgatctcttccagc

SEQ ID NO: 383590 - DNA, 75 bp, synthetic construct
  source 1..75: mol_type = other DNA
gccaacttggtcactatgttattgaatccttgatgaaaacggttcctgccagccaaatagtggctatcgttcgta

SEQ ID NO: 383591 - DNA, 75 bp, synthetic construct
  source 1..75: mol_type = other DNA
cgaccgttgcagcaatatctgggcgtcgttacctggtgcaggttacggtcagtatgaacataaaatcggtgacct

SEQ ID NO: 383592 - DNA, 75 bp, synthetic construct
  source 1..75: mol_type = other DNA
tcaaatcaacagctgccggacgttatcagcttctttcacgctggtgggatgcttaccgtaagcagcttgctctga

SEQ ID NO: 383593 - DNA, 75 bp, synthetic construct
  source 1..75: mol_type = other DNA
gcatcgaaaggcggtctgtttgatgacagcaaaacgcttagcaaattgattggccgcccaacgacaacgttagcc

SEQ ID NO: 383594 - DNA, 75 bp, synthetic construct
  source 1..75: mol_type = other DNA
atgccagcgcctctgtatggtgcggacgacgtgcaccgctgttccggcaattccgtatcggaggtgctggataaa

SEQ ID NO: 383595 - DNA, 75 bp, synthetic construct
  source 1..75: mol_type = other DNA
ggcgacgctcatgaacaggcaatgagtgaacttagcaaacaaagtagccagaagccgctcatcaaggcattagcc

SEQ ID NO: 383596 - DNA, 75 bp, synthetic construct
  source 1..75: mol_type = other DNA
aaaaacgaagatctggaacccatagccgctcattaccgcaaactgagcattgaccgcctacagtgccgacaagcc

SEQ ID NO: 383597 - DNA, 75 bp, synthetic construct
  source 1..75: mol_type = other DNA
taccgatccggccagtgataaaggaggcagcagtgccgcaacgaaacgacaggagccgcagcacaccgacgacca

SEQ ID NO: 383598 - DNA, 75 bp, synthetic construct
  source 1..75: mol_type = other DNA
gtggcgggcgcgtttatcggcacctcgtctgttaccgcctatattgaaagtacttctggtgtggcagtcggtggt

SEQ ID NO: 383599 - DNA, 75 bp, synthetic construct
  source 1..75: mol_type = other DNA
gtgctggataaattcagaaaaaactacgatcgaataatgtctctaccgcaggaaacgaaagaggaaaaggaattt

SEQ ID NO: 383600 - DNA, 75 bp, synthetic construct
  source 1..75: mol_type = other DNA
attaacccagttgcgaccgacgatattattaacgccgccgaatcgggcaatgcgcaaaccatcagcggccaggtg

SEQ ID NO: 383601 - DNA, 75 bp, synthetic construct
  source 1..75: mol_type = other DNA
tcaaatcaacagccgccggacgttatcagcttctttcacgctggtgggatgcctaccgtaagcagcttgctctga

SEQ ID NO: 383602 - DNA, 75 bp, synthetic construct
  source 1..75: mol_type = other DNA
tgttgaacggcctggcgtacagcgccaccaccgatagttccggcaactggagcgttaccgtgcctgcttcggcgg

SEQ ID NO: 383603 - DNA, 75 bp, synthetic construct
  source 1..75: mol_type = other DNA
tctcaacaagttacaggcgggcggttatgggtttgtgatctccgactggaatatgccgaatatggatggtctgga

SEQ ID NO: 383604 - DNA, 75 bp, synthetic construct
  source 1..75: mol_type = other DNA
aactatcgctacaccatgccgccggtgaaagacagttcgcggatggatatcagcctgaataaccagttcctgcaa

SEQ ID NO: 383605 - DNA, 75 bp, synthetic construct
  source 1..75: mol_type = other DNA
cgccacggtgcaggctaatttaagctggagtgtcagcgttccggcggcggatattcaggcgctgggtaacggcga

SEQ ID NO: 383606 - DNA, 75 bp, synthetic construct
  source 1..75: mol_type = other DNA
ttaaatcaacagccgccggacgttatcagcttctttcacgctggtgggatgcttaccgtaagcagcttgctctga

SEQ ID NO: 383607 - DNA, 75 bp, synthetic construct
  source 1..75: mol_type = other DNA
aaacgggtgcttctcaaggctatttagctttctctctggcggcgtgaccaaggctttggaaagaagattaaatga

SEQ ID NO: 383608 - DNA, 75 bp, synthetic construct
  source 1..75: mol_type = other DNA
caaccgacacgtaaccacggttatgacgttattgttggtggtgaactcttcagtgattactccgatcaccctcgc

SEQ ID NO: 383609 - DNA, 75 bp, synthetic construct
  source 1..75: mol_type = other DNA
aagctttcctcgatatggtggcttggtcagaaggaacggataacggacgacaaccgacacgtaaccacggttatg

SEQ ID NO: 383610 - DNA, 75 bp, synthetic construct
  source 1..75: mol_type = other DNA
acaacgaattgtatgcgcatttattaatatctaccttgatgagaatagataaatctgataacgcaagagttttta

SEQ ID NO: 383611 - DNA, 75 bp, synthetic construct
  source 1..75: mol_type = other DNA
ataagataactcaggaaagtggatgtttctcaaggatatttagctttttgtatggaggcgttacgaaggccctgg

SEQ ID NO: 383612 - DNA, 75 bp, synthetic construct
  source 1..75: mol_type = other DNA
gatcacgacgatgatcgctttgcccatgtgtttgccgtcgaagccgaatggggtcggggtaaatcacgtttaggc

SEQ ID NO: 383613 - DNA, 75 bp, synthetic construct
  source 1..75: mol_type = other DNA
attggcacgctggttgtgtttgttgccttcatcctgagttatatgggggtggaagcatccgcaacgcacgtcaat

SEQ ID NO: 383614 - DNA, 75 bp, synthetic construct
  source 1..75: mol_type = other DNA
ggtacgctggtactgtaaatacggcattagctaccgtgaactgcaggagatgctggcagatgttaccaacggtgc

SEQ ID NO: 383615 - DNA, 75 bp, synthetic construct
  source 1..75: mol_type = other DNA
cgcaaaggccaggcctcagcattttattatggtgatcccctgggcgaaatgcgcctggtaagcagagtttttgaa

SEQ ID NO: 383616 - DNA, 75 bp, synthetic construct
  source 1..75: mol_type = other DNA
ggtggcggcaatctgtttaagctcggttggtggtttgtccattgcgatggtcattccgggtaatgaaatcaatct

SEQ ID NO: 383617 - DNA, 75 bp, synthetic construct
  source 1..75: mol_type = other DNA
gttggcaccctggttgtgtttgttgccttcatattgagttatatgggtgtagaagcctccgcaacccacgtcaat

SEQ ID NO: 383618 - DNA, 75 bp, synthetic construct
  source 1..75: mol_type = other DNA
gccagaacgcgccgaaaggccacttcttcctgcatccacgtgcccgttcaccgcactatattgtgataaacgaca

SEQ ID NO: 383619 - DNA, 75 bp, synthetic construct
  source 1..75: mol_type = other DNA
ggctggcgccgcagcatccgcaatatgctgcgatgcatgagtctttattggccttgttaagcgataacaaaccgt

SEQ ID NO: 383620 - DNA, 75 bp, synthetic construct
  source 1..75: mol_type = other DNA
ggaccaggggcggatagtcgagcagggggcagcaaaagcgttatttgccgatccccagcagcctcgcacccgcca

SEQ ID NO: 383621 - DNA, 75 bp, synthetic construct
  source 1..75: mol_type = other DNA
tgaataccatccgccaactggcacaggaaaagcgcacgatggtcattgtgacgcacgaaatgagctttgctcgtg

SEQ ID NO: 383622 - DNA, 75 bp, synthetic construct
  source 1..75: mol_type = other DNA
cgcccgcctatggtcgcgcgcttgctctgctcaaacgcgaaggccggtgcccgtctgacgttgaacaccgacaga

SEQ ID NO: 383623 - DNA, 75 bp, synthetic construct
  source 1..75: mol_type = other DNA
atttaatatgccgagttcagacgctatctacttacatgacacgcctaatcacaatctgttcaagcgtgatacgcg

SEQ ID NO: 383624 - DNA, 75 bp, synthetic construct
  source 1..75: mol_type = other DNA
aatgggtagagttactgactgacccaggcgttaacggtctggcacgtgacgtagtgttgtcggatgcaatgctgg

SEQ ID NO: 383625 - DNA, 75 bp, synthetic construct
  source 1..75: mol_type = other DNA
gtgatttatctgtgtgcttatttcatgctgtttattggctacattgtgttagtccttaaacatcctgacttaaaa

SEQ ID NO: 383626 - DNA, 75 bp, synthetic construct
  source 1..75: mol_type = other DNA
cttcacgccctatggcgttgcggcattattaacacattatgggtcgatcacggtgtttatagtacttggtgtcgg

SEQ ID NO: 383627 - DNA, 75 bp, synthetic construct
  source 1..75: mol_type = other DNA
tgactgctggctgatgcaaccaaccgacaaagcgatgccggtgatcacccgcaatatcgaccgcagtatatggcg

SEQ ID NO: 383628 - DNA, 75 bp, synthetic construct
  source 1..75: mol_type = other DNA
agatcagcttgccgatctggaacggatgttctatctgctggatgggaaggccattcccgataaccggcatgatgt

SEQ ID NO: 383629 - DNA, 75 bp, synthetic construct
  source 1..75: mol_type = other DNA
cgcatggagataagctacatgccttagcaagaaacactaagcttccagctagtgatcgaccgcgcgtagaagcac

SEQ ID NO: 383630 - DNA, 75 bp, synthetic construct
  source 1..75: mol_type = other DNA
tcacgagaaagcccggatggtctgggaggtgctgcaggatgatgatgttatccgccgccagctacagacatggtg

SEQ ID NO: 383631 - DNA, 75 bp, synthetic construct
  source 1..75: mol_type = other DNA
tgtatcactatcctgatggcagaaaagagctgcgcctgaacggtacgctacttccctactctacctacgaccgac

SEQ ID NO: 383632 - DNA, 75 bp, synthetic construct
  source 1..75: mol_type = other DNA
atggctacatcggtacagacaggtaaagctaagcagctaacattacttggattcttcgccattacggcgtcgatg

SEQ ID NO: 383633 - DNA, 75 bp, synthetic construct
  source 1..75: mol_type = other DNA
ttatttcatgctgtttattggctacattgtgttggttcttaaacatcctgacttaaaacgcacatttaatatccc

SEQ ID NO: 383634 - DNA, 75 bp, synthetic construct
  source 1..75: mol_type = other DNA
ttactgctgatggtggcggcaatctgcttaagctctgttggcggtttgtctattgcgatggtcattccgggtaat

SEQ ID NO: 383635 - DNA, 75 bp, synthetic construct
  source 1..75: mol_type = other DNA
aaacgtttggatctggtggagaagatgaatgatatcgtggcgaagcactttccgtcagcgttatcagcaaaatga

SEQ ID NO: 383636 - DNA, 75 bp, synthetic construct
  source 1..75: mol_type = other DNA
atgcaaacagaagctgaagtcttaaccgatcataacgagctaatttgctcgaccagcattgagcgtatcgtgacg

SEQ ID NO: 383637 - DNA, 75 bp, synthetic construct
  source 1..75: mol_type = other DNA
agttaacccgctacacccttagcctgatggtgcttgagcgtaaactttcatctgccaaaggtgcgctcgacactc

SEQ ID NO: 383638 - DNA, 75 bp, synthetic construct
  source 1..75: mol_type = other DNA
tctggaaactggtgaggggatgccagaagatattaagcagggcgaccgggttattgtagatccctatatttattg

SEQ ID NO: 383639 - DNA, 75 bp, synthetic construct
  source 1..75: mol_type = other DNA
gttagcttgtgtggaagatggtgtcgatatgacacaggtaaatatagaactaattcaaaactggttgaagagtcg

SEQ ID NO: 383640 - DNA, 75 bp, synthetic construct
  source 1..75: mol_type = other DNA
gcggatatatgccccctggatggggtctccggagcaaagggaatgagatcaatacgctgctgaaaaatcataata

SEQ ID NO: 383641 - DNA, 75 bp, synthetic construct
  source 1..75: mol_type = other DNA
ccgtggtcaggtcgataaatatacctggcgcgatattggctccagctatttgatgtccgatctgcaagctgcgta

SEQ ID NO: 383642 - DNA, 75 bp, synthetic construct
  source 1..75: mol_type = other DNA
tagcgcaatcagaagtaccctggatctggcctcatttgcagggcgtatagcctatactggttggccaaagcagga

SEQ ID NO: 383643 - DNA, 75 bp, synthetic construct
  source 1..75: mol_type = other DNA
attgccctgcacgcattacatcgggcgcaattgaaagcaggtgaacatgtcgtcattattggtgctggtgccatt

SEQ ID NO: 383644 - DNA, 75 bp, synthetic construct
  source 1..75: mol_type = other DNA
atccatttttggctgagaaagtattaacatccttcttccaaagcccacatacggtagatgcaaaaatgtttatgg

SEQ ID NO: 383645 - DNA, 75 bp, synthetic construct
  source 1..75: mol_type = other DNA
cgtgggctgcacatggagatttgaatttttataagaactccgttcaaaagcacctaattccacaaggtaatatac

SEQ ID NO: 383646 - DNA, 75 bp, synthetic construct
  source 1..75: mol_type = other DNA
aaatctctccagactactttaaacaagctggatttactgatgagaatgaaatattaaatgctgatcctcaagggc

SEQ ID NO: 383647 - DNA, 75 bp, synthetic construct
  source 1..75: mol_type = other DNA
gtggtgtttatctccagtgaagtggaggagttgccgctggtgtgcgaccgcatcctgttgttacagcacggtacg

SEQ ID NO: 383648 - DNA, 75 bp, synthetic construct
  source 1..75: mol_type = other DNA
tggatgacgttatcgcccaagtgaaacagattgtgggtgatatgccggtttacctgacttttgatatcgactgcc

SEQ ID NO: 383649 - DNA, 75 bp, synthetic construct
  source 1..75: mol_type = other DNA
gcgcaggttactgaccttgcacaaagcgacacacacgctacagaaccgccaaaaaatgacgggacagcagcaaca

SEQ ID NO: 383650 - DNA, 75 bp, synthetic construct
  source 1..75: mol_type = other DNA
gaaaaagcataatctgtttgtggtggaagatgccgctcagggcgtgatgtccacttacaaagggcgtgcactggg

SEQ ID NO: 383651 - DNA, 75 bp, synthetic construct
  source 1..75: mol_type = other DNA
tatatattggcaacgatacctgtcatatcaccattacctgtaatcagtcaggttttcatttaaccagggacggac

SEQ ID NO: 383652 - DNA, 75 bp, synthetic construct
  source 1..75: mol_type = other DNA
ctgtggtttgcccgcaaagatgagttcccggtagggaagctcggtgagctaatgcaaatcacgctgctgatttaa

SEQ ID NO: 383653 - DNA, 75 bp, synthetic construct
  source 1..75: mol_type = other DNA
tttggcagaggcaaaacggtgggcgatccgctgaccggacatcccaaagtgcggatggtgtcgctgacgggttct

SEQ ID NO: 383654 - DNA, 75 bp, synthetic construct
  source 1..75: mol_type = other DNA
ggtggtcgccacggtccggcagctatccgtcaggtttcgacgaatctggcctgggaacacaaccgcttcccgtgg

SEQ ID NO: 383655 - DNA, 75 bp, synthetic construct
  source 1..75: mol_type = other DNA
aatttcgacatgcgtgagcgcctgaacgtcgtggactgcggtgatctggtatatgccttcggcgatgcccgtgag

SEQ ID NO: 383656 - DNA, 75 bp, synthetic construct
  source 1..75: mol_type = other DNA
ggtcatcatcagtctgaccagcggcgatcctgacagcgacaccccgtcacgtgaaatcgatgcccgtcttgattt

SEQ ID NO: 383657 - DNA, 75 bp, synthetic construct
  source 1..75: mol_type = other DNA
ggtgatacaactgaatcagtgaacactctatcggaaaaatacaaaaaggtgcttaatttatttcctgcgggtgtc

SEQ ID NO: 383658 - DNA, 75 bp, synthetic construct
  source 1..75: mol_type = other DNA
cctgtgggcgcaactggaagcggcggatcgcatcaaccagcagcgcctggcgctgtggcaaaactactacgatgc

SEQ ID NO: 383659 - DNA, 75 bp, synthetic construct
  source 1..75: mol_type = other DNA
ccgctaacgcttttgtactgcgtggggcaaaaattgtctttgtcgatattcgcccggataccatgaacatcgacg

SEQ ID NO: 383660 - DNA, 75 bp, synthetic construct
  source 1..75: mol_type = other DNA
agacaggagattataaccttgcatatattgatcaggcgggcaatgccaacgatgccagtatttcgcaaggtgctt

SEQ ID NO: 383661 - DNA, 75 bp, synthetic construct
  source 1..75: mol_type = other DNA
gatgagaatgctgtctctattgcagggttgtatgttgatactatttcacttccatgtcctatattaagagtcggt

SEQ ID NO: 383662 - DNA, 75 bp, synthetic construct
  source 1..75: mol_type = other DNA
gaaagctacgatgaatttcaagattttagttattcgatgaatgatattgatgctgttcttaaaaatattaagaga

SEQ ID NO: 383663 - DNA, 75 bp, synthetic construct
  source 1..75: mol_type = other DNA
ttagctgggttgacagcggctaagttatttgatactgaaaacccaaatctagagaataaaactcattttcaagga

SEQ ID NO: 383664 - DNA, 75 bp, synthetic construct
  source 1..75: mol_type = other DNA
tcgttaccaggtgcaggttacggtcagtatgaacataaaatcggcgacctgattgcccgatttaaagaggctggt

SEQ ID NO: 383665 - DNA, 75 bp, synthetic construct
  source 1..75: mol_type = other DNA
aggcgtgcagggcgctgatgcccccatcgtggcgcagaacggtccttcgcgtgatgtgaagctgacctttgcgca

SEQ ID NO: 383666 - DNA, 75 bp, synthetic construct
  source 1..75: mol_type = other DNA
agagcgatcgcgcggcagaaactcagtcaacgctgacctcttccggtgcgatggcggcggtgattggcttccagt

SEQ ID NO: 383667 - DNA, 75 bp, synthetic construct
  source 1..75: mol_type = other DNA
tcgttgccgggtgctggttacggtcagtatgaacatagagtcggtgacctgattgcccgatttaaagaagctggt

SEQ ID NO: 383668 - DNA, 75 bp, synthetic construct
  source 1..75: mol_type = other DNA
tcggcggggcgacttacaccgctacggtgcaggcgaatttaagctggagcgtcgatgttccggcctcggcgctac

SEQ ID NO: 383669 - DNA, 75 bp, synthetic construct
  source 1..75: mol_type = other DNA
tgtgatattgctggcatgggtactgtggcgtctgctgcgtattattagtcgtcgtcgtcttaacccggataacga

SEQ ID NO: 383670 - DNA, 75 bp, synthetic construct
  source 1..75: mol_type = other DNA
tgcaggccacggaaagttgggtgaaaacaccgatgcgtcagacgccgttccccggcattgtgcctgatgaaaacg

SEQ ID NO: 383671 - DNA, 75 bp, synthetic construct
  source 1..75: mol_type = other DNA
gcgtaagccgtacgatgcgccgaactgggtgcgtaccgatcgtccggtcacctttggcgaactgaaaacctatga

SEQ ID NO: 383672 - DNA, 75 bp, synthetic construct
  source 1..75: mol_type = other DNA
ttggttttatcggcgcacagacgggcttcccggcgattaacctgacggtgaccgatgatggcagcaccattcagg

SEQ ID NO: 383673 - DNA, 75 bp, synthetic construct
  source 1..75: mol_type = other DNA
ctgtcacacttcccggtgccattctttgacccgcgcgataaccgcaccaacaccttgccgatggtctttgcgggt

SEQ ID NO: 383674 - DNA, 75 bp, synthetic construct
  source 1..75: mol_type = other DNA
gttaaaggtttatctcaatgatgaactgatgggcgtgctgccagtgaccaaagaacagttgggtaaaaaaacgtt

SEQ ID NO: 383675 - DNA, 75 bp, synthetic construct
  source 1..75: mol_type = other DNA
ggtaaaaagctgtgggatatagcaaaaaaaacaggtaaacctatttacatcatatctgatatgtatttacctaag

SEQ ID NO: 383676 - DNA, 75 bp, synthetic construct
  source 1..75: mol_type = other DNA
agtatgaacataaaatcggtgacctgatttccagttttaaagatgctggtggggtggtaaatgaagctgacttat

SEQ ID NO: 383677 - DNA, 75 bp, synthetic construct
  source 1..75: mol_type = other DNA
agtatgaacataaaatcggtgatctgattgcccggtttaaagaggctggtggggtggtaaatgaagttgagctat

SEQ ID NO: 383678 - DNA, 75 bp, synthetic construct
  source 1..75: mol_type = other DNA
gaaaataacctgcgaaataatcaagaaggaataaagctgagatataagattgagagagttttggtaaaaaatttt

SEQ ID NO: 383679 - DNA, 75 bp, synthetic construct
  source 1..75: mol_type = other DNA
ccttccttgctgaacgtacgcttagctcttttttacaaacacctgattttgcagatgcacagttatttatcggac

SEQ ID NO: 383680 - DNA, 75 bp, synthetic construct
  source 1..75: mol_type = other DNA
atgcactattattagtgatataatactaactcatgcaaaaaatgaaagaaaaagctatcttaattatgtcaatag

SEQ ID NO: 383681 - DNA, 75 bp, synthetic construct
  source 1..75: mol_type = other DNA
ctcagtggcattacagcagattaaagagcgtggcgctttaccgatgattgatcgcggcaatattcgtcaggcaat

SEQ ID NO: 383682 - DNA, 75 bp, synthetic construct
  source 1..75: mol_type = other DNA
agttcgagcataaggctgacaacctgattgcaaaattcaaagaagctggcggaacggtcagagagattgaggtat

SEQ ID NO: 383683 - DNA, 75 bp, synthetic construct
  source 1..75: mol_type = other DNA
aagctttcctggatatggtggcctggtcagaaggaacggataacgggcgacaaccgacacgtaatcacggttatg

SEQ ID NO: 383684 - DNA, 75 bp, synthetic construct
  source 1..75: mol_type = other DNA
aaacttgtcacgctaaaccccaaactcaaatcaacagccgccggacgttaccagcttctttcccgttggtgggat

SEQ ID NO: 383685 - DNA, 75 bp, synthetic construct
  source 1..75: mol_type = other DNA
tgccctgccggatttcagtccgttgtcacaggacaggctcgccattcagttgatccgcgaacgcggtgcactgga

SEQ ID NO: 383686 - DNA, 75 bp, synthetic construct
  source 1..75: mol_type = other DNA
tacaggaaggaagactaaagcgcagtctctgcgtgacgggaataaagccgaacagcaccggacgctgatgaatta

SEQ ID NO: 383687 - DNA, 75 bp, synthetic construct
  source 1..75: mol_type = other DNA
gtcagttgtttcgtaacatgcataataaaaacattatcctgaaagcgcgccagctgggattttccacagccattg

SEQ ID NO: 383688 - DNA, 75 bp, synthetic construct
  source 1..75: mol_type = other DNA
gctgatccgtcagcgacctataacgtcaacctgcaaaccgctgccgccggagttgatatcccgacccgcattctg

SEQ ID NO: 383689 - DNA, 75 bp, synthetic construct
  source 1..75: mol_type = other DNA
gcaatggaacgcaaaggcgttcgtctgagcgttttcaaacctatcgctcagccgcgtaccggtggcgatgcgccc

SEQ ID NO: 383690 - DNA, 75 bp, synthetic construct
  source 1..75: mol_type = other DNA
tttgccccgaagcaagcactggctcaggcgcgaaactataaattattacgcgctaaagagatccgtaacacctgc

SEQ ID NO: 383691 - DNA, 75 bp, synthetic construct
  source 1..75: mol_type = other DNA
acagaacgaaaaaggtgagctggtcaccttcagaatgcgaccggcgcagcgccagttgttccggagcatgcacaa

SEQ ID NO: 383692 - DNA, 75 bp, synthetic construct
  source 1..75: mol_type = other DNA
catacggttgcgacgttacagagctacgcgaaaaattcaatgaagcggcagaggatataaacaaagggaatgatg

SEQ ID NO: 383693 - DNA, 75 bp, synthetic construct
  source 1..75: mol_type = other DNA
tgcggagcttttcgctcatctcattgcgcaggtctgccgtatgtacaacaatgcgtttgtggggccggagcgtaa

SEQ ID NO: 383694 - DNA, 75 bp, synthetic construct
  source 1..75: mol_type = other DNA
aacactggtacatctgcaaggaaactgaacagcgtgaggaaatgaagcaggaatttccctcaacgccacaggagg

SEQ ID NO: 383695 - DNA, 75 bp, synthetic construct
  source 1..75: mol_type = other DNA
agtaacaaaaggcgtaggtattgccaaatttaccccggtatgggctggcgctcttacaccgaaggagtttgaaga

SEQ ID NO: 383696 - DNA, 75 bp, synthetic construct
  source 1..75: mol_type = other DNA
aaagtggaaggcggtagcggtgaatcctttctgaaaaacgcagcgcgtcaactggctatctcattcgacaaagag

SEQ ID NO: 383697 - DNA, 75 bp, synthetic construct
  source 1..75: mol_type = other DNA
tagaaggcactgaagacgagaaagcggaaacggaaacaccctgggaaagagaaataaagaaacaattcgataacc

SEQ ID NO: 383698 - DNA, 75 bp, synthetic construct
  source 1..75: mol_type = other DNA
cgcaaacaccatccgtccgccgctgcagctgatcaaaactgcaccgggtagctctttggtatcttctgtgttctt

SEQ ID NO: 383699 - DNA, 75 bp, synthetic construct
  source 1..75: mol_type = other DNA
ttatgacaccacgctgtttaatctgagtttgcccaataaccgtaacgacttgctgaaagaagcgctctcttatct

SEQ ID NO: 383700 - DNA, 75 bp, synthetic construct
  source 1..75: mol_type = other DNA
tatgacgctgctggtggtgggtaatgttgatgcgcgctcggttgtcgaccaaatcaacaaaacctttggcgaatt

SEQ ID NO: 383701 - DNA, 75 bp, synthetic construct
  source 1..75: mol_type = other DNA
atcaggatctgcgtcagcagttgtcgaacgatatggcgttaatactgctgcagccgaaaggcgagccggaattta

SEQ ID NO: 383702 - DNA, 75 bp, synthetic construct
  source 1..75: mol_type = other DNA
tgtgctgtatctgcgtgcgcagtgtgccatcaacatcgaatcaccaaacgacaagctgaacagcaaccttaatct

SEQ ID NO: 383703 - DNA, 75 bp, synthetic construct
  source 1..75: mol_type = other DNA
gaagcggaaaaaattaaagatttctatcagaaatggtacaccccggatgcaatgacgctgctggtggtgggaaac

SEQ ID NO: 383704 - DNA, 75 bp, synthetic construct
  source 1..75: mol_type = other DNA
agccgattcgtgaatcagccgcactgctgcgctactggcgcgcggacctggcccgtgaggcgctgttctggcatg

SEQ ID NO: 383705 - DNA, 75 bp, synthetic construct
  source 1..75: mol_type = other DNA
atcggaccgatgctgcagggtatgcgcaagccggttaacgacctgtcccgtggcgcactggttgatgatatcgtc

SEQ ID NO: 383706 - DNA, 75 bp, synthetic construct
  source 1..75: mol_type = other DNA
gcaagccggttaacgacctgtcccgtggcgcactggttgacgatatcgtctataccatcgcactgaccgcgattc

SEQ ID NO: 383707 - DNA, 75 bp, synthetic construct
  source 1..75: mol_type = other DNA
gtttacggtgactgtgcgatcaacccggatccgaccgcagaacagctggcagaaattgcgattcagtccgcagat

SEQ ID NO: 383708 - DNA, 75 bp, synthetic construct
  source 1..75: mol_type = other DNA
gatgaaagcctggcaggaggcgcgcgacagcggtgcgctaaagaacgccattaatcaacgaatggcgcgtgagcg

SEQ ID NO: 383709 - DNA, 75 bp, synthetic construct
  source 1..75: mol_type = other DNA
tggcccggatgcctccggctgggtgttccgcctgacgccgtatgtgatggtgggcgtcatgctgactatcgctac

SEQ ID NO: 383710 - DNA, 75 bp, synthetic construct
  source 1..75: mol_type = other DNA
cgtactggttatcgcgctgttcgaaaacagcatggcccgtctgcgtcttgatattactccgcgcattacctgggc

SEQ ID NO: 383711 - DNA, 75 bp, synthetic construct
  source 1..75: mol_type = other DNA
ctggtggcaggatctcaaatacagcgccagagtgccggaaagcggacttaagctgtcacgggaaaaaacagcgta

SEQ ID NO: 383712 - DNA, 75 bp, synthetic construct
  source 1..75: mol_type = other DNA
tcaaatcgtcagcgaaagccgtcgaatcaagcgagaaaaaggatgtgttggcatgattctggtcgattacctgac

SEQ ID NO: 383713 - DNA, 75 bp, synthetic construct
  source 1..75: mol_type = other DNA
gatcgcgtcgcggccttcgctcatttggtgaggtcatggaagactgggttagcgaccttgagaagcgatttgacc

SEQ ID NO: 383714 - DNA, 75 bp, synthetic construct
  source 1..75: mol_type = other DNA
gttacaacgatttactacaggccgctgcagatgacgtttgatggctctcactggcgcaccgttggtgttggtgag

SEQ ID NO: 383715 - DNA, 75 bp, synthetic construct
  source 1..75: mol_type = other DNA
caggcctgaagggggataccggagagcgggggcctaaaggggaccagggggatatggggccaaaaggcgagaaag

SEQ ID NO: 383716 - DNA, 75 bp, synthetic construct
  source 1..75: mol_type = other DNA
cgcagggacctaaaggggatacgggagctgcaggcccggcaggcgcacagggaccaaaaggtgacaaaggcgatc

SEQ ID NO: 383717 - DNA, 75 bp, synthetic construct
  source 1..75: mol_type = other DNA
gggccgggaaacattattgagacaaacagcaatggctggttcccggatacagatggcgcactcatcaccggactg

SEQ ID NO: 383718 - DNA, 75 bp, synthetic construct
  source 1..75: mol_type = other DNA
caggccggtggcgcataaagtggattttcatatccgcgtgacgccggacacaccggaaatacgggctgccatcac

SEQ ID NO: 383719 - DNA, 75 bp, synthetic construct
  source 1..75: mol_type = other DNA
tggacataccgtcactggatgggaacgggaactgtcggtgtgatgattgccagcagtgacctgattaatcccatt

SEQ ID NO: 383720 - DNA, 75 bp, synthetic construct
  source 1..75: mol_type = other DNA
agccatcagttgcttgcaccggcggacaatatcaccattacgaaaaatgaactggcggttctgggggcgatttca

SEQ ID NO: 383721 - DNA, 75 bp, synthetic construct
  source 1..75: mol_type = other DNA
atggttctcagtggcgtacagtcagcgtgggtgagtatgtgtcgtcaggagcttcggggtttgagtattttccat

SEQ ID NO: 383722 - DNA, 75 bp, synthetic construct
  source 1..75: mol_type = other DNA
caaaacccttattgacagggtatcttacaggccgcttcaggtgacatttgatggttctcagtggcgtacagtcag

SEQ ID NO: 383723 - DNA, 75 bp, synthetic construct
  source 1..75: mol_type = other DNA
gtatgaggctgccatagtccgggtcaccattggcgaatacggtgcaacggggtttattaatggcacggtctgtac

SEQ ID NO: 383724 - DNA, 75 bp, synthetic construct
  source 1..75: mol_type = other DNA
gaagccggaccacagggtccgatgggagcacgaggtgagcgtggggagactggcccccgaggtgaacctggtcct

SEQ ID NO: 383725 - DNA, 75 bp, synthetic construct
  source 1..75: mol_type = other DNA
tgttcattaaagttgcagagctggaaagtttttcccgcgcggcagatttctttgctttgcccaaaggaagtgtct

SEQ ID NO: 383726 - DNA, 75 bp, synthetic construct
  source 1..75: mol_type = other DNA
aaaaatgcaagctaaattattctaaatctcaaatagacagggcagctcaattgataaggcatggatgcagcgatg

SEQ ID NO: 383727 - DNA, 75 bp, synthetic construct
  source 1..75: mol_type = other DNA
aagaaaggcagcaatctattgaaatgatacaaaatttccgtgagctgcatctttatccattaatgctcatgaaaa

SEQ ID NO: 383728 - DNA, 75 bp, synthetic construct
  source 1..75: mol_type = other DNA
acagcagtaatgaggagtctactatttctcttgttatgccagatgcaattgaatggaacggaaagaatacgccaa

SEQ ID NO: 383729 - DNA, 75 bp, synthetic construct
  source 1..75: mol_type = other DNA
gaccctgtcgcgtatgccgcagtttggtcgccttgataccaacatctattacatgcagggctacagcggccacgg

SEQ ID NO: 383730 - DNA, 75 bp, synthetic construct
  source 1..75: mol_type = other DNA
gctcatttctctggtttacccgcaacgccgggagctttcccgccgtgtaaacctgtttatgcagtggctggccgg

SEQ ID NO: 383731 - DNA, 75 bp, synthetic construct
  source 1..75: mol_type = other DNA
cattgttaatctccgttgaaccgcttatcgacatgggtcgtacggcgctaaacgttagtggctcgatgaccgctg

SEQ ID NO: 383732 - DNA, 75 bp, synthetic construct
  source 1..75: mol_type = other DNA
cgcggtcggtaacgctgacgacggtacgtcattaatcctggtcacgccggtgaatggtctgccgtcttccggtgt

SEQ ID NO: 383733 - DNA, 75 bp, synthetic construct
  source 1..75: mol_type = other DNA
aaacgggagcaacaggccccgctggtccgcggggagcgcagggaccgaaaggggagaaaggcgaccccggtccca

SEQ ID NO: 383734 - DNA, 75 bp, synthetic construct
  source 1..75: mol_type = other DNA
aagatttttttatctttctggatgcctagttgctcatgatgaaggtgcctgtattcttgatgatgaaaccatcaa

SEQ ID NO: 383735 - DNA, 75 bp, synthetic construct
  source 1..75: mol_type = other DNA
caggaagatcaactgggcacactggggctggtcactaacgccgtcgtgttatggaacactatttatatgcaggca

SEQ ID NO: 383736 - DNA, 75 bp, synthetic construct
  source 1..75: mol_type = other DNA
tagctgagtggaaaaaataccgggtattacttatgcgcgttgacatctccaaagcaccggatatcgagtggccgg

SEQ ID NO: 383737 - DNA, 75 bp, synthetic construct
  source 1..75: mol_type = other DNA
aacgccattgagcgtgataaggcgctggcatgggtggagaaaaacatcaaagtgccattgaccgaaccccagaaa

SEQ ID NO: 383738 - DNA, 75 bp, synthetic construct
  source 1..75: mol_type = other DNA
tacaaaccacatgaaggcgtcgagcgctgttttccgtgatgcggagatccccgttttccatgagagcggattcgt

SEQ ID NO: 383739 - DNA, 75 bp, synthetic construct
  source 1..75: mol_type = other DNA
gcgcccgcatgattggcaggggctgatcagtccaacaactaatcaggatatggcaataactgaagttatcagcaa

SEQ ID NO: 383740 - DNA, 75 bp, synthetic construct
  source 1..75: mol_type = other DNA
gcccgtataacattggccccggtaagtgtttcccgtcgacgttttataaacgaattaatgcaggcgatcgccggg

SEQ ID NO: 383741 - DNA, 75 bp, synthetic construct
  source 1..75: mol_type = other DNA
cgtattcgctcaaataactgttatggtcaggtctcacggcgtgaccaggagagcgcgctggcgtgctgggacatc

SEQ ID NO: 383742 - DNA, 75 bp, synthetic construct
  source 1..75: mol_type = other DNA
gcaaccacaccacggcataccgtgatggtgcaggtatctggaccatctgccgtggtgccatcatggtggatggca

SEQ ID NO: 383743 - DNA, 75 bp, synthetic construct
  source 1..75: mol_type = other DNA
tcgccacacttgaagagcagaaagagaactgggaacgctacggcaataaacagctggagctgctggacgccaacg

SEQ ID NO: 383744 - DNA, 75 bp, synthetic construct
  source 1..75: mol_type = other DNA
cccggcgggcgcacgctgcgcgtaccgtttaccgcgatgggcgcggcgtattacagcctgcgcgatcgtctgggc

SEQ ID NO: 383745 - DNA, 75 bp, synthetic construct
  source 1..75: mol_type = other DNA
gagcgtgtgaagcgattcgctggtggattaaggacggtggcagagactgccgtatccgctcaaataattgctacg

SEQ ID NO: 383746 - DNA, 75 bp, synthetic construct
  source 1..75: mol_type = other DNA
ttactcgttcgtttacaacgtgggcgctggcaatttcagaacatcgacgcttcttcgcaaaataaaccagggcga

SEQ ID NO: 383747 - DNA, 75 bp, synthetic construct
  source 1..75: mol_type = other DNA
ctaaccaaaggccagaagaatggctgctatggtcaggttgagcgacgggaccaggaaagcgcgctggcgtgctgg

SEQ ID NO: 383748 - DNA, 75 bp, synthetic construct
  source 1..75: mol_type = other DNA
atgcctccatcattacgaaaagctgttgctactgctattggtggcggggctattgctatagcatctgtgttaatc

SEQ ID NO: 383749 - DNA, 75 bp, synthetic construct
  source 1..75: mol_type = other DNA
caggttaacgccattgaacgtgataaggcgctggcatgggtggcgaaaaacatcagagtgccactgaccgaacct

SEQ ID NO: 383750 - DNA, 75 bp, synthetic construct
  source 1..75: mol_type = other DNA
gagcgtgtgaggcgattcgctggtggattaaggacggtggcagagactgccgtattcgctcaaacaactgttacg

SEQ ID NO: 383751 - DNA, 75 bp, synthetic construct
  source 1..75: mol_type = other DNA
atgaacgtaaaaatccgatacggcctgtcggctgccgttctggcgctgattggtgcaggggcgtctgcgcctgaa

SEQ ID NO: 383752 - DNA, 75 bp, synthetic construct
  source 1..75: mol_type = other DNA
gtccctataacattggccccggtaagtgttttccatcgacgttttataagcggctgaatgctggtgatcgtaagg

SEQ ID NO: 383753 - DNA, 75 bp, synthetic construct
  source 1..75: mol_type = other DNA
gaagctgtcgaaggaagaatgcgaccaggttaacgctattgaacgtgataaggcgctggcatgggtggagcgcaa

SEQ ID NO: 383754 - DNA, 75 bp, synthetic construct
  source 1..75: mol_type = other DNA
gtgtttcccgtcgacgttttacagacgaattaatgcaggcgatcgcaggggagcgtgtgaggcgattcgctggtg

SEQ ID NO: 383755 - DNA, 75 bp, synthetic construct
  source 1..75: mol_type = other DNA
acaacgtgcaggtgaacacggcggcagtgtcgctttcggtcagcaccatcagcggcgataatattattaacgccg

SEQ ID NO: 383756 - DNA, 75 bp, synthetic construct
  source 1..75: mol_type = other DNA
ccacgttcctgcgccggacgttgaccttgacggtccgttccagatgcagatttctcagctcgattacaacagcta

SEQ ID NO: 383757 - DNA, 75 bp, synthetic construct
  source 1..75: mol_type = other DNA
acgtggcttgcgaacggcgggatggacgtggttgattttcggctttcgacggtgggcgtgacggctaacttaagc

SEQ ID NO: 383758 - DNA, 75 bp, synthetic construct
  source 1..75: mol_type = other DNA
ataaactgctcaacgccagcgacgccactggcggcaacggttcggatgtggtgaatggctttacggtaggcacat

SEQ ID NO: 383759 - DNA, 75 bp, synthetic construct
  source 1..75: mol_type = other DNA
taaaaagttcggcgggtaacggcaataacgccaatattagcaacggcacggtgacggttaacgcggcgattgatt

SEQ ID NO: 383760 - DNA, 75 bp, synthetic construct
  source 1..75: mol_type = other DNA
ctgttcggtctgcaggatcgcggtaagctgttcctcggtcacggtgcagaagtttacgaaggtcagattatcggt

SEQ ID NO: 383761 - DNA, 75 bp, synthetic construct
  source 1..75: mol_type = other DNA
tttctgacaccgtttgcgacacgcaaaacgttgaagcgctgccggcactctccgttgatgagccgaccgtttcta

SEQ ID NO: 383762 - DNA, 75 bp, synthetic construct
  source 1..75: mol_type = other DNA
ttgtcattattgaagatggcgagctggcctggtcgaaactcaataactccaacatgacggaatttgagttcttta

SEQ ID NO: 383763 - DNA, 75 bp, synthetic construct
  source 1..75: mol_type = other DNA
tgttgctgccgggttatgtgaagggaacgaaccgttgccggaaaagcgccccgtaattttagaggcgcaggatgt

SEQ ID NO: 383764 - DNA, 75 bp, synthetic construct
  source 1..75: mol_type = other DNA
agaaaacgatgatattgaatcacgcattgaaaaactggagtgctatatcgctgaattgaaaaaaagcaccccaac

SEQ ID NO: 383765 - DNA, 75 bp, synthetic construct
  source 1..75: mol_type = other DNA
gcagagtgtttcagtattcataatgataatttcagtgacctggaatgggagtgtaagggcattgccggtgacgcc

SEQ ID NO: 383766 - DNA, 75 bp, synthetic construct
  source 1..75: mol_type = other DNA
atgcccgttgactttctgaccactgagcagactgaaagctatggggcactgttgcaaatagtcggtggtgataaa

SEQ ID NO: 383767 - DNA, 75 bp, synthetic construct
  source 1..75: mol_type = other DNA
ttcttgatcgcgcggcgaatctaagctgcgcttcctggttgaaagagcatcttcagcagcctgaaaaaaaaacgc

SEQ ID NO: 383768 - DNA, 75 bp, synthetic construct
  source 1..75: mol_type = other DNA
gtggcactggaaattggtgggtatccgtcactgttgttgccaaatgtggcgattagtcttgaccgtactgaaggt

SEQ ID NO: 383769 - DNA, 75 bp, synthetic construct
  source 1..75: mol_type = other DNA
atggtatcgactggtttttcaatttcctatacgtgcacgatcacttcagcgttacacacgctttttctccagcgt

SEQ ID NO: 383770 - DNA, 75 bp, synthetic construct
  source 1..75: mol_type = other DNA
ccgtttattgtctgcgtggatacttccggctcaatgggcggctttaatgaacagtgtgcgaaagcgttctgcctg

SEQ ID NO: 383771 - DNA, 75 bp, synthetic construct
  source 1..75: mol_type = other DNA
acgctttttctccagcgttggcgcttaagtctgatcgtgcaagcgacgacgttaaatcaacagttattagaagaa

SEQ ID NO: 383772 - DNA, 75 bp, synthetic construct
  source 1..75: mol_type = other DNA
gaactggaatatgagttttatcgtcggctggtggaaaaacaattgctcacctatcgccttcacggtgagtcgtgg

SEQ ID NO: 383773 - DNA, 75 bp, synthetic construct
  source 1..75: mol_type = other DNA
gccctcgctgaaaaccggcgctgctatattatgctattttccaccgagatcgtccgttatgagctttcaggccca

SEQ ID NO: 383774 - DNA, 75 bp, synthetic construct
  source 1..75: mol_type = other DNA
gtggatacttccggctcaatgggcggctttaatgaacagtgtgcgaaagcgttctgcctggccttgatgcgcatt

SEQ ID NO: 383775 - DNA, 75 bp, synthetic construct
  source 1..75: mol_type = other DNA
tctctctgagcatccatatctatatccgccaagtgatcgagtatccggtttgcgggaaattgtggttcaccctaa

SEQ ID NO: 383776 - DNA, 75 bp, synthetic construct
  source 1..75: mol_type = other DNA
aggaagccgtttccgaaaacatcatggctggcaatgttatgagccgacgagccagttatatgtatggcaacttat

SEQ ID NO: 383777 - DNA, 75 bp, synthetic construct
  source 1..75: mol_type = other DNA
atactgccagccctgacactgtacgcgcaatgacgccggaaatgttctttgattatcttgcggtgcacattaatg

SEQ ID NO: 383778 - DNA, 75 bp, synthetic construct
  source 1..75: mol_type = other DNA
ataaaggttttattgcccctatccctcaagacgtgattaagggcgaacaagggaatgttatctgggatccacaac

SEQ ID NO: 383779 - DNA, 75 bp, synthetic construct
  source 1..75: mol_type = other DNA
actcgtgatgaaattgccgcaaacttcaaattgccctcttcacttgctaacacctgggcgaatcgcggttattac

SEQ ID NO: 383780 - DNA, 75 bp, synthetic construct
  source 1..75: mol_type = other DNA
gagagatctggaagctgatgcgcttgagcagttaggctatcaggctgaatctgggccgtggcgtaatttctatct

SEQ ID NO: 383781 - DNA, 75 bp, synthetic construct
  source 1..75: mol_type = other DNA
gcggctattacggttcggtaagtcatgacgtgaaagcaacttacgtgctttatctcggctggtttgatggtaacc

SEQ ID NO: 383782 - DNA, 75 bp, synthetic construct
  source 1..75: mol_type = other DNA
ccgcgacgcttgatgaactgccgccagaagaaggcgcaaaaaaattcgtcgagtatatgggcggtgctgatgcca

SEQ ID NO: 383783 - DNA, 75 bp, synthetic construct
  source 1..75: mol_type = other DNA
gtgagaaagcggcagatgccaaaaccgtgttgaatttcgattttggtgaagatggcggcacctataaagtggagc

SEQ ID NO: 383784 - DNA, 75 bp, synthetic construct
  source 1..75: mol_type = other DNA
ctacataatactttaccgagtaacagcatctaacatcgagatcgtaaatgtagttcactcacgaaggcagtatcc

SEQ ID NO: 383785 - DNA, 75 bp, synthetic construct
  source 1..75: mol_type = other DNA
tgggcgctggcaatttcagaacatcgacgcttcttcgcaaaataaaccagggcgatatcaaaggcgcatgtgacc

SEQ ID NO: 383786 - DNA, 75 bp, synthetic construct
  source 1..75: mol_type = other DNA
ggcgatatcaaaagcgcatgtgatcagctgaaccgccccgggaatcctggagagtgttttatctgtgaactcagg

SEQ ID NO: 383787 - DNA, 75 bp, synthetic construct
  source 1..75: mol_type = other DNA
atttcctgcgatgtttgcgtggtcggcggcggctataccgggctttcctccgcgctgcatctggcggaagcgggc

SEQ ID NO: 383788 - DNA, 75 bp, synthetic construct
  source 1..75: mol_type = other DNA
atgatgatgaccgttcagcaaacagaccctttttctggcttgcttcttttcgtcgtttccaggtatagttttccc

SEQ ID NO: 383789 - DNA, 75 bp, synthetic construct
  source 1..75: mol_type = other DNA
atgatgcctgaacgcattaacccccttttttctggcttgcatcctgcagtcatttccaggtatagttttcccgct

SEQ ID NO: 383790 - DNA, 75 bp, synthetic construct
  source 1..75: mol_type = other DNA
cattttccgggctgtggtgtttatgtgtacaccgtggttcattcaagataatggcagtccgggcggggcagcctt

SEQ ID NO: 383791 - DNA, 75 bp, synthetic construct
  source 1..75: mol_type = other DNA
gctctgccattgttgttggtgatttgcttgcccatatggaagaaatgacgggagaaagcggggtagacgcatttg

SEQ ID NO: 383792 - DNA, 75 bp, synthetic construct
  source 1..75: mol_type = other DNA
gtcgtcgcgaggcggcacttctggctggtctggagcgtgtgcctgtcatcgttcgcgacgatctgagcgaagaag

SEQ ID NO: 383793 - DNA, 75 bp, synthetic construct
  source 1..75: mol_type = other DNA
atcgcgacccggcagatcttattccctatgagatgaatgccaaaaagcatgatgaacagcagatcagagatctgg

SEQ ID NO: 383794 - DNA, 75 bp, synthetic construct
  source 1..75: mol_type = other DNA
tccctttttctggcttgcctttttccggtatttgcggatatagtttttccgctgccgcaaaatcggcagccgggc

SEQ ID NO: 383795 - DNA, 75 bp, synthetic construct
  source 1..75: mol_type = other DNA
ctgaactatccgcgaaatatgcctggttttttgatctcgatggaacgctggcggaaatcaaaccgcatcccgatc

SEQ ID NO: 383796 - DNA, 75 bp, synthetic construct
  source 1..75: mol_type = other DNA
gggatggcgtttgcactgcattatcgtcaggcaccgcagcatgaagacgccttattgacgttagcgcaacgtatt

SEQ ID NO: 383797 - DNA, 75 bp, synthetic construct
  source 1..75: mol_type = other DNA
ttttgtgtcgttgcttcggcacacctgtttttctggctgtggtttttaaaccgtagcctctgtcagataatggtg

SEQ ID NO: 383798 - DNA, 75 bp, synthetic construct
  source 1..75: mol_type = other DNA
ttttgtgtcgcaatcaacgccacagagcgccagattatggtgtggtgtgtggtcagtcgagcagatggaactccg

SEQ ID NO: 383799 - DNA, 75 bp, synthetic construct
  source 1..75: mol_type = other DNA
acgcattgccggacgcaaacgggggtacgacgcatgatgatgcccgctctgcaaaaactccctttttctggcttg

SEQ ID NO: 383800 - DNA, 75 bp, synthetic construct
  source 1..75: mol_type = other DNA
cgtttacgttacgttgaaagcgatcatgtcgtttttgacccgattacaggccgggaggttccggcagaacggacg

SEQ ID NO: 383801 - DNA, 75 bp, synthetic construct
  source 1..75: mol_type = other DNA
ggtaaaacctttagcgacgatgtagaaatgatgcttgaagccaaccgcattggtggccgtcacggtctgggcatg

SEQ ID NO: 383802 - DNA, 75 bp, synthetic construct
  source 1..75: mol_type = other DNA
gtctctgacaacctgacttacaaaccagaacgtctgacgatggaaaaaggtgactcggtgttctcgccagatgat

SEQ ID NO: 383803 - DNA, 75 bp, synthetic construct
  source 1..75: mol_type = other DNA
caccgactccaacatgcttggtgccacgcacgaagcgaaagatctggaatatctcaattccagcgtcaaaatcgt

SEQ ID NO: 383804 - DNA, 75 bp, synthetic construct
  source 1..75: mol_type = other DNA
gcacgtctgaaatactggccgccacaccgaaagcggtcaaggatgcatacgatctggcaaacggaaaacaaccgg

SEQ ID NO: 383805 - DNA, 75 bp, synthetic construct
  source 1..75: mol_type = other DNA
aaccggcagatgccacgctcactgctctggcaggacttgccactgcagcagatcggttgccttattttaccggag

SEQ ID NO: 383806 - DNA, 75 bp, synthetic construct
  source 1..75: mol_type = other DNA
ctgcagatttacaaaccgtggctcgatactgactttatcgatgaactgggcggtcgtcatgaaatgtctgaattt

SEQ ID NO: 383807 - DNA, 75 bp, synthetic construct
  source 1..75: mol_type = other DNA
cagttgggccgtctgctgtaccagggacgttggtttgactcccaggcgctgatgctgcgtgactctctgcaacgc

SEQ ID NO: 383808 - DNA, 75 bp, synthetic construct
  source 1..75: mol_type = other DNA
tcatggtatttctttggtcactgtactgaagttaccgccttgccgggtgcgccagcacaatgggccgcgatattt

SEQ ID NO: 383809 - DNA, 75 bp, synthetic construct
  source 1..75: mol_type = other DNA
aacccactccatcaggcgctaacgcgaggtgcgctctcgcctgaaaaagaggtttattatgaacgatatcgcgca

SEQ ID NO: 383810 - DNA, 75 bp, synthetic construct
  source 1..75: mol_type = other DNA
cggtaggtcaacgtattggcatcgctttttctggcggtctggacaccagtgccgcactgctgtggatgcgacaaa

SEQ ID NO: 383811 - DNA, 75 bp, synthetic construct
  source 1..75: mol_type = other DNA
aacacgacgccgctgggccgcgccgtgaccggcaccatgctggttgctgctatgaaagaagatggcgtgaatatc

SEQ ID NO: 383812 - DNA, 75 bp, synthetic construct
  source 1..75: mol_type = other DNA
aacacgacgccgctgggccgcgccgtgactggtaccatgctggttgctgctatgaaagaagatggcgtgaatatc

SEQ ID NO: 383813 - DNA, 75 bp, synthetic construct
  source 1..75: mol_type = other DNA
agtcaatggtagctcaggcggggcagcctccgggctggccggtattcttcgaggccggtattctcacccccgtct

SEQ ID NO: 383814 - DNA, 75 bp, synthetic construct
  source 1..75: mol_type = other DNA
ttcgtacccgagagttttacttgcgtgatttttggtgacaatagctgggaaagtgatgacggtgactatatggct

SEQ ID NO: 383815 - DNA, 75 bp, synthetic construct
  source 1..75: mol_type = other DNA
caacaacttgttatccgtcaatcgtgaattaccgcctgttccggctaaatacgacaatatattcccttactatgc

SEQ ID NO: 383816 - DNA, 75 bp, synthetic construct
  source 1..75: mol_type = other DNA
gatcaattttgtgcggcagcttttaattttctacgcaatgctgatatgactcaaaacgatgtgaaagatacagag

SEQ ID NO: 383817 - DNA, 75 bp, synthetic construct
  source 1..75: mol_type = other DNA
tcggctattttaaacgaactatataaattagctgatgaggaaggtatatctaaaactggattatctaaatcagca

SEQ ID NO: 383818 - DNA, 75 bp, synthetic construct
  source 1..75: mol_type = other DNA
ctcgttgatatcaaaaatgagagagaagataaaaagcgtagcgaggctattcgcgccttagattcatggatgcga

SEQ ID NO: 383819 - DNA, 75 bp, synthetic construct
  source 1..75: mol_type = other DNA
gcacaattttgcggcaaaaccgtttcgatcctaaaacaaaaaacagcgattatgatatctatgtcaccgcaaaaa

SEQ ID NO: 383820 - DNA, 75 bp, synthetic construct
  source 1..75: mol_type = other DNA
cctggtaccggaaaagcgtcaggaagtcacgaccgaaggcggcctggacgttgcagggcagcgtgacaaaatgcg

SEQ ID NO: 383821 - DNA, 75 bp, synthetic construct
  source 1..75: mol_type = other DNA
gccgggattcaggtttctctgtttatcgacgctgacgaagagcagatcaaagctgcagcagaggtgggggcacca

SEQ ID NO: 383822 - DNA, 75 bp, synthetic construct
  source 1..75: mol_type = other DNA
acaaaccggaagtacggcgcaaattcatctggtatcgattggtgatgggcaatccgctgaactaaaaagcatgtt

SEQ ID NO: 383823 - DNA, 75 bp, synthetic construct
  source 1..75: mol_type = other DNA
ttccagctcctccagtgacagcagctgttttcttaccaccgcaacctgtcgcgtaatgggttatgaggacgattg

SEQ ID NO: 383824 - DNA, 75 bp, synthetic construct
  source 1..75: mol_type = other DNA
ccgaagcgcatccacgtttccgtgatggctatgcgataggcaccgggcgctggcgcgcgttgccgtttgctatca

SEQ ID NO: 383825 - DNA, 75 bp, synthetic construct
  source 1..75: mol_type = other DNA
tgcatgagctggatgaagtgggcgttgtcggcttcaaatgcttcgtcgcaacctgtggcgatcgcggtatcgaca

SEQ ID NO: 383826 - DNA, 75 bp, synthetic construct
  source 1..75: mol_type = other DNA
cgctgaccactcacggtgatgacagtaccagcgccggggtatttgcaggcgacgccggactcagttcactggcga

SEQ ID NO: 383827 - DNA, 75 bp, synthetic construct
  source 1..75: mol_type = other DNA
aacagcagcaatacgtttgatgatgtgatccccggcgtcaccatgactttcaccgaagtcagcgattctgacagc

SEQ ID NO: 383828 - DNA, 75 bp, synthetic construct
  source 1..75: mol_type = other DNA
gttgacgcgctgaacagcgataccgacggcccggtgacgtttgccgccaccagcaataatgactcggcgaccgtt

SEQ ID NO: 383829 - DNA, 75 bp, synthetic construct
  source 1..75: mol_type = other DNA
ggaatatatatgtggaagatattggatcatagtaataccattgtctgcttatacaatttacgaaatttatagagt

SEQ ID NO: 383830 - DNA, 75 bp, synthetic construct
  source 1..75: mol_type = other DNA
atgatagttaagtttcatgcccggggaaaaggtggtggcagtggtccggttgattacctgctgggaagggagcgt

SEQ ID NO: 383831 - DNA, 75 bp, synthetic construct
  source 1..75: mol_type = other DNA
aagattccagcgccagccaggagaaagtgcagacctttgtcgatgcctataacaccctgatcgatacggttgatt

SEQ ID NO: 383832 - DNA, 75 bp, synthetic construct
  source 1..75: mol_type = other DNA
ggagcttggacctttaagctcgctggcgcatctcgaacgcgtcagcaaggcggtagaagaggcgaaagcgacagg

SEQ ID NO: 383833 - DNA, 75 bp, synthetic construct
  source 1..75: mol_type = other DNA
gggggcgtctggactgcctgctcaataacgcgggcatttcagtgaaaaagcgcggtgaccttctcgacctcgaac

SEQ ID NO: 383834 - DNA, 75 bp, synthetic construct
  source 1..75: mol_type = other DNA
ctcatcaaaactgatatgactattccggcaacggcttattacgacgaactgattgccaaaggtctggtgccgtga

SEQ ID NO: 383835 - DNA, 75 bp, synthetic construct
  source 1..75: mol_type = other DNA
tcaatgatgaaatcccggcgattgtcgatgtttttcgctttttcgcgggtgcggcgcgctgtctgaatggtctgg

SEQ ID NO: 383836 - DNA, 75 bp, synthetic construct
  source 1..75: mol_type = other DNA
cgcgttacaggaagatgccatcgttcaaagagaggtatttggtccggtcgtgaccatcactgtattcgataacga

SEQ ID NO: 383837 - DNA, 75 bp, synthetic construct
  source 1..75: mol_type = other DNA
ggcgaatgacagccagtacggacttgcatcttcggtatggacgaaagatgtgggcagggcgcatcgcgtcagcgc

SEQ ID NO: 383838 - DNA, 75 bp, synthetic construct
  source 1..75: mol_type = other DNA
actgctggacaatctcacctcggcgctgaacaaagtttatcagcgtaaaggggttaatatttccctcgatatctc

SEQ ID NO: 383839 - DNA, 75 bp, synthetic construct
  source 1..75: mol_type = other DNA
ataacattagccaatatgtactggattcctgttataagagcggagaaaagcaccccataactatatgtagtgcag

SEQ ID NO: 383840 - DNA, 75 bp, synthetic construct
  source 1..75: mol_type = other DNA
atgtacaacgcacatacccgcatcatccccattgtcagcgcttttgcaccggaggagaaatggtcattccagatg

SEQ ID NO: 383841 - DNA, 75 bp, synthetic construct
  source 1..75: mol_type = other DNA
tctgttggacaatctcacctcggcgctgaacaaagtgtatcaacgcaaaggggtcaatatctctctcgatatttc

SEQ ID NO: 383842 - DNA, 75 bp, synthetic construct
  source 1..75: mol_type = other DNA
ctgaacaaagtgtatcaacgcaaaggggtcaatatctctctcgatatttcgccagagatcagctttgttggtgag

SEQ ID NO: 383843 - DNA, 75 bp, synthetic construct
  source 1..75: mol_type = other DNA
gaaattaccgagcaatacgacggaaaaatcatcgccggagagagtatgctcggcggtgcacgaatggaagtgatt

SEQ ID NO: 383844 - DNA, 75 bp, synthetic construct
  source 1..75: mol_type = other DNA
catgtgttatccggtcagaatctggccacggcaatgcgaaattccggttacgattttccgtccagagtatgggta

SEQ ID NO: 383845 - DNA, 75 bp, synthetic construct
  source 1..75: mol_type = other DNA
aatgccggacgggacaacattcagcgatcctgtcatggcaatgtcagacaatggtatgcaggctactattctgac

SEQ ID NO: 383846 - DNA, 75 bp, synthetic construct
  source 1..75: mol_type = other DNA
aatatcctgttctggcccgagtctacccgaccctccgcctgcctgatttgcgcggtgagtttatccgtggatggg

SEQ ID NO: 383847 - DNA, 75 bp, synthetic construct
  source 1..75: mol_type = other DNA
gtactgaactggatctgtctgccctgaacagctggacagccagaaaaaccttcggtcttaagcgtgctgagttct

SEQ ID NO: 383848 - DNA, 75 bp, synthetic construct
  source 1..75: mol_type = other DNA
gacactctgtgtggtgaatatgtataacgttcatacccgggttattccgatgatcagcgcctttgcaccggaaga

SEQ ID NO: 383849 - DNA, 75 bp, synthetic construct
  source 1..75: mol_type = other DNA
aataagtgctatcagaaaaaatgtcttatccggtcagtcactggcactggccatgaaaaactgtggttatgactt

SEQ ID NO: 383850 - DNA, 75 bp, synthetic construct
  source 1..75: mol_type = other DNA
cctgatggaggggttgcagtcacatacattgataatgggagtcaacctgttttcgttatgagaccgactaacaat

SEQ ID NO: 383851 - DNA, 75 bp, synthetic construct
  source 1..75: mol_type = other DNA
cttcaggcgaacagcgcggtatgagtaccggtatcccgtcactcgaccggctgctggcgccgaaaggtctggtta

SEQ ID NO: 383852 - DNA, 75 bp, synthetic construct
  source 1..75: mol_type = other DNA
cccatgtggaaagttaatgttcctctgaaaaataagagcacttcaaatcacgaactctgcgagcgatggatgctt

SEQ ID NO: 383853 - DNA, 75 bp, synthetic construct
  source 1..75: mol_type = other DNA
tcaccaaagggttgaagaacctcgccaaagagcttggctgcgtcgtcgtgctgctgacccagctcaaccgcgaac

SEQ ID NO: 383854 - DNA, 75 bp, synthetic construct
  source 1..75: mol_type = other DNA
cgatcacttgctcaagtgcaggcgcggtcggtaacgctgacgacggtacggcattaatcctggtcacgccggtga

SEQ ID NO: 383855 - DNA, 75 bp, synthetic construct
  source 1..75: mol_type = other DNA
aaatattttttaccttccggcgacaaatgacgctgatgacggctatcagggtgattacgatggtgacttcaacag

SEQ ID NO: 383856 - DNA, 75 bp, synthetic construct
  source 1..75: mol_type = other DNA
caaagagcttggctgcgtcgtcgtgctgctgactcagctcaaccgcgaactggagaagcgagtgaataaacgccc

SEQ ID NO: 383857 - DNA, 75 bp, synthetic construct
  source 1..75: mol_type = other DNA
tgttttcgttatgcgcccaactaacaacgacgggcagactgctatctatacgcttagtttgtgttctgaggctta

SEQ ID NO: 383858 - DNA, 75 bp, synthetic construct
  source 1..75: mol_type = other DNA
atgaaaagattgattctcacggcgctgatcattctccccttcgcctcaagtgcaaccacattcacctgtaaggcc

SEQ ID NO: 383859 - DNA, 75 bp, synthetic construct
  source 1..75: mol_type = other DNA
atgaaaagattgattctcgcggcgctgatcgctctccccttcgtctcaagtgcaaccacattcacctgtaaggcg

SEQ ID NO: 383860 - DNA, 75 bp, synthetic construct
  source 1..75: mol_type = other DNA
gggcagcgggaatgctggtgacatctgcagacgcgtttgccgattatcagaaaaacgaggcctggacgtgggagc

SEQ ID NO: 383861 - DNA, 75 bp, synthetic construct
  source 1..75: mol_type = other DNA
cagtggcgtgagctgtggcaggatgcgttgcaggaagatgacactacgccagtgctggcgcatcttagcgaagat

SEQ ID NO: 383862 - DNA, 75 bp, synthetic construct
  source 1..75: mol_type = other DNA
attgaatttatcgtccaggtgttccagctcattcgcggcgggcgcgaaccgtcgctgcaatcgcgctctttactg

SEQ ID NO: 383863 - DNA, 75 bp, synthetic construct
  source 1..75: mol_type = other DNA
tctacacaatacggatttggtgacgctttaacctctaatcaactgggggtcttaaatggcaaaaagtggatattt

SEQ ID NO: 383864 - DNA, 75 bp, synthetic construct
  source 1..75: mol_type = other DNA
tgcgcatccaggatgcgaccatgacgcatgacgatctgcattttgtcgatagtctggtgttcgatctgcaaagta

SEQ ID NO: 383865 - DNA, 75 bp, synthetic construct
  source 1..75: mol_type = other DNA
cggcgatcatcgaagagcagcttgctgtatataaaaccagacaagtaccgctggatcttggtctggtggtacgcg

SEQ ID NO: 383866 - DNA, 75 bp, synthetic construct
  source 1..75: mol_type = other DNA
aaacaagagaaaaagcgtttgctgcttttacgatggggccactgactgacttctggcgtcagcgggacgaagcag

SEQ ID NO: 383867 - DNA, 75 bp, synthetic construct
  source 1..75: mol_type = other DNA
ttgagcaaaccagcgaaaccatcggcgtgcgcgccaacaacgcgatcaacgacatggtgcgtcaacgtctgctga

SEQ ID NO: 383868 - DNA, 75 bp, synthetic construct
  source 1..75: mol_type = other DNA
taccgtctgacgccgctcggcatcggcattactgactattacatccgtcagcgcgagttttctacgctgcgcctt

SEQ ID NO: 383869 - DNA, 75 bp, synthetic construct
  source 1..75: mol_type = other DNA
tacgcattcaggatgcgacgatgacccatgacgatctgcattttgtcgatcgtctggtgttcgatctgcagagca

SEQ ID NO: 383870 - DNA, 75 bp, synthetic construct
  source 1..75: mol_type = other DNA
gtcagccacactcacccgtggagtcagataacgggagtgcctgctgcctcgctgacggcaaaaggcaccgtacaa

SEQ ID NO: 383871 - DNA, 75 bp, synthetic construct
  source 1..75: mol_type = other DNA
gctggttaaagtgcgacgggcgcgcctttacaaaagaacaatatcctgttctggccagagcctacccgaccctcc

SEQ ID NO: 383872 - DNA, 75 bp, synthetic construct
  source 1..75: mol_type = other DNA
atcccgttcactaatcccgaaaaactactgtgtcgaagactgtaactatctgcttgattactaccgcctgactgc

SEQ ID NO: 383873 - DNA, 75 bp, synthetic construct
  source 1..75: mol_type = other DNA
acttctttaagcgaagattactggcagcgccactatgttggcgctcgccgggtaatgacccccaagacacttcgc

SEQ ID NO: 383874 - DNA, 75 bp, synthetic construct
  source 1..75: mol_type = other DNA
caaaactcgcagcaaacacgttgtcaataaaacggcgtcagccagctttacggaaaagtgcaccaaacgtaaggg

SEQ ID NO: 383875 - DNA, 75 bp, synthetic construct
  source 1..75: mol_type = other DNA
ggtagatttaccagtcaatacagaacggaatcctcaggggggaatgaagcccgcccacgcaatattgccttcaat

SEQ ID NO: 383876 - DNA, 75 bp, synthetic construct
  source 1..75: mol_type = other DNA
ccatgacgacctgcattttgtcgatcgtctggtgttcgatctgcaaagtaagctcgaccgaattatcagctgggg

SEQ ID NO: 383877 - DNA, 75 bp, synthetic construct
  source 1..75: mol_type = other DNA
ccggaaatcagccaggattttcacgatttaatttcaccagtaactctttgggtgatggtgtgaattttgttgctg

SEQ ID NO: 383878 - DNA, 75 bp, synthetic construct
  source 1..75: mol_type = other DNA
acgagcagtcacgacgtcacccggacgcctcgctgaccgcaaaaggctttgttcaacttagcagcaccaccaaca

SEQ ID NO: 383879 - DNA, 75 bp, synthetic construct
  source 1..75: mol_type = other DNA
agtttattcgtggctgggatgatgggcgcggagctgacagtggtcgtggattattaagctttcaaaaagccactc

SEQ ID NO: 383880 - DNA, 75 bp, synthetic construct
  source 1..75: mol_type = other DNA
cactcacccgtggagtcagataacgggagtgcctgcggcttcactgacggcaaaaggcaccgtacaactgagcag

SEQ ID NO: 383881 - DNA, 75 bp, synthetic construct
  source 1..75: mol_type = other DNA
gaccctccgtcttcccgatttacgcggtgagtttatccgtggatgggacgacgggcgcaaagttgatacaggacg

SEQ ID NO: 383882 - DNA, 75 bp, synthetic construct
  source 1..75: mol_type = other DNA
atttaatttcaccagtaactctttgggtgatggtgtgaattttgttgctgtcagaccgcgaaatattgcatttaa

SEQ ID NO: 383883 - DNA, 75 bp, synthetic construct
  source 1..75: mol_type = other DNA
attctctgtttgccggtaacggtcgcgccttagcattaggtcaggaaggtgggcgttgcacgttatacagcgata

SEQ ID NO: 383884 - DNA, 75 bp, synthetic construct
  source 1..75: mol_type = other DNA
gagctgatcaatgaaattgcgctggcgatgacttttagcgcctctggcgaggatattgtctgtgcgatccatgcg

SEQ ID NO: 383885 - DNA, 75 bp, synthetic construct
  source 1..75: mol_type = other DNA
aacaatacacagattgccaccacggcttttgtgaaatcagcaattgcgacaatggtgggttctgcacctgcggca

SEQ ID NO: 383886 - DNA, 75 bp, synthetic construct
  source 1..75: mol_type = other DNA
caagtgttggacgtgccattcttagtaaaaccagcactcagggagttcttgattaccttggtttgggagaagcgg

SEQ ID NO: 383887 - DNA, 75 bp, synthetic construct
  source 1..75: mol_type = other DNA
tggaaaaacaccgccatattgttgttgccaatgatggttacgacacaaaagatgaatgggaactggctacgattt

SEQ ID NO: 383888 - DNA, 75 bp, synthetic construct
  source 1..75: mol_type = other DNA
agtttatccgtggctgggatgatgggcgcggggtggatgccggaaggggcatcttaagcatgcaggggtggttaa

SEQ ID NO: 383889 - DNA, 75 bp, synthetic construct
  source 1..75: mol_type = other DNA
ccggtgattaagcaccgacagtatgtgataacaacagagcaggggcgacctgttttcttcatgagctgggcctgg

SEQ ID NO: 383890 - DNA, 75 bp, synthetic construct
  source 1..75: mol_type = other DNA
tggcggatctcgacacctgtgaacgtgcaattcaccgggtacagaaaaaagccaaaggtggcgataaagacgcga

SEQ ID NO: 383891 - DNA, 75 bp, synthetic construct
  source 1..75: mol_type = other DNA
cgttgtgccaatgcccgatccgcgtctggatcaactggctgaaatcgtaaaaccgcagcgtacgcttcccacgac

SEQ ID NO: 383892 - DNA, 75 bp, synthetic construct
  source 1..75: mol_type = other DNA
cctgtttgaatcgctgtgcatcgataatctgcaacgtcatggagccagcaaaaaagccattgcccgtgcatttga

SEQ ID NO: 383893 - DNA, 75 bp, synthetic construct
  source 1..75: mol_type = other DNA
agaaaatgctgaggtggtattaacaataaacaacgctccattactggtctttagtaactatggtgatgctgccaa

SEQ ID NO: 383894 - DNA, 75 bp, synthetic construct
  source 1..75: mol_type = other DNA
agcctgctttatgagtgaccaccgcactggggtacacagcagtttatgtcctggccgttctataccgcgttgtgg

SEQ ID NO: 383895 - DNA, 75 bp, synthetic construct
  source 1..75: mol_type = other DNA
acctggaaaaaggtctgcctcagcacctgtttgaatcgctctgcatcgaccatttgcaacgccacggtgccaata

SEQ ID NO: 383896 - DNA, 75 bp, synthetic construct
  source 1..75: mol_type = other DNA
aaacccacctgtgcgccgctttatatggccagcaaacccggattcacgcatctgcctatttgttccggtaatcag

SEQ ID NO: 383897 - DNA, 75 bp, synthetic construct
  source 1..75: mol_type = other DNA
taccacactaaataacatgggggttgcaccacatgttgttgaacagcttctcggtcacacattaggtggtgtaat

SEQ ID NO: 383898 - DNA, 75 bp, synthetic construct
  source 1..75: mol_type = other DNA
catggctggctgaggggaaaaatccgcgctatgaacttaatcatgctgtacaggacgcgttagcccccgtgacgg

SEQ ID NO: 383899 - DNA, 75 bp, synthetic construct
  source 1..75: mol_type = other DNA
gccgcaggcggcgctacgcgtttagcaacgccctggacgatttgatcgttactgatgtgggtaagagagcagaaa

SEQ ID NO: 383900 - DNA, 75 bp, synthetic construct
  source 1..75: mol_type = other DNA
acgcgctgatggcgtcgcgttcagcatcgagcagggtgcggcgaacaatatcctgctggcaaatggcggcgtgtt

SEQ ID NO: 383901 - DNA, 75 bp, synthetic construct
  source 1..75: mol_type = other DNA
cgttgatcttgggacctatgagtatgtcctgaaaagcgatggcaacagcaactggaacctgaccaataatgtcaa

SEQ ID NO: 383902 - DNA, 75 bp, synthetic construct
  source 1..75: mol_type = other DNA
agagaaagacggcaccatcaccggtctgcagcagcagttgggtgagctgaccgaaaagctgaccgcgctggaggc

SEQ ID NO: 383903 - DNA, 75 bp, synthetic construct
  source 1..75: mol_type = other DNA
accggccaggatcgctatcgtctgctgttaactaacccattgggcagcaccgagctggagctgaatgctcaaccg

SEQ ID NO: 383904 - DNA, 75 bp, synthetic construct
  source 1..75: mol_type = other DNA
aaaaattgagaaatgaatatataagtgttcaaaaaaaagataagcaagtgaaaatcataggtgttcaattagttt

SEQ ID NO: 383905 - DNA, 75 bp, synthetic construct
  source 1..75: mol_type = other DNA
ccggtgattaagcaccgacagtatgtggtggcaacagagctggggcgaccgattttcttcatgagttatgcatgg

SEQ ID NO: 383906 - DNA, 75 bp, synthetic construct
  source 1..75: mol_type = other DNA
tatggctggcagaaggaaaaaatccacgccatgagcttaattactccatacaggaagcactaaagccggtaacgg

SEQ ID NO: 383907 - DNA, 75 bp, synthetic construct
  source 1..75: mol_type = other DNA
gtctgcggcagtggatcctgggtttaccaggcgatgcgaccgactacaaactggacgatcaatatcgtctgagtg

SEQ ID NO: 383908 - DNA, 75 bp, synthetic construct
  source 1..75: mol_type = other DNA
tgctgactaacccattgggcagcaccgaactggagctgaatgctcagccgggtaacgtgcagttagtcgacaata

SEQ ID NO: 383909 - DNA, 75 bp, synthetic construct
  source 1..75: mol_type = other DNA
tccagaacttccgctctattcgtttactgacctggcagccttcgccagggcttaactgcctcatcggtcctgggg

SEQ ID NO: 383910 - DNA, 75 bp, synthetic construct
  source 1..75: mol_type = other DNA
cttggtagtacaggatatggtaaatcaaatttcaatgctttgttaacgaggaaggtttctgaaaaataccctaac

SEQ ID NO: 383911 - DNA, 75 bp, synthetic construct
  source 1..75: mol_type = other DNA
ggaacacctggatgatccgactattgctgagctggacaagctgattgaacgggatgacacgctttcccgacttgc

SEQ ID NO: 383912 - DNA, 75 bp, synthetic construct
  source 1..75: mol_type = other DNA
gatctggcgccgctctttatgctggcctcgctgttgattatcaccctccagctccctctcgcccgcttcgcccgg

SEQ ID NO: 383913 - DNA, 75 bp, synthetic construct
  source 1..75: mol_type = other DNA
caattgttgatataaaaaacaacaagttagttgctgttgaagtactaagtcgcttttatacacaaagcggcgagc

SEQ ID NO: 383914 - DNA, 75 bp, synthetic construct
  source 1..75: mol_type = other DNA
agataagtctttcccaactgttttacttcttgaagaagcacatcattatttgagagatccttactctgagattga

SEQ ID NO: 383915 - DNA, 75 bp, synthetic construct
  source 1..75: mol_type = other DNA
tttattagacgagatatagatggatgtgtgtttgtttcggaagactggaggttacctgctctgggagcatccgct

SEQ ID NO: 383916 - DNA, 75 bp, synthetic construct
  source 1..75: mol_type = other DNA
aacgcactgtcaagggagcgttactgactaacctgctgtttgttttagggatattcctaagccagtgggcagcat

SEQ ID NO: 383917 - DNA, 75 bp, synthetic construct
  source 1..75: mol_type = other DNA
caactggtggctgatggcatgaatccagagaaagcggcaaatatgattggcctgctgggtaaaacagccaccgcc

SEQ ID NO: 383918 - DNA, 75 bp, synthetic construct
  source 1..75: mol_type = other DNA
ttcgcggaattatgagcgccgggcgtgccgttctctggattggccgggcgctgctgatgaatcccatcggtctcg

SEQ ID NO: 383919 - DNA, 75 bp, synthetic construct
  source 1..75: mol_type = other DNA
agtggcggttaacgaattcgaatttatgaacgttaaccaacaaggccagcagcaaggccagcagcagaaagcgcc

SEQ ID NO: 383920 - DNA, 75 bp, synthetic construct
  source 1..75: mol_type = other DNA
ggcaacggcagtactgaacattaataacctgcgtgatatcaatagcgaccgcgaaaatggcaaaaacacgctggt

SEQ ID NO: 383921 - DNA, 75 bp, synthetic construct
  source 1..75: mol_type = other DNA
tatttccgtactggttttctttggctggttaagcgtcatggggagctggtatttacaggctcatacattgattcc

SEQ ID NO: 383922 - DNA, 75 bp, synthetic construct
  source 1..75: mol_type = other DNA
ccgacatgctcggagatattgcagcagaagctaaacgttatgctggaatcgctgacgaacgctacaccgccggga

SEQ ID NO: 383923 - DNA, 75 bp, synthetic construct
  source 1..75: mol_type = other DNA
gtggtggctgttaaagctgaagagtatgacgatgagtttctgtcattagacttgaatgtcaaaatcgtcagcgat

SEQ ID NO: 383924 - DNA, 75 bp, synthetic construct
  source 1..75: mol_type = other DNA
gccgcgaacagtcgacgataccggtgatcacgggcggtattggcgtctgccatatttacgttgatgaaagtgcag

SEQ ID NO: 383925 - DNA, 75 bp, synthetic construct
  source 1..75: mol_type = other DNA
cctggctggaacgcttaaatgatgcttcatacagtctttataaaaagaatgaaacaggatttattgtctgttcat

SEQ ID NO: 383926 - DNA, 75 bp, synthetic construct
  source 1..75: mol_type = other DNA
gatgatattcaaagtacggtccgggtcgaccccgaagcctttctggcgcgtagcgtgatcgtctgtgaaggggcg

SEQ ID NO: 383927 - DNA, 75 bp, synthetic construct
  source 1..75: mol_type = other DNA
tcaccgatgatggtaaacatatcattcaggggccaatgtatgacgttagcggcacggctccggtcaatgtcacca

SEQ ID NO: 383928 - DNA, 75 bp, synthetic construct
  source 1..75: mol_type = other DNA
gtaatctcgccgatccggtggggcaggtgattgatggtggtgtgctggatagcggtttgcgtctggagcgtcgtc

SEQ ID NO: 383929 - DNA, 75 bp, synthetic construct
  source 1..75: mol_type = other DNA
actaacgctgcaacggtagcggtgattcaggacgccctgaaatcctgcggcttaccggcgggtgccgtgcaggca

SEQ ID NO: 383930 - DNA, 75 bp, synthetic construct
  source 1..75: mol_type = other DNA
gcaatctcgccgatccggtggggcaggtaatcgatggcggcgtactggacagcggcctgcgtcttgagcgtcgtc

SEQ ID NO: 383931 - DNA, 75 bp, synthetic construct
  source 1..75: mol_type = other DNA
ctcgccgacatgctcggaagtattgcagaagaagctcagcgatatgctggaatcgctgacgaacgctaccgcgcc

SEQ ID NO: 383932 - DNA, 75 bp, synthetic construct
  source 1..75: mol_type = other DNA
atcaaccatgatattgccaatgtcaccgaacaatgtcggcaggccgtgctggcgatacgacaaaacagaatatgt

SEQ ID NO: 383933 - DNA, 75 bp, synthetic construct
  source 1..75: mol_type = other DNA
atgcaatccattaacttccgtaccgcacgcggcaaccttagcgaagtgctcaataatgttgaagcaggggaagag

SEQ ID NO: 383934 - DNA, 75 bp, synthetic construct
  source 1..75: mol_type = other DNA
taaccagctgcgcaccgaagcaacaaaacttaccgtccgcttggacgctgcaaagcacacctcaggtcttgccgt

SEQ ID NO: 383935 - DNA, 75 bp, synthetic construct
  source 1..75: mol_type = other DNA
gcctttccgacaaaattttcagtggtggaacgccgaataccagtacagaagaatattggaatggtgcgttaaact

SEQ ID NO: 383936 - DNA, 75 bp, synthetic construct
  source 1..75: mol_type = other DNA
gtttaacgacaaagttaatttcgtcaatgaaagtcgcgtctccaactgatgaattaatttcattatttgatataa

SEQ ID NO: 383937 - DNA, 75 bp, synthetic construct
  source 1..75: mol_type = other DNA
atgtaccggatatcggcccacaatgggctgcggatcagatttttttatcagatcttccctgatcgttttgcgcgt

SEQ ID NO: 383938 - DNA, 75 bp, synthetic construct
  source 1..75: mol_type = other DNA
atgaaagaaaaaatgatgaaaggaatgaagatgaataaagcattactgccactgttactctgctgctttattttt

SEQ ID NO: 383939 - DNA, 75 bp, synthetic construct
  source 1..75: mol_type = other DNA
ccaaatccaaacccgaacccgaacccgaacccgaacccgaacccgaacccaaacccaaacccgaacccaaaccca

SEQ ID NO: 383940 - DNA, 75 bp, synthetic construct
  source 1..75: mol_type = other DNA
agccatttcttccgctgcaaaatcagccgcagctggactgccaggctttggctctatcactggacatacggaagg

SEQ ID NO: 383941 - DNA, 75 bp, synthetic construct
  source 1..75: mol_type = other DNA
tgtggcacgatcgccagcgttggtttacaccgcagggcttcagccgaatgccgccggcacgactggagcagtttg

SEQ ID NO: 383942 - DNA, 75 bp, synthetic construct
  source 1..75: mol_type = other DNA
ttcgccaaaaaaacgctgctggtcaccacaggttctgaagcggtggaaaacgcggtgaaaatcgcccgcgccgcc

SEQ ID NO: 383943 - DNA, 75 bp, synthetic construct
  source 1..75: mol_type = other DNA
gtatctaatttcatagcattcctgcgcattgatattgttaagcttccggaaaatgttggccttggaactgcactt

SEQ ID NO: 383944 - DNA, 75 bp, synthetic construct
  source 1..75: mol_type = other DNA
aggtgctgtatgcggaagataatgtggtggtgtttgttcgtgtgctgaatcagcagcgtgtgatggtggcgatca

SEQ ID NO: 383945 - DNA, 75 bp, synthetic construct
  source 1..75: mol_type = other DNA
aggtggagcctgccataatcctgaatctccctggcgcagttggtactcgtttagcgatgatggcacggcgcttga

SEQ ID NO: 383946 - DNA, 75 bp, synthetic construct
  source 1..75: mol_type = other DNA
atgctgcgtacagaacacgacaacgaagaaacgtcagtaccgatgcataagcagcgcagtcagccgcagcctggc

SEQ ID NO: 383947 - DNA, 75 bp, synthetic construct
  source 1..75: mol_type = other DNA
cgacgttaagactgatgttctttaaaccccgttacgtgaaaccggcaggggtattacgccggggaacaacggtta

SEQ ID NO: 383948 - DNA, 75 bp, synthetic construct
  source 1..75: mol_type = other DNA
tctttcaggagattattcacgtattgccgaatatcttctcgatagcggaatctgatttgatcctcgtgttactgt

SEQ ID NO: 383949 - DNA, 75 bp, synthetic construct
  source 1..75: mol_type = other DNA
gttggagtcattaccgagaatttcgtctcacagctggatatctccgagaacaaagagaagctgaactggctgggg

SEQ ID NO: 383950 - DNA, 75 bp, synthetic construct
  source 1..75: mol_type = other DNA
tgctggtgcgctatgccgcgcagaatctgtatgccccactgcgcactgttgaagccctgcccggcgtcacgcccg

SEQ ID NO: 383951 - DNA, 75 bp, synthetic construct
  source 1..75: mol_type = other DNA
cccgccgctctggagggcaagctgcgccttcagagcagcaatggcacgttgtacctgcttgccagccagccgttt

SEQ ID NO: 383952 - DNA, 75 bp, synthetic construct
  source 1..75: mol_type = other DNA
gtagctgacattctgcttactctcgttaagccgtcttcagatttcgaagcagaaacgctgactcatgtaacagaa

SEQ ID NO: 383953 - DNA, 75 bp, synthetic construct
  source 1..75: mol_type = other DNA
caccacagcaacaaacctggcttcttatctggtaaataattcacgaacggtcatcattctgaagaccgataaaaa

SEQ ID NO: 383954 - DNA, 75 bp, synthetic construct
  source 1..75: mol_type = other DNA
gcttcgtacagtgataccctgactccggagtttgttcaggaaatatttaaaaccgcgaatgacgttgcagccgga

SEQ ID NO: 383955 - DNA, 75 bp, synthetic construct
  source 1..75: mol_type = other DNA
tgatcaatgggccgccacggctattgcagaagaaagccggggctgggaatgggaagtgacgccgggaagttatta

SEQ ID NO: 383956 - DNA, 75 bp, synthetic construct
  source 1..75: mol_type = other DNA
gtgttggggatatgatctacggttttgctttcaacttacagccatgggcgcgtgaacatttagagaaaaatagtc

SEQ ID NO: 383957 - DNA, 75 bp, synthetic construct
  source 1..75: mol_type = other DNA
ccccgccacagaaaagcggccattgatctggataaattactgcgttcggacaacatctggattcaacctcttaaa

SEQ ID NO: 383958 - DNA, 75 bp, synthetic construct
  source 1..75: mol_type = other DNA
cggacaaaggcgggatcggtaaaacaacaacagtggccaacttagcgtctgctatggccaataaaggaaaatcag

SEQ ID NO: 383959 - DNA, 75 bp, synthetic construct
  source 1..75: mol_type = other DNA
ctggcggcgcaaaccggtgaacgcaaagtaggacgtaacgatccttgcccgtgcggttctggtaaaaaatacaag

SEQ ID NO: 383960 - DNA, 75 bp, synthetic construct
  source 1..75: mol_type = other DNA
cccgcgaacaacgggcggtcaggcaccagggcgagagcgatatggcaggaagccgctgggcactggcgaaccaca

SEQ ID NO: 383961 - DNA, 75 bp, synthetic construct
  source 1..75: mol_type = other DNA
atatgtggacggagcggttagggatactggcgggagcacatgaaaacgtaaccacgctaccagtagccagaagaa

SEQ ID NO: 383962 - DNA, 75 bp, synthetic construct
  source 1..75: mol_type = other DNA
tcctgatctgagtctgaaagctgccagggaaaaagcggcacagtgtcgcgcttggcttgctgaggggaaaaatcc

SEQ ID NO: 383963 - DNA, 75 bp, synthetic construct
  source 1..75: mol_type = other DNA
catacagggttattgctcggagaactgaaaaaagataccacggtagcgcaatatgggcgaaatgcgcataagcgg

SEQ ID NO: 383964 - DNA, 75 bp, synthetic construct
  source 1..75: mol_type = other DNA
ggtgttgcattgattcagttccctgatttacaccccgttgcaataaacggtctgggggctgctttcggtattgcg

SEQ ID NO: 383965 - DNA, 75 bp, synthetic construct
  source 1..75: mol_type = other DNA
aactgtgtgaacacctgacgcaaatcgcaaagcaaacctgcgttgtctggaaacaactggcaacggcagaggagg

SEQ ID NO: 383966 - DNA, 75 bp, synthetic construct
  source 1..75: mol_type = other DNA
ctggatcaactggctgaaatcgtaaaaccgcaacgtacgcttcccacgaccatggaatttgtcgatatcgccggt

SEQ ID NO: 383967 - DNA, 75 bp, synthetic construct
  source 1..75: mol_type = other DNA
ggaggcggcgctatgcaatcagtaacgttctcgatgatctgaacgtagcggacgttgggaaaaaaccggatataa

SEQ ID NO: 383968 - DNA, 75 bp, synthetic construct
  source 1..75: mol_type = other DNA
gcgttaagctgggaaattatcccgatctgagtctgaaagcagccagggaaaaagccgcccagtgtcgcgcatggc

SEQ ID NO: 383969 - DNA, 75 bp, synthetic construct
  source 1..75: mol_type = other DNA
gcattgaagagcagtcatgggcacgacactaccagcaaattgcccgtgaagaaactgaagctgagctggcagacg

SEQ ID NO: 383970 - DNA, 75 bp, synthetic construct
  source 1..75: mol_type = other DNA
ggtggagcagaacaggcacacgggcttattgctgggggaagtgaaacaggaggccagcgtatcgcagtatggaag

SEQ ID NO: 383971 - DNA, 75 bp, synthetic construct
  source 1..75: mol_type = other DNA
gaattacgccgtacaggaagcgttaaagccggtaacggttggcgatgcgctcacctactggcttgagtcgtacgt

SEQ ID NO: 383972 - DNA, 75 bp, synthetic construct
  source 1..75: mol_type = other DNA
aactgaaacaggaagccagtgtgtcgcaatacggcagattcatgcacaaaaaattaaaccatccgcactggtcac

SEQ ID NO: 383973 - DNA, 75 bp, synthetic construct
  source 1..75: mol_type = other DNA
aactgacggagcgggtgctggtcagtactgacggcagtgtgtcgagcgttgaagcggtagcggaacccgatgaac

SEQ ID NO: 383974 - DNA, 75 bp, synthetic construct
  source 1..75: mol_type = other DNA
atgtcagctcaaatcaacaacattcgcccggaatttgatcgtgaaatcgttgatatcgtcgattacgtgatgaac

SEQ ID NO: 383975 - DNA, 75 bp, synthetic construct
  source 1..75: mol_type = other DNA
ggcgatgccacttcccgcgcggtacgtctggcactgatggcgaaaacgggcgaaatgggttacccgtcagccctg

SEQ ID NO: 383976 - DNA, 75 bp, synthetic construct
  source 1..75: mol_type = other DNA
cgacacgctcggctgcggtcttgaagctctcgaatacccggcctgtaaaaaactgctggggccaattgtccccgg

SEQ ID NO: 383977 - DNA, 75 bp, synthetic construct
  source 1..75: mol_type = other DNA
atgaagcgcggatttaccttgctggaagtgatgatcgcactggcgatttttgcgctggctgccacggcggtatta

SEQ ID NO: 383978 - DNA, 75 bp, synthetic construct
  source 1..75: mol_type = other DNA
ccagtgattgatgaaaactgcgcacatcgtgaacaagtgaaaaatgcttttgatttcggtttttctcgttatgag

SEQ ID NO: 383979 - DNA, 75 bp, synthetic construct
  source 1..75: mol_type = other DNA
cgcggttgagtattccgcctcgcgataaaagcgttgtggcagtccctcgcccagtgattgatgaaaactgcgcac

SEQ ID NO: 383980 - DNA, 75 bp, synthetic construct
  source 1..75: mol_type = other DNA
atgaccacttttaccgacgaggacaaagaactaattaaagaaatcagagagcgaattggcagcctggacgtccga

SEQ ID NO: 383981 - DNA, 75 bp, synthetic construct
  source 1..75: mol_type = other DNA
ctgtcacgctgccttgccagcgccggtagtgcctgaaggactggttaaagcggtgcgtttttatgagcaggtaaa

SEQ ID NO: 383982 - DNA, 75 bp, synthetic construct
  source 1..75: mol_type = other DNA
cactgacggcagtgtgtcgaacgttgaagaggtagcggaacctgatgaacctgaagaaatgtggacggtgaaacg

SEQ ID NO: 383983 - DNA, 75 bp, synthetic construct
  source 1..75: mol_type = other DNA
gcgaccagaatctgttgatggccccggttttgctgtggctgcgggataaccagcctgatgccatcaataacccgg

SEQ ID NO: 383984 - DNA, 75 bp, synthetic construct
  source 1..75: mol_type = other DNA
gcgaccagaatctgttgatggccccggttttactgtggctgagggataaccagcccgttgccatcaataacccgg

SEQ ID NO: 383985 - DNA, 75 bp, synthetic construct
  source 1..75: mol_type = other DNA
tgtgctgctgtggctaagtgacaaccagccggatgctatcaataacccggagctgcgcgaaaaactgttcacctt

SEQ ID NO: 383986 - DNA, 75 bp, synthetic construct
  source 1..75: mol_type = other DNA
ggtagtcactatgactggtatattcagccgcagtcccagatcacgtggatgaatgtaagagccagtgagcatacg

SEQ ID NO: 383987 - DNA, 75 bp, synthetic construct
  source 1..75: mol_type = other DNA
ggaaacttactataccgatgtgtttactggtgagaagaaagcaacaagtatgtggatgcgtcatatcggcggtca

SEQ ID NO: 383988 - DNA, 75 bp, synthetic construct
  source 1..75: mol_type = other DNA
gtcatcaataaagggactatcacagttgaagggcatgacagcgatacacctgcactgaatgtcggcatgtttgca

SEQ ID NO: 383989 - DNA, 75 bp, synthetic construct
  source 1..75: mol_type = other DNA
accggagacggtacgctggctgtcacgggcagcaatctgacggtacatggcaccaatatcgggttctccggtaat

SEQ ID NO: 383990 - DNA, 75 bp, synthetic construct
  source 1..75: mol_type = other DNA
ggatctgctggatggcgggcagggagattctgattccctgatttttgataacgccattcatacgctggattctgc

SEQ ID NO: 383991 - DNA, 75 bp, synthetic construct
  source 1..75: mol_type = other DNA
tcgtctgggcgtcagaacttacctgaaaggtaagagtgcgtctgatgataataaggcgcatcagttcgagccatt

SEQ ID NO: 383992 - DNA, 75 bp, synthetic construct
  source 1..75: mol_type = other DNA
aactccccgcgatcctcgaactgtggctggaaagtacaacctgggggcatccctttataaaatcgagttactggc

SEQ ID NO: 383993 - DNA, 75 bp, synthetic construct
  source 1..75: mol_type = other DNA
tgggtgtgggaagacaatggtgaatttctcggttttgtcagcattatggagggccggtttctggcagcgatgttt

SEQ ID NO: 383994 - DNA, 75 bp, synthetic construct
  source 1..75: mol_type = other DNA
aactgcccgcgattctggagttatggctggaaagcacaagctggggacatccctttatagaaacaagctattggc

SEQ ID NO: 383995 - DNA, 75 bp, synthetic construct
  source 1..75: mol_type = other DNA
gactgcggggacgatatccctggagggacagggagcgattggtgttcaggccagtgagcagggaacggtgaatct

SEQ ID NO: 383996 - DNA, 75 bp, synthetic construct
  source 1..75: mol_type = other DNA
ggtgcaagtgtcaatgttacacagaccgatggcggttccgctctggtggttaacaatgcagccagtgaagtggtt

SEQ ID NO: 383997 - DNA, 75 bp, synthetic construct
  source 1..75: mol_type = other DNA
aaggtatgatggccattaatgctggctcccgtgcagtaaataatggtgttattaatgttcgtccatttaaagtcg

SEQ ID NO: 383998 - DNA, 75 bp, synthetic construct
  source 1..75: mol_type = other DNA
aaacagggggcgggtaatctgatcattaatcatgagctggcttataccggtgataccactgttgagaacggtgtc

SEQ ID NO: 383999 - DNA, 75 bp, synthetic construct
  source 1..75: mol_type = other DNA
tgcaggaaattatcgagctggcgctggtggcagccgtgccgcgtcagacaaaagtgaaccgcgaaagcagtttac

SEQ ID NO: 384000 - DNA, 75 bp, synthetic construct
  source 1..75: mol_type = other DNA
caccggagaagagccgcgcgtggcgatgttgtcgttttccagcaacggcagcgcccgtcacccctgcgttgccaa

SEQ ID NO: 384001 - DNA, 75 bp, synthetic construct
  source 1..75: mol_type = other DNA
tagcgcccgtcacccctgcgttgccaacgtccagcaggcgacagaaatcgtccgtgagcgcgcaccaaagctggt

SEQ ID NO: 384002 - DNA, 75 bp, synthetic construct
  source 1..75: mol_type = other DNA
atgatgaagcgcttaacagccagcggacatctgaagagttgcatcattattacgagattgtctgggacgaagagc

SEQ ID NO: 384003 - DNA, 75 bp, synthetic construct
  source 1..75: mol_type = other DNA
aggcggcagtggtctcgttcttcctgatgatcttacaggccattgtcgcgccgctgcctgcgtttttaattacct

SEQ ID NO: 384004 - DNA, 75 bp, synthetic construct
  source 1..75: mol_type = other DNA
atgaagatgcaatcgcgtaaaatctggtactaccgtataaccctcatcatcctgttgatcgcttcgctgctagca

SEQ ID NO: 384005 - DNA, 75 bp, synthetic construct
  source 1..75: mol_type = other DNA
tccgtcgctggaagccggaaatattggttacaaatcgcacaacgactcggcggatatcgtgccgtcgggccactg

SEQ ID NO: 384006 - DNA, 75 bp, synthetic construct
  source 1..75: mol_type = other DNA
gtgcagattggattgtacgaatatcgtctctatgaagacggtggcgactggtatttacgttcgcaatccagcgtt

SEQ ID NO: 384007 - DNA, 75 bp, synthetic construct
  source 1..75: mol_type = other DNA
tgccaacggttcaggaaccgtttatatgtcagtagcacaggcaaaggcagaaggctacattacgtccggagatga

SEQ ID NO: 384008 - DNA, 75 bp, synthetic construct
  source 1..75: mol_type = other DNA
caatggtcagcgccggtaaagcggatgtctgtatcgcgggcaatctctcttccacggcgaatgtgctgcgtgccg

SEQ ID NO: 384009 - DNA, 75 bp, synthetic construct
  source 1..75: mol_type = other DNA
gattacgcattatcggtttacagccaggctgtaaaacgctctcctccatttttctgatgttgccgcaatacagcg

SEQ ID NO: 384010 - DNA, 75 bp, synthetic construct
  source 1..75: mol_type = other DNA
cgtgagcgcgcgccgcagctggtcgtcgatggcgagttgcagtttgacgccgcctttgtgccggaagtggcggcg

SEQ ID NO: 384011 - DNA, 75 bp, synthetic construct
  source 1..75: mol_type = other DNA
tactgcaacaaaccgaaatgcttatccggcaactggctgaaatctcagcaatgacagaaagtattggcggtaaaa

SEQ ID NO: 384012 - DNA, 75 bp, synthetic construct
  source 1..75: mol_type = other DNA
aatataaaaacattgctggcgttgaagaaaaattaacttttacagatacttacgcacaggaaaacgtaactatcg

SEQ ID NO: 384013 - DNA, 75 bp, synthetic construct
  source 1..75: mol_type = other DNA
ttgttttcgcagtctccgtttttctgttcgatatattgctaatacagtggattgaactgctgacaacggaagcag

SEQ ID NO: 384014 - DNA, 75 bp, synthetic construct
  source 1..75: mol_type = other DNA
tgccgtaatatgaactcagttaatccactaaaactggttaactgtgacgaactgaattttcaggacagaatgtga

SEQ ID NO: 384015 - DNA, 75 bp, synthetic construct
  source 1..75: mol_type = other DNA
gcgagaaccgaatggccggaagactgtcaccacacagcggtttgtccaggaactgggtaaggttaactggcactg

SEQ ID NO: 384016 - DNA, 75 bp, synthetic construct
  source 1..75: mol_type = other DNA
ggatacagtatctgctgagtctggtccccgactgtccgtggcagcatattgaagtggtcaacaaaaactggccac

SEQ ID NO: 384017 - DNA, 75 bp, synthetic construct
  source 1..75: mol_type = other DNA
acattcacctgtcaacaacagccggcggagtgacgtcaggccacacctggaaaaccttcatttttacgcccgtaa

SEQ ID NO: 384018 - DNA, 75 bp, synthetic construct
  source 1..75: mol_type = other DNA
gctgcggatgtgatactggaaatctgccaccaggcagatgtggagccggggatattcacggtaatccacacatgg

SEQ ID NO: 384019 - DNA, 75 bp, synthetic construct
  source 1..75: mol_type = other DNA
tcaataagctgttttccctcgttgttgcatctgttctggttttctctcttgctggctgcggtgacaaagaagaat

SEQ ID NO: 384020 - DNA, 75 bp, synthetic construct
  source 1..75: mol_type = other DNA
aaggtgcttaagcaatcttcagaaaccaaaattcagtttgcaaccatcggtgcagctaacaaagaagaggcggct

SEQ ID NO: 384021 - DNA, 75 bp, synthetic construct
  source 1..75: mol_type = other DNA
gtggcgcatagcactgccagcagaataacacatccccgtcaatacggccctcgctgtacgcttacgaacggcact

SEQ ID NO: 384022 - DNA, 75 bp, synthetic construct
  source 1..75: mol_type = other DNA
agtggttccttatctcacaacttatcaggaaaaccgtctctcggtagatactacgcagctgcccgataacgtcga

SEQ ID NO: 384023 - DNA, 75 bp, synthetic construct
  source 1..75: mol_type = other DNA
tgtaacaatgccacaagccagttccgtggtttacataagtctgattggtggtgctggatataatgttaactcccc

SEQ ID NO: 384024 - DNA, 75 bp, synthetic construct
  source 1..75: mol_type = other DNA
catcaccaacttatacagcgaataaaccaacaggcctgacagatggaactgtatatgtaatttacagttcgcaca

SEQ ID NO: 384025 - DNA, 75 bp, synthetic construct
  source 1..75: mol_type = other DNA
cggtcagataaaccccaacaactggagtaactttgattctcgttatgtgagagatgtccgacttggtacacgtgt

SEQ ID NO: 384026 - DNA, 75 bp, synthetic construct
  source 1..75: mol_type = other DNA
atgagtaccacaacacgaaaatttaaaaccgttatcaccgatacaggtgcaaaaaaattagctcaggcagccgcg

SEQ ID NO: 384027 - DNA, 75 bp, synthetic construct
  source 1..75: mol_type = other DNA
tcgggcgggatattcttgcgaaatcgaccgttgccgccgttatcgaatacctcggtttacaagaaacggtaaatc

SEQ ID NO: 384028 - DNA, 75 bp, synthetic construct
  source 1..75: mol_type = other DNA
cgggaatcagagaacaacagcatatgggataaatgaaactcgtccacggaatattgcatttaactatatcgtgag

SEQ ID NO: 384029 - DNA, 75 bp, synthetic construct
  source 1..75: mol_type = other DNA
ggtgaatacatccggtgatacctatgatgtttatgttgaaataggtaattacgccacaggtgttaatattcagtg

SEQ ID NO: 384030 - DNA, 75 bp, synthetic construct
  source 1..75: mol_type = other DNA
tttaagaatgatgcagctttttctttaaaaaaattgctgatcggagatagtaaaactttttcattatcaagttca

SEQ ID NO: 384031 - DNA, 75 bp, synthetic construct
  source 1..75: mol_type = other DNA
tgaccattcgtgtgaccactccgagtacatcaagtggtggtggtaccaccagtgcgcaattcacgtatatcaatc

SEQ ID NO: 384032 - DNA, 75 bp, synthetic construct
  source 1..75: mol_type = other DNA
gctaacggtaaatatactgcgcaggatgccagcacgacgcgaaaaggccttgtccagctcagtagcgccaccaac

SEQ ID NO: 384033 - DNA, 75 bp, synthetic construct
  source 1..75: mol_type = other DNA
agcagtaaaggccgcgtatgaccttgctaacgcaaaatataccgctcaggacgctacgacggcacaaaaagggat

SEQ ID NO: 384034 - DNA, 75 bp, synthetic construct
  source 1..75: mol_type = other DNA
cgcattattgcggagctagttattcctcctgaaacgggcggattctggatccgggaaattggtgtatttgatgag

SEQ ID NO: 384035 - DNA, 75 bp, synthetic construct
  source 1..75: mol_type = other DNA
ccggtttgtacgcctgcacgggccggactatttaccggtatctacgctaaccagtccggcccgtggaccaacaac

SEQ ID NO: 384036 - DNA, 75 bp, synthetic construct
  source 1..75: mol_type = other DNA
tgatcgcgatgggcaagggcagctttatgcagggcattgagcaactcaccaccgttcacgccgagaaattaaact

SEQ ID NO: 384037 - DNA, 75 bp, synthetic construct
  source 1..75: mol_type = other DNA
tgcctgcatagctccccggacagactggcaacagtttgcccggaaaagggctgaacactgccaccggcgctgccg

SEQ ID NO: 384038 - DNA, 75 bp, synthetic construct
  source 1..75: mol_type = other DNA
ccgtgctaatcatcgcgattctggttgtaggctccatctggatcatgtggaacctcaactacaacatgatgatgc

SEQ ID NO: 384039 - DNA, 75 bp, synthetic construct
  source 1..75: mol_type = other DNA
aaactaaccagtcatatatggattgatgattttggttctaatgattgcaaaataaatatatcccaattgcaacat

SEQ ID NO: 384040 - DNA, 75 bp, synthetic construct
  source 1..75: mol_type = other DNA
aacgcgccgcaggggctgtatagctggatgaaacagctcaacggcatttacaacgtgccgctggttaccatcatc

SEQ ID NO: 384041 - DNA, 75 bp, synthetic construct
  source 1..75: mol_type = other DNA
gcgattggcgttgaggccagcaataaagggactgttaaccttgatggttcggcagtaccgaactttgctgctgac

SEQ ID NO: 384042 - DNA, 75 bp, synthetic construct
  source 1..75: mol_type = other DNA
tgtgtgaagaacttcgtcctgatgttgactggtcatacttacgacgctcgtcatgttattcgcagaatatgtcga

SEQ ID NO: 384043 - DNA, 75 bp, synthetic construct
  source 1..75: mol_type = other DNA
gtgaagcctgccgcattgttgggggacaagccgctttgtcaaggaatctaggcatctcatcaccaacagtgaatc

SEQ ID NO: 384044 - DNA, 75 bp, synthetic construct
  source 1..75: mol_type = other DNA
accacaacgcatcagtacgatgttgatcgtaccgcggggggaaagattaatccggatatgtatcaagccagtacc

SEQ ID NO: 384045 - DNA, 75 bp, synthetic construct
  source 1..75: mol_type = other DNA
ataacgcacgagcaatattaggtaaaacgggtaaattaactggagttcttcctgcctatgggaatggaggaggga

SEQ ID NO: 384046 - DNA, 75 bp, synthetic construct
  source 1..75: mol_type = other DNA
tgaatttaataaggcccttattgtcactaagcataattacaatgtggatatgaccgctgggggacgcatagactc

SEQ ID NO: 384047 - DNA, 75 bp, synthetic construct
  source 1..75: mol_type = other DNA
atgttctggcgcatgatcctttcggtaacatttttcctgtgtgcagcggctcaggctgcgccatcgccctccttt

SEQ ID NO: 384048 - DNA, 75 bp, synthetic construct
  source 1..75: mol_type = other DNA
gtatctgatttatcgctactgggggccaatatccgctttctttaaacggctgtgggcgcaggtcacggtagcgtt

SEQ ID NO: 384049 - DNA, 75 bp, synthetic construct
  source 1..75: mol_type = other DNA
ttctgattggtggtgcaattagcggggcgtttcgttctgcaatggggggaacgcgcagcgcgttaaccgatttag

SEQ ID NO: 384050 - DNA, 75 bp, synthetic construct
  source 1..75: mol_type = other DNA
aagtttaatttatccggtcaggcaaaaggaattaatctgcagatagctgatgtcaggggaaatattgcccgggca

SEQ ID NO: 384051 - DNA, 75 bp, synthetic construct
  source 1..75: mol_type = other DNA
gttgaccggcgtactgaatatgagcctgcatgagctggagaaaatgctggagcgtctgctggctcagcaacaacg

SEQ ID NO: 384052 - DNA, 75 bp, synthetic construct
  source 1..75: mol_type = other DNA
ccgccagccaacagatggcggcggcgttaattcccccgttgctggatatccgcgttccgggtctggatgttgccg

SEQ ID NO: 384053 - DNA, 75 bp, synthetic construct
  source 1..75: mol_type = other DNA
atgacacgttacgggcaggcaggtattagcagtacatcccggctcaacaacgaattacagcaagtcagtcgcaca

SEQ ID NO: 384054 - DNA, 75 bp, synthetic construct
  source 1..75: mol_type = other DNA
acggttacgcaactgtgagcttgcaggaacgggaaagcaggtctatacggcaacccgggtgcgcgtgacttttga

SEQ ID NO: 384055 - DNA, 75 bp, synthetic construct
  source 1..75: mol_type = other DNA
cgattgtcaacatgacaaataataagttaatggctgttgaagtattaagtcgattttacacaccaaacggtttgc

SEQ ID NO: 384056 - DNA, 75 bp, synthetic construct
  source 1..75: mol_type = other DNA
ggtaaagtgatgccgccgttattgctgaacggaaatgaagaggggctggattataccctgcgggttgtccgtaat

SEQ ID NO: 384057 - DNA, 75 bp, synthetic construct
  source 1..75: mol_type = other DNA
gtgggatggcagggctacttttcatggtgaggttgtcagacctgcctgtactctggcgatggaagacgcctggca

SEQ ID NO: 384058 - DNA, 75 bp, synthetic construct
  source 1..75: mol_type = other DNA
cgaaacgccagataaattctcattgcttggtcaggcagaaggtatcaatctgcagatactggataaccaggggta

SEQ ID NO: 384059 - DNA, 75 bp, synthetic construct
  source 1..75: mol_type = other DNA
aaccacgccactccgggatttgcagaacagcactgaaggtcccgagaaaaaattccgtctgcgactgcgtaactg

SEQ ID NO: 384060 - DNA, 75 bp, synthetic construct
  source 1..75: mol_type = other DNA
tgttactgctgctttgtccgctcatgcatcttttccacggtcacggggggcatggagatcatcaacatcacggaa

SEQ ID NO: 384061 - DNA, 75 bp, synthetic construct
  source 1..75: mol_type = other DNA
tatttgcgccggattgggctcctccactctttattggggggtcgcggagtgggcctattattaccaaacaccggg

SEQ ID NO: 384062 - DNA, 75 bp, synthetic construct
  source 1..75: mol_type = other DNA
accagatcattaacgtgggttctgttcaggtggaaacgattggacttgttcgtgcgctgaccgtgggcgtggcgt

SEQ ID NO: 384063 - DNA, 75 bp, synthetic construct
  source 1..75: mol_type = other DNA
cccggcgtggcaatgtttgtcacccgcgtatcacgtggtcgtaagatcaaagaagttatctgggggctgatcctc

SEQ ID NO: 384064 - DNA, 75 bp, synthetic construct
  source 1..75: mol_type = other DNA
tcggctggggcgcgttcctgctgccattgctggttttgattgtcgatccaaccgagtttattaccaacagcatca

SEQ ID NO: 384065 - DNA, 75 bp, synthetic construct
  source 1..75: mol_type = other DNA
ttacccgcaactggaccgttttctactggctgtggtggatctcatacacccctggcgtagcaattgtttgtcacc

SEQ ID NO: 384066 - DNA, 75 bp, synthetic construct
  source 1..75: mol_type = other DNA
tgtcgcgcgggatattccttgcgaaatgtgtgaggacattccgtgcgccaaagtgtgcccgagcggtgcgctgga

SEQ ID NO: 384067 - DNA, 75 bp, synthetic construct
  source 1..75: mol_type = other DNA
tacgagattgtctgggacgaagagcagacgcacaagttcaaaaacatctccccgcatttgcagcgtattaaagcg

SEQ ID NO: 384068 - DNA, 75 bp, synthetic construct
  source 1..75: mol_type = other DNA
acagcactctgcatccgaaacacgatatgcagcatctgctcaaagaagtagacaaaatgctgcaactgaacgtcg

SEQ ID NO: 384069 - DNA, 75 bp, synthetic construct
  source 1..75: mol_type = other DNA
ggatgatagtggcgatgtcccggtaacgccgcaatatcgccctgatatcggcgcttacctcggtaaccagtggat

SEQ ID NO: 384070 - DNA, 75 bp, synthetic construct
  source 1..75: mol_type = other DNA
gatgctgacagcgttatcgacaataacggcactcgtattgacgatcaggatagtgatagctggaccacccgtctg

SEQ ID NO: 384071 - DNA, 75 bp, synthetic construct
  source 1..75: mol_type = other DNA
ctcacagcccttcccttcctcgtcattttactggtgaaagtcggcggatttattcgctggctgaaacaggattac

SEQ ID NO: 384072 - DNA, 75 bp, synthetic construct
  source 1..75: mol_type = other DNA
tgtggactgacggtcttggcgtgatgacccgcggtgtgaccgatgacagcggtaccttgcagttacaacatatat

SEQ ID NO: 384073 - DNA, 75 bp, synthetic construct
  source 1..75: mol_type = other DNA
gagcggacaacgtggggcatttcggtcaataaacctaacgctggaaaacagcaggggcaattgctggaaaaagcg

SEQ ID NO: 384074 - DNA, 75 bp, synthetic construct
  source 1..75: mol_type = other DNA
ttgtctccgataccgtggcgcttagcaaagtgtcaggcaacgaacttctggtgtggaccgcgggcaaaaaacagg

SEQ ID NO: 384075 - DNA, 75 bp, synthetic construct
  source 1..75: mol_type = other DNA
ttgctgtcgccgcgatcgcggcatttgccctcctgcgagaacactggtcacatgtggcaggttactggccatatc

SEQ ID NO: 384076 - DNA, 75 bp, synthetic construct
  source 1..75: mol_type = other DNA
cccgcgtgcagttaagtttgcgcgctcagcaattatcaatggttggtaacgatttgcgttatgccggacgtttcc

SEQ ID NO: 384077 - DNA, 75 bp, synthetic construct
  source 1..75: mol_type = other DNA
aaaccttcccgttatgtacagaacaaccagttttcaccgctgaaaaaatatccactggtggaacagttccgttac

SEQ ID NO: 384078 - DNA, 75 bp, synthetic construct
  source 1..75: mol_type = other DNA
caatttaatacctcaattattgtatatttaattgacccaaaatactttgctgatctgccgacgtcacagttggtg

SEQ ID NO: 384079 - DNA, 75 bp, synthetic construct
  source 1..75: mol_type = other DNA
actagaacttagccacaattactgtaaagaacatcgccccaaacttgccaatgacgagtggaatccaagttacaa

SEQ ID NO: 384080 - DNA, 75 bp, synthetic construct
  source 1..75: mol_type = other DNA
atgaatatcgaacaccaagctagactagacctagggcaagactacatagccatccttccaggctgcgcccagcct

SEQ ID NO: 384081 - DNA, 75 bp, synthetic construct
  source 1..75: mol_type = other DNA
gccgtgcaaaacgttgttgaaagggttggatgaagctatcgcccggcgcggaactaaaactgaagatttctctga

SEQ ID NO: 384082 - DNA, 75 bp, synthetic construct
  source 1..75: mol_type = other DNA
tcaataaaccgaacgccggaaaacagcaaggacaactgctggaaaaagcgcgcaatgaaatgggtgaactggcct

SEQ ID NO: 384083 - DNA, 75 bp, synthetic construct
  source 1..75: mol_type = other DNA
ctccagcctcgatttcggtcatcagatccaactactggacacgctggcgcagctcaaaaataacggcatgacaat

SEQ ID NO: 384084 - DNA, 75 bp, synthetic construct
  source 1..75: mol_type = other DNA
gaaaaacgtcatgctcggcggcggtgataacgcgctgatgttgcccgagctggcgagcaatatccggatacaaag

SEQ ID NO: 384085 - DNA, 75 bp, synthetic construct
  source 1..75: mol_type = other DNA
ttgtttccgataccgtggcgctcagcaaagtgtcgggtaacgaacttctggtgtggaccgctggcaaaaagcagg

SEQ ID NO: 384086 - DNA, 75 bp, synthetic construct
  source 1..75: mol_type = other DNA
gtgagcaattcctttgcgcctaacatcactttttcggtgctgtatacccgtaatggtcagtacagttttcagaac

SEQ ID NO: 384087 - DNA, 75 bp, synthetic construct
  source 1..75: mol_type = other DNA
atgaaggataatatcgtagattttcaaagaatcagggacagcatgaatgatcattcaactgatgttgcaaatgat

SEQ ID NO: 384088 - DNA, 75 bp, synthetic construct
  source 1..75: mol_type = other DNA
gaaacttatacgcattgagattaaaatggctgaaggatttatcgaaggttgtctttcaatgttggatattagatt

SEQ ID NO: 384089 - DNA, 75 bp, synthetic construct
  source 1..75: mol_type = other DNA
taaaaaatgctcgggtgcagttaagtttgcgcgcccaacaattgtcgatggttggcaacgatttgcgttatgccg

SEQ ID NO: 384090 - DNA, 75 bp, synthetic construct
  source 1..75: mol_type = other DNA
ctgccgataaaccgagccgctatttgttaaccgtttccgccagcgatggtgcggcatatcgtgtcaccaccacca

SEQ ID NO: 384091 - DNA, 75 bp, synthetic construct
  source 1..75: mol_type = other DNA
ggaatcttcaaagcaggtgcctgttaagtatgagtggctacgcctggaagaccgaacaagctacagcggagatct

SEQ ID NO: 384092 - DNA, 75 bp, synthetic construct
  source 1..75: mol_type = other DNA
acagcattagcacaaaactgtcttttgtggataacagctggccgttgaacagcagaaaaatgtcatgctcggcgg

SEQ ID NO: 384093 - DNA, 75 bp, synthetic construct
  source 1..75: mol_type = other DNA
aaaccttcccgttatgtacaaaacaacccgttttcaccgctgaagaaatacccgctggtggagcagtttcgttac

SEQ ID NO: 384094 - DNA, 75 bp, synthetic construct
  source 1..75: mol_type = other DNA
accagcaatgagattgacagcgatgcgctgtatctcgatgaaattacgcttaccagcgagcaggatgcagttctg

SEQ ID NO: 384095 - DNA, 75 bp, synthetic construct
  source 1..75: mol_type = other DNA
ccacattttgagattggcttagccctcgacaaaaaagatttcaaaactggcgaagcggtcagcggcaaactgcaa

SEQ ID NO: 384096 - DNA, 75 bp, synthetic construct
  source 1..75: mol_type = other DNA
atgaaccataaaatgactaccactactcctttcatcctgttaggttttgatgctgatagcttccacaatgacaag

SEQ ID NO: 384097 - DNA, 75 bp, synthetic construct
  source 1..75: mol_type = other DNA
ctttcagccgggcatctcaccgagcacgcgagcaaaatcgatgcgattataagtcgcaatggcacaaatacggca

SEQ ID NO: 384098 - DNA, 75 bp, synthetic construct
  source 1..75: mol_type = other DNA
ggcttacagaggaggaatcgaagcgcctgtttgcagaaattgctcctcatttcttccctgtggtcatgtttgcaa

SEQ ID NO: 384099 - DNA, 75 bp, synthetic construct
  source 1..75: mol_type = other DNA
tcaaggaagcctgcatacggtggctgcgagagaaagcggataagaagtccattgatgatgacaagagcattatat

SEQ ID NO: 384100 - DNA, 75 bp, synthetic construct
  source 1..75: mol_type = other DNA
gcggaacggaacgtactaaaccaatgccgccagaaaaccgctttaattcgttgacctgctactttgcttctgatg

SEQ ID NO: 384101 - DNA, 75 bp, synthetic construct
  source 1..75: mol_type = other DNA
ttattgaatggaaggaaaatgcgcaaatcaagaagctgggcagttggctggctgcccagcagatcacaggttttg

SEQ ID NO: 384102 - DNA, 75 bp, synthetic construct
  source 1..75: mol_type = other DNA
tcatcgctttgagcatatcttttcctggcttttattaacgccagagcaattacagaacacgccggggatcgcgaa

SEQ ID NO: 384103 - DNA, 75 bp, synthetic construct
  source 1..75: mol_type = other DNA
tgaggaagacgaagactacgctccaatctgtttctcttctcagaatggcttctacggttacgatgaaggcttaga

SEQ ID NO: 384104 - DNA, 75 bp, synthetic construct
  source 1..75: mol_type = other DNA
ctatggtaacttccatatgctagaagttttcgctcatcgtggttataacatcattcgtcattccgaagactccaa

SEQ ID NO: 384105 - DNA, 75 bp, synthetic construct
  source 1..75: mol_type = other DNA
cgatgaagatcgcctgaaataccagaatctaccagcaattattgttcgtgatgatctgcctttcgaagtccggtc

SEQ ID NO: 384106 - DNA, 75 bp, synthetic construct
  source 1..75: mol_type = other DNA
aggattgcacatgtagggcggataaggcgttcacgccgcatccgccagtggcgcggtgcaattgccggatgcgac

SEQ ID NO: 384107 - DNA, 75 bp, synthetic construct
  source 1..75: mol_type = other DNA
tgtttaatgtggtgtaatgaacaagaaaaatactctacgtataaagaaaatataaaaaaactgttaggtaataca

SEQ ID NO: 384108 - DNA, 75 bp, synthetic construct
  source 1..75: mol_type = other DNA
catcagcgtttatcaaatcatgaagatgcacaactgtgtttcgctcgctgtgcaactttagttatgcaagatccc

SEQ ID NO: 384109 - DNA, 75 bp, synthetic construct
  source 1..75: mol_type = other DNA
cctttgcgcctaacatcaccttttcggtgctgtatacccgtaacgggcagtacagttttcagaatgccgggatca

SEQ ID NO: 384110 - DNA, 75 bp, synthetic construct
  source 1..75: mol_type = other DNA
gtacacagaatatttataatcatggtattgctacgggaaccaatatcaacagtggcacgcaaaatatcaagagcg

SEQ ID NO: 384111 - DNA, 75 bp, synthetic construct
  source 1..75: mol_type = other DNA
tccggacggactgactcagttgcagtacatggatatctgcatggcgatgatacgttgcgtggatgcgatttacat

SEQ ID NO: 384112 - DNA, 75 bp, synthetic construct
  source 1..75: mol_type = other DNA
gaagccaggcagatgcgctactcacgagtatcagagatgtaatgaaaaatagtctttcagatatttactttcctc

SEQ ID NO: 384113 - DNA, 75 bp, synthetic construct
  source 1..75: mol_type = other DNA
gaactgaaacgggaagggcatacagtcttgaacccggcagtacttccggacgggctgacacagccgcactacatg

SEQ ID NO: 384114 - DNA, 75 bp, synthetic construct
  source 1..75: mol_type = other DNA
tggtaactggaacctgacgccgtatgcatcgttaacggggttcaccgctgataaccccgaatatcatttatccaa

SEQ ID NO: 384115 - DNA, 75 bp, synthetic construct
  source 1..75: mol_type = other DNA
gctgaaaggctggcagcggtcggcaggcgctaaggcagaactggcactggcggagaagctgggacatgcagttat

SEQ ID NO: 384116 - DNA, 75 bp, synthetic construct
  source 1..75: mol_type = other DNA
ttcaccgaatccaggactggcagcagataatgtagcaaaagcaaaagccgacgaagccgtagataatatgcgaca

SEQ ID NO: 384117 - DNA, 75 bp, synthetic construct
  source 1..75: mol_type = other DNA
aatggggagggcgagccgccgcaggtgcggtgagggccacgggacggggtatcaaatgggggacgctgggggccg

SEQ ID NO: 384118 - DNA, 75 bp, synthetic construct
  source 1..75: mol_type = other DNA
tctcaggcagaatcaatgctcgcgtttgttaatccattatccgggatggtaaataaaaataccgcgcctgcagca

SEQ ID NO: 384119 - DNA, 75 bp, synthetic construct
  source 1..75: mol_type = other DNA
gaagattattgacagatataaaggctcgaataaagacctcagatttgacgacgaatacatcgaaagccttctcaa

SEQ ID NO: 384120 - DNA, 75 bp, synthetic construct
  source 1..75: mol_type = other DNA
tcatattgatcaccttcacccaagaaatcatttttcaaagaaatatcttgaaaaactagattatattgcgaattc

SEQ ID NO: 384121 - DNA, 75 bp, synthetic construct
  source 1..75: mol_type = other DNA
gagttcagtcgcttcccggagttctacaatgagcgaagaaacgccctgaagcaaagactactgaatcgggtattt

SEQ ID NO: 384122 - DNA, 75 bp, synthetic construct
  source 1..75: mol_type = other DNA
ttgacggaacggctattgggatgtgtgcattaactaacggcaaacgctgcagcgaacagtcgcttgccgccggaa

SEQ ID NO: 384123 - DNA, 75 bp, synthetic construct
  source 1..75: mol_type = other DNA
gccacagatgcaggaaaatggcacacgtccattactacatcgccaattgatgattcgaaaaatgtaattttatcg

SEQ ID NO: 384124 - DNA, 75 bp, synthetic construct
  source 1..75: mol_type = other DNA
gatatttgcatggcaatgattcgttgtgtggatgcgatttacatgctgaaaggctggcagcggtcagcgggcgct

SEQ ID NO: 384125 - DNA, 75 bp, synthetic construct
  source 1..75: mol_type = other DNA
gtccgatgaccgggtatgaaaatttcaaccgcgaggcgtttcacaaggcggaagaggagctaaaacgggaagggc

SEQ ID NO: 384126 - DNA, 75 bp, synthetic construct
  source 1..75: mol_type = other DNA
aagatattgctaataacctcggcgtttcaataaaaactgtttcgagttataaaaagtctttaatgaatagactgt

SEQ ID NO: 384127 - DNA, 75 bp, synthetic construct
  source 1..75: mol_type = other DNA
gctggcaggggccggaaccacctatcagggaatgttgcgtaatcccttagtgtcaccggatattttaggcgtctc

SEQ ID NO: 384128 - DNA, 75 bp, synthetic construct
  source 1..75: mol_type = other DNA
gtcaggttactcgtcacgatccggtattaaccctggtgctggtcggcattgctctggggacattatgcggtgccg

SEQ ID NO: 384129 - DNA, 75 bp, synthetic construct
  source 1..75: mol_type = other DNA
gtgagggtgagaatttatatcgccggtccaatgacgggatatgaaaatttcaaccgcgaggcatttcacagggcg

SEQ ID NO: 384130 - DNA, 75 bp, synthetic construct
  source 1..75: mol_type = other DNA
tgacgggatacgaagactttaaccgtccggcgtttcatgccgccgggaaggcgttgtcacaagaagggcacacag

SEQ ID NO: 384131 - DNA, 75 bp, synthetic construct
  source 1..75: mol_type = other DNA
gtccaatgaccgggtataaaaatttcaaccgtgaggcatttcacgaggcggaagagaagctgaaacagaaagggt

SEQ ID NO: 384132 - DNA, 75 bp, synthetic construct
  source 1..75: mol_type = other DNA
gaagaggcgctgaaacgggaagggcataccgtcttaaacccggcagtgcttccggacgggctgacacagccgcac

SEQ ID NO: 384133 - DNA, 75 bp, synthetic construct
  source 1..75: mol_type = other DNA
gcgtggatgcgatttatatgctgaatggctggcagcggtcggcaggtgctaaggcagaactggcactggcggaga

SEQ ID NO: 384134 - DNA, 75 bp, synthetic construct
  source 1..75: mol_type = other DNA
gatatttgcatggcaatgattcgctgcgtggatgcgatttacatgctgaaagactggcagcggtcggcaggtgcc

SEQ ID NO: 384135 - DNA, 75 bp, synthetic construct
  source 1..75: mol_type = other DNA
ccgatgttgtgattgattatttgaaatcaggacacaaaatagttccggcacagattaatgaaatgcgagttaacg

SEQ ID NO: 384136 - DNA, 75 bp, synthetic construct
  source 1..75: mol_type = other DNA
cactgatcaattccggtagtttacgtgcggatatcaatgctggccccattacctttggtgatattaccagcacat

SEQ ID NO: 384137 - DNA, 75 bp, synthetic construct
  source 1..75: mol_type = other DNA
gcattgatttcaatactgatgattatccggcaaatatgccagatatatatattaagtttaacgatacatttgatg

SEQ ID NO: 384138 - DNA, 75 bp, synthetic construct
  source 1..75: mol_type = other DNA
acggctgggtttatggggtgcgtgatgtggtggatgcattccggctcacggaagatgagacgcgtgtaatgaata

SEQ ID NO: 384139 - DNA, 75 bp, synthetic construct
  source 1..75: mol_type = other DNA
tgggcgttgactgggcggatgcttcactggcaggaagtctgattggtcagaagctggcgattaacgaatttgttg

SEQ ID NO: 384140 - DNA, 75 bp, synthetic construct
  source 1..75: mol_type = other DNA
gtgatgcaaatcttgccgggagtttgattggacagaaactggcaataaatgaatttgtcgcttatctcaatttct

SEQ ID NO: 384141 - DNA, 75 bp, synthetic construct
  source 1..75: mol_type = other DNA
ccgctggttaccctggaatctgtcggggaaggcagcatgttttcccgcctgagtgattatttccaccataaggct

SEQ ID NO: 384142 - DNA, 75 bp, synthetic construct
  source 1..75: mol_type = other DNA
atcgggtactgttacgccatgaactggcgtcagccagtgaatttaatcctgtaggcattgttattccctccctga

SEQ ID NO: 384143 - DNA, 75 bp, synthetic construct
  source 1..75: mol_type = other DNA
tctgcaacgggtaaaaacatttagcgttccaccggtgacgctttgcggtccgggctcggtgagcagttgcggaca

SEQ ID NO: 384144 - DNA, 75 bp, synthetic construct
  source 1..75: mol_type = other DNA
atcttactccgattctattcttttgaaacaaaaaataatttattttcttggagtatttaagaatttcggattttt

SEQ ID NO: 384145 - DNA, 75 bp, synthetic construct
  source 1..75: mol_type = other DNA
ggtgagttgtggctagccgcctgtacgactttcctgaacgggattgagacctcactgatggtgacgatgaagctg

SEQ ID NO: 384146 - DNA, 75 bp, synthetic construct
  source 1..75: mol_type = other DNA
atccggtagatgtagatgtagaggttgcagaggcgttagagaagcacatggcacagttacgggacctggaagcat

SEQ ID NO: 384147 - DNA, 75 bp, synthetic construct
  source 1..75: mol_type = other DNA
gcaacgctgaatcacggtgttggttcccgggatctgagaccggaaagcctgatatcaggcggaggtgaggtatga

SEQ ID NO: 384148 - DNA, 75 bp, synthetic construct
  source 1..75: mol_type = other DNA
tggaactatcagttcgatgaaaacggctatgcgaaacgcgatgacacgctgactcatccgcgctgtgtatggaat

SEQ ID NO: 384149 - DNA, 75 bp, synthetic construct
  source 1..75: mol_type = other DNA
cggtacaaccgcatcttcttgctggatctacaccggtagctggacagagcagggcaaccagatggctaaccgcga

SEQ ID NO: 384150 - DNA, 75 bp, synthetic construct
  source 1..75: mol_type = other DNA
atttttacccaacttttaacttctagcctccaaagctatgtgattggtagggttgcttttaccgacgtgcccttt

SEQ ID NO: 384151 - DNA, 75 bp, synthetic construct
  source 1..75: mol_type = other DNA
ccatgcagttaattgccgaagcggaaggtcgtcgacgcggcagctacggcggtgcggtaggttatttcaccgcac

SEQ ID NO: 384152 - DNA, 75 bp, synthetic construct
  source 1..75: mol_type = other DNA
atggcgatctcgacacctgcattgtgatccgctcggcgctggtggaaaacggtatcgccaccgtgcaagccggtg

SEQ ID NO: 384153 - DNA, 75 bp, synthetic construct
  source 1..75: mol_type = other DNA
ggaaaggtcaggacgcgccgggcgaagcacgtaacgacggcgaaattctggcgggtatctaccatcatctgcgcg

SEQ ID NO: 384154 - DNA, 75 bp, synthetic construct
  source 1..75: mol_type = other DNA
agtatcaccacgctacgcaccccggtcgcctttggtaacgaggagtgcgaccccgtctggctgcttctctgcgtc

SEQ ID NO: 384155 - DNA, 75 bp, synthetic construct
  source 1..75: mol_type = other DNA
tagagagacgctatgagcaagctaaaacgaaccgagctataggggcatttattggcggcggtggggtatttgctc

SEQ ID NO: 384156 - DNA, 75 bp, synthetic construct
  source 1..75: mol_type = other DNA
cttcatcacagggggcaccttctgaggctgaaaaagttccggcgtggatgtttcgtctggtcatgatggtgtcac

SEQ ID NO: 384157 - DNA, 75 bp, synthetic construct
  source 1..75: mol_type = other DNA
ttttctcgattagctatagataaggttgggcggttagtaatcagaggtggcggtgggcgttttgttgagtctcct

SEQ ID NO: 384158 - DNA, 75 bp, synthetic construct
  source 1..75: mol_type = other DNA
caacgctgctgctggaatccgcagatatcgacagcaaagatgatttaaaaagtctattgctagtggacagtgcgc

SEQ ID NO: 384159 - DNA, 75 bp, synthetic construct
  source 1..75: mol_type = other DNA
tggataacgccttgcctgcgggtgtggaatatgaacaatcaccaaactgccgcgtactgcgcttcccgcctgtca

SEQ ID NO: 384160 - DNA, 75 bp, synthetic construct
  source 1..75: mol_type = other DNA
agtttagagccaatgccaacgagtcagtcgagcttgctgctgtggttggcgtttcggcttcgagaaaagactcgg

SEQ ID NO: 384161 - DNA, 75 bp, synthetic construct
  source 1..75: mol_type = other DNA
aaacgaacagcgacggggttgagtaccagtattgtcggtgcagcagagacacgcccacgtaatatttcatttaat

SEQ ID NO: 384162 - DNA, 75 bp, synthetic construct
  source 1..75: mol_type = other DNA
cggtttcccgctgccgtggccgcaggcaacaccgccgagcggctggctgaaatgcaatggcgcggcttttgacaa

SEQ ID NO: 384163 - DNA, 75 bp, synthetic construct
  source 1..75: mol_type = other DNA
ggacgtttgatgcttcacgcgcggtgcgaacagcgaccgaaacccgtgcgaggaacattgcatttaactacatcg

SEQ ID NO: 384164 - DNA, 75 bp, synthetic construct
  source 1..75: mol_type = other DNA
tccgctgttgataatattgttcagttttcactgaatacccttgcgctcctcggatgggacaaaagtgaaaacaat

SEQ ID NO: 384165 - DNA, 75 bp, synthetic construct
  source 1..75: mol_type = other DNA
gataaatctcagatcagagaatggtttggagagaacacacttactcaaatggggaatggagcaatcaccacttta

SEQ ID NO: 384166 - DNA, 75 bp, synthetic construct
  source 1..75: mol_type = other DNA
atttacgtggtgagtttattcgcggttgggatgacgggcgcggggttgacagcgggcggttgttactcgcaactc

SEQ ID NO: 384167 - DNA, 75 bp, synthetic construct
  source 1..75: mol_type = other DNA
ccggctgttccggttgatgtggtgcatcgcgcgctgcgtgaaatccacgaacgcgccgatgccgttcgtcgtcag

SEQ ID NO: 384168 - DNA, 75 bp, synthetic construct
  source 1..75: mol_type = other DNA
aaagttgctggcctgatgatgcgccaggggaatagcgacacgctaaactcactggctgtttttgtctgggcatgg

SEQ ID NO: 384169 - DNA, 75 bp, synthetic construct
  source 1..75: mol_type = other DNA
ctggcggcgtggaaatatcagccggtggctcaggttgccgaagtgaacgccattcagtttgccgtgggtaagagt

SEQ ID NO: 384170 - DNA, 75 bp, synthetic construct
  source 1..75: mol_type = other DNA
tgaaacgccgctgggaactaacccgctgcatccaaacgttatctcgaacccggctgcacgtatctttaaagacga

SEQ ID NO: 384171 - DNA, 75 bp, synthetic construct
  source 1..75: mol_type = other DNA
aaaccgctgctggaaggccaggtaaactactggggcaactacccgaaattcttcgtctctatgatgaaggccttc

SEQ ID NO: 384172 - DNA, 75 bp, synthetic construct
  source 1..75: mol_type = other DNA
gatcctgatcaatcatggggggaatttttttcaataaagaatatcagagaatctcttagaaatagtgttgaagga

SEQ ID NO: 384173 - DNA, 75 bp, synthetic construct
  source 1..75: mol_type = other DNA
cagcgctgaaattacctgatttgcgcagtgagtttatccgtggatgggatgatggtcgtggtgttgatagtgggc

SEQ ID NO: 384174 - DNA, 75 bp, synthetic construct
  source 1..75: mol_type = other DNA
cgtctgccttcgacctgctttgctgaagaagatggttctattgctaactccggtcgctggttgcagtggcactgg

SEQ ID NO: 384175 - DNA, 75 bp, synthetic construct
  source 1..75: mol_type = other DNA
ggaaacagcaccgcatcagcagcagtgggagcacaaagcgggaagaatgctgttgagaataactcactcagtgat

SEQ ID NO: 384176 - DNA, 75 bp, synthetic construct
  source 1..75: mol_type = other DNA
catccggtgggcgaactttatgaaccgcgtatcctgaacatttacattgtcgacaacgccaacaatgtggtctcg

SEQ ID NO: 384177 - DNA, 75 bp, synthetic construct
  source 1..75: mol_type = other DNA
gccgaagggtaagcagaagaaaggcctggtcgaagtcaacatggccgcgctcactattcaggctttaagcgaatg

SEQ ID NO: 384178 - DNA, 75 bp, synthetic construct
  source 1..75: mol_type = other DNA
atgcgtccgaacattacaatcatcatccctgagccatacctgcctttagacgagtattgccgccgtactggtacc

SEQ ID NO: 384179 - DNA, 75 bp, synthetic construct
  source 1..75: mol_type = other DNA
taactccgacccgtccggtctggggaatacgctgggatgggcctgggcgtggccgctcaaccgtcgcgtactcta

SEQ ID NO: 384180 - DNA, 75 bp, synthetic construct
  source 1..75: mol_type = other DNA
cgccggattggttgctgaggttctcaaaaaccttggtttgggagaaggttcggcattacccgttggtgtgcctgt

SEQ ID NO: 384181 - DNA, 75 bp, synthetic construct
  source 1..75: mol_type = other DNA
gcgtcatcggagatgcttcatctgattcaattaaaggtggttatgcaaagcgagtaacattcgatgcttccagag

SEQ ID NO: 384182 - DNA, 75 bp, synthetic construct
  source 1..75: mol_type = other DNA
tcgcggcgagccggctgaattcccggtgaatggcgtgattcccggctggattgaagcattgaccctgatgccagt

SEQ ID NO: 384183 - DNA, 75 bp, synthetic construct
  source 1..75: mol_type = other DNA
cagctggcggtgaaaaaacgcatcgaaattgatgagccagaacagcagttcctgctgtggttcccccatgatgcg

SEQ ID NO: 384184 - DNA, 75 bp, synthetic construct
  source 1..75: mol_type = other DNA
ctggccatcctcggcgatgcctaatactgttatgacagaatgggccgatatggtgtttttgaagttcaacggggc

SEQ ID NO: 384185 - DNA, 75 bp, synthetic construct
  source 1..75: mol_type = other DNA
tacaccagtaactcagtaggagatggtgttaattttattgccgtcagaccacgtaacattgcatttaactttctg

SEQ ID NO: 384186 - DNA, 75 bp, synthetic construct
  source 1..75: mol_type = other DNA
gagattggctatacgccaggtgttgaaaccaccaccggtccacttggacaaggtttggcgaacgccgtcggactg

SEQ ID NO: 384187 - DNA, 75 bp, synthetic construct
  source 1..75: mol_type = other DNA
agatccccaaagagatttatcacgcctgggatgcccgcgaaaaaggcgaaaaagcgcagcagagctggaatgaga

SEQ ID NO: 384188 - DNA, 75 bp, synthetic construct
  source 1..75: mol_type = other DNA
ctgcaggaaaaagtttcgccagtggtacgtaaattaatcccaccttctcagacgttcccacgcccagctcccatg

SEQ ID NO: 384189 - DNA, 75 bp, synthetic construct
  source 1..75: mol_type = other DNA
ggctggaagctggcggttgagcgccacaacgggccgacggcgctgatcctctcaaggcagaatctggcgcaggtg

SEQ ID NO: 384190 - DNA, 75 bp, synthetic construct
  source 1..75: mol_type = other DNA
ttttcttaaacataatcccaccgaccctggctggtatgaccgcgaccgctttgttctctctaacggccacgcctc

SEQ ID NO: 384191 - DNA, 75 bp, synthetic construct
  source 1..75: mol_type = other DNA
gagattggctatacgccaggtgttgaaaccaccaccggtccgcttgggcaaggtttggcaaacgccgtcgggctg

SEQ ID NO: 384192 - DNA, 75 bp, synthetic construct
  source 1..75: mol_type = other DNA
ggaacgaacaccggcaagcatatatcataaaccactaaacattgtggtcgtacaggtaggcttgtatttaagaaa

SEQ ID NO: 384193 - DNA, 75 bp, synthetic construct
  source 1..75: mol_type = other DNA
attgttgtttttacaacatttgcttttctaaatcgatatctttattggggagggggggtacatgcttttttattg

SEQ ID NO: 384194 - DNA, 75 bp, synthetic construct
  source 1..75: mol_type = other DNA
gtacttatcaagggaagtattttatcgaaattttccgttgcaccaaatactccttttattaatgtacagaattat

SEQ ID NO: 384195 - DNA, 75 bp, synthetic construct
  source 1..75: mol_type = other DNA
agaagagctggaaaaagaaggtatcaactgcaacctgacgctgctgttttcttttgcccaggcgcgggcctgtgc

SEQ ID NO: 384196 - DNA, 75 bp, synthetic construct
  source 1..75: mol_type = other DNA
tttatgggcgacggttgcctgatggaaggtatttcccacgaagtctgttcgctggcgggcacgctggggctgggc

SEQ ID NO: 384197 - DNA, 75 bp, synthetic construct
  source 1..75: mol_type = other DNA
ctgatgaacaggccgaagaggaagctcaacgcatttttgttgttgtcgggggggggaagagtaaaggcatttgcc

SEQ ID NO: 384198 - DNA, 75 bp, synthetic construct
  source 1..75: mol_type = other DNA
ctgggacgcccgtgaaaaaggcgaaaaagcccagcagcgcaggaatgagagatttgccgcttataaaaaggccca

SEQ ID NO: 384199 - DNA, 75 bp, synthetic construct
  source 1..75: mol_type = other DNA
tctgatgaaggcgctctcgcctaccagaaagcaacggtggatctcgttccactacttgaagtcgcgggcggcgca

SEQ ID NO: 384200 - DNA, 75 bp, synthetic construct
  source 1..75: mol_type = other DNA
gcctgaaactgcaattttccctgccagacagtattaccgtatttggcgatcgcgaccgtttaatgcagttgttca

SEQ ID NO: 384201 - DNA, 75 bp, synthetic construct
  source 1..75: mol_type = other DNA
cagcgcgccgggcgtcagtgacgatcaactgcaaaaattgtttgaacgtttttatcgcacagaaggttcccgcaa

SEQ ID NO: 384202 - DNA, 75 bp, synthetic construct
  source 1..75: mol_type = other DNA
gaactgcgcacgcctttagcagtactgcgcggcgaactggaagccattcaggatggtgtgcgtaaattcacgccg

SEQ ID NO: 384203 - DNA, 75 bp, synthetic construct
  source 1..75: mol_type = other DNA
agaaatcgtcggtggatctgatcccgctactggaagtcgcgggtggcgcatttcgtgagcgtttcgccagccgcg

SEQ ID NO: 384204 - DNA, 75 bp, synthetic construct
  source 1..75: mol_type = other DNA
agatgaattgggcaaactggcgcaagacttcaaccagctcgccagcacgctggagaaaaaccaacagatgcgccg

SEQ ID NO: 384205 - DNA, 75 bp, synthetic construct
  source 1..75: mol_type = other DNA
acaacgggccgacggcgcttatcctctcaaggcagaatctggcccaggtggaacgtacgccagatcaggtaaaag

SEQ ID NO: 384206 - DNA, 75 bp, synthetic construct
  source 1..75: mol_type = other DNA
ggagaaactggtgggcgaaggacataatgtgcgcgtggtttctctgccctcgaccgatattttcgacgcccagga

SEQ ID NO: 384207 - DNA, 75 bp, synthetic construct
  source 1..75: mol_type = other DNA
gaacgtacgccgagtcaggtaaaagaaattgcccgcggtggttatgtgttgaaggacagtggcggtaagccggat

SEQ ID NO: 384208 - DNA, 75 bp, synthetic construct
  source 1..75: mol_type = other DNA
ttactcgcggcgctcgccacctttctgctggcgcgtggtctgttggccccggtcaaacggctggtggacggcacg

SEQ ID NO: 384209 - DNA, 75 bp, synthetic construct
  source 1..75: mol_type = other DNA
gatcgtcgatcacttcacctatgtgtttatgggcgacggctgtctgatggaaggtatctcccatgaagtttgttc

SEQ ID NO: 384210 - DNA, 75 bp, synthetic construct
  source 1..75: mol_type = other DNA
ggctggaagctggcggttgagcgccacaacggaccgacagcactgatcctctccaggcagaatctggcactgaag

SEQ ID NO: 384211 - DNA, 75 bp, synthetic construct
  source 1..75: mol_type = other DNA
tgtatttattttgcttctatgccgcggcaagaagaaaatggttaatgcttttattgacaatttttttgttttcat

SEQ ID NO: 384212 - DNA, 75 bp, synthetic construct
  source 1..75: mol_type = other DNA
atgcaggaagaagcaatgccgctttatctcaacatggggcttaatcgccgccagattgaaattatcgcgtcagcc

SEQ ID NO: 384213 - DNA, 75 bp, synthetic construct
  source 1..75: mol_type = other DNA
caataatggctacgtggatgaagatgctttatctatggttcacgatgcctcgtctgccattgcggaaacaaactc

SEQ ID NO: 384214 - DNA, 75 bp, synthetic construct
  source 1..75: mol_type = other DNA
taaagcgattggcagactcggcaacggctggatgatgcacgttgatgcaattcgtagtccggctccgtcatacag

SEQ ID NO: 384215 - DNA, 75 bp, synthetic construct
  source 1..75: mol_type = other DNA
atgaatctgatttcccgtcttaatgatgcgctcaacacgaaaattgctgaactgactgaaattcgccagaaacag

SEQ ID NO: 384216 - DNA, 75 bp, synthetic construct
  source 1..75: mol_type = other DNA
atgcactcaactcgaaaattgctgaactggttgaaatccgtcaaaagcagcaggtgcggattctgaaagcctttt

SEQ ID NO: 384217 - DNA, 75 bp, synthetic construct
  source 1..75: mol_type = other DNA
gccgttgtagacgatggggtaattgtttgcaaaaacggctccttcatggcgtctttcttttataaaggcgctgat

SEQ ID NO: 384218 - DNA, 75 bp, synthetic construct
  source 1..75: mol_type = other DNA
ccgcagtattactggcatcaggtatgctgatgtctactgcggtaaccgcagcacccggcgatgcagcacaatttg

SEQ ID NO: 384219 - DNA, 75 bp, synthetic construct
  source 1..75: mol_type = other DNA
tttatcttcttctttggccgctttatctactcgtccgtcggtgcctggcagcaccatcagagcaaaaaagaagct

SEQ ID NO: 384220 - DNA, 75 bp, synthetic construct
  source 1..75: mol_type = other DNA
actgtggcaggcagtggtgaattacgtctgaacggcacgatgccggagcgctggcgggtgtcactgccgataagt

SEQ ID NO: 384221 - DNA, 75 bp, synthetic construct
  source 1..75: mol_type = other DNA
attgaacacctcatgaacatggatcagaaatacgcgctgccggtgctgctctatctcttccgtcgcattgaagaa

SEQ ID NO: 384222 - DNA, 75 bp, synthetic construct
  source 1..75: mol_type = other DNA
aaaccaccctgaccacacctgcaggacgtgagggactttctccccgggtcagttacggaaagggggctgagggtt

SEQ ID NO: 384223 - DNA, 75 bp, synthetic construct
  source 1..75: mol_type = other DNA
agtggcgaaggccccggctggctgcagacaatgaccatcagtggttattcgggagtgagtcatttcagtgatgcc

SEQ ID NO: 384224 - DNA, 75 bp, synthetic construct
  source 1..75: mol_type = other DNA
cggtgaaaaaggcgattttgagaaagcgatcaacgcgaaaatttcacaatcaaagctgtgctactcactgcagaa

SEQ ID NO: 384225 - DNA, 75 bp, synthetic construct
  source 1..75: mol_type = other DNA
atgaaagtaattatcccactccaaacatgctcgacacgagtaccaaagaaaaatataattccattttataatgga

SEQ ID NO: 384226 - DNA, 75 bp, synthetic construct
  source 1..75: mol_type = other DNA
atgcacgaaagcgatgcgcgatcgatttcgactgttccgaagggcgaacaggtcaaaatgacaagttttctctcc

SEQ ID NO: 384227 - DNA, 75 bp, synthetic construct
  source 1..75: mol_type = other DNA
gcgggagcgaaattcccttatgtaaatgccaacgtcattgacgccagaaccaaacagccaatgtttacaccgtag

SEQ ID NO: 384228 - DNA, 75 bp, synthetic construct
  source 1..75: mol_type = other DNA
ctttttcgcatcgttaccagatgcttgctttattgatagtgaacagagagataatacattactaataattggtaa

SEQ ID NO: 384229 - DNA, 75 bp, synthetic construct
  source 1..75: mol_type = other DNA
tgtcatatatggtttcctgagttcttatgggttacttggagcatgtctacatgcactttcattaacctcattatc

SEQ ID NO: 384230 - DNA, 75 bp, synthetic construct
  source 1..75: mol_type = other DNA
tttacagccacagtgatcttttatatgttttatgtcttgatttattcctttgatcggatgggggccggtgaatag

SEQ ID NO: 384231 - DNA, 75 bp, synthetic construct
  source 1..75: mol_type = other DNA
ggacgtaccgaacttgccgaaacgctttacgggctacgaccgctacaggccggaagcatcgtactcggcggcaag

SEQ ID NO: 384232 - DNA, 75 bp, synthetic construct
  source 1..75: mol_type = other DNA
gtgggtttatcggtagatgattttggcacgggcttttccggattatcccgcttagtcagtcttccggtaacggaa

SEQ ID NO: 384233 - DNA, 75 bp, synthetic construct
  source 1..75: mol_type = other DNA
atgcgtaaatttttactcgtggcaggtcttgctgctcttttatcgggatgcggtgaaaaaggcgattttgagaaa

SEQ ID NO: 384234 - DNA, 75 bp, synthetic construct
  source 1..75: mol_type = other DNA
gcacaatctgtcatgtgctgacctgcaaaagtggggagaaaacgtggcacgctggaaggatgtaccggtgatggt

SEQ ID NO: 384235 - DNA, 75 bp, synthetic construct
  source 1..75: mol_type = other DNA
tcgacgttaatgaagattattgccggtattacccctgctgatagcggtacgctggagattgagggcaacaactac

SEQ ID NO: 384236 - DNA, 75 bp, synthetic construct
  source 1..75: mol_type = other DNA
tgtcgacaccatcatgcacgtggcgtttggcgaccgcacgtcaggggctacaccacattccggggaggcgccatg

SEQ ID NO: 384237 - DNA, 75 bp, synthetic construct
  source 1..75: mol_type = other DNA
tgcgatgcacctggcttgacccggcagagaaagaggcccgtcgtttgcatctgcagggtatgacggttccggatt

SEQ ID NO: 384238 - DNA, 75 bp, synthetic construct
  source 1..75: mol_type = other DNA
agttcttccacggcgttggcgttgacggtgtgtatctgccgttccataaagcaaaccaattccttggcatggaac

SEQ ID NO: 384239 - DNA, 75 bp, synthetic construct
  source 1..75: mol_type = other DNA
gcggcagtacaccaacgaatatcttgataacattacaccgccgttcacgaaagccttgtttacctacgtcaaaga

SEQ ID NO: 384240 - DNA, 75 bp, synthetic construct
  source 1..75: mol_type = other DNA
ccgtggtttgaacatgaccagatgactgttgctgcgaaaatcctgctgcgatgcacctggcttgacccggcagag

SEQ ID NO: 384241 - DNA, 75 bp, synthetic construct
  source 1..75: mol_type = other DNA
gagaaaagtgctgcccgcgttgtggtaccggggtatacagcagggcgtggggggcggcaggaggtgccgtcggaa

SEQ ID NO: 384242 - DNA, 75 bp, synthetic construct
  source 1..75: mol_type = other DNA
gtgatgtgtgacgaagattatgagggggaaaagtgctgcccgagttgtggtaccggggtatacagcagggagggg

SEQ ID NO: 384243 - DNA, 75 bp, synthetic construct
  source 1..75: mol_type = other DNA
aaagccgataagcgaggtctctgggcattaccggaatcggagagaactcccccttgggagtggcgaagaaagcac

SEQ ID NO: 384244 - DNA, 75 bp, synthetic construct
  source 1..75: mol_type = other DNA
gcagtttgaaggtaaggtgcagcgcattgcccgcgttcatcactacggcctgcgcgatcgtgtcagtcgtaaggg

SEQ ID NO: 384245 - DNA, 75 bp, synthetic construct
  source 1..75: mol_type = other DNA
tgcgcgatcgcgtcagtcgtaaaggaccggaggtccgttacgcagagcgtcgcctcctaggcgtaaatgatgatg

SEQ ID NO: 384246 - DNA, 75 bp, synthetic construct
  source 1..75: mol_type = other DNA
acacccactcgacgatggatgtcagcgtgcaggatatgcggatggcgctctggttttttgaatatgcgctggggc

SEQ ID NO: 384247 - DNA, 75 bp, synthetic construct
  source 1..75: mol_type = other DNA
gatcttcccggtttgatgttgcgggcattcgataccttgccggagatgatcatgacgccacatcaggcatggcag

SEQ ID NO: 384248 - DNA, 75 bp, synthetic construct
  source 1..75: mol_type = other DNA
gtttggtcgaatgatcaaagtggagcaaatcgacaaagaccgttatagccgcctggttgccaatctctatgtcga

SEQ ID NO: 384249 - DNA, 75 bp, synthetic construct
  source 1..75: mol_type = other DNA
ctgcccgcgttgtggtaccggggtatacagcagggagggggggctgcaggaaggcaactggaaggataggaactg

SEQ ID NO: 384250 - DNA, 75 bp, synthetic construct
  source 1..75: mol_type = other DNA
ttcaccatcgagccaatggtcaacgcgggtaaaaaagagatccgcaccatgaaagatggctggacggtaaaaacc

SEQ ID NO: 384251 - DNA, 75 bp, synthetic construct
  source 1..75: mol_type = other DNA
aatgaacaacacgcggtttctgcctgcctcggctatcacggctatccgaaatccgtttgcatctctattaatgaa

SEQ ID NO: 384252 - DNA, 75 bp, synthetic construct
  source 1..75: mol_type = other DNA
tttaatacaaatagttgtgcttaaaaatggtggtggttttattatttttagtgcgttagagattttatatgtgct

SEQ ID NO: 384253 - DNA, 75 bp, synthetic construct
  source 1..75: mol_type = other DNA
tgttgatagtattaaagaatgggttaagccagaaaatatgaaaaaactttgggaggggatagtcagttttggcga

SEQ ID NO: 384254 - DNA, 75 bp, synthetic construct
  source 1..75: mol_type = other DNA
acggatggctaaatgggatcgagaaaaacagttcaatgaagttatgcggcgtatctctgaaatgaaggatgatca

SEQ ID NO: 384255 - DNA, 75 bp, synthetic construct
  source 1..75: mol_type = other DNA
cgaataaaagcgacaacgcaggaccaggaggcgctgaatactcaacttgctaaaaaacagcggctggagaagtgg

SEQ ID NO: 384256 - DNA, 75 bp, synthetic construct
  source 1..75: mol_type = other DNA
aaccgacaggacgttttgtgctgtgtgtcctgtggatgcccgttaacacttcagcggggcaatgacggacaacca

SEQ ID NO: 384257 - DNA, 75 bp, synthetic construct
  source 1..75: mol_type = other DNA
taccggggtatacagcagggcgtgggggcggcaggaggtgccgtcggaagatgccagggctgataatccgttact

SEQ ID NO: 384258 - DNA, 75 bp, synthetic construct
  source 1..75: mol_type = other DNA
atgcacctggcttgacccggcagagaaagaggcccgtcgtttgcatctgcagggtatgacggttccggattatac

SEQ ID NO: 384259 - DNA, 75 bp, synthetic construct
  source 1..75: mol_type = other DNA
atgcgcgctagtccattttttcggtcagttaaatatggtattgtattttctttagttataatgatacttacattt

SEQ ID NO: 384260 - DNA, 75 bp, synthetic construct
  source 1..75: mol_type = other DNA
gaagaaattgtctggtggcaatcaggtggcattttcccggatccctggcccgctaatatatcccggctgaactga

SEQ ID NO: 384261 - DNA, 75 bp, synthetic construct
  source 1..75: mol_type = other DNA
ctgcagggtatgacggttccggattatacggtgaaggtgagaaagtggttttgtgtgatgtgtgacgaagattat

SEQ ID NO: 384262 - DNA, 75 bp, synthetic construct
  source 1..75: mol_type = other DNA
ccgccagctctgattctgccagcgtacagtttgaaggtaaggtgcagcgcattgcccgtgttcaccattacggct

SEQ ID NO: 384263 - DNA, 75 bp, synthetic construct
  source 1..75: mol_type = other DNA
atggcagctcttactgcaagctgtattgacctgaatattcaggacaatggcacttattccattctgaaacagtta

SEQ ID NO: 384264 - DNA, 75 bp, synthetic construct
  source 1..75: mol_type = other DNA
gcaaacgttactactgcgcgaaaaaatgcactccaccggttttggttccggcatcgccgtaccgcacggtaaaag

SEQ ID NO: 384265 - DNA, 75 bp, synthetic construct
  source 1..75: mol_type = other DNA
accattagtaatttatagagaacgaaggttacttggattcaatgagaataatgattgcattaaaaatatattaat

SEQ ID NO: 384266 - DNA, 75 bp, synthetic construct
  source 1..75: mol_type = other DNA
gaaccggacgcacaaaaacgggcgaccggatggcatcagctgtattccgcagacggtggtatggcacccaccggc

SEQ ID NO: 384267 - DNA, 75 bp, synthetic construct
  source 1..75: mol_type = other DNA
tcaggccgctgaggcccgccgtaatctggccacagtacttaaacgcaacgcagaccgggggatgttcaccattaa

SEQ ID NO: 384268 - DNA, 75 bp, synthetic construct
  source 1..75: mol_type = other DNA
cactggatgaaggcagagcccccttccacgctggcttaccctacatctcaggaatggagagctgaaccagtaacc

SEQ ID NO: 384269 - DNA, 75 bp, synthetic construct
  source 1..75: mol_type = other DNA
gtggctgaactgcagaaagtggacgactggctgagtgccttgctggctaatctggagccagccgcaagaagccgc

SEQ ID NO: 384270 - DNA, 75 bp, synthetic construct
  source 1..75: mol_type = other DNA
tatttataccatctatgcgaaaaggcagttattaggttttaatgtccaatctattgagttaattgaaagaatgtt

SEQ ID NO: 384271 - DNA, 75 bp, synthetic construct
  source 1..75: mol_type = other DNA
cagcacgcagtaaaaaggggcgcatcaaacgtcagatgtttgcaaagctgcgaaccacaaaatacctgaaaactg

SEQ ID NO: 384272 - DNA, 75 bp, synthetic construct
  source 1..75: mol_type = other DNA
accggctacgagccgcgccgggtaacagcccgcagcaaaaaggggcgcatcaaacgccagatgtttgcaaaactt

SEQ ID NO: 384273 - DNA, 75 bp, synthetic construct
  source 1..75: mol_type = other DNA
agtggctgacagcgctgctggcgaatctggagccggctgcgcgtcagcacatgatgtgtgaactggcgcagcagc

SEQ ID NO: 384274 - DNA, 75 bp, synthetic construct
  source 1..75: mol_type = other DNA
gtattttgatggaaaagtccagcgcatcgcctgtgtacaccactatggactgcgtgaccgtgttagtcgaagagg

SEQ ID NO: 384275 - DNA, 75 bp, synthetic construct
  source 1..75: mol_type = other DNA
aaataatcaactgattcatatagcctttgacgccatgggcacccgtaacagagaaaccgtcctgattgataaaca

SEQ ID NO: 384276 - DNA, 75 bp, synthetic construct
  source 1..75: mol_type = other DNA
cccggaggtccgctatgctgagcgccgcctgctgggcgtgaatgatgaggtggaaaccattacccgcgaaacgct

SEQ ID NO: 384277 - DNA, 75 bp, synthetic construct
  source 1..75: mol_type = other DNA
tctggaaccagccgccagaagctgcatgatgcgccagctggcgcaggaactgcgccggacacagcagcagaatat

SEQ ID NO: 384278 - DNA, 75 bp, synthetic construct
  source 1..75: mol_type = other DNA
cgcaccacaaaatacctgaaaactgctgccagcgccgactctgccagcgtgcagtttgaaggtaaggtacagcgt

SEQ ID NO: 384279 - DNA, 75 bp, synthetic construct
  source 1..75: mol_type = other DNA
accagaagtgcgttacgcagagcgtcgtttgttgggtcttaatggtgagtcttacgttctaactcttgatatatt

SEQ ID NO: 384280 - DNA, 75 bp, synthetic construct
  source 1..75: mol_type = other DNA
cgtttgttgggtattaacaatgatattgagaacaacgttaagaatgttttttatcaatggttaattaataacaat

SEQ ID NO: 384281 - DNA, 75 bp, synthetic construct
  source 1..75: mol_type = other DNA
tgcgagatcgcgtcagtcgtaagggaccggaggtgcgttatgcagagcggcagttgttaggttataacgataaaa

SEQ ID NO: 384282 - DNA, 75 bp, synthetic construct
  source 1..75: mol_type = other DNA
cggcctgcgtgatcgcgtcagccgcaaaggaccagaggtccgttatgcagagcgtcgtttgttaggggggaatga

SEQ ID NO: 384283 - DNA, 75 bp, synthetic construct
  source 1..75: mol_type = other DNA
aaattgcttggattaaatggatgtgaaaaattaattcgaaaaatattcattatgaatttattttctggggattgg

SEQ ID NO: 384284 - DNA, 75 bp, synthetic construct
  source 1..75: mol_type = other DNA
cgcaccacaaaatacctgagaactgccgccagcgcggattctgccagcgtacagtttgaaggtaaggtacagcgt

SEQ ID NO: 384285 - DNA, 75 bp, synthetic construct
  source 1..75: mol_type = other DNA
cagcacgcagtaaaaaggggcgtatcaaacgtcagatgtttgcaaagctacgcaccacaaaatatctgaaaactg

SEQ ID NO: 384286 - DNA, 75 bp, synthetic construct
  source 1..75: mol_type = other DNA
accggaggtccgttacgcagagcgtcgtttgttgggagtaagctcaacaacgagagaaatatcaaatagaattat

SEQ ID NO: 384287 - DNA, 75 bp, synthetic construct
  source 1..75: mol_type = other DNA
accggaagtgcgttatgcagagcggcggttgcttggtatcaataacaagatgcagtctgtcattggagatatatt

SEQ ID NO: 384288 - DNA, 75 bp, synthetic construct
  source 1..75: mol_type = other DNA
actggttaaagcgccgtgtggcgcggttcattcatgggaaaaacggaatagacccgccgttgcagcacacttttg

SEQ ID NO: 384289 - DNA, 75 bp, synthetic construct
  source 1..75: mol_type = other DNA
cacctgacaattacgacatcaatctggcgctgccttgctcgccggggaaactcgtttttcgtgaaagttctaatc

SEQ ID NO: 384290 - DNA, 75 bp, synthetic construct
  source 1..75: mol_type = other DNA
tatttatccgttttattgattttcgcggtgaactgttattacgtgcatccgctattgatggagtgactccggcgg

SEQ ID NO: 384291 - DNA, 75 bp, synthetic construct
  source 1..75: mol_type = other DNA
tcggaatcaataaccgggcagttgctggactggatagcacttggtatttacggtgttgaaagacctttactacag

SEQ ID NO: 384292 - DNA, 75 bp, synthetic construct
  source 1..75: mol_type = other DNA
tcggaatcaataaccgggcaattgctggactggattgctctcgggatttatggcgttgaaaggcctttactacag

SEQ ID NO: 384293 - DNA, 75 bp, synthetic construct
  source 1..75: mol_type = other DNA
actggttaaagcgccgtgtggcgcggtttattcatggaaaaaacggaatagacccgccgttacaacatacttttg

SEQ ID NO: 384294 - DNA, 75 bp, synthetic construct
  source 1..75: mol_type = other DNA
tgtaataattgtggtaaaaaaattcgttggtattatcttattcctgttttggggtattttttgtgtcggggggaa

SEQ ID NO: 384295 - DNA, 75 bp, synthetic construct
  source 1..75: mol_type = other DNA
acagtagacgactgctaccgcgtggacttcacaccacacggactggcgttgcactgcctgacaccgcacggcgaa

SEQ ID NO: 384296 - DNA, 75 bp, synthetic construct
  source 1..75: mol_type = other DNA
gtgtgcctcgctgagtgaatacaccgctgaatttaaccgcctttccgccatcttctcgcaggagtggcagcgcgt

SEQ ID NO: 384297 - DNA, 75 bp, synthetic construct
  source 1..75: mol_type = other DNA
accgccatcgctggactgtcgaagaatgcagggcgatcaaggcgaagtatcagcagaaacttaaagacctgcgaa

SEQ ID NO: 384298 - DNA, 75 bp, synthetic construct
  source 1..75: mol_type = other DNA
ttaggaatagataaaatgccttttttcttattttgtcttcatttatatttattctttactctcttccagcaaggt

SEQ ID NO: 384299 - DNA, 75 bp, synthetic construct
  source 1..75: mol_type = other DNA
tcacgaccgcccctggtgggggctgccctgcaccgttcgtgacagtgacaccctgttttggcgcccgtctggtgc

SEQ ID NO: 384300 - DNA, 75 bp, synthetic construct
  source 1..75: mol_type = other DNA
cgggcgggtactggatattcctgccgcgcggcgcgggcgaatctgttagcggagcaccgcttcagcactacacgc

SEQ ID NO: 384301 - DNA, 75 bp, synthetic construct
  source 1..75: mol_type = other DNA
cggttcgagtaaacagacagacgaattacgcgtagcaatcgtttctgaaactctgaaaattccggcccgtggcgt

SEQ ID NO: 384302 - DNA, 75 bp, synthetic construct
  source 1..75: mol_type = other DNA
gggctattcgagaaatggacaaagtggcgatagtggtagcggtggcgaaaatccggaaccgacgtatctgattaa

SEQ ID NO: 384303 - DNA, 75 bp, synthetic construct
  source 1..75: mol_type = other DNA
agcattcttgcgcttcttgaggctggcgattggtcagaacattgcactaaaacagagctaggcggtcggcttgaa

SEQ ID NO: 384304 - DNA, 75 bp, synthetic construct
  source 1..75: mol_type = other DNA
ctagtgaacgagttgcggcatattgcggttacgtatcacggaacgcagcaattgcgggagaaaattgccagagca

SEQ ID NO: 384305 - DNA, 75 bp, synthetic construct
  source 1..75: mol_type = other DNA
ttggatggaactggagtagcggagcctataacgcaactattagtggtgcatcaacgttaattattcatttttata

SEQ ID NO: 384306 - DNA, 75 bp, synthetic construct
  source 1..75: mol_type = other DNA
ccgcgcttttgggcatcgtggttttacccacagtctgctggcggtatttgcgctgctggcaaccttttaccttaa

SEQ ID NO: 384307 - DNA, 75 bp, synthetic construct
  source 1..75: mol_type = other DNA
taccacctttgaggtgcctaggaccttagcgttaaaagatgatatacccagaacagttagtctgtttctgacacc

SEQ ID NO: 384308 - DNA, 75 bp, synthetic construct
  source 1..75: mol_type = other DNA
aacgcctcgattcatcggggcgtgatagcctatatccgcaaacaatctcattgcttacagcatgcgaacagcatc

SEQ ID NO: 384309 - DNA, 75 bp, synthetic construct
  source 1..75: mol_type = other DNA
ggtcggttcctgaccctgcccgtggagaccttttgccttccgaagggcgaaatgtggaagaaagcagctactggt

SEQ ID NO: 384310 - DNA, 75 bp, synthetic construct
  source 1..75: mol_type = other DNA
tccgcctgccaattctggtgccaaaaaagggcaatcaactggaacgttttctctgcatggcattatttgtctggt

SEQ ID NO: 384311 - DNA, 75 bp, synthetic construct
  source 1..75: mol_type = other DNA
tccggaaagctggtttattccggctgatgctttgcaaggtatggtgctgggttatttgagccatatccttgccga

SEQ ID NO: 384312 - DNA, 75 bp, synthetic construct
  source 1..75: mol_type = other DNA
cggtctccttatttgcagcgatgctgacgcatcgcactgctggcggctgcgcttccctgagtgaatacaccactg

SEQ ID NO: 384313 - DNA, 75 bp, synthetic construct
  source 1..75: mol_type = other DNA
ggaaacgctattctcctgaatttaaaatggaactggtcaggctggcccttgaacaagatatcacgaacggtgcaa

SEQ ID NO: 384314 - DNA, 75 bp, synthetic construct
  source 1..75: mol_type = other DNA
cattattgttgttagttgccctttgggcacccttaagtcaggcagaaacgggatggcagccgattcaggaaacca

SEQ ID NO: 384315 - DNA, 75 bp, synthetic construct
  source 1..75: mol_type = other DNA
cggtcggtgcgctggacgctctgggtttgtcggctaagaaactggccggagaatctcccgacaagcaactcctgg

SEQ ID NO: 384316 - DNA, 75 bp, synthetic construct
  source 1..75: mol_type = other DNA
cccagggcggtcagattgcgtccatgcgtatccgcatgttcagtcagatcgccaatatcatactttactgcctgt

SEQ ID NO: 384317 - DNA, 75 bp, synthetic construct
  source 1..75: mol_type = other DNA
agcccaggacgcaggcgatgactgggataagttacgcgccgctcaccttatggccgggaatgggcttgaagagat

SEQ ID NO: 384318 - DNA, 75 bp, synthetic construct
  source 1..75: mol_type = other DNA
aaaaactgcgacgatcttatatcttcggccagatgtcgctcgaaatcgcctccgctcaggctggcgtggcatttg

SEQ ID NO: 384319 - DNA, 75 bp, synthetic construct
  source 1..75: mol_type = other DNA
ccgctaatttacgtaagcaaaatcagaatgaccaggcagctaatgattctgattttatcggcgcaggtatgggag

SEQ ID NO: 384320 - DNA, 75 bp, synthetic construct
  source 1..75: mol_type = other DNA
tacggtgcagataatgatcaacaattccaggagaaactaaagaaacataaagacagtatcgtacaggctgtacgt

SEQ ID NO: 384321 - DNA, 75 bp, synthetic construct
  source 1..75: mol_type = other DNA
acagttgataacttcctagcggcaaataagaaagctggtgatcttgcattcaaacaacgtgtagaaagtcaaaaa

SEQ ID NO: 384322 - DNA, 75 bp, synthetic construct
  source 1..75: mol_type = other DNA
tacaaaggtgggagttcggtcggcctgaatgcctccattccagaaattgaacggcgcatcaagaacctgaatgca

SEQ ID NO: 384323 - DNA, 75 bp, synthetic construct
  source 1..75: mol_type = other DNA
accagcggagcaagcttctctcccgttattaacatgaatgttaacggtgatccgtctgatactcagatctccatg

SEQ ID NO: 384324 - DNA, 75 bp, synthetic construct
  source 1..75: mol_type = other DNA
ttctggaaaattaacagggattaatgcagctcagaaagagcgtcttgagcagcttgctacggaaatagatcgtct

SEQ ID NO: 384325 - DNA, 75 bp, synthetic construct
  source 1..75: mol_type = other DNA
tgtgctgaccaactacgtgaaagctatccgttacctgcaggggattgagcataacggtgagcccttcaccatccg

SEQ ID NO: 384326 - DNA, 75 bp, synthetic construct
  source 1..75: mol_type = other DNA
ttcggctgttaagttggcacacgagaacttttcggcgctggcggcggagaatgcggggctgaaggattacctggc

SEQ ID NO: 384327 - DNA, 75 bp, synthetic construct
  source 1..75: mol_type = other DNA
gaacatccatcaatcaaactttgctctttgacgcacatatgtgatgagttagcctcccagcttcgcaaaggaggc

SEQ ID NO: 384328 - DNA, 75 bp, synthetic construct
  source 1..75: mol_type = other DNA
agtgctcatctgatatgcatgaggttgttggctggaagatggttctccagcaggccaataatcgcgcctcccggc

SEQ ID NO: 384329 - DNA, 75 bp, synthetic construct
  source 1..75: mol_type = other DNA
gtagggttgcacagttagttagtgacaattcccgattaagcaaacttgttgaacatactggtcaggccaaggggg

SEQ ID NO: 384330 - DNA, 75 bp, synthetic construct
  source 1..75: mol_type = other DNA
tgtaactcttgagcatgtgtcggtcacggatgcagggcaggccggagttgctgcaatgattatcaacgatgccct

SEQ ID NO: 384331 - DNA, 75 bp, synthetic construct
  source 1..75: mol_type = other DNA
ctgaaattgaacgcaaagcaatccgcaagttcattaacagcattgaacacatcctgcgtgacaagttatcaccgt

SEQ ID NO: 384332 - DNA, 75 bp, synthetic construct
  source 1..75: mol_type = other DNA
acgtcagatactgagtgacagttacacaatatattgcggccagttgctgaagcaggaactgatcattgccggttg

SEQ ID NO: 384333 - DNA, 75 bp, synthetic construct
  source 1..75: mol_type = other DNA
gattccgaagcgtatgaggactgggttcaggcttcacatcagacccgcgatatgacccgcagggaagaggtcaac

SEQ ID NO: 384334 - DNA, 75 bp, synthetic construct
  source 1..75: mol_type = other DNA
tgtttcagttaagtaccctgccgcatcagcaggtggaacagagtaaacgctggcgacacgtcagtaatgaacggg

SEQ ID NO: 384335 - DNA, 75 bp, synthetic construct
  source 1..75: mol_type = other DNA
gaagattcggccctctttaaacttagcaatcgggtccgtggttccggaaaagtgggggagatggggacgctacta

SEQ ID NO: 384336 - DNA, 75 bp, synthetic construct
  source 1..75: mol_type = other DNA
tgctgtatctttagcatttcctaattcgccactaacaattgaacatttttaccaagcggttgcggagttagggcc

SEQ ID NO: 384337 - DNA, 75 bp, synthetic construct
  source 1..75: mol_type = other DNA
caggctgttccgggcggtgcgtatattccgcagggtaatctgtcgaatacgccccctccttctgccgacctggtg

SEQ ID NO: 384338 - DNA, 75 bp, synthetic construct
  source 1..75: mol_type = other DNA
tacctgtgcgatcagcgggcatccgatcaggcgcgtgaccgttatcgtgaagcgctggcctggctgaaagacgtc

SEQ ID NO: 384339 - DNA, 75 bp, synthetic construct
  source 1..75: mol_type = other DNA
tgcgggcacgttaccgcgaggatttgctccggccgttactggctgtgccccgttcggatgaaccggacacgcgca

SEQ ID NO: 384340 - DNA, 75 bp, synthetic construct
  source 1..75: mol_type = other DNA
cacaaaacgggcgcggcgcgctcttcgccggtgggctggccgccattcttgcgtcggcctgctgcctggggccgc

SEQ ID NO: 384341 - DNA, 75 bp, synthetic construct
  source 1..75: mol_type = other DNA
tggaaggaatccaacagcgcaaggacctcaaagtgctttgtgatgacaagtacaaagatctggtgaagcgaaaaa

SEQ ID NO: 384342 - DNA, 75 bp, synthetic construct
  source 1..75: mol_type = other DNA
atgaggtgaaggtcgatcccgactccgctgcattcatcatctggaatgaatacccgcgacttagggagtcggtac

SEQ ID NO: 384343 - DNA, 75 bp, synthetic construct
  source 1..75: mol_type = other DNA
aaaggccagtgatgcgtgtggtgctcgcttcggttgctgggcctgccaagctgtagggttggataagtcgatgga

SEQ ID NO: 384344 - DNA, 75 bp, synthetic construct
  source 1..75: mol_type = other DNA
aagcaaagagatgctgctgattaatctccacgaacgagataatttagccccctacgaacgcatgttgttcgacac

SEQ ID NO: 384345 - DNA, 75 bp, synthetic construct
  source 1..75: mol_type = other DNA
tcggacagcaagggttgttcgacatcactcggacactattgcagcagcccgatctggcctcgctgtgtgaggctc

SEQ ID NO: 384346 - DNA, 75 bp, synthetic construct
  source 1..75: mol_type = other DNA
ttctttgagctgcgtcatttatatcaactcatcacgcgtagcaattctctaacgccgccaccgcaaggagcttaa

SEQ ID NO: 384347 - DNA, 75 bp, synthetic construct
  source 1..75: mol_type = other DNA
ctttctgctttacacaaagcccacacggtgtgcgggtttgcaaaggttgccatgcaaaagtggcctatggtgaaa

SEQ ID NO: 384348 - DNA, 75 bp, synthetic construct
  source 1..75: mol_type = other DNA
catcaccaacgcggtactttcccgcctggacatggacgaactggtcagcgaagtcgcgaaagagatccactacta

SEQ ID NO: 384349 - DNA, 75 bp, synthetic construct
  source 1..75: mol_type = other DNA
atatgccactggagttacagccgaagttgctgcgcgtattacaggagcaggagtttgaacgcctcggcagcaaca

SEQ ID NO: 384350 - DNA, 75 bp, synthetic construct
  source 1..75: mol_type = other DNA
ttcaagtaccacctccaccaccggactccgacggggttattcgtcgagaggcaacttgaccaggaagcaatggaa

SEQ ID NO: 384351 - DNA, 75 bp, synthetic construct
  source 1..75: mol_type = other DNA
aatgaaatcgctttccctgcgaacactccggtgtacttcaaagtgacctccaactccgtgatgaactccttcttc

SEQ ID NO: 384352 - DNA, 75 bp, synthetic construct
  source 1..75: mol_type = other DNA
cccggaacagggcattgctaccgtgaatgaaatcgctttccctgcgaacactccggtgtacttcaaagtgacctc

SEQ ID NO: 384353 - DNA, 75 bp, synthetic construct
  source 1..75: mol_type = other DNA
gagcatttacaagcggggttaccgaaactggtcacttctcttgacgctattttgtcgtcagctacgacagcataa

SEQ ID NO: 384354 - DNA, 75 bp, synthetic construct
  source 1..75: mol_type = other DNA
acggtaagagcatggacatgacccagccagaaggtgagcacagcgcacatgaaggtatggaaggcatggacatga

SEQ ID NO: 384355 - DNA, 75 bp, synthetic construct
  source 1..75: mol_type = other DNA
attccacgtctgggtagtcagatttatgccatggcaggtatgcaaactcgcctgcatctgatcgccaacgagcct

SEQ ID NO: 384356 - DNA, 75 bp, synthetic construct
  source 1..75: mol_type = other DNA
aagatgttactaagtggaagtgtggcaattttgtaaattctacggacaatgatgcttatactgctaacgtcaccc

SEQ ID NO: 384357 - DNA, 75 bp, synthetic construct
  source 1..75: mol_type = other DNA
gacactcgggcaaggataaaaagtctaatagttaacgatgaccaaatctttgctgggataacactctatgagccc

SEQ ID NO: 384358 - DNA, 75 bp, synthetic construct
  source 1..75: mol_type = other DNA
aactgttgatgcaagacctcacgtttagtcagctacgaaccggaccctattccgtctcctcacaaaaagaactgc

SEQ ID NO: 384359 - DNA, 75 bp, synthetic construct
  source 1..75: mol_type = other DNA
agttttggcgatattccgttagttcacggcatgccttttgtttctggtgtcggtatcgaagcattacaaaataaa

SEQ ID NO: 384360 - DNA, 75 bp, synthetic construct
  source 1..75: mol_type = other DNA
cactctgctcgggtgcgtattaatagtgtgcctcacactgctgatattcacttacctcacccggaaatcactttg

SEQ ID NO: 384361 - DNA, 75 bp, synthetic construct
  source 1..75: mol_type = other DNA
cggctaccgcccggaaacagagcggttccggtgggacagcctggaccagctgaccgggtattgcagcgcacaggg

SEQ ID NO: 384362 - DNA, 75 bp, synthetic construct
  source 1..75: mol_type = other DNA
tattggctcagtcgttcattagcacgaaccaaattccacttgaatttggagcgacaggacgccgagtttgtgtcc

SEQ ID NO: 384363 - DNA, 75 bp, synthetic construct
  source 1..75: mol_type = other DNA
atcaagaacttcttatgatgaaccggtgccgcaatgctatcgataaagtaggtcggaattttcactacatcatcc

SEQ ID NO: 384364 - DNA, 75 bp, synthetic construct
  source 1..75: mol_type = other DNA
gtacttaacaggtaaacaaagggctgatattgaaagagctgctaatcgtcacggatggacgttatcacgagaatg

SEQ ID NO: 384365 - DNA, 75 bp, synthetic construct
  source 1..75: mol_type = other DNA
atgattgatgaatttcatgtgatgtatatgtataaaaaaatccaagcggaagccgcagctactgacctcaaaaca

SEQ ID NO: 384366 - DNA, 75 bp, synthetic construct
  source 1..75: mol_type = other DNA
ttgttggcaatgcgtcagcgaagaaaaaaacaccttcatgccatcatagaaaaaataaataaccgtattgggaat

SEQ ID NO: 384367 - DNA, 75 bp, synthetic construct
  source 1..75: mol_type = other DNA
taaccgcgtttcaacgtgtctaccctgatggcaattttattgactggaagatcggtaatggtgccaacttactga

SEQ ID NO: 384368 - DNA, 75 bp, synthetic construct
  source 1..75: mol_type = other DNA
atgaaaaaagttcaattcaggattgaagaaagtcaatatgatgatctactagattgtcttaaaacactttatcca

SEQ ID NO: 384369 - DNA, 75 bp, synthetic construct
  source 1..75: mol_type = other DNA
aagctgaaatcggaaacctttattctcgatctcgcaccgaaaagtccgttaccgaagctcgatggctatcagtat

SEQ ID NO: 384370 - DNA, 75 bp, synthetic construct
  source 1..75: mol_type = other DNA
acaaaggcaccaccatcattctcaccacacactacctggaagaagcagaaatgctgtgccgcaatatcggcatta

SEQ ID NO: 384371 - DNA, 75 bp, synthetic construct
  source 1..75: mol_type = other DNA
atgacgttttttcccacgtcttcatcggtgcatccgatgttgaaaaatccgctgatttttacgatgctgtcctcg

SEQ ID NO: 384372 - DNA, 75 bp, synthetic construct
  source 1..75: mol_type = other DNA
ccgcaggcgtggatattgaacttcgccgctcaatgtggggctttttgaaggatttaaacgacaaaggcaccacca

SEQ ID NO: 384373 - DNA, 75 bp, synthetic construct
  source 1..75: mol_type = other DNA
gccaaacgccagttggggctggtgccgcaggaatttaacttcaacccgtttgaaaccgtgcagcaaattgtggtg

SEQ ID NO: 384374 - DNA, 75 bp, synthetic construct
  source 1..75: mol_type = other DNA
agcgcaaagaagcgtacatccgcagcgaaaagtatcttaaacagctcgatttatggggaaaacgtaacgaacgtg

SEQ ID NO: 384375 - DNA, 75 bp, synthetic construct
  source 1..75: mol_type = other DNA
cgttttttccccgacttaaccgcatttcaacgagtctaccctgatggcaattttattgactggaagatctatcaa

SEQ ID NO: 384376 - DNA, 75 bp, synthetic construct
  source 1..75: mol_type = other DNA
cgataatcaagtatcagaacgcactgaatgccggggatacaaaaaccatcctgggcctgtttgctgatgaaagtt

SEQ ID NO: 384377 - DNA, 75 bp, synthetic construct
  source 1..75: mol_type = other DNA
atgttacgcgataaatttattcactattttcagcaatggcgtgaacgccagttaagccgtggcgaacactggctg

SEQ ID NO: 384378 - DNA, 75 bp, synthetic construct
  source 1..75: mol_type = other DNA
gtttcgcgtgtattgttctgttgctcaggcttttggcgataaacccgtcaccatccgcactctggatattggcgg

SEQ ID NO: 384379 - DNA, 75 bp, synthetic construct
  source 1..75: mol_type = other DNA
gcgaatttctattgaagacaatttctcgtagtgcagatcaattaatccttcacagagctgataattttagagaat

SEQ ID NO: 384380 - DNA, 75 bp, synthetic construct
  source 1..75: mol_type = other DNA
aatcgccaatgccagtcagaaagaatggggaggccagcgagcagaccgccgaactttgacagaattgctcgacat

SEQ ID NO: 384381 - DNA, 75 bp, synthetic construct
  source 1..75: mol_type = other DNA
tggcgctgacaagctcacctgaacaatccggcggtacattcaaatactccacagacagtaagattgctactgagc

SEQ ID NO: 384382 - DNA, 75 bp, synthetic construct
  source 1..75: mol_type = other DNA
ctgccgcagcggggctttcggtgacggagattatcgctgaagtggatcttgcgctgtgtgctaaacagcagcaac

SEQ ID NO: 384383 - DNA, 75 bp, synthetic construct
  source 1..75: mol_type = other DNA
cctcaattgcgcgcacttctcagggccgggaaagaatacccaacgttgcaaattatgctgccgatggtttcaacg

SEQ ID NO: 384384 - DNA, 75 bp, synthetic construct
  source 1..75: mol_type = other DNA
atgaaaatcagcatgatgatttgctggattgccttaaaactctttatccggatgaaccagctttaacagtagcta

SEQ ID NO: 384385 - DNA, 75 bp, synthetic construct
  source 1..75: mol_type = other DNA
gctcaccatggggattgataagctcagtgccagtccgtcccggcttccggccttgaaagcagcaatcagaacctc

SEQ ID NO: 384386 - DNA, 75 bp, synthetic construct
  source 1..75: mol_type = other DNA
agagcaatattgtcaggcggaaacactgtatttacgtgaacgcgaggcagatatccgtgaccttacacgtcaggt

SEQ ID NO: 384387 - DNA, 75 bp, synthetic construct
  source 1..75: mol_type = other DNA
agccggatgagattacccgtctggacttactgcaacgcgccgaagcatggcagcaacaaaggcatcgtcagttag

SEQ ID NO: 384388 - DNA, 75 bp, synthetic construct
  source 1..75: mol_type = other DNA
caacgaaaagaaaatcacaactgtccagttaggcaggaaacttaatggcaggtatgcagatatgattgctgagtt

SEQ ID NO: 384389 - DNA, 75 bp, synthetic construct
  source 1..75: mol_type = other DNA
ctggtaatgctcgatctcaaacagatgaacgacgagatccaccaaaatctggttggagtttccaaccaccgcaca

SEQ ID NO: 384390 - DNA, 75 bp, synthetic construct
  source 1..75: mol_type = other DNA
cctttgaatcctgtggaaccgtagacggcccgggtattcgctttatcacctttttccagggctgcctgatgcgct

SEQ ID NO: 384391 - DNA, 75 bp, synthetic construct
  source 1..75: mol_type = other DNA
agcgaccagcgaccagcgaccagcgaccagcgaccagcgaccagcgaccagcgaccagcgaccagcgaccgtaaa

SEQ ID NO: 384392 - DNA, 75 bp, synthetic construct
  source 1..75: mol_type = other DNA
tcagacgtacatttacgtttttcaggtaaaaattccgcataacgcgaaacaggctgttaagtttatcgacttttc

SEQ ID NO: 384393 - DNA, 75 bp, synthetic construct
  source 1..75: mol_type = other DNA
acgcacttcttcagttcaccaattaccctgatattattgctattggtatgaccggctggcgcgatgatggtacag

SEQ ID NO: 384394 - DNA, 75 bp, synthetic construct
  source 1..75: mol_type = other DNA
cggaaaagtcaggcttgtaggtgtatcggtatttctattcggacacttcagcgctggactaatggcaacgtcatc

SEQ ID NO: 384395 - DNA, 75 bp, synthetic construct
  source 1..75: mol_type = other DNA
ggaaaatatccgaacagacagggcattgcgtgacgcaaaaaataagttacgagaactggagaaagagcttaagcg

SEQ ID NO: 384396 - DNA, 75 bp, synthetic construct
  source 1..75: mol_type = other DNA
gtcctgtacagggaaatcactaccccgtttctggtacggggattttttcccgacgttctatgcctgtcatcttac

SEQ ID NO: 384397 - DNA, 75 bp, synthetic construct
  source 1..75: mol_type = other DNA
gttaaagaagtcagtttattctcacatggggggccaattcatggtcctacaacctcaaactctataaatacacct

SEQ ID NO: 384398 - DNA, 75 bp, synthetic construct
  source 1..75: mol_type = other DNA
ctccctgaaaattataaccgtttgtttttaccaaattcaaaaaaccaaacaaataatcgtttcaaataccgagtt

SEQ ID NO: 384399 - DNA, 75 bp, synthetic construct
  source 1..75: mol_type = other DNA
taacgggagaacaacaaggaagcatctccgcaggttgtggaacttctgagtctacaggtaatcgttggcagagcg

SEQ ID NO: 384400 - DNA, 75 bp, synthetic construct
  source 1..75: mol_type = other DNA
atgcgctgcctgtattgtcataaccgcgacacctgggatacgcatggcggtaaagaagttaccgttgaagatttg

SEQ ID NO: 384401 - DNA, 75 bp, synthetic construct
  source 1..75: mol_type = other DNA
aacgacagacaacggatgtctatgaacatgctttgacgattaccgcctggcagcagatttacgatcagctgcatc

SEQ ID NO: 384402 - DNA, 75 bp, synthetic construct
  source 1..75: mol_type = other DNA
tgtcagccgccgcacgctacaaaacgcgtttcacgccattttgggcattggtccgaacgcgtggctgaaacgtat

SEQ ID NO: 384403 - DNA, 75 bp, synthetic construct
  source 1..75: mol_type = other DNA
ttcccgcgcccgtgaatatgtgctggaaaatatgtccgaaccggtgacggtgctggacttgtgtaatcaactgca

SEQ ID NO: 384404 - DNA, 75 bp, synthetic construct
  source 1..75: mol_type = other DNA
ttgggttgcgtccgcttatctgcgcgatcgtcagcctgaaaaagcacaagcaatgatgacccgactgttctataa

SEQ ID NO: 384405 - DNA, 75 bp, synthetic construct
  source 1..75: mol_type = other DNA
ttgttgcactggtcttcagtattcttaccggaagcactttaggcattattgggtatggtttactgatggctgtca

SEQ ID NO: 384406 - DNA, 75 bp, synthetic construct
  source 1..75: mol_type = other DNA
gaaatttacgtgggcctgttaatctttactctctgattctggctgattccggtgaaaggaaaacgaccgtggata

SEQ ID NO: 384407 - DNA, 75 bp, synthetic construct
  source 1..75: mol_type = other DNA
aacgctcgatattgttccggctctggaggcaagccatttattgtggcgtaaatacgagaatagctggcaacaaat

SEQ ID NO: 384408 - DNA, 75 bp, synthetic construct
  source 1..75: mol_type = other DNA
actacacttcaggctttaatagacttagagcttatcactaacatttcatttagaatagataacataaccgactac

SEQ ID NO: 384409 - DNA, 75 bp, synthetic construct
  source 1..75: mol_type = other DNA
cgttaccgcatccggcggtgaggcaatcctacaagctgagtttgttcgtgactggttccgcgcctgcaaaaaaga

SEQ ID NO: 384410 - DNA, 75 bp, synthetic construct
  source 1..75: mol_type = other DNA
tcgcctgaacgccgtgcgccgcgaactgataagcccgtggtcgcaaagtacaacggtcaaagatgccgccatgca

SEQ ID NO: 384411 - DNA, 75 bp, synthetic construct
  source 1..75: mol_type = other DNA
aaaccagtcagcactggaagtgaaagaacagcataaagcggcgctgtggggctttgtacaacaggcgctggcgac

SEQ ID NO: 384412 - DNA, 75 bp, synthetic construct
  source 1..75: mol_type = other DNA
ttatcggttcgcaatgtctgggaagcgcagaaatagccacgcggcctggcggcactgagtttgaattaagtacgc

SEQ ID NO: 384413 - DNA, 75 bp, synthetic construct
  source 1..75: mol_type = other DNA
gatcaggccgccattgatgccagttgcaaagagtgcgacgccctgtttgccctgctcgatgcggaactggcaaaa

SEQ ID NO: 384414 - DNA, 75 bp, synthetic construct
  source 1..75: mol_type = other DNA
ggtgaggagcatctggaatggttacgcctgtatggtgattttgaaaatggcaccccctcccatcacacgattgcc

SEQ ID NO: 384415 - DNA, 75 bp, synthetic construct
  source 1..75: mol_type = other DNA
tctgggcgtccctgccgggagccggttacggtcagcgtgagcatccactggaaaaactggtcaccgtctggcgta

SEQ ID NO: 384416 - DNA, 75 bp, synthetic construct
  source 1..75: mol_type = other DNA
aaaaataagtgttcaacacttgacgtgtttaacacctcgatttaaattggtgttcaacaccttattaaggcaagg

SEQ ID NO: 384417 - DNA, 75 bp, synthetic construct
  source 1..75: mol_type = other DNA
gaacaggttcgtgaatatattcgcaatgcagaacgcccacagtgtcagggagaaatacccgccctgtctggcgat

SEQ ID NO: 384418 - DNA, 75 bp, synthetic construct
  source 1..75: mol_type = other DNA
aaccattggcgcacattcgggtaatgactccaacttattgatagtgttttatgttcagataatgcccgatgactt

SEQ ID NO: 384419 - DNA, 75 bp, synthetic construct
  source 1..75: mol_type = other DNA
acaaaaagagtgcgggttttctctcttaatataaccaaaaacgggaacattaaaggcaaccgagagggggtcaat

SEQ ID NO: 384420 - DNA, 75 bp, synthetic construct
  source 1..75: mol_type = other DNA
catccgcgtcttggttcagtgatgcagcaaatgctggaaatgccaggacataactggacagtcgaatcattggcc

SEQ ID NO: 384421 - DNA, 75 bp, synthetic construct
  source 1..75: mol_type = other DNA
cgtggaatataactggctgagggagacgatcccgtttttacaacaggaatccagatcggcaatgccgggaatgga

SEQ ID NO: 384422 - DNA, 75 bp, synthetic construct
  source 1..75: mol_type = other DNA
tgatccgcgaacgcggtgcactggatgacatccgggcgggacgcattgagcgcgccattttacgctgtcgcaata

SEQ ID NO: 384423 - DNA, 75 bp, synthetic construct
  source 1..75: mol_type = other DNA
gccagcctgccgggggccggatacggtcagcgtgaggtgacgatggcgatgttcgtggcgcagtaccggcgctgt

SEQ ID NO: 384424 - DNA, 75 bp, synthetic construct
  source 1..75: mol_type = other DNA
gttctggtcacggttaaccgtcgcgggctgaaatccacggcagcagggcgttaccagctgctgtcccgttactgg

SEQ ID NO: 384425 - DNA, 75 bp, synthetic construct
  source 1..75: mol_type = other DNA
cttttcacaaggcttttgtccgggagtttgcttgtactccgggagaatatcgggaaagagtcagacaacttcagg

SEQ ID NO: 384426 - DNA, 75 bp, synthetic construct
  source 1..75: mol_type = other DNA
tcggcattcttagcgtctatggtcgtcagggctggctggcatcgctctgccaatcgctcggtctggagtggacct

SEQ ID NO: 384427 - DNA, 75 bp, synthetic construct
  source 1..75: mol_type = other DNA
gaaattgaaaatgaagcggctgcccaggcgcaggaaaatatcgcgcagtccccgtgggcagagcggattaacgtc

SEQ ID NO: 384428 - DNA, 75 bp, synthetic construct
  source 1..75: mol_type = other DNA
ttttgctgggcgcatgggcaccggtggctggggtaaaacgttgccttgatatcggcgcgggtagcgggttgctgg

SEQ ID NO: 384429 - DNA, 75 bp, synthetic construct
  source 1..75: mol_type = other DNA
cattaatgctggcgcagcgaaccgatgacagcgtgatgattgatgcagttgaactggaaagtgaagctgccgcgc

SEQ ID NO: 384430 - DNA, 75 bp, synthetic construct
  source 1..75: mol_type = other DNA
atgcaggatttaagcggtttctcggtgccgaaagggttccggggcggcaacgctattaaagtgcaattgtggtgg

SEQ ID NO: 384431 - DNA, 75 bp, synthetic construct
  source 1..75: mol_type = other DNA
ggtatatgacaggggtattaccagccagaaaaatatctctttatgcaaaattaggatataaaggaagtatgcaga

SEQ ID NO: 384432 - DNA, 75 bp, synthetic construct
  source 1..75: mol_type = other DNA
taatgcaattttagtccagaatacttcaacaactccttctgatggattactcatttatctttacaataaaaattt

SEQ ID NO: 384433 - DNA, 75 bp, synthetic construct
  source 1..75: mol_type = other DNA
atcgagctggcaatctatcaggcgctgagttacgactacgatcctgcccgcgcggcgatgctggcgctgatccag

SEQ ID NO: 384434 - DNA, 75 bp, synthetic construct
  source 1..75: mol_type = other DNA
caatcgctcggtctggagtggaccttttcgccctacggcctgcaaggcattttgctggcccatgtgttttttaat

SEQ ID NO: 384435 - DNA, 75 bp, synthetic construct
  source 1..75: mol_type = other DNA
tgtggtcgaacgcgccgcagggtgactggtcggcagtctggcaggacagctacctgtggcatgtggtgcgcttct

SEQ ID NO: 384436 - DNA, 75 bp, synthetic construct
  source 1..75: mol_type = other DNA
ttaccgaagagggatttttctgcgtggtgctgccagagcagattggtaatggttttactgaactggcattaagca

SEQ ID NO: 384437 - DNA, 75 bp, synthetic construct
  source 1..75: mol_type = other DNA
aatgtctcagcatgtacatgcagctgataatctgacctttaaaggaaaactgattattcctgcctgtactgtaca

SEQ ID NO: 384438 - DNA, 75 bp, synthetic construct
  source 1..75: mol_type = other DNA
tccggcgctacgccaggagatgttgacgctggtgagcacgagctgccagcagcacaaaatgacgttattgatggt

SEQ ID NO: 384439 - DNA, 75 bp, synthetic construct
  source 1..75: mol_type = other DNA
tatgttcccgcagattttcccgattgtggcaaagtttgcggctgaagaggggattgcgttgcgcatcgaccgtca

SEQ ID NO: 384440 - DNA, 75 bp, synthetic construct
  source 1..75: mol_type = other DNA
tgccggtcaacctgcgcactacccagggattcagcagtgcattctacggtgaagagatcagtgagtcgctgttcc

SEQ ID NO: 384441 - DNA, 75 bp, synthetic construct
  source 1..75: mol_type = other DNA
gagctggaagtgttgacatcagcatcgttgaagtatgccattgccgagcgaggttatcggttgggtagttatctt

SEQ ID NO: 384442 - DNA, 75 bp, synthetic construct
  source 1..75: mol_type = other DNA
atgctggtggagtggggaccggttatcccggaagggaaggtcgagatcactatcagtaagtacgagaaaccggcg

SEQ ID NO: 384443 - DNA, 75 bp, synthetic construct
  source 1..75: mol_type = other DNA
ggacccgcgcggggaactggacccggaagccgaccccggcctgctgtatgctggacagtggcaggatgcagaatc

SEQ ID NO: 384444 - DNA, 75 bp, synthetic construct
  source 1..75: mol_type = other DNA
cagttcgcagggcttcagtagcgcgttctatggtgaagagattagcgagtcactgtttctgcaagtgctggatga

SEQ ID NO: 384445 - DNA, 75 bp, synthetic construct
  source 1..75: mol_type = other DNA
aaaagatgctctcaaacacacatacctcggttatgaaaccaaggacctggttgatgtcgtaaccggcgaaatcac

SEQ ID NO: 384446 - DNA, 75 bp, synthetic construct
  source 1..75: mol_type = other DNA
tggtcgtcgtgttagtgggcatacgggtttcctggatggggttcgtttatcacgtagtcaaataaacaatattgc

SEQ ID NO: 384447 - DNA, 75 bp, synthetic construct
  source 1..75: mol_type = other DNA
atgggccgtgaacaccacaccgaatacagcggtcacgacctgccggtgaagatgcgcggccccggcggtcagtca

SEQ ID NO: 384448 - DNA, 75 bp, synthetic construct
  source 1..75: mol_type = other DNA
gtgaacctaccacaagatggcatcaaactgcatcgcggtaacttcaccgctatcggccagcagatccagccttat

SEQ ID NO: 384449 - DNA, 75 bp, synthetic construct
  source 1..75: mol_type = other DNA
ctggaggagggcaaatgctttcgcatggtgcttaaaccgtggcgtgagaaacgcagtctttcccagaatgcactc

SEQ ID NO: 384450 - DNA, 75 bp, synthetic construct
  source 1..75: mol_type = other DNA
aacgttcgctactgcagtatgggtaaaagatgcactcaaacacacatacctcggttatgaaaccaaggacttggt

SEQ ID NO: 384451 - DNA, 75 bp, synthetic construct
  source 1..75: mol_type = other DNA
agccatcattgagcagttgcgtcgcctgccgaaaccaacgtcggcacctgcttcagtggagatcgtgttgtttcc

SEQ ID NO: 384452 - DNA, 75 bp, synthetic construct
  source 1..75: mol_type = other DNA
tcaactattcgggatttaagataccggaagcgaaaggggagatcgtcaccgggactgagcaacctgttttttact

SEQ ID NO: 384453 - DNA, 75 bp, synthetic construct
  source 1..75: mol_type = other DNA
atgctgaagtttatgctcgataccaacatctgcattttcacgataaagaacaaacccgccagcgtcagggagcgt

SEQ ID NO: 384454 - DNA, 75 bp, synthetic construct
  source 1..75: mol_type = other DNA
tcccgaaagggaaggtcgagatcaccatcagtaagtacgagaaaacggcggggggagccgcccggtcaagagggg

SEQ ID NO: 384455 - DNA, 75 bp, synthetic construct
  source 1..75: mol_type = other DNA
agtaaactcagtaccgtgtatcgtgaattgggaagtggtcaggcagtattaaacgatatagctaatcaaactgtt

SEQ ID NO: 384456 - DNA, 75 bp, synthetic construct
  source 1..75: mol_type = other DNA
tggccgctggcaacctggggaatcaactattcgggctttaagataccggaagcgaaaggggagatcgtcgccggg

SEQ ID NO: 384457 - DNA, 75 bp, synthetic construct
  source 1..75: mol_type = other DNA
tgcgtctgaccgaccagggcgaaatcccggatgataatccttttataaaggaatcccggtgcgcgcgccgagatc

SEQ ID NO: 384458 - DNA, 75 bp, synthetic construct
  source 1..75: mol_type = other DNA
atgaagctgatcctgcctttcccgcccagcgtgaacacgtactggcgacaccccaacaaaggggggtttgctggt

SEQ ID NO: 384459 - DNA, 75 bp, synthetic construct
  source 1..75: mol_type = other DNA
atgaagctgatcttgcctttccctcccagcgtgaacacgtactggcgacaccccaacaaaggggagtttgctggt

SEQ ID NO: 384460 - DNA, 75 bp, synthetic construct
  source 1..75: mol_type = other DNA
atgaagctgatcatgcctttccctcccagcgtgaacacgtactggcgacaccccaacaaaggggtgtttgctggt

SEQ ID NO: 384461 - DNA, 75 bp, synthetic construct
  source 1..75: mol_type = other DNA
ctgacccacgcgggtgtgtgggaagacgacagtcaggtgaaaagaatgctggtggagtggggaccggttatcccg

SEQ ID NO: 384462 - DNA, 75 bp, synthetic construct
  source 1..75: mol_type = other DNA
atgaagctgatcgtgcctttcccgcccagcgtgaacacgtactggcgacaccccaacaaaggggcgtttgctggt

SEQ ID NO: 384463 - DNA, 75 bp, synthetic construct
  source 1..75: mol_type = other DNA
atgaagctgatcgtgcctttcccccccagcgtgaacacgtactggcgacaccccaacaaaggggggtttgctggt

SEQ ID NO: 384464 - DNA, 75 bp, synthetic construct
  source 1..75: mol_type = other DNA
tgggcgatgaatattggttgccacctgactattccacagagctgcgagtttcagctgctgcgcgacaagcaggag

SEQ ID NO: 384465 - DNA, 75 bp, synthetic construct
  source 1..75: mol_type = other DNA
cagcaacaaactcgaacctgaagaaatgatccatttggatctatccaaaatacaccaagcagcaagaataaattt

SEQ ID NO: 384466 - DNA, 75 bp, synthetic construct
  source 1..75: mol_type = other DNA
atgaactaattaaagaagcaaaaaaggattttgatttttctaagccgtatcagcttagatccactcctctcgata

SEQ ID NO: 384467 - DNA, 75 bp, synthetic construct
  source 1..75: mol_type = other DNA
aattgcagcacgtcacatgacaaatttagatgagtctaccaaagaatcttacactcacgaattaattcttttttt

SEQ ID NO: 384468 - DNA, 75 bp, synthetic construct
  source 1..75: mol_type = other DNA
aattgggctggcaggccacccgcactattgaagaaatgatgcgtgatacctggaactggcagaaaaataacccga

SEQ ID NO: 384469 - DNA, 75 bp, synthetic construct
  source 1..75: mol_type = other DNA
ttttgggggagactatcctacaaaagatggtacaggtgtacgagattatatacatgtaatggatttagcagaggg

SEQ ID NO: 384470 - DNA, 75 bp, synthetic construct
  source 1..75: mol_type = other DNA
agagttccttcggagttcgtcataaataaaacatctcttgacaaattaaggaatgttattttcaaagcagatcaa

SEQ ID NO: 384471 - DNA, 75 bp, synthetic construct
  source 1..75: mol_type = other DNA
taaaatgatatttagctcttctgctactgtttatgggagtaacagtatccctccccatacggaagatagacgaat

SEQ ID NO: 384472 - DNA, 75 bp, synthetic construct
  source 1..75: mol_type = other DNA
aataccaggtctatctgcaaatgtacgacgacctgcaacgggcggaagcgcggttcaacaccactatgaacacta

SEQ ID NO: 384473 - DNA, 75 bp, synthetic construct
  source 1..75: mol_type = other DNA
gaggcaagccatttattgtggcgtaaatacgagaatagctggcagcaaatatttagcgcaggcgctggtacctca

SEQ ID NO: 384474 - DNA, 75 bp, synthetic construct
  source 1..75: mol_type = other DNA
acaatctgtttcaagtgatttcattgaattatcgaaggaagttatgaaacaaatgtataaatctgctcaagagca

SEQ ID NO: 384475 - DNA, 75 bp, synthetic construct
  source 1..75: mol_type = other DNA
ttccaattccagaaacagctaaaattggaggaactacgaatccatatggcacatcgaaatattttgttgaaaaaa

SEQ ID NO: 384476 - DNA, 75 bp, synthetic construct
  source 1..75: mol_type = other DNA
gatggaacaggagtacgcgactttatccatgtggtagatcttgccgcaggccatgttagtgctttaaggtatatt

SEQ ID NO: 384477 - DNA, 75 bp, synthetic construct
  source 1..75: mol_type = other DNA
ttttggagatgattacccaactatagacggaacaggcgttcgtgactatatccatgtggtagatttagcattggg

SEQ ID NO: 384478 - DNA, 75 bp, synthetic construct
  source 1..75: mol_type = other DNA
ctgcaggtaatatgggggcttctattacatcagaaatgacggggactgaactacaaaaagtcattaatgataaat

SEQ ID NO: 384479 - DNA, 75 bp, synthetic construct
  source 1..75: mol_type = other DNA
gacgatgacgattccgcccaccgtcttggtgaatttacccgcgatatgggtaatgtcgagaagatcgagcttctc

SEQ ID NO: 384480 - DNA, 75 bp, synthetic construct
  source 1..75: mol_type = other DNA
atgtcagttattggtcgcattcactcttttgaatcctgtggaaccgtagatggcccgggcattcgctttatcacc

SEQ ID NO: 384481 - DNA, 75 bp, synthetic construct
  source 1..75: mol_type = other DNA
tggaaccggcgcggaaggatttcgctatgaccgccacggcaacctgctggcgtacacggacggtaatggtgttgt

SEQ ID NO: 384482 - DNA, 75 bp, synthetic construct
  source 1..75: mol_type = other DNA
atgaagctgatcctgccttttccgcccagcgtgaacacgtactggcgacacaccaacaaaggggcgtttgcaggt

SEQ ID NO: 384483 - DNA, 75 bp, synthetic construct
  source 1..75: mol_type = other DNA
tcgaagcgatgattgaacctgctcttaagcaggttctggcagcgctgcgcgaatcaggcgtggaagccatcccac

SEQ ID NO: 384484 - DNA, 75 bp, synthetic construct
  source 1..75: mol_type = other DNA
cgatgcggaactggcaaaagtaaaatggttctctggcgacgagtttggtgtgggcgatatcgctatcgcaccgtt

SEQ ID NO: 384485 - DNA, 75 bp, synthetic construct
  source 1..75: mol_type = other DNA
ttatggcagtgattataatacaaaggatggctcaggtgttcgtgattatattcatgtgcttgacttagcctctgg

SEQ ID NO: 384486 - DNA, 75 bp, synthetic construct
  source 1..75: mol_type = other DNA
cactttgacttttataaagtcgatcttagaaataaaaaagagcttgatgatatctttctaaagcatgatatttcc

SEQ ID NO: 384487 - DNA, 75 bp, synthetic construct
  source 1..75: mol_type = other DNA
gacgatgacgattcagcgcatcgcctcggtgaatttacccgtgatatgggtaacgttgagaaaatcgaacttctc

SEQ ID NO: 384488 - DNA, 75 bp, synthetic construct
  source 1..75: mol_type = other DNA
cgttaccgcatccggcggtgaagcaatcctgcaagctgagtttgttcgtgactggttccgcgcctgcaaaaaaga

SEQ ID NO: 384489 - DNA, 75 bp, synthetic construct
  source 1..75: mol_type = other DNA
attcaaccaacgttaaaaaagtgttgctgacgctcgaagaactgaaactgccttatgagcaaattttggcgggtc

SEQ ID NO: 384490 - DNA, 75 bp, synthetic construct
  source 1..75: mol_type = other DNA
ctgggctgcggtgaaggccgcacccgccgtgaagtggaaagccgctgggtgttttacgtggtggcaaaaatgctg

SEQ ID NO: 384491 - DNA, 75 bp, synthetic construct
  source 1..75: mol_type = other DNA
aagttattatatgatgatgttggagttatcattgagctttttaaaagtagaggggttggtattgactccccagaa

SEQ ID NO: 384492 - DNA, 75 bp, synthetic construct
  source 1..75: mol_type = other DNA
gcttaaaattgcttatcaggaagcggggaaatggcctgatgatggaatcgaaattgacgacactgctgccgctga

SEQ ID NO: 384493 - DNA, 75 bp, synthetic construct
  source 1..75: mol_type = other DNA
tcgccccttcaagccacgagattttatctttaccgcacttttccgcgttttgctggctggtgggcgctctttctg

SEQ ID NO: 384494 - DNA, 75 bp, synthetic construct
  source 1..75: mol_type = other DNA
tctctggctgccttctgccacttacggtgctgttcaattttttgttcgattgttttcatatggcaaaaaaaaggc

SEQ ID NO: 384495 - DNA, 75 bp, synthetic construct
  source 1..75: mol_type = other DNA
gacctgacagaaaaggctattgaagctcatttttaccggactgacactgaaccgaacgatatggagtatgccagt

SEQ ID NO: 384496 - DNA, 75 bp, synthetic construct
  source 1..75: mol_type = other DNA
cgtcatcggtgccccggtctccttgccgtccatgaaagcggcaatggataagaacagcgtgccggcggatatctg

SEQ ID NO: 384497 - DNA, 75 bp, synthetic construct
  source 1..75: mol_type = other DNA
tatcgcccgtggctataaaaatgccgcattcatcggcgaacgtattttccccgtcgtgctgacggacaaggaagg

SEQ ID NO: 384498 - DNA, 75 bp, synthetic construct
  source 1..75: mol_type = other DNA
ccgcgagcaggcggagtcgatgttcaacgaagaggccaaggccattcgtcgcgtgaccagtggcgtcaacctgaa

SEQ ID NO: 384499 - DNA, 75 bp, synthetic construct
  source 1..75: mol_type = other DNA
cgatggcactacgtttgttactcgtttctccagtgctgaactaaattatgtgacacgctggatcctttataacgg

SEQ ID NO: 384500 - DNA, 75 bp, synthetic construct
  source 1..75: mol_type = other DNA
tattacaacgttcctgctatgtgtcgggcgtcgctggccatgtataacacccatgaagaagtggatcgtctggtg

SEQ ID NO: 384501 - DNA, 75 bp, synthetic construct
  source 1..75: mol_type = other DNA
gggacagcgtgccggcggatatctggggagacaacctgatgctgcactacgtcggcaagccgcagccgggggcgg

SEQ ID NO: 384502 - DNA, 75 bp, synthetic construct
  source 1..75: mol_type = other DNA
accggataaaactggtgctggaaaaaacgggactgaagcaggcggaactagcccgcaggattggtgttgcccaac

SEQ ID NO: 384503 - DNA, 75 bp, synthetic construct
  source 1..75: mol_type = other DNA
cacgcaagcacaatggccggttcatgcggtgatcaccaactcaacctatgatggcttgctctacaacaccgactg

SEQ ID NO: 384504 - DNA, 75 bp, synthetic construct
  source 1..75: mol_type = other DNA
ccggcagtacgctgttaattgaccgcaattgtcataaatcgctggcgcatctgttgatgatgaacgatgtagtgc

SEQ ID NO: 384505 - DNA, 75 bp, synthetic construct
  source 1..75: mol_type = other DNA
gggataaatataatctcgagctgtgcgaagaaattagcaaaatgaacgagaacctgccgttgtacgcgttcgcta

SEQ ID NO: 384506 - DNA, 75 bp, synthetic construct
  source 1..75: mol_type = other DNA
aaattgcttcagcacaggaacgtctatacttcttggaagccaaaaagaaacaacaaacaaaaaaagagaatactc

SEQ ID NO: 384507 - DNA, 75 bp, synthetic construct
  source 1..75: mol_type = other DNA
gcagaagtggctaaagctgtgggctgcaaagtagaagaagtggataaagagttaatattaggactgatattgcaa

SEQ ID NO: 384508 - DNA, 75 bp, synthetic construct
  source 1..75: mol_type = other DNA
gaagagtacatcgcgcggacttttggcgcggaacagagttatatcgttaccaacggaacatcgacgtctaacaaa

SEQ ID NO: 384509 - DNA, 75 bp, synthetic construct
  source 1..75: mol_type = other DNA
cacgaatttcaagccagacggtatcactgtcagctggtgcatccattccgcaggtacgggtatttccaaaccagg

SEQ ID NO: 384510 - DNA, 75 bp, synthetic construct
  source 1..75: mol_type = other DNA
atatgcggcctcccccttgagggcgtcgggccagaactcgggatcctcggccgacaaggtgcaacagccgacgat

SEQ ID NO: 384511 - DNA, 75 bp, synthetic construct
  source 1..75: mol_type = other DNA
cggtaaggctacacctaaagcctcaagtttggataaactggttgaggttacagggcatccgttgcattggttttt

SEQ ID NO: 384512 - DNA, 75 bp, synthetic construct
  source 1..75: mol_type = other DNA
ttcaccacaatctgccggatctgatgtatcgcgcatttgaagtgctgccgacgatggtaatgactccgtatgctg

SEQ ID NO: 384513 - DNA, 75 bp, synthetic construct
  source 1..75: mol_type = other DNA
gcgaaatacctcgacgaacatggcatcgttgttgagaaaaccggtccgtataacctgctgttcctgttcagcatc

SEQ ID NO: 384514 - DNA, 75 bp, synthetic construct
  source 1..75: mol_type = other DNA
ccaaaagcaccgcggtgtttaatatgttcaaacacctggcccatgtgctttcagaaaaatatcacctggttgatt

SEQ ID NO: 384515 - DNA, 75 bp, synthetic construct
  source 1..75: mol_type = other DNA
gcattcatcggcgaacgtattttccccgtcgtgcagacggacaaggaaggcgtgcgtgtaccgaccttcgggaaa

SEQ ID NO: 384516 - DNA, 75 bp, synthetic construct
  source 1..75: mol_type = other DNA
tatcgacgggctgctctcgaccgccgcaggcgttcagcgggcaagcggcaaaccgacgctggcgattgtgggcga

SEQ ID NO: 384517 - DNA, 75 bp, synthetic construct
  source 1..75: mol_type = other DNA
gctgggcggcggtcattctggaagcattaacgcgtcacggcgtcagacacatctgtatcgcccctggctcgcgtt

SEQ ID NO: 384518 - DNA, 75 bp, synthetic construct
  source 1..75: mol_type = other DNA
tggcgaagcgcaactggcgcatcgcatcagcgactatctgcctgaacaggggcaattgtttgttggtaacagcct

SEQ ID NO: 384519 - DNA, 75 bp, synthetic construct
  source 1..75: mol_type = other DNA
gtgttaaatgaagaacagaaacaggcggtattcgaacgaattaagtcaggtgtaagtataagtgccattgcccgg

SEQ ID NO: 384520 - DNA, 75 bp, synthetic construct
  source 1..75: mol_type = other DNA
gggggcgttgacctgaccagtccacctggaaaaatgatgatgcaagtaatttcagcagtcgctgaatttgagcga

SEQ ID NO: 384521 - DNA, 75 bp, synthetic construct
  source 1..75: mol_type = other DNA
cctggttttaccagactgcttgaccgcatggaaaatggcgatgtgttgattgttactaaactcgaccggctgggg

SEQ ID NO: 384522 - DNA, 75 bp, synthetic construct
  source 1..75: mol_type = other DNA
atgatgaatattaagccgctgaaaattaggaacaaggtcatgaagcctcataaagcatcattaaaccctgaccta

SEQ ID NO: 384523 - DNA, 75 bp, synthetic construct
  source 1..75: mol_type = other DNA
ggcctccatgttaagtattgatattcccgttgcaaaagcactggaaaggctggagaaaaacagcactcaaaacag

SEQ ID NO: 384524 - DNA, 75 bp, synthetic construct
  source 1..75: mol_type = other DNA
tggctggaggaagcaaaaggaaaagtcaaatcaacaggagtctggataactgtagtatccgcattaattgttttc

SEQ ID NO: 384525 - DNA, 75 bp, synthetic construct
  source 1..75: mol_type = other DNA
gcaggtaacggttaaccgctatgaacgcgaccgtaaggcccgacaggccgcattagcctggcatggttgtctgtg

SEQ ID NO: 384526 - DNA, 75 bp, synthetic construct
  source 1..75: mol_type = other DNA
aatatatttttcatgaaaaccttcacgaagacagaattattattgaactggagaaaaaagaaaatgggtggtggt

SEQ ID NO: 384527 - DNA, 75 bp, synthetic construct
  source 1..75: mol_type = other DNA
taaaggcgttactttcatctcgcaatataaacttcaaacagcatcatggtgttgctaggggtgataatgcagccc

SEQ ID NO: 384528 - DNA, 75 bp, synthetic construct
  source 1..75: mol_type = other DNA
cggcgactggtatgttcgtgctgctgatggtcagatggtgccgttctcggcgttctcctcttctcgttgggagta

SEQ ID NO: 384529 - DNA, 75 bp, synthetic construct
  source 1..75: mol_type = other DNA
tgccttcgcatgttaatcccaccgctcagtggctggcgtttaatcaacggattatgcagggagaagcctctctgt

SEQ ID NO: 384530 - DNA, 75 bp, synthetic construct
  source 1..75: mol_type = other DNA
tgacacgctggatcctttataacggagagcaacaggtagccgcctttgcattacctgcaacctgtcggcctgagg

SEQ ID NO: 384531 - DNA, 75 bp, synthetic construct
  source 1..75: mol_type = other DNA
tatcagagtgcattgcttagcattgggtggcattgacctgaccagtccaacaggaaaaatgatgatgcaagtaat

SEQ ID NO: 384532 - DNA, 75 bp, synthetic construct
  source 1..75: mol_type = other DNA
aattggaaaatgatttcaataaactaactaaagaacttctgacgaaagagtatctcactgagtttcaaaaaaaac

SEQ ID NO: 384533 - DNA, 75 bp, synthetic construct
  source 1..75: mol_type = other DNA
ccgggattgaggcggtgcgtaacaccaccggtctgcgcccgaatctgatgaccatgggagccagtgtgatggcac

SEQ ID NO: 384534 - DNA, 75 bp, synthetic construct
  source 1..75: mol_type = other DNA
cgtagtcggtaacccggtatcgctgggtaaagacggcaaaaccgcagacctctggaaagacaacctgatgggcca

SEQ ID NO: 384535 - DNA, 75 bp, synthetic construct
  source 1..75: mol_type = other DNA
tgttcgccgttaacggcttcggctttgcgggacgtggtcagaacaccggtattgcgttcgtttccttgaaggact

SEQ ID NO: 384536 - DNA, 75 bp, synthetic construct
  source 1..75: mol_type = other DNA
cagttgctgggcgaagcagcgaagcaccctgatctgctgaccagcgtgcgtccgaacggcctggaagatacgccg

SEQ ID NO: 384537 - DNA, 75 bp, synthetic construct
  source 1..75: mol_type = other DNA
tgccaagctccttcttgccagatgaagaccagggcgtgtttatgaccatggtccaactgcctgcaggtgcaacac

SEQ ID NO: 384538 - DNA, 75 bp, synthetic construct
  source 1..75: mol_type = other DNA
gaaatcctgggccaggctgcaccaggtaagagtactggtgaagcaatggcgctgatggaagaactggcaagcaaa

SEQ ID NO: 384539 - DNA, 75 bp, synthetic construct
  source 1..75: mol_type = other DNA
gttcagctgcctgcaggtgcaacgcaggaacgcacgcagaaagtgctcaacgaagtgacgaattactatctgacc

SEQ ID NO: 384540 - DNA, 75 bp, synthetic construct
  source 1..75: mol_type = other DNA
gctatcggcctgttggtggatgacgccatcgttgtagtagaaaacgtggaacgtgtgatggcggaagaaggtttg

SEQ ID NO: 384541 - DNA, 75 bp, synthetic construct
  source 1..75: mol_type = other DNA
tggccgtcagtaacctggtcatagccgccatgaatctggccgctgaaatcggggttccacaggtcaacgctgacg

SEQ ID NO: 384542 - DNA, 75 bp, synthetic construct
  source 1..75: mol_type = other DNA
caaactgcaacgggccggtaaacaactgacggacattatggacgcccgcgcagtggatgccatacgtgcccgcct

SEQ ID NO: 384543 - DNA, 75 bp, synthetic construct
  source 1..75: mol_type = other DNA
tcaggacgcccgctttcgccaggtgcatcgcgtcctgaaagacagctgccaggcggggttcagccacgttctggt

SEQ ID NO: 384544 - DNA, 75 bp, synthetic construct
  source 1..75: mol_type = other DNA
aacccggcgaaaatcgccagccgtaaagcatctcagaatgcgattgaagcgttcggtccgctgttgccggaattc

SEQ ID NO: 384545 - DNA, 75 bp, synthetic construct
  source 1..75: mol_type = other DNA
gttacagtacgcgcatatccgctttatgtgaaacaggaagatttttctgatatcactgccacagcaaaacaccaa

SEQ ID NO: 384546 - DNA, 75 bp, synthetic construct
  source 1..75: mol_type = other DNA
atgcgacaaacgttaagtgacattgcctacacattcggggcgggatttcaaatccgctcccagttgatggggggc

SEQ ID NO: 384547 - DNA, 75 bp, synthetic construct
  source 1..75: mol_type = other DNA
actcaaaaaacaggtgttatttccagcaaccaaaaaagcgtttggtcttttccgtgaccctttcgccgacgaagc

SEQ ID NO: 384548 - DNA, 75 bp, synthetic construct
  source 1..75: mol_type = other DNA
attgtcattgaaccttatatcattgcgatggaagacaacgatgtgaagggaaagaccttaaaagcggcggcgata

SEQ ID NO: 384549 - DNA, 75 bp, synthetic construct
  source 1..75: mol_type = other DNA
gccgaagccattatcagtaccatcgcgccactggaaagcatcagacgcagtcaggacgcccgctttcgccagttg

SEQ ID NO: 384550 - DNA, 75 bp, synthetic construct
  source 1..75: mol_type = other DNA
tcaggacgcccgctttcgccagttgcatcgcgtcctgaaagacagcggccaggcggggttcagccacgttctggt

SEQ ID NO: 384551 - DNA, 75 bp, synthetic construct
  source 1..75: mol_type = other DNA
ccatggaagacaacgatgtgaaagggaaaaccctgaaggcagcagcgattgccgaagccattatcagtaccatcg

SEQ ID NO: 384552 - DNA, 75 bp, synthetic construct
  source 1..75: mol_type = other DNA
accaccccggacattcgctacgtgcgtgaggcgctgtaccagacagcccgtcatggagggtttatggccgtcatc

SEQ ID NO: 384553 - DNA, 75 bp, synthetic construct
  source 1..75: mol_type = other DNA
atgatattgtctgtttttataacggtaatttcaggccatgacaagccgcagccgccaggctgcctactcgatatt

SEQ ID NO: 384554 - DNA, 75 bp, synthetic construct
  source 1..75: mol_type = other DNA
gtagtgatgtcagccatcaaacgagatgttggtgttaaagatagcggaaaactattaccaggacatggcggactc

SEQ ID NO: 384555 - DNA, 75 bp, synthetic construct
  source 1..75: mol_type = other DNA
tgacataattgcacctgttgttgcgtcttcgacaaatagtgaattcatggtccgtgcgagtgacaaaaatgacac

SEQ ID NO: 384556 - DNA, 75 bp, synthetic construct
  source 1..75: mol_type = other DNA
gtgttaaagatagtggaaaactattaccaggacatggcggactccttgacaggattgactcattaattttcaccg

SEQ ID NO: 384557 - DNA, 75 bp, synthetic construct
  source 1..75: mol_type = other DNA
gattgggcaagtgccgaagcattgggaagtcaaaaagataaagcatatttgctccaactttatgtatggaacctc

SEQ ID NO: 384558 - DNA, 75 bp, synthetic construct
  source 1..75: mol_type = other DNA
ctggtcggccaaagcgcgctttttgattcaaatgggcagtatttatttgcgtcgtacctaataaagttaacacca

SEQ ID NO: 384559 - DNA, 75 bp, synthetic construct
  source 1..75: mol_type = other DNA
aggtattgaagcatcattaaaaaaatcgggactagaatacttcgacctctatttattgcaccaggccatgcgcga

SEQ ID NO: 384560 - DNA, 75 bp, synthetic construct
  source 1..75: mol_type = other DNA
ggtaatcctgcgctggaatattcaacgaggcgtagttgttataccgaaatcgactcatcaacaccgtattgagga

SEQ ID NO: 384561 - DNA, 75 bp, synthetic construct
  source 1..75: mol_type = other DNA
tagatactacgcagctgcccgataacgtcgatcttgagcaaacaacacagtttgtggtgcccaacagaggtgcaa

SEQ ID NO: 384562 - DNA, 75 bp, synthetic construct
  source 1..75: mol_type = other DNA
cggtcagccaaatatcgacattctggcgtaaacctgatcacatcttccatccttaccacttcactgcatattgca

SEQ ID NO: 384563 - DNA, 75 bp, synthetic construct
  source 1..75: mol_type = other DNA
ttccatattgttgcccgtctggtttacagaaaaccctggatggctttctttctggcagagcttattgcagccatt

SEQ ID NO: 384564 - DNA, 75 bp, synthetic construct
  source 1..75: mol_type = other DNA
gtgggtattttccctgggtgtctggttccatattgttgcccgtctggtttacagaaaaccctggatggctttctt

SEQ ID NO: 384565 - DNA, 75 bp, synthetic construct
  source 1..75: mol_type = other DNA
caggggctatatagctggatgaaacagctcaacggtatttacaacgtgccgctggttaccatcatcattatgggc

SEQ ID NO: 384566 - DNA, 75 bp, synthetic construct
  source 1..75: mol_type = other DNA
tgatggggtgtgttgggattaagcggttaacgcaacatatggtttccgccagtaaatttgttgcacctgaatttc

SEQ ID NO: 384567 - DNA, 75 bp, synthetic construct
  source 1..75: mol_type = other DNA
attaacgcaacatatggtttccgccagtaaatttgttgcgcctgaatttcatggaaagaaaatcgggttagtgct

SEQ ID NO: 384568 - DNA, 75 bp, synthetic construct
  source 1..75: mol_type = other DNA
aaacgctgtagcccggacgaactgatcgctgcggtgcataccgttgccacgggcggctgttatctgacgccagat

SEQ ID NO: 384569 - DNA, 75 bp, synthetic construct
  source 1..75: mol_type = other DNA
tgcagcctcattagtgtctctgatgacagtcaatatgccctgctgagcagccctggcggttcggcctgttatgac

SEQ ID NO: 384570 - DNA, 75 bp, synthetic construct
  source 1..75: mol_type = other DNA
ctgggagacagaggaactacatgaagcgggagtaattcgtgacctgatggagaattccgttccccgtcgttatag

SEQ ID NO: 384571 - DNA, 75 bp, synthetic construct
  source 1..75: mol_type = other DNA
acgaagaatcagcactgaccgccggacaaggtagttttattaccgaaacgggtgcgcatatcattaacatcaccg

SEQ ID NO: 384572 - DNA, 75 bp, synthetic construct
  source 1..75: mol_type = other DNA
acgcaacccgacctatgactaatgactgtgggacctgggatcaagggggctggcggagagacaacatggatacca

SEQ ID NO: 384573 - DNA, 75 bp, synthetic construct
  source 1..75: mol_type = other DNA
taaatacaccttagccattgccctgttacaaacctgcgggatggttggcctggcgcagtgggcgctggtcagcgg

SEQ ID NO: 384574 - DNA, 75 bp, synthetic construct
  source 1..75: mol_type = other DNA
ctggcgacggcactggcctggagtttgtggctatttgtactgaaaaacttacctgccagtattgccagcttaagc

SEQ ID NO: 384575 - DNA, 75 bp, synthetic construct
  source 1..75: mol_type = other DNA
cgtccatcgcgccaatctgatggaaaaactgggcgtcagtaacgacgtagagctggcgcgccgcatgtttgatgg

SEQ ID NO: 384576 - DNA, 75 bp, synthetic construct
  source 1..75: mol_type = other DNA
gatttgcaggtagttgccgagtttggttcggggcgcgaggcgctggcggggttgccggggcgcggtgtgcaggtg

SEQ ID NO: 384577 - DNA, 75 bp, synthetic construct
  source 1..75: mol_type = other DNA
tgggatcacgacctttaggttatgaaacaattagaattttagaatcaatcacgtgtgttgagattgtcgggtgtg

SEQ ID NO: 384578 - DNA, 75 bp, synthetic construct
  source 1..75: mol_type = other DNA
ctcacctggcacccggaagcctttgccggtatgttcaatacccgcacgctggcaaacattcaggcatcatggcgc

SEQ ID NO: 384579 - DNA, 75 bp, synthetic construct
  source 1..75: mol_type = other DNA
cggaatttatggtggagtggtttgggctgaccaacaccaactggctgtatggttttaccgggatctggctggcac

SEQ ID NO: 384580 - DNA, 75 bp, synthetic construct
  source 1..75: mol_type = other DNA
aggttctggcattcacgccaatggcttttatgatcctcgatggggccattaaaaccattcatccctcgctggaag

SEQ ID NO: 384581 - DNA, 75 bp, synthetic construct
  source 1..75: mol_type = other DNA
gattgaggaggcccacagtctgcccattccgacactgaaacacctcaaacggaaacacctcaaacgcttttttga

SEQ ID NO: 384582 - DNA, 75 bp, synthetic construct
  source 1..75: mol_type = other DNA
accgttcacgccgagaaattaaactcagtcggcggcccgaccgatcccttgccgattggcgcggcatttaccggt

SEQ ID NO: 384583 - DNA, 75 bp, synthetic construct
  source 1..75: mol_type = other DNA
ggcgttaccggcggcgtggttatccatcctcatggcgtgacgctctcgcaatatctgggcaacgcttttgcgctt

SEQ ID NO: 384584 - DNA, 75 bp, synthetic construct
  source 1..75: mol_type = other DNA
gcgctttcctgctgctgttctcgctgctggtgttctgcatccagtatatgtggattggtaaacgctcttacgtca

SEQ ID NO: 384585 - DNA, 75 bp, synthetic construct
  source 1..75: mol_type = other DNA
tgatttgccgtacgccacaaacggtacgtaaattgggtaatgactccaacttattgatagtgttttatgttcaga

SEQ ID NO: 384586 - DNA, 75 bp, synthetic construct
  source 1..75: mol_type = other DNA
tgatttgccgtacgccacaaacggtacgtaaattggtagaaggtggcattgacctgaaagatgtcaacgtcggca

SEQ ID NO: 384587 - DNA, 75 bp, synthetic construct
  source 1..75: mol_type = other DNA
ctgattggcatttttatcgtctggccgagcatcgccatttttatcccgatgttcgccaacgacgcgggagagttc

SEQ ID NO: 384588 - DNA, 75 bp, synthetic construct
  source 1..75: mol_type = other DNA
tttgcgcttattgggttctttcttgggtgtttggctcagcctgtatgggacagcatttcggcatgtagagactat

SEQ ID NO: 384589 - DNA, 75 bp, synthetic construct
  source 1..75: mol_type = other DNA
tgttttcattcaggacgtccctggcgatcaaaaagaacaaatccctgacactaaatctaaaatcgccttaatatt

SEQ ID NO: 384590 - DNA, 75 bp, synthetic construct
  source 1..75: mol_type = other DNA
ttggcattcgtttctttactatcgaaaaaaccattaacgtcatcggcaaagctgcaccacatcagaagatcttcc

SEQ ID NO: 384591 - DNA, 75 bp, synthetic construct
  source 1..75: mol_type = other DNA
gcatgggcgatgtgctctctggtattattagcgcattgctcgggcaaaaattgtcgccatatgatgcggcgtgcg

SEQ ID NO: 384592 - DNA, 75 bp, synthetic construct
  source 1..75: mol_type = other DNA
gcagatgcgctggggcttacactctatgagctgatgcttcgcgctggcgaagccgcattccaggtgtgtcgttcg

SEQ ID NO: 384593 - DNA, 75 bp, synthetic construct
  source 1..75: mol_type = other DNA
aaaaaggaattgtccagctcagtagtgcaaccaacagcgcatctgaaacgcttgccgcgacaccgaaagcagtga

SEQ ID NO: 384594 - DNA, 75 bp, synthetic construct
  source 1..75: mol_type = other DNA
gctgaccgcacgaccggaattgatggtgcatgaactgactatggattcacttaccgaaagcctggaatgggccga

SEQ ID NO: 384595 - DNA, 75 bp, synthetic construct
  source 1..75: mol_type = other DNA
gtgcatgaactgacgatggactctcttaccgaaagcctggaatgggccgatgtggtggtgattggtcccggtctg

SEQ ID NO: 384596 - DNA, 75 bp, synthetic construct
  source 1..75: mol_type = other DNA
tatgtggtcgcgcggctggccacagcggtcggtattgaggtcacgctgctggcccaggaaagtgacaaaccgttg

SEQ ID NO: 384597 - DNA, 75 bp, synthetic construct
  source 1..75: mol_type = other DNA
gcattgattggtggcgctggttacaacgtcggctccccacagcaggcaggcatttcagaactggttctacgagca

SEQ ID NO: 384598 - DNA, 75 bp, synthetic construct
  source 1..75: mol_type = other DNA
gaacacaaagaaactgcccacaccgcttgaaattggcgcttacagcatatcggagattaaccaactcaataaaag

SEQ ID NO: 384599 - DNA, 75 bp, synthetic construct
  source 1..75: mol_type = other DNA
agatgaggcgatcaggcaggcgtcagctgcgaagggtagtgcttcaacggcatccacgaaagcaacagaggcggc

SEQ ID NO: 384600 - DNA, 75 bp, synthetic construct
  source 1..75: mol_type = other DNA
cctgttacccatctggcaataccgagcagggcgataaagccctcaaaggtgcgtctcgtgcaggctcgagtactg

SEQ ID NO: 384601 - DNA, 75 bp, synthetic construct
  source 1..75: mol_type = other DNA
gatagtacagctcagcagtgcgaccaacagtacgtctaacagcacttccgagtcactggcggcaacgccaaaagc

SEQ ID NO: 384602 - DNA, 75 bp, synthetic construct
  source 1..75: mol_type = other DNA
tatccggtgttccatttgatggttctactgatatcactttaaccgctgcgcatgttgccgctttcgcaagaaggg

SEQ ID NO: 384603 - DNA, 75 bp, synthetic construct
  source 1..75: mol_type = other DNA
gacgggggaagcggcactgcgtgctggtgctggtttagttcgagtattgacccgcagtgaaaacattgcgccgct

SEQ ID NO: 384604 - DNA, 75 bp, synthetic construct
  source 1..75: mol_type = other DNA
cgggaagtggatcacctgattattctaaatacagtgttaacacttcttctgcaggcgctcatacgcactctgtat

SEQ ID NO: 384605 - DNA, 75 bp, synthetic construct
  source 1..75: mol_type = other DNA
aacaaccggaggaacagtttcaggtccgttgtctgttacaggtggattaactggttcattgaatggtaatgcaag

SEQ ID NO: 384606 - DNA, 75 bp, synthetic construct
  source 1..75: mol_type = other DNA
atgagctttataaaaataaacaggcaacgtgaatttatggagcgaagtaattcaccacgtcttgtactacgaaaa

SEQ ID NO: 384607 - DNA, 75 bp, synthetic construct
  source 1..75: mol_type = other DNA
ctatccagtgggtttcggagttgaccgatgagcttatggcgaagattcgcgctcatgaatacaaccgctcaatgg

SEQ ID NO: 384608 - DNA, 75 bp, synthetic construct
  source 1..75: mol_type = other DNA
atgcaggactatcttttggagtcgttgaagctccagcgcattgatttttttattaagcttgtagcggctagtgag

SEQ ID NO: 384609 - DNA, 75 bp, synthetic construct
  source 1..75: mol_type = other DNA
taccagtacagatggtaatcatagccactcactgtccggcacagcagcatctgcaggtgcacacgcgcatactgt

SEQ ID NO: 384610 - DNA, 75 bp, synthetic construct
  source 1..75: mol_type = other DNA
gcatcaacaaaggccagtgaagcatcgaaaagtgctgctgctgcagagtcctcaaaaagcgcggcagctaccagt

SEQ ID NO: 384611 - DNA, 75 bp, synthetic construct
  source 1..75: mol_type = other DNA
tggattaactggttcattgaatggtaatgcaagtacagccacgaaattgcagacggcaagatctatcggtggagt

SEQ ID NO: 384612 - DNA, 75 bp, synthetic construct
  source 1..75: mol_type = other DNA
tttgatggttctactgatatcactttaaccgctgcgcatgttgctgcttttgccagaagagcaacggatacgtat

SEQ ID NO: 384613 - DNA, 75 bp, synthetic construct
  source 1..75: mol_type = other DNA
cgtggggaatggaacagtgccttcttctggtgcacacacccactcagtatcaggcactgctgcaagtgcaggggc

SEQ ID NO: 384614 - DNA, 75 bp, synthetic construct
  source 1..75: mol_type = other DNA
accacgaaagcgtcagaagctgccacctcagcccgggatgcggcggcctccaaagaggcggcaaaatcatcagaa

SEQ ID NO: 384615 - DNA, 75 bp, synthetic construct
  source 1..75: mol_type = other DNA
aaggcgcattacagaaatggtggtctgttctaccgttcttcaagagacggttatggttttgaaagtggttgggcg

SEQ ID NO: 384616 - DNA, 75 bp, synthetic construct
  source 1..75: mol_type = other DNA
gcacacattacgccagcaaattctcgctgatttattcggtcaggtgacagaggcttatattgagccaacgtttcg

SEQ ID NO: 384617 - DNA, 75 bp, synthetic construct
  source 1..75: mol_type = other DNA
atcttttgagttgttgcgtctgaaaggggggaatggaagcttgcatatccctgatgaacaggcaacctggtcagt

SEQ ID NO: 384618 - DNA, 75 bp, synthetic construct
  source 1..75: mol_type = other DNA
gcggcaaatgaagctcttgtccaggtatcgcatgttgataatgacattgatggtcagatttttctctgtaaagtg

SEQ ID NO: 384619 - DNA, 75 bp, synthetic construct
  source 1..75: mol_type = other DNA
aacgctatacgatctactcgacgttcgcgcattgctggaaggcgaatcggcaaggttggcagctacgctgggaac

SEQ ID NO: 384620 - DNA, 75 bp, synthetic construct
  source 1..75: mol_type = other DNA
acgcggctggccctatggctatggtggatggggctggtataatcctgggcccgcgagagtagaaactgttgtaac

SEQ ID NO: 384621 - DNA, 75 bp, synthetic construct
  source 1..75: mol_type = other DNA
acaaatttatggttatgcaggcaacgggttataaacgttggcatttgacccagcaggtgattatgccgccgcagc

SEQ ID NO: 384622 - DNA, 75 bp, synthetic construct
  source 1..75: mol_type = other DNA
atgctgcgttttatcacggtgctggtcagtgctttattacttatgcaatccgcatttgccgatacagctcgaccg

SEQ ID NO: 384623 - DNA, 75 bp, synthetic construct
  source 1..75: mol_type = other DNA
gtcaaaaagttaattgctgggaacgccgttttcatctgcgacgagtgtgtggatgtgtgcaacagaattatccgg

SEQ ID NO: 384624 - DNA, 75 bp, synthetic construct
  source 1..75: mol_type = other DNA
ttcatcctgatgactggtgaactggcagcgttaattcaaaacctgattgaaggattaggtggcgaagcacaacgt

SEQ ID NO: 384625 - DNA, 75 bp, synthetic construct
  source 1..75: mol_type = other DNA
acctgaacgcagacgccgggatattcttctggaagaggttctgaggcaggctggtattccgttgctcagaagcca

SEQ ID NO: 384626 - DNA, 75 bp, synthetic construct
  source 1..75: mol_type = other DNA
atgaccgaacgggagcagcgctttctgcgccggctggacagggtgacagatacccgccagtggcggttatgtcca

SEQ ID NO: 384627 - DNA, 75 bp, synthetic construct
  source 1..75: mol_type = other DNA
ccatcatttgtcagtgcgggccgattgatgaccgaacgggaacagtgctttctgcgccggctggacaaggtgact

SEQ ID NO: 384628 - DNA, 75 bp, synthetic construct
  source 1..75: mol_type = other DNA
gacggcaaaatcggcaacacgccctataaatttatggtgatgcaggtaacgggttacaaacgttggcatttaacc

SEQ ID NO: 384629 - DNA, 75 bp, synthetic construct
  source 1..75: mol_type = other DNA
cactttgccgacaatccgaacagagcctgccattggcaggctctggtgttcttttacgctaccatgctaataatc

SEQ ID NO: 384630 - DNA, 75 bp, synthetic construct
  source 1..75: mol_type = other DNA
atggatctgagcgcacatcgctcagccctgaagttcacatccctgacgtttgtcatcctgttgttttttcttggt

SEQ ID NO: 384631 - DNA, 75 bp, synthetic construct
  source 1..75: mol_type = other DNA
gaaggcaaagaagagttaccgccaaagctaaactctaattattcgtataaaggttctatatcagtaacttatgat

SEQ ID NO: 384632 - DNA, 75 bp, synthetic construct
  source 1..75: mol_type = other DNA
aggcttatattgagccaacgtttcgctgtgactatggctataacatttttctcggtaataattttttcgccaact

SEQ ID NO: 384633 - DNA, 75 bp, synthetic construct
  source 1..75: mol_type = other DNA
gtgttggtacgcaagcataacggtcaatggacggttgaactcaacagcgacagcattccacggctacaaattaac

SEQ ID NO: 384634 - DNA, 75 bp, synthetic construct
  source 1..75: mol_type = other DNA
agaagatgtgctgaaagaagccgtcaatctgatccagtcgctcgatccgcgccccgggcagtcgatccagactgg

SEQ ID NO: 384635 - DNA, 75 bp, synthetic construct
  source 1..75: mol_type = other DNA
ctcgagcaagtctggaataagctcgataatactaagagaaaaagcttaattatgtttttagatgagtttataaaa

SEQ ID NO: 384636 - DNA, 75 bp, synthetic construct
  source 1..75: mol_type = other DNA
gatggcctctgtaccgccagggtcaacggtctggaggaaaccatcctctacagccgggacgccgcaggccgcctg

SEQ ID NO: 384637 - DNA, 75 bp, synthetic construct
  source 1..75: mol_type = other DNA
atttccgtggacaactggttacggtagtcgggccaatcaccggtgcggttgacggcaaaatcggcaacacgccct

SEQ ID NO: 384638 - DNA, 75 bp, synthetic construct
  source 1..75: mol_type = other DNA
ttcgacacgcgctatatggcgcaggaaggggccagcggcgtgaacgacagcaccggtgttgcggagaaaaccgaa

SEQ ID NO: 384639 - DNA, 75 bp, synthetic construct
  source 1..75: mol_type = other DNA
ggcacgtaaagatgggtggcgaataagcgtcgacaaaacgcgtgcttttgcgccagggcataaaattttgagaag

SEQ ID NO: 384640 - DNA, 75 bp, synthetic construct
  source 1..75: mol_type = other DNA
ggcgcgcaaggatggctggcgaataaacaaagacaaaacgcgtgcttttgcgccagggcataaaattttgaggag

SEQ ID NO: 384641 - DNA, 75 bp, synthetic construct
  source 1..75: mol_type = other DNA
atgaccgtgaaaaagaatctccacaatatcgaactggaaggtcaccacttgattcgctcggcggtgccgctggag

SEQ ID NO: 384642 - DNA, 75 bp, synthetic construct
  source 1..75: mol_type = other DNA
agtattccgcacattattgtcacttccgcaaccttgcgttcgctgaacagtttttcgcgtttgcaggagatgagt

SEQ ID NO: 384643 - DNA, 75 bp, synthetic construct
  source 1..75: mol_type = other DNA
gcgacgcgggaagagcgcgaagggcagctacatctgtggtttcactgtgtgggtattcgtgttagcgaccaactg

SEQ ID NO: 384644 - DNA, 75 bp, synthetic construct
  source 1..75: mol_type = other DNA
gggcagctcctggatacggcagaattatcgtcgttcctgcctgcaacactgaaagtcgcgatacgtaccgtgcgt

SEQ ID NO: 384645 - DNA, 75 bp, synthetic construct
  source 1..75: mol_type = other DNA
attctgcctgaactggacctggtactgtggctgattaaagccgatgaccgtgccctgtctgtggatgagtatttc

SEQ ID NO: 384646 - DNA, 75 bp, synthetic construct
  source 1..75: mol_type = other DNA
ctccacgatatcgagctggaaggccaccatttgattcgctcggcggtgccgctggagatgaagcaggggtgactg

SEQ ID NO: 384647 - DNA, 75 bp, synthetic construct
  source 1..75: mol_type = other DNA
ggcctttttccgtaagcaggtggagagcaaaaaacatctcggtatgttggtactgtttgccagcggacgggcgat

SEQ ID NO: 384648 - DNA, 75 bp, synthetic construct
  source 1..75: mol_type = other DNA
ttaaccactgcgaacagggcaaaattgttattccccggatgcgcgttgagccttccatcgacaacgaagagcagc

SEQ ID NO: 384649 - DNA, 75 bp, synthetic construct
  source 1..75: mol_type = other DNA
agttgaactgcaccgcaaacgcgtcgctaacggtgagcgcagcgtgctggtgggcttacagtcatttgccgaagg

SEQ ID NO: 384650 - DNA, 75 bp, synthetic construct
  source 1..75: mol_type = other DNA
atgcgctggagatgagcgccgaaatcaccgcgccctggtatcggctacagctggacttgttcacgaaactggtcg

SEQ ID NO: 384651 - DNA, 75 bp, synthetic construct
  source 1..75: mol_type = other DNA
tactatcgcgaatgcccgttttttgtcgctcgtcgggagattcaggaagcggaagtggtggtggcaaaccatgcg

SEQ ID NO: 384652 - DNA, 75 bp, synthetic construct
  source 1..75: mol_type = other DNA
atgcgctggagatgagcgccgaaatcaccgcgccctggtatcggctgcaactggacttgttcacgaaactggtcg

SEQ ID NO: 384653 - DNA, 75 bp, synthetic construct
  source 1..75: mol_type = other DNA
ccctggaaaaaccgctggcgtcgcttcccgatacgcttcgccagcttattcttgaacgtattcagaatctgaccc

SEQ ID NO: 384654 - DNA, 75 bp, synthetic construct
  source 1..75: mol_type = other DNA
ggcagatgcgggtcactatgatactgcgctggttaaacttaagcagcttaaatctggagcaccggacaaagccaa

SEQ ID NO: 384655 - DNA, 75 bp, synthetic construct
  source 1..75: mol_type = other DNA
acctgaaaatgccttaacgcaacaatatcccacagaatacgtgcaggcattacggaataatcaacttgctgccgc

SEQ ID NO: 384656 - DNA, 75 bp, synthetic construct
  source 1..75: mol_type = other DNA
cagagtttccgcccatctcctccgacgaagccagcgaaaaaatatctctttgcgatggcaaacttgctgcgctgg

SEQ ID NO: 384657 - DNA, 75 bp, synthetic construct
  source 1..75: mol_type = other DNA
aggcggacatgtgtgaaaaacttcatgaggatgcagagatgctctgcaggactttatatgggcggttaaatgctc

SEQ ID NO: 384658 - DNA, 75 bp, synthetic construct
  source 1..75: mol_type = other DNA
gtaagtacggtgtctcctgggctttcactgatttttccgacagtaaccagcgtcatgaagtctcacttgagggtc

SEQ ID NO: 384659 - DNA, 75 bp, synthetic construct
  source 1..75: mol_type = other DNA
gcctggacagcattaacgttacaagaatggcagcaggcagctgtcttaacgcacgatgttgtcgaacgtgaaccg

SEQ ID NO: 384660 - DNA, 75 bp, synthetic construct
  source 1..75: mol_type = other DNA
gaaaacggtgattcgaaccgtgcgggaagccgtggtaaccgttgcccgtgccgtctgggactggattttcttatg

SEQ ID NO: 384661 - DNA, 75 bp, synthetic construct
  source 1..75: mol_type = other DNA
tgacgcaggccgacaaaacggagccctgccatgaatgggatatggccggcattcagccttctcccgcacaggcac

SEQ ID NO: 384662 - DNA, 75 bp, synthetic construct
  source 1..75: mol_type = other DNA
gatgaagaatacactgcactgtatcgccgcatcctacccgaactggatttagttttatgggtcatcaaggctgat

SEQ ID NO: 384663 - DNA, 75 bp, synthetic construct
  source 1..75: mol_type = other DNA
agttttggtccggtgtgatgcagccttaccagcagcaggtgctgttcgtgcttaaccagtccgacaaaatcgaac

SEQ ID NO: 384664 - DNA, 75 bp, synthetic construct
  source 1..75: mol_type = other DNA
atgattaaaactgatggccttcaggccttggaaaaaccgctggcatcgcttccctctacgcttcgcgagcttatt

SEQ ID NO: 384665 - DNA, 75 bp, synthetic construct
  source 1..75: mol_type = other DNA
actacgagccggtgattggtatcatgggcaaaagtggtgccggtaagtcttcgctctgtaacgaactcttccggg

SEQ ID NO: 384666 - DNA, 75 bp, synthetic construct
  source 1..75: mol_type = other DNA
tatttccgatagagcaaccggaagtccctgaaggtatagttaaaaagaaagaaaaaaacgaaatccccacgccgt

SEQ ID NO: 384667 - DNA, 75 bp, synthetic construct
  source 1..75: mol_type = other DNA
ctggcgaaactgaaaaccggcggactgccggtgacggccggcgtgattaaagccctgcagcgtgatccggataac

SEQ ID NO: 384668 - DNA, 75 bp, synthetic construct
  source 1..75: mol_type = other DNA
ccggccacacgcggcaatatgcaaaagctggggctgaatgccagctggagcagtgacctgatgtgcggcaacttt

SEQ ID NO: 384669 - DNA, 75 bp, synthetic construct
  source 1..75: mol_type = other DNA
gtgaaaaaaacaccttcattttcagccgctcgcgtaagcctgctgctgaccggctccctgctgaccgtcctcccg

SEQ ID NO: 384670 - DNA, 75 bp, synthetic construct
  source 1..75: mol_type = other DNA
ggcaaaagctcgtagctcgggctaaaccgggggaatatgtacaagggataaacggtaaatgggtgcgaaaatttt

SEQ ID NO: 384671 - DNA, 75 bp, synthetic construct
  source 1..75: mol_type = other DNA
ccgaacgtaaagcgagctatcaacaactggcaaagcagaataatgtgtcggtggatgatatcgcgaaactcgccg

SEQ ID NO: 384672 - DNA, 75 bp, synthetic construct
  source 1..75: mol_type = other DNA
tactttgaatctgatctgggagaaggtaaagcgaaatactggacactggatattaatgaggcccatgtatttccc

SEQ ID NO: 384673 - DNA, 75 bp, synthetic construct
  source 1..75: mol_type = other DNA
gccggatgctgatggccgggcaatcggaacccaatgccgccgaccagaccatggcactggatgaatccgaccgcc

SEQ ID NO: 384674 - DNA, 75 bp, synthetic construct
  source 1..75: mol_type = other DNA
ctcgtgaacgggcaggataagcccacggcagagaatctggcaaaactgaagaccggcagtctggcggtatctgcc

SEQ ID NO: 384675 - DNA, 75 bp, synthetic construct
  source 1..75: mol_type = other DNA
cgatcgcagcaagtggacgcaggccgcgatgatggaggagtacaaaaaggttgttaataccagtgacggtgatgc

SEQ ID NO: 384676 - DNA, 75 bp, synthetic construct
  source 1..75: mol_type = other DNA
acggtgagcaatcagctgaacggggtgacggacggttttaaaaacctgatgggggatgtgatacagggggcgacg

SEQ ID NO: 384677 - DNA, 75 bp, synthetic construct
  source 1..75: mol_type = other DNA
tggttaatggtactgaaaaaccgacagcagcgaatctggccaaactccgatccggcagtctgacggtgacggccg

SEQ ID NO: 384678 - DNA, 75 bp, synthetic construct
  source 1..75: mol_type = other DNA
agaattttaaaggaaattcaggacgtagctggattggtggtcagaaacggggaggggcagggcaaccggctattc

SEQ ID NO: 384679 - DNA, 75 bp, synthetic construct
  source 1..75: mol_type = other DNA
aagctcgtaatctgagttaccaacaattggcaaagcaaaataatgtatccactgatgagatagcaaaattggcag

SEQ ID NO: 384680 - DNA, 75 bp, synthetic construct
  source 1..75: mol_type = other DNA
ggcaaaagctcgtagaacgggccaaacccggggaatatgtacaagggataaacggtaaatgggtgcgaaaatttt

SEQ ID NO: 384681 - DNA, 75 bp, synthetic construct
  source 1..75: mol_type = other DNA
atgtatgaggagggtgtgacatttttcatgaaagtaaaacaggtgataacctcctttcgtaagggggattcacag

SEQ ID NO: 384682 - DNA, 75 bp, synthetic construct
  source 1..75: mol_type = other DNA
atgtatgaggagcgtgtgacatttttcatgaaagtaaaacaggtgataacctcctttcgtaaggggcattcacag

SEQ ID NO: 384683 - DNA, 75 bp, synthetic construct
  source 1..75: mol_type = other DNA
tgaggaagtgctggaaatctgtcagcggctggcaaagctcaccgagatgctgcgtggtctggcggagttatttct

SEQ ID NO: 384684 - DNA, 75 bp, synthetic construct
  source 1..75: mol_type = other DNA
atgggatggtctgcgcgatcatactgatatcgctatagatgatgatctctggcgtcgtttgagtaccgacaaagc

SEQ ID NO: 384685 - DNA, 75 bp, synthetic construct
  source 1..75: mol_type = other DNA
tgaaaggcctccatcccaataagagcgatgcagaaattgacgctatgatgggtaccacgccgatggttggcgtga

SEQ ID NO: 384686 - DNA, 75 bp, synthetic construct
  source 1..75: mol_type = other DNA
atgtatgaggagagtgtgacatttttcatgaaagtaaaacaggtgataacctcctttcgtaaggggaattcacag

SEQ ID NO: 384687 - DNA, 75 bp, synthetic construct
  source 1..75: mol_type = other DNA
ttgtcattaatgcattatttaacgccagtgcgatggcgctgacgctggatgacgctcgaactcaggggcgtgttg

SEQ ID NO: 384688 - DNA, 75 bp, synthetic construct
  source 1..75: mol_type = other DNA
gaacctgccttccagtgcagaagttctgccggagttaacgccctgcggcgatgttggtctggtcagtgcctattt

SEQ ID NO: 384689 - DNA, 75 bp, synthetic construct
  source 1..75: mol_type = other DNA
atgtatgaggagagtgtgacatttttcatgagagtaaaacaggtgataacctcctttcgtaagggggattcacag

SEQ ID NO: 384690 - DNA, 75 bp, synthetic construct
  source 1..75: mol_type = other DNA
atgtatgaggagagtgtgacatttttcatgacagtaaaacaggtgataacctcctttcgtaaggggcattcacag

SEQ ID NO: 384691 - DNA, 75 bp, synthetic construct
  source 1..75: mol_type = other DNA
atgtatgaggagagtgtgacatttttcatgatagtaaaacaggtgataacctcctttcgtaaggggtattcacag

SEQ ID NO: 384692 - DNA, 75 bp, synthetic construct
  source 1..75: mol_type = other DNA
gggaagtggggattaaggatgttcgggcgctacgtatacttggggcgaaaatgtgctggttgagactacggcagc

SEQ ID NO: 384693 - DNA, 75 bp, synthetic construct
  source 1..75: mol_type = other DNA
ttcaaaggcatgaaagaacttgctgacaagaagtttattgcagagaccatgatacagaactattactttattaac

SEQ ID NO: 384694 - DNA, 75 bp, synthetic construct
  source 1..75: mol_type = other DNA
aaaactcgaggcagcggcagcgactgcgcgtgaggcatataaaccgaaaagaaatattagcccggcaaaaaatga

SEQ ID NO: 384695 - DNA, 75 bp, synthetic construct
  source 1..75: mol_type = other DNA
ctccaccacgtcgaacagcggcggtagcgccacggtgggcggggcggtgacggggtatctttcgctcaacgaagg

SEQ ID NO: 384696 - DNA, 75 bp, synthetic construct
  source 1..75: mol_type = other DNA
cggtggcacgccgccaggagcttgcagaatgggcagattctcttacgccgaaacaggagtttcctgcggaacttg

SEQ ID NO: 384697 - DNA, 75 bp, synthetic construct
  source 1..75: mol_type = other DNA
ttgggcacaattgaataccgatcattgtttggcagttacagcctgaccgttgacgacacggtgtttgcgatggtt

SEQ ID NO: 384698 - DNA, 75 bp, synthetic construct
  source 1..75: mol_type = other DNA
atggcccgtcttgcagactacagcaatgacgagggcgtgtcatggcctgctattgaaactatccggcgtcagatc

SEQ ID NO: 384699 - DNA, 75 bp, synthetic construct
  source 1..75: mol_type = other DNA
tttgatggatcaaccgttgataaaaaacggtcggttaggggggcgatgattgaccccgatccgtcagtattaaaa

SEQ ID NO: 384700 - DNA, 75 bp, synthetic construct
  source 1..75: mol_type = other DNA
cctgaacggcgaactgattggtatcaacaccgcgatcctcgcaccggacggcggaaacatcggtatcggttttgc

SEQ ID NO: 384701 - DNA, 75 bp, synthetic construct
  source 1..75: mol_type = other DNA
gccagcgatgatggcgagatcacgagaccgaaagaacccaactggactgcatgggccaatgacgtgcggacaatg

SEQ ID NO: 384702 - DNA, 75 bp, synthetic construct
  source 1..75: mol_type = other DNA
taggggggcgatggttggccccgatccgtcagtattaaaacctgatccgtcagataaaagatcttttcgtccgga

SEQ ID NO: 384703 - DNA, 75 bp, synthetic construct
  source 1..75: mol_type = other DNA
gcgcgtgaggcatataaaccgaaaagaaaaattaacccggcaaaaaatgacccgctaaccgttgacccgtcaaat

SEQ ID NO: 384704 - DNA, 75 bp, synthetic construct
  source 1..75: mol_type = other DNA
gaggacttaaagcgagacatcattgattacataaactattataatcaattgaggataaaggaaaacttggcggtc

SEQ ID NO: 384705 - DNA, 75 bp, synthetic construct
  source 1..75: mol_type = other DNA
atgaataatgaacaacgcggcgtcgcgctgctcattgtattgatgctactggcgctcatggctgctctggcagca

SEQ ID NO: 384706 - DNA, 75 bp, synthetic construct
  source 1..75: mol_type = other DNA
catttctctactgggcacagcaggatttctccggcgtgaagcccttggtttctcaggtgaaagaacatctctttc

SEQ ID NO: 384707 - DNA, 75 bp, synthetic construct
  source 1..75: mol_type = other DNA
tttcaaccgtaaacagcagagcgcccaaatctatcggcgtacgctgcaactctactaatcataaggatcgtgatg

SEQ ID NO: 384708 - DNA, 75 bp, synthetic construct
  source 1..75: mol_type = other DNA
gacagttactcccccgccatcgcgctttctgggggaatagtgaagcgtatggcactgcaaccaccgcattttcgc

SEQ ID NO: 384709 - DNA, 75 bp, synthetic construct
  source 1..75: mol_type = other DNA
cggcgtgcaggccttgcgcgaggcgattgctcagaaaacggaacgtttgtatggctatcaaccagatgccgatag

SEQ ID NO: 384710 - DNA, 75 bp, synthetic construct
  source 1..75: mol_type = other DNA
gtcacctggtttattcgtcggggagtacaacgccccgttgccattacgattgtagtggtggcgatgctgatcgca

SEQ ID NO: 384711 - DNA, 75 bp, synthetic construct
  source 1..75: mol_type = other DNA
cattaggacagcaatcgattatttattgtagcaagcaacaaaagtatcaatctgcgctcgcgacagattatttga

SEQ ID NO: 384712 - DNA, 75 bp, synthetic construct
  source 1..75: mol_type = other DNA
atttaatgattacctggtcatcaacggtagcccattcatttgcagaacttgaagtattgattggaaatacgaaac

SEQ ID NO: 384713 - DNA, 75 bp, synthetic construct
  source 1..75: mol_type = other DNA
cgatatctacgaaaaaatcatgtccgatctggagttcgaccgcgacaatctggaggaagtctggcgtcagcaacc

SEQ ID NO: 384714 - DNA, 75 bp, synthetic construct
  source 1..75: mol_type = other DNA
cggcatagtgccaatcagatgctttttctgactggcgaattacgtcagataaaaggcataaccgaaaacatctat

SEQ ID NO: 384715 - DNA, 75 bp, synthetic construct
  source 1..75: mol_type = other DNA
tgagatcgtgcaatcaatcgctgactatattgatgccgatgactcaccacgctttcacggcgcagaagataactt

SEQ ID NO: 384716 - DNA, 75 bp, synthetic construct
  source 1..75: mol_type = other DNA
atgaataatgaacaacgcagcgtcgcgctgctcattgtactcatgttactggcgctcatggctgctctggcagca

SEQ ID NO: 384717 - DNA, 75 bp, synthetic construct
  source 1..75: mol_type = other DNA
aattcatggcgctgggttccggcgtcatcattgatgccgataaaggctatgttgtcaccaacaaccacgttgttg

SEQ ID NO: 384718 - DNA, 75 bp, synthetic construct
  source 1..75: mol_type = other DNA
actactgtcggctggaaagggttaattaacgatccgcatatggatggctcttttgacgtagaagccgggctgcaa

SEQ ID NO: 384719 - DNA, 75 bp, synthetic construct
  source 1..75: mol_type = other DNA
atgatcgaaagcaacatccacgaggggaatcaatcttccgagcagcctcgcagtgaaatggagtacggcgtatcc

SEQ ID NO: 384720 - DNA, 75 bp, synthetic construct
  source 1..75: mol_type = other DNA
aaccatttcagatattatcgccgggcgcgatcctcgtctgctggtagtatgtggtccttgttccattcatgatcc

SEQ ID NO: 384721 - DNA, 75 bp, synthetic construct
  source 1..75: mol_type = other DNA
aaaaattcaacaggaaagatatgagaacggagagatcaaactcaacacgctgaaacaaaaagcggcccctctcaa

SEQ ID NO: 384722 - DNA, 75 bp, synthetic construct
  source 1..75: mol_type = other DNA
gcaaacgggcgatgtcccgccaggctttaaccctgctgaatcggcaaaaaaaccacaggtacggatatcacggca

SEQ ID NO: 384723 - DNA, 75 bp, synthetic construct
  source 1..75: mol_type = other DNA
ttgctgggtcattcgaatcaaaaaatgaccgatatttacaacgatgcacgcggtaaggagtggaaaaaactggtc

SEQ ID NO: 384724 - DNA, 75 bp, synthetic construct
  source 1..75: mol_type = other DNA
gtcagaagatgtaattgctaaaggcagtgcgataagtacagaagaataccaggacattaagggctttcatcagtg

SEQ ID NO: 384725 - DNA, 75 bp, synthetic construct
  source 1..75: mol_type = other DNA
gccgggctgtggcgcttattgttcgccagcagcggctgaaattaagcctgtccggaaggctggtgataaaggtga

SEQ ID NO: 384726 - DNA, 75 bp, synthetic construct
  source 1..75: mol_type = other DNA
cgagcagtttgacaaaattaatattgtgcgcggtcagctcgtttctggtggtcggttgggcgtgaagatttacaa

SEQ ID NO: 384727 - DNA, 75 bp, synthetic construct
  source 1..75: mol_type = other DNA
tatcgaccagacggtcaacaccagctggggcggtttacaggccaccgatgccactcacgcttacgatctcagcgc

SEQ ID NO: 384728 - DNA, 75 bp, synthetic construct
  source 1..75: mol_type = other DNA
cagcaatgcatcaacaatcaagattgtagatataattctttaccattcgaaaaaatttactctttacaaataaaa

SEQ ID NO: 384729 - DNA, 75 bp, synthetic construct
  source 1..75: mol_type = other DNA
ctaaataataccgatcagcataataatgctataataaactataaagcgcttaataataaaataaaacagaagtgt

SEQ ID NO: 384730 - DNA, 75 bp, synthetic construct
  source 1..75: mol_type = other DNA
atacaaggcaaagggacataacagaatgggacaaattttcaggaaggtattgatcgatgttttccgggaggctca

SEQ ID NO: 384731 - DNA, 75 bp, synthetic construct
  source 1..75: mol_type = other DNA
gacttcgaacgtctgatggaaggcgctaagctgctgaaatgttcagagtttggtgaagcgatcatcaagaatatg

SEQ ID NO: 384732 - DNA, 75 bp, synthetic construct
  source 1..75: mol_type = other DNA
gacttcgagcgtctgatggaaggcgctaaactgctgaaatgttcagaatttggtgatgcgatcatcaagaacatg

SEQ ID NO: 384733 - DNA, 75 bp, synthetic construct
  source 1..75: mol_type = other DNA
actgtaacctatgacttcgaacgtctgatggaaggcgctaaattgctgaaatgtagcgagtttggcgacgcgatc

SEQ ID NO: 384734 - DNA, 75 bp, synthetic construct
  source 1..75: mol_type = other DNA
agaaggtagcacaaccgttaatacaccgcgtatgccgcgtaatttccagcagttcttcggtgatgattctccgtt

SEQ ID NO: 384735 - DNA, 75 bp, synthetic construct
  source 1..75: mol_type = other DNA
taaaacctgatccgtcagataaaagatcttctcgtccggaagcttcgcaaccggacccgcagacggctgaacagg

SEQ ID NO: 384736 - DNA, 75 bp, synthetic construct
  source 1..75: mol_type = other DNA
gctgaacaggattttttaacccgacaccctgacgcggttgtgttcagtgcgaaaaaacgccagtggggcagccag

SEQ ID NO: 384737 - DNA, 75 bp, synthetic construct
  source 1..75: mol_type = other DNA
aaaaggttgtccggaagatacagggtaagaaaaaggagctgccaatcggccagccctggattcacggggtagaac

SEQ ID NO: 384738 - DNA, 75 bp, synthetic construct
  source 1..75: mol_type = other DNA
tggtttttgatgccagcaaaccggatggcacaccgcgcaaactgctggatgtgacgcgcctgcatcagcttggct

SEQ ID NO: 384739 - DNA, 75 bp, synthetic construct
  source 1..75: mol_type = other DNA
ggtcatactgaggggcacaccttaattgtcggtacgaccggtgccggaaaaacccgatgctttgatgcgatgatc

SEQ ID NO: 384740 - DNA, 75 bp, synthetic construct
  source 1..75: mol_type = other DNA
tgttaaaggtatggaaggcgcaatcaatgccaagaccgtaacttatgacttcgaacgtctgatggaaggcgctaa

SEQ ID NO: 384741 - DNA, 75 bp, synthetic construct
  source 1..75: mol_type = other DNA
aatcaatgccaagaccgtaacttatgacttcgaacgtctgatggaaggcgctaagctgctgaaatgttcagagtt

SEQ ID NO: 384742 - DNA, 75 bp, synthetic construct
  source 1..75: mol_type = other DNA
ccggtgacagatacaactacggcgtcaacaacagacccgtaaatatctttgttgatgaggctgctgaggtgatca

SEQ ID NO: 384743 - DNA, 75 bp, synthetic construct
  source 1..75: mol_type = other DNA
cggcgctgcgatcatggctaccggaatttgtaacgcgttgccgtcagtatgacagctttggtttttacgcgacac

SEQ ID NO: 384744 - DNA, 75 bp, synthetic construct
  source 1..75: mol_type = other DNA
gctgcggcggtgaatgagctggaaaactgtattgccacgctgacagtacgtgacgatgcccgtctggaactggcc

SEQ ID NO: 384745 - DNA, 75 bp, synthetic construct
  source 1..75: mol_type = other DNA
cctctcaaaagcagaggggggatatcgtcatcattggtaaaggtcccagtattgaccagatagatttatccctgc

SEQ ID NO: 384746 - DNA, 75 bp, synthetic construct
  source 1..75: mol_type = other DNA
tgtttttttaaaaatctacctttccccaaattaaaccccgccccgcttggggggggccgttttgtatggaaacca

SEQ ID NO: 384747 - DNA, 75 bp, synthetic construct
  source 1..75: mol_type = other DNA
caaacattatttgagctaggttcggtgagcaaaacatttaccggcgtgcttggtggcgacgctattgcacgagag

SEQ ID NO: 384748 - DNA, 75 bp, synthetic construct
  source 1..75: mol_type = other DNA
gtttgagttttgagcaggcgatgcaaactcgtgtcttccagccactcaaactcaaccatacgtggattaatgtac

SEQ ID NO: 384749 - DNA, 75 bp, synthetic construct
  source 1..75: mol_type = other DNA
tgataccatcactctgttgcagatggaaatcgaagagctgaaagaaaaaacaactcactgtcgcaggaagttcaa

SEQ ID NO: 384750 - DNA, 75 bp, synthetic construct
  source 1..75: mol_type = other DNA
tggtgaagcgacgcgtcttatcaacaaagaagacgccgtagttgtggatttacgtcagcgtgatgacttccgtaa

SEQ ID NO: 384751 - DNA, 75 bp, synthetic construct
  source 1..75: mol_type = other DNA
agcgctggtactgccggaagcaggacgggaaaaagatccgcgtcattggcagacagttatggcacacggtcatgt

SEQ ID NO: 384752 - DNA, 75 bp, synthetic construct
  source 1..75: mol_type = other DNA
tgggtcgttcaaggtactcatctattgcgatgatcgattacttcaatgcaatcgaacgtctgtgcgaagagaaaa

SEQ ID NO: 384753 - DNA, 75 bp, synthetic construct
  source 1..75: mol_type = other DNA
gccgacctgaataaagtaactttggtcagccagggctatgaagcggaagtggctgaacaaagcaatgaactcaaa

SEQ ID NO: 384754 - DNA, 75 bp, synthetic construct
  source 1..75: mol_type = other DNA
aaattaacccggaaaatatcgatctgagcttcaaagttcactggctcagaaacgctgttggcggctcgtttgcaa

SEQ ID NO: 384755 - DNA, 75 bp, synthetic construct
  source 1..75: mol_type = other DNA
aatgccgggcaggtttttgctgttcgtctggcgcgctttattggttgcacgcaaaagcggaatattgatggagat

SEQ ID NO: 384756 - DNA, 75 bp, synthetic construct
  source 1..75: mol_type = other DNA
gccgtaaaagcaatacgcgaggcactaggaaacgaagagttccagcgtttagcaagggctggaattgtggcatcg

SEQ ID NO: 384757 - DNA, 75 bp, synthetic construct
  source 1..75: mol_type = other DNA
caaggagagcaggggaaatacgccgggcaattactgatgatatgcgcacaatggcggaaaacggcggatttcttg

SEQ ID NO: 384758 - DNA, 75 bp, synthetic construct
  source 1..75: mol_type = other DNA
gtaatattgaagacagtcgcctggcgatgctgggagaagagttcacgtttattatgctgctttccggttcatgga

SEQ ID NO: 384759 - DNA, 75 bp, synthetic construct
  source 1..75: mol_type = other DNA
aacataccatttgacgtattgcagggtggcgcaagtctgattaatgcaatcagccaggggcttggtggccccaag

SEQ ID NO: 384760 - DNA, 75 bp, synthetic construct
  source 1..75: mol_type = other DNA
gaaacccgtgaaatggtgatagagcgagtgctcgcgctggataccgcagagttcgacctggaagacctgaaatgg

SEQ ID NO: 384761 - DNA, 75 bp, synthetic construct
  source 1..75: mol_type = other DNA
gcatctgcggacgcagcaaatattgagcaagcgttcaaagccctatgtacagaactcaatgcacaaggcagtatt

SEQ ID NO: 384762 - DNA, 75 bp, synthetic construct
  source 1..75: mol_type = other DNA
accaccggtggttacccgcgtattgcctgtatcattgaggctgatatgtaccatctggcgcaaattccgctcggt

SEQ ID NO: 384763 - DNA, 75 bp, synthetic construct
  source 1..75: mol_type = other DNA
tgtataccactgtgcaggatggcggtcgtcacggttttcgccagtcgggtatcagccactgtggcgcactggata

SEQ ID NO: 384764 - DNA, 75 bp, synthetic construct
  source 1..75: mol_type = other DNA
atgaatattaccccgtttccgacgctttcgccggcaaccatagatgccataaatgttatcggacagtggctggcg

SEQ ID NO: 384765 - DNA, 75 bp, synthetic construct
  source 1..75: mol_type = other DNA
cgcccatctctggacgttagtcggcttatcaattgtgcctggttgctttggctggctatgggcagcaaaacgttg

SEQ ID NO: 384766 - DNA, 75 bp, synthetic construct
  source 1..75: mol_type = other DNA
taatgagctggtggttactggctattctgtacggcctggcgggatttggttatatcatcgtcgcgacttacctgc

SEQ ID NO: 384767 - DNA, 75 bp, synthetic construct
  source 1..75: mol_type = other DNA
gaaaaaacacgccatcgcaccaatgccattggcaaaaacggagcaacagataatgagctggtggttactggctat

SEQ ID NO: 384768 - DNA, 75 bp, synthetic construct
  source 1..75: mol_type = other DNA
gctgttctttagctgccatttcatcaatgacggctcgctcttctgctgacaatcgaagtgccagtcgcggtcctg

SEQ ID NO: 384769 - DNA, 75 bp, synthetic construct
  source 1..75: mol_type = other DNA
ccaacgtgcagggtaatttgatggatgagatgctgattacgatcattcaggggcacgctcagcgactcgggatga

SEQ ID NO: 384770 - DNA, 75 bp, synthetic construct
  source 1..75: mol_type = other DNA
gctattggtgtcgatctgatttacggcgatgtgattgccaacgttcaaccgttggatttactggtggatagccgt

SEQ ID NO: 384771 - DNA, 75 bp, synthetic construct
  source 1..75: mol_type = other DNA
acctgaaagtacagaaaaacgcacaggaccggattatcaagaaaggtaaggaactgcttaaagcatttttaaata

SEQ ID NO: 384772 - DNA, 75 bp, synthetic construct
  source 1..75: mol_type = other DNA
gaaaaacgctactacaaccgcaatggcgatgttgtctgggcgttgcttgccgtctcactggtgcgccacacggat

SEQ ID NO: 384773 - DNA, 75 bp, synthetic construct
  source 1..75: mol_type = other DNA
tcggcatcaatatggatatgaccgaagtgaaacagcttaacgaggcattgtttcaggaaaaagagcgcctgcaca

SEQ ID NO: 384774 - DNA, 75 bp, synthetic construct
  source 1..75: mol_type = other DNA
ctggcgatattgtttgggcattgcttgctgtctcactggtacgccacaccgatggtacgccgctctactttattg

SEQ ID NO: 384775 - DNA, 75 bp, synthetic construct
  source 1..75: mol_type = other DNA
gaaggcacatactttttgctggtggattacagcgcggtatctacgctggatgatgttgagttttgtcagtggctg

SEQ ID NO: 384776 - DNA, 75 bp, synthetic construct
  source 1..75: mol_type = other DNA
ccttcccacataaactgattcgtctctgttttgccaagaaggagtcgacgttgctggcggcggctgatcgtctgc

SEQ ID NO: 384777 - DNA, 75 bp, synthetic construct
  source 1..75: mol_type = other DNA
attgctcagaaaacggaacgtctgtatggctatcaaccggatgccgacagcgatatcaccgtgacggcaggggcg

SEQ ID NO: 384778 - DNA, 75 bp, synthetic construct
  source 1..75: mol_type = other DNA
atcaaccccgattggcggttattcagcgaagatttaaagatgtggttaattattgaccatctggaatacaaccgc

SEQ ID NO: 384779 - DNA, 75 bp, synthetic construct
  source 1..75: mol_type = other DNA
tttgctggtggattacagcgccgtatctacgctggatgatgttgagttttgccagtggctgacgcgggagcacgg

SEQ ID NO: 384780 - DNA, 75 bp, synthetic construct
  source 1..75: mol_type = other DNA
cggcgtgcaggcattacgcgaggcgattgctcagaaaaccgcgcggctgtatggctatcaaccagatgctgacag

SEQ ID NO: 384781 - DNA, 75 bp, synthetic construct
  source 1..75: mol_type = other DNA
acgcaccgaacaggtgaatcagcaactgatggagcgcatcacgctggctaacgaagcgggcgggattggcatctg

SEQ ID NO: 384782 - DNA, 75 bp, synthetic construct
  source 1..75: mol_type = other DNA
gctcgccctttaagctggaatttcgcattaccgtaaaagacggtattcgccatatccgcgccctcgccaaccggg

SEQ ID NO: 384783 - DNA, 75 bp, synthetic construct
  source 1..75: mol_type = other DNA
tttctggcatcggcgtcgatctgatttatggtgatgtgattgccgatgcccaaccgctggatttgctggtgaata

SEQ ID NO: 384784 - DNA, 75 bp, synthetic construct
  source 1..75: mol_type = other DNA
caatcacgctcgccctttaaactggaatttcgcattgccgtgaaagatggcatccgccatatccgcgccctcgcc

SEQ ID NO: 384785 - DNA, 75 bp, synthetic construct
  source 1..75: mol_type = other DNA
gggggcagccatgccgcagtcggccttcgaggcgatgacggatgcagccttcaatctggggtgctccggtctgat

SEQ ID NO: 384786 - DNA, 75 bp, synthetic construct
  source 1..75: mol_type = other DNA
cgggtcggcgccagtgccggaattacgctgattgatggctgtaatcatcaggccgcagaggtgatgtcgcaggca

SEQ ID NO: 384787 - DNA, 75 bp, synthetic construct
  source 1..75: mol_type = other DNA
gtacgcatcaacgacatgctctggtgtttatcgatcttgatcgctttaaagccgtaaatgacagcgccgggcacg

SEQ ID NO: 384788 - DNA, 75 bp, synthetic construct
  source 1..75: mol_type = other DNA
atcctgctgcccgccaacatcatgaccatggtgatgtacgcctttcgcgctgaacgcaagcatatttcagaaagc

SEQ ID NO: 384789 - DNA, 75 bp, synthetic construct
  source 1..75: mol_type = other DNA
gctgctgccagactgcaatgttgaaagcgctcgttttatcgctacacgtattatcagtgctgtgaatgactatca

SEQ ID NO: 384790 - DNA, 75 bp, synthetic construct
  source 1..75: mol_type = other DNA
gaatattccgccatcggcatggcattagtgggcaccgaggggcaatggctgcaatccaacaaagcgctctgccag

SEQ ID NO: 384791 - DNA, 75 bp, synthetic construct
  source 1..75: mol_type = other DNA
cggcgggcgacgcttttctgcgcgaactggcgtcgttggcgggcatgcggcgggcgacgctttactgcgcgaact

SEQ ID NO: 384792 - DNA, 75 bp, synthetic construct
  source 1..75: mol_type = other DNA
tatgactgtgtgctgccggaagatcgccaacacgccgaaaaagtgattcgtgattcattacaggctcgcttgcct

SEQ ID NO: 384793 - DNA, 75 bp, synthetic construct
  source 1..75: mol_type = other DNA
catcgccgggccagtcgttttacccttagtgatggatacgctttcgggcatcggcgtcgatctgatttatggtga

SEQ ID NO: 384794 - DNA, 75 bp, synthetic construct
  source 1..75: mol_type = other DNA
agtgtcagcgatcgggcagggaacagcaccagccacagcgcgaatttcacggtagatacctcagcacccgtggtc

SEQ ID NO: 384795 - DNA, 75 bp, synthetic construct
  source 1..75: mol_type = other DNA
atgaacagaagaagaaaactgttaataccgttgttattctgcggcgcgatgctcaccgcctgcgatgacaaatcg

SEQ ID NO: 384796 - DNA, 75 bp, synthetic construct
  source 1..75: mol_type = other DNA
acgctaccaaagctatcggaaatcagtgggttgttacctctggtttgcaagctggcgatcgggtgatcgtttccg

SEQ ID NO: 384797 - DNA, 75 bp, synthetic construct
  source 1..75: mol_type = other DNA
agcactggcggagaagcgggggatgtcgtcaccgtcacgctaaacagtaaaacctacaccacgacgctggatgct

SEQ ID NO: 384798 - DNA, 75 bp, synthetic construct
  source 1..75: mol_type = other DNA
cggccgagctggccattctgttgcggcagatggctacggcctcggcaggtgatgcaaggtcggaggacgccgata

SEQ ID NO: 384799 - DNA, 75 bp, synthetic construct
  source 1..75: mol_type = other DNA
tacggcgatcatgcgaaaggggttgttaagggtagttttgataatcgtgtaatggcgcattttgttaagtggtga

SEQ ID NO: 384800 - DNA, 75 bp, synthetic construct
  source 1..75: mol_type = other DNA
atgtttgcaagatgcgtttattctgacactacatgctttactactggcgaactatatagcgttgatcttcttaat

SEQ ID NO: 384801 - DNA, 75 bp, synthetic construct
  source 1..75: mol_type = other DNA
atctgtatgctcctgattgtgaagcgtctggtgttcggtctgggctctgtctccgacctgaacggcggcttcccg

SEQ ID NO: 384802 - DNA, 75 bp, synthetic construct
  source 1..75: mol_type = other DNA
ggcacatggtacacaggtacgcaaattcagccaggtgtcgaaaagtttattaaagattttaacgatgctaaatag

SEQ ID NO: 384803 - DNA, 75 bp, synthetic construct
  source 1..75: mol_type = other DNA
attgttgaggccgtccttcaagtggatcggtttgaaaaatatatgttctggctaatcaaagataagacgctacct

SEQ ID NO: 384804 - DNA, 75 bp, synthetic construct
  source 1..75: mol_type = other DNA
atgccagagattaaaggcaccgtcactgaagtcctggtaaaacaggcactgtattccggtgaagtaaataaatta

SEQ ID NO: 384805 - DNA, 75 bp, synthetic construct
  source 1..75: mol_type = other DNA
acgccagaagaaattcgtactttgatgcagatagcagagctaacaggaagcaaagcggccacactcaccggcctg

SEQ ID NO: 384806 - DNA, 75 bp, synthetic construct
  source 1..75: mol_type = other DNA
aaagacagtcgaaccgtcaggcgctggattgggggagatacccccattcctttttcggcctgggctatcctggtt

SEQ ID NO: 384807 - DNA, 75 bp, synthetic construct
  source 1..75: mol_type = other DNA
cctacgcctgttctctatgcacagcctgtgacagcgtttgcccggtgcgtattccgctgtcgaaactaattttac

SEQ ID NO: 384808 - DNA, 75 bp, synthetic construct
  source 1..75: mol_type = other DNA
tctccagctggatcaagatccgccatctcatgttgtggtcccggcaattcataaagatcgccatcagatccgtcg

SEQ ID NO: 384809 - DNA, 75 bp, synthetic construct
  source 1..75: mol_type = other DNA
ctgataatgagccgaaaaccgacgcgcagccagagcaaccagaaccagctcagcccggagctgacagtaccatga

SEQ ID NO: 384810 - DNA, 75 bp, synthetic construct
  source 1..75: mol_type = other DNA
agacattactcacccgtccgccacttgtcagcaaagcagcaagcttcttcctgttaccgttcgacttgcatgtgt

SEQ ID NO: 384811 - DNA, 75 bp, synthetic construct
  source 1..75: mol_type = other DNA
tgttggtgttgtggtactatccgcaatagtgttatctcttcttttaataggagttgttttaaagccgttcatcat

SEQ ID NO: 384812 - DNA, 75 bp, synthetic construct
  source 1..75: mol_type = other DNA
actacggcaaggtgactcaggttcgtcttgagccgtcggtggcagcagcaaaagcgggaatactgccggagggat

SEQ ID NO: 384813 - DNA, 75 bp, synthetic construct
  source 1..75: mol_type = other DNA
gatggaaatccacgttcgccagcgcaccatgaagaaagagctggaaaagctgaccagtgcggatgagatactggc

SEQ ID NO: 384814 - DNA, 75 bp, synthetic construct
  source 1..75: mol_type = other DNA
gtgtgtggggccggagaatatgccgatctggagagaagcggggcaatgatggtaaatattaaaaacttcatctgg

SEQ ID NO: 384815 - DNA, 75 bp, synthetic construct
  source 1..75: mol_type = other DNA
ttaggcataaaacaaaaaaataatatacagaatttgagttttatcaggctttttctggcaatattgctgcttttt

SEQ ID NO: 384816 - DNA, 75 bp, synthetic construct
  source 1..75: mol_type = other DNA
attccacctgttctggaattttcggtcattcatcagtacgttgagccagatgtgcttattttttgtgttattgct

SEQ ID NO: 384817 - DNA, 75 bp, synthetic construct
  source 1..75: mol_type = other DNA
actcttcactttttgttgcttatatgggctgtcttgggtgggggagcgcttacttctatggctggggaacttcct

SEQ ID NO: 384818 - DNA, 75 bp, synthetic construct
  source 1..75: mol_type = other DNA
gtggatgttcttatcaccatgcttgcaaggagtgctgtgggtgcaagactgacaggttataacacctggcttaca

SEQ ID NO: 384819 - DNA, 75 bp, synthetic construct
  source 1..75: mol_type = other DNA
atcatcaccgccatcagtcgggatgtctcggcgctgtggccggaggggcagagtgtggctgaggtggaggacacg

SEQ ID NO: 384820 - DNA, 75 bp, synthetic construct
  source 1..75: mol_type = other DNA
gtaaagcaccaattagtgttggagcgataaaagaatggactgaagccagagacctgccatcgcctgatggagaaa

SEQ ID NO: 384821 - DNA, 75 bp, synthetic construct
  source 1..75: mol_type = other DNA
tgccatggaaaatgcggagtatgtgtttgagtacaatggacggaagtgggactacggcaaggtgactcaggttcg

SEQ ID NO: 384822 - DNA, 75 bp, synthetic construct
  source 1..75: mol_type = other DNA
gccagtccaggtttgcggaagacacgctgaaggtggtgtatgacagccgtggtgtgattacgggatatggtaagg

SEQ ID NO: 384823 - DNA, 75 bp, synthetic construct
  source 1..75: mol_type = other DNA
atggactgaccgaatcaggaggtgttgtcttattctccgccccagaacgagggcgttcagtaagtcttttacctg

SEQ ID NO: 384824 - DNA, 75 bp, synthetic construct
  source 1..75: mol_type = other DNA
gtattgttttctttttaggcataaaacaaaaaaacaatatacagaatttgagttttatcagactttttctggcaa

SEQ ID NO: 384825 - DNA, 75 bp, synthetic construct
  source 1..75: mol_type = other DNA
gggagtctgacaaaagtcggatacttcggaccatcggctggtgcaagcgcaatcaccttacacttgccggtcttc

SEQ ID NO: 384826 - DNA, 75 bp, synthetic construct
  source 1..75: mol_type = other DNA
aggtaatctgaatgccaatggtatcggtgctcaggggggcttggcgcaggacgcttatgttattctgacgccagc

SEQ ID NO: 384827 - DNA, 75 bp, synthetic construct
  source 1..75: mol_type = other DNA
ggcgcgcctgttgatgattttacgctgccggagcattacacccgcaagcgtatccgtgcgatgggccgcgtgtcg

SEQ ID NO: 384828 - DNA, 75 bp, synthetic construct
  source 1..75: mol_type = other DNA
atggtttttactattatgggaatatggatagcatatctataccctaatgcaatattgaggattacgcagccatca

SEQ ID NO: 384829 - DNA, 75 bp, synthetic construct
  source 1..75: mol_type = other DNA
tttgatgcgcgtacctcgttcaatctcgtttgcagcgatggacgatcttgagttcggtcaactgtattcagccgt

SEQ ID NO: 384830 - DNA, 75 bp, synthetic construct
  source 1..75: mol_type = other DNA
ttgattactggcatccgtccggaggggctatttctcctgcggagcgcgaactggttcacggctacgttaagttac

SEQ ID NO: 384831 - DNA, 75 bp, synthetic construct
  source 1..75: mol_type = other DNA
cgcgcagtgccgttggtgcacgtttgacgggatacaacacctggctgacaggacctcgcgaagcggggcacgttg

SEQ ID NO: 384832 - DNA, 75 bp, synthetic construct
  source 1..75: mol_type = other DNA
gatcttcctgaagctgacggagagagtttccgtagttggtttaagaaacatcaggcgcaggagaataagaatgga

SEQ ID NO: 384833 - DNA, 75 bp, synthetic construct
  source 1..75: mol_type = other DNA
gcgtatactaactatgcagcagaagacctgcaggaaacgcaggtaatctgcatcgtcaatctgggtaccatgaag

SEQ ID NO: 384834 - DNA, 75 bp, synthetic construct
  source 1..75: mol_type = other DNA
cgtggttcgtatcacccacggtttggtgttttaccgcaacgtaatattccctgggacgaaaactttctgacatgg

SEQ ID NO: 384835 - DNA, 75 bp, synthetic construct
  source 1..75: mol_type = other DNA
gaacagtgcctggaagatttttatgaccagggcaaagaatctatgcgctggcaccttgatctacataccgcaatt

SEQ ID NO: 384836 - DNA, 75 bp, synthetic construct
  source 1..75: mol_type = other DNA
cgagcgagaaatcaacggcgttcgctggcgctggctgggcgatggtgtgctggaactgacgccattaacgccacc

SEQ ID NO: 384837 - DNA, 75 bp, synthetic construct
  source 1..75: mol_type = other DNA
ggtgagttttatacccaggacggcgtgctgattgcctcgaccgttcaggaaggggtaatgcgtaatcacaattaa

SEQ ID NO: 384838 - DNA, 75 bp, synthetic construct
  source 1..75: mol_type = other DNA
ggcgctatatgcagcaaaagagacggtcccggaagagcgtctggtgcattcgtttcatagctactttcttcgccc

SEQ ID NO: 384839 - DNA, 75 bp, synthetic construct
  source 1..75: mol_type = other DNA
tcagcgcccgccgggttgctgctattcaaaacggcaaaccgattttttatatgacggcctctttccaggcaccag

SEQ ID NO: 384840 - DNA, 75 bp, synthetic construct
  source 1..75: mol_type = other DNA
taaaggcgatgaagatcgtattttaccggctgtcgataaaggtgactccctgtcgcttgttgaactgacgcctgc

SEQ ID NO: 384841 - DNA, 75 bp, synthetic construct
  source 1..75: mol_type = other DNA
cattccacagttactttcttcgccctggcgatagtcaaaacccaataatttatgatgtggaaacactgcgcgatg

SEQ ID NO: 384842 - DNA, 75 bp, synthetic construct
  source 1..75: mol_type = other DNA
cgtttcacagctactttcttcgcccaggcgatagtaagaagccgattatttatgatgtcgaaacgctgcgtgacg

SEQ ID NO: 384843 - DNA, 75 bp, synthetic construct
  source 1..75: mol_type = other DNA
atgcgtatagagtttgttttgccttacccgccgacggtgaacacctactggcgtcgtcgtggcagcacatatttt

SEQ ID NO: 384844 - DNA, 75 bp, synthetic construct
  source 1..75: mol_type = other DNA
cgagcagtttgatgaaatcaatattgtacgtggtcagccagtatctggtggacggctggaaataagaattacaga

SEQ ID NO: 384845 - DNA, 75 bp, synthetic construct
  source 1..75: mol_type = other DNA
gttatcgccgggcagtggcgcttattgttcgccagcagcggctgaaattaagcctgtccggaaggctggcgataa

SEQ ID NO: 384846 - DNA, 75 bp, synthetic construct
  source 1..75: mol_type = other DNA
ggtgagttttatacccaggacggcgtgctggttgcctcgaccgttcaggaaggggtgatgcgtaatcacaattaa

SEQ ID NO: 384847 - DNA, 75 bp, synthetic construct
  source 1..75: mol_type = other DNA
ttttaacacctcgacatttaccaatatcgaaggcatttccggctcgaattttaacgacattctgaccggcagcag

SEQ ID NO: 384848 - DNA, 75 bp, synthetic construct
  source 1..75: mol_type = other DNA
gttatcgccgtgatgtggcgctaattgttcgccagcagcggctgaaactgaacctgtccggaaggctggcaatca

SEQ ID NO: 384849 - DNA, 75 bp, synthetic construct
  source 1..75: mol_type = other DNA
tcgatcgtgttaatgcccaacaagcgcgtcgctttatggaccgggtggtgggatatatggtttcgccgctgttgt

SEQ ID NO: 384850 - DNA, 75 bp, synthetic construct
  source 1..75: mol_type = other DNA
ctgaaagcaccactggatgcgctgacgcatgcgggactgcttatcgatgacgagcagtttgatgaaatcaatata

SEQ ID NO: 384851 - DNA, 75 bp, synthetic construct
  source 1..75: mol_type = other DNA
gtgcgcggtcagcgcgttcctggggggcggctgggcgtgaagatttaccccataatgcttgaagggcaggtcaaa

SEQ ID NO: 384852 - DNA, 75 bp, synthetic construct
  source 1..75: mol_type = other DNA
cgggctgtggcgcttattgttcgccagcagcggctgaaattaagcctgtccggaaggctggcgataaagattatt

SEQ ID NO: 384853 - DNA, 75 bp, synthetic construct
  source 1..75: mol_type = other DNA
ccggacttctcatagacgacgagcagtttgatgaaatcaatattgtgcgcggtcagctcgttcctggtgggcggc

SEQ ID NO: 384854 - DNA, 75 bp, synthetic construct
  source 1..75: mol_type = other DNA
gtttgatgaaattaatattgtgcgcggtcagctcgttccaggggggcggctgggcgtgaagatttacaaaattga

SEQ ID NO: 384855 - DNA, 75 bp, synthetic construct
  source 1..75: mol_type = other DNA
gttatcgccgtgatgtggcgcttattgttcgccagcagcgactgaaattaaacctgtccggaaggctggcaataa

SEQ ID NO: 384856 - DNA, 75 bp, synthetic construct
  source 1..75: mol_type = other DNA
gaataccattttctgtgtgttaataaagggggaggctccgccaataaagccgcgctttatcaggaaacaaaatct

SEQ ID NO: 384857 - DNA, 75 bp, synthetic construct
  source 1..75: mol_type = other DNA
acaccggagaacatggcctgcggttcactgggtccaaccacgggcggtcgaatggacggttatgtcgataccttc

SEQ ID NO: 384858 - DNA, 75 bp, synthetic construct
  source 1..75: mol_type = other DNA
tggaaaaactcgaacacaatccggggcaatatattccagcctcattgcgggaagaaaatcacgcgcaacatgtac

SEQ ID NO: 384859 - DNA, 75 bp, synthetic construct
  source 1..75: mol_type = other DNA
attctggaagcccgctatgccattgaggccagcaccgcctggcacgcagcaatgcgtgccacacaagccgataaa

SEQ ID NO: 384860 - DNA, 75 bp, synthetic construct
  source 1..75: mol_type = other DNA
cgggacgtttatccgctggcgccatgacgcgtggtcggagcaaaacatcgtccagccgctgaaaacgctgatggc

SEQ ID NO: 384861 - DNA, 75 bp, synthetic construct
  source 1..75: mol_type = other DNA
cgatgacccggattacagtttcgatattctggaagctcgctacgctattgaggccagcaccgcctggcatgcggc

SEQ ID NO: 384862 - DNA, 75 bp, synthetic construct
  source 1..75: mol_type = other DNA
ttgccccgtttgaaccggcacagattcaggcgcttattccgctggcgaaagatattattgcccgttatcacatca

SEQ ID NO: 384863 - DNA, 75 bp, synthetic construct
  source 1..75: mol_type = other DNA
aatctgtccggaagactgtcgataaagattattgcagagccaccggataaacgccgccgcgacctggacaatatt

SEQ ID NO: 384864 - DNA, 75 bp, synthetic construct
  source 1..75: mol_type = other DNA
ggcaactggagtctgggtgttccggcttccgttgtcagcggactggtggatggcagttatcctgtcagcgtctcg

SEQ ID NO: 384865 - DNA, 75 bp, synthetic construct
  source 1..75: mol_type = other DNA
aaccaccctggtcgccgggattgtgttgataaaatcaggtacccgtaaagcgcgtaaacctgaactggaggtgaa

SEQ ID NO: 384866 - DNA, 75 bp, synthetic construct
  source 1..75: mol_type = other DNA
cgtgtcgcgtaattcactgcgcgaggcgctggcgaaactggtgagtgaaggtgtgcttcttagtcgtcgcggtgg

SEQ ID NO: 384867 - DNA, 75 bp, synthetic construct
  source 1..75: mol_type = other DNA
catctggcgattgccgaagcctcacataacatcgtgctgctgcaaaccatgcgcggtttcttcgatgtcctgcaa

SEQ ID NO: 384868 - DNA, 75 bp, synthetic construct
  source 1..75: mol_type = other DNA
atgcgtatagagtttgttttgccttacccgccgacggtgaatacctactggcgacgtcatggcaatacgtatttc

SEQ ID NO: 384869 - DNA, 75 bp, synthetic construct
  source 1..75: mol_type = other DNA
acagcggcaatgtgcaggcagacggaagctggagcgtcagcgtcccgaccggggatttagctaaccttaccgcca

SEQ ID NO: 384870 - DNA, 75 bp, synthetic construct
  source 1..75: mol_type = other DNA
atgcccatagatttggttttaccttacccgccgacggtgaacacctactggcgtcgtcgtggcagtacatatttt

SEQ ID NO: 384871 - DNA, 75 bp, synthetic construct
  source 1..75: mol_type = other DNA
acggtcaatgacaaagcgggcaacccggcgagcaccacgcataatctggcggtggatctcaccgttccggtactt

SEQ ID NO: 384872 - DNA, 75 bp, synthetic construct
  source 1..75: mol_type = other DNA
aagatcaggctcgccacgcacggattacccgcctgcccggtgagcataatgagcattcgagggagaaaaacgcat

SEQ ID NO: 384873 - DNA, 75 bp, synthetic construct
  source 1..75: mol_type = other DNA
aagatcaggctcgccatgcacgcattacccgcctgcctggtgaccataatgagcattcgagggagaaaaacgcat

SEQ ID NO: 384874 - DNA, 75 bp, synthetic construct
  source 1..75: mol_type = other DNA
aagatcaggctcgccaggcgcgaattacccgcctgcccggtgagcataatgagcattcgagggagaaaaacgcat

SEQ ID NO: 384875 - DNA, 75 bp, synthetic construct
  source 1..75: mol_type = other DNA
gcagtttgatgaaatcaatattgtgcgcggtcagctcgttcctggtgggcgactgggcgtgaagatttacgaaat

SEQ ID NO: 384876 - DNA, 75 bp, synthetic construct
  source 1..75: mol_type = other DNA
tgtccgtccgctgcgtgacgaagtacgcccaatcgataccgatccaaatgtcctggtcatgcctgccgatggcgt

SEQ ID NO: 384877 - DNA, 75 bp, synthetic construct
  source 1..75: mol_type = other DNA
tgtttgcaccgggtaaagtgaatctggttgagcaactggcaagcctttctgtcactaagattggtcagccactgg

SEQ ID NO: 384878 - DNA, 75 bp, synthetic construct
  source 1..75: mol_type = other DNA
aaactcggctctaccgttatcaacctgtttgcaccaggtaaagtgaacctggttgagcaactggaaagcctgtct

SEQ ID NO: 384879 - DNA, 75 bp, synthetic construct
  source 1..75: mol_type = other DNA
ctggcctggcatgcgggaattagcgcctggcgcggggcaacgcgccttaacgacacctctattggcattgagctg

SEQ ID NO: 384880 - DNA, 75 bp, synthetic construct
  source 1..75: mol_type = other DNA
cgctggcgacactgaccgataagcaggtcagttcgcattatctggtccctgcggtgccaccgcgatacaacggta

SEQ ID NO: 384881 - DNA, 75 bp, synthetic construct
  source 1..75: mol_type = other DNA
ctaccaccgcgtacatatgccgtgcaacggtatcctgcgtgagatgatctacgtgccgggcgatctcttctccgt

SEQ ID NO: 384882 - DNA, 75 bp, synthetic construct
  source 1..75: mol_type = other DNA
tccggaaggctggcaataaaaattattgcagagccaccggataagcgccgtcgtgacctggacaatattctgaaa

SEQ ID NO: 384883 - DNA, 75 bp, synthetic construct
  source 1..75: mol_type = other DNA
atggggatagaatttgttttgccttacccgccgacggtaaatacctactggcgtcgtcgtggcagcacatatttt

SEQ ID NO: 384884 - DNA, 75 bp, synthetic construct
  source 1..75: mol_type = other DNA
gtttgatgaaatcaatattgtacgtggtcagccagtatctggtggacgcctggagataaaaattactgaggtggg

SEQ ID NO: 384885 - DNA, 75 bp, synthetic construct
  source 1..75: mol_type = other DNA
gcgtgatctgcctgttcgataccgaatttggtccgatggcgcagattctggtcggtgcaaccattgttggcagca

SEQ ID NO: 384886 - DNA, 75 bp, synthetic construct
  source 1..75: mol_type = other DNA
cctgctgaagagatcgaagcagaacacgacgccagcccattggttgacgacaaaaagaccaggtctaatccatca

SEQ ID NO: 384887 - DNA, 75 bp, synthetic construct
  source 1..75: mol_type = other DNA
cgggactgcttatcgacgacgagcagtttgatgaagttaatattatgcgcggtcaggttgttcccggtggtcggc

SEQ ID NO: 384888 - DNA, 75 bp, synthetic construct
  source 1..75: mol_type = other DNA
ttttggggctttttttgcgtatttatttaattatcaaaaacatagcaaccatagaagccactacttatacaactt

SEQ ID NO: 384889 - DNA, 75 bp, synthetic construct
  source 1..75: mol_type = other DNA
gttccgctcattgttgtcggtacagatttcaaagctggcactggcgataataccgatctttctgttaacgcaacg

SEQ ID NO: 384890 - DNA, 75 bp, synthetic construct
  source 1..75: mol_type = other DNA
ttgggtggaaatatattttatgattatgactttacccgtggacatcgccgtttaggtttaggcgccgaagcctgg

SEQ ID NO: 384891 - DNA, 75 bp, synthetic construct
  source 1..75: mol_type = other DNA
cagcgtcagtgggcagaccgttcgcgcacagtgctggccgggcagagcctcggcgggatcagtgcgctaatgggg

SEQ ID NO: 384892 - DNA, 75 bp, synthetic construct
  source 1..75: mol_type = other DNA
ccgcctggtggtgaccatcgccgggcagcagtatgtcaccagcaccgatgccagcggcaactggagcgtcggcgt

SEQ ID NO: 384893 - DNA, 75 bp, synthetic construct
  source 1..75: mol_type = other DNA
cgtgatgatgcgggtaatactcttttaccggatccgccgacgctggtactgagcaccaaacgccagtggcacgga

SEQ ID NO: 384894 - DNA, 75 bp, synthetic construct
  source 1..75: mol_type = other DNA
attaatgaacaaaggattaatgcgaacgttaaattaatcgaagatttgagttcatcatataatgaaaaggggagt

SEQ ID NO: 384895 - DNA, 75 bp, synthetic construct
  source 1..75: mol_type = other DNA
ggatttttcaccatcgtggtcggtcatgcgactttttgcgtagtggtggtgtttaacaatgtcatcgcccgtttt

SEQ ID NO: 384896 - DNA, 75 bp, synthetic construct
  source 1..75: mol_type = other DNA
tatgttggtaacaaccttgccgatcctgggggctaacccgcgaaggcgacaatggtcaataaccactgatacagg

SEQ ID NO: 384897 - DNA, 75 bp, synthetic construct
  source 1..75: mol_type = other DNA
tataaagcggggaccggagataacagcgatgtcagcattaatgccactcttaattatcagttcggcgttccgcta

SEQ ID NO: 384898 - DNA, 75 bp, synthetic construct
  source 1..75: mol_type = other DNA
tatcacccgctttctgactggaaagactccgaagatttcgatttttatgaggagcgtcctgcgcgcggctgggat

SEQ ID NO: 384899 - DNA, 75 bp, synthetic construct
  source 1..75: mol_type = other DNA
gatccagtcatcgtcacaggtgcgtatccgctccggctcccgtcagttcgggcgtgagtccacacggggaggtgc

SEQ ID NO: 384900 - DNA, 75 bp, synthetic construct
  source 1..75: mol_type = other DNA
gttaatggtcatgttgattcattacataccgagttgggaaatataatcattaatggtaatgctggtatggttaaa

SEQ ID NO: 384901 - DNA, 75 bp, synthetic construct
  source 1..75: mol_type = other DNA
aaatgttgaaaccgcatcaggaaccgacgctatatggggcgaacggtcagacctcaacaacccatcgcggcggta

SEQ ID NO: 384902 - DNA, 75 bp, synthetic construct
  source 1..75: mol_type = other DNA
gcggttgttggcattttgctggcagcctggctgtggctgggtaaacgtactctggtgacttctatcgccaacagt

SEQ ID NO: 384903 - DNA, 75 bp, synthetic construct
  source 1..75: mol_type = other DNA
accccggaagttctgcatctggtgggtattgtcggggcggttaccttgctgctggctggttttgctgcgttggta

SEQ ID NO: 384904 - DNA, 75 bp, synthetic construct
  source 1..75: mol_type = other DNA
gggtacggcgatcaccgtcacgctgaacggacaaaactacagcgccactaccgacgcctccggcaactggagcgt

SEQ ID NO: 384905 - DNA, 75 bp, synthetic construct
  source 1..75: mol_type = other DNA
cattatcgcgcggtgaagagaaaatagaacgcacgcgcggtcgctggcgtttctatgacgagaaccataaacagg

SEQ ID NO: 384906 - DNA, 75 bp, synthetic construct
  source 1..75: mol_type = other DNA
aaacagcgacgagatcgcacagcgatggcaggaaattaccgtgaaaacgcagcaactgcaccagttaaatcaaca

SEQ ID NO: 384907 - DNA, 75 bp, synthetic construct
  source 1..75: mol_type = other DNA
ctggctgtacgacaaagtgttcgtcaaaccgttcctgggtatcgcctggctgctgaagcgcgatccgctgaacgc

SEQ ID NO: 384908 - DNA, 75 bp, synthetic construct
  source 1..75: mol_type = other DNA
atggacatatcaatctgatggtggcaggtctggtcggtgcgtttatgacctcgctctacaccttccgtatgattt

SEQ ID NO: 384909 - DNA, 75 bp, synthetic construct
  source 1..75: mol_type = other DNA
gtcgcccctctgattatatgccggaggtggctaatgacatttgcgcattgctttcctccggcgagagtctgcgca

SEQ ID NO: 384910 - DNA, 75 bp, synthetic construct
  source 1..75: mol_type = other DNA
atgtacgcctcctggtatatgcgcggtgaagagggctactctcgcttcttcgcttacaccaacctgttcatcgcc

SEQ ID NO: 384911 - DNA, 75 bp, synthetic construct
  source 1..75: mol_type = other DNA
tgctgctgatcctttccaccttcgttggcgcactgattgtaccgccgctgcagggcgtgcttccgcaaacgacgg

SEQ ID NO: 384912 - DNA, 75 bp, synthetic construct
  source 1..75: mol_type = other DNA
ccgtacccacggtctgttcctgatgactccggaaattctgcatctggtcggtatcgtgggtgcggtgacgctggt

SEQ ID NO: 384913 - DNA, 75 bp, synthetic construct
  source 1..75: mol_type = other DNA
aaacgcgccagcgtcgttgcgctggatagcgggctacatgtgcaacaaatctggattcagggtcaattagcttcg

SEQ ID NO: 384914 - DNA, 75 bp, synthetic construct
  source 1..75: mol_type = other DNA
tattttcagcaggtgtttgaaaaaatccgcgacaaatggcgtgtgaatgaacgccttgctgcccgctactggcgc

SEQ ID NO: 384915 - DNA, 75 bp, synthetic construct
  source 1..75: mol_type = other DNA
attgcggatcgcgttgagcataagcgcaatgtgctgctgcccaaatgggtgccgactgtggaagcgtatctggcc

SEQ ID NO: 384916 - DNA, 75 bp, synthetic construct
  source 1..75: mol_type = other DNA
tattttcagcaggtgtttgaaaaaatccgtgacaaatggcgcgtgaatgaacgccttgctgcccgctactggcgc

SEQ ID NO: 384917 - DNA, 75 bp, synthetic construct
  source 1..75: mol_type = other DNA
tctgcggagatcaaatacagcaaggcaggtcattcctaccatctcgttaatccgggccagctggataaaaagacc

SEQ ID NO: 384918 - DNA, 75 bp, synthetic construct
  source 1..75: mol_type = other DNA
tctcctttgatgaatatgaccctaagtgtcttcctgcaattcagtataaagaacttacccagaaaattattatga

SEQ ID NO: 384919 - DNA, 75 bp, synthetic construct
  source 1..75: mol_type = other DNA
ttgattttattattgccgattcagcaccatcatattcgaatgtcatgatcgcagctcatatgtcagctgattacc

SEQ ID NO: 384920 - DNA, 75 bp, synthetic construct
  source 1..75: mol_type = other DNA
gaggcgggttttccggcagtcaggtcaatatatgaattgccattaagcgatgatgtactcgatgaggtacgcgag

SEQ ID NO: 384921 - DNA, 75 bp, synthetic construct
  source 1..75: mol_type = other DNA
ttgtgtaataacgcgtcccggatggatcagaatctccgggctcctgtacccatgacatgggcatttatgatgcgt

SEQ ID NO: 384922 - DNA, 75 bp, synthetic construct
  source 1..75: mol_type = other DNA
gatgcgtaaaaagaacctgaaaacgatgatatttatcagtcagttgaaagcaaaaacgaatttccaggtcgtcgg

SEQ ID NO: 384923 - DNA, 75 bp, synthetic construct
  source 1..75: mol_type = other DNA
atgaggcccgtcgtctgcgtgccgaacgctggcaggccgaaaatcaggaagggatggccgaggttgcccgcttta

SEQ ID NO: 384924 - DNA, 75 bp, synthetic construct
  source 1..75: mol_type = other DNA
gcggtagctggagctacaccctcggcagcgccgatgtcaccgcgctggcggacggcaacgcctacgtgattaacg

SEQ ID NO: 384925 - DNA, 75 bp, synthetic construct
  source 1..75: mol_type = other DNA
gaaatgcgatcgttaggatcttacattgcgctcaatttagaaggtagctcgcaggaacgtacattttcattatcg

SEQ ID NO: 384926 - DNA, 75 bp, synthetic construct
  source 1..75: mol_type = other DNA
atgctggagtttgcgtatcgttcatcgttcctcgttggtgccggtgtggacgcgatggctgatgatatgacccgc

SEQ ID NO: 384927 - DNA, 75 bp, synthetic construct
  source 1..75: mol_type = other DNA
tagccagattctggcgatcatcctcatcatcgttttgattttgcttttaaggtcagtaaaaaatggaattatgca

SEQ ID NO: 384928 - DNA, 75 bp, synthetic construct
  source 1..75: mol_type = other DNA
atgcaaaagatcgcggcattctcgaatcacaacttgatgagttgcagatctgggatgcgctgaacgacgtgctga

SEQ ID NO: 384929 - DNA, 75 bp, synthetic construct
  source 1..75: mol_type = other DNA
cctcggcaagcctgagttttacgacgtggtgaccactgcaacgggcatcccggcctggcgcatccatcacagccg

SEQ ID NO: 384930 - DNA, 75 bp, synthetic construct
  source 1..75: mol_type = other DNA
cggcggcaatgtcgctgtgttgttgctgtgcgaaagagagaatcgtactgatcaccgacgcgatgcaggcagccg

SEQ ID NO: 384931 - DNA, 75 bp, synthetic construct
  source 1..75: mol_type = other DNA
atgagtgaaatatactgcattgcaattgcagtcattatcgttggttacgtttatctaatgatcagtgtaattact

SEQ ID NO: 384932 - DNA, 75 bp, synthetic construct
  source 1..75: mol_type = other DNA
tatgtttggcactttttcagcaacactgattttttacatgtttaaaattttgattcgcgcttttgattcattgac

SEQ ID NO: 384933 - DNA, 75 bp, synthetic construct
  source 1..75: mol_type = other DNA
tataccacaaatatcaaaaatgtgaaaaagactttgggtaacaaattctacggcagttgctggagcacctggttc

SEQ ID NO: 384934 - DNA, 75 bp, synthetic construct
  source 1..75: mol_type = other DNA
gaagacaacaatttgctaccgcactatgtgtggatttacggtcatacccccaccccgctaaatcagtacgattct

SEQ ID NO: 384935 - DNA, 75 bp, synthetic construct
  source 1..75: mol_type = other DNA
gtaaaggcgatatctctatcacgctggtgaacagtgacgatcgtgacgcgtttgtcgcccaggaagccgctcgct

SEQ ID NO: 384936 - DNA, 75 bp, synthetic construct
  source 1..75: mol_type = other DNA
cgccaggcggagatccgatatcgaacgagcctacggcagatagcgcgggcggtcggggatatcgtaaatggtcgc

SEQ ID NO: 384937 - DNA, 75 bp, synthetic construct
  source 1..75: mol_type = other DNA
gaacttggcgacaaaccgccagagccgccaggcggagatccgatatcgaacgagcctacggcagatagcgcgggc

SEQ ID NO: 384938 - DNA, 75 bp, synthetic construct
  source 1..75: mol_type = other DNA
gtaaccggcataggggcatccattaccgacgaggacatcgagaatgccgaagatgaagcgccgcccggcatcggc

SEQ ID NO: 384939 - DNA, 75 bp, synthetic construct
  source 1..75: mol_type = other DNA
tgcggatgcgtatgaaaaggcaatccgtgcctggcagcagaaacaggcagggacaaaaaatgaatgcgttgttaa

SEQ ID NO: 384940 - DNA, 75 bp, synthetic construct
  source 1..75: mol_type = other DNA
gacgcgaaaatcctccatcgacagccgaaatatctcgggccgtcggtcatgattgggccgtttagcgagcatggc

SEQ ID NO: 384941 - DNA, 75 bp, synthetic construct
  source 1..75: mol_type = other DNA
cgtcagcgcggtgattgacgcaaaaatcctccatcgccagccgaaatatctcgggccatcggtcatgattgggcc

SEQ ID NO: 384942 - DNA, 75 bp, synthetic construct
  source 1..75: mol_type = other DNA
cgtcgaatacgctggttccgattttttatgcggaaatggataactcggcggcgaatactgcacaggacagcggag

SEQ ID NO: 384943 - DNA, 75 bp, synthetic construct
  source 1..75: mol_type = other DNA
acgtcacgacgattgccagcagtatcaaagatgccatcaatgccgttccggccctgccgtttacggcttcatctt

SEQ ID NO: 384944 - DNA, 75 bp, synthetic construct
  source 1..75: mol_type = other DNA
gtatttcatgttggtgttcagcatcttttttcttaaagagctttatcaactggcatttttgctgggcggtgtctg

SEQ ID NO: 384945 - DNA, 75 bp, synthetic construct
  source 1..75: mol_type = other DNA
tctatgtttttagtttccgttcgacataaggaagatcttattgccggggggatattgtctttgccacggctgcag

SEQ ID NO: 384946 - DNA, 75 bp, synthetic construct
  source 1..75: mol_type = other DNA
caagggaaagtgtttaaactgtaatgtaaagataccgatagtctatccactatcagagctatgttgttcattaac

SEQ ID NO: 384947 - DNA, 75 bp, synthetic construct
  source 1..75: mol_type = other DNA
tcgcgccgtaatgctcactccggcacaggcagaatatctgataacagggaaaatattacccactgcgttattcag

SEQ ID NO: 384948 - DNA, 75 bp, synthetic construct
  source 1..75: mol_type = other DNA
aaaccatatcaccattatctcgcaagaatttcataaccaacgcgccatctggctggcaaaacagtacggcatcga

SEQ ID NO: 384949 - DNA, 75 bp, synthetic construct
  source 1..75: mol_type = other DNA
atgtctatgccattaagcaatgccgctaataaccaattctatataaataatcacttccttcatcatccaaaagtc

SEQ ID NO: 384950 - DNA, 75 bp, synthetic construct
  source 1..75: mol_type = other DNA
ccatacaggcttaaaggcattcgctttgctcctatgggcccctcattgagtataggttttttgctatgtctgctg

SEQ ID NO: 384951 - DNA, 75 bp, synthetic construct
  source 1..75: mol_type = other DNA
ccgcaggtgaccagtttaaccagcagcacattaccctggcggggtacgaaaaagagacccagacgcctgccgacg

SEQ ID NO: 384952 - DNA, 75 bp, synthetic construct
  source 1..75: mol_type = other DNA
gcgtttattgccctgcgcctgaatgtctcaccggaaattgtcgatgcttctcaccaggcacttctgcagtatatc

SEQ ID NO: 384953 - DNA, 75 bp, synthetic construct
  source 1..75: mol_type = other DNA
ttgcaacggatcgaaatgccaatgttatgtcgcaggaggaatgggaagcgttgcctgcgcttttatccggattta

SEQ ID NO: 384954 - DNA, 75 bp, synthetic construct
  source 1..75: mol_type = other DNA
cggcggttttggtggtgggaatatgtggggcgcaactaactggacgaaaacaggtttcgttgctcattgtaacta

SEQ ID NO: 384955 - DNA, 75 bp, synthetic construct
  source 1..75: mol_type = other DNA
gcgtattaaaaacgataacgtgaactccgcattttttcagaccagtgttcgtgtctggcctcagtatggccgtgt

SEQ ID NO: 384956 - DNA, 75 bp, synthetic construct
  source 1..75: mol_type = other DNA
acatcaggcgcttctgcaatatatccgtccgggcgcacagaaccagatgaaagttattctggctgaagaagcgaa

SEQ ID NO: 384957 - DNA, 75 bp, synthetic construct
  source 1..75: mol_type = other DNA
tcatttattgccctccgtctgaatgtctcaccggaaatcgtcgatgcctcacatcaggcgcttctgcaatatatc

SEQ ID NO: 384958 - DNA, 75 bp, synthetic construct
  source 1..75: mol_type = other DNA
tctcaccggaaattgtcgatgcttctcaccaggcgcttctgcagtatatccgtccgggcgcacagaaccagatga

SEQ ID NO: 384959 - DNA, 75 bp, synthetic construct
  source 1..75: mol_type = other DNA
agcgaaactggcggtattgataacgcacctatctggttacaggttaacggcgaagatcatcagcgcagcgatatt

SEQ ID NO: 384960 - DNA, 75 bp, synthetic construct
  source 1..75: mol_type = other DNA
tcacatcaggcgcttctgcaatatatccgcccgggcgcacagaaccagatgaaagttattctggctgaagaagcg

SEQ ID NO: 384961 - DNA, 75 bp, synthetic construct
  source 1..75: mol_type = other DNA
aaaatactattgctgacattctcacataccttggtttgggagaagcggcgaaaaggaatgtggggactggggcga

SEQ ID NO: 384962 - DNA, 75 bp, synthetic construct
  source 1..75: mol_type = other DNA
aaggggtatctacaacacaatttgtggtagaggttatttcgaaagacacaacttatgtgccggtaattcacttta

SEQ ID NO: 384963 - DNA, 75 bp, synthetic construct
  source 1..75: mol_type = other DNA
ctgtatcacaataagttacacgtatcggagcgcagccagcgtattgtcaaacaagccatgctgaccgaagccaat

SEQ ID NO: 384964 - DNA, 75 bp, synthetic construct
  source 1..75: mol_type = other DNA
cggcaggcgtggtcacactgaccgcgcgtcataaggggctttgcgggaatgaaattcctgtcagcctcaattact

SEQ ID NO: 384965 - DNA, 75 bp, synthetic construct
  source 1..75: mol_type = other DNA
tgcgccgctgattcagtgggatgcaacctccgcaacgcttaaagctctcggctgcaacaatatcgaccgcgttct

SEQ ID NO: 384966 - DNA, 75 bp, synthetic construct
  source 1..75: mol_type = other DNA
agcgttaattctgttgaatctcaaggggtatgattacccggatattcagcgcgcgattctggcagaaaaagccga

SEQ ID NO: 384967 - DNA, 75 bp, synthetic construct
  source 1..75: mol_type = other DNA
gaaagatctggagattaaaacgctgctgatggacgagcaggatcacggctatgcgctgactggtgatgcgctttc

SEQ ID NO: 384968 - DNA, 75 bp, synthetic construct
  source 1..75: mol_type = other DNA
accacgccggaaaagtgaaatggctattggtgagcggcgataatggacgtaaaaattacgatgaagcgtcaggaa

SEQ ID NO: 384969 - DNA, 75 bp, synthetic construct
  source 1..75: mol_type = other DNA
aacagctatctggacagtgaaacactgcataccagcgcatacgttcttcgcaaactgaaatcggtcatcaccagc

SEQ ID NO: 384970 - DNA, 75 bp, synthetic construct
  source 1..75: mol_type = other DNA
actgaacacgctgttcccgccggattatgttaaccagttacgtgtctttgcggtggttaaccagttccgtctcca

SEQ ID NO: 384971 - DNA, 75 bp, synthetic construct
  source 1..75: mol_type = other DNA
ctggtttagtcagccagaaaacgcccgccgcgttggtcagcatctgttgcagatcatgagcggttttcttgaact

SEQ ID NO: 384972 - DNA, 75 bp, synthetic construct
  source 1..75: mol_type = other DNA
tgcaggcagacggaagctggagcgtcagcgtcccgaccggcgatttagctaacctcaccgccagcccctatacgg

SEQ ID NO: 384973 - DNA, 75 bp, synthetic construct
  source 1..75: mol_type = other DNA
tggcaacaccggtagcggcacgcgcgatatcaccatcgatgccagtctgcctggcctgcgggtggataccgtcgc

SEQ ID NO: 384974 - DNA, 75 bp, synthetic construct
  source 1..75: mol_type = other DNA
agtttatgaacgaactgaacagcgggctggatctacgcattcatctgccgggccgcgaagcgcatgcgctgcgtg

SEQ ID NO: 384975 - DNA, 75 bp, synthetic construct
  source 1..75: mol_type = other DNA
gaacaagccgcgcaccgcgtcgcgcctgagttttccgcattcctgacgcgccatatcagcgatacggtaaaaagc

SEQ ID NO: 384976 - DNA, 75 bp, synthetic construct
  source 1..75: mol_type = other DNA
cctgatcgacaagctgaaaaacgatccggaaatggcagcgcgagccgatgccgtaaaaagttatctgaaagaaga

SEQ ID NO: 384977 - DNA, 75 bp, synthetic construct
  source 1..75: mol_type = other DNA
atgctgcgcgtatttgcccaccttcttcgccgcgtttgtttctctcgccggactcttaagattggctgtttattg

SEQ ID NO: 384978 - DNA, 75 bp, synthetic construct
  source 1..75: mol_type = other DNA
atgacgataagctttaacaccattccgtcgaatacgctggttccgttgttttatgcggaaatggataaccaggcg

SEQ ID NO: 384979 - DNA, 75 bp, synthetic construct
  source 1..75: mol_type = other DNA
ctgatgcagcaatctcgccattttcaaaacttatcagaaacccttattgccccgctggacgctgaccgtatggca

SEQ ID NO: 384980 - DNA, 75 bp, synthetic construct
  source 1..75: mol_type = other DNA
atgcacgcagataccgcgacccgccagcactggatgtccgtactggcgcacagccaaccggctgaactggcagcc

SEQ ID NO: 384981 - DNA, 75 bp, synthetic construct
  source 1..75: mol_type = other DNA
gtcatgtgtatacggcaaagaccggcacgctgtcagaactggtgaccgcaggtgaccagtttaaccagcagcaca

SEQ ID NO: 384982 - DNA, 75 bp, synthetic construct
  source 1..75: mol_type = other DNA
ccggcggtgatcaaaggggaactgctggcaacctaccgtcagctcgagcgtgcggggatcgtggaaaactacgaa

SEQ ID NO: 384983 - DNA, 75 bp, synthetic construct
  source 1..75: mol_type = other DNA
caggcaccggtgaccaacggcgataacgtcacgatgattgccagtagtattcaggatgccatcaatgccgttccg

SEQ ID NO: 384984 - DNA, 75 bp, synthetic construct
  source 1..75: mol_type = other DNA
tgaaaaacgatccggaaatggcagcgcgagccgatgccgtaaaaagctatctgaaagaagatgaagcttttaacc

SEQ ID NO: 384985 - DNA, 75 bp, synthetic construct
  source 1..75: mol_type = other DNA
acagttacgctgacggtgaccggggcggcaaccgaaaccggcacggtgaatgtttatgtgggacgtacccgcgtg

SEQ ID NO: 384986 - DNA, 75 bp, synthetic construct
  source 1..75: mol_type = other DNA
cgctatgggcgatgaggtattcgattttatcggtctgccgttcaacgatgccgcctccattaatatgatgatgac

SEQ ID NO: 384987 - DNA, 75 bp, synthetic construct
  source 1..75: mol_type = other DNA
cgcctgatcttactgccgctgttgctgctatgggcgatgaggcattcgactttatcggtctgccgttcaacgatg

SEQ ID NO: 384988 - DNA, 75 bp, synthetic construct
  source 1..75: mol_type = other DNA
atgccactgcggttgccaccgcgattaaggaagcggtaaacggggttatcaccctgccgtttacggcgtcatctg

SEQ ID NO: 384989 - DNA, 75 bp, synthetic construct
  source 1..75: mol_type = other DNA
cggatctcaccataaacaccgtttcgggcgatgacatcatcaacgccatcgaacacgggcaggcactggtcgtca

SEQ ID NO: 384990 - DNA, 75 bp, synthetic construct
  source 1..75: mol_type = other DNA
gaaatggtgccggagttcattgagaagatggacgaagcgctggcggagatcggcttcacgttcggtgaacagtgg

SEQ ID NO: 384991 - DNA, 75 bp, synthetic construct
  source 1..75: mol_type = other DNA
attcgcagcggcgtgttgcaacattaccctgcagtgctgcattcggaagatgccattgaagggccactggcgttt

SEQ ID NO: 384992 - DNA, 75 bp, synthetic construct
  source 1..75: mol_type = other DNA
gctttgaactggcgctggcggcagattttattgtttgtgccgataacgccagcttcgccctgccggaagccaaac

SEQ ID NO: 384993 - DNA, 75 bp, synthetic construct
  source 1..75: mol_type = other DNA
cttgctgagtcgattaatcaggaacctggttttctgtggaaggtatggaccgaaagtgaaaagaaccacgaagcc

SEQ ID NO: 384994 - DNA, 75 bp, synthetic construct
  source 1..75: mol_type = other DNA
tgggcgcggcgctcggggctaatgagttcgcacaaatcagtatcgacaacggcgcaacctgggtgaatgtgaccg

SEQ ID NO: 384995 - DNA, 75 bp, synthetic construct
  source 1..75: mol_type = other DNA
gataccgatgcgctgacagtttccgcgaccgcctataccgttactgcgcaggtaaaaagttcggcgggtaacggc

SEQ ID NO: 384996 - DNA, 75 bp, synthetic construct
  source 1..75: mol_type = other DNA
attattaccggtgccggagagaaattcttttccgcgggctgggatttaaaagcggcagcagaaggcgaagcaccg

SEQ ID NO: 384997 - DNA, 75 bp, synthetic construct
  source 1..75: mol_type = other DNA
ttgcctttaatggcccctttggcgacgaaatggcagaacagcttaaaccgcttgccgaatcgattaaccaggaac

SEQ ID NO: 384998 - DNA, 75 bp, synthetic construct
  source 1..75: mol_type = other DNA
ctgccgctggaagcagccgatcgcgtgatggacatacaaaagcgcgcaatgcaggcggttatcactggtgaacgt

SEQ ID NO: 384999 - DNA, 75 bp, synthetic construct
  source 1..75: mol_type = other DNA
cagggcgcggatgatagcccgcactgagataggccgcgccactaccgcattaactcaggctcgggcgttatccgt

SEQ ID NO: 385000 - DNA, 75 bp, synthetic construct
  source 1..75: mol_type = other DNA
tgggccaggtgatgcaatccatcatcgccgaacaggtcaagtacatcaaatcgctccccctcgaggcggctgaca

SEQ ID NO: 385001 - DNA, 75 bp, synthetic construct
  source 1..75: mol_type = other DNA
tgcaggcaatgcggttatgccgactatcgatgcggcatgtaagattgctcgcgatcagcaaattcctttactgat

SEQ ID NO: 385002 - DNA, 75 bp, synthetic construct
  source 1..75: mol_type = other DNA
cggtgctgctggaggaagatgtaatactcaaggtaacggtacagaatataacggcggagcagctggtaaagctgt

SEQ ID NO: 385003 - DNA, 75 bp, synthetic construct
  source 1..75: mol_type = other DNA
cagggcgcaactgattgcccgcacagagattggacgagctaccggcgcgctgacgcaggccagagccctttcggt

SEQ ID NO: 385004 - DNA, 75 bp, synthetic construct
  source 1..75: mol_type = other DNA
ggacgtggcgagcgctacggacaaggagaaagctgagcttggtggtgctggtgcagcaccgtatattgctgaaat

SEQ ID NO: 385005 - DNA, 75 bp, synthetic construct
  source 1..75: mol_type = other DNA
tcttcaagaaactgcaaatatgtataggacgttattctctatgtccttggtttttttgttttctttgttttttgt

SEQ ID NO: 385006 - DNA, 75 bp, synthetic construct
  source 1..75: mol_type = other DNA
atggcaactttgttacaacttcattttgcttttaatggcccatttggcgacgcacttgctgagtcgattaatcag

SEQ ID NO: 385007 - DNA, 75 bp, synthetic construct
  source 1..75: mol_type = other DNA
agaacaaggccatcgaggccgttgtgtctggtggccgcgctgaaccattcgcgaaagagatagcagcgtccggtg

SEQ ID NO: 385008 - DNA, 75 bp, synthetic construct
  source 1..75: mol_type = other DNA
atgaaatccatcgttgctgaacaggttaagtacattaaatcgctacccctcgaggcggctgacagggtgtacgac

SEQ ID NO: 385009 - DNA, 75 bp, synthetic construct
  source 1..75: mol_type = other DNA
tcagcagggctggccggcggtaatctgagtgcagccctggcaggtggtgcagcaccgtatattgctgaaattatc

SEQ ID NO: 385010 - DNA, 75 bp, synthetic construct
  source 1..75: mol_type = other DNA
acgtgcgcacccggcagtacagcagcgtcgaagcgttctctggtgatcaaacgtataaagataaagccttcgatc

SEQ ID NO: 385011 - DNA, 75 bp, synthetic construct
  source 1..75: mol_type = other DNA
agcctttccagcaatcgtcgattgttataccagtccacccacgttagtgtggccagttccacttctgcacggttt

SEQ ID NO: 385012 - DNA, 75 bp, synthetic construct
  source 1..75: mol_type = other DNA
gccatgcttgatgtgcacagacaacaatgggtgtgttcaggcttcactcccaactgtctacccactgataaaaat

SEQ ID NO: 385013 - DNA, 75 bp, synthetic construct
  source 1..75: mol_type = other DNA
aagccaactacttccagcatctgggcaacggcttctacggtcaggtctacggaggttatctcgaaaccatgtttg

SEQ ID NO: 385014 - DNA, 75 bp, synthetic construct
  source 1..75: mol_type = other DNA
tgccgatccgcagatccaggcgaaaggcgatacgctgtatgttaccggcgagcaggtgaaatatcgtgattcgcg

SEQ ID NO: 385015 - DNA, 75 bp, synthetic construct
  source 1..75: mol_type = other DNA
tgctaacctggcgaataactacgacaagtttaactacactaacccgccgcaggactcccatctgccgcgtgtgcg

SEQ ID NO: 385016 - DNA, 75 bp, synthetic construct
  source 1..75: mol_type = other DNA
gtttgctgcgcgttgccgtcagtatgatagctttggtttttacgcggcactaagccagttgttgcagatgttggt

SEQ ID NO: 385017 - DNA, 75 bp, synthetic construct
  source 1..75: mol_type = other DNA
agcaacggaagatatgcgcataatggctcaaaatggcggttttcttgatgactggcaaaaagctaatgatctgtc

SEQ ID NO: 385018 - DNA, 75 bp, synthetic construct
  source 1..75: mol_type = other DNA
catttacctttcctgatggtacgagcacggaagatattggcaccgccattgatgagtattttgctggtcaggctg

SEQ ID NO: 385019 - DNA, 75 bp, synthetic construct
  source 1..75: mol_type = other DNA
ggggacggttcctgcgcgaagaatcgacagtttacggcaaaaaacactcacggcgttgcggcaatggttaccaga

SEQ ID NO: 385020 - DNA, 75 bp, synthetic construct
  source 1..75: mol_type = other DNA
gacggtggtcagcaacttgggcgtaagttccagttgtatgatatgaccagcgaccgtagcgtaaatttccgctaa

SEQ ID NO: 385021 - DNA, 75 bp, synthetic construct
  source 1..75: mol_type = other DNA
aatgccgggcaggtttttgccgtgcgcctggcgcgctttattggctgtacgcaaatgcggtctgttgagggagat

SEQ ID NO: 385022 - DNA, 75 bp, synthetic construct
  source 1..75: mol_type = other DNA
tgcagaacgttatttattgcccggagcggctgacgcttaatctcgactggcagggggcgattccgggatttaacg

SEQ ID NO: 385023 - DNA, 75 bp, synthetic construct
  source 1..75: mol_type = other DNA
atcaatcaatatctgcggcaggtcagagtgtgtcatgcgcaatatcttctccagcatagccgcctgttaatcagt

SEQ ID NO: 385024 - DNA, 75 bp, synthetic construct
  source 1..75: mol_type = other DNA
ccgaagtaaagtctttacgtattcaaccgtgtattaacggtatttactttgaaaaaaactggccagactttttaa

SEQ ID NO: 385025 - DNA, 75 bp, synthetic construct
  source 1..75: mol_type = other DNA
cacccgacctggcggcgcggcattgaatgccgggcaggtttttgctgttcgtctggcgcgctttattggttgcac

SEQ ID NO: 385026 - DNA, 75 bp, synthetic construct
  source 1..75: mol_type = other DNA
cacttctcgtctgatggtgaaagtattgctcgaagaagtgcagcgtctttccatcccattgttaaccagcgcgac

SEQ ID NO: 385027 - DNA, 75 bp, synthetic construct
  source 1..75: mol_type = other DNA
aaatccaggcgcgaatgtctgattacgccggatttatttgtcatgccgataaagttcgtcacgccacccgtgacg

SEQ ID NO: 385028 - DNA, 75 bp, synthetic construct
  source 1..75: mol_type = other DNA
ttttggctccagcttgttagatatggcggtggcgcaagagcagcaacatggtcgtcgggtgtttatggatttcaa

SEQ ID NO: 385029 - DNA, 75 bp, synthetic construct
  source 1..75: mol_type = other DNA
atatggcggtagcgcaggaacaacaacgcggtcgccaggtttttatggatttcaatcgcaatcctgaaacagtgc

SEQ ID NO: 385030 - DNA, 75 bp, synthetic construct
  source 1..75: mol_type = other DNA
cagcggatggactcggaaaaagtggttaccttcaccacggcgctaatgaccgggctttccggggcaatggcgagc

SEQ ID NO: 385031 - DNA, 75 bp, synthetic construct
  source 1..75: mol_type = other DNA
gatgggcgtacagttcgcgttgatgtgggcggtgctggcatttttactcaactatgttcccaatatcggcgcggt

SEQ ID NO: 385032 - DNA, 75 bp, synthetic construct
  source 1..75: mol_type = other DNA
taacgttcaccacagcattaatgaccgggctttctggcgccatggcgagtgtgctcctgctggtgatgaccgtag

SEQ ID NO: 385033 - DNA, 75 bp, synthetic construct
  source 1..75: mol_type = other DNA
ggaaatatcggcgcgaccgccagccagatagtcactgtggataccaccgcgccgctggcgagcaaaaccatcgcc

SEQ ID NO: 385034 - DNA, 75 bp, synthetic construct
  source 1..75: mol_type = other DNA
cgggtatgcacatcctgctgaagctggcctcactggtggtgatcctcgcgggtattcacgcagcagcagatatca

SEQ ID NO: 385035 - DNA, 75 bp, synthetic construct
  source 1..75: mol_type = other DNA
ttttcatgctgtttgaagtgcgccacgtcccttacaaaatgcgttttgcgttgaataatccacagattcacatcg

SEQ ID NO: 385036 - DNA, 75 bp, synthetic construct
  source 1..75: mol_type = other DNA
gcagttgcgctggaacattgatacatcgtccaaccaggcgcccttaacgctgactcatggtcgcgttgaagtttg

SEQ ID NO: 385037 - DNA, 75 bp, synthetic construct
  source 1..75: mol_type = other DNA
gtggtagggaaaaatattgatcacatcaatctggatgagttcagaaatacgataaaaagaattatcgcaaaaatt

SEQ ID NO: 385038 - DNA, 75 bp, synthetic construct
  source 1..75: mol_type = other DNA
tccatcggcctggagcaactgctggcggtcaatcctgcctggctgctggttgcccactatcgcgaagagagcatt

SEQ ID NO: 385039 - DNA, 75 bp, synthetic construct
  source 1..75: mol_type = other DNA
catatggtcatcggcaatattttagaaccacggatgatgggccatcgcctggggatgtccaccatggtggtattt

SEQ ID NO: 385040 - DNA, 75 bp, synthetic construct
  source 1..75: mol_type = other DNA
gtcacctggtttattcgtcgtggagtacaacgccccgttgccattaccattgtggtggtggtgatgctgatagca

SEQ ID NO: 385041 - DNA, 75 bp, synthetic construct
  source 1..75: mol_type = other DNA
caggaatgcatatactgctcaagttggcctcgctggtggtgatcctcgccggcattcacgcagcggcagatatca

SEQ ID NO: 385042 - DNA, 75 bp, synthetic construct
  source 1..75: mol_type = other DNA
gcgacccgtatctttatcctggccttgatatcatgcgtaatcggctgaacattcaccagcagcagcggcttgagc

SEQ ID NO: 385043 - DNA, 75 bp, synthetic construct
  source 1..75: mol_type = other DNA
ctttatttatcggcttgaggacagcagcccgaaaaatcttgccggtgatgcaaaaccgatccctctgaaatctgg

SEQ ID NO: 385044 - DNA, 75 bp, synthetic construct
  source 1..75: mol_type = other DNA
aaaagggtcatcggcaaaactccggtgtggtagaaatcaccgtacagcaggatcgtaaaattgagctgatcgtca

SEQ ID NO: 385045 - DNA, 75 bp, synthetic construct
  source 1..75: mol_type = other DNA
gttggactggaaaaatgtaaatggaccatcaacgcgctgatcaaccatcattacaaaattatttccgcctcgtgg

SEQ ID NO: 385046 - DNA, 75 bp, synthetic construct
  source 1..75: mol_type = other DNA
acccttaaatatcagtttgggacgcctctcaaagaccagctcgatcctgaaaacgttaagattgcccactcattg

SEQ ID NO: 385047 - DNA, 75 bp, synthetic construct
  source 1..75: mol_type = other DNA
aataaaccttgcaccaccgaagccccttgcgtctttattgccgaaaagaacaaagaaaaaggtaccgtcacgctt

SEQ ID NO: 385048 - DNA, 75 bp, synthetic construct
  source 1..75: mol_type = other DNA
acctgacattagccatcgcagaactggaaagtggtgatgaccactccgcccaggcggtgcatacaaccgttagcc

SEQ ID NO: 385049 - DNA, 75 bp, synthetic construct
  source 1..75: mol_type = other DNA
atgagcgataaattcggcgaagggcgcgatccgtatctttatcctggtctcgatatcatgcgtaacaagctcaac

SEQ ID NO: 385050 - DNA, 75 bp, synthetic construct
  source 1..75: mol_type = other DNA
gccctgatgcaggctctggaggaagaaggttatctggtcggccttgagaaagcgaagttcgtcgagcggctggcg

SEQ ID NO: 385051 - DNA, 75 bp, synthetic construct
  source 1..75: mol_type = other DNA
tctggcacagcggatcttcttcgagcaactggcgattcatgccggatatcaactgagctggcagggtatcgaaaa

SEQ ID NO: 385052 - DNA, 75 bp, synthetic construct
  source 1..75: mol_type = other DNA
cgatgcgttgcacttgttgagcagatcccagaaatcagagattcattcgacaaggttgcaaagcgcgttccggca

SEQ ID NO: 385053 - DNA, 75 bp, synthetic construct
  source 1..75: mol_type = other DNA
tcaatcgcatgtggactgaaaaagaatatctatggtcatcacttcggcgctccacatgacgcagcagacttccgg

SEQ ID NO: 385054 - DNA, 75 bp, synthetic construct
  source 1..75: mol_type = other DNA
aactgagctggcagggtatcgaaaaagaggcctggaatcaggcaaatcagaatgggcaatgggggatctcaccgc

SEQ ID NO: 385055 - DNA, 75 bp, synthetic construct
  source 1..75: mol_type = other DNA
tcggtattgccgacgataacgatgcaaaacgcatcctgcccgaagtgcgtgcgcacctgaaaccgtggcagtccg

SEQ ID NO: 385056 - DNA, 75 bp, synthetic construct
  source 1..75: mol_type = other DNA
cagcaaaccggcttttctgagctgcctgccgatacatctattctggtgctcaatgcggtagaaggagaacggagc

SEQ ID NO: 385057 - DNA, 75 bp, synthetic construct
  source 1..75: mol_type = other DNA
accagcgtgtggtttaacatcaataatcgtcggcttaaagcccggcgcaaacttgatgcccgtgatagcaaactg

SEQ ID NO: 385058 - DNA, 75 bp, synthetic construct
  source 1..75: mol_type = other DNA
atgatcgaagcctacaaaatacttattaataatgcgttgcagcgttatcacttcgaacttgcaaaccggggtgta

SEQ ID NO: 385059 - DNA, 75 bp, synthetic construct
  source 1..75: mol_type = other DNA
accgacctcgatcaacagctggctaatacgctgttggtggttaataacggcgtcgaattcagcgccacgcaagaa

SEQ ID NO: 385060 - DNA, 75 bp, synthetic construct
  source 1..75: mol_type = other DNA
taaatttagtgggtatactatcacccgctcagcaaaaccagaacaaaacgtactgccctatctgatatcaccggc

SEQ ID NO: 385061 - DNA, 75 bp, synthetic construct
  source 1..75: mol_type = other DNA
tgcggcctttgccgacgcccgaaaacaacctgaactcaactgggatacctatacccaacttaaactggatcgttt

SEQ ID NO: 385062 - DNA, 75 bp, synthetic construct
  source 1..75: mol_type = other DNA
tagcggtggtatcggtcactcgacaacatttttatacagtgccatcgcccagcatccgcattacaacaccattcg

SEQ ID NO: 385063 - DNA, 75 bp, synthetic construct
  source 1..75: mol_type = other DNA
tgtaatctttattaatcagttacaaggattatggccggttgagcgttatctctcactactcactggcgagctgcc

SEQ ID NO: 385064 - DNA, 75 bp, synthetic construct
  source 1..75: mol_type = other DNA
acgtttgcgtgatgatagcgacggttatggcccccgcggacgtgattttatcgttcacgttgattttcctgtaga

SEQ ID NO: 385065 - DNA, 75 bp, synthetic construct
  source 1..75: mol_type = other DNA
aaaaatgtaatggaggcggtggataccagttggggaacgacttcctgggaaagcgtggccgctactgagccggac

SEQ ID NO: 385066 - DNA, 75 bp, synthetic construct
  source 1..75: mol_type = other DNA
ggcgttggaattataatattctttgtcatcatatataattttatgaacttatggttaagtggcagagataaggat

SEQ ID NO: 385067 - DNA, 75 bp, synthetic construct
  source 1..75: mol_type = other DNA
caccacgggcagggcggaagcgagcatccttgcggatatcgcccaccagttctggcatattccccatgaaaaaat

SEQ ID NO: 385068 - DNA, 75 bp, synthetic construct
  source 1..75: mol_type = other DNA
atacgctgttggtggttaataacggcgtcgaattcagcgccacgcaagaagcttatttctttgacgcattagcca

SEQ ID NO: 385069 - DNA, 75 bp, synthetic construct
  source 1..75: mol_type = other DNA
gaacactgtactgaccagcaaacagcgcaccgacgccacgtatcaatggcagcaacgtctcattaaactggccgg

SEQ ID NO: 385070 - DNA, 75 bp, synthetic construct
  source 1..75: mol_type = other DNA
tccatcgacgtgatccttcgcatcatcggtgagcaggacgaaatcgaccaggttgaaaccgtcatcctggaacac

SEQ ID NO: 385071 - DNA, 75 bp, synthetic construct
  source 1..75: mol_type = other DNA
atgatgcccggctacaccaacccgaccgaatacaccatcgagatcaactctccccaagttgcccagtttgcacac

SEQ ID NO: 385072 - DNA, 75 bp, synthetic construct
  source 1..75: mol_type = other DNA
tggccgataccaaaaaaacattgaaaaacttgaatcagaaaatatggacctaagaagaaaacttggtgaagcacg

SEQ ID NO: 385073 - DNA, 75 bp, synthetic construct
  source 1..75: mol_type = other DNA
gcacaagcagcgaccgcaacaaccactactctcgccctgttttcaaacaagctctgaaagtaaatagcctccagg

SEQ ID NO: 385074 - DNA, 75 bp, synthetic construct
  source 1..75: mol_type = other DNA
gctgatggaagacaacggcatcgacatgatgcccggctacaccaacccgaatgaatacaccatcgagatcaactc

SEQ ID NO: 385075 - DNA, 75 bp, synthetic construct
  source 1..75: mol_type = other DNA
cccaaaggggtttgtgtcagcagagccaacgtcaattgtcaccgttgaggatgttgattacccgatctggcaagt

SEQ ID NO: 385076 - DNA, 75 bp, synthetic construct
  source 1..75: mol_type = other DNA
atgagtcagcttgatgacaccctccttgatgcgctgacgcatgtcactttcccgaagggttttgcacaggcagaa

SEQ ID NO: 385077 - DNA, 75 bp, synthetic construct
  source 1..75: mol_type = other DNA
tggcgctggaggaaggtctgacgctaaccaatctgaccgaaagccagtttggtataggcacaccgcgcagcacgt

SEQ ID NO: 385078 - DNA, 75 bp, synthetic construct
  source 1..75: mol_type = other DNA
cacccgacctggcggtgcggcattgaatgccgggcaggtttttgctgttcgtctggcacgttttattggttgcac

SEQ ID NO: 385079 - DNA, 75 bp, synthetic construct
  source 1..75: mol_type = other DNA
ggcgtgcaacctcgtgtgggccgcgtacctcaaggttaatggtgaaagtgctgctggaagaagtacagcgtcttg

SEQ ID NO: 385080 - DNA, 75 bp, synthetic construct
  source 1..75: mol_type = other DNA
gtcgtggggcgcggatggttattgatccacaaggcaaatgcctcccacaaactcgtcgcggcgcaaaagaagaat

SEQ ID NO: 385081 - DNA, 75 bp, synthetic construct
  source 1..75: mol_type = other DNA
aaacttgaatcagaaaatatggacctaagaagaaaactcggtgaagcacgtcgagacatcgaagcatataaacgt

SEQ ID NO: 385082 - DNA, 75 bp, synthetic construct
  source 1..75: mol_type = other DNA
ccaacacatattctgatcattcctaatatcctcattcctaccgtgaatgacgtgtcaaccgagcatgagcaggcg

SEQ ID NO: 385083 - DNA, 75 bp, synthetic construct
  source 1..75: mol_type = other DNA
atggcgcaacgcatggctattatgaaaaaggaaaatgtcgtggcagaagaaactattttcagcaaaattattcgt

SEQ ID NO: 385084 - DNA, 75 bp, synthetic construct
  source 1..75: mol_type = other DNA
actaaacttgctgccgcgaccggagagccaagtaaacagatttggcaatcgatgctggagctttcgggggtgaag

SEQ ID NO: 385085 - DNA, 75 bp, synthetic construct
  source 1..75: mol_type = other DNA
ccctgaattatcagatattgaagctctacaagccattcgtgatgctcaggatacatttgatgaaagattaaaaaa

SEQ ID NO: 385086 - DNA, 75 bp, synthetic construct
  source 1..75: mol_type = other DNA
gataatgggatagccaaaccccaaagaatagacagtaagcaaacattacttgatggcatacctctcaaagatcta

SEQ ID NO: 385087 - DNA, 75 bp, synthetic construct
  source 1..75: mol_type = other DNA
caagattcaccgttactggatttgtatcgggtagcggaacaggtagtacttgaagcgtttccgaaacaagagatg

SEQ ID NO: 385088 - DNA, 75 bp, synthetic construct
  source 1..75: mol_type = other DNA
gtggagtgcgcaacattgcccggattatttcgcgctgttagtgatggttatcgaagcgcagagcatggttgatgc

SEQ ID NO: 385089 - DNA, 75 bp, synthetic construct
  source 1..75: mol_type = other DNA
atcgagagtcggtagcgagaaagaaggcgattcaccattactggatttgtatcgggtagcggaacaggtagtact

SEQ ID NO: 385090 - DNA, 75 bp, synthetic construct
  source 1..75: mol_type = other DNA
atgagcatcaaaacccataccggaataatcatcaccattgatggtgagaaaaaagtgaagttacgcgaaacgccg

SEQ ID NO: 385091 - DNA, 75 bp, synthetic construct
  source 1..75: mol_type = other DNA
ctggctggagaagcagccggaagggtctgtgcgtccggtggtgattgagtcggtgacaaaaatcatggcctgcgg

SEQ ID NO: 385092 - DNA, 75 bp, synthetic construct
  source 1..75: mol_type = other DNA
tcagtgcgtccggtggtgattgagtcagtgacaaaaatcatggcatgcgggaccgcgctgatggggtacacgcaa

SEQ ID NO: 385093 - DNA, 75 bp, synthetic construct
  source 1..75: mol_type = other DNA
cgtcaccgtgctgaccctgcaccggggccagaaattggcgcgtggtcactggtatttgttgatgaggtcagcggc

SEQ ID NO: 385094 - DNA, 75 bp, synthetic construct
  source 1..75: mol_type = other DNA
gtggaccatcccgtagtctggtagacaatatacaccgtgtcttcaacacccttacaggaatatttcatacccgca

SEQ ID NO: 385095 - DNA, 75 bp, synthetic construct
  source 1..75: mol_type = other DNA
aggcaactgcatcaaaggttcagcacgtttcccaagccaccacactgaagtccccaattgggaacgatctgaatt

SEQ ID NO: 385096 - DNA, 75 bp, synthetic construct
  source 1..75: mol_type = other DNA
tggccctgcttgccagtagcgccagcctggcagcgacgccgtggcaaaaaataacccaacctgtgccgggtagcg

SEQ ID NO: 385097 - DNA, 75 bp, synthetic construct
  source 1..75: mol_type = other DNA
atgtccgggaaaaaccactttatctgtaagcgtaaactgaccgccgtatgtagccatcagacgagaattggtaac

SEQ ID NO: 385098 - DNA, 75 bp, synthetic construct
  source 1..75: mol_type = other DNA
ccggaagcaggatactatcagagacccgtaaacaactcagtgaagacctgaactgtctgaaaagggatgatgaat

SEQ ID NO: 385099 - DNA, 75 bp, synthetic construct
  source 1..75: mol_type = other DNA
tgatattcactgtatttggggttgtatcgcttctgatattcattttgctgtcagtctcaccggagcatcggctga

SEQ ID NO: 385100 - DNA, 75 bp, synthetic construct
  source 1..75: mol_type = other DNA
gggcaaaaacttggaagcgaagaaagtgaagctttagaaattcctaaagtaaaacttattgacaatcaaattttc

SEQ ID NO: 385101 - DNA, 75 bp, synthetic construct
  source 1..75: mol_type = other DNA
tgttcccaaagccaccaccaacgagaacccaattgtgaaccatccaaatctggattcaggtggacgtaatgcgat

SEQ ID NO: 385102 - DNA, 75 bp, synthetic construct
  source 1..75: mol_type = other DNA
atcatcaaactggcgaaagagctgggaattgaagtgcgtgagcaagttctgtcgcgcgaatcactctatctggca

SEQ ID NO: 385103 - DNA, 75 bp, synthetic construct
  source 1..75: mol_type = other DNA
tcgtcgagggtggaaacagggccttcgaatgcaagatagaagacattgaaataattggtagaattataagtttaa

SEQ ID NO: 385104 - DNA, 75 bp, synthetic construct
  source 1..75: mol_type = other DNA
cactgaatattctggaagctgcaaaagaacgtattacctggacacttaataccctaccccgtatctgtgtttctt

SEQ ID NO: 385105 - DNA, 75 bp, synthetic construct
  source 1..75: mol_type = other DNA
ctggaggcaatcttcgagtaacagacgatgatttaacatttgattgtgaaaaagaagatataaaattagttgcca

SEQ ID NO: 385106 - DNA, 75 bp, synthetic construct
  source 1..75: mol_type = other DNA
tcgttattcttcaaacgcaaagcatgggcgtggtggaaatcgagagtcggtagcgagacagagcaagattcaccg

SEQ ID NO: 385107 - DNA, 75 bp, synthetic construct
  source 1..75: mol_type = other DNA
atcgaaatccaacacctacggctggctggggcatgcgcctcattttcgtgagtggattggttctcgtgtgatcca

SEQ ID NO: 385108 - DNA, 75 bp, synthetic construct
  source 1..75: mol_type = other DNA
ttgaaacctttatttcgggcaggcacgggattcgcgacggattatcgtcgtttgagcggacatgcgctgaaaggc

SEQ ID NO: 385109 - DNA, 75 bp, synthetic construct
  source 1..75: mol_type = other DNA
aaggctacggtgaggccataaaccgtgatgctgatactccgtacccaccgaaaccgcacctgatgcagttccggc

SEQ ID NO: 385110 - DNA, 75 bp, synthetic construct
  source 1..75: mol_type = other DNA
aatgaacagccttatagagtagttaacatgaatgatattgccgatgacggaaatcaaaatgttaaatttattaat

SEQ ID NO: 385111 - DNA, 75 bp, synthetic construct
  source 1..75: mol_type = other DNA
ttcgcggacggtaacaccaccgtctctaacgagatgaagggcaagctggagctggttgtcgcggattatctgtaa

SEQ ID NO: 385112 - DNA, 75 bp, synthetic construct
  source 1..75: mol_type = other DNA
tgcagctgctggagcgcgagctgttcgcggacggtaacaccaccgtctccaacgagatgaaaggcaagctggaac

SEQ ID NO: 385113 - DNA, 75 bp, synthetic construct
  source 1..75: mol_type = other DNA
gttctggtttcaaagaagaacaataaaatagtctgtgttattgagctggatgatccgagtcatgaaagggcagat

SEQ ID NO: 385114 - DNA, 75 bp, synthetic construct
  source 1..75: mol_type = other DNA
gcggagcagctcagaaaaaatgacaatgccgttatggattcaggggtgctgagagcagtcgttacggggtatggc

SEQ ID NO: 385115 - DNA, 75 bp, synthetic construct
  source 1..75: mol_type = other DNA
tcgtacctgggatgaatggcggcgcgaggaagatgcacgaacacacgccaccgagaggaggcgcgatcgcggttg

SEQ ID NO: 385116 - DNA, 75 bp, synthetic construct
  source 1..75: mol_type = other DNA
tgctgcatctgttgttgtgcaaagggccggaggaaatgtttgtcgggtttgtgcgcctggaggacgggctgcgtc

SEQ ID NO: 385117 - DNA, 75 bp, synthetic construct
  source 1..75: mol_type = other DNA
gataacccgttacatgatgctgaataaccgctcgggaaaattcacggtatggggtgatgagctggcacattaccc

SEQ ID NO: 385118 - DNA, 75 bp, synthetic construct
  source 1..75: mol_type = other DNA
tggcaagggagattgaacttgccattccccgagagatttcccgcgatgtcgcacgggaaaccgttctcgcttttg

SEQ ID NO: 385119 - DNA, 75 bp, synthetic construct
  source 1..75: mol_type = other DNA
gttaattgtctgggcgctgtacaataagctgcgttttcaaaaacagcagcatcatgcagcctaccaatatacgcc

SEQ ID NO: 385120 - DNA, 75 bp, synthetic construct
  source 1..75: mol_type = other DNA
atgcttcgattttctttttattttgaaagcgtcaagtttatactcatcaatacatgttggcaaatcctcgaaatt

SEQ ID NO: 385121 - DNA, 75 bp, synthetic construct
  source 1..75: mol_type = other DNA
gaagaaagggaggcttttcttgaggccattcaggctggtgattgtttcgatttccttagccttctggaatatccc

SEQ ID NO: 385122 - DNA, 75 bp, synthetic construct
  source 1..75: mol_type = other DNA
cgtttaatggtctttttgctgttaaacaaacaaatggtttaggtggtgtttctgtagcaaaaagtaaaaatgctg

SEQ ID NO: 385123 - DNA, 75 bp, synthetic construct
  source 1..75: mol_type = other DNA
gtactgcggcgagggggaaagcctgcttgccgatctctgcgcgtactgggaaagttacccatctacacaagctga

SEQ ID NO: 385124 - DNA, 75 bp, synthetic construct
  source 1..75: mol_type = other DNA
gaagatgcccggtattacttgtgtgcacaacgtttgtactgcggcgagggggaaagcctgcttgccgatctctgc

SEQ ID NO: 385125 - DNA, 75 bp, synthetic construct
  source 1..75: mol_type = other DNA
ccgcaggggtttaaagcattacgccaggcctatgaagaggcgctgcgactggcggtaaatcctgtcgaggaagca

SEQ ID NO: 385126 - DNA, 75 bp, synthetic construct
  source 1..75: mol_type = other DNA
gaaggggcgcggcgtaacttttttgccaacgtgagccatgagttacgtacgccattgaccgtgttacagggttac

SEQ ID NO: 385127 - DNA, 75 bp, synthetic construct
  source 1..75: mol_type = other DNA
ggcgttcatgacgttgtgctggcggaggagtacttcgcactcaataaagatcgttacaaagcgatgtcagtggtc

SEQ ID NO: 385128 - DNA, 75 bp, synthetic construct
  source 1..75: mol_type = other DNA
gcgaatgccgtcgtgttaattgtctgggcgctgtacaataagctgcgttttcaaaaacagcagcatcatgcagcc

SEQ ID NO: 385129 - DNA, 75 bp, synthetic construct
  source 1..75: mol_type = other DNA
tgttggagcgcaggagagcctcagaagtaaaaaatgtagcaactaccaatttgaatgtcgtgtctaatatcgata

SEQ ID NO: 385130 - DNA, 75 bp, synthetic construct
  source 1..75: mol_type = other DNA
gggctcctgaaaacagccagggcccgtccaaccaacggaagctgagcctgaaatatacagaactcgtgccggggg

SEQ ID NO: 385131 - DNA, 75 bp, synthetic construct
  source 1..75: mol_type = other DNA
gaccattaccgccacggtcaccgactccgcaggcaacagcggcacggcctcgcacactgtcagcgtggcgctcgg

SEQ ID NO: 385132 - DNA, 75 bp, synthetic construct
  source 1..75: mol_type = other DNA
cgctgatcgacctacgcgatgaaacgctgtttatgcgccagccggaagccatcttgcgcatgttttataccatgg

SEQ ID NO: 385133 - DNA, 75 bp, synthetic construct
  source 1..75: mol_type = other DNA
tggctggttcgccagcacttgctgatgtcggtgacagcacagcgccgcgatattcaggacccggaagtcatcaag

SEQ ID NO: 385134 - DNA, 75 bp, synthetic construct
  source 1..75: mol_type = other DNA
tattttatggcgtattcgctttgccctgcatctggtagtcagccgttacgataaccgcctgttgtttgatcgcca

SEQ ID NO: 385135 - DNA, 75 bp, synthetic construct
  source 1..75: mol_type = other DNA
tgagcgcaaaaaaattcatcagtggtattaccgcgccgatgacctggaacataaaaccgcattgctggtgcatct

SEQ ID NO: 385136 - DNA, 75 bp, synthetic construct
  source 1..75: mol_type = other DNA
aagagaaagagaagccgcgggtgaaaaaacgccatcgcgacaccaaaaatattggtaagcgccgtaaaccaagcg

SEQ ID NO: 385137 - DNA, 75 bp, synthetic construct
  source 1..75: mol_type = other DNA
ctctcgtatgaacgttctaaaccaggtgatctaagcaatagcatttggatgcttggtgtcggttaccgattttaa

SEQ ID NO: 385138 - DNA, 75 bp, synthetic construct
  source 1..75: mol_type = other DNA
gtgaagaaacgcgccagcgccatccgttgtgtgtggacgtctggccgcgcctgccgtcaactgagctgattttca

SEQ ID NO: 385139 - DNA, 75 bp, synthetic construct
  source 1..75: mol_type = other DNA
agacatcaaaagtagccccggcggcttgcgcgatatccacactctgcaatgggtggcccgccgtcattttggcgc

SEQ ID NO: 385140 - DNA, 75 bp, synthetic construct
  source 1..75: mol_type = other DNA
taatcgccaccgctgaccgacgtgcacttaataacgagttgcagcaggaagtacatcagcggttgacagaggccc

SEQ ID NO: 385141 - DNA, 75 bp, synthetic construct
  source 1..75: mol_type = other DNA
ctgggataaaagcccatattgatacctttcagcgttggctgggcgatgcctttgatagcgggatctccgcagaac

SEQ ID NO: 385142 - DNA, 75 bp, synthetic construct
  source 1..75: mol_type = other DNA
cggtggctacggtcgtggcgagctgcatccactttccgacatcgatttgctgatcttaagccgtaagaaactccc

SEQ ID NO: 385143 - DNA, 75 bp, synthetic construct
  source 1..75: mol_type = other DNA
tcgccgcgctgtttcacgatatcgccaaagggcgtggcggcgaccactccattctcggtgcacaagacgtggtgc

SEQ ID NO: 385144 - DNA, 75 bp, synthetic construct
  source 1..75: mol_type = other DNA
tattaccgcgctgatgatcttgaacataaaaccgcgctgctggtgcatctgttaaaacagccggaagcaactcgc

SEQ ID NO: 385145 - DNA, 75 bp, synthetic construct
  source 1..75: mol_type = other DNA
gaaggtggtttatgaccttgggaaaaaagcggcagcggactttatgcaacagcaggcccgtgatggtggtcggtt

SEQ ID NO: 385146 - DNA, 75 bp, synthetic construct
  source 1..75: mol_type = other DNA
gtgtcgcgggcgaaaagactcccctggacggcatcatcttctcaggttgaatacgatcagcagcgtcttaacgat

SEQ ID NO: 385147 - DNA, 75 bp, synthetic construct
  source 1..75: mol_type = other DNA
gcgtattcagcagcagatccgacaggccagaaacagtggcgggattggccagcaggattatctggcgctgatttc

SEQ ID NO: 385148 - DNA, 75 bp, synthetic construct
  source 1..75: mol_type = other DNA
agcgggggatgtggtgagcgtcgtgctcaacggcaaaacctacaccaccacgctggatgcctccggcaactggag

SEQ ID NO: 385149 - DNA, 75 bp, synthetic construct
  source 1..75: mol_type = other DNA
gggcatggctactgaaaggatgacagaagcgcataaacagcttctggcccttcagcagcgtatcagcgatttagc

SEQ ID NO: 385150 - DNA, 75 bp, synthetic construct
  source 1..75: mol_type = other DNA
cagtctgtcagtgacaccatcagtcagtttaaacggctgaaggatgatccggtcagtgctgcgaaggcgctggat

SEQ ID NO: 385151 - DNA, 75 bp, synthetic construct
  source 1..75: mol_type = other DNA
gaaacccgtaatgatgaggccacccggttattgctgcagtacagtcagcaacaggcacaggtggaaggacagatt

SEQ ID NO: 385152 - DNA, 75 bp, synthetic construct
  source 1..75: mol_type = other DNA
aagtttctgctaatccatccacccgtgagcgcaaaaagattcatcagtggtattaccgtgccgatgaccttgagc

SEQ ID NO: 385153 - DNA, 75 bp, synthetic construct
  source 1..75: mol_type = other DNA
ctggttgaagctcatgaccatctgctgctgggcaaagtaggccgctatattgaagagccaattaaagctcgcgtt

SEQ ID NO: 385154 - DNA, 75 bp, synthetic construct
  source 1..75: mol_type = other DNA
gcgctgggcgaagcgacctacagcgtcacggcgagcgtcaccaatgctcagggcaacagcagcaccgccagccat

SEQ ID NO: 385155 - DNA, 75 bp, synthetic construct
  source 1..75: mol_type = other DNA
cacctccaaaaccgggaacaacaaagcctgagaagaagacaccgcctccgttgccgccttcctgccaggcgctac

SEQ ID NO: 385156 - DNA, 75 bp, synthetic construct
  source 1..75: mol_type = other DNA
ttcagcttgatcaaactcgccgcccaggacaaagacgtcacacgcatttttgttaatccggcgattaaacaacaa

SEQ ID NO: 385157 - DNA, 75 bp, synthetic construct
  source 1..75: mol_type = other DNA
cgccaaactgcgtcattttaccgttgaaaccgaagtgacgtttttgccaacccataccgaccgaaaatcattcct

SEQ ID NO: 385158 - DNA, 75 bp, synthetic construct
  source 1..75: mol_type = other DNA
ttaccgttagcggcgcgaacagtgccggaacgcaaaccagcattacccatccgctgactgttgatctcactaccg

SEQ ID NO: 385159 - DNA, 75 bp, synthetic construct
  source 1..75: mol_type = other DNA
ctatttccctaaacccatcaaactggggcgcagcagccgctggtacaaaagtgaggtggagcagtggatgcagca

SEQ ID NO: 385160 - DNA, 75 bp, synthetic construct
  source 1..75: mol_type = other DNA
gaaaaagttctcagagcagatttttaaaattactggcgatgagaatgcggcaaaaaatgaattagaaccgtggac

SEQ ID NO: 385161 - DNA, 75 bp, synthetic construct
  source 1..75: mol_type = other DNA
tcccctgatcgacatgaactacatcaccagcttcactggtatgaccgacaaatggttttacaagctgatcagtga

SEQ ID NO: 385162 - DNA, 75 bp, synthetic construct
  source 1..75: mol_type = other DNA
gcgtattgctgcgtgccgacgatcccctgatcgacatgaactacatcaccagtttcaccggcatgaccgataaat

SEQ ID NO: 385163 - DNA, 75 bp, synthetic construct
  source 1..75: mol_type = other DNA
tcgctgactttttcctttatcgccgtaatggctatcaagagtcagtgttagcccaggagtcacagattaaagtgc

SEQ ID NO: 385164 - DNA, 75 bp, synthetic construct
  source 1..75: mol_type = other DNA
tagatttcaaaatatacatcagccaaagcatagtagatgaattattttctcatcgtcaaacccactgttttagta

SEQ ID NO: 385165 - DNA, 75 bp, synthetic construct
  source 1..75: mol_type = other DNA
aaccaccccacgagccagatacgaagccattgccgtgggaactgcacttgcattaaaaactaacccacaactcca

SEQ ID NO: 385166 - DNA, 75 bp, synthetic construct
  source 1..75: mol_type = other DNA
aataaattcaggtgttaagagactggaagcgatggaggttagacatggttcagatgcggccacttcaattttcta

SEQ ID NO: 385167 - DNA, 75 bp, synthetic construct
  source 1..75: mol_type = other DNA
ccgatctggcggcattaccggaaggcagcgcttccgcgcaggccagcgtcagcaatattaatggcaatagcgcct

SEQ ID NO: 385168 - DNA, 75 bp, synthetic construct
  source 1..75: mol_type = other DNA
acgcggaaaaatataacgagtgggtaaaaaaattctctgagcagatttttaaaattactggtgacgagaatgtag

SEQ ID NO: 385169 - DNA, 75 bp, synthetic construct
  source 1..75: mol_type = other DNA
ggataagcggaggttttattattattttcaggaaaaaaacaccccaaacatagaacgcttcttcgtttttgattc

SEQ ID NO: 385170 - DNA, 75 bp, synthetic construct
  source 1..75: mol_type = other DNA
gcgtgttactgcgtgccgacgatcccctgatcgacatgaactacatcaccagtttcaccggcatgaccgataaat

SEQ ID NO: 385171 - DNA, 75 bp, synthetic construct
  source 1..75: mol_type = other DNA
acagcctatgggttggtaaactttgtattatatttacctggtggctgggctgccgatagattttctgcccgcaaa

SEQ ID NO: 385172 - DNA, 75 bp, synthetic construct
  source 1..75: mol_type = other DNA
ttaacgccgccgaagcgggtgttgcgcaatccatcagcgggcaggtgactggagccgcagttggtaacacggtaa

SEQ ID NO: 385173 - DNA, 75 bp, synthetic construct
  source 1..75: mol_type = other DNA
acttccttcaggaaaaagctgggcggaatcaagtgtcgccctgaagagtacacgcgatccggtcggaagcggtgg

SEQ ID NO: 385174 - DNA, 75 bp, synthetic construct
  source 1..75: mol_type = other DNA
gctgatgaatccggagcctctcttcgggcagctggttttgttcgtgtgaaagaacttccttcaggaaaaagctgg

SEQ ID NO: 385175 - DNA, 75 bp, synthetic construct
  source 1..75: mol_type = other DNA
taccacaggagaacgcaacgctaacagcgcgctttatggtgctgtctggcgggcagcaaaagctatgggttatca

SEQ ID NO: 385176 - DNA, 75 bp, synthetic construct
  source 1..75: mol_type = other DNA
ccaaatttggcgaaggtgttgatggtttacgggcgacaattattttttattccgtagtgactattctggcaggtg

SEQ ID NO: 385177 - DNA, 75 bp, synthetic construct
  source 1..75: mol_type = other DNA
atgttgacctcaataacaggccacgacagcgtattgctgcgtgctgacgatcccctgatcgacatgaactacatc

SEQ ID NO: 385178 - DNA, 75 bp, synthetic construct
  source 1..75: mol_type = other DNA
gtcgtagaggaaggcaaacagacgctgacactcgacggtaaaacctggctgcttgaacgtccactgcgcgccgac

SEQ ID NO: 385179 - DNA, 75 bp, synthetic construct
  source 1..75: mol_type = other DNA
accacatcatcgtttcacaggagagcaaataatggatgcgaaacaatgtattgcgcgccgtgtggcgcaagagct

SEQ ID NO: 385180 - DNA, 75 bp, synthetic construct
  source 1..75: mol_type = other DNA
agcgcactttatggcgctgtctggagggcggcaaaagatatgggctatcgccgttgcattacatacacccgggct

SEQ ID NO: 385181 - DNA, 75 bp, synthetic construct
  source 1..75: mol_type = other DNA
aatggttttacaagctgatcagtgaaggccattttcctaaacccatcaagctgggccgcagcagccgctggtaca

SEQ ID NO: 385182 - DNA, 75 bp, synthetic construct
  source 1..75: mol_type = other DNA
ctgggtcgcagcagccgctggtacaaaagtgaagtggagcagtggatgcagcagcgaattgaggaatcacgagga

SEQ ID NO: 385183 - DNA, 75 bp, synthetic construct
  source 1..75: mol_type = other DNA
cgtttccggcgacgatgtgattaacgccgctgaaaaaggggccgatttaaccctttccggcagcacttccggcgt

SEQ ID NO: 385184 - DNA, 75 bp, synthetic construct
  source 1..75: mol_type = other DNA
ttctaaatattttattttatcaaagagggagagcatactgtgtaaattatcgagatatgacaataggaataacgt

SEQ ID NO: 385185 - DNA, 75 bp, synthetic construct
  source 1..75: mol_type = other DNA
atgagtttctgtctgttaatcacttagctggatacggttcaatttttggtgacagtaatcgcttaaaactggatt

SEQ ID NO: 385186 - DNA, 75 bp, synthetic construct
  source 1..75: mol_type = other DNA
acgaatttgccgtcgctgagaaattgtcgctgttacaggcgcctgattctgtacgtcgtcatcagatggaaatgc

SEQ ID NO: 385187 - DNA, 75 bp, synthetic construct
  source 1..75: mol_type = other DNA
gcctacgcctactggatttcacctcagcaaatgctggatgtggcatgggacgacgacgggaatatgttgtgggcg

SEQ ID NO: 385188 - DNA, 75 bp, synthetic construct
  source 1..75: mol_type = other DNA
ccatcagcggccaggtgacgggcgcggcggcgggcgatacggttaccgtgacgcttggcgggaaaacctacaccg

SEQ ID NO: 385189 - DNA, 75 bp, synthetic construct
  source 1..75: mol_type = other DNA
ccgcacgggatcgctgaacattgcgcgtaaaacaccgatcgtaatgggcatgttgctgtcgatggtgatggtgtt

SEQ ID NO: 385190 - DNA, 75 bp, synthetic construct
  source 1..75: mol_type = other DNA
agaagctcacggaatttgcccgctacactcagcagcagggggtgcagattgcctatcaccaccatatggggacgg

SEQ ID NO: 385191 - DNA, 75 bp, synthetic construct
  source 1..75: mol_type = other DNA
ggcggatgtcaaaaaccgcaaaaccagcttcctcgatgcggtgctgagcggcgtgtttaccgtgccgggcgacgg

SEQ ID NO: 385192 - DNA, 75 bp, synthetic construct
  source 1..75: mol_type = other DNA
atgtcaataaaaggccttgaacaggcgatagaaaaccttaacagcatcagcaaaacggctgtcccgcgtgcgtcg

SEQ ID NO: 385193 - DNA, 75 bp, synthetic construct
  source 1..75: mol_type = other DNA
aacgtgtttagtgcctgtatttggatcccctatttcattgtatctgagcgcgttaagcggacatttgtgaaataa

SEQ ID NO: 385194 - DNA, 75 bp, synthetic construct
  source 1..75: mol_type = other DNA
ctgacgctcgccgatcagaaagtgacgctgaagattgcgcccgcgcagggtgaccttatttccgtcagcgctgcg

SEQ ID NO: 385195 - DNA, 75 bp, synthetic construct
  source 1..75: mol_type = other DNA
aaataagtcagtacttacttatgatcgagatacagtccaagaaagcggacaagatcaaccccgagggaatgggga

SEQ ID NO: 385196 - DNA, 75 bp, synthetic construct
  source 1..75: mol_type = other DNA
cgctggcagatgtttctatcaccaaggcactgccgccggaagcgcagcagatgatgcagttaagcattgagaatg

SEQ ID NO: 385197 - DNA, 75 bp, synthetic construct
  source 1..75: mol_type = other DNA
ccggtggctactggatctccactccggctaattacattgtggctaaccccagcaccctgaccggctctattggta

SEQ ID NO: 385198 - DNA, 75 bp, synthetic construct
  source 1..75: mol_type = other DNA
gaagcagtggcacctggaatattacgttgatgaacccaccttctttgacaaagtgatggacaacatgtcaggttc

SEQ ID NO: 385199 - DNA, 75 bp, synthetic construct
  source 1..75: mol_type = other DNA
cggggtggtcactcgtgccgccgctggcgatacggttaccgtcacgctgggcggcaacacttacaccaccacggt

SEQ ID NO: 385200 - DNA, 75 bp, synthetic construct
  source 1..75: mol_type = other DNA
gtgatctcgcaacagaatcgaattctttatgattcaactgtcccggctggaccattttcgatccaggatctggat

SEQ ID NO: 385201 - DNA, 75 bp, synthetic construct
  source 1..75: mol_type = other DNA
atgattctggacaccgttgacgaaaaaaagaaaggcgtgcatacccgctatttaatattactgattatttttatt

SEQ ID NO: 385202 - DNA, 75 bp, synthetic construct
  source 1..75: mol_type = other DNA
aatattatctcgccagtttcgccaataaaatttggctgtcaccgcaaggcgtggtggatctgcacggttttgcta

SEQ ID NO: 385203 - DNA, 75 bp, synthetic construct
  source 1..75: mol_type = other DNA
agctgtggcaaaactatctgaatactgttgccgctaaccggcagatccctgctcagcaggtattccctggcgcgc

SEQ ID NO: 385204 - DNA, 75 bp, synthetic construct
  source 1..75: mol_type = other DNA
tgcttggtgccagttccgatcgtctgcaggaaaactcactgtttgatatcgtcaacaccattcgccaggcgaagg

SEQ ID NO: 385205 - DNA, 75 bp, synthetic construct
  source 1..75: mol_type = other DNA
aaaagcgctgaccaaagagttcggctggagtaaggcagataaaaattatcgcgccatcagttattacgattatgc

SEQ ID NO: 385206 - DNA, 75 bp, synthetic construct
  source 1..75: mol_type = other DNA
ccggattttttaaatggacatggcgtctgctgaactttgtccgtgagatggtactcaatctgttctttatttttc

SEQ ID NO: 385207 - DNA, 75 bp, synthetic construct
  source 1..75: mol_type = other DNA
tgattcgcgctgaactggcagcagcccgggcagcgggtaagcctgtggttgtatcgatgggcggcatggcggcat

SEQ ID NO: 385208 - DNA, 75 bp, synthetic construct
  source 1..75: mol_type = other DNA
gctgatgtggaacgtatttcagccgtcacctctggcgttaaagagattcgcgaggcaatcgagcgagcgcggcag

SEQ ID NO: 385209 - DNA, 75 bp, synthetic construct
  source 1..75: mol_type = other DNA
ggcaacggcggctcccattgcgacgccatgcactttgcagaagaactgacggggcgctaccgtgaaaaccgtccg

SEQ ID NO: 385210 - DNA, 75 bp, synthetic construct
  source 1..75: mol_type = other DNA
aacgtcggtgccactgacagccagaatgtggtgatcgacaccatcgcgccagatccagcagtaaaaaccatcgcc

SEQ ID NO: 385211 - DNA, 75 bp, synthetic construct
  source 1..75: mol_type = other DNA
tcattaaattgtgcttctttgctggcagagcgtttgaactggcattcgtttaatgactgcgaaggaatagatgag

SEQ ID NO: 385212 - DNA, 75 bp, synthetic construct
  source 1..75: mol_type = other DNA
tggctggatatggcgcgtatcgtacgtgggcaaacccttagtctgaagcgcaaagagtttattgaggcagcacaa

SEQ ID NO: 385213 - DNA, 75 bp, synthetic construct
  source 1..75: mol_type = other DNA
cgtgctcggcgtcgtggtggtttacgcatcgctgctggtgccaagcatgattctctttgaatcatttcttagctt

SEQ ID NO: 385214 - DNA, 75 bp, synthetic construct
  source 1..75: mol_type = other DNA
ttctcccgttacgttgaagcggtaggtcgcgaaggcgatgtactgctggggatctccacctccggtaactctgca

SEQ ID NO: 385215 - DNA, 75 bp, synthetic construct
  source 1..75: mol_type = other DNA
aaaattatccagccggacactgaccattgccctgaatgtgacgagccgctgcactatatccgtgatgcggtgagt

SEQ ID NO: 385216 - DNA, 75 bp, synthetic construct
  source 1..75: mol_type = other DNA
ccgccggtcgtctgttttgactcgcagaccggacgggccctcagatatcctgaggcctggctgcagggctggtgt

SEQ ID NO: 385217 - DNA, 75 bp, synthetic construct
  source 1..75: mol_type = other DNA
tctcaacaccacgaatgacatcgaaaaactgcgtgctatggcacttgccatggtacaagaagtcatgtcggagaa

SEQ ID NO: 385218 - DNA, 75 bp, synthetic construct
  source 1..75: mol_type = other DNA
tcgtttattgagtcgttattcttcaaacgcaaagcatgggcgtggtggaaatcgagagtcggtagcgagacagag

SEQ ID NO: 385219 - DNA, 75 bp, synthetic construct
  source 1..75: mol_type = other DNA
gcggctgagcacacggtacaggcggcgtatgaagcacagcgtgaatttggtctggacctgggttcacgtatagga

SEQ ID NO: 385220 - DNA, 75 bp, synthetic construct
  source 1..75: mol_type = other DNA
ttgagtaacttacgcgaataccagaatcgtattgcagatatcgcaaaacgctctaaagctgtgcttggctgggca

SEQ ID NO: 385221 - DNA, 75 bp, synthetic construct
  source 1..75: mol_type = other DNA
aaccgacaaacataacgtcatgcaagaagaagatagagggataggtaagtgtatgattgatcgtagtctgtggct

SEQ ID NO: 385222 - DNA, 75 bp, synthetic construct
  source 1..75: mol_type = other DNA
ttccctgtcatttatctcaagtctaatcagaagaatactaaattattgctggcgattgcgacctctgcagcctta

SEQ ID NO: 385223 - DNA, 75 bp, synthetic construct
  source 1..75: mol_type = other DNA
actggtgataacgtggtgattcgtcagtcacacggtggttcaggtaaacaagcgacgtcggtaatcaacggtatt

SEQ ID NO: 385224 - DNA, 75 bp, synthetic construct
  source 1..75: mol_type = other DNA
taccggacgaccaacgtcaggcgcgtttccactgcgtgctggtgtatctgcgtcacgcggaagatccgactccgc

SEQ ID NO: 385225 - DNA, 75 bp, synthetic construct
  source 1..75: mol_type = other DNA
gtgagcaatctgtcgctcgatttttcggataatacttttcaacctctggccgcgcgtatgcgaccagaaaattta

SEQ ID NO: 385226 - DNA, 75 bp, synthetic construct
  source 1..75: mol_type = other DNA
tacgcagaaaagaaacttgcttcatcagaacatctttcgagtgttgaagacctaatctcccaggtagcggcagag

SEQ ID NO: 385227 - DNA, 75 bp, synthetic construct
  source 1..75: mol_type = other DNA
tcgctatgccgaagttgaaaaactaattaatctgtataaaaaggatataaaaagcaccaaatcatccccgagaat

SEQ ID NO: 385228 - DNA, 75 bp, synthetic construct
  source 1..75: mol_type = other DNA
cgccagcttaatcacgttgaagcggcagagctgctgcgtattgcggctgaaaacattcagaacgaagcgcaggag

SEQ ID NO: 385229 - DNA, 75 bp, synthetic construct
  source 1..75: mol_type = other DNA
tagcctggcgtgtcatatcacatctcgccagctaaaccacgtcgaagcagcagaactgctgcgtgtgaccgctga

SEQ ID NO: 385230 - DNA, 75 bp, synthetic construct
  source 1..75: mol_type = other DNA
cggtattaatgaactgattgatgacctgatggatcacatcagcctggaaaacaatgtactgttcccacgcgcgct

SEQ ID NO: 385231 - DNA, 75 bp, synthetic construct
  source 1..75: mol_type = other DNA
taacctggcgtgtcatatcacatcccgccaactaaaccacgtcgaagcggcagaactgctgcgtgtgactgctga

SEQ ID NO: 385232 - DNA, 75 bp, synthetic construct
  source 1..75: mol_type = other DNA
cgccagctaaaccacgtggaagcggcagaactgctgcgtgtgactgctgaagcaatccagaacgaagcgcgggag

SEQ ID NO: 385233 - DNA, 75 bp, synthetic construct
  source 1..75: mol_type = other DNA
ctaaaaccggaccggatgacgtagggcttaatattttactgacagaggcccgtcttgaagaacgtcgggcaaggg

SEQ ID NO: 385234 - DNA, 75 bp, synthetic construct
  source 1..75: mol_type = other DNA
atggttacgttttggggaaattatgaggggatctctcagtataaagcagcaacattaagcgatgccgatgcaaaa

SEQ ID NO: 385235 - DNA, 75 bp, synthetic construct
  source 1..75: mol_type = other DNA
ggctaacttcgttctggctgggcgtctcactcaggggcaggccaacgcattggggcgccgtgctggtgaaccacc

SEQ ID NO: 385236 - DNA, 75 bp, synthetic construct
  source 1..75: mol_type = other DNA
ggctaactttgttcgggctgggcgtctcactcagggacaggccaacgcactgggtcgccgtgctggtgaaccgcc

SEQ ID NO: 385237 - DNA, 75 bp, synthetic construct
  source 1..75: mol_type = other DNA
ggcggtcgtacccagtctatgtttgactctcatccaccatcaacagagcgtgcacaacacatccgtgaccgtatc

SEQ ID NO: 385238 - DNA, 75 bp, synthetic construct
  source 1..75: mol_type = other DNA
tctggatggcggtcgcacccagtccatgtttgactctcacccaccatcaacagagcgtgcgcaacacatccgtga

SEQ ID NO: 385239 - DNA, 75 bp, synthetic construct
  source 1..75: mol_type = other DNA
ccggtttaaatgcctataaagcagcaacgttaagcgatgccgatgcaaaagcgattgccaatcagggctgtgccg

SEQ ID NO: 385240 - DNA, 75 bp, synthetic construct
  source 1..75: mol_type = other DNA
acgggagacctagtgcgcgtcacgcagattatcaacggtggccagaacggtatcgacgaccggcgagcacgttac

SEQ ID NO: 385241 - DNA, 75 bp, synthetic construct
  source 1..75: mol_type = other DNA
gcatgggtaacaacggcccaggtgatggatggaattatcgcggtcgtggacttatccagatcactggtctgaaca

SEQ ID NO: 385242 - DNA, 75 bp, synthetic construct
  source 1..75: mol_type = other DNA
ctgccggcgttagcctggcgctggccacgcgctggcatccgcacattgtggcggccatgaaagagtttggcatca

SEQ ID NO: 385243 - DNA, 75 bp, synthetic construct
  source 1..75: mol_type = other DNA
gcatgggtaacaatgcctctggtgatggctggaattaccgtggtcgcggacttatccagattaccggtttgaata

SEQ ID NO: 385244 - DNA, 75 bp, synthetic construct
  source 1..75: mol_type = other DNA
ggcagaacgtgatggcacagcgcgcaggccggtcgactgaaggcatggaccacgccgcgcgtaccgcgcatgaag

SEQ ID NO: 385245 - DNA, 75 bp, synthetic construct
  source 1..75: mol_type = other DNA
ggcagaacgtgatggcacagcgcgcaggccgggcgaatgaaggtgtggaccacgccgcgcgtaccgcgcatgaag

SEQ ID NO: 385246 - DNA, 75 bp, synthetic construct
  source 1..75: mol_type = other DNA
ggctaacttcgttcgggctgggcgtctcgctcagggacaggccaacgcattgggtcgccgcgcaggcgaacctcc

SEQ ID NO: 385247 - DNA, 75 bp, synthetic construct
  source 1..75: mol_type = other DNA
gagttgcgccagaaacaatacgaatactaccgtgatttacttttcagtttcccgaaacctgaaactgtcagtaat

SEQ ID NO: 385248 - DNA, 75 bp, synthetic construct
  source 1..75: mol_type = other DNA
gaactccacactagatatcttttctatttcctgcaaaccaattacgcaaaacagtattttgaaaatcaaaaaaca

SEQ ID NO: 385249 - DNA, 75 bp, synthetic construct
  source 1..75: mol_type = other DNA
agatcattaacggtggacagaacggtatcgacgaccggcggacgcgttacggtgctgcccgtaaggcgctgttat

SEQ ID NO: 385250 - DNA, 75 bp, synthetic construct
  source 1..75: mol_type = other DNA
gtttgccagacatggccgcaatatacccgcaatctccgccagccgaagacatggccggagtctttctgtcttgga

SEQ ID NO: 385251 - DNA, 75 bp, synthetic construct
  source 1..75: mol_type = other DNA
aaattggaggaaatccctccgggtaatgactccaacttattgatagtgttttatgttcagataatgcccgatgac

SEQ ID NO: 385252 - DNA, 75 bp, synthetic construct
  source 1..75: mol_type = other DNA
gccttttgtacgagcttctgtcactaaattggaggaaatccctccgggtaatgactccaacttattgatagtgtt

SEQ ID NO: 385253 - DNA, 75 bp, synthetic construct
  source 1..75: mol_type = other DNA
cggctcgtagcgcggcgtggttcttctccagcaaaggttgcatgaagtataccggcgatattgcacgtgtaactc

SEQ ID NO: 385254 - DNA, 75 bp, synthetic construct
  source 1..75: mol_type = other DNA
tgattatcaatggtggccggaacggcattgacgaccggcgcgcgcggtacatcacagccagtaaggtgcttttat

SEQ ID NO: 385255 - DNA, 75 bp, synthetic construct
  source 1..75: mol_type = other DNA
tctgcgatgagagagtttggtatcagcaaaccagaagagcaggcaatgtttattgctcaagtcgggcatgagtct

SEQ ID NO: 385256 - DNA, 75 bp, synthetic construct
  source 1..75: mol_type = other DNA
accggagatattgtacgtgtaactctgattatcaatggtggcaggaacggcatcgacgaccggcgcgcgcggtac

SEQ ID NO: 385257 - DNA, 75 bp, synthetic construct
  source 1..75: mol_type = other DNA
tgattatcaatggtggcaggaacggcatcgacgaccggagcgcgcggtacatcactgccagtaaggcgctgatgg

SEQ ID NO: 385258 - DNA, 75 bp, synthetic construct
  source 1..75: mol_type = other DNA
cggctggttttaccgcgggcgcgggcttatccagatcaccggcctgaacaactaccgggactgcggcaacggcct

SEQ ID NO: 385259 - DNA, 75 bp, synthetic construct
  source 1..75: mol_type = other DNA
ggccagaaaggtatcaaaggttcagccggaaccggaaaaaccggcagaagagaaaagtaaatcgaaagcaacatc

SEQ ID NO: 385260 - DNA, 75 bp, synthetic construct
  source 1..75: mol_type = other DNA
gttaccgcaggcctgtctgacgccggagatggtcaatcgtatggggctgacggcggcttctcaggagaaggtcac

SEQ ID NO: 385261 - DNA, 75 bp, synthetic construct
  source 1..75: mol_type = other DNA
gcggtgcaacgataaccgcaaaaggcgcggccctgcatgcagggggcatgaacggaggaacccgtctcctggtgg

SEQ ID NO: 385262 - DNA, 75 bp, synthetic construct
  source 1..75: mol_type = other DNA
actggcctgagagcgtcgacaccgatgcgaaaaaatgcgccgcctttgcgggttctggcgtatccgttcagccac

SEQ ID NO: 385263 - DNA, 75 bp, synthetic construct
  source 1..75: mol_type = other DNA
ttaacagcattacatatgtgctgctactttccctggtagccgtaccggcttatgccatcgattttaatacagatg

SEQ ID NO: 385264 - DNA, 75 bp, synthetic construct
  source 1..75: mol_type = other DNA
cccgttaccggaatgacttcacgggacgtgagaaggagctgtacaccgtcacactcaacaagaacttcgaggact

SEQ ID NO: 385265 - DNA, 75 bp, synthetic construct
  source 1..75: mol_type = other DNA
tccaccaaccggtggggcattggtgtggtgacggatgtgagcagctattaccgcaacaccacctcagtggacctg

SEQ ID NO: 385266 - DNA, 75 bp, synthetic construct
  source 1..75: mol_type = other DNA
ggtatgagcgcatccggtggtgcaacgattaccgcgaaaggtgcggccctgcatgcagggggcatgaacggaggg

SEQ ID NO: 385267 - DNA, 75 bp, synthetic construct
  source 1..75: mol_type = other DNA
attcgccccaatccggcagaggggatgctttatataaatatgccgcaggcgtggctggagtattccgatgcttcc

SEQ ID NO: 385268 - DNA, 75 bp, synthetic construct
  source 1..75: mol_type = other DNA
ggcaacatcgccagcagccaggcgaatttactggtcgatagcggcctgccgggcgtcaccatcaacaccgtggcg

SEQ ID NO: 385269 - DNA, 75 bp, synthetic construct
  source 1..75: mol_type = other DNA
tggacgaccggtctcatcaggaaccgaaacgtcagcggcgtgacctgctgctggaagaggtgctgaaacaggcgg

SEQ ID NO: 385270 - DNA, 75 bp, synthetic construct
  source 1..75: mol_type = other DNA
ggattcgcttaattttaccgtagatctccaaaaaacagtgccagacaatttccaacgaccggtagcacaagtcca

SEQ ID NO: 385271 - DNA, 75 bp, synthetic construct
  source 1..75: mol_type = other DNA
tcaaagcttaatgaaaaggataatgactcggtatttgtgaggttaacagtgccgtttggttcggggagagcaagt

SEQ ID NO: 385272 - DNA, 75 bp, synthetic construct
  source 1..75: mol_type = other DNA
ttaaagagatcctcgacattaaccccgttggtcgccgcgcgcgcgtgcagccaggcgtgcgtaacctggcgatct

SEQ ID NO: 385273 - DNA, 75 bp, synthetic construct
  source 1..75: mol_type = other DNA
gcaggtaaaaaaagcctctgcggaaaatgcatcaggcagtgagggtgcagaccagagcggggggcgaagggggca

SEQ ID NO: 385274 - DNA, 75 bp, synthetic construct
  source 1..75: mol_type = other DNA
ggacgaagtgcgcgccaaattatgcaaggcgtgcgcctttgcccgtcgtggcctgaccgatgcggacagcatggc

SEQ ID NO: 385275 - DNA, 75 bp, synthetic construct
  source 1..75: mol_type = other DNA
aaaaagagttgttgccggacttttccggctggattgagggaacgctggaggctgacggcgggcagcaggacgaag

SEQ ID NO: 385276 - DNA, 75 bp, synthetic construct
  source 1..75: mol_type = other DNA
aggccgggcgaatgaaggtgtggaccacgccgcgcgtaccgcgcatgaagaggtgctgtatcgtctgcgtctggc

SEQ ID NO: 385277 - DNA, 75 bp, synthetic construct
  source 1..75: mol_type = other DNA
caacgccggggtgatcctcggtggtcgacccattaagcccgatgagctggatctgcgttggatctccgccctgct

SEQ ID NO: 385278 - DNA, 75 bp, synthetic construct
  source 1..75: mol_type = other DNA
cgtccgatcaaaccagacgaactggatctgcgttggatctccgccctgatgtatcgcaatggcgtgattgaagaa

SEQ ID NO: 385279 - DNA, 75 bp, synthetic construct
  source 1..75: mol_type = other DNA
tcgtctgtttatgatgtttgcttctccggctgatatgactctcgaatggcaggaatccggcgtggaaggggctaa

SEQ ID NO: 385280 - DNA, 75 bp, synthetic construct
  source 1..75: mol_type = other DNA
acaaactggcgaaagcaccaaccgatggcgagcaggatcgcgctctgatgcaggaagcgctgctggccgttgtcc

SEQ ID NO: 385281 - DNA, 75 bp, synthetic construct
  source 1..75: mol_type = other DNA
tcgcctggttttgacctgctggcgctgtttaccggatcggaaggtatgctcggcgtgaccaccgaagtgacggta

SEQ ID NO: 385282 - DNA, 75 bp, synthetic construct
  source 1..75: mol_type = other DNA
taactttggccgtactgctgccacggtactgaccgaagaaatctgtaatccggtactgacgcaggccgggacgga

SEQ ID NO: 385283 - DNA, 75 bp, synthetic construct
  source 1..75: mol_type = other DNA
cgttgagcgcgacgagaaaggccgtatcgtgaaagcgaaagacgcggcaggccatgaactggtgtataccggcat

SEQ ID NO: 385284 - DNA, 75 bp, synthetic construct
  source 1..75: mol_type = other DNA
ccggtgatcctgccggaagatgtggtaatggatggtattaccagcccgatcaaagcagatcctgagtgggcgaaa

SEQ ID NO: 385285 - DNA, 75 bp, synthetic construct
  source 1..75: mol_type = other DNA
aatcattaacgatgaaaatagaaaggttcagtggaatgatgctattaatgggcttcctgtgataagtgataatat

SEQ ID NO: 385286 - DNA, 75 bp, synthetic construct
  source 1..75: mol_type = other DNA
tcgcaattatgggattacataaatgctaattcaatctggtttgaatactataatcataatgaatcattatttctg

SEQ ID NO: 385287 - DNA, 75 bp, synthetic construct
  source 1..75: mol_type = other DNA
tatctaacagactcatagaacaagatgcctttaaaacgtcattactccgagaaagtggagcaaataaagcctatc

SEQ ID NO: 385288 - DNA, 75 bp, synthetic construct
  source 1..75: mol_type = other DNA
ctgaagtacaaaagtgagagcctgattttcccacgctatcaccagtgggatgtggtgaataaactgatcaccgcc

SEQ ID NO: 385289 - DNA, 75 bp, synthetic construct
  source 1..75: mol_type = other DNA
accctggaactgaagtctgaatttaagcagacggtgcaaaacgccattacgcaatataagaaaacgcgtttgcca

SEQ ID NO: 385290 - DNA, 75 bp, synthetic construct
  source 1..75: mol_type = other DNA
gaagtttgggtgagtaaaattattaatgatgaaaatcgaaaggttcagtggaatgatgctatcaatggacttcct

SEQ ID NO: 385291 - DNA, 75 bp, synthetic construct
  source 1..75: mol_type = other DNA
aaaaagtcctgcaggatgcaggaatgccggttactgaagaagccgtaaaagcggaatttaaccgcctggtgaaag

SEQ ID NO: 385292 - DNA, 75 bp, synthetic construct
  source 1..75: mol_type = other DNA
cggcggtcgttactctttgtggtcagcgattggtctgtcgattgttctctccatcggctttgataacttcgttga

SEQ ID NO: 385293 - DNA, 75 bp, synthetic construct
  source 1..75: mol_type = other DNA
gtaaacatcggtatcggtggttctgaccttggtccgtacatggtgactgaagcgctgcgcccgtacaaaaaccac

SEQ ID NO: 385294 - DNA, 75 bp, synthetic construct
  source 1..75: mol_type = other DNA
acagactggtcacttccctgccctgttctaccgctttcatcagtgcagcaatggcataaagcccgtgaaatcgtc

SEQ ID NO: 385295 - DNA, 75 bp, synthetic construct
  source 1..75: mol_type = other DNA
ctgacattaccaaagagattgattatctggcatcactgcgcaaaaagcacatggtggcggatctgcgcacagagc

SEQ ID NO: 385296 - DNA, 75 bp, synthetic construct
  source 1..75: mol_type = other DNA
ttatcataccgatgcgatttaccgcagcatgattgcggaagtggtggcgctgtcagtggatcgcatcttctttaa

SEQ ID NO: 385297 - DNA, 75 bp, synthetic construct
  source 1..75: mol_type = other DNA
ggggaatgatgtcggtacggcgaagccgaaagacaagaaagaagagtttctgtcgaatatcctggcgcgcctgaa

SEQ ID NO: 385298 - DNA, 75 bp, synthetic construct
  source 1..75: mol_type = other DNA
tgaaaattgcagcaatcatgaagaagcttggttacaaaaataaacagttgcaaagtttaccgggtaagcctcgca

SEQ ID NO: 385299 - DNA, 75 bp, synthetic construct
  source 1..75: mol_type = other DNA
tgaccagccgaaactgtgcgcgatgtacgtggataaagccctcggcggcgtcgagtgcgtgcagacgctctcccg

SEQ ID NO: 385300 - DNA, 75 bp, synthetic construct
  source 1..75: mol_type = other DNA
atgagccacgacatcacaaaagaggtcaacctacaaaacgacatcatcgcacagatggtggaaaaaggctggatt

SEQ ID NO: 385301 - DNA, 75 bp, synthetic construct
  source 1..75: mol_type = other DNA
agcaggatcgcatccagctcgatgacgctctgcgtcagcagcgccgtagcggcaccatcacacaaaccggcagca

SEQ ID NO: 385302 - DNA, 75 bp, synthetic construct
  source 1..75: mol_type = other DNA
atgaaaactatcaatactattgttgctgctatggctctttccactctgtcatttggcgtgttcgcggcggagccg

SEQ ID NO: 385303 - DNA, 75 bp, synthetic construct
  source 1..75: mol_type = other DNA
gtacgaataccgcacgatgattagtgatgtggaggcgaaagagatcccccttgctatctctgcattgtggtctgt

SEQ ID NO: 385304 - DNA, 75 bp, synthetic construct
  source 1..75: mol_type = other DNA
gccgttgggtgctggatattttggatcgtgaagccacggattcaccgatcgccaaacagttcacagatgatgagt

SEQ ID NO: 385305 - DNA, 75 bp, synthetic construct
  source 1..75: mol_type = other DNA
aagcccggcagtgcgcgaacacaaaccgggcctctatgtcagtaaccgtatgcaaggaaactaacatgaatattg

SEQ ID NO: 385306 - DNA, 75 bp, synthetic construct
  source 1..75: mol_type = other DNA
gctgggtgctggatattttggatcggcaggcagaatgctcaccgattgcaaaacagttcactgacgaagagctgg

SEQ ID NO: 385307 - DNA, 75 bp, synthetic construct
  source 1..75: mol_type = other DNA
tattcaaaaaagatctcggcagctttgttcgcttttacgaatttatgtcgcagatcgtcgaatacgatgacaaag

SEQ ID NO: 385308 - DNA, 75 bp, synthetic construct
  source 1..75: mol_type = other DNA
gaccattgccgcccggaaaggcagcagtaacctgaactactacgcctttaccgccacgccaaaatccaaaaccct

SEQ ID NO: 385309 - DNA, 75 bp, synthetic construct
  source 1..75: mol_type = other DNA
aaataaatcgaatgcggcgatcagtaatatctgcaaaccggcggtagaacgctggaaaaagcgttatctgatggc

SEQ ID NO: 385310 - DNA, 75 bp, synthetic construct
  source 1..75: mol_type = other DNA
ccccgattctggttgatggcaaagatgttatgccggaagtcaacgcggtgctggagaagatgaaaaccttctcgg

SEQ ID NO: 385311 - DNA, 75 bp, synthetic construct
  source 1..75: mol_type = other DNA
tatacgtcatgatgcagatgctgaaacccgtcagtttgcagcatggctgcaaactgacgaagcggcacctgcatt

SEQ ID NO: 385312 - DNA, 75 bp, synthetic construct
  source 1..75: mol_type = other DNA
ggccagtaatcctgatattggtgatgtcgtggaaatagcaccagactacgttatatggcgtgatatgaacattac

SEQ ID NO: 385313 - DNA, 75 bp, synthetic construct
  source 1..75: mol_type = other DNA
gatgaaggctacacgatgaacattgcacagcttgcaagaatgaaggatgaaaagctggtagacagctacacaact

SEQ ID NO: 385314 - DNA, 75 bp, synthetic construct
  source 1..75: mol_type = other DNA
atgaaagattatctacaaactgtgacgggccccgtcgcccgtgaagatatggggctaacacttcctcatgaacat

SEQ ID NO: 385315 - DNA, 75 bp, synthetic construct
  source 1..75: mol_type = other DNA
acccgccagtttgcggcatggctgcgttctgacgaggcggtgccggccttcaaaaagtatggctgggtcagacag

SEQ ID NO: 385316 - DNA, 75 bp, synthetic construct
  source 1..75: mol_type = other DNA
acttcaaaaaacgccgtatttccatctggatgttcccggaaggaacgcgtagccgtggtcgcggcctgctgccgt

SEQ ID NO: 385317 - DNA, 75 bp, synthetic construct
  source 1..75: mol_type = other DNA
ggcctatctggcggagcgcggcgtcgataaaacgatcctcaaaaaactctgtatcgataatcccggacgattatt

SEQ ID NO: 385318 - DNA, 75 bp, synthetic construct
  source 1..75: mol_type = other DNA
gctggcacagattaacaatcctcatgtggcgatgaatattcacatgccgggctggcttcgtcgcggtgatgaagt

SEQ ID NO: 385319 - DNA, 75 bp, synthetic construct
  source 1..75: mol_type = other DNA
tattgctgggtaagatcaccttattgctgcgctgataatatggaccgcaaacctattgaagatgtgatcttcgaa

SEQ ID NO: 385320 - DNA, 75 bp, synthetic construct
  source 1..75: mol_type = other DNA
gccaatattgagttgctatccgagaacaggcgtgagtcactgatagacagaattaaaggcgctgacgtaatcact

SEQ ID NO: 385321 - DNA, 75 bp, synthetic construct
  source 1..75: mol_type = other DNA
tttgctcaacgtcttctcgggcataaatcagattcaatggcggcgcggtatagagacagccgtggacgggaatgg

SEQ ID NO: 385322 - DNA, 75 bp, synthetic construct
  source 1..75: mol_type = other DNA
gtaaaacaggggctaaactcgccattccgctaacgctaacgattgacgcgctcaatatctcattggctgatacac

SEQ ID NO: 385323 - DNA, 75 bp, synthetic construct
  source 1..75: mol_type = other DNA
gaaaagacgtggcgtatcagcggaaaatgcttgataaaggtgtctggctggaattcgacatgattggcctagaca

SEQ ID NO: 385324 - DNA, 75 bp, synthetic construct
  source 1..75: mol_type = other DNA
gtgaatacccagggccaccacggacacggtgatgatttgcagtgttataccatgccggaaaccagccacaccctg

SEQ ID NO: 385325 - DNA, 75 bp, synthetic construct
  source 1..75: mol_type = other DNA
atgacggaaaagccccaggttgattttgaagaagtggtgaaagccagcgggatgccggtgacggaatctgaggtt

SEQ ID NO: 385326 - DNA, 75 bp, synthetic construct
  source 1..75: mol_type = other DNA
tggacagtggggtgacttccgcaccgtttgtggatgctgtgaatgactacatcaactcacaggggcatcacggcc

SEQ ID NO: 385327 - DNA, 75 bp, synthetic construct
  source 1..75: mol_type = other DNA
ttcctgaaaacagctggtgatgaaaaacacgttgcgaaacactttgccgcgctctctactaacggtaaagcggtg

SEQ ID NO: 385328 - DNA, 75 bp, synthetic construct
  source 1..75: mol_type = other DNA
agatctggcgaaagagtgcgatctggcgggcgcgattaagtcgatgttctctggcgagaagatcaaccgcactga

SEQ ID NO: 385329 - DNA, 75 bp, synthetic construct
  source 1..75: mol_type = other DNA
ctgatttcgaagattgtcaccacgccggtgttatggctgcgggcggcgctgatcgatgtggttctgcgcaatatg

SEQ ID NO: 385330 - DNA, 75 bp, synthetic construct
  source 1..75: mol_type = other DNA
atgggtaaaccgcccgttgatgacgacattccggcagaagaacaagtacgtattctgcgtaaactgttcgatcgc

SEQ ID NO: 385331 - DNA, 75 bp, synthetic construct
  source 1..75: mol_type = other DNA
ttacaggcgaaccatatcgacgaaaccttcacctgggcgcaccgcatcagcaatcgggcggtggattttctgcaa

SEQ ID NO: 385332 - DNA, 75 bp, synthetic construct
  source 1..75: mol_type = other DNA
taacgccagagcaacgtgaaaatacgtgggtcatttatacctccgatcacggtgaaatgatgggcgcacataagc

SEQ ID NO: 385333 - DNA, 75 bp, synthetic construct
  source 1..75: mol_type = other DNA
actgtctttttcactgggtgatatcaccagcgaactgagtgttccacgcctgaaatcgcttgcggttgttgttga

SEQ ID NO: 385334 - DNA, 75 bp, synthetic construct
  source 1..75: mol_type = other DNA
ttaattacggccattgtgactgcgccggtgatgtggctgaaagaggttctggtgtccacggtgctggccaatatg

SEQ ID NO: 385335 - DNA, 75 bp, synthetic construct
  source 1..75: mol_type = other DNA
gctgcggggatgtgtatacagtctgcagaatgacttatccggcgtgccggattgtttcagctacagtcttgcgac

SEQ ID NO: 385336 - DNA, 75 bp, synthetic construct
  source 1..75: mol_type = other DNA
tgcggtagccgtggctaaacgagtgcatcgtcccgctctcaattttgagcgaatccctgaattacttgatagaat

SEQ ID NO: 385337 - DNA, 75 bp, synthetic construct
  source 1..75: mol_type = other DNA
cgcaatcgctgtagctaaacgagtacaccgcccggctctggatttcgaacgcattcccgaattacttgatcgtat

SEQ ID NO: 385338 - DNA, 75 bp, synthetic construct
  source 1..75: mol_type = other DNA
acacaactgttgaggtatgtgggcatggttttagagcgatggcttgtagtgctttgatcgagtcaggaaagtggt

SEQ ID NO: 385339 - DNA, 75 bp, synthetic construct
  source 1..75: mol_type = other DNA
ggcggttgcttccagtaatcgacagcatcgtccggcgctggagttaaagcgtatcccggaattactccagaaaat

SEQ ID NO: 385340 - DNA, 75 bp, synthetic construct
  source 1..75: mol_type = other DNA
tcccagcagagcgagaagctattgaaggggtgaagcactcccagcgtggttcaaaaatgcgtacgcctcatttgg

SEQ ID NO: 385341 - DNA, 75 bp, synthetic construct
  source 1..75: mol_type = other DNA
ctggctctgggtgtttatcctgatgtgtcactcgctgatgcaagggctcgtcgtgatgaggctcgtaagcttttg

SEQ ID NO: 385342 - DNA, 75 bp, synthetic construct
  source 1..75: mol_type = other DNA
tattctgaagcagatccacactatcagtggagagcatgaactgattttcaccggcgaccataatccatggaaacc

SEQ ID NO: 385343 - DNA, 75 bp, synthetic construct
  source 1..75: mol_type = other DNA
tcccgatttacttgttccagtaaaggctgccgaagccaaagagatctatgaaattgcagcgcgccttcagcagcg

SEQ ID NO: 385344 - DNA, 75 bp, synthetic construct
  source 1..75: mol_type = other DNA
gcagtggtcggctgattttctggatgctaacagggaacagagtgtcagcccttttgactatgcaaaaattaataa

SEQ ID NO: 385345 - DNA, 75 bp, synthetic construct
  source 1..75: mol_type = other DNA
agaaaaaagccgacaagatcgagcaaagtgaagccctgacattcgaggctgtcgcaagggactggcatactgcct

SEQ ID NO: 385346 - DNA, 75 bp, synthetic construct
  source 1..75: mol_type = other DNA
agaaaaaagcagataagattgagcaaagcgaagccctgacattcgaagctgttgcaagggactggcatactgcct

SEQ ID NO: 385347 - DNA, 75 bp, synthetic construct
  source 1..75: mol_type = other DNA
gcaagcgtagtattgaagagctaaagactcgcgacctgcttgcacccattaaagttgtagaagcaactggccgcc

SEQ ID NO: 385348 - DNA, 75 bp, synthetic construct
  source 1..75: mol_type = other DNA
atgtttttgctgattcaccccaatggctcaaaatattggcgtttccgctttcgcttcggtggtaaacaacatttg

SEQ ID NO: 385349 - DNA, 75 bp, synthetic construct
  source 1..75: mol_type = other DNA
ggaatttaattataaaaacaatgtttgtaattatagcaatatttatcttagaagtatataaaaatattgctgttt

SEQ ID NO: 385350 - DNA, 75 bp, synthetic construct
  source 1..75: mol_type = other DNA
atggaattgtaaataatattattgtgatgttatctcccattataataattccgtttgcaattaaaaatgtcggca

SEQ ID NO: 385351 - DNA, 75 bp, synthetic construct
  source 1..75: mol_type = other DNA
tgaacccggcattgaacgccgcactttgcaagatctgaacactttaatcgacagcgtgatagcgcaattactgaa

SEQ ID NO: 385352 - DNA, 75 bp, synthetic construct
  source 1..75: mol_type = other DNA
gcgcggcgaacgtgcaggccagcgtcagcagcgcgagcggcaacagcgcctcggcgacccatgcgtacagcgttg

SEQ ID NO: 385353 - DNA, 75 bp, synthetic construct
  source 1..75: mol_type = other DNA
cgtataaccagagtcttcaattacgtaaacagccatccaacactctggaaggggggtatggtggctggcgcgaaa

SEQ ID NO: 385354 - DNA, 75 bp, synthetic construct
  source 1..75: mol_type = other DNA
tggcgttcacgtgccgagcaaattcgtcggcatgtgctggaaaatcttgatgcctatttgtatcaattatccgaa

SEQ ID NO: 385355 - DNA, 75 bp, synthetic construct
  source 1..75: mol_type = other DNA
gagtcatatggaacgcaattcggtgagggcggcatatatccataaagcggaacatctggatgagcgcaagctgat

SEQ ID NO: 385356 - DNA, 75 bp, synthetic construct
  source 1..75: mol_type = other DNA
agtgcattgcgggtgatgggctatgacactaaagttgaggtttgcggtcacggtttccgcacaatggcctgtagt

SEQ ID NO: 385357 - DNA, 75 bp, synthetic construct
  source 1..75: mol_type = other DNA
ataaaaagtggtctgaagatcacgcccatcgtgtgctaaaaagcttggaagataatctcttcgcggcacttggtg

SEQ ID NO: 385358 - DNA, 75 bp, synthetic construct
  source 1..75: mol_type = other DNA
ggagcgatgatgcgattgagcgccagttaagccactcagaacgtaacaatgttcgtgcggcgtatattcatactt

SEQ ID NO: 385359 - DNA, 75 bp, synthetic construct
  source 1..75: mol_type = other DNA
cggggcatgaagatgaaagaggaacatatcgttccgcttagccgacaagcgatgattttgttacagcagcttaag

SEQ ID NO: 385360 - DNA, 75 bp, synthetic construct
  source 1..75: mol_type = other DNA
tgcttatctttattcggtccagtgagctgcgttttgctcgctggtcagagatcgattttgaaacgtcaatgtgga

SEQ ID NO: 385361 - DNA, 75 bp, synthetic construct
  source 1..75: mol_type = other DNA
tatactgaagcagatccacactatcagcggagaacatgaactgattttcaccggcgatcacaatccatggaaacc

SEQ ID NO: 385362 - DNA, 75 bp, synthetic construct
  source 1..75: mol_type = other DNA
gcaaaggtttggcgaaataccggcgaaaagtggtctcggcagtctgaggagcttccacttcaccgcgtaatagac

SEQ ID NO: 385363 - DNA, 75 bp, synthetic construct
  source 1..75: mol_type = other DNA
atctgccagcatctcggcattgatcaggtgccggcacgggtgagtgctgtcagtggcgatcgtttcctgaaggtg

SEQ ID NO: 385364 - DNA, 75 bp, synthetic construct
  source 1..75: mol_type = other DNA
cgctgctgaccggcagcgtgacggccgctgacctcgggacgtggggcgatctctggccggtggcggagccggata

SEQ ID NO: 385365 - DNA, 75 bp, synthetic construct
  source 1..75: mol_type = other DNA
tccgtcgatggcgtccagacccgtgaatgtggccatacccgccgcagtgacctcgatggcgtggaggcggcgctc

SEQ ID NO: 385366 - DNA, 75 bp, synthetic construct
  source 1..75: mol_type = other DNA
ctcagattgaactggtgccgctgtcggcgctcgtcaaatccccgctgaacgtccgcactattccgtatccggcag

SEQ ID NO: 385367 - DNA, 75 bp, synthetic construct
  source 1..75: mol_type = other DNA
cgcagtgaagatgacgtggctgacgacgctgaacgcacggaacaggtgcgtaagactgatgcggtggaggaaatc

SEQ ID NO: 385368 - DNA, 75 bp, synthetic construct
  source 1..75: mol_type = other DNA
ggatgacgccgtgcgcctgaacagttgcgcggtggcggcgcaggtttatatcggcagcgaatatgaacatcagtc

SEQ ID NO: 385369 - DNA, 75 bp, synthetic construct
  source 1..75: mol_type = other DNA
atggcagatttagacgatattaaagatggtaaagattttcgtaccgatcaaccgcaacaaaatatcccttttacc

SEQ ID NO: 385370 - DNA, 75 bp, synthetic construct
  source 1..75: mol_type = other DNA
gcttcgataacgcccgcacggccatgcaggccgctggcgtaaataccagcacattcgaggatgagaacgcgatgc

SEQ ID NO: 385371 - DNA, 75 bp, synthetic construct
  source 1..75: mol_type = other DNA
atgcgtttaagcagcgggttatcgagaacagtcagcggccggcaccggtggagggcattaagcgtgcggagaaat

SEQ ID NO: 385372 - DNA, 75 bp, synthetic construct
  source 1..75: mol_type = other DNA
catcctttaacacaaattacgccattgacgctggaatcaatagcgaagtggccgttgatcacttaccgacaggga

SEQ ID NO: 385373 - DNA, 75 bp, synthetic construct
  source 1..75: mol_type = other DNA
cgctgatattggcatagccagtgagcgtttgagcaatgacctccaactcgtcgccttcccctggtttcgttggca

SEQ ID NO: 385374 - DNA, 75 bp, synthetic construct
  source 1..75: mol_type = other DNA
tcggatgtggcggaagggatcagcgcaccattactcaaaaagatgtcttcagaaagaacgctggcagtgcaggcc

SEQ ID NO: 385375 - DNA, 75 bp, synthetic construct
  source 1..75: mol_type = other DNA
cgagcagcttacatccataaggcggaacatcttggggagcgtaggttgatgtttgaagtggtcaacaaaaactgg

SEQ ID NO: 385376 - DNA, 75 bp, synthetic construct
  source 1..75: mol_type = other DNA
ttgggccgttggtggagatataagtggatcacttttcatccgtcgttgacagctgctatcggtaagcggaacatt

SEQ ID NO: 385377 - DNA, 75 bp, synthetic construct
  source 1..75: mol_type = other DNA
atgctacagtggtgggccgattttctggatgtaaacagagaaaggtttatcagtccatttgaatatgcaaagatt

SEQ ID NO: 385378 - DNA, 75 bp, synthetic construct
  source 1..75: mol_type = other DNA
gtggattttgaaacggccatgtggacgatccccggtgagcgtgaaccgttggacggtgttaaacattctcagcgt

SEQ ID NO: 385379 - DNA, 75 bp, synthetic construct
  source 1..75: mol_type = other DNA
gccgttcagagtggcttaatcgattacaaccccgcgcaggagattgctggtgcggttgctacggcgaaaagacag

SEQ ID NO: 385380 - DNA, 75 bp, synthetic construct
  source 1..75: mol_type = other DNA
ctggcgttggggaaataccctgaagtttcgctggcggatgccagggctcgtcgggatgaagcccgtaagctgtta

SEQ ID NO: 385381 - DNA, 75 bp, synthetic construct
  source 1..75: mol_type = other DNA
agaatttatacatcaagctcgctttctaatgttgttggatcaagattcaatatttggtcctgagtattttcaaga

SEQ ID NO: 385382 - DNA, 75 bp, synthetic construct
  source 1..75: mol_type = other DNA
tggttcgtgaagatttatttagccaggaggagaatgacggtactgcagatcgcgtgctcgtagaccgtctggtta

SEQ ID NO: 385383 - DNA, 75 bp, synthetic construct
  source 1..75: mol_type = other DNA
gagccggatgccgcagaagggatcagtctgcccttactcaaaaaaatgtcttccgaacgcacactggctgttcag

SEQ ID NO: 385384 - DNA, 75 bp, synthetic construct
  source 1..75: mol_type = other DNA
ccggaacagcttttgaaagtaaacaggatgatctaagtgatatttacaaaaaaaatagatttgaagagtttatcc

SEQ ID NO: 385385 - DNA, 75 bp, synthetic construct
  source 1..75: mol_type = other DNA
atttgtatcatcggaacaaaggtagaagggctacagtgccggagacgccttttttactgcttgctaagcgcattc

SEQ ID NO: 385386 - DNA, 75 bp, synthetic construct
  source 1..75: mol_type = other DNA
tgagtattaaataccttgatgatgaagattttcggttcgcttccggtatttactacaaacaacttcattttgatg

SEQ ID NO: 385387 - DNA, 75 bp, synthetic construct
  source 1..75: mol_type = other DNA
gaaagccatttggttttaaataatgataatgaaaatccggcaatacctactattattgaaggtttagattttctc

SEQ ID NO: 385388 - DNA, 75 bp, synthetic construct
  source 1..75: mol_type = other DNA
aagccagcctgttcttccggctactgaaccgtcgatatgaaaaagcgagcatcatactgacgtcaaacaaagggt

SEQ ID NO: 385389 - DNA, 75 bp, synthetic construct
  source 1..75: mol_type = other DNA
gagaatgcggataacacagcctggacagtggaacagttgttcacgtctgcgttcagtagcatgagtgactggctg

SEQ ID NO: 385390 - DNA, 75 bp, synthetic construct
  source 1..75: mol_type = other DNA
ggattaattctggtatgagtgagtttgacagccggttgtttgcagccattaacgatatgctgctggatatgctgg

SEQ ID NO: 385391 - DNA, 75 bp, synthetic construct
  source 1..75: mol_type = other DNA
tgcagcagatggcatatctgaagggcatatggcaatgagggacgattctttccgtgtagacgtttttgatattca

SEQ ID NO: 385392 - DNA, 75 bp, synthetic construct
  source 1..75: mol_type = other DNA
tggttaaaaaatattgtgcagataaaaaatccacacctcgcttaatagcaaaagttactcacactgtagaaacta

SEQ ID NO: 385393 - DNA, 75 bp, synthetic construct
  source 1..75: mol_type = other DNA
ttggtcgtgaagattcgctggatgcgcagattgccactttgcaggagaaagtatcgcgggcgaaaagactcccct

SEQ ID NO: 385394 - DNA, 75 bp, synthetic construct
  source 1..75: mol_type = other DNA
tctcctcgcgcggcgatacttacgaaatctggttgggagcaaactgttatcactaccgctctgatggttatgcag

SEQ ID NO: 385395 - DNA, 75 bp, synthetic construct
  source 1..75: mol_type = other DNA
ttggtacgattggtgtgatcgtcggcgctgaaatcccgatgttccttggctcaatgattatggggcgctcggtgg

SEQ ID NO: 385396 - DNA, 75 bp, synthetic construct
  source 1..75: mol_type = other DNA
aaagcggcgtttatccgtcagcttaaagagcaggcagcccgccagaatctttcatcttctgaactgcttcgtgcc

SEQ ID NO: 385397 - DNA, 75 bp, synthetic construct
  source 1..75: mol_type = other DNA
agcagcagatccggcaggccagaaaccgtggcgggattggtcagcaggattatctggcgctgatttcggatgtga

SEQ ID NO: 385398 - DNA, 75 bp, synthetic construct
  source 1..75: mol_type = other DNA
gaaaaaacgccagaaggatttgcaggatgcaaaagagcaggcagagcggaattatcaggagcaacagaaacgacg

SEQ ID NO: 385399 - DNA, 75 bp, synthetic construct
  source 1..75: mol_type = other DNA
gttatggccgtgaatgtgccgacgacctggattaattctggtatgagtgagtttgacagccggttgtttgcagcc

SEQ ID NO: 385400 - DNA, 75 bp, synthetic construct
  source 1..75: mol_type = other DNA
gcatgcttcagcagctattgtagcctctaccgccgcgactacggctgctgtagctgctgcgaactctgcgaatat

SEQ ID NO: 385401 - DNA, 75 bp, synthetic construct
  source 1..75: mol_type = other DNA
agttgaagtgaccgaaatcctggtgaaagttggcgacaaagttgaagctgagcagtcgctgatcaccgtagaagg

SEQ ID NO: 385402 - DNA, 75 bp, synthetic construct
  source 1..75: mol_type = other DNA
atgaatcagagtaaatccgttgctgtacaaccagtcaggccagcccttaatttctccgcgctgcagcgcgatgtt

SEQ ID NO: 385403 - DNA, 75 bp, synthetic construct
  source 1..75: mol_type = other DNA
cgttacgcaggagttggggcgtgttgagattgtcgagttactcagtcaggaatcaacggtacttcataacgcagg

SEQ ID NO: 385404 - DNA, 75 bp, synthetic construct
  source 1..75: mol_type = other DNA
acggacatcgacactggcctgccgatgagcctgtccatgaacgtgtatgcgaaataccagtggcagaactacggc

SEQ ID NO: 385405 - DNA, 75 bp, synthetic construct
  source 1..75: mol_type = other DNA
cagctgcagcgaactctgcgaatatcgcaaaccaacaggcacagcgtgctgctaatgcatcagccagtgctctcc

SEQ ID NO: 385406 - DNA, 75 bp, synthetic construct
  source 1..75: mol_type = other DNA
tcactgagtccaccgacttgccatgggtggattgtgcatctctgatcaaggctgacccgaatattattttctggc

SEQ ID NO: 385407 - DNA, 75 bp, synthetic construct
  source 1..75: mol_type = other DNA
ggacttgctcagaatgcagtaccttcgccttcagacgctcttttcagtcgcgatattacggagcggttgcgtgac

SEQ ID NO: 385408 - DNA, 75 bp, synthetic construct
  source 1..75: mol_type = other DNA
tttcgaagagtgcgcaggactggttcattttttcttcgatcacaccgatgaggtgagcactcgcttcagtatccg

SEQ ID NO: 385409 - DNA, 75 bp, synthetic construct
  source 1..75: mol_type = other DNA
ggactcatgtggtggcaactgaatatcctgttcacctttgctgttgtcatgcaggtggctcttttcctgcagtct

SEQ ID NO: 385410 - DNA, 75 bp, synthetic construct
  source 1..75: mol_type = other DNA
accattcagttctgccagttacggcatccccggtctgctgatgcttgccggagcgctgctggtctggcaggtcag

SEQ ID NO: 385411 - DNA, 75 bp, synthetic construct
  source 1..75: mol_type = other DNA
gcaggtggctcttttcctgcagtctgctactgcccgtaatggtgttgcggccttcacggcactggtaagcgtcaa

SEQ ID NO: 385412 - DNA, 75 bp, synthetic construct
  source 1..75: mol_type = other DNA
aacaaacgttattcgtcccgcacaagaaccgtccgccgccccggctcaaccgaacggcgtggagaaatccaacaa

SEQ ID NO: 385413 - DNA, 75 bp, synthetic construct
  source 1..75: mol_type = other DNA
aggccatcgctctggcggaggctcaggataaagcggctgctgcgttttatcgtcagattgacagtgtgaaacagg

SEQ ID NO: 385414 - DNA, 75 bp, synthetic construct
  source 1..75: mol_type = other DNA
aattggcgaaactggggaaatgtgaagcgatgatcaagaaagtcgccagccatcctcgccctgccctgtcaaagc

SEQ ID NO: 385415 - DNA, 75 bp, synthetic construct
  source 1..75: mol_type = other DNA
aggcgctgacggagagcctgaaccgacaactgaatgagaatcgccgttactggcaacagcttgaaattgctcagg

SEQ ID NO: 385416 - DNA, 75 bp, synthetic construct
  source 1..75: mol_type = other DNA
tcgtgtttgagagcgatcctggctggatactggatttctctaaccgcaccttgtctgctttttttgatgaagaac

SEQ ID NO: 385417 - DNA, 75 bp, synthetic construct
  source 1..75: mol_type = other DNA
ttctggatgctaaaacccggcacgcggctgaaacgggagagccctatgctgagttcgaccgactatatgcactga

SEQ ID NO: 385418 - DNA, 75 bp, synthetic construct
  source 1..75: mol_type = other DNA
tcagtctgctgatttgagtcgttacagtggcacggtggttaaccgtccgacgttttttgcttttgcaaaaggcgc

SEQ ID NO: 385419 - DNA, 75 bp, synthetic construct
  source 1..75: mol_type = other DNA
gatttgagtcgctacagtggcacggtggttaaccgtccgacgttttttgcttttgcaaaaggcgcgggtgtgatg

SEQ ID NO: 385420 - DNA, 75 bp, synthetic construct
  source 1..75: mol_type = other DNA
cctgcccttgcgcaggggggctgacggtaagctgggtgttgtggcagcgacctgtggttcggggatggtgatgtt

SEQ ID NO: 385421 - DNA, 75 bp, synthetic construct
  source 1..75: mol_type = other DNA
attcagcttgccagccagctggcggaagaggagcgggttctgcgtcagcaacatgacctggatatcgccacgaca

SEQ ID NO: 385422 - DNA, 75 bp, synthetic construct
  source 1..75: mol_type = other DNA
taccggcaaactcaatttcaaatccttcacctcttctgtgctgtcagatatggcgaaaatcctggcgcaggcaac

SEQ ID NO: 385423 - DNA, 75 bp, synthetic construct
  source 1..75: mol_type = other DNA
ggcagcctgagttcacagataaaacactctccaggaaacccggggcggttcaatatcaggtacaactgagtcttc

SEQ ID NO: 385424 - DNA, 75 bp, synthetic construct
  source 1..75: mol_type = other DNA
gcgcgcatcaatgccatgcagtatgccgaccaggcggtcagggacgcagcgatacagcgtgaaaatgaacgttac

SEQ ID NO: 385425 - DNA, 75 bp, synthetic construct
  source 1..75: mol_type = other DNA
acgtggttttcggtttgaagcctggcttgctgaactgttcagtatctttaagcttgctccccgttcgtctttccg

SEQ ID NO: 385426 - DNA, 75 bp, synthetic construct
  source 1..75: mol_type = other DNA
aatcgctcacagtgggcaccgtgcactctcttcagggagcggaaagagcgattgtgatattctcgccagtctatt

SEQ ID NO: 385427 - DNA, 75 bp, synthetic construct
  source 1..75: mol_type = other DNA
tattgaagcgcattacggtaaatcgcttcatgaagttgtcggtatcgtgacgccttttagcgctcaggtatccac

SEQ ID NO: 385428 - DNA, 75 bp, synthetic construct
  source 1..75: mol_type = other DNA
aatttaatgcccgaaatggggtatctccatattgatggtaaaggtgagctggcaagtagtggaagtcgatataat

SEQ ID NO: 385429 - DNA, 75 bp, synthetic construct
  source 1..75: mol_type = other DNA
ttggttaatcgtgttcacagcaaaattgtgattgaggatgaagaactgctgtgtgtcggatcttttaactggttc

SEQ ID NO: 385430 - DNA, 75 bp, synthetic construct
  source 1..75: mol_type = other DNA
agtgctacacgggaagataagtatcaacgatacggtaatgactccaacttattgatagtgttttatgttcagata

SEQ ID NO: 385431 - DNA, 75 bp, synthetic construct
  source 1..75: mol_type = other DNA
tatcaggtgtaccaccgaagcatgtcagagcctggacacaacaggaagatgctctactggtcggtttatacccct

SEQ ID NO: 385432 - DNA, 75 bp, synthetic construct
  source 1..75: mol_type = other DNA
aaacccggcacgccgctgaaacgggagagccctatgctgagttcgaccgactatatgcactgaagaacaaacagt

SEQ ID NO: 385433 - DNA, 75 bp, synthetic construct
  source 1..75: mol_type = other DNA
ctggcagtataaaacggaatccatgcctgaacaggctgaacaaagccgtaatgactatcttgcactgatttcccg

SEQ ID NO: 385434 - DNA, 75 bp, synthetic construct
  source 1..75: mol_type = other DNA
agtttccgactgaatgatgaattttacctgatggaggcaaagtggcatcagaaaagaacgtcggctgccgacctc

SEQ ID NO: 385435 - DNA, 75 bp, synthetic construct
  source 1..75: mol_type = other DNA
acctgataatgcggcatgcgaaggctttttcggcagactgaaaacggaaatgtatcatgggcgtaaatggtcggg

SEQ ID NO: 385436 - DNA, 75 bp, synthetic construct
  source 1..75: mol_type = other DNA
aaacccgtaatgatgaggccacccggttattgctgcagtacagtcagcaacaggcacaggtggaaggacagattg

SEQ ID NO: 385437 - DNA, 75 bp, synthetic construct
  source 1..75: mol_type = other DNA
cggcgtactgcggatattgataataacctcaatgcgcttggcagtacgctgaagtatctgtctgatttgtggagt

SEQ ID NO: 385438 - DNA, 75 bp, synthetic construct
  source 1..75: mol_type = other DNA
tgttgagcaggcttgcaggcagtgctgccggacaactggttacgggaacaatcggaaagctggctggtgccggtc

SEQ ID NO: 385439 - DNA, 75 bp, synthetic construct
  source 1..75: mol_type = other DNA
ctctgtcaacccgtacattccgaatgctgtcagccggggcgctgggtatcgctggcgtgggttacaccgccaata

SEQ ID NO: 385440 - DNA, 75 bp, synthetic construct
  source 1..75: mol_type = other DNA
ccgccaatgagcaggcatctcgattattagcaaatgttaatgttcaaaaattcgttgctgaacttaaatccgccc

SEQ ID NO: 385441 - DNA, 75 bp, synthetic construct
  source 1..75: mol_type = other DNA
tatcgtgaacgcccgtgtccggggaagttttcggctatgataatagtgaggataatgatgaggcggcatctgatt

SEQ ID NO: 385442 - DNA, 75 bp, synthetic construct
  source 1..75: mol_type = other DNA
aactcgctgtatcacggcgataaggccagagcgcaggcaatgatggcctgggcgaagcagaacgcgaaggatacc

SEQ ID NO: 385443 - DNA, 75 bp, synthetic construct
  source 1..75: mol_type = other DNA
cacgctgggcagtgtcgccggggagtatctgggcggttttgtaaccgacctgtatcagaaatggacggccccgga

SEQ ID NO: 385444 - DNA, 75 bp, synthetic construct
  source 1..75: mol_type = other DNA
gctactacaggaagggaagatggttatcccgcagccgcaacagcgccaggcgaccgaccgacctttattaccagc

SEQ ID NO: 385445 - DNA, 75 bp, synthetic construct
  source 1..75: mol_type = other DNA
ctcctgcgcaaccaccaggtcagggggataacctgtcgtctggcgcaggcaatcagcctttatccagcttgcaac

SEQ ID NO: 385446 - DNA, 75 bp, synthetic construct
  source 1..75: mol_type = other DNA
aatatggcaacgcgtcccgcgctgtggatactgttagtcgcgattatcctgatgctggtctggctggttcgttaa

SEQ ID NO: 385447 - DNA, 75 bp, synthetic construct
  source 1..75: mol_type = other DNA
acggaggaccagtcagaacagaaattaccaaattaacgcctgagcaggccgcagaggtgtatagaaaaatgatgg

SEQ ID NO: 385448 - DNA, 75 bp, synthetic construct
  source 1..75: mol_type = other DNA
gaaatcgaccagatggatgtgctcgacattctcctgcaaaacggtgagctaaagcccattaaagactggcctaag

SEQ ID NO: 385449 - DNA, 75 bp, synthetic construct
  source 1..75: mol_type = other DNA
gcagaggaagcttctgataacgacatcctcagtgatatctaccagcaaacgatcaattatgtggtcagtggccag

SEQ ID NO: 385450 - DNA, 75 bp, synthetic construct
  source 1..75: mol_type = other DNA
atgggtggaagcttctgataacgacatcctcagtgatatctaccagcaaacgatcaattatgtggtcagtggcca

SEQ ID NO: 385451 - DNA, 75 bp, synthetic construct
  source 1..75: mol_type = other DNA
tagtttaggtctggtgggtgatcgtattgatggatcacttcaacaagacaccattacaggaaccttcaataaggc

SEQ ID NO: 385452 - DNA, 75 bp, synthetic construct
  source 1..75: mol_type = other DNA
aaacaatgcgccctgtagcatactggtttagaaaagtcaacctactgactcagacctacactggtgatcattata

SEQ ID NO: 385453 - DNA, 75 bp, synthetic construct
  source 1..75: mol_type = other DNA
tagtttaggactggtaggtgatcgcattgatggtgcacttcaacaagacactatcacaggaaccttcaataaggc

SEQ ID NO: 385454 - DNA, 75 bp, synthetic construct
  source 1..75: mol_type = other DNA
cgccgatcagcttgttctcagccacgatgtcttccttaaacaaatgtgggctaaaaatggcggtaatggctgggg

SEQ ID NO: 385455 - DNA, 75 bp, synthetic construct
  source 1..75: mol_type = other DNA
tgcaaccgaagtggctgcggatttcccaaccgttgaagcgttacgccaacatctggctgcgcagagcgatcgctg

SEQ ID NO: 385456 - DNA, 75 bp, synthetic construct
  source 1..75: mol_type = other DNA
taaacaatgctgtaggtaagcgatacaagcagtatatcgttgaccaagttgttggtacggggcttgatccgaaac

SEQ ID NO: 385457 - DNA, 75 bp, synthetic construct
  source 1..75: mol_type = other DNA
gtggtcggcggtacggcgctttccggcggtcgcggctcgttgttcggtacgctgcttggcgtactggtgattacg

SEQ ID NO: 385458 - DNA, 75 bp, synthetic construct
  source 1..75: mol_type = other DNA
ctggtgattacgctaatcggtaacggtctggtgctgctcggtattaactcctttttccagcaggtggtacgcggc

SEQ ID NO: 385459 - DNA, 75 bp, synthetic construct
  source 1..75: mol_type = other DNA
gattactgttacatacagtgctgttccgttggcctatctctgtgggatttatcctcattcctcatggcccattat

SEQ ID NO: 385460 - DNA, 75 bp, synthetic construct
  source 1..75: mol_type = other DNA
gccgcacgtttcggtgaattaacccagcgcacacgagttaaagcactgcaaaacaaattaattgaaacagtggta

SEQ ID NO: 385461 - DNA, 75 bp, synthetic construct
  source 1..75: mol_type = other DNA
ttaaatgtttctatcctgtctgctgataagtgcgactggtcgctcaaccgtgaagtaagcaaagaacgcgctatc

SEQ ID NO: 385462 - DNA, 75 bp, synthetic construct
  source 1..75: mol_type = other DNA
tccgtggtaggtactggcttacagcctcgaaccttcgttatgaaaggggaaaagctggacgcaaccactaacacc

SEQ ID NO: 385463 - DNA, 75 bp, synthetic construct
  source 1..75: mol_type = other DNA
agaccattcttaacctgttacaggaagggaaaatggttattcctcaaccacagcaacgtcaggctaccgatcgtc

SEQ ID NO: 385464 - DNA, 75 bp, synthetic construct
  source 1..75: mol_type = other DNA
gcggctgaaggatgatcctgtaaatgccgcgaaggctctggacaatgagctgcattttcttactgccactcagct

SEQ ID NO: 385465 - DNA, 75 bp, synthetic construct
  source 1..75: mol_type = other DNA
tgctgatggtaagctgggggttgtggcggatactggtggttcaggcatggtgatgtttgccccgcagtacaacat

SEQ ID NO: 385466 - DNA, 75 bp, synthetic construct
  source 1..75: mol_type = other DNA
aatccttcacctcttccctgttgtcagatatggccagaattatggcacagatggccatgatgcaggcggtaaagg

SEQ ID NO: 385467 - DNA, 75 bp, synthetic construct
  source 1..75: mol_type = other DNA
gagaaagcggataacacagccgggacagtggaacagttgttcacgtctgcgttcagtagcatgagtgactggctg

SEQ ID NO: 385468 - DNA, 75 bp, synthetic construct
  source 1..75: mol_type = other DNA
caggggctgtccagtgatgcggcccggatcgccatgtctgcgctggcagaggaaaccggtaaacgcacatctgat

SEQ ID NO: 385469 - DNA, 75 bp, synthetic construct
  source 1..75: mol_type = other DNA
tacaacatcgagatcaataacgatggcacgaacgggcagataggtccggctgccctgaaggtggtttatgacctc

SEQ ID NO: 385470 - DNA, 75 bp, synthetic construct
  source 1..75: mol_type = other DNA
ttatttttgtttataatatcaacaaattcttttgctgatgatatcactcatgccggagtggttcgtattgaaggg

SEQ ID NO: 385471 - DNA, 75 bp, synthetic construct
  source 1..75: mol_type = other DNA
gcagcccctgataatcacctgaccctcgaagagcgctctgctttgcagaaactctggggcggtttggagacagga

SEQ ID NO: 385472 - DNA, 75 bp, synthetic construct
  source 1..75: mol_type = other DNA
atgcatacagtttctgaaaacaagtgcggtaaatacgcattactgctgcaacaggccagaaccgaagcacaggcc

SEQ ID NO: 385473 - DNA, 75 bp, synthetic construct
  source 1..75: mol_type = other DNA
tccattcattcaagcaataatttcgaaaaataagtttggagatgtatatacgtttgatgatggaaccgctaatta

SEQ ID NO: 385474 - DNA, 75 bp, synthetic construct
  source 1..75: mol_type = other DNA
tatttcaggtatattatgcagggatcttaattaaaaataaaaacattaaagatgttatgctcgcttatttatctg

SEQ ID NO: 385475 - DNA, 75 bp, synthetic construct
  source 1..75: mol_type = other DNA
tccgcgaggctgcacgtcaggattacaacctgacagaggttgcgaatatgctttttacctcacagtcaggcgtta

SEQ ID NO: 385476 - DNA, 75 bp, synthetic construct
  source 1..75: mol_type = other DNA
gatggcggtgtttatcagtcggctgatttgagtcgctacagtggcacggtggttaaccgtccgacgttttttgct

SEQ ID NO: 385477 - DNA, 75 bp, synthetic construct
  source 1..75: mol_type = other DNA
gaaggccggtcagccggttgagcgcctgaatgcagaggccagcgcgctggcgcaggatctgcaaaaagccgtgac

SEQ ID NO: 385478 - DNA, 75 bp, synthetic construct
  source 1..75: mol_type = other DNA
agcaacagatgaaaatactgtcgcgtcactcggatacggcaaaagcgttcacatacctgctgaaacagtgggaca

SEQ ID NO: 385479 - DNA, 75 bp, synthetic construct
  source 1..75: mol_type = other DNA
aatgggggagcctttgcgctcgctggttccttgattgccagtctgctaaccctgttacgtcccgccaccatgttt

SEQ ID NO: 385480 - DNA, 75 bp, synthetic construct
  source 1..75: mol_type = other DNA
cgcaacgtctgctggccgcgcaaaaaagccattctgcccgccagcttttagcgcaattaggggagtatttacgtc

SEQ ID NO: 385481 - DNA, 75 bp, synthetic construct
  source 1..75: mol_type = other DNA
gaaagtgacctcactgacgcaacagcaaagagcagaactgtgggcgggtatcaggcacgatattggtctgtcggg

SEQ ID NO: 385482 - DNA, 75 bp, synthetic construct
  source 1..75: mol_type = other DNA
actggggtggcctgaacatcgcgttgtttcaagccatcaacacaggcacgcccgccacgctgaaaccactggcat

SEQ ID NO: 385483 - DNA, 75 bp, synthetic construct
  source 1..75: mol_type = other DNA
tgcaataaagcatgcggatttcttgaaaggtatcggtgtatataaacaagatggatatccattaattaagcttga

SEQ ID NO: 385484 - DNA, 75 bp, synthetic construct
  source 1..75: mol_type = other DNA
tgtgaaaatggcgacggtacggtgccgctgcgtgccgggcaaatcgttcacgcgaatattcaggagcgtctggca

SEQ ID NO: 385485 - DNA, 75 bp, synthetic construct
  source 1..75: mol_type = other DNA
accgtcatgacgttagtcaggcttttgccttacgctctattataaaaatcgctcagcaggtaaataaagatgaaa

SEQ ID NO: 385486 - DNA, 75 bp, synthetic construct
  source 1..75: mol_type = other DNA
tacgcccccaactcctgcagtacgcgcatcatgggtacataaaacgggggcgaccggcggatttggtagctatgt

SEQ ID NO: 385487 - DNA, 75 bp, synthetic construct
  source 1..75: mol_type = other DNA
tattaattaccgcctcttgctccacatttgccgcacctcaacaaatcaacgatattgtgcatcgcacaattaccc

SEQ ID NO: 385488 - DNA, 75 bp, synthetic construct
  source 1..75: mol_type = other DNA
agtaaacaatatgcagatataaattcgttctggaatgacctcggatttccagggaaaggttaccaggatggcagt

SEQ ID NO: 385489 - DNA, 75 bp, synthetic construct
  source 1..75: mol_type = other DNA
aacaacccggcttaacgctgtgctggattacattgatgcggtggcggcaacagataccagcaccgcgcctgatgt

SEQ ID NO: 385490 - DNA, 75 bp, synthetic construct
  source 1..75: mol_type = other DNA
gatgctcctggcacatataaggtgggttatgctatctgtcgttctgcaaattttaactcatgggaatatgtgcca

SEQ ID NO: 385491 - DNA, 75 bp, synthetic construct
  source 1..75: mol_type = other DNA
ccccattaacgccatacgataaatgggatggagagaaatgggtgaccgataccgaggcacaatatagcgccgcag

SEQ ID NO: 385492 - DNA, 75 bp, synthetic construct
  source 1..75: mol_type = other DNA
attcggcgagatgtttctgacttccagaggaatgatcagtattcccataaacgacctggcccggacaatgggtat

SEQ ID NO: 385493 - DNA, 75 bp, synthetic construct
  source 1..75: mol_type = other DNA
attacagaagaaattctcagaaagtttaatcagttcgtaaagcctctactgccactgcatatagtgtttgatggg

SEQ ID NO: 385494 - DNA, 75 bp, synthetic construct
  source 1..75: mol_type = other DNA
gatgctcctgactcatataaagctggttatgcaatctgccgttctgcagattttaactcatgggtatatgtgcca

SEQ ID NO: 385495 - DNA, 75 bp, synthetic construct
  source 1..75: mol_type = other DNA
atgaataagctggtttctgatggcagcgtcaaaaaaataaattatgccggggtgaacacatatcgctggcagggg

SEQ ID NO: 385496 - DNA, 75 bp, synthetic construct
  source 1..75: mol_type = other DNA
tgaacatgctgccggagagtgagcgtccccgtgtcgttgggctgggtcccacgcaccgcgcggtcggggagatgc

SEQ ID NO: 385497 - DNA, 75 bp, synthetic construct
  source 1..75: mol_type = other DNA
ctgggcagcatgggagaacgctgggccggcaagggggctgaacagctgggactgcagggcagcgtcgataaggat

SEQ ID NO: 385498 - DNA, 75 bp, synthetic construct
  source 1..75: mol_type = other DNA
atttcagcaacacgctgttcctgctcgatgagagctcaatggtgggcaataccgacatggcacgggcatacgccc

SEQ ID NO: 385499 - DNA, 75 bp, synthetic construct
  source 1..75: mol_type = other DNA
gtggcacaggtcagcggagtacgggaacaggccatactgacacaggccattcgcagtgagctgaaaacacagggc

SEQ ID NO: 385500 - DNA, 75 bp, synthetic construct
  source 1..75: mol_type = other DNA
tatctgcgggatatgtaccgtccggggatggtgatggagcagtggaacccggagacacgcagtcatgaccgctat

SEQ ID NO: 385501 - DNA, 75 bp, synthetic construct
  source 1..75: mol_type = other DNA
actgcgcctgctgacgctgtatatggagcattactggacagtggcagctccacagaatatggcgcataaaaaacg

SEQ ID NO: 385502 - DNA, 75 bp, synthetic construct
  source 1..75: mol_type = other DNA
atccacattttgatgaagcatgtcgtgcatttgcattgcgccacaacttggtgcaactggcagaacgtgcaggca

SEQ ID NO: 385503 - DNA, 75 bp, synthetic construct
  source 1..75: mol_type = other DNA
gccgcattacgtcatgagtgcaactgcagagatcgggcgtattgctgcaggtgcggtatctggcaatgtaaaaac

SEQ ID NO: 385504 - DNA, 75 bp, synthetic construct
  source 1..75: mol_type = other DNA
tcacctgtcgtcgaaactcatattcccgaagcgccagccaggaagaagaagaaaagacaacgctttccaagacca

SEQ ID NO: 385505 - DNA, 75 bp, synthetic construct
  source 1..75: mol_type = other DNA
actcaacccagatcaaccgcatcagctcaatgcgccagaaatctggctgcttaccgatctgactgaagattcaac

SEQ ID NO: 385506 - DNA, 75 bp, synthetic construct
  source 1..75: mol_type = other DNA
tgaatgtccagacgctgcgcaacaagctgaacccggagcaaccgcatcaacttaccccgccggagatctggctgc

SEQ ID NO: 385507 - DNA, 75 bp, synthetic construct
  source 1..75: mol_type = other DNA
tgaatgtgcagatcctgcggaacaagctgaacccagctcaacctcatttattaaccgcaccagaaatctggttgc

SEQ ID NO: 385508 - DNA, 75 bp, synthetic construct
  source 1..75: mol_type = other DNA
atccccactatgacgaagcgtgccgggctttcgcgcagcgtcacaatatggcgaagctggccgagcatgcgggta

SEQ ID NO: 385509 - DNA, 75 bp, synthetic construct
  source 1..75: mol_type = other DNA
gcatgcacgtctgcagactaatccagctatgtcgagcgtgatcgataccatgagcggtattggcgcatcgtttgg

SEQ ID NO: 385510 - DNA, 75 bp, synthetic construct
  source 1..75: mol_type = other DNA
ttacaggctaatcctgcgatggcgagtgcagttgataccgtgactggcctcggtgcttcattcggtttgctgtga

SEQ ID NO: 385511 - DNA, 75 bp, synthetic construct
  source 1..75: mol_type = other DNA
gtggtgttttttaatcttttgggggttttaattcctattgatgaacagacggcagaatcagcccccgccggaata

SEQ ID NO: 385512 - DNA, 75 bp, synthetic construct
  source 1..75: mol_type = other DNA
taagttatcagaggggactttgcttacaagacgagccgttgccgaaattcttaaaggcctcaatgctgacgtctt

SEQ ID NO: 385513 - DNA, 75 bp, synthetic construct
  source 1..75: mol_type = other DNA
tgaatgtgcagattctgcgaaacaagctgaacccagctcaacctcatttattaaccgcaccagaaatctggctgc

SEQ ID NO: 385514 - DNA, 75 bp, synthetic construct
  source 1..75: mol_type = other DNA
ctggcacaggatcgcccgtcgctggctattgtgtccgggcagggcggtgcagccgggcagcgtgagcgggtggct

SEQ ID NO: 385515 - DNA, 75 bp, synthetic construct
  source 1..75: mol_type = other DNA
tttaagttcatgggagtatgcgccagaccatcgtggtgaaaccgtctatagcactgacacgggaaacaccgaaga

SEQ ID NO: 385516 - DNA, 75 bp, synthetic construct
  source 1..75: mol_type = other DNA
agtctgattcagttgaagttgcaggccgggcggaagttgacgcaggcagaaaccacccggcttaatgccgtgctg

SEQ ID NO: 385517 - DNA, 75 bp, synthetic construct
  source 1..75: mol_type = other DNA
cggtatcccggcatattcctgtttagatgctcctggcacatataaggctggttatgcaatctgccgttcagtaga

SEQ ID NO: 385518 - DNA, 75 bp, synthetic construct
  source 1..75: mol_type = other DNA
gaaaatacaaccactatcgccccattaacgccatacgatgaatgggatggtgagaaatgggtgacggataccgag

SEQ ID NO: 385519 - DNA, 75 bp, synthetic construct
  source 1..75: mol_type = other DNA
aagtatgcccgcctgttccactggaattgaccctggcaaaaacattccgggaagagtggcagtatttacaggtaa

SEQ ID NO: 385520 - DNA, 75 bp, synthetic construct
  source 1..75: mol_type = other DNA
gactatatcgacgtggtagcagcaatagatatcagcacagcccctgatattaactggcccgaactaccagaattt

SEQ ID NO: 385521 - DNA, 75 bp, synthetic construct
  source 1..75: mol_type = other DNA
aaccagccgacttaacacggtgttggattacattgacgcggtgacggcaacagataccagcaccgcgccggatgt

SEQ ID NO: 385522 - DNA, 75 bp, synthetic construct
  source 1..75: mol_type = other DNA
gattacattgacgcggtggtggcaacagataccagcaccgcgccgggggttatctggccagttccacctgagatg

SEQ ID NO: 385523 - DNA, 75 bp, synthetic construct
  source 1..75: mol_type = other DNA
aacaacccggcttaacgctgtgctggattacattgacgcggtgacggcaacagataccggcaccgcgccggatgt

SEQ ID NO: 385524 - DNA, 75 bp, synthetic construct
  source 1..75: mol_type = other DNA
aaggctcggtcaagcatgtgtatttcgttgctgagaccaagggctcgatgtcgtcattggatttacggcctattg

SEQ ID NO: 385525 - DNA, 75 bp, synthetic construct
  source 1..75: mol_type = other DNA
tgagaaatgggtgaccgatactgaagcacagcataacgccgcagtagacgcggcagaagcacagcgccagtcact

SEQ ID NO: 385526 - DNA, 75 bp, synthetic construct
  source 1..75: mol_type = other DNA
gattatattgacgcggtgacggcaacagataccagcacagcgccggatgtcatctggcctgaactgccggaggcg

SEQ ID NO: 385527 - DNA, 75 bp, synthetic construct
  source 1..75: mol_type = other DNA
gcatcgaaacaggagaatcgaaagaaatcacagctccgggtgattatcctgaaaatacaaccactatcgccccgt

SEQ ID NO: 385528 - DNA, 75 bp, synthetic construct
  source 1..75: mol_type = other DNA
cagcgtgccgccacccgcatgatactggaaacgtccgaccgtttcacggtggtgcaggggtatgccggtgtgggt

SEQ ID NO: 385529 - DNA, 75 bp, synthetic construct
  source 1..75: mol_type = other DNA
cgatgtgtttgagccgaaaccggaccgggaggtcatgaatgcgcagcggctgttcagtacggcgcgggagctgcg

SEQ ID NO: 385530 - DNA, 75 bp, synthetic construct
  source 1..75: mol_type = other DNA
acgccctgattgcggccggtggcggtcgtgccgtggccagtggtgacacggaccagctgcaggccatcgcgcccg

SEQ ID NO: 385531 - DNA, 75 bp, synthetic construct
  source 1..75: mol_type = other DNA
gaactggtcatgatggcccgggaacaggggcgggaggtgcagattatcgctgctgaccgtcgctcgcagatgaac

SEQ ID NO: 385532 - DNA, 75 bp, synthetic construct
  source 1..75: mol_type = other DNA
gggtgatttactgcatgtggatgtggcaaaaggttatggcacagacctgctggtttcccgtgcgtcgtatgaggc

SEQ ID NO: 385533 - DNA, 75 bp, synthetic construct
  source 1..75: mol_type = other DNA
tgcgcagggcgaaacgcaggtggtgcgtatttcctccctggacagcagctggtcgctgttccggccggaaaaaat

SEQ ID NO: 385534 - DNA, 75 bp, synthetic construct
  source 1..75: mol_type = other DNA
ctggattacattgacgcggtgactgcaacagataccagcactgcgccggatgtcatctggcctgaactaccggag

SEQ ID NO: 385535 - DNA, 75 bp, synthetic construct
  source 1..75: mol_type = other DNA
aatcacagctccgggtgattaccctgaaaacacgaccactatcgctccattaacgccatacgataaatgggatgg

SEQ ID NO: 385536 - DNA, 75 bp, synthetic construct
  source 1..75: mol_type = other DNA
gagacgcgggaatatatttctgcatcaactgaatatcttgcagtgggtgtcggtattccagcatattcctgttta

SEQ ID NO: 385537 - DNA, 75 bp, synthetic construct
  source 1..75: mol_type = other DNA
ccggaaacagatggccggctttgagtcagcctacgtggccctgtcgcgtatgaagcagcatgtgcaggtgtacac

SEQ ID NO: 385538 - DNA, 75 bp, synthetic construct
  source 1..75: mol_type = other DNA
cagggctggacggatgccattaacaatgccgtacagaaaggaacagcccacgatgtgtttgaaccgaaaccggac

SEQ ID NO: 385539 - DNA, 75 bp, synthetic construct
  source 1..75: mol_type = other DNA
gttgcccgggaaaacctgctgcaggagcgactgcagcagatggagcgggatatggtccgtgacctgcagaaagag

SEQ ID NO: 385540 - DNA, 75 bp, synthetic construct
  source 1..75: mol_type = other DNA
tctcgaagtattaccacttcatcccgatgccggatctacgcgcctttgctaacgcgggcttcccgttcagccgga

SEQ ID NO: 385541 - DNA, 75 bp, synthetic construct
  source 1..75: mol_type = other DNA
ctgatttaatggctgcaaccttaatttccagtggcatgtcagaacaaaaggtaaatgatttcctggataatgtcg

SEQ ID NO: 385542 - DNA, 75 bp, synthetic construct
  source 1..75: mol_type = other DNA
cggctttgcgtgagggttgggataacccgaacgtgttcgttatctgcacgctcaaacatagtgataacaccattt

SEQ ID NO: 385543 - DNA, 75 bp, synthetic construct
  source 1..75: mol_type = other DNA
tgatgggcgtgctggtcaccaaatggacgtcaatcaacgtaccgttggtggtttcacaaacgcatgccgccgatg

SEQ ID NO: 385544 - DNA, 75 bp, synthetic construct
  source 1..75: mol_type = other DNA
caaagtcggtctgatgggaccattggcaggggttggcgatccactggtctggggaacgctgcgcccgattaccgc

SEQ ID NO: 385545 - DNA, 75 bp, synthetic construct
  source 1..75: mol_type = other DNA
cgcgagtccggtatcaacagcctacgtgttggcgacgtttattacgtaggtcatctgccgtggttcgagcgcttg

SEQ ID NO: 385546 - DNA, 75 bp, synthetic construct
  source 1..75: mol_type = other DNA
cgtgaagaggacttcgcgcgtcggcatatcccaggcgctctccatttaccccataagcaaatgaccgcagaaaga

SEQ ID NO: 385547 - DNA, 75 bp, synthetic construct
  source 1..75: mol_type = other DNA
tgtgaagaaaacttcgcccgcaggcatattcccggcgcgattcatttgccccataagcaaatgacctcagagaga

SEQ ID NO: 385548 - DNA, 75 bp, synthetic construct
  source 1..75: mol_type = other DNA
atgcaggcattaacaggaatggttaattcttttagccactttattttaatgcgtatcggtctggggggtaatgct

SEQ ID NO: 385549 - DNA, 75 bp, synthetic construct
  source 1..75: mol_type = other DNA
aagagtccggcccggcctgtcaccagacgggtcacaacagcggcgtgatccatgccggggtctattacacgcccg

SEQ ID NO: 385550 - DNA, 75 bp, synthetic construct
  source 1..75: mol_type = other DNA
tatgctgacgccaatcatctcaccccggaacagaagcaggcaggactggataaacttgccaaaggagagttacct

SEQ ID NO: 385551 - DNA, 75 bp, synthetic construct
  source 1..75: mol_type = other DNA
atggccgaatggcccgacgatacgctatttgtggtgtattgcgcggggccacattgtaacggtgcagaccgtgcg

SEQ ID NO: 385552 - DNA, 75 bp, synthetic construct
  source 1..75: mol_type = other DNA
ctcggcgcatctctggcactttctggcaacatcctcggcccgctttttttttctttattttcaatgcggtgcgtc

SEQ ID NO: 385553 - DNA, 75 bp, synthetic construct
  source 1..75: mol_type = other DNA
ataacgccccggaactggcactggctaccgatgatctttttgccctgtaccagcgtgcgtttaatcgtgcggcac

SEQ ID NO: 385554 - DNA, 75 bp, synthetic construct
  source 1..75: mol_type = other DNA
actggctgcggtctctgccgatatggtggcggattaccagtcccggcttgccagcgcggatatggcgctgtggca

SEQ ID NO: 385555 - DNA, 75 bp, synthetic construct
  source 1..75: mol_type = other DNA
tacaaacaggtggcagacgccatccgcgatgaggtcatccgcttccttgagcgtctgccccagcttaccgggctg

SEQ ID NO: 385556 - DNA, 75 bp, synthetic construct
  source 1..75: mol_type = other DNA
ccgcgatcagtttcaccgccagtaccttgccgcacagttgacggaagaggcggggctggtacagcttgcgcagca

SEQ ID NO: 385557 - DNA, 75 bp, synthetic construct
  source 1..75: mol_type = other DNA
atgacaacccgaactgggagtatatcgacggcgaaatcgtcaagctgggatcgctggcccccggcgctggatatc

SEQ ID NO: 385558 - DNA, 75 bp, synthetic construct
  source 1..75: mol_type = other DNA
cacagaacgccgccacagcgcagcgcgatgcgctgctaggtgaactggcgaaactggcgcaatgctggcagtcac

SEQ ID NO: 385559 - DNA, 75 bp, synthetic construct
  source 1..75: mol_type = other DNA
aaaccggtttatatcagtagttttttcgccggaaacatgtcgccagatggctatcgccaactgctggaacaagtt

SEQ ID NO: 385560 - DNA, 75 bp, synthetic construct
  source 1..75: mol_type = other DNA
cgcctcgctgttagcgaaacgttcctcttgcggtaaagacacgctctatttctctctgcgctatttgcccgtcgc

SEQ ID NO: 385561 - DNA, 75 bp, synthetic construct
  source 1..75: mol_type = other DNA
cctggaaagaggccaatctgggtgaaaaccataaaaaagtacccgacgatgtggcgcccccccccccatcatcat

SEQ ID NO: 385562 - DNA, 75 bp, synthetic construct
  source 1..75: mol_type = other DNA
gtcacgtctgaaagcagcatgacgcaaaccagtgctccggctctacagatcgccatcgacagtcacgacgacaaa

SEQ ID NO: 385563 - DNA, 75 bp, synthetic construct
  source 1..75: mol_type = other DNA
taccgatgatctttttgccctgtaccagcgagcttttaatcgttcgaaacctgcttcctcccccactcctgcggc

SEQ ID NO: 385564 - DNA, 75 bp, synthetic construct
  source 1..75: mol_type = other DNA
aaaggtaaaacgtttacagcgaaaccgaaaccggatgcagagatcgcctcgctgttagcgaaacgttcctcttgc

SEQ ID NO: 385565 - DNA, 75 bp, synthetic construct
  source 1..75: mol_type = other DNA
ttgatggcagtgcactgcgtggttcccccacatccggctgctttatatgttgccaataagctgggcgcagatatc

SEQ ID NO: 385566 - DNA, 75 bp, synthetic construct
  source 1..75: mol_type = other DNA
agctcgggtaattttgattatccgtttgttatcttatcatcaggacgtgaaaaaaatttgggaaaaacgatctaa

SEQ ID NO: 385567 - DNA, 75 bp, synthetic construct
  source 1..75: mol_type = other DNA
gtcacccaggagcgccagcgcgtgggggccccctggtggaatggctcttccgccagaccgcacagacatggggcg

SEQ ID NO: 385568 - DNA, 75 bp, synthetic construct
  source 1..75: mol_type = other DNA
gtcacccaggagcgccagcgcgtgggggcccctggtggaatggctcttccgccagaccgcacagacatggggcgc

SEQ ID NO: 385569 - DNA, 75 bp, synthetic construct
  source 1..75: mol_type = other DNA
aggcgtcaactcactgatgtttatgaaaaacctgactatcgccggcggatttttgttgctggcaatcaccggtcc

SEQ ID NO: 385570 - DNA, 75 bp, synthetic construct
  source 1..75: mol_type = other DNA
tttatgctgccgctggtgattctgcttgagtttggtggtggtctggcaatcctgttcggtttcctgactcgtacc

SEQ ID NO: 385571 - DNA, 75 bp, synthetic construct
  source 1..75: mol_type = other DNA
ggggcattggttaataagtggacacatgtcaacatcccgctggtggtctctcgcattactgaccagacgggcaaa

SEQ ID NO: 385572 - DNA, 75 bp, synthetic construct
  source 1..75: mol_type = other DNA
tctgtgcagtgtcctgcatcacctcacgccgtgtatatctgcagcggacagctgtcgccggcgtcccacgttatg

SEQ ID NO: 385573 - DNA, 75 bp, synthetic construct
  source 1..75: mol_type = other DNA
gcaaagctggcagaacgtgcaggaatgaatgttcagacactgcgaaacaaactcaatccagatcaaccgcatcag

SEQ ID NO: 385574 - DNA, 75 bp, synthetic construct
  source 1..75: mol_type = other DNA
gcaggcccgtttacaggttaatcctgcgatggcaagtgcagttgatactgtaactggcctcggtgcttcattcgg

SEQ ID NO: 385575 - DNA, 75 bp, synthetic construct
  source 1..75: mol_type = other DNA
gaccatcaccagtaccccgcaggcagaaagcgatggccggaccccactggcagccttccctgtcgatatgatgga

SEQ ID NO: 385576 - DNA, 75 bp, synthetic construct
  source 1..75: mol_type = other DNA
agccccccatcattgtggtgaaaaaacgtcgtactttttcaccgccttccttatccgaaaaaacagatattatcg

SEQ ID NO: 385577 - DNA, 75 bp, synthetic construct
  source 1..75: mol_type = other DNA
gccggtcgcagactggcgacattagaacaaaagtggctcaggacgcaggcacagcaggagaatatttctgggcaa

SEQ ID NO: 385578 - DNA, 75 bp, synthetic construct
  source 1..75: mol_type = other DNA
ccatttctggcggattcctgctgctggcaattacggggccgggcgcattcagcatcgaccgcctgctgaataaaa

SEQ ID NO: 385579 - DNA, 75 bp, synthetic construct
  source 1..75: mol_type = other DNA
tcactggagtcctgccggctcatttattacagcggtagctggtatctgatcgcgttacagaagggaaaactgcag

SEQ ID NO: 385580 - DNA, 75 bp, synthetic construct
  source 1..75: mol_type = other DNA
cacgctaacctgcgtcacattctaaccaaaaaagcgaccaaacgtaaacgtcacctgcgtccgaaagccatggtt

SEQ ID NO: 385581 - DNA, 75 bp, synthetic construct
  source 1..75: mol_type = other DNA
tgatcgcgttacagaagggaaaactgcaggtctttcctctggcagatatcaaatcagtcagcctgacatcagaac

SEQ ID NO: 385582 - DNA, 75 bp, synthetic construct
  source 1..75: mol_type = other DNA
gcgggcttgtcagatgatgtagatgcttatgatctgatcctcaaagacaaggaacggttattatcactcgctgag

SEQ ID NO: 385583 - DNA, 75 bp, synthetic construct
  source 1..75: mol_type = other DNA
cgcattacagaagggaaaactgcaggtctttcctctggcagatatcaaatcagtcagcctgacatcagaacggtt

SEQ ID NO: 385584 - DNA, 75 bp, synthetic construct
  source 1..75: mol_type = other DNA
gctggtgactgagcgatggtatccgtcactggagccctgccggctcatttattacagcggtagctggtatctgat

SEQ ID NO: 385585 - DNA, 75 bp, synthetic construct
  source 1..75: mol_type = other DNA
ggaaaaattactggctacgcgggtacccaacaatatatggaagcaatgggcgtcccgggttttatgctgccgctg

SEQ ID NO: 385586 - DNA, 75 bp, synthetic construct
  source 1..75: mol_type = other DNA
ctatttctggcggattcctgctgctggcgattaccggtccgggcgcgtatagcatcgaccgtctgttgaataaaa

SEQ ID NO: 385587 - DNA, 75 bp, synthetic construct
  source 1..75: mol_type = other DNA
cagcaattttgcagaaggcatgaactcgctgatgtttatgaaaaacctgactatttctggcggattcctgctgct

SEQ ID NO: 385588 - DNA, 75 bp, synthetic construct
  source 1..75: mol_type = other DNA
aaaaagctcagattatagcaaagacaatgcgaaaaggattttatttcataaatcctaactttgtatttaatggcg

SEQ ID NO: 385589 - DNA, 75 bp, synthetic construct
  source 1..75: mol_type = other DNA
atagtgagcaatttgttaaattgtttactgcgaatattgggctaacatttgatttatcatcggcaggaattaaag

SEQ ID NO: 385590 - DNA, 75 bp, synthetic construct
  source 1..75: mol_type = other DNA
ctatttctggcggattcctgctgctggcaattaccggtccaggcgcattcagcatcgaccgcctgctgaataaaa

SEQ ID NO: 385591 - DNA, 75 bp, synthetic construct
  source 1..75: mol_type = other DNA
agcattactggcagggtgggaatgcctgatggcgaggcgctggctggcgtcattgcaggcggcatggccgaacgg

SEQ ID NO: 385592 - DNA, 75 bp, synthetic construct
  source 1..75: mol_type = other DNA
atgagcgcagaacaagaacaggacacagccgcaaaatccggcaaaaagctgtcagccctgctggttatggggggc

SEQ ID NO: 385593 - DNA, 75 bp, synthetic construct
  source 1..75: mol_type = other DNA
ccttttcagaaaataagtgagctcaatgatatcatacattcatatgaaaatatgcgaattaaaaatagtcgaaaa

SEQ ID NO: 385594 - DNA, 75 bp, synthetic construct
  source 1..75: mol_type = other DNA
aatgaacgaacaggaatgtcaaccgtggccagcgacgtgaaccaccgctggtttaagcacattgttctgccgtcc

SEQ ID NO: 385595 - DNA, 75 bp, synthetic construct
  source 1..75: mol_type = other DNA
ggcgtctgacaggatccaggcagctgtcatacgtaaacagaacgaaatgcggcaacgttacggaatacaacagga

SEQ ID NO: 385596 - DNA, 75 bp, synthetic construct
  source 1..75: mol_type = other DNA
agagtgtgacgtttgccacggtagcggtgcaaaaccaggtacacagccgcagacctgtccgacctgtcatggttc

SEQ ID NO: 385597 - DNA, 75 bp, synthetic construct
  source 1..75: mol_type = other DNA
tcagcgccagtgcggacaacctgaaaatttttgacgagatctggcaggagggtatgaagccggaagactggaaag

SEQ ID NO: 385598 - DNA, 75 bp, synthetic construct
  source 1..75: mol_type = other DNA
cacgagatctcggcggccattatcgagcagtgtagtacccgcatcttcatggcgaaccagcaggcgaaggagtac

SEQ ID NO: 385599 - DNA, 75 bp, synthetic construct
  source 1..75: mol_type = other DNA
ccaaccagcgagcaggttatccgggacaccaacaccctggcggataccctgaaggatctcggtttcatcatgacc

SEQ ID NO: 385600 - DNA, 75 bp, synthetic construct
  source 1..75: mol_type = other DNA
aaccgccacgggaatgatggactcccttctttatgcgccctgcgattacgtgatcacgcaatcctatacctgcat

SEQ ID NO: 385601 - DNA, 75 bp, synthetic construct
  source 1..75: mol_type = other DNA
gcaagcccgccagtatgttgtggtgaaaaatcagttcaagcgcggcgataccaaacgttttgccgctcgtgtcac

SEQ ID NO: 385602 - DNA, 75 bp, synthetic construct
  source 1..75: mol_type = other DNA
ttaagacgatatttattgaatgaacattcaattacaaaagtcattgaattgcctaggaatatcttcaaaaggaca

SEQ ID NO: 385603 - DNA, 75 bp, synthetic construct
  source 1..75: mol_type = other DNA
cgttctctacagccaggacgccagactcgcaggtcagggaatggatatccactttgaccggatgatgtggcgggg

SEQ ID NO: 385604 - DNA, 75 bp, synthetic construct
  source 1..75: mol_type = other DNA
ggttaggcatggattttatcgaaaccgtcagtgcgctgatgaatgcaacccccggacgtgatctctgctggatcc

SEQ ID NO: 385605 - DNA, 75 bp, synthetic construct
  source 1..75: mol_type = other DNA
atgaatgctatcccttatttcgattatagccaggcacccttctggccatcttatcagagcaaagtcatcggcgtt

SEQ ID NO: 385606 - DNA, 75 bp, synthetic construct
  source 1..75: mol_type = other DNA
ttaagacagtgcacacaacaagagattattatcttctagataatggtgcttggtatagagatatccaaagtcaac

SEQ ID NO: 385607 - DNA, 75 bp, synthetic construct
  source 1..75: mol_type = other DNA
ggttcggtatggattttatcgaaaccgtcagtgcgctgatgaatgcaacacccggacgtgacctctgctggctcc

SEQ ID NO: 385608 - DNA, 75 bp, synthetic construct
  source 1..75: mol_type = other DNA
cctgctcccgggtacggcggagcctgcttcgtctgccgtgggaacatgacaacgccttcagtgacagaaaaatct

SEQ ID NO: 385609 - DNA, 75 bp, synthetic construct
  source 1..75: mol_type = other DNA
gcttcgtctgccgtgggaacatgacaacgccttcaacagcagaaagacctggtttggtatggattttatcgaaac

SEQ ID NO: 385610 - DNA, 75 bp, synthetic construct
  source 1..75: mol_type = other DNA
cggtacagaaagatgtttccaatcagatacaaagtattctcgagaaaagcataccgctcgacccgaattatacgt

SEQ ID NO: 385611 - DNA, 75 bp, synthetic construct
  source 1..75: mol_type = other DNA
taaaggacgggaaaagcgcgatggcagtacgctgggcgatcgcctgaattactgggatgtgaaaatgagtattca

SEQ ID NO: 385612 - DNA, 75 bp, synthetic construct
  source 1..75: mol_type = other DNA
atgagaaaaatagtggccatggccgttatttgcctgacggctgcctctggccttacctctgcttacgcggcgcaa

SEQ ID NO: 385613 - DNA, 75 bp, synthetic construct
  source 1..75: mol_type = other DNA
cccggacgtgacctctgctggctcctgacccgtcatcctgaaaaaccggaataccacgtggtgctgtgcgtcaga

SEQ ID NO: 385614 - DNA, 75 bp, synthetic construct
  source 1..75: mol_type = other DNA
cctgctcccgggtacggcggatcctgcttcgcctgccgggggaacatgacaacatcttcagtgacagaaatacct

SEQ ID NO: 385615 - DNA, 75 bp, synthetic construct
  source 1..75: mol_type = other DNA
tgtttataacagccagacgggaaaatacgataaacatcgcgcacgttcttttttagctgccagttggcatgatga

SEQ ID NO: 385616 - DNA, 75 bp, synthetic construct
  source 1..75: mol_type = other DNA
ttgtcagcacctgggagatcggcggtatcatttttgaatgcgaggatgaacattacctcgccaccctggacatgc

SEQ ID NO: 385617 - DNA, 75 bp, synthetic construct
  source 1..75: mol_type = other DNA
ttcgctggcggatgagcctctgctgctgggcgatatcatcctggttgttggtaactggaaactgatcggtatgct

SEQ ID NO: 385618 - DNA, 75 bp, synthetic construct
  source 1..75: mol_type = other DNA
acgctggtggcgacgccgccgaacctggtagtcaacagtgaattgctgcgtgaaggctatcacggcttcagtttc

SEQ ID NO: 385619 - DNA, 75 bp, synthetic construct
  source 1..75: mol_type = other DNA
aataataaagatgaatttaacaggaaaggtaacgaaagattaaatgaaatatacgaatctcgccgggtacatggt

SEQ ID NO: 385620 - DNA, 75 bp, synthetic construct
  source 1..75: mol_type = other DNA
ggtgaaagggctgatggacattggcggcggttatgggccacatatgatgctggggtgtttgtttgtcttgtcggc

SEQ ID NO: 385621 - DNA, 75 bp, synthetic construct
  source 1..75: mol_type = other DNA
actttgttaagttgggggttccattcaccattattgttatggtggtttgcgtggtgatgattccgatgttgtttc

SEQ ID NO: 385622 - DNA, 75 bp, synthetic construct
  source 1..75: mol_type = other DNA
tcgcgatcttatccgtgaatatcgcctgaccgggcgcgcgcgtcgcctggctatccgccccggttcgccaatgat

SEQ ID NO: 385623 - DNA, 75 bp, synthetic construct
  source 1..75: mol_type = other DNA
aatgtctcttgggatgcactgaacacagcatacagtgaacacccggagtggttttccgggtttatcaggatcggg

SEQ ID NO: 385624 - DNA, 75 bp, synthetic construct
  source 1..75: mol_type = other DNA
gttgcggagtaaaaataaatgatacaatccgtaacttacttgagcgtaaggtggctgaattagaaaatgtcaagg

SEQ ID NO: 385625 - DNA, 75 bp, synthetic construct
  source 1..75: mol_type = other DNA
tgtgataatgatgttccagttaggtttaggcggggtacagaaattcaaaaagatgttagtagcccttaaagcaaa

SEQ ID NO: 385626 - DNA, 75 bp, synthetic construct
  source 1..75: mol_type = other DNA
caaaatgttggttttactgatgctgacagttgccggtcttggcgcgtttatgagttcaaccggcgtcgtcgctat

SEQ ID NO: 385627 - DNA, 75 bp, synthetic construct
  source 1..75: mol_type = other DNA
gtttattgaacgcgccgatgcgttacccgcttttgaaaaagcttacgactttaaactcgatcaggatcagttact

SEQ ID NO: 385628 - DNA, 75 bp, synthetic construct
  source 1..75: mol_type = other DNA
aaaaactcgatgcagagcaaaacaagttaatctggctgacgcccgcacctgcgaataacacctggaccatcgccg

SEQ ID NO: 385629 - DNA, 75 bp, synthetic construct
  source 1..75: mol_type = other DNA
cttcgccagcctcgatgaaaaaacattgcagcaactgaatgccagcattgcagtggaaggactggatgccaaaaa

SEQ ID NO: 385630 - DNA, 75 bp, synthetic construct
  source 1..75: mol_type = other DNA
catcgtattcgagagcattatactgatacattcgatgcaaattccggtattgaattttcagatgaagtggcccaa

SEQ ID NO: 385631 - DNA, 75 bp, synthetic construct
  source 1..75: mol_type = other DNA
ggaccatcgccgtgcgtcaggatgtggcagagaaaaataaactcacttcgcttgccgacctgagtcgttatctga

SEQ ID NO: 385632 - DNA, 75 bp, synthetic construct
  source 1..75: mol_type = other DNA
agcattgcagtggaaggactggatgccaaaaaagtggctgccgactacctgaaacaaaaagggtggacgaagtaa

SEQ ID NO: 385633 - DNA, 75 bp, synthetic construct
  source 1..75: mol_type = other DNA
tatgccggactggcggataaccggaaccgcctggcagaagttgttacccgaaaattgcaggacagcttttatata

SEQ ID NO: 385634 - DNA, 75 bp, synthetic construct
  source 1..75: mol_type = other DNA
tgtcgcgctggcggtgaaagggctgatggacattggcggcggttacgggccacatatgatgctgggttgtttgtt

SEQ ID NO: 385635 - DNA, 75 bp, synthetic construct
  source 1..75: mol_type = other DNA
tttagcgtaacgcctatcggcctggtcgtattggtactcggcatcttatacatgctggtgatgcgttttatgctg

SEQ ID NO: 385636 - DNA, 75 bp, synthetic construct
  source 1..75: mol_type = other DNA
tccagcttggcaccacgccagtagtgcgcggggcgattacttcgggcgaactggatatttacccggaatacaccg

SEQ ID NO: 385637 - DNA, 75 bp, synthetic construct
  source 1..75: mol_type = other DNA
gttcactggttatgttggcagccgtgagcctgccgctacaggcggcttcccccgttaaagtcggttcaaaaatcg

SEQ ID NO: 385638 - DNA, 75 bp, synthetic construct
  source 1..75: mol_type = other DNA
tcaatctgtctctggaacatgaactgaatgagtggctggcagaggtggttacccgcaaattgcgggacagttttt

SEQ ID NO: 385639 - DNA, 75 bp, synthetic construct
  source 1..75: mol_type = other DNA
atgaataatgcagaattaaatagtgaattgattgctactgcggcagggaatattaccgtttataactatgattgt

SEQ ID NO: 385640 - DNA, 75 bp, synthetic construct
  source 1..75: mol_type = other DNA
cactctatgaaagctggtcaattcctgtctcggttatgttggtcgtgccgttagggattgtcggcgtgctgctgg

SEQ ID NO: 385641 - DNA, 75 bp, synthetic construct
  source 1..75: mol_type = other DNA
gattacattgacgcggtgacggcaacaaataccagcaccgcgcctgatgtcatctggcctgagctgccggaggcg

SEQ ID NO: 385642 - DNA, 75 bp, synthetic construct
  source 1..75: mol_type = other DNA
gaaactcgggaatatatttccacatcaactgaatatcttgctgtgggtgtcggtattccggcatgttcctgtctg

SEQ ID NO: 385643 - DNA, 75 bp, synthetic construct
  source 1..75: mol_type = other DNA
gattacattgacgcggtgacggtaacagataccagcaccgcgccggatatcatctggcctgaactgccggaggcg

SEQ ID NO: 385644 - DNA, 75 bp, synthetic construct
  source 1..75: mol_type = other DNA
gaagagcctactcggtttatcttttcacattcggccttgcgcgaggggtgggataatccaaacgtatttgtcatg

SEQ ID NO: 385645 - DNA, 75 bp, synthetic construct
  source 1..75: mol_type = other DNA
aatggatatatccgcataagaattaacggcattaagtggctagcacaccgcatcgtatgggtaatgtttaacgga

SEQ ID NO: 385646 - DNA, 75 bp, synthetic construct
  source 1..75: mol_type = other DNA
gttatgcaatttgccgttctgaagattttaactcatgggaatatgtgccagaccatcgcggtgaaacggtctata

SEQ ID NO: 385647 - DNA, 75 bp, synthetic construct
  source 1..75: mol_type = other DNA
tgttaacgtttataactatgatggtgaaacacgggaatatatttccacttcaaatgaatatcttgccgttggtgt

SEQ ID NO: 385648 - DNA, 75 bp, synthetic construct
  source 1..75: mol_type = other DNA
tcggggttgccgctcataaagggggggtttacaaaacctctgtttcagttcacttggctcaggacttggccctga

SEQ ID NO: 385649 - DNA, 75 bp, synthetic construct
  source 1..75: mol_type = other DNA
gcaaatttgatgaaggtaaattacctactgacccacatctgatgctccgactggccattgaaaccgtcgctcatg

SEQ ID NO: 385650 - DNA, 75 bp, synthetic construct
  source 1..75: mol_type = other DNA
tattaacgtttataactacaacggagaaacgcggggatatatttccacatcaactgagtatcttgctgtgggtgt

SEQ ID NO: 385651 - DNA, 75 bp, synthetic construct
  source 1..75: mol_type = other DNA
cttagccaaattcaaaccactgatggtacttcgatattcggccacgcataagacaacacataataaagtgcatcg

SEQ ID NO: 385652 - DNA, 75 bp, synthetic construct
  source 1..75: mol_type = other DNA
ggctggctacagtgccgggcgatatgcgttgtttttattatgatgcagaaacatctgagtatacgggctggtctg

SEQ ID NO: 385653 - DNA, 75 bp, synthetic construct
  source 1..75: mol_type = other DNA
aatcacagcaccgggtgattaccccgaaaatacaaccactatcgccccattaacgccatacgataaatgggatgg

SEQ ID NO: 385654 - DNA, 75 bp, synthetic construct
  source 1..75: mol_type = other DNA
gtaccgaaacgggagataccaaagaaatcacagttccgggtgattaccctgaaaatacaaccactatcgccccat

SEQ ID NO: 385655 - DNA, 75 bp, synthetic construct
  source 1..75: mol_type = other DNA
gcacagcatagcgccgcagtagacgcggcagaagcacaacgtcagtcactgattgatactgcaatggcttccatc

SEQ ID NO: 385656 - DNA, 75 bp, synthetic construct
  source 1..75: mol_type = other DNA
attaaccctggcgaaaacattccgggaaaagtggctgtatttacaggtaagggatggagccatgaagaggaccat

SEQ ID NO: 385657 - DNA, 75 bp, synthetic construct
  source 1..75: mol_type = other DNA
agcttattgccacggaagccggtgatattactgtgtttaactacgatggtgaaacacgggagtatatttctgcat

SEQ ID NO: 385658 - DNA, 75 bp, synthetic construct
  source 1..75: mol_type = other DNA
atgccaatatttacaggtaagggatggagccatgaagaagaccatcgcaatgagactgtttactcaatcgaaaat

SEQ ID NO: 385659 - DNA, 75 bp, synthetic construct
  source 1..75: mol_type = other DNA
tgagaaatgggtgacggatactgaggcacagcatagcgccgcagtagacgcggcagaagcacagcgccagtcact

SEQ ID NO: 385660 - DNA, 75 bp, synthetic construct
  source 1..75: mol_type = other DNA
aaaaggcacggtttttcatctataactcaaaacaattgcaccagttagagagtttttcttctgacagtggcatca

SEQ ID NO: 385661 - DNA, 75 bp, synthetic construct
  source 1..75: mol_type = other DNA
cgtcggtatcccggcatgttcctgtttggatgcaccaggtacacataaagctggttatgcaatctgtcgctctgt

SEQ ID NO: 385662 - DNA, 75 bp, synthetic construct
  source 1..75: mol_type = other DNA
agattattgccacgaaggcggggaatattaccgtctataactatgatggtaaaactcgggaatatatttctactt

SEQ ID NO: 385663 - DNA, 75 bp, synthetic construct
  source 1..75: mol_type = other DNA
gataaatgggatggtgagaaatgggtgacagacactgaggcacaacacagtgccgcagtagacgcggcagaagca

SEQ ID NO: 385664 - DNA, 75 bp, synthetic construct
  source 1..75: mol_type = other DNA
agctcattgcaacaaaggcaggggatgttaacgtttataactatgatggtgaaacacgggaatatatttccactt

SEQ ID NO: 385665 - DNA, 75 bp, synthetic construct
  source 1..75: mol_type = other DNA
ggcttttacgccaacgtcaatccgcatgttgatcatcctcgttggtcgcaggccaccgaacgttttattggttca

SEQ ID NO: 385666 - DNA, 75 bp, synthetic construct
  source 1..75: mol_type = other DNA
aagccgatgtcactgccgaatcggctttttttatgcaacgtcggcagattctgaaaacgttaggcatcagcgcag

SEQ ID NO: 385667 - DNA, 75 bp, synthetic construct
  source 1..75: mol_type = other DNA
atagcctggcacccttctggccgtcttatcagaacaaaatcatcggtatccttgagcgtgcgctgcgtgagcagt

SEQ ID NO: 385668 - DNA, 75 bp, synthetic construct
  source 1..75: mol_type = other DNA
ttgccgttatgtcacacaaaggcggcgtttataaaacatcgtctgcggtacatcaagctcaatggttagcattac

SEQ ID NO: 385669 - DNA, 75 bp, synthetic construct
  source 1..75: mol_type = other DNA
agcctacgttgctgtttaacggatatgccgatcaagtagcgtcgctttatcgtggcctggatttacgggagaatt

SEQ ID NO: 385670 - DNA, 75 bp, synthetic construct
  source 1..75: mol_type = other DNA
aagggtaacgatcgcccgcccgcaccagccggaaagccattagaattcagcaggcctgccgcctggcaaaataac

SEQ ID NO: 385671 - DNA, 75 bp, synthetic construct
  source 1..75: mol_type = other DNA
gggtgctgcatgatttatgcgccaggaaccatgggcgacctgaaacctgaactgtttgcggtgctgcgcacatga

SEQ ID NO: 385672 - DNA, 75 bp, synthetic construct
  source 1..75: mol_type = other DNA
atagcatggcacccttctggccatcttatcagaacaaaatcgtcggcgttctcaatcgtgcgctgcgtgaacagt

SEQ ID NO: 385673 - DNA, 75 bp, synthetic construct
  source 1..75: mol_type = other DNA
cgttcagtgatttcgcccgcgctcgtcgtgatgtgtgcgatccggaagcccgttgcctcgccggtaatcccgggt

SEQ ID NO: 385674 - DNA, 75 bp, synthetic construct
  source 1..75: mol_type = other DNA
tgacacgtcatcctgaaaaaccggaataccacgtggtgctgtgcgtcagacaggagtatttcgacggccctgaac

SEQ ID NO: 385675 - DNA, 75 bp, synthetic construct
  source 1..75: mol_type = other DNA
cctggagtaacgtactgggcttcgcgtcaccgggtgaagcaaagcagtatcagaagcagatcacccgggatgtgg

SEQ ID NO: 385676 - DNA, 75 bp, synthetic construct
  source 1..75: mol_type = other DNA
aaaccgtcagtgcgctgatgaatgcaacccccggacgtgatctctgctggctcctgacccgtcatcctgaaaaac

SEQ ID NO: 385677 - DNA, 75 bp, synthetic construct
  source 1..75: mol_type = other DNA
cagatttaattggtgtaactcctcaagcaattagagatgctgagaagagcgggcgtttacctgcacctgactttg

SEQ ID NO: 385678 - DNA, 75 bp, synthetic construct
  source 1..75: mol_type = other DNA
ggggcaggcagcctggtcgcattgaaagatcatatcaacaccatgcccggtacgccgatggtgggtcttaacgat

SEQ ID NO: 385679 - DNA, 75 bp, synthetic construct
  source 1..75: mol_type = other DNA
gatgccccaggcacatacaaagctggttatgcaatctgccgatctgcagattttaactcatgggaatatgtacca

SEQ ID NO: 385680 - DNA, 75 bp, synthetic construct
  source 1..75: mol_type = other DNA
atgatgcagtaacgtctgaatatacgggctggtctgatgaatatattaatactggcgtaagtatgcccgtttgtt

SEQ ID NO: 385681 - DNA, 75 bp, synthetic construct
  source 1..75: mol_type = other DNA
aagagtgcaaaaagtatgttcttcattcgaagaggcgaaagaagtaatcagaaagtttgacgaggaaaacaacat

SEQ ID NO: 385682 - DNA, 75 bp, synthetic construct
  source 1..75: mol_type = other DNA
tgggagtacgtgccggaccatcggggtgagacagtctataacacagaaacccgtgaggcagcagaaatcaccact

SEQ ID NO: 385683 - DNA, 75 bp, synthetic construct
  source 1..75: mol_type = other DNA
tacaccgatggtgggtcttaacgatgaacgctttggcgaacgcttcttctcgctggcgaatgcctacgatgcgga

SEQ ID NO: 385684 - DNA, 75 bp, synthetic construct
  source 1..75: mol_type = other DNA
actggtaaacgcgcaggggaaacgtccattagcagcattctggggcgacgggacaacatcgtcatcagacgggca

SEQ ID NO: 385685 - DNA, 75 bp, synthetic construct
  source 1..75: mol_type = other DNA
ggccgaggcgaaatttaaagagatcaaggaagcttatgaagttctgaccgactcgcaaaaacgtgcggcatacga

SEQ ID NO: 385686 - DNA, 75 bp, synthetic construct
  source 1..75: mol_type = other DNA
caggtgcctggagaaatgccctttctatctgggaacctgtctgcaatgaaattttcgatcgtttgattaaaccac

SEQ ID NO: 385687 - DNA, 75 bp, synthetic construct
  source 1..75: mol_type = other DNA
ggcgtttacgccgcatccggcaacagtgccaactgcctgatgcgacgcttgcgcgtcttatcaggcctacaaatt

SEQ ID NO: 385688 - DNA, 75 bp, synthetic construct
  source 1..75: mol_type = other DNA
gaaaatatgaccactatcgctccgttaacaccatacgataaatgggatggtgagaaatgggtaaccgataccgag

SEQ ID NO: 385689 - DNA, 75 bp, synthetic construct
  source 1..75: mol_type = other DNA
ttcactgtacacatctcttgatgggagctcacaggtgacggagtattttataatctccatagccacctttctttt

SEQ ID NO: 385690 - DNA, 75 bp, synthetic construct
  source 1..75: mol_type = other DNA
aagtggaaggtttgagcctggaagacgcgcgtaatgccgctgttgaagcggtatttgctctcaaccgtgatgtcg

SEQ ID NO: 385691 - DNA, 75 bp, synthetic construct
  source 1..75: mol_type = other DNA
tctgacagcagagagaattatatcgttattggtgataatgtcgatgtaggtgcccatacgtgtattatcgggctt

SEQ ID NO: 385692 - DNA, 75 bp, synthetic construct
  source 1..75: mol_type = other DNA
aaactggagccatgtcttttattatggaggtggttccggataactgtacttacgttaccaggaaagaatcacggg

SEQ ID NO: 385693 - DNA, 75 bp, synthetic construct
  source 1..75: mol_type = other DNA
aggcgaaagacaccattcgccgcggctgtctggagtacgacgccggggcaaccgacgtcacgcagtcgtttatgt

SEQ ID NO: 385694 - DNA, 75 bp, synthetic construct
  source 1..75: mol_type = other DNA
catcaggaggaagtgtcattagtacttctgtttatgattctggtgtgcagactgtttatgacggagccacggtta

SEQ ID NO: 385695 - DNA, 75 bp, synthetic construct
  source 1..75: mol_type = other DNA
tactctgacggcaagcaaactgtctattcaggtggcgaggcatctggaactcaaatttttgacggcggcatgatc

SEQ ID NO: 385696 - DNA, 75 bp, synthetic construct
  source 1..75: mol_type = other DNA
gagctggaaacagcgcgacggctgggacagcgttgcccccatcagccgtgtcgaaatgagtctggaagcgcggct

SEQ ID NO: 385697 - DNA, 75 bp, synthetic construct
  source 1..75: mol_type = other DNA
tcataacgcccttgccggaggtcttctctgtgcggacggccagtggcggcagattgtcaccattgaggacgccct

SEQ ID NO: 385698 - DNA, 75 bp, synthetic construct
  source 1..75: mol_type = other DNA
ccaactttcagaggctgcgcaaagtggcgtcggggatggcgtcacagtcccacctgcgcaccacctacttttcaa

SEQ ID NO: 385699 - DNA, 75 bp, synthetic construct
  source 1..75: mol_type = other DNA
ccgattaatcgtcctccagcaaactggaaacggctttactcaggctctacttcgctacatttcatcgccaaatat

SEQ ID NO: 385700 - DNA, 75 bp, synthetic construct
  source 1..75: mol_type = other DNA
gatgaatatttctggataccaaaattccaggagctgcgcaaagtggcttccggtatggctattcacaagaaatgg

SEQ ID NO: 385701 - DNA, 75 bp, synthetic construct
  source 1..75: mol_type = other DNA
gcatgggggacagttgggaaatctggaccgattttcaggcgctggcgctgcgcccgtttggctggcgcgaagtct

SEQ ID NO: 385702 - DNA, 75 bp, synthetic construct
  source 1..75: mol_type = other DNA
gacccgcgtcgtcaggcggcgctgctgtactggcaggggttttccgtgccgcagattgccgccatgttgcagatg

SEQ ID NO: 385703 - DNA, 75 bp, synthetic construct
  source 1..75: mol_type = other DNA
gcaaaatcattcacccgatgggcgaaatcgatgcaatggaattcctcattaataaactggccatgaccaagacca

SEQ ID NO: 385704 - DNA, 75 bp, synthetic construct
  source 1..75: mol_type = other DNA
aacggttctactgaagatttaaccgctcgcgtactggatctggcatcacctatcggtcgtggtcagcgtggtctg

SEQ ID NO: 385705 - DNA, 75 bp, synthetic construct
  source 1..75: mol_type = other DNA
tgttgaccggtggtgtggacgccaatgccctgcatcgtccgaaacgcttcttcggtgcggcgcgtaacgtggaag

SEQ ID NO: 385706 - DNA, 75 bp, synthetic construct
  source 1..75: mol_type = other DNA
gcaagtttgacggggaccgcctctgaaggggcgaccgtttccagttggaccgaaaaaggtgacggttcctatgtt

SEQ ID NO: 385707 - DNA, 75 bp, synthetic construct
  source 1..75: mol_type = other DNA
tgatctgctgatttggggtgagaagtcaggtaaggaagtgagcaatccgatgatttctgccttggtttttagtga

SEQ ID NO: 385708 - DNA, 75 bp, synthetic construct
  source 1..75: mol_type = other DNA
aatcgatgcaatggaattcctcattaataaactggccatgaccaagaccaatgacgatttcttcgaaatgatgaa

SEQ ID NO: 385709 - DNA, 75 bp, synthetic construct
  source 1..75: mol_type = other DNA
acgcgctatacgctggcgtactggctgaacaattttaatgagcgcctgaaagtaaggcgcatgtttgaagtgctg

SEQ ID NO: 385710 - DNA, 75 bp, synthetic construct
  source 1..75: mol_type = other DNA
gtcgcacactggcgacagtgccgggtgcgtcgtgctcgcaccgccggtggtctcgggtagcaagttccgcatgct

SEQ ID NO: 385711 - DNA, 75 bp, synthetic construct
  source 1..75: mol_type = other DNA
gcatcggtattcccgttcgaggagctgcagcgctgcatggtcgatgtgatggaagaatgggaggactttgccccg

SEQ ID NO: 385712 - DNA, 75 bp, synthetic construct
  source 1..75: mol_type = other DNA
gggatcgcgttcttaatatcaatgaaaccgctgatgtatggtcttatgcttacggtaataatttgctaactctgt

SEQ ID NO: 385713 - DNA, 75 bp, synthetic construct
  source 1..75: mol_type = other DNA
tccatttggagacattaatgtaagttatgtaggccgctcgtccggtatacgggatcgcgttcttagcatcaatga

SEQ ID NO: 385714 - DNA, 75 bp, synthetic construct
  source 1..75: mol_type = other DNA
cagctttgttttttactatcgtcttggtggcagggaatcccctccggtatggcttacacttggtcgctatcctga

SEQ ID NO: 385715 - DNA, 75 bp, synthetic construct
  source 1..75: mol_type = other DNA
tgacgccggatggctggtacattagcgctgaagttgatgatctgaactggcgcagtgaagccgcgcgccagccat

SEQ ID NO: 385716 - DNA, 75 bp, synthetic construct
  source 1..75: mol_type = other DNA
tgccaccggcctcggtgtcggcgtgttccagctcgtgcgctcgttctatcccgccgcgcgcgatatccgctacac

SEQ ID NO: 385717 - DNA, 75 bp, synthetic construct
  source 1..75: mol_type = other DNA
ggccagaccggaaacgaggctgacctgaatccccgcgtggccaaccgcaacaaaggcgaacgtaaaaagccgaca

SEQ ID NO: 385718 - DNA, 75 bp, synthetic construct
  source 1..75: mol_type = other DNA
gctgctgtactttcaggggtaccgcgtagcccgcattgctgaaatgctgggcgagaaagttgcaaccgttcacag

SEQ ID NO: 385719 - DNA, 75 bp, synthetic construct
  source 1..75: mol_type = other DNA
tttccagcggatcaattctggcggagcagcctccggtacaaaactcagtggtggtaaccagaatgtctcttctgg

SEQ ID NO: 385720 - DNA, 75 bp, synthetic construct
  source 1..75: mol_type = other DNA
tctggctccaggcctgctgtgtgcagacgggcaataccgccagatagtcaccgtggaagatgcggtgcgcggcgg

SEQ ID NO: 385721 - DNA, 75 bp, synthetic construct
  source 1..75: mol_type = other DNA
cgtcgagtatatcggcatcgatgcgaccggcatcggccagggggtttaccagctcgtgcgctcgttcttcccggc

SEQ ID NO: 385722 - DNA, 75 bp, synthetic construct
  source 1..75: mol_type = other DNA
ccgtggaagatgctgtgcgcggcggatgtaacctgttcgatctcgaccagttgcgcatggagtacagcccggacg

SEQ ID NO: 385723 - DNA, 75 bp, synthetic construct
  source 1..75: mol_type = other DNA
gcgagaaagttgcaactgttcacagctggaagaaacgcgacaagtggggtgactatgggccgctggatcagatgc

SEQ ID NO: 385724 - DNA, 75 bp, synthetic construct
  source 1..75: mol_type = other DNA
taagcttaatgacgggcaaaataaaacaacaaccaatcagtttatcaatcagctcgggggggatatttataaatt

SEQ ID NO: 385725 - DNA, 75 bp, synthetic construct
  source 1..75: mol_type = other DNA
acacaggcacagggagtgaacgtaaagaatggcgggattatttttgatgctgctgtagtcaatgcagatgtgtcg

SEQ ID NO: 385726 - DNA, 75 bp, synthetic construct
  source 1..75: mol_type = other DNA
tgtcagtgaatggcggagtcgcatatcaggcaggaggccacgggagcaatactatctccggagcgctggggataa

SEQ ID NO: 385727 - DNA, 75 bp, synthetic construct
  source 1..75: mol_type = other DNA
ggagccactccagacaggtctgggttgtagcctcagagttggccagagggcatggttttgtccttgcaaaaaaga

SEQ ID NO: 385728 - DNA, 75 bp, synthetic construct
  source 1..75: mol_type = other DNA
catgtgtgaatttgttgacgacaaggcgtcggtattcccgttcgaggagctgcaacgctgcatggtcgacacgct

SEQ ID NO: 385729 - DNA, 75 bp, synthetic construct
  source 1..75: mol_type = other DNA
cggtatggctattcacaaaaaatggcggcagacctatttttccacgccatccagtctgacccacagtgcttatcc

SEQ ID NO: 385730 - DNA, 75 bp, synthetic construct
  source 1..75: mol_type = other DNA
gtggtaaccagaatgtttcttctggtggtaaagtcattgctgctgaagtgttctctggcggtaaacaaactgtct

SEQ ID NO: 385731 - DNA, 75 bp, synthetic construct
  source 1..75: mol_type = other DNA
tctggcccccggccagctgtgcgctgacgggcagtaccgccagatagtcaccgtggaagatgcggtgcgcggcgg

SEQ ID NO: 385732 - DNA, 75 bp, synthetic construct
  source 1..75: mol_type = other DNA
tgcggaaattgacgatctgaactggcgcagtgaagccgcccgacaacctttactaaaatggttaaacaatacgca

SEQ ID NO: 385733 - DNA, 75 bp, synthetic construct
  source 1..75: mol_type = other DNA
accgacattgcgcagtcatttatggcaatccgtcgcgccaccactgccagtggcaaccgcccgacctatgaagcc

SEQ ID NO: 385734 - DNA, 75 bp, synthetic construct
  source 1..75: mol_type = other DNA
cgtccgggagtttgtctacaaccccaatgttaaaaacgccctggtactcaaggcctatgacattatcagccaccg

SEQ ID NO: 385735 - DNA, 75 bp, synthetic construct
  source 1..75: mol_type = other DNA
ctgctgccgtatccgttctggtccggtgcgctgttcaaccgtggacgcaacaaagccgacaaggtggacatcgac

SEQ ID NO: 385736 - DNA, 75 bp, synthetic construct
  source 1..75: mol_type = other DNA
catgataaatgccggcggaaaccagtatatatacagcaatggtgaagccactgctgccattgttaataccagtgg

SEQ ID NO: 385737 - DNA, 75 bp, synthetic construct
  source 1..75: mol_type = other DNA
ccgaacgtgtggaaatcgacgtcagtcataacgccctagccggtgggcttctctgtgcggacggtcagtggcggc

SEQ ID NO: 385738 - DNA, 75 bp, synthetic construct
  source 1..75: mol_type = other DNA
cgccaaagaagtcgaggtggagctaaaaggcgatccgatggtgcttcctaacggagccacgctttacttcctcgg

SEQ ID NO: 385739 - DNA, 75 bp, synthetic construct
  source 1..75: mol_type = other DNA
cttccggtatggctattcacaagaaatggcggcagacctatttttccacaccatccagcctgacccacagtgctt

SEQ ID NO: 385740 - DNA, 75 bp, synthetic construct
  source 1..75: mol_type = other DNA
tgggcaacgatgcacgcactgtttaacgaaccgctgcagggcgaagccgccaataccagcaacattgtggagatt

SEQ ID NO: 385741 - DNA, 75 bp, synthetic construct
  source 1..75: mol_type = other DNA
agcaaaaacaagcggcgttggcgaaagaatataaagctcaggtgaagcagctcattgaaatgaaccgaatcacca

SEQ ID NO: 385742 - DNA, 75 bp, synthetic construct
  source 1..75: mol_type = other DNA
atatatcaataaatctggcgaactgaaaacggcggaaattaatgagccacgatttgaaaaagaaggtttattgat

SEQ ID NO: 385743 - DNA, 75 bp, synthetic construct
  source 1..75: mol_type = other DNA
atgatttacacaacaggcacgatagccgttagcggaaaaacagttaccggaacggggactgaattcaatgccgca

SEQ ID NO: 385744 - DNA, 75 bp, synthetic construct
  source 1..75: mol_type = other DNA
aagcgcagttgattaatggtcgtctggcgattgcccgcttgttggtcgataacaatagcgaaggtgaatacgcca

SEQ ID NO: 385745 - DNA, 75 bp, synthetic construct
  source 1..75: mol_type = other DNA
cttcactgacggcaatctgattaagaagatttttgtcgataagctcacacaagcgcagttgattaatggtcgtct

SEQ ID NO: 385746 - DNA, 75 bp, synthetic construct
  source 1..75: mol_type = other DNA
ttgccaatggcgatattggttttaacttcactgacggcaatctgattaagaagatttttgtcgataagctcacac

SEQ ID NO: 385747 - DNA, 75 bp, synthetic construct
  source 1..75: mol_type = other DNA
ctcataccggattacccgcaaactgtacggatattgtaccgccggaaatccccgaaggttttacagcaatgtttg

SEQ ID NO: 385748 - DNA, 75 bp, synthetic construct
  source 1..75: mol_type = other DNA
ttaaagttgtcgatctttcaatatcaaagaatggaacgctgaacgtgggtacaacgcatcctcacttactgacgt

SEQ ID NO: 385749 - DNA, 75 bp, synthetic construct
  source 1..75: mol_type = other DNA
cagaaaaattcacaatcgcaggagttgaatacaaggggaaaagaaactcagctgaaaaaaaagtgctaatccctt

SEQ ID NO: 385750 - DNA, 75 bp, synthetic construct
  source 1..75: mol_type = other DNA
aatggggtttggttcatcaggtgggtacgacggttttccgtattgtgatataggtggttcaaaccgacgaataaa

SEQ ID NO: 385751 - DNA, 75 bp, synthetic construct
  source 1..75: mol_type = other DNA
ttccagacaaaatcactatcgatggtattgtcagtgagggtaagatgagactactcgcacaccttcataccgact

SEQ ID NO: 385752 - DNA, 75 bp, synthetic construct
  source 1..75: mol_type = other DNA
caaaatctgttctattcctcacccgtcctatcatgaagagcaactcgctgaatacattgttggttgggcaaaaga

SEQ ID NO: 385753 - DNA, 75 bp, synthetic construct
  source 1..75: mol_type = other DNA
aaaaaaaccgcctttgcccgtaagctacgtgagccgaaatatggcgctgcggcggacaaaattcctgccgatcaa

SEQ ID NO: 385754 - DNA, 75 bp, synthetic construct
  source 1..75: mol_type = other DNA
tggctgtgcatagtgcaatggagtctcttaattatcacccgaacgccaacgcccgtgcgctggcgcaacagacca

SEQ ID NO: 385755 - DNA, 75 bp, synthetic construct
  source 1..75: mol_type = other DNA
tttgaaaaccgttgtattgctctggacgaccgttacggtgcctggctggcaacgcgtcatctaattcaacaaggt

SEQ ID NO: 385756 - DNA, 75 bp, synthetic construct
  source 1..75: mol_type = other DNA
tgtctttagtccgacgctggtacgtcgtcattcagtgtcaactccgtcgcggaggcaagtcatcatgcaaccagc

SEQ ID NO: 385757 - DNA, 75 bp, synthetic construct
  source 1..75: mol_type = other DNA
gtgggtaagcatcactggaaagtagaaaaacagcctgagtggtatgtgaaagctgtcagaaaaactattgcaaag

SEQ ID NO: 385758 - DNA, 75 bp, synthetic construct
  source 1..75: mol_type = other DNA
tcaggcgtcggagtttatccctgcacagggcgtggatgaaaaaacgctggctgacgccgcacaactggcttcgct

SEQ ID NO: 385759 - DNA, 75 bp, synthetic construct
  source 1..75: mol_type = other DNA
attgccctgaccatcgtctttttactggcaaccgccacgctgtggccattttccgcgtggggcgataatgcagtc

SEQ ID NO: 385760 - DNA, 75 bp, synthetic construct
  source 1..75: mol_type = other DNA
gtatcgtaggtgcttacggtgcagcagaccgtaccgacgcccaggaagccgaattccgcggcagggtaaaaaagc

SEQ ID NO: 385761 - DNA, 75 bp, synthetic construct
  source 1..75: mol_type = other DNA
gtctgaaatttgctgatgctggctcaatcgattacggtcgtaactatggtgttgtttatgatgcactgggttaca

SEQ ID NO: 385762 - DNA, 75 bp, synthetic construct
  source 1..75: mol_type = other DNA
ttgatgctggagtggtgtcgttctgccgtcagtatctgcctaaccataacgccggtagctacgacgatcagcgtt

SEQ ID NO: 385763 - DNA, 75 bp, synthetic construct
  source 1..75: mol_type = other DNA
gaggaagaaatttcactgcggtagcctgttataacgattcaatggcggcgggtgcgatgggcgttctcaatgata

SEQ ID NO: 385764 - DNA, 75 bp, synthetic construct
  source 1..75: mol_type = other DNA
gaactggctttggcactggcgaacaatcacccgcttcctgaaattaccaacgtctttagtccaacgctggtacgt

SEQ ID NO: 385765 - DNA, 75 bp, synthetic construct
  source 1..75: mol_type = other DNA
gacgcgtcatttgattcaacaaggccatactcgcattggttatctctgctctaaccactctatttctgacgccga

SEQ ID NO: 385766 - DNA, 75 bp, synthetic construct
  source 1..75: mol_type = other DNA
cctgattctcccttggctagttatgttaataaccatattagggactatctggatatggttttatctagttgtgat

SEQ ID NO: 385767 - DNA, 75 bp, synthetic construct
  source 1..75: mol_type = other DNA
tacggaattcaaccgtctgctggggctggggaatgaactgcttcagcagcggcagggactggtgaatgtgccgtt

SEQ ID NO: 385768 - DNA, 75 bp, synthetic construct
  source 1..75: mol_type = other DNA
cagattgccacggcgcgggcaagggcagccgtgtaccgtgctcagcaggccgtggcggcagcccgcgggacggag

SEQ ID NO: 385769 - DNA, 75 bp, synthetic construct
  source 1..75: mol_type = other DNA
aagccgaactgctggggtacgggcagggagaacgagccagggaacgcatgcgggagttgcagcagatccgcgaca

SEQ ID NO: 385770 - DNA, 75 bp, synthetic construct
  source 1..75: mol_type = other DNA
ccaaaagtggcaaacgacaatgatgcctttacgctgacggcaacggttaaggatcaatacggcaaccttctgcct

SEQ ID NO: 385771 - DNA, 75 bp, synthetic construct
  source 1..75: mol_type = other DNA
gcgctcagcgccgaagagcagaatgaagatgatccgtatgccgacttcaaagtgcctgatgatttgatgtggtaa

SEQ ID NO: 385772 - DNA, 75 bp, synthetic construct
  source 1..75: mol_type = other DNA
gtccttttatgccgaatcggatgtgcagcgtgcggactggcagaagggctgcaggagggattcagtaacgtgggt

SEQ ID NO: 385773 - DNA, 75 bp, synthetic construct
  source 1..75: mol_type = other DNA
cagagttgcaggtggtttcagtgactgccggaacctatgagatcacggcgtcggcaggaaatgaccagccttcga

SEQ ID NO: 385774 - DNA, 75 bp, synthetic construct
  source 1..75: mol_type = other DNA
gtggtttcagtgactgccggaacgtatgagatcacggcatcggcggggaatagccagccttcggatacgcagact

SEQ ID NO: 385775 - DNA, 75 bp, synthetic construct
  source 1..75: mol_type = other DNA
acattgagcttatgtcaacggttgcgggagaacacaatatttccgcttcggtgaatggtgctcagaagacggtca

SEQ ID NO: 385776 - DNA, 75 bp, synthetic construct
  source 1..75: mol_type = other DNA
aacgtgcggactggcagaaagggctgcaggaggggctcagtaactgggtggacagtgcatccgattacgcctctc

SEQ ID NO: 385777 - DNA, 75 bp, synthetic construct
  source 1..75: mol_type = other DNA
gcgctgacagagcagaacaggctgattgatgagcacgccagccgggtgaaatccctgcaggaaaaaatcgccggg

SEQ ID NO: 385778 - DNA, 75 bp, synthetic construct
  source 1..75: mol_type = other DNA
gatgcacatggcaacgctatcagtggtctttccctgtcggcaagcctgacgggtgctgcgtctgaaggggcgact

SEQ ID NO: 385779 - DNA, 75 bp, synthetic construct
  source 1..75: mol_type = other DNA
atggttttttatatactttctgaagtgtgctgcgtggcttttcaacaggtcgaggtttatcatattgaaataatg

SEQ ID NO: 385780 - DNA, 75 bp, synthetic construct
  source 1..75: mol_type = other DNA
cgcgatattttaccttctgcggatgtggaggatgtcccggtggatgatgccgcattaatgatggcttcagcgggg

SEQ ID NO: 385781 - DNA, 75 bp, synthetic construct
  source 1..75: mol_type = other DNA
gactggcgcgccatgcttgccgggatgacatccaccgaatatgccgactggcgacgtttttaccgcacgcattat

SEQ ID NO: 385782 - DNA, 75 bp, synthetic construct
  source 1..75: mol_type = other DNA
aagcggcaggacttgccggaggcgtacggtttggtggggacggagggcgtgagattttatcgtctgcggatgtgg

SEQ ID NO: 385783 - DNA, 75 bp, synthetic construct
  source 1..75: mol_type = other DNA
ttccccagacacattttaaagtaaagaaaaaaataaaaactaacaacattgtgataaacaccatctttacggtgt

SEQ ID NO: 385784 - DNA, 75 bp, synthetic construct
  source 1..75: mol_type = other DNA
gatgtacgccgtactcagcctgttttttggcgatccggatatgcatccggcggatttcagtctgcttgcgccagt

SEQ ID NO: 385785 - DNA, 75 bp, synthetic construct
  source 1..75: mol_type = other DNA
tacatcattgcgcagcaggacaataacagtcaggctatgcagtggctgacccggctacgggataactctcatcgc

SEQ ID NO: 385786 - DNA, 75 bp, synthetic construct
  source 1..75: mol_type = other DNA
aacctgaccgcattcacacctgattttaaaatcaccaagaccatcgttaacggtaacgaggtcgtaactcaataa

SEQ ID NO: 385787 - DNA, 75 bp, synthetic construct
  source 1..75: mol_type = other DNA
ttcgacggcgagctgaattttgccctcagactggcgcgagagatggggaggcctgactggcgcgccatgcttgcc

SEQ ID NO: 385788 - DNA, 75 bp, synthetic construct
  source 1..75: mol_type = other DNA
ctgactggcgcgccatgcttgccgggatgacatccaccgaatatgccgactggcgacatttttaccgcacgcatt

SEQ ID NO: 385789 - DNA, 75 bp, synthetic construct
  source 1..75: mol_type = other DNA
cgcacgcattattttcaggatacccaactggatatgcatttttccgggctgacgtacgccgtactcagcctgttt

SEQ ID NO: 385790 - DNA, 75 bp, synthetic construct
  source 1..75: mol_type = other DNA
taccgcacgcattattttcacgatacccagctggatatgcatttttccgggctgacgtacgccgtactcagcctg

SEQ ID NO: 385791 - DNA, 75 bp, synthetic construct
  source 1..75: mol_type = other DNA
ggctgaacctggtgaaaaaaggcactcataacccgaacttcgtgcgtaaacccgatgctgcgctggttgatttcc

SEQ ID NO: 385792 - DNA, 75 bp, synthetic construct
  source 1..75: mol_type = other DNA
cagagcgtgagctggccctgtccggactgaacggggacgaaaaagagcggggccgcctggggtatgcggcggatg

SEQ ID NO: 385793 - DNA, 75 bp, synthetic construct
  source 1..75: mol_type = other DNA
cagagcgtgagctggccctgtcccgactgaagggggacgaaaaagagcggggccgcctggggtatgcggcggatg

SEQ ID NO: 385794 - DNA, 75 bp, synthetic construct
  source 1..75: mol_type = other DNA
cagagcgtgagctggccctgtcccgactgaacggggacgaaaaagagcggggccggctggggtatgcggcggatg

SEQ ID NO: 385795 - DNA, 75 bp, synthetic construct
  source 1..75: mol_type = other DNA
actgaacggggaggaaaaagagcgggcccgactggggtatgcggcggatgacctaggttttgtgggggatccgta

SEQ ID NO: 385796 - DNA, 75 bp, synthetic construct
  source 1..75: mol_type = other DNA
actgaaaggggaggaaaaagagcgggcccgcctggggtatgcggcggatgacctaggttttgtgggggatccgta

SEQ ID NO: 385797 - DNA, 75 bp, synthetic construct
  source 1..75: mol_type = other DNA
actgaaaggggaggaaaaagagcgggcccgactggggtatgcggcggatgacctcggttttgtgggggatccgta

SEQ ID NO: 385798 - DNA, 75 bp, synthetic construct
  source 1..75: mol_type = other DNA
gacgcagattgccacggcgcgggcaagagcagccgtgtaccgtgctcagcaggcagtggcggcagcccgcgggac

SEQ ID NO: 385799 - DNA, 75 bp, synthetic construct
  source 1..75: mol_type = other DNA
tacgcagattgccacggcgcgggcaagggcagccgtgtaccgtgcgcagcaggcagtggcggcagcccgcgggac

SEQ ID NO: 385800 - DNA, 75 bp, synthetic construct
  source 1..75: mol_type = other DNA
tacgcagattgccacggcgcgggcaagcgcagccgtgtaccgtgcccagcaggcagtggcggcagcccgcgggac

SEQ ID NO: 385801 - DNA, 75 bp, synthetic construct
  source 1..75: mol_type = other DNA
tgaacagaaatattgctgccagaagcgcagcccagaatgtgctgaacagtacaacggcggtgggctcacgtctga

SEQ ID NO: 385802 - DNA, 75 bp, synthetic construct
  source 1..75: mol_type = other DNA
tgaacagaaatattgctgccagaatcgctgcccagaatgtgctgaacagtacaacggcggtgggctcacgtctga

SEQ ID NO: 385803 - DNA, 75 bp, synthetic construct
  source 1..75: mol_type = other DNA
tgaacagaaatattgctgccagaaacgcggcccagaatgtgctgaacagtacaacggcggtgggctcacgtctga

SEQ ID NO: 385804 - DNA, 75 bp, synthetic construct
  source 1..75: mol_type = other DNA
actgaagggggaggaaaaagagcgggcccggctggggtatgcggcggatgacctgggttttgtgggggatccgta

SEQ ID NO: 385805 - DNA, 75 bp, synthetic construct
  source 1..75: mol_type = other DNA
aaagcggaagacagtttttcccggctgctgaagcagcagaaggcgcaactggcactggtggggcagaatacagag

SEQ ID NO: 385806 - DNA, 75 bp, synthetic construct
  source 1..75: mol_type = other DNA
agcattggtgactggctgggcggggcggtggccaatgcaaaaggcggcgtgtatacctcggcaaacctgagtgcg

SEQ ID NO: 385807 - DNA, 75 bp, synthetic construct
  source 1..75: mol_type = other DNA
cagtatctgagcgaacgccttaaggaccaggcagccttttatgccgaatcggatgtgcagcgtgcggactggcag

SEQ ID NO: 385808 - DNA, 75 bp, synthetic construct
  source 1..75: mol_type = other DNA
agtctgcgacggaaaagttaaaagccctgaatgaagaattgctgacaccggaagaggcattactcagtaaaacaa

SEQ ID NO: 385809 - DNA, 75 bp, synthetic construct
  source 1..75: mol_type = other DNA
cggcgtgcactggcagaagtgacggagcagataaatacagctaaatcttcggcactgaatatggcgggggcattt

SEQ ID NO: 385810 - DNA, 75 bp, synthetic construct
  source 1..75: mol_type = other DNA
ggtactttggcaatatggcctccggagcgatgtctgccacggcaggacttgtgactgctgcacgtaatgaagttg

SEQ ID NO: 385811 - DNA, 75 bp, synthetic construct
  source 1..75: mol_type = other DNA
atgaacgctgccatcgttaacgggctgaagtcactttccaaaagcatgtccggtgccggaggatggcttggtacg

SEQ ID NO: 385812 - DNA, 75 bp, synthetic construct
  source 1..75: mol_type = other DNA
aacaaaagagagcgctggtaatattcttacggtggcaagttacaccggaaccccaggaagtgttttgtcactcgg

SEQ ID NO: 385813 - DNA, 75 bp, synthetic construct
  source 1..75: mol_type = other DNA
cggatcattcgcgcactggctgcaggcatgggcgtggcccgtaaggatctgaaggcgatggcggacgatggtcaa

SEQ ID NO: 385814 - DNA, 75 bp, synthetic construct
  source 1..75: mol_type = other DNA
gggcggcggatggctcgctgggtgtgcgagcggtgggcagtatgaacggcagtgcgggtctggtgtattccccgg

SEQ ID NO: 385815 - DNA, 75 bp, synthetic construct
  source 1..75: mol_type = other DNA
gcgctgacagagcagaaccggctgattgatgaacaggccagccgggtgaaatccctgcaggaaaaaatcgcagga

SEQ ID NO: 385816 - DNA, 75 bp, synthetic construct
  source 1..75: mol_type = other DNA
aacgcgcagtatctgagcgaacgccttaaggaccaggcagccttttatgccgaatcggatgcgcagcgtgcggac

SEQ ID NO: 385817 - DNA, 75 bp, synthetic construct
  source 1..75: mol_type = other DNA
tacgcagattgccacggcgcgggcaagagcagccgtgtaccgtgcacagcaggcagtggcggcagcccgcgggac

SEQ ID NO: 385818 - DNA, 75 bp, synthetic construct
  source 1..75: mol_type = other DNA
tgttactgcacctggcattaatgggaagatgagtgagataaatgctgcatttggtttagttcaattaaaacatat

SEQ ID NO: 385819 - DNA, 75 bp, synthetic construct
  source 1..75: mol_type = other DNA
ttatcaattcttagtttccatgcgacgaaagtcttcaatacatttgaaggtggggcaataattagccctgatgct

SEQ ID NO: 385820 - DNA, 75 bp, synthetic construct
  source 1..75: mol_type = other DNA
gatgtggaataatctaaatccagtatttgtcgatgtcagtagagatacatttaatatcaatccgtctcaaattga

SEQ ID NO: 385821 - DNA, 75 bp, synthetic construct
  source 1..75: mol_type = other DNA
aaattcctctgtgtaaacgcattaaactggtcatctcactttttaaaggtgttatgaccatcctctgtggttaca

SEQ ID NO: 385822 - DNA, 75 bp, synthetic construct
  source 1..75: mol_type = other DNA
ttaaatttctgggtcaacgactgccctttaaacctgtacccacagagtttgcagatctcaaagttcgcgatgaaa

SEQ ID NO: 385823 - DNA, 75 bp, synthetic construct
  source 1..75: mol_type = other DNA
atgcattctcaaatctgggttgtgagcacgctgcttatcagcatcgtgttaattgtactgaccatcgtgaagttc

SEQ ID NO: 385824 - DNA, 75 bp, synthetic construct
  source 1..75: mol_type = other DNA
cctcgatcctttcaggtaaacgtgctttgacaattccacacatctgcaaactagcagaatatttccgggtaagtc

SEQ ID NO: 385825 - DNA, 75 bp, synthetic construct
  source 1..75: mol_type = other DNA
gtctgcatctactgacaggggagttaccctggcttgaaaagatccagaacgaccgtgattataaagatgcactga

SEQ ID NO: 385826 - DNA, 75 bp, synthetic construct
  source 1..75: mol_type = other DNA
atcgacagtcacgacgacaaagcctggcgcgacacgctgttaaaagtggcggccattttatgtgaacgccaaccg

SEQ ID NO: 385827 - DNA, 75 bp, synthetic construct
  source 1..75: mol_type = other DNA
cgcaaccatttttacctgaactaagagagtttattccctatctggaaaaaatatgggaaaataaatggttaacaa

SEQ ID NO: 385828 - DNA, 75 bp, synthetic construct
  source 1..75: mol_type = other DNA
atggaacaatcttacgccagtatttgtcgatattaaagaagggggatttaatattgatcctaaaaaaatagaaga

SEQ ID NO: 385829 - DNA, 75 bp, synthetic construct
  source 1..75: mol_type = other DNA
gttaaacatatatctttatttacaaatgcgacaattgctcttgtaacagcacttcaagccctaagagtgaaaggt

SEQ ID NO: 385830 - DNA, 75 bp, synthetic construct
  source 1..75: mol_type = other DNA
gccgtagcagcggtatttatgttgtccgtattgcagttcccgcccgataccgtctctacacgggacagcgtgaga

SEQ ID NO: 385831 - DNA, 75 bp, synthetic construct
  source 1..75: mol_type = other DNA
gttgatatcgatgccaatcagccgctggagcaggtgctgattgatgcggaaaaagcgattagggattttatgacg

SEQ ID NO: 385832 - DNA, 75 bp, synthetic construct
  source 1..75: mol_type = other DNA
aacgggaatcgctggcgaggaagattgccataacgccacagttaacctttggtggtgcacaactggttgatatcg

SEQ ID NO: 385833 - DNA, 75 bp, synthetic construct
  source 1..75: mol_type = other DNA
tgctgaatggtattgcaggcaatattgacactgtggcaaccgctgccggtgctctggttgccgtcggggtagccc

SEQ ID NO: 385834 - DNA, 75 bp, synthetic construct
  source 1..75: mol_type = other DNA
aacgcagattgccacggcgcgggcaagggcagccgtgtaccgtgctcagcaggcagtggcggcagcccgcgggac

SEQ ID NO: 385835 - DNA, 75 bp, synthetic construct
  source 1..75: mol_type = other DNA
gaaacggtttccagtagtatcacaaaggtggaaaacgcctttatggcctgggtgggcggtgcgaatgaggccagc

SEQ ID NO: 385836 - DNA, 75 bp, synthetic construct
  source 1..75: mol_type = other DNA
cccgaccataaacgggaatcgctggcaaggaagattgccataacgccacagttaacctttggcggtgcacaactg

SEQ ID NO: 385837 - DNA, 75 bp, synthetic construct
  source 1..75: mol_type = other DNA
cgctgtagccgctaataaccagctacaaacggaaaagggcgctcatgaatcaatttcattgctcaaaaaaggact

SEQ ID NO: 385838 - DNA, 75 bp, synthetic construct
  source 1..75: mol_type = other DNA
gtggcgcagcgactacttgatacgaatatcccgcttttttggcttgctgatgggcgtcctgcctactatgtagaa

SEQ ID NO: 385839 - DNA, 75 bp, synthetic construct
  source 1..75: mol_type = other DNA
cgatagtgctattaacattgggatcagaggttctctgagcggttatatccagcccttggttgcctcacgtatatt

SEQ ID NO: 385840 - DNA, 75 bp, synthetic construct
  source 1..75: mol_type = other DNA
gtttattctcccgtgtatcacatcagcattcagaatcaagggagcaatggcgagatagatgcgcgctcagccagg

SEQ ID NO: 385841 - DNA, 75 bp, synthetic construct
  source 1..75: mol_type = other DNA
tgattaaacagcaaaaagaacagatagcactggcagggcagaatactgaactggctaagatgaaatatcaggtca

SEQ ID NO: 385842 - DNA, 75 bp, synthetic construct
  source 1..75: mol_type = other DNA
aaccaatgcctatatctatttacaagccatcgaaatctcaaacaaaaaaccgccggtagcggttgtggagttcga

SEQ ID NO: 385843 - DNA, 75 bp, synthetic construct
  source 1..75: mol_type = other DNA
ggtcactctggtgttaccattctgccgctgctgtcacaggttcctggcgttagttttaccgagcaggaagtggct

SEQ ID NO: 385844 - DNA, 75 bp, synthetic construct
  source 1..75: mol_type = other DNA
ggctgtcgatctgagccatatccctactgctgtgaaaatcaaaggtttttctggtgaagatgcgactccggcgct

SEQ ID NO: 385845 - DNA, 75 bp, synthetic construct
  source 1..75: mol_type = other DNA
tgtaggaagaatttcttttggaagcattaatgcaattctgggaagcgtggcattaatactgaattgtcatcatca

SEQ ID NO: 385846 - DNA, 75 bp, synthetic construct
  source 1..75: mol_type = other DNA
ttctggatcccgaattttcaggtactgcgtaaggtggcatcaggtatggcctcacagagtcacctgcgctcgacc

SEQ ID NO: 385847 - DNA, 75 bp, synthetic construct
  source 1..75: mol_type = other DNA
acaactgtttccatgacaacggacagcagttataccacgctgcaacgtgtcgcagcgctggaacgttccggaatg

SEQ ID NO: 385848 - DNA, 75 bp, synthetic construct
  source 1..75: mol_type = other DNA
gatctgaccaaacgtatccagaacgcgggcacggaagtggttgaagcaaaagccggtggcgggtctgcaaccctg

SEQ ID NO: 385849 - DNA, 75 bp, synthetic construct
  source 1..75: mol_type = other DNA
cggtcaccgggttaacgggacggacgaggaagcactggaagtcaaaaagtacgcaacgacgcttccttatattaa

SEQ ID NO: 385850 - DNA, 75 bp, synthetic construct
  source 1..75: mol_type = other DNA
tcaatcttcaggcaggggaaaacgtcaccattttcaacggacatcccgtggccggcgcatcaatgtatattccgg

SEQ ID NO: 385851 - DNA, 75 bp, synthetic construct
  source 1..75: mol_type = other DNA
gagcagaaaaataatgagttgctgagacagtaccagaccggagaaatcgaagaagccctgtggaaacaggaaaaa

SEQ ID NO: 385852 - DNA, 75 bp, synthetic construct
  source 1..75: mol_type = other DNA
ttcacatgttacctttccaggtacaacagcggttacattgtctggtgacagtagctataccacgttacagcgtgt

SEQ ID NO: 385853 - DNA, 75 bp, synthetic construct
  source 1..75: mol_type = other DNA
cgacagcttcacactcatcagtccgatgatgcgcaggctgcacgatgaatgcgccagccaggtgctcgacatgcc

SEQ ID NO: 385854 - DNA, 75 bp, synthetic construct
  source 1..75: mol_type = other DNA
gtcgacccgattccgctggcagaactgcggcatctggtgccccgggaaagtgaacgccgcattccgcgaccggag

SEQ ID NO: 385855 - DNA, 75 bp, synthetic construct
  source 1..75: mol_type = other DNA
ttgacctgctcgggcggcagattgagcgactggcgcgcgttaaccgctacagccagaccggcaacgaggtcgacc

SEQ ID NO: 385856 - DNA, 75 bp, synthetic construct
  source 1..75: mol_type = other DNA
gatatggccactggcccttcctgtctgtctgctgttcaccctggtcacctccgtgatattcatgctgcaacgctg

SEQ ID NO: 385857 - DNA, 75 bp, synthetic construct
  source 1..75: mol_type = other DNA
agaaaagttgcgacagtgatccggtggtcatcaaccgctatatttccgttgaagccccccggctggagcgtctcc

SEQ ID NO: 385858 - DNA, 75 bp, synthetic construct
  source 1..75: mol_type = other DNA
ctgcagcgccacgatggtgtgatgggtgagtcctgggtggacggtaaccagatcaccatccagatggaaagcaaa

SEQ ID NO: 385859 - DNA, 75 bp, synthetic construct
  source 1..75: mol_type = other DNA
gacttccgcgcccaggctgacgccatcaaaaaactgactgaacagtacaacgtaacatacatcggtatcgactca

SEQ ID NO: 385860 - DNA, 75 bp, synthetic construct
  source 1..75: mol_type = other DNA
ctcaatttttatcgggaacacgaaatctgggagaaataaaaacaggtattgaggggcagatttctcaaaatctga

SEQ ID NO: 385861 - DNA, 75 bp, synthetic construct
  source 1..75: mol_type = other DNA
atgaacaccacactgacacccgcagatctcgatccccgtcggcaggccatgctgctgtactttcagggatatcgc

SEQ ID NO: 385862 - DNA, 75 bp, synthetic construct
  source 1..75: mol_type = other DNA
atgaagtgtatattatttaaatgggtactgtgcctgttactgggcttttcttcggtatcctattcccgggaattt

SEQ ID NO: 385863 - DNA, 75 bp, synthetic construct
  source 1..75: mol_type = other DNA
actggcgacaggcccgttataaaaataaacaatacattatgggaaagtaatacagcagcagcgtttctgaacaga

SEQ ID NO: 385864 - DNA, 75 bp, synthetic construct
  source 1..75: mol_type = other DNA
aagaactttttcagcgacgaggctatcgagaaactggaggaactatttttcgaccagtctttcgagtaccagttg

SEQ ID NO: 385865 - DNA, 75 bp, synthetic construct
  source 1..75: mol_type = other DNA
acaacctttgccgaaaccttcggggacgtctttgcggcagatgccggcgacatcgatattcgcgacagtattcac

SEQ ID NO: 385866 - DNA, 75 bp, synthetic construct
  source 1..75: mol_type = other DNA
tcgggaaactcgaagagattttcctcgaacagtctttcgactatcagctcgagtggtggcgcgcggggctggcgc

SEQ ID NO: 385867 - DNA, 75 bp, synthetic construct
  source 1..75: mol_type = other DNA
tacagcgttgcatggtcgacagcctcgagaaatgggaggactacgcgccattcgccgaccggccattcggtcacc

SEQ ID NO: 385868 - DNA, 75 bp, synthetic construct
  source 1..75: mol_type = other DNA
attccagtcagagatctcccgggcttcgcgtatggggcaggattactaccgcaccatgcagaacggaggccgaca

SEQ ID NO: 385869 - DNA, 75 bp, synthetic construct
  source 1..75: mol_type = other DNA
atgcagacgcaagggcatcaaatgacgcagagctgctggggtacgggcagggtgagcggggccgtgaacggatgc

SEQ ID NO: 385870 - DNA, 75 bp, synthetic construct
  source 1..75: mol_type = other DNA
gcactggcgggtcagaatacagagctggcgaagctgaagtaccagactgcgcagggcgaactgaaaaccctgacg

SEQ ID NO: 385871 - DNA, 75 bp, synthetic construct
  source 1..75: mol_type = other DNA
cggagatgctgaacggaaataaagtggaatggcgcagctgggcagcatcaatcctgcaggaaatatcaaaagttc

SEQ ID NO: 385872 - DNA, 75 bp, synthetic construct
  source 1..75: mol_type = other DNA
aaaacgcctttatggcctgggtgggtggcgcgaatgatgccagtggtgtgactaaaacgctctccggcgtgctga

SEQ ID NO: 385873 - DNA, 75 bp, synthetic construct
  source 1..75: mol_type = other DNA
gcaggaggggctcagtaactgggtggacaatgcatccgattacgcctctcaggcagcacagctggcaacggaggg

SEQ ID NO: 385874 - DNA, 75 bp, synthetic construct
  source 1..75: mol_type = other DNA
agcagcagaaggcgcaactggcactggccggtcagaacacggagctggcgaagctgaagtaccagacagcgctgg

SEQ ID NO: 385875 - DNA, 75 bp, synthetic construct
  source 1..75: mol_type = other DNA
accagaatcaggagcaggccagggagtctgcgcgccagtatgcactgacgattgatgaaatcgcgcataaaacgc

SEQ ID NO: 385876 - DNA, 75 bp, synthetic construct
  source 1..75: mol_type = other DNA
gcttgattacgccattctccgccctggcggtctgcttgatggtgcggcaacgggcaaagcacaacggatacaaaa

SEQ ID NO: 385877 - DNA, 75 bp, synthetic construct
  source 1..75: mol_type = other DNA
atgacgccgtggctactctttggcgcaggcggaaagggagttggagccagaacgcttgcactggcgctggcggaa

SEQ ID NO: 385878 - DNA, 75 bp, synthetic construct
  source 1..75: mol_type = other DNA
cagggctgaaaatctccggtgccagtacggcagaggcgggctcggtgatcacccagttcagccaggcgctggcac

SEQ ID NO: 385879 - DNA, 75 bp, synthetic construct
  source 1..75: mol_type = other DNA
gccctggcagaactgaacagccagttgacggaaattcgcggttctgctgtcggagtggctggcgcatttgccggt

SEQ ID NO: 385880 - DNA, 75 bp, synthetic construct
  source 1..75: mol_type = other DNA
aaagcgcagtccattcaggatgtgcttgccggactggaagagcgccgtgttgtgttaattcgtcagcaggcagca

SEQ ID NO: 385881 - DNA, 75 bp, synthetic construct
  source 1..75: mol_type = other DNA
aaaaaattcgtgagcaaattgctgcttatgaaagcagcctggcggacagtaacgccagtgtcagggcatcaaatg

SEQ ID NO: 385882 - DNA, 75 bp, synthetic construct
  source 1..75: mol_type = other DNA
caccaatcgtcaacaccgctacctcgctgaaaccggtgcggcagctgcttgatgcggcgttaaaaatcgatcatc

SEQ ID NO: 385883 - DNA, 75 bp, synthetic construct
  source 1..75: mol_type = other DNA
gattcccagtgctgcggtattgcggtacttacggtttcaaaaaagagaactaccccacctcacaagccatcggtg

SEQ ID NO: 385884 - DNA, 75 bp, synthetic construct
  source 1..75: mol_type = other DNA
cggctgcttcgtcaattacaaccatccacaactgggtaaagatttaattaaagtactcaacgcgatgggaacggg

SEQ ID NO: 385885 - DNA, 75 bp, synthetic construct
  source 1..75: mol_type = other DNA
aagtgctcaacgcaatgggtaccggtgtacaactgctcagcaaagaaaaaatgctgcggcgtaccgctaatcgcc

SEQ ID NO: 385886 - DNA, 75 bp, synthetic construct
  source 1..75: mol_type = other DNA
ttttgtcctgagccacaccgatctgatgggcagcgtttctacgccattcgcaccaataataaatacggccacctc

SEQ ID NO: 385887 - DNA, 75 bp, synthetic construct
  source 1..75: mol_type = other DNA
cgactgcgaaacctgcaaatggcagattgagatgtccacgagccttcgctgcgaacatccgattacgctactggc

SEQ ID NO: 385888 - DNA, 75 bp, synthetic construct
  source 1..75: mol_type = other DNA
cgccccactccgtcgaagcggaacaatcggtgctcggcgggctgatgctggataacgatcgctgggatgacgtcg

SEQ ID NO: 385889 - DNA, 75 bp, synthetic construct
  source 1..75: mol_type = other DNA
tatcagtatgttctggcgaacccgggctggacgaccggtgacggattcatgataaaccatctgacctcggtgaag

SEQ ID NO: 385890 - DNA, 75 bp, synthetic construct
  source 1..75: mol_type = other DNA
cggtgccggaggatggcttggtacggtcggcgactggctttccggtgcagtggcaaacgcaaaaggtggtgttta

SEQ ID NO: 385891 - DNA, 75 bp, synthetic construct
  source 1..75: mol_type = other DNA
gctgctcgacgactccgggatcctcaccccgtctattttacgcagtcgggccagacgatcgctgcgccagtacgg

SEQ ID NO: 385892 - DNA, 75 bp, synthetic construct
  source 1..75: mol_type = other DNA
cgccccactccgtcgaggcggaacaatcggtacttggtggactgatgctggataacgatcgctgggatgacgtcg

SEQ ID NO: 385893 - DNA, 75 bp, synthetic construct
  source 1..75: mol_type = other DNA
ccgataggcacagtgcgaacccgatttattagcgatcaaacccgcttcgaatcgctcagccagcagggagtggag

SEQ ID NO: 385894 - DNA, 75 bp, synthetic construct
  source 1..75: mol_type = other DNA
gctgggcgacaatcccgccgtggtgccgctggtcacgaaggatgaaccggaaatcttcgcggaagatgaagcggg

SEQ ID NO: 385895 - DNA, 75 bp, synthetic construct
  source 1..75: mol_type = other DNA
agcgaaagagaaccgcctgtcacaaagtaaattcagatgccaggtatgtggatatacagcgaacgccgatgtaaa

SEQ ID NO: 385896 - DNA, 75 bp, synthetic construct
  source 1..75: mol_type = other DNA
cgggtacggtggatattacggtaagcggcaccaacagcgccggaacaacctccaccattacccatccggtcaccg

SEQ ID NO: 385897 - DNA, 75 bp, synthetic construct
  source 1..75: mol_type = other DNA
agcaatgggtgagcgacagcggtcaggcgcgtgaggcgatgcggttcacccgtaaacaactgcgtgacgcggtgc

SEQ ID NO: 385898 - DNA, 75 bp, synthetic construct
  source 1..75: mol_type = other DNA
aggtgtcggagccggaacgggcgttcagtctgttgctggatggcgcggttccggtggctgacgtcgtgggtgcgg

SEQ ID NO: 385899 - DNA, 75 bp, synthetic construct
  source 1..75: mol_type = other DNA
caacctgacggcggcgtatctggcggcggtgtcgcgcaaactggacaggccgctggcggtgctgatccagtcatc

SEQ ID NO: 385900 - DNA, 75 bp, synthetic construct
  source 1..75: mol_type = other DNA
cgggcaggcgagaagatccgcgcccggcttaagggtgtgggtgtgctgcgtgagtccgggcatgagcacttcacc

SEQ ID NO: 385901 - DNA, 75 bp, synthetic construct
  source 1..75: mol_type = other DNA
acagcggcaatgtgcaggcagacgggagctggagcgtcagcgtaccaaccggcgatttagctagccttaccgcca

SEQ ID NO: 385902 - DNA, 75 bp, synthetic construct
  source 1..75: mol_type = other DNA
ggcgaagcggctttgccaaccattacgccgaccgacttgcgccacaacgtgggccattcactggctatgcaaggg

SEQ ID NO: 385903 - DNA, 75 bp, synthetic construct
  source 1..75: mol_type = other DNA
atcaccgttatcttcggcggcaaaagctacaccaccacggttgccgcggataatacctgggggctgacgatccct

SEQ ID NO: 385904 - DNA, 75 bp, synthetic construct
  source 1..75: mol_type = other DNA
ccggagaacgccgccccggagatgacgccagaagatcgggaggcggcgctggaactgctgcgcgacgagtgtctt

SEQ ID NO: 385905 - DNA, 75 bp, synthetic construct
  source 1..75: mol_type = other DNA
gggtcgctggttgtgccggtgatggatctgaacggtcagatccgcgagatgtacgggcgcaagatcggtaatgat

SEQ ID NO: 385906 - DNA, 75 bp, synthetic construct
  source 1..75: mol_type = other DNA
atcgcctgtcacaaagtaaattcagatgccaggtatgtggatatacagcgaacgccgatgtaaatggcgctcgta

SEQ ID NO: 385907 - DNA, 75 bp, synthetic construct
  source 1..75: mol_type = other DNA
gagctggcacgtcggttacaactgaaccaaccaacgctacacaggctggtatcaggagaggtgaaagatccgaaa

SEQ ID NO: 385908 - DNA, 75 bp, synthetic construct
  source 1..75: mol_type = other DNA
gacgaacttgaacaggaactggaatcactgattcaacgggacggcacgccctccgggaatattcggttatctgcc

SEQ ID NO: 385909 - DNA, 75 bp, synthetic construct
  source 1..75: mol_type = other DNA
ctcacgatctacaaaatcatcagtgtatcaatatgcgtttgccaactgccggtggaatttatcactgggagtttg

SEQ ID NO: 385910 - DNA, 75 bp, synthetic construct
  source 1..75: mol_type = other DNA
ataagacagaccaatctgtagttaagcaacttttgcccgagagcttggaggggttgatggaggtgctgccgacgc

SEQ ID NO: 385911 - DNA, 75 bp, synthetic construct
  source 1..75: mol_type = other DNA
atggagggtggggaaggttgtggatcgaaggttgtaaaaactctggccactccgctttatgttctggagacaaga

SEQ ID NO: 385912 - DNA, 75 bp, synthetic construct
  source 1..75: mol_type = other DNA
atggagaaagaggacgcgacgggtataaaaacgtatatttctcttaggtttaataaagtacctgttttgggaaac

SEQ ID NO: 385913 - DNA, 75 bp, synthetic construct
  source 1..75: mol_type = other DNA
ctgacccgcacgacccggagtgtggcccccacagaagccggtgagagaataattgcctgccttgaaccgcgtatt

SEQ ID NO: 385914 - DNA, 75 bp, synthetic construct
  source 1..75: mol_type = other DNA
tgggaataaccgacgtgcgtgtggaacggctgcatgacattagcgaggcagatgcgaaagcggaaggcgcatttc

SEQ ID NO: 385915 - DNA, 75 bp, synthetic construct
  source 1..75: mol_type = other DNA
tggtgatcgcatatgggtacgtgaaacattcaacgctttttggctggataacgatgtcattcaggaaatcaaaga

SEQ ID NO: 385916 - DNA, 75 bp, synthetic construct
  source 1..75: mol_type = other DNA
tgtcgatattgttgaagggcgttttgatgccgggatacgtctgggtgaaactgtggataatgatatgattgcagt

SEQ ID NO: 385917 - DNA, 75 bp, synthetic construct
  source 1..75: mol_type = other DNA
tgtcgatattgttgaaggtcgttttgatgccgggatacgtctgggtgaaactgtagataacgatatgattgcagt

SEQ ID NO: 385918 - DNA, 75 bp, synthetic construct
  source 1..75: mol_type = other DNA
tgtcgatattgttgaaggacgttttgatgccgggatacgtctgggtgaaactgttgataacgatatgattgcagt

SEQ ID NO: 385919 - DNA, 75 bp, synthetic construct
  source 1..75: mol_type = other DNA
tccctcgcccgcattcccacgactgggacatctatcaggaaatcgaccatgttctggatccgctcgaaaaaagca

SEQ ID NO: 385920 - DNA, 75 bp, synthetic construct
  source 1..75: mol_type = other DNA
atggcgtcgggcagatttacggcatgtatgtgctgactgaaacgaatacgacccgttccgagtttgatcgctacg

SEQ ID NO: 385921 - DNA, 75 bp, synthetic construct
  source 1..75: mol_type = other DNA
catcgttcagtgatatgctgtccggcttcaaagataaggtcacatcatccctcaacagcgcggccagctctgtta

SEQ ID NO: 385922 - DNA, 75 bp, synthetic construct
  source 1..75: mol_type = other DNA
caccgtttccggcgacgatgtgattaacgccgctgaaaaaggggccgatttaaccctttccggcaacacctccgg

SEQ ID NO: 385923 - DNA, 75 bp, synthetic construct
  source 1..75: mol_type = other DNA
gggatgggagagcgttataatggcaaactttctcgtgcagacctggaaacgccgacagcgtataacacctatacc

SEQ ID NO: 385924 - DNA, 75 bp, synthetic construct
  source 1..75: mol_type = other DNA
gcagaccgacccaaccgtgatttacgggatgggagagcgttataatggcaaactttctcgtgcagacctggaaac

SEQ ID NO: 385925 - DNA, 75 bp, synthetic construct
  source 1..75: mol_type = other DNA
agcatacgctgagcgacgataagtacgccaccgtagcgcaggcacttgaactggaaaacccggagtggattgaag

SEQ ID NO: 385926 - DNA, 75 bp, synthetic construct
  source 1..75: mol_type = other DNA
gaccgggagcgcggttatgtggccaacagcgtctggacggtgacggcggtttccggtgacagtgtcacgctgtcg

SEQ ID NO: 385927 - DNA, 75 bp, synthetic construct
  source 1..75: mol_type = other DNA
ggtttctgagcagataaaggcgcgggccggtgagacatcgctggaaaccgctatcagtctgcagaaagccgggct

SEQ ID NO: 385928 - DNA, 75 bp, synthetic construct
  source 1..75: mol_type = other DNA
ggcagccgtaacgagaaagcttgctggctgataatatgcaggatggtgtccggattgcccgtgataatcctgaca

SEQ ID NO: 385929 - DNA, 75 bp, synthetic construct
  source 1..75: mol_type = other DNA
tcagatccgccatgcgtttgatcgcgccacctttgcgttgatcgataagctaaaaaacgatcccgaaatggcggc

SEQ ID NO: 385930 - DNA, 75 bp, synthetic construct
  source 1..75: mol_type = other DNA
atcaatagcgaagattctcgcgtgaaggaacgtatcgcgcgggcgggtcaatggtttggcgagacgttaattgcc

SEQ ID NO: 385931 - DNA, 75 bp, synthetic construct
  source 1..75: mol_type = other DNA
aagtttattgctcagcaaattgtccactggctggagagcgagcatccgctaaaagctaaaattttgcctacggaa

SEQ ID NO: 385932 - DNA, 75 bp, synthetic construct
  source 1..75: mol_type = other DNA
tgatatgctgtccggcttcaaagataaggtcacatcatcccttaacagcgcggccagctccgttaaagggctgtt

SEQ ID NO: 385933 - DNA, 75 bp, synthetic construct
  source 1..75: mol_type = other DNA
tttttgagctgcgcacgttgccgcatcagcagttacagcaaaacaaaagctggcggcatgtgaaaaatgaacgcg

SEQ ID NO: 385934 - DNA, 75 bp, synthetic construct
  source 1..75: mol_type = other DNA
tcagcagttacagcaaaacaaaagctggcgacatgtgaaaaatgaacgcgttaaccgttcagcaagctggcagta

SEQ ID NO: 385935 - DNA, 75 bp, synthetic construct
  source 1..75: mol_type = other DNA
gtatgtaattgagcagatcacgcaaaaccggacggagttttttaaggacgggaaggcaaagaaaattgatttcac

SEQ ID NO: 385936 - DNA, 75 bp, synthetic construct
  source 1..75: mol_type = other DNA
tttggcgattccagctgaaatcggcgcgttgattaggcactatatcgagcgagcgcaactaaaacctgatggcaa

SEQ ID NO: 385937 - DNA, 75 bp, synthetic construct
  source 1..75: mol_type = other DNA
ttggcaactgatcattgcataaccaaatctgctttcacttttacggtgttgaaagattacctcgaaactcaggaa

SEQ ID NO: 385938 - DNA, 75 bp, synthetic construct
  source 1..75: mol_type = other DNA
taccgaagcattccctggttttaccctcgaagattatgaagacctcgaattcatccctcgcccgcactcccatga

SEQ ID NO: 385939 - DNA, 75 bp, synthetic construct
  source 1..75: mol_type = other DNA
catcgttcagtgatatgctgtccggtcttaaagataaggtgacatcatcccttaacaatgtggtcagctcagtta

SEQ ID NO: 385940 - DNA, 75 bp, synthetic construct
  source 1..75: mol_type = other DNA
gcgggacgcccgtggcctctgattgatggcgtcgggcagatttacggcatgtatgttctgactgaaacgagcacg

SEQ ID NO: 385941 - DNA, 75 bp, synthetic construct
  source 1..75: mol_type = other DNA
atgatgatgatctacggcatgtttgtttttgagctgcgtacattgccgcatcagcagttacagcaaaacaaaagc

SEQ ID NO: 385942 - DNA, 75 bp, synthetic construct
  source 1..75: mol_type = other DNA
acgctttccggtgtgctgtatcccgaaatcacgggcggggaggtttcccttacggtgctgaacactcaggcatat

SEQ ID NO: 385943 - DNA, 75 bp, synthetic construct
  source 1..75: mol_type = other DNA
tttttgagttgcgcacattaccgcatcagcagttacagcaaaacaaaagctggcgacatgtgaaaaacgagcgcg

SEQ ID NO: 385944 - DNA, 75 bp, synthetic construct
  source 1..75: mol_type = other DNA
atgctgtccggcttcaaagataaggtgacatcatctcttaacagcgtggccagttcagttaaagggctgttctga

SEQ ID NO: 385945 - DNA, 75 bp, synthetic construct
  source 1..75: mol_type = other DNA
tataatgaaggcaacataaccatgaatgattatcttttggttatgctactaatttatactggtcgaagaccaatg

SEQ ID NO: 385946 - DNA, 75 bp, synthetic construct
  source 1..75: mol_type = other DNA
atgtttctgataattctcacgccactggtgggcgtgctgggggcgcttttgctgtcgtatggcacatggatgatt

SEQ ID NO: 385947 - DNA, 75 bp, synthetic construct
  source 1..75: mol_type = other DNA
ggtgttatctcatggggtcaggcaaagcttgttcatgctaacgatacttatgagtcaaacggacttgataaagca

SEQ ID NO: 385948 - DNA, 75 bp, synthetic construct
  source 1..75: mol_type = other DNA
ccgcaatgaggcagtgatccgtcgtgctggtggcgtggaatgtcttgaaagctggttacttcgtgaaaaaggctg

SEQ ID NO: 385949 - DNA, 75 bp, synthetic construct
  source 1..75: mol_type = other DNA
acaactagttaacggggcaatggataaaagccctgttgtagctacattaaaattagttgatgaagatcataaaca

SEQ ID NO: 385950 - DNA, 75 bp, synthetic construct
  source 1..75: mol_type = other DNA
tttttgcgagaaaattccaaattagacaactagttaacggggcaatggataaaagccctgttgtagctacattaa

SEQ ID NO: 385951 - DNA, 75 bp, synthetic construct
  source 1..75: mol_type = other DNA
gctggcgtatggtgcctggctgatttatcccccggcgggttttgttgttgccggggcgctgtgcctgttctggtc

SEQ ID NO: 385952 - DNA, 75 bp, synthetic construct
  source 1..75: mol_type = other DNA
cattaacactctctctggtgatgatgtgatcaacgccgtcgaaaaaggcgaaacgctggtcgtaagcggcagcac

SEQ ID NO: 385953 - DNA, 75 bp, synthetic construct
  source 1..75: mol_type = other DNA
cgacagaggcctgctctgtcgccctgtggaacgacggtactgtcaacgctcattttgagctttgccctcgtgaac

SEQ ID NO: 385954 - DNA, 75 bp, synthetic construct
  source 1..75: mol_type = other DNA
aactggtgtactcaaacgacacctatgaatcaaacggccttgattcagcaccaacccacaaatacaacgcatttg

SEQ ID NO: 385955 - DNA, 75 bp, synthetic construct
  source 1..75: mol_type = other DNA
atgacgcttgagcgaatcagcgcctttatcacgtactgcatcgccgttgtgctggcctggctgggcgatttgtcc

SEQ ID NO: 385956 - DNA, 75 bp, synthetic construct
  source 1..75: mol_type = other DNA
tatcccccggcgggttttgttgttgccggggcgctgtgcctgttctggtcgtggctggtggcgcgatatctcgac

SEQ ID NO: 385957 - DNA, 75 bp, synthetic construct
  source 1..75: mol_type = other DNA
gcagcggcccgcaaactatcactgcggcaattaccgacgcggcaggcaacagcgatgacgccagccgcacggtca

SEQ ID NO: 385958 - DNA, 75 bp, synthetic construct
  source 1..75: mol_type = other DNA
cgctgcatggtgacgcagccggagattttaatgctcgacgaacctgcggcaggtcttaacccgaaagaaacgaaa

SEQ ID NO: 385959 - DNA, 75 bp, synthetic construct
  source 1..75: mol_type = other DNA
ccaaaaataaaaacactaaaatgaagccccccagcagattcctgaatcaggacgaaatccattgcttgtcgtgct

SEQ ID NO: 385960 - DNA, 75 bp, synthetic construct
  source 1..75: mol_type = other DNA
caaaaaataaaaacgctaaagtgaaaaaacaaaagaagactccgcaggttcgtgaatcaggacgaaattcattgt

SEQ ID NO: 385961 - DNA, 75 bp, synthetic construct
  source 1..75: mol_type = other DNA
ctcagcaagaggcagtcctgtttgccaaacaacatctcgccctggctgcacagaatattgaacgtcagcagttta

SEQ ID NO: 385962 - DNA, 75 bp, synthetic construct
  source 1..75: mol_type = other DNA
tcattatgggggcgggtgttagccgctctgaatggcgttatgtagctgagaacgtggctaaggtggaatgtatgc

SEQ ID NO: 385963 - DNA, 75 bp, synthetic construct
  source 1..75: mol_type = other DNA
tacagttttacatagtgactctgtaacggataacttcccgtttatgcagtggatggaagagagagacggattatt

SEQ ID NO: 385964 - DNA, 75 bp, synthetic construct
  source 1..75: mol_type = other DNA
tctcacggctaaagtctctaccgctatcccggcttcatttttatggctgcacagtaactttatttgtttaattaa

SEQ ID NO: 385965 - DNA, 75 bp, synthetic construct
  source 1..75: mol_type = other DNA
gtttgctaatccgcaacgttcgctgccatgtcttgcctggacactgctgatgatcgttgccatcgttgtcctctg

SEQ ID NO: 385966 - DNA, 75 bp, synthetic construct
  source 1..75: mol_type = other DNA
gctctggctgaacgaatggggttacgaccgtcagccatcagccgcctggaaagcaatcctttaggggcaagtatg

SEQ ID NO: 385967 - DNA, 75 bp, synthetic construct
  source 1..75: mol_type = other DNA
gtgatccgtacctcggtctccacatttatggagttcatcggtaataatcctaacgccttccggttattattgcgg

SEQ ID NO: 385968 - DNA, 75 bp, synthetic construct
  source 1..75: mol_type = other DNA
agttggagtcattacccagaaaccggtatcgacattatgcagccggatgttggctggtgcggtggtttaaccacg

SEQ ID NO: 385969 - DNA, 75 bp, synthetic construct
  source 1..75: mol_type = other DNA
tggcgctgacacctgtagtttgtatacacaatccctggcattgaaacacgcatatgaggtgtacttcggaatatg

SEQ ID NO: 385970 - DNA, 75 bp, synthetic construct
  source 1..75: mol_type = other DNA
gaaccggaaatattttactacgaacgcaattgtatccattgcggacgctgcgtatccgcctgccccgttggggct

SEQ ID NO: 385971 - DNA, 75 bp, synthetic construct
  source 1..75: mol_type = other DNA
gggatatgggagctaaagataaagcgacaggaaaatcacggagtgatgtgcagcaacgcattcagcagtttcaca

SEQ ID NO: 385972 - DNA, 75 bp, synthetic construct
  source 1..75: mol_type = other DNA
aaattgccgagttgcttaatgtcgagccgcagccgctggatggcgaagcgcaagagctaacgcctgcgcggatgg

SEQ ID NO: 385973 - DNA, 75 bp, synthetic construct
  source 1..75: mol_type = other DNA
ccaggtggcgaagctgtgatgctaaaaattgccgagttgcttaatgtcgagccgcagccgctggatggcgaagcg

SEQ ID NO: 385974 - DNA, 75 bp, synthetic construct
  source 1..75: mol_type = other DNA
tgacggcaatcgtgacaggttcaactgacaatacgggttattacaaaaatgaaggtactgccgaaaatattcaga

SEQ ID NO: 385975 - DNA, 75 bp, synthetic construct
  source 1..75: mol_type = other DNA
atgaccattgcggtgtcggggatctcgtttccggcatttgcgctggggatgcttttaattcaggtattctccgtt

SEQ ID NO: 385976 - DNA, 75 bp, synthetic construct
  source 1..75: mol_type = other DNA
cccggcatttgcgctggggatgcttttgattcaggtgttctccgttgagttggggtggctgccgactgttggtgc

SEQ ID NO: 385977 - DNA, 75 bp, synthetic construct
  source 1..75: mol_type = other DNA
gacacggtgaccgtcacgctcggcggggcgacttacactgccacggtgcaggcgaatttaagctggagcgtcgat

SEQ ID NO: 385978 - DNA, 75 bp, synthetic construct
  source 1..75: mol_type = other DNA
cacaggagccacccccattttcgttgattcagataatgaaacttggcaaatgtctgttagtgacatagaacaaaa

SEQ ID NO: 385979 - DNA, 75 bp, synthetic construct
  source 1..75: mol_type = other DNA
cgtcattgacaggaaaagaaaaagaatatgtaaatgaatgtctggactcaacgtggatttcatcaaaaggaaact

SEQ ID NO: 385980 - DNA, 75 bp, synthetic construct
  source 1..75: mol_type = other DNA
aactggtgacgctgaccggcgggcaaaaaacacgtagcgcaagcggcggagttctgggtgttctgtgccgacttt

SEQ ID NO: 385981 - DNA, 75 bp, synthetic construct
  source 1..75: mol_type = other DNA
caataatgttacattatattatgaaggtttcaagggtggaatgaatatcattgatgcgtttcattctccgtggga

SEQ ID NO: 385982 - DNA, 75 bp, synthetic construct
  source 1..75: mol_type = other DNA
atgtcatctcttgattctgaagctaaacccgataatgcaggtcacagcgtactggctttaacaacctctcatagc

SEQ ID NO: 385983 - DNA, 75 bp, synthetic construct
  source 1..75: mol_type = other DNA
ggtcgcagcagccgctggtacaaaagcgaagtggagcagtggatgcagcagcgaattgaggaatcacgagaggca

SEQ ID NO: 385984 - DNA, 75 bp, synthetic construct
  source 1..75: mol_type = other DNA
gacgaaaccgttttttatcttttcactcgcccacaggatgccttagcgatggttcgccaggggggtgatgctgcc

SEQ ID NO: 385985 - DNA, 75 bp, synthetic construct
  source 1..75: mol_type = other DNA
aacccgcaatatcaggacgaaaccgttttttatcttttcactcgcccacaggatgccttagcgatggttcgctag

SEQ ID NO: 385986 - DNA, 75 bp, synthetic construct
  source 1..75: mol_type = other DNA
ggttcgccagggggtaaaaataggtaccctgaatattggcggtatggcctggcgtcctggtaagaaacagttaac

SEQ ID NO: 385987 - DNA, 75 bp, synthetic construct
  source 1..75: mol_type = other DNA
atgggcgatacaaaaagtatcgaagaagcccaaatggcagagttaaaagcaatggttgaatccttaggttttaac

SEQ ID NO: 385988 - DNA, 75 bp, synthetic construct
  source 1..75: mol_type = other DNA
gaaaagattcccgatcaactttttaacaaaaaatcatttacaattagtgatctccataatgctgacattgataca

SEQ ID NO: 385989 - DNA, 75 bp, synthetic construct
  source 1..75: mol_type = other DNA
caattgaggttactgattcaggcaagcttgtagaacaagaggtatttcaagaaatgagcagatatttaaaagaga

SEQ ID NO: 385990 - DNA, 75 bp, synthetic construct
  source 1..75: mol_type = other DNA
tatcgaagaatttgatgtgctacgtggagacactctggccgaacctaagtttattgaaaacgatcggctcaagca

SEQ ID NO: 385991 - DNA, 75 bp, synthetic construct
  source 1..75: mol_type = other DNA
gggagataagtaaatggcaatcgtttagaaaagaattgaatatgaactcttcttacttttttaatggaggaaaga

SEQ ID NO: 385992 - DNA, 75 bp, synthetic construct
  source 1..75: mol_type = other DNA
ggaatcttgtgtggtggtgcttaattgtaataagccagctgagcgcaaaaacaagatcttgtttatcaatggggt

SEQ ID NO: 385993 - DNA, 75 bp, synthetic construct
  source 1..75: mol_type = other DNA
tggtcaatattgaaaaagccgtcgcggtttatcacaacccgcaatatcaggacgaaaccgttttttatcttttca

SEQ ID NO: 385994 - DNA, 75 bp, synthetic construct
  source 1..75: mol_type = other DNA
tcggtgatgcgcagtggaccaataaagagcgcctgcccgatcatctgctggctgatctgattgaacatttcagta

SEQ ID NO: 385995 - DNA, 75 bp, synthetic construct
  source 1..75: mol_type = other DNA
attgaagcggtgattgggttagggccgaatctgttttataactcgccgatggaatcgtgcgtggttgtgcttaat

SEQ ID NO: 385996 - DNA, 75 bp, synthetic construct
  source 1..75: mol_type = other DNA
tggcacctggagcgtgggcgttccggcggcagacgtgggtaactggcctgcgggaacggtcaatattgctgtttc

SEQ ID NO: 385997 - DNA, 75 bp, synthetic construct
  source 1..75: mol_type = other DNA
aggggcgggaagtgcagattatcgctgctgaccgtcgctcgcagatgaacctgaagcaggatgaacggctgtccg

SEQ ID NO: 385998 - DNA, 75 bp, synthetic construct
  source 1..75: mol_type = other DNA
aacggtctggcccgcagcggtcgtgatgtccggctgtattcctcgctggatgaaacccgtactgcggaaaaactt

SEQ ID NO: 385999 - DNA, 75 bp, synthetic construct
  source 1..75: mol_type = other DNA
aaacctgacctgccggacggcaaaacagagctggctgtcagggatattgccggacaggagcgtgaccggtctgcc

SEQ ID NO: 386000 - DNA, 75 bp, synthetic construct
  source 1..75: mol_type = other DNA
ggacgtggcggcaggccgtgccgttctccgtcaggcggggcttgccgggggagacagtcctgcacggtttattgc

SEQ ID NO: 386001 - DNA, 75 bp, synthetic construct
  source 1..75: mol_type = other DNA
aggaaaccgggttcgacatccgggcatatcgtgacgcggcggatcagcgtgcggagatccgcacgcaggcgcccg

SEQ ID NO: 386002 - DNA, 75 bp, synthetic construct
  source 1..75: mol_type = other DNA
gtgagaatcgccggtgaaggtcgtccgtggaatcccggtgccatcaccggtggtcgcgtgtggggggatatcccg

SEQ ID NO: 386003 - DNA, 75 bp, synthetic construct
  source 1..75: mol_type = other DNA
gtcatgaatgcagagcggctgttcagtacggcgcgggaactgcgggacgtggcggcagggcgtgctgttctccgt

SEQ ID NO: 386004 - DNA, 75 bp, synthetic construct
  source 1..75: mol_type = other DNA
acctgggagaataacccggatgcccttgccctggtggatagtgtgtatcaccggattgccggtatcagcaaggat

SEQ ID NO: 386005 - DNA, 75 bp, synthetic construct
  source 1..75: mol_type = other DNA
cggggatgcgcagttcgtggccctgcagggcagccgtaacggagagagcctgctggctgataatatgcaggatgg

SEQ ID NO: 386006 - DNA, 75 bp, synthetic construct
  source 1..75: mol_type = other DNA
aaggccggtgagctggggaaagagcaggtcatggtgcctgtcctgaacacagcgaatatacgcgacggggagctg

SEQ ID NO: 386007 - DNA, 75 bp, synthetic construct
  source 1..75: mol_type = other DNA
gtggaaacgcccgggcattccgtcagcgacagtgcgacggtgtttgcctccgtcacacagatggcaatggacaac

SEQ ID NO: 386008 - DNA, 75 bp, synthetic construct
  source 1..75: mol_type = other DNA
cgtcttattgatgcacataaccaggccgtggattttgctgtccgtcaggtggaggcgctggcttccacacgggtt

SEQ ID NO: 386009 - DNA, 75 bp, synthetic construct
  source 1..75: mol_type = other DNA
ggattaagtgaacgcaaagtgcagtttacgtacacggacgtgctggccaggacggtcggcatactgccgccggaa

SEQ ID NO: 386010 - DNA, 75 bp, synthetic construct
  source 1..75: mol_type = other DNA
ccgctatgtgatagaccgggtgacagcgcagagtcacagcctgaccctgcgggatgcgcagggtgaaacgcaggt

SEQ ID NO: 386011 - DNA, 75 bp, synthetic construct
  source 1..75: mol_type = other DNA
gaaaatctgctgcaggagcgactgcagcagatggagcgggatatggtccgtgacctgcagaaagagaaaacgctg

SEQ ID NO: 386012 - DNA, 75 bp, synthetic construct
  source 1..75: mol_type = other DNA
ccggcacagcaggccattcacctggcccttcctgtgctggaaagtaaaaacctggccttcagcatggtggacctg

SEQ ID NO: 386013 - DNA, 75 bp, synthetic construct
  source 1..75: mol_type = other DNA
ccgaccgtttcacggtggtacaggggtatgccggtgtgggtaagaccacacagttccgggcggtgatgtcagccg

SEQ ID NO: 386014 - DNA, 75 bp, synthetic construct
  source 1..75: mol_type = other DNA
gaccgggagcgcggttatgtggccaacagcgtctggacggtgacagcggtttccggtgacagtgtcacgctgtca

SEQ ID NO: 386015 - DNA, 75 bp, synthetic construct
  source 1..75: mol_type = other DNA
ctggcacaggatcgcccgtcgctggccattgtgtccgggcaggggggagccgccgggcagcgtgagcgggtggct

SEQ ID NO: 386016 - DNA, 75 bp, synthetic construct
  source 1..75: mol_type = other DNA
agccgggtgccggaaatggcgaaccggtcacggcagaggtactggcacagcggcaggctgaagaggccatccgcc

SEQ ID NO: 386017 - DNA, 75 bp, synthetic construct
  source 1..75: mol_type = other DNA
cagacgctgattgtcacgcacctgaatgaggaccggcgcgtactgaacagcatgattcatgatgcacgggaaaag

SEQ ID NO: 386018 - DNA, 75 bp, synthetic construct
  source 1..75: mol_type = other DNA
cgggaggcggtggctgaaggcgtcacactgtacaccccggacaccatccgggtgggaaccggtgaccggatgcgc

SEQ ID NO: 386019 - DNA, 75 bp, synthetic construct
  source 1..75: mol_type = other DNA
gtcagcctacgtggctctgtcgcgtatgaagcagcatgtgcaggtgtacaccgataaccgtcagggctggacgga

SEQ ID NO: 386020 - DNA, 75 bp, synthetic construct
  source 1..75: mol_type = other DNA
tcagccaccggctgtaccgggcggaagacagagcggaacgtctggcgctggtcgcctgcctgctggccgtgattc

SEQ ID NO: 386021 - DNA, 75 bp, synthetic construct
  source 1..75: mol_type = other DNA
cagcgcagcggagaaacgccggatttcagcaacacgctgttcctgctcgatgagagctcaatggtgggcaatacc

SEQ ID NO: 386022 - DNA, 75 bp, synthetic construct
  source 1..75: mol_type = other DNA
gaagataaagccagggtattagtggattgttataataatgtccttgttgatgacttccatatccacctcaccaga

SEQ ID NO: 386023 - DNA, 75 bp, synthetic construct
  source 1..75: mol_type = other DNA
atcaacatctccgggctcccgtacccatgacatgggcgtttatgatgcgtgaagcgggttatccgccagtcaggc

SEQ ID NO: 386024 - DNA, 75 bp, synthetic construct
  source 1..75: mol_type = other DNA
atgtttttagcatcattgttgagacgtattgcatttagttactacgattataaagctaataatttcaatattgaa

SEQ ID NO: 386025 - DNA, 75 bp, synthetic construct
  source 1..75: mol_type = other DNA
ggtgcagccgggcagcgtgagcgggtggctgaactggtcatgatggcccgggagcaggggcgggaggtgcagatt

SEQ ID NO: 386026 - DNA, 75 bp, synthetic construct
  source 1..75: mol_type = other DNA
aattgtccgtaaaatggcagagaacaaacctgacctgccggacagcaaaacagagcaggctgtcagggagattgc

SEQ ID NO: 386027 - DNA, 75 bp, synthetic construct
  source 1..75: mol_type = other DNA
gcaataactcctgacacctcaatattacatatggcaagtgcctataatacccccgttgttgcaatttatgctgat

SEQ ID NO: 386028 - DNA, 75 bp, synthetic construct
  source 1..75: mol_type = other DNA
ctctattacgattttgttggtgcgtcaccgatttccggttttgatagcggcttctccacctttgcccagggcttt

SEQ ID NO: 386029 - DNA, 75 bp, synthetic construct
  source 1..75: mol_type = other DNA
ggtaattatttttaccgtcatcaactatggcctgacgtacatcggcgtaaacccgtactggcagtacatcatcaa

SEQ ID NO: 386030 - DNA, 75 bp, synthetic construct
  source 1..75: mol_type = other DNA
ttcttacttacctgaaagagggcggtatttacgtcgttcttttagttttgctggcgattattattttccaggacc

SEQ ID NO: 386031 - DNA, 75 bp, synthetic construct
  source 1..75: mol_type = other DNA
atgactatgcaggatcacgcaacattaaaagaaataaaagatttagcgaagaacataacacagcaatacggtacg

SEQ ID NO: 386032 - DNA, 75 bp, synthetic construct
  source 1..75: mol_type = other DNA
atcagcatctcagggctcccgtacccatgacatgggcgtttatgatgcgtgaagcgggttttcctgcagtcaggc

SEQ ID NO: 386033 - DNA, 75 bp, synthetic construct
  source 1..75: mol_type = other DNA
agtgatcgttcatggaccaaaaggggaagataaagccagggaactagtgaatagttataataatgtctaccgttt

SEQ ID NO: 386034 - DNA, 75 bp, synthetic construct
  source 1..75: mol_type = other DNA
cgagcgtctgagggtgacagggaaaattcccggactccgcgtctccggcggtgaccgcctgcaggtggcatccgt

SEQ ID NO: 386035 - DNA, 75 bp, synthetic construct
  source 1..75: mol_type = other DNA
ggtcggtaagcacggtatgtgggaaatgccgggcgtaccggtggaggccttttccggacgctcccagactatccg

SEQ ID NO: 386036 - DNA, 75 bp, synthetic construct
  source 1..75: mol_type = other DNA
ccgggcactcagtcgtgacatcatgaaacagaaccgggtgaccgtacatccggagaaaagtgttccccggacggc

SEQ ID NO: 386037 - DNA, 75 bp, synthetic construct
  source 1..75: mol_type = other DNA
tgcgggacgtggcggcaggccgtgccgttctccgtcaggcggggctggccgggggagacagtcctgcacggttta

SEQ ID NO: 386038 - DNA, 75 bp, synthetic construct
  source 1..75: mol_type = other DNA
acggagttcagtcacagccaggaagcgaaactggcagaagcgcagcagaaggcgatgctgaaaggtgaggctttt

SEQ ID NO: 386039 - DNA, 75 bp, synthetic construct
  source 1..75: mol_type = other DNA
ctgggcagcatgggagaacgctgggccggcaggggggctgaacagctggggctgcagggcagcgtcgataaggat

SEQ ID NO: 386040 - DNA, 75 bp, synthetic construct
  source 1..75: mol_type = other DNA
taacgatgccattcgtgggcaacatttgctggcaatgaaagccctgcggcagaaattcggcattaatgaaaacat

SEQ ID NO: 386041 - DNA, 75 bp, synthetic construct
  source 1..75: mol_type = other DNA
atggcgcagcaaacgtccaggccagcgtcagcaacgtcgcaggtaacaacgcccaggccacacatgtttacagcg

SEQ ID NO: 386042 - DNA, 75 bp, synthetic construct
  source 1..75: mol_type = other DNA
cctccagtgatgcagcggcggtggccggtcttgtaatgacggtgctgaccgttggtctggtgtcgtgtgcaggaa

SEQ ID NO: 386043 - DNA, 75 bp, synthetic construct
  source 1..75: mol_type = other DNA
aaacagaaccgggtgaccgtacatccggagaaaagtgtcccccggacggctggttacagcgatgcggtcagtgtt

SEQ ID NO: 386044 - DNA, 75 bp, synthetic construct
  source 1..75: mol_type = other DNA
ggtcatgcttcatggctgtactattggtaatcgagtactggttggaatgggctcaattttacttgatggcgctgt

SEQ ID NO: 386045 - DNA, 75 bp, synthetic construct
  source 1..75: mol_type = other DNA
gtggcatccgtcagcgaggacgcgatgacggttgttgtgccgggacgggctgaaccggcctccctgcctgtggct

SEQ ID NO: 386046 - DNA, 75 bp, synthetic construct
  source 1..75: mol_type = other DNA
ggataatgtgtatcaccggattgccggtatcagcaaggatgacgggctgataaccctggaggatgcggaaggtaa

SEQ ID NO: 386047 - DNA, 75 bp, synthetic construct
  source 1..75: mol_type = other DNA
cggatgcccttgccctggtggataatgtgtatcaccggattgccggtatcagcagggatgacgggctgataaccc

SEQ ID NO: 386048 - DNA, 75 bp, synthetic construct
  source 1..75: mol_type = other DNA
ggccggatgtgcagcaggcggtgacacaggccattgccggattaagtgaacgaaaagtgcagtttacgtacacgg

SEQ ID NO: 386049 - DNA, 75 bp, synthetic construct
  source 1..75: mol_type = other DNA
aacttcttccagaagcgggctgcttttccccgattcaaaaagcggggacagaatgatgcattccgctacccgtag

SEQ ID NO: 386050 - DNA, 75 bp, synthetic construct
  source 1..75: mol_type = other DNA
gccatgaaggatgccggggtgaacacatatcgctggcaggggggagaacagcgaccggccaccatcatcagtgaa

SEQ ID NO: 386051 - DNA, 75 bp, synthetic construct
  source 1..75: mol_type = other DNA
tgttcagtacggcgcgggagctgcgggacgtggcagctggtcgtgccgttctccgtcaggcggggcttgccgggg

SEQ ID NO: 386052 - DNA, 75 bp, synthetic construct
  source 1..75: mol_type = other DNA
ggagaacagcgaccggcaaccatcatcagtgaaccggaccgtaatgtccgctatgcccggctggccggagatttt

SEQ ID NO: 386053 - DNA, 75 bp, synthetic construct
  source 1..75: mol_type = other DNA
cacggcctgaccaattgcgcgaacatgaacgtctgcgaaaactgggctttaccgtagtggtgctggatagcaaaa

SEQ ID NO: 386054 - DNA, 75 bp, synthetic construct
  source 1..75: mol_type = other DNA
cagcgggctattctcattcgtgctcaataaaaaactgagtaacgaagagttagcgaactatctggataacttcag

SEQ ID NO: 386055 - DNA, 75 bp, synthetic construct
  source 1..75: mol_type = other DNA
catcatgaaagtagcctgaaagtcgccgaatggctggcggcgcattctcaggtcgaacgggttaaccatccagct

SEQ ID NO: 386056 - DNA, 75 bp, synthetic construct
  source 1..75: mol_type = other DNA
cgcgtctctccggatatgcgtcttgaaatgcatattgataccgatgaggccaacgccgcaggcgctgatagccct

SEQ ID NO: 386057 - DNA, 75 bp, synthetic construct
  source 1..75: mol_type = other DNA
gtcgaatgcaaagcgccaggcaagccaccacggcctgaccagttgcgcgagcatgaacgtctgcgaaagctgggc

SEQ ID NO: 386058 - DNA, 75 bp, synthetic construct
  source 1..75: mol_type = other DNA
tgaacgtctgcgaaaactgggctttaccgtggtagtactggatagtaaggagctttcatgtatattaggcaaaaa

SEQ ID NO: 386059 - DNA, 75 bp, synthetic construct
  source 1..75: mol_type = other DNA
tcgtggccctgcagggcagccgtaacggagagagcctgctggctgataatatgcaggatggtgtccggattgccc

SEQ ID NO: 386060 - DNA, 75 bp, synthetic construct
  source 1..75: mol_type = other DNA
tatcagattacgcctgcccactcatggcggattttatacctgggagtttcgcaaggatgagactgaaattaaggt

SEQ ID NO: 386061 - DNA, 75 bp, synthetic construct
  source 1..75: mol_type = other DNA
tgcaattatttctggcgattgcccgggagcgaagttttaccaaagcggcggcaaaacttggcgtgtcacagtctg

SEQ ID NO: 386062 - DNA, 75 bp, synthetic construct
  source 1..75: mol_type = other DNA
cattaatcttcgttttccaacgcatggcaatctgtatgcgtgggagtttgaaaaagaaggaaaaagcctgaatgt

SEQ ID NO: 386063 - DNA, 75 bp, synthetic construct
  source 1..75: mol_type = other DNA
tccgggacgtaaatatccacagccgtatgtggcactgccggcgtttgaccgtaacggcaagtctgccggtatctg

SEQ ID NO: 386064 - DNA, 75 bp, synthetic construct
  source 1..75: mol_type = other DNA
caggagcgtctgcagcagatggagcgggatatggttcgtgacctgcagaaagagaaaaccctgggcggagactga

SEQ ID NO: 386065 - DNA, 75 bp, synthetic construct
  source 1..75: mol_type = other DNA
ttcaggttttacaggagtggtgtccaacttttcccggatattacctttactatcccagccgtaagcagcatccgc

SEQ ID NO: 386066 - DNA, 75 bp, synthetic construct
  source 1..75: mol_type = other DNA
aaatggcttcctggctggttgagtggaaaaacgccactgaaacgcaatggcttaaagattcacccagtcacagcc

SEQ ID NO: 386067 - DNA, 75 bp, synthetic construct
  source 1..75: mol_type = other DNA
gggaaaatggcttcctggctggttgagtggaaaaatgccactgaaacgcaatggcttaaagattctccctcacag

SEQ ID NO: 386068 - DNA, 75 bp, synthetic construct
  source 1..75: mol_type = other DNA
gtgaaacctttgccatcgcgcttgaaggtacggaaggcagccggaaactgatggccggctttgagtcagcctacg

SEQ ID NO: 386069 - DNA, 75 bp, synthetic construct
  source 1..75: mol_type = other DNA
gcttgatgagctggggccttatattgatgggattcagggaacattgcagcaactaaaagatctcaacaagaagcc

SEQ ID NO: 386070 - DNA, 75 bp, synthetic construct
  source 1..75: mol_type = other DNA
tgaatctcgtctgggtatgaaactcctcactcgcaccacccgcagcatatcgctgacggatgtagggcaatcaat

SEQ ID NO: 386071 - DNA, 75 bp, synthetic construct
  source 1..75: mol_type = other DNA
aagcgggctgcttttccccgattcaaaaagcggggacagaatgatgcatttcgctacccgcagggcgttaatctc

SEQ ID NO: 386072 - DNA, 75 bp, synthetic construct
  source 1..75: mol_type = other DNA
aaaactcaacgatgaagaactggcgaactatctggataacttcagtttatttagcatggcctactcgtggggcgg

SEQ ID NO: 386073 - DNA, 75 bp, synthetic construct
  source 1..75: mol_type = other DNA
cagagcaggctgtcagggagattgccgggcaggagcgtgaccgggctgccataactgaacgggaagccgcgctgc

SEQ ID NO: 386074 - DNA, 75 bp, synthetic construct
  source 1..75: mol_type = other DNA
cggtggtttctgagcagataaaggcgcgtgccggtgagacattgctggaaaccgctatcagtctgcagaaaaccg

SEQ ID NO: 386075 - DNA, 75 bp, synthetic construct
  source 1..75: mol_type = other DNA
tgcaggagcgactgcagcagatggagcgggatatggttcgtgacctgcagaaagagaaaaccctgggcggagact

SEQ ID NO: 386076 - DNA, 75 bp, synthetic construct
  source 1..75: mol_type = other DNA
ctgtggctgattcaccgttcacggcactgaagctggagaacggctgggtggaaacgcccgggcattccgtcagtg

SEQ ID NO: 386077 - DNA, 75 bp, synthetic construct
  source 1..75: mol_type = other DNA
gcgctgtccggacttgagagtgtgaaaccgtctcaggtgccacgtctggagggcgcatgggcaccggagcactcc

SEQ ID NO: 386078 - DNA, 75 bp, synthetic construct
  source 1..75: mol_type = other DNA
gcataacggcgaatggaagacactgagcagtgataaagtggggaaaaccggtttttccgagaacgtgctcgcgaa

SEQ ID NO: 386079 - DNA, 75 bp, synthetic construct
  source 1..75: mol_type = other DNA
gagagtctgctggcggataacatgcaggatggcgtccggattgcccgtgataaccccgacagcggtgtggtggta

SEQ ID NO: 386080 - DNA, 75 bp, synthetic construct
  source 1..75: mol_type = other DNA
cgggaggttgcccgggaaaatctgctgcaggagcgtctgcagcagatggagcgggatatggtccgtgacctgcag

SEQ ID NO: 386081 - DNA, 75 bp, synthetic construct
  source 1..75: mol_type = other DNA
agcggctgttcagtacggcgcgggagctgcgggacgtggcggcaggccgtgccgttctccgtcaggcggggcttg

SEQ ID NO: 386082 - DNA, 75 bp, synthetic construct
  source 1..75: mol_type = other DNA
ggggatatcccggacaacagtgtccagccgggtgccggaaacggtgagccggtcacggcagaggtactggcacag

SEQ ID NO: 386083 - DNA, 75 bp, synthetic construct
  source 1..75: mol_type = other DNA
ggtggataatgtgtatcaccggattgccggtatcagcaaggatgacgggctgataaccctgcaggatgcggaagg

SEQ ID NO: 386084 - DNA, 75 bp, synthetic construct
  source 1..75: mol_type = other DNA
tgtgcagcaggcggtgacacaggccattgccggattaagtgaacgaaaagtgcagtttacgtacacggacgtgct

SEQ ID NO: 386085 - DNA, 75 bp, synthetic construct
  source 1..75: mol_type = other DNA
aggcgctgggctatgaaaccgaagtggtgggtaagcacggtatgtgggagatgccgggcgtaccggtggaagcct

SEQ ID NO: 386086 - DNA, 75 bp, synthetic construct
  source 1..75: mol_type = other DNA
gatatgcgtaaatccttcaacggtctgggagaacaggtacaacatgtgctggatgagaaccccttctcagatcac

SEQ ID NO: 386087 - DNA, 75 bp, synthetic construct
  source 1..75: mol_type = other DNA
tggatgagaaccccttctcagatcacactccgaccgcgcatagaggcattttcatcgctgacaggccacatggcc

SEQ ID NO: 386088 - DNA, 75 bp, synthetic construct
  source 1..75: mol_type = other DNA
aaattctggtggtgctgtttatctattttggctcctcgcagttactgctgacgcttgcggatggcttcaccatca

SEQ ID NO: 386089 - DNA, 75 bp, synthetic construct
  source 1..75: mol_type = other DNA
ataaccagccgtggcctgcgcacattaggtgtgcgtttgcgtcaacatcatgaaagcagtctgaaagtggctgaa

SEQ ID NO: 386090 - DNA, 75 bp, synthetic construct
  source 1..75: mol_type = other DNA
ttgtagcaaaatcctcagcaaattgggcgtaacgacatcgtggtttgatccgctgattggcgcgaatatcgttaa

SEQ ID NO: 386091 - DNA, 75 bp, synthetic construct
  source 1..75: mol_type = other DNA
atggcggacaaaaagcttgatactcaactggtgaatgcaggacgcagcaaaaaatacactctcggcgcggtaaat

SEQ ID NO: 386092 - DNA, 75 bp, synthetic construct
  source 1..75: mol_type = other DNA
tgccgtttgtgcattgattgtcgggctggcgctggcgatgttctttgcggtatgggagtcggcaaaatggcgtcc

SEQ ID NO: 386093 - DNA, 75 bp, synthetic construct
  source 1..75: mol_type = other DNA
atgatttcactcccattagatactcgtagctggctcgttgccggcgttaccgatatgtgtaaatccttcaacgga

SEQ ID NO: 386094 - DNA, 75 bp, synthetic construct
  source 1..75: mol_type = other DNA
gcgatcgcagcgtacatgtttaaccgtttctaccgtattaagctgcctgagtatcttgcttctttgccggtaaac

SEQ ID NO: 386095 - DNA, 75 bp, synthetic construct
  source 1..75: mol_type = other DNA
tcgctctgtcgctgctgtatgccgcctatgcctcgcaaacgctgcgcggcgcgttgaaagcggtgccgatgggtc

SEQ ID NO: 386096 - DNA, 75 bp, synthetic construct
  source 1..75: mol_type = other DNA
ctggcgctggcaatgttcttcgcggtgtgggagtcagcgaaatggcgccctgtcgcgtgggcaggttcggcgctg

SEQ ID NO: 386097 - DNA, 75 bp, synthetic construct
  source 1..75: mol_type = other DNA
gtgacgattctacgcggcctgccagaaattctggtggtgctgtttatctactttggctcctcgcagttactgctg

SEQ ID NO: 386098 - DNA, 75 bp, synthetic construct
  source 1..75: mol_type = other DNA
gtaaccaggagcgcaatatatttccacgatggaacccgttccaacaagcagaacgaatacaaggttaagttatga

SEQ ID NO: 386099 - DNA, 75 bp, synthetic construct
  source 1..75: mol_type = other DNA
ttacagacgcaccatttgatctaattaaagaagttaccaaatcaatgttaaccaggttcgtcaaagaacgtattg

SEQ ID NO: 386100 - DNA, 75 bp, synthetic construct
  source 1..75: mol_type = other DNA
ttacagacgcgccatttgatctaatcaaagaggttaccaaatcgatgttaaccaggctcatcaaagaacgtattg

SEQ ID NO: 386101 - DNA, 75 bp, synthetic construct
  source 1..75: mol_type = other DNA
tcaggtcagcgttattgtctccctgttggtaagcgttcaggatatcgcctacctgaatggattattggtcatgaa

SEQ ID NO: 386102 - DNA, 75 bp, synthetic construct
  source 1..75: mol_type = other DNA
gtggaacgattttggttactaaagggtataagaagagttttacttccgatggcgaaacatggaaagaaagtgacg

SEQ ID NO: 386103 - DNA, 75 bp, synthetic construct
  source 1..75: mol_type = other DNA
tttgcgtttgccaaagacgaagaggcacatcgtgaatatttccagacgatcccggtcagccggatgatcgtcaac

SEQ ID NO: 386104 - DNA, 75 bp, synthetic construct
  source 1..75: mol_type = other DNA
cgttcctcggctttatcggcattaccgatgtgaaatttgtcttcgccgaagggatcgcatacggtccggaaatgg

SEQ ID NO: 386105 - DNA, 75 bp, synthetic construct
  source 1..75: mol_type = other DNA
tcctcagccaggtcagccgtgaactggaaacagccgctgtacagcacggaagcctcacggatatttcccgtgagg

SEQ ID NO: 386106 - DNA, 75 bp, synthetic construct
  source 1..75: mol_type = other DNA
aagatcccgtcgggcttttctggtcactctacagcttcattccgctgtatttactctggtgtgatatatcacctg

SEQ ID NO: 386107 - DNA, 75 bp, synthetic construct
  source 1..75: mol_type = other DNA
atgacgctaaaggaattcatcaaatcattaaaaactggagaagcaaaaaaatttgcgaccaatcttggtgtgtct

SEQ ID NO: 386108 - DNA, 75 bp, synthetic construct
  source 1..75: mol_type = other DNA
atgacgttgcacgggatgaggcctgatcacggtctgctcccatctgtttacgcatctgcagatgaagaatggatc

SEQ ID NO: 386109 - DNA, 75 bp, synthetic construct
  source 1..75: mol_type = other DNA
aatcagggcagagctttacaggggtatacagccgaacctcccctggctggatcgcaatcgcgctcctcactgttt

SEQ ID NO: 386110 - DNA, 75 bp, synthetic construct
  source 1..75: mol_type = other DNA
gggtaacaccctgctgttcaaatatgtaaacggtcagtggttccgctccggtgagctggagaataatcgtatcgc

SEQ ID NO: 386111 - DNA, 75 bp, synthetic construct
  source 1..75: mol_type = other DNA
tgaacgggttcgtatatctcctgaagtgtacataatcccgtatctgttttttgcactgttgatagcgcaaggcgc

SEQ ID NO: 386112 - DNA, 75 bp, synthetic construct
  source 1..75: mol_type = other DNA
ctgaaactttcgttagccggttagatatgttacgggcgttggatgatcgcggttcgacccggaggctctatcttg

SEQ ID NO: 386113 - DNA, 75 bp, synthetic construct
  source 1..75: mol_type = other DNA
ggataccaaatcgctcacacctgcgccagaaggacttacctatactgtaaatgggcaggcacttccagcaaaaga

SEQ ID NO: 386114 - DNA, 75 bp, synthetic construct
  source 1..75: mol_type = other DNA
ccgctacgctttgaactgttctacaacaagtatgatttgcatgaaaaaacggcaatttcgttgtcttccgaatgg

SEQ ID NO: 386115 - DNA, 75 bp, synthetic construct
  source 1..75: mol_type = other DNA
agtatattagtccccgtgagcgaaggctgcttaccggatgtgttgccttacttgttgtcgcttttgtctattatg

SEQ ID NO: 386116 - DNA, 75 bp, synthetic construct
  source 1..75: mol_type = other DNA
caatgtattgacggatggcggatattggcgcacctccgcagctactggcaaaatagccaggactccacaaaacgc

SEQ ID NO: 386117 - DNA, 75 bp, synthetic construct
  source 1..75: mol_type = other DNA
aacaattatgcgccgcttcatctgaaggaagtcatgctacctaccggtacattgctgactgatgcagatcccggt

SEQ ID NO: 386118 - DNA, 75 bp, synthetic construct
  source 1..75: mol_type = other DNA
agtgatgccagcgggagttctattcatagccatctaacaaataatgcactggtggagatccatactgcaaatggt

SEQ ID NO: 386119 - DNA, 75 bp, synthetic construct
  source 1..75: mol_type = other DNA
ccgggttaaacttggtgattaaacaaggtaacctgagtggtagcctaaatgacatcaatgttggagcaccagggg

SEQ ID NO: 386120 - DNA, 75 bp, synthetic construct
  source 1..75: mol_type = other DNA
cagctgatatgaaaaaagttaaagcttggaacgggcagtacctggacttcagcagaccgaggtcgatgagggttg

SEQ ID NO: 386121 - DNA, 75 bp, synthetic construct
  source 1..75: mol_type = other DNA
atccaaaaggcaccctgtcgagctacatctatcccgcaatgtacggtgcgtatggcttcacttattccgatgaca

SEQ ID NO: 386122 - DNA, 75 bp, synthetic construct
  source 1..75: mol_type = other DNA
cgtatgaacacaccattgacaggtctgagcagattacggcttccgtcagtgatctcagtgaaagcaaaatggctg

SEQ ID NO: 386123 - DNA, 75 bp, synthetic construct
  source 1..75: mol_type = other DNA
ggtggcctggtgccctgctgaccgactccgcggcgaaagctaaagcgcttaaagactaccaacatgtcatggcac

SEQ ID NO: 386124 - DNA, 75 bp, synthetic construct
  source 1..75: mol_type = other DNA
tgcgcgacagagctgctcgcgaacttgatggtggttttcgcgcgcatcacaacgccctgatttatgccgctaatg

SEQ ID NO: 386125 - DNA, 75 bp, synthetic construct
  source 1..75: mol_type = other DNA
ggctcaggctttagacgttgagcaggttaatcagttgcagactgatatcgctggcatcgagagatccattgaaac

SEQ ID NO: 386126 - DNA, 75 bp, synthetic construct
  source 1..75: mol_type = other DNA
gtgctgctgccgtcactgcactgcagggcttctctgagtttgagaaattgactgctcagggcgtagatttcagga

SEQ ID NO: 386127 - DNA, 75 bp, synthetic construct
  source 1..75: mol_type = other DNA
cgttgggatcagctgggttgtcagactctttgctctgtttatcacactcggtggactgttcctgtacactaaaaa

SEQ ID NO: 386128 - DNA, 75 bp, synthetic construct
  source 1..75: mol_type = other DNA
cctggctgcaaatccggttccggtgctggatggcgaactggttggcgctctgcgtccgagtgacgcgcctctgac

SEQ ID NO: 386129 - DNA, 75 bp, synthetic construct
  source 1..75: mol_type = other DNA
tctggctgcaaatccgattccggtgctggatggcgaactggttggcgctctgcgtccgagcgatgcgccgctgac

SEQ ID NO: 386130 - DNA, 75 bp, synthetic construct
  source 1..75: mol_type = other DNA
gtgagcagagagaatgagcaggcagtacaggattccagcctttttgacgtggctgtagcgtgtttcttgagagga

SEQ ID NO: 386131 - DNA, 75 bp, synthetic construct
  source 1..75: mol_type = other DNA
ggcgatggttatgaacagcgtcgtgcggcgggactgaataaccagctgtcgacttacagcgtgacgatacgtgtt

SEQ ID NO: 386132 - DNA, 75 bp, synthetic construct
  source 1..75: mol_type = other DNA
ggcgagaaaactgaggcgctggagccgttccatccggaccgtatcgcttcccgtattctcggcatgggcgacgta

SEQ ID NO: 386133 - DNA, 75 bp, synthetic construct
  source 1..75: mol_type = other DNA
gcagcaagttaagcgcctgactcctgacgccgccacaacaggaactgctggtcaggtactgaatggtctgttcga

SEQ ID NO: 386134 - DNA, 75 bp, synthetic construct
  source 1..75: mol_type = other DNA
ggcgttaacttcgaggcgcgggcagaacttgtacggcgtcagcaggcagaaagcgatctgaacgcacaggccatg

SEQ ID NO: 386135 - DNA, 75 bp, synthetic construct
  source 1..75: mol_type = other DNA
ggaaagagttgtcacgtgcacgttcagcgcgtcaggaaagactgcgtgatattgaccagcgaatcaatgacgagt

SEQ ID NO: 386136 - DNA, 75 bp, synthetic construct
  source 1..75: mol_type = other DNA
tggatttgcctcccatctacgcccgtcctggcgatcgtagcgatgacctctccccgacagaaatggcgcaacgcc

SEQ ID NO: 386137 - DNA, 75 bp, synthetic construct
  source 1..75: mol_type = other DNA
atgagcaaggtattagtcctcaaatccagtattctggcagggtactctcagtctggtcagttgtctgattatttt

SEQ ID NO: 386138 - DNA, 75 bp, synthetic construct
  source 1..75: mol_type = other DNA
gtctggtcagttgtctgattattttgttgaacagtggcgtgaaaagcattccgctgatgaaatcaccgttcgtga

SEQ ID NO: 386139 - DNA, 75 bp, synthetic construct
  source 1..75: mol_type = other DNA
cgatgtgaaatttgtcttcgccgaagggatcgcatacggtcctgaaatggcagcgaaagcgcagtctgacgcgaa

SEQ ID NO: 386140 - DNA, 75 bp, synthetic construct
  source 1..75: mol_type = other DNA
cgatgacgatgtggctgcaacgattaaattcgttcgtcagcaactgaccaatctcaatatcacaggccgcttatc

SEQ ID NO: 386141 - DNA, 75 bp, synthetic construct
  source 1..75: mol_type = other DNA
aacagacactttccgttggccccgtggaaaatgttgtccagttggtgacacaaccgcaactgcgcgatcgcctct

SEQ ID NO: 386142 - DNA, 75 bp, synthetic construct
  source 1..75: mol_type = other DNA
atgaataaattacagtcgtatttcattgccagcgtactttacgtaatgacaccccatgcctttgcgcaaggaacg

SEQ ID NO: 386143 - DNA, 75 bp, synthetic construct
  source 1..75: mol_type = other DNA
gcagaacaaaaaatgatggcggatcaggcgggagatattgatctgcgcatagctgaagactcgctgcttgaatca

SEQ ID NO: 386144 - DNA, 75 bp, synthetic construct
  source 1..75: mol_type = other DNA
agatattgcctatgccgcaggtacaaatattgcgttcggtatggcacagcgtgggcttactgcaaaaacgcttcg

SEQ ID NO: 386145 - DNA, 75 bp, synthetic construct
  source 1..75: mol_type = other DNA
ctttatcggcattaccgatgtgaaatttgtcttcgccgaagggatcgcgtacggcccggaaatggcagcgaaagc

SEQ ID NO: 386146 - DNA, 75 bp, synthetic construct
  source 1..75: mol_type = other DNA
ccggaaggcctggtcaccggtaaaaagccatcgttatcaccagccgcggtgggatccataaagatggcccaacgg

SEQ ID NO: 386147 - DNA, 75 bp, synthetic construct
  source 1..75: mol_type = other DNA
gttgaacaatggcgcgaaaagcactccgctgatgaaatcaccgttcgcgacctgactgcaaatccgattccggta

SEQ ID NO: 386148 - DNA, 75 bp, synthetic construct
  source 1..75: mol_type = other DNA
gcgataatcagttcgggcaggattttacattgtacgaagcactgcgcacagtcgatcgtttgcttcgcgggcaaa

SEQ ID NO: 386149 - DNA, 75 bp, synthetic construct
  source 1..75: mol_type = other DNA
atgaataagcaacagcgaaatggcaagccccataacacgggatttcgtcgcaattactttgaaaatgggcgttat

SEQ ID NO: 386150 - DNA, 75 bp, synthetic construct
  source 1..75: mol_type = other DNA
agaaggctggaatcgtggtccacaaatgcccgcgcaatccgttcaccggaaaccgcatttttgaactgatcagcg

SEQ ID NO: 386151 - DNA, 75 bp, synthetic construct
  source 1..75: mol_type = other DNA
tcacaggtaaccacctcgctgtcggcatcgaccgggggcgtgctggtggccgctgtgcaatcggggattccatcc

SEQ ID NO: 386152 - DNA, 75 bp, synthetic construct
  source 1..75: mol_type = other DNA
ttcgcaatggtgcagaacgccacgctaaccgttttgctaccagtgcatcacgcagcaacatccgctacagcctga

SEQ ID NO: 386153 - DNA, 75 bp, synthetic construct
  source 1..75: mol_type = other DNA
atgaaaaaaaacactaatattccatactccaaatttcgtaatggcgtagaacgccacgctaaccgtttcgctatc

SEQ ID NO: 386154 - DNA, 75 bp, synthetic construct
  source 1..75: mol_type = other DNA
tcgtcttcccattcaggtggtgaaaattccgatggcagccccactgaaacaggcttttgatgagaacgttaaccg

SEQ ID NO: 386155 - DNA, 75 bp, synthetic construct
  source 1..75: mol_type = other DNA
gtcccgacgcaggcgtcgtaaaaaggggcagcgttcatccctgaaaggtggcgacagcgtgcttgtggtgggaaa

SEQ ID NO: 386156 - DNA, 75 bp, synthetic construct
  source 1..75: mol_type = other DNA
acgataagggaaggaaaaagcgtaatcgtcttcccattcaggtggtgaaaattccgatgtcggccccactgaaac

SEQ ID NO: 386157 - DNA, 75 bp, synthetic construct
  source 1..75: mol_type = other DNA
cgaactctcccaaggcttaaaggaatttcagctaaggaaggtgcgaataagcggggaaattcttctcggctgact

SEQ ID NO: 386158 - DNA, 75 bp, synthetic construct
  source 1..75: mol_type = other DNA
atcggcgaacacacctggctgattgagaaagctggaatcgtggttcacagatgcccacacaatccgtttaccgga

SEQ ID NO: 386159 - DNA, 75 bp, synthetic construct
  source 1..75: mol_type = other DNA
aaaacaaaccggcaagcacacctggacgattggcgacactggcatcgttattcacaaaagttttcgcagccctgt

SEQ ID NO: 386160 - DNA, 75 bp, synthetic construct
  source 1..75: mol_type = other DNA
gacaaaggcctgaagcgtcaggtactgaatcacgcgatgcgtaccggcgacagcacatacctcaagtcatttggc

SEQ ID NO: 386161 - DNA, 75 bp, synthetic construct
  source 1..75: mol_type = other DNA
tatccgacgcgaacgtctgccaaaagaactgagctatgcgctgaaacaacaactgaggatagtaataaagcgatg

SEQ ID NO: 386162 - DNA, 75 bp, synthetic construct
  source 1..75: mol_type = other DNA
aatatgaaggtacgattgcctatcagaaaaaattgaggtacttccgtaatggaaaattcttcccatactctgatt

SEQ ID NO: 386163 - DNA, 75 bp, synthetic construct
  source 1..75: mol_type = other DNA
aaccgcggtgatctccctgtgattaagctggggatcaggatgctggggcgtcgcccgaacagcatacttaaagcc

SEQ ID NO: 386164 - DNA, 75 bp, synthetic construct
  source 1..75: mol_type = other DNA
acaggttgcccgggagacaaaggtacgccggaaactggttaaggaacggtccagactgaaaagggcgacggtcag

SEQ ID NO: 386165 - DNA, 75 bp, synthetic construct
  source 1..75: mol_type = other DNA
gggaaaaaccgttaccccattgatgtggtgaaaatcccgatggcggccccactgaaacaggcgtttgatgagaat

SEQ ID NO: 386166 - DNA, 75 bp, synthetic construct
  source 1..75: mol_type = other DNA
atggcgataaaagggcttgatcaggcgattgataatctgagccgggttcgtaaaaacgccattccggctgcttct

SEQ ID NO: 386167 - DNA, 75 bp, synthetic construct
  source 1..75: mol_type = other DNA
atgatgggaccatggggcgaaatcatcatcgctgccggtttgatcgtttccgtttgcggcgcgtacttaagctgg

SEQ ID NO: 386168 - DNA, 75 bp, synthetic construct
  source 1..75: mol_type = other DNA
gggttttcattggtgtggaaggtgccgtggttgtttctgcgcgtgcgcgtaataaacgtgatgttggcaaagcga

SEQ ID NO: 386169 - DNA, 75 bp, synthetic construct
  source 1..75: mol_type = other DNA
tggcgaccgcgcccgcggcccaatgtccccggctgagttgaacaaaatcaacgccgaattctggaaacgtaacaa

SEQ ID NO: 386170 - DNA, 75 bp, synthetic construct
  source 1..75: mol_type = other DNA
cgattgacaatctgagccgggttcgtaaaaacgccattccggcggcttcagcaatgaccattaaccgcgtggcca

SEQ ID NO: 386171 - DNA, 75 bp, synthetic construct
  source 1..75: mol_type = other DNA
caacggcgattaatcagtcttcatcacaggttgcccgggagacaaaggttcgccggaaactggttaaggaacggt

SEQ ID NO: 386172 - DNA, 75 bp, synthetic construct
  source 1..75: mol_type = other DNA
caacggcgattaatcagtcttcatcacaggttgcccgggaaaccagggtgagacggaaactggtaaaggaacggt

SEQ ID NO: 386173 - DNA, 75 bp, synthetic construct
  source 1..75: mol_type = other DNA
actggttaaggaacggtccagactgaaacgggccacggtcagaaatccgaatgcaaaaattatcgttaaccgcgg

SEQ ID NO: 386174 - DNA, 75 bp, synthetic construct
  source 1..75: mol_type = other DNA
gacatcgacggtgcgttagttggcggtgcttctctgaaagctgatgctttcgcagtgatcgtcaaagctgctgaa

SEQ ID NO: 386175 - DNA, 75 bp, synthetic construct
  source 1..75: mol_type = other DNA
atggcaaaaacaaaacaggaatggttatatcagttacgtcgctgttccagcttaaatacacttgagaaaattatt

SEQ ID NO: 386176 - DNA, 75 bp, synthetic construct
  source 1..75: mol_type = other DNA
cacgcagacgccgcgtaacccggatacaggagcgcattcgctttatctggaataacgaagcacgcacgctgaaaa

SEQ ID NO: 386177 - DNA, 75 bp, synthetic construct
  source 1..75: mol_type = other DNA
tatcttcgtcttccggggccgcagtggcaaaatggtgaaaatactgtgtgaaccgccccgggtttcctggagagt

SEQ ID NO: 386178 - DNA, 75 bp, synthetic construct
  source 1..75: mol_type = other DNA
atgcagccggtggtgcatttggtaactggctggatgggaaggatccattatctggtgctgcgatgagtggtggta

SEQ ID NO: 386179 - DNA, 75 bp, synthetic construct
  source 1..75: mol_type = other DNA
gcgaaaaaattcgcggtgctgaaagagcagggcctgactccggttctgtgcatcggtgaaaccgaagctgaaaac

SEQ ID NO: 386180 - DNA, 75 bp, synthetic construct
  source 1..75: mol_type = other DNA
ctatcttgatgcccggcgtagcggcgatttcatgctatcgcggcagtcgtgggatgcgacgtacaatgatgcatc

SEQ ID NO: 386181 - DNA, 75 bp, synthetic construct
  source 1..75: mol_type = other DNA
ggaaaaatgcaaagtatgacgcgttattgaaccaggccgcgcaaaccaccgacgcgggaaaacgtaatgcgctgt

SEQ ID NO: 386182 - DNA, 75 bp, synthetic construct
  source 1..75: mol_type = other DNA
cttgggctacgaacgccagcaacaacattgacgccgacagaggtagaagggtttcgtgcgccaacgtttgaggaa

SEQ ID NO: 386183 - DNA, 75 bp, synthetic construct
  source 1..75: mol_type = other DNA
gaagatatggccaaacttcagcaacttgttgccctgctggtacgcttcgaaaaactgcttgagtccgacgcgcca

SEQ ID NO: 386184 - DNA, 75 bp, synthetic construct
  source 1..75: mol_type = other DNA
atattacaatttcaatatccagaaaccaccgtttgacgatgttcgtgtccggcgggcgctatatctgacggtcga

SEQ ID NO: 386185 - DNA, 75 bp, synthetic construct
  source 1..75: mol_type = other DNA
ctgcaaaagccaatgagtgagcgtgtcgcgatggcaaaagccttgctgaaacaggcgggatacgacgcctctcat

SEQ ID NO: 386186 - DNA, 75 bp, synthetic construct
  source 1..75: mol_type = other DNA
tggttcttaccctaaattaagtgatgggcgtgatgctgtgaaagttgctactgaacgttgtaatagaacaataac

SEQ ID NO: 386187 - DNA, 75 bp, synthetic construct
  source 1..75: mol_type = other DNA
attcgggctggataaagccgatcccgctgctaatgctggtagcctgaaaaccgatccatggacactgaaaatcag

SEQ ID NO: 386188 - DNA, 75 bp, synthetic construct
  source 1..75: mol_type = other DNA
aaatcagagaagtgtattcttcgctactacataagttcggtgacgcttacggcgaaagaactcctggaagcaaca

SEQ ID NO: 386189 - DNA, 75 bp, synthetic construct
  source 1..75: mol_type = other DNA
ctggcatgttatgcaacgtcttccccaggccagatatgacggtggcatgtcatgcagcgtgtggccgggaaaaat

SEQ ID NO: 386190 - DNA, 75 bp, synthetic construct
  source 1..75: mol_type = other DNA
ggaaactggttaaggaacggtccagactgaaacgggcgacggtcagaaatccgaatgcaaaaattatcgttaacc

SEQ ID NO: 386191 - DNA, 75 bp, synthetic construct
  source 1..75: mol_type = other DNA
aaatatccttatgtcgaaggattgcgtctcgacgaagcaatgcatccgctcacactgatgaccgtgggtgtttat

SEQ ID NO: 386192 - DNA, 75 bp, synthetic construct
  source 1..75: mol_type = other DNA
tgcttcgcacagcgtggcggcgcgaatcgacgacgccaaaccggtgctgattgtctcggcagacgccggggcgcg

SEQ ID NO: 386193 - DNA, 75 bp, synthetic construct
  source 1..75: mol_type = other DNA
accgctggctggagaaacagccagaggcgctggcgctgattgccgtctcttcggaaacagaagaagagcgcacct

SEQ ID NO: 386194 - DNA, 75 bp, synthetic construct
  source 1..75: mol_type = other DNA
gggacgaggcaagtccacactgggaagaatggcaaagcgcaatcaagatcagcgaattattggatatggaaacgc

SEQ ID NO: 386195 - DNA, 75 bp, synthetic construct
  source 1..75: mol_type = other DNA
gatgcgggaagatgaatgccagattgttcgtggagaagcgggagaaaatctggcagtttgtcgacatatcgcgat

SEQ ID NO: 386196 - DNA, 75 bp, synthetic construct
  source 1..75: mol_type = other DNA
ttttacgccgagtttccaaaaaagatgggcctcaagggtaaaagctcggcgagtggccggagctcgctatccagc

SEQ ID NO: 386197 - DNA, 75 bp, synthetic construct
  source 1..75: mol_type = other DNA
gttcagttcctgcaatggggatatcgttgtggaggcggaaattaccaggggggaaggtggtctttatcaccttgc

SEQ ID NO: 386198 - DNA, 75 bp, synthetic construct
  source 1..75: mol_type = other DNA
aaatccctcaaaagaagagatcggaataatgcttgagtattccagggaaaagtttggtggtgtactcaaacttac

SEQ ID NO: 386199 - DNA, 75 bp, synthetic construct
  source 1..75: mol_type = other DNA
aaatgaaagcccttgaacgtctcaaaagctatctcaacttcgatgaaatcaacgccatttctgctgacgaacccg

SEQ ID NO: 386200 - DNA, 75 bp, synthetic construct
  source 1..75: mol_type = other DNA
gaaggaagcttactcttaactcgtcagggtcaattagtagagaacttcattgacactctggaaaactggcgtgac

SEQ ID NO: 386201 - DNA, 75 bp, synthetic construct
  source 1..75: mol_type = other DNA
gggcagatttaaccctttccggcagcacctccggcgtggaagtggggcaaacggtcaccgttacctttggcggga

SEQ ID NO: 386202 - DNA, 75 bp, synthetic construct
  source 1..75: mol_type = other DNA
agagctttttagctattcggcaagtgagttatcagatgaagcattaaaagcccgtgtaacgtgctctaagagcgt

SEQ ID NO: 386203 - DNA, 75 bp, synthetic construct
  source 1..75: mol_type = other DNA
tgtaaaattgcctggagataaaaaatacacaaacttaaaaagtcctctttttcgtcagaattacattgagacaag

SEQ ID NO: 386204 - DNA, 75 bp, synthetic construct
  source 1..75: mol_type = other DNA
gtacaagggctattgaaaatgtgaataaactggaacaacagaaggattatgtctatttctcaacacatgaaggtc

SEQ ID NO: 386205 - DNA, 75 bp, synthetic construct
  source 1..75: mol_type = other DNA
tactcaacacgatcaggctactgcgcaggtgcataataaacaggaaatttattgtataaactttagtcgcttcca

SEQ ID NO: 386206 - DNA, 75 bp, synthetic construct
  source 1..75: mol_type = other DNA
agaaaaaatagtgattatagtgttattttaaagagagtaaaagcagatcttgatgtagagcgtaattctgcattt

SEQ ID NO: 386207 - DNA, 75 bp, synthetic construct
  source 1..75: mol_type = other DNA
ctggcaaacagaatggaaaacagatcgcattctgattcagcaatgcgacggaatgctgatagacgattctcagaa

SEQ ID NO: 386208 - DNA, 75 bp, synthetic construct
  source 1..75: mol_type = other DNA
gatgctcttggaaaacaatttgtccaggccagagaagagcatcaggaatcgcagcagcagcgtgacgattcacag

SEQ ID NO: 386209 - DNA, 75 bp, synthetic construct
  source 1..75: mol_type = other DNA
gcctaagagtccaactaacttttcaggaaattaacttcaaagccattgtgggtcagactgatatttcggctgcaa

SEQ ID NO: 386210 - DNA, 75 bp, synthetic construct
  source 1..75: mol_type = other DNA
cgcttcggtgaccaacggcgttggcaatactggcagcggttcgcgagatattactatcgacgccaacctgccagg

SEQ ID NO: 386211 - DNA, 75 bp, synthetic construct
  source 1..75: mol_type = other DNA
cgacactctggaaaactggcgtgaccagaagcaaattatttcggtcatctgtaaagatggaattaaaattgatga

SEQ ID NO: 386212 - DNA, 75 bp, synthetic construct
  source 1..75: mol_type = other DNA
ttccattattacgagttttaaagcctctaaagatgttggaatttcaaacggattaagaatccaattaacttttca

SEQ ID NO: 386213 - DNA, 75 bp, synthetic construct
  source 1..75: mol_type = other DNA
gttgagtgaaattgcgaaacgtttaggaccagacgtttatcaaaccttcactgaaggtcgtagccaacatgaatg

SEQ ID NO: 386214 - DNA, 75 bp, synthetic construct
  source 1..75: mol_type = other DNA
ctgactgaaccagacaccaataccaatgcggagggggaagccgctgccgtggatgtacaactgatatacctgact

SEQ ID NO: 386215 - DNA, 75 bp, synthetic construct
  source 1..75: mol_type = other DNA
gcttcaaaagtgcttaagtcggggaatgctttacggaaatttagtgtgaatcctaataagaagggtacttattga

SEQ ID NO: 386216 - DNA, 75 bp, synthetic construct
  source 1..75: mol_type = other DNA
ccgacgacggtattgaatttatcatcaatggcaaagtgcgggaaacgcggctgttcggtgaaaatttgacacttg

SEQ ID NO: 386217 - DNA, 75 bp, synthetic construct
  source 1..75: mol_type = other DNA
gggcaaactgatgtttcggctgctactggaaggacttctaccacgaatgatggcggtgctacttctaagaagaat

SEQ ID NO: 386218 - DNA, 75 bp, synthetic construct
  source 1..75: mol_type = other DNA
gtaatggtatgttgatgtgtcaggagctatataatcgctctacgagtgaactcactaatgagcaacttcaagccc

SEQ ID NO: 386219 - DNA, 75 bp, synthetic construct
  source 1..75: mol_type = other DNA
taaagatgttggtatttcaaatggtctaagaatccagctaacttttcaggaaattaacttcaaagctattgtagg

SEQ ID NO: 386220 - DNA, 75 bp, synthetic construct
  source 1..75: mol_type = other DNA
actggtaacactacaacgacattaaatcagcctatgctatcgtgcaaagagctaatgagtattaacgatgtatcc

SEQ ID NO: 386221 - DNA, 75 bp, synthetic construct
  source 1..75: mol_type = other DNA
agccaggttttgacgagcaggtttactatctcacgttgaatagtgacgatgacggaatgagtaaggttgcgttgg

SEQ ID NO: 386222 - DNA, 75 bp, synthetic construct
  source 1..75: mol_type = other DNA
agaatagagaaaggtgatgcattgaaggaacaggccaccgaacaggaacaggccaccgaacaggcacagaccaca

SEQ ID NO: 386223 - DNA, 75 bp, synthetic construct
  source 1..75: mol_type = other DNA
ggtcgattccgttctccgttatgctggtcgttccgctgggggttatcggtgcgttgctggctgccaccttccgtg

SEQ ID NO: 386224 - DNA, 75 bp, synthetic construct
  source 1..75: mol_type = other DNA
tggtatcaacaacaagatgctcgtgccctcgcccctgccagccgcgactgggcgctcatctggtgggatagcgta

SEQ ID NO: 386225 - DNA, 75 bp, synthetic construct
  source 1..75: mol_type = other DNA
gattttatccgtggacaaaattgccaacaggataacagcacctgggaacgttttgagcagaacgtcagctggagt

SEQ ID NO: 386226 - DNA, 75 bp, synthetic construct
  source 1..75: mol_type = other DNA
cgatcccgcgttaccggtggcaacgctatgccacgcgatttctgccgaagaagcgacggagcccagcacagtaaa

SEQ ID NO: 386227 - DNA, 75 bp, synthetic construct
  source 1..75: mol_type = other DNA
cgggaatcaacattcgcacatttgaggttgccgcaaccggtccgggcgtcgacaccccggcatgccttgaaaagg

SEQ ID NO: 386228 - DNA, 75 bp, synthetic construct
  source 1..75: mol_type = other DNA
aagcggctgagccaagcacggtaaaagtggtggtaaatacccgccaggatgcgctttatttcagccgttcgccga

SEQ ID NO: 386229 - DNA, 75 bp, synthetic construct
  source 1..75: mol_type = other DNA
ctgagcggcagcggtgaggagctgcgccgggtactgctggtcaacgggctgtcctatatcagcaccaccggtgag

SEQ ID NO: 386230 - DNA, 75 bp, synthetic construct
  source 1..75: mol_type = other DNA
ctccgtctgcggcgggcctgactactggcagacatggcgggccaccggcaacgcgctggagggatgcgccagccg

SEQ ID NO: 386231 - DNA, 75 bp, synthetic construct
  source 1..75: mol_type = other DNA
gccgatggaaatgctcagtggtagcggtgaggaactacgccgggtactgctggttaacgggctgtcctatatcag

SEQ ID NO: 386232 - DNA, 75 bp, synthetic construct
  source 1..75: mol_type = other DNA
aatggtgagccggtctatctgacaaacaagggcttacacgggtattcacttcccttgctgtcacagcctttgaat

SEQ ID NO: 386233 - DNA, 75 bp, synthetic construct
  source 1..75: mol_type = other DNA
tattgaaagagtatacccgaaggctgacgccggaaaatgccgggaatcaggttggccgggctgttacccgttttg

SEQ ID NO: 386234 - DNA, 75 bp, synthetic construct
  source 1..75: mol_type = other DNA
ttctgctggttaacgggctttcttacatcaacattaacggcatggccagagcattcctgatggaatatatctcgc

SEQ ID NO: 386235 - DNA, 75 bp, synthetic construct
  source 1..75: mol_type = other DNA
tgcctcgcacagcgtggcggcgcggattgatgacgctaaaccggtgctgattgtctcggctgatgccggagcgcg

SEQ ID NO: 386236 - DNA, 75 bp, synthetic construct
  source 1..75: mol_type = other DNA
tctttcaggatgtggagccatgggcacagcgatcaaaaaacgaaatctggaagtaaaaacccagatgagtgaaac

SEQ ID NO: 386237 - DNA, 75 bp, synthetic construct
  source 1..75: mol_type = other DNA
gcaggatatcctgaccaccagcggaacctccctgactgacattaatgctctggcttacggacgtggccccggtag

SEQ ID NO: 386238 - DNA, 75 bp, synthetic construct
  source 1..75: mol_type = other DNA
cgtactcaaacccgaactcgttcatgaacggatgcaacagctttccggggaatgggtgacggtaggtacaggctg

SEQ ID NO: 386239 - DNA, 75 bp, synthetic construct
  source 1..75: mol_type = other DNA
cgaacaacgtcggcaattagaagagcgactggtactgcaactgcgaatgatttcgaaaggggcttattactggta

SEQ ID NO: 386240 - DNA, 75 bp, synthetic construct
  source 1..75: mol_type = other DNA
tattattgcgggaacgctccggcacctccgctgcgtttcgtgccgccgttgcgcgtgaaattcagcacttcattg

SEQ ID NO: 386241 - DNA, 75 bp, synthetic construct
  source 1..75: mol_type = other DNA
atctggaactcgaaaaccatatgccgcgtgcgtttactgaagcgcaagccgaagcaatggtgacaattgtcttca

SEQ ID NO: 386242 - DNA, 75 bp, synthetic construct
  source 1..75: mol_type = other DNA
acagcctgcaggaaacgcacgccacacctgacgggcatctggttaaacaaaccggtaaacacacctggctgatta

SEQ ID NO: 386243 - DNA, 75 bp, synthetic construct
  source 1..75: mol_type = other DNA
gcgtggctggaatccaacgaaacctcctgcattctctacacctccggcacgaccggcaaacctaaaggtgtgcag

SEQ ID NO: 386244 - DNA, 75 bp, synthetic construct
  source 1..75: mol_type = other DNA
gtgcagcgtgatgtcggcggatatgcggtggcgctggcgacctcgatggacaccatttttggcggcaaagcgggc

SEQ ID NO: 386245 - DNA, 75 bp, synthetic construct
  source 1..75: mol_type = other DNA
gcaggatatcctgaccaccagcggaacttccctgactgatattaacgctctggcttacgggcgcggccccggtag

SEQ ID NO: 386246 - DNA, 75 bp, synthetic construct
  source 1..75: mol_type = other DNA
tcagcgcgctgaccatggagagcatcatcaaccatatttcggtgctcaacccgcagcgaattctgaaagagatcg

SEQ ID NO: 386247 - DNA, 75 bp, synthetic construct
  source 1..75: mol_type = other DNA
gagtcggtcaactcggcactattgcgtaccttccagcggcgtatccaggtatgtattgacttaccgggtattcgc

SEQ ID NO: 386248 - DNA, 75 bp, synthetic construct
  source 1..75: mol_type = other DNA
acgcatagacgacggtctgtggcgtctggggtccctgttagagacgcattacggcgaactcaaggaaaacgaaac

SEQ ID NO: 386249 - DNA, 75 bp, synthetic construct
  source 1..75: mol_type = other DNA
aaaaaattaaagagaatagttagtaatcaaggtattattgttcattcaggcacgaaaattcagaaggatggattc

SEQ ID NO: 386250 - DNA, 75 bp, synthetic construct
  source 1..75: mol_type = other DNA
cgggagccgctctatcgcagcatgaaattacgtgtctgcgtggaatttctggcggcatggtgccagcaacggctg

SEQ ID NO: 386251 - DNA, 75 bp, synthetic construct
  source 1..75: mol_type = other DNA
attcgcaaagccgcgttatctatgcgcgcagggggtgtaggatattatccacgtagtaactttgtgcatattgat

SEQ ID NO: 386252 - DNA, 75 bp, synthetic construct
  source 1..75: mol_type = other DNA
cattactatccaagcgaaacgattcactgccaccatcacaagaacacctgatcgtagagtggccttgatcaaaaa

SEQ ID NO: 386253 - DNA, 75 bp, synthetic construct
  source 1..75: mol_type = other DNA
cattactatccaagcgaaacgattcactgccaccatcacaagaacacctagtcgtagagtggccttgatcaaaaa

SEQ ID NO: 386254 - DNA, 75 bp, synthetic construct
  source 1..75: mol_type = other DNA
cctacctgtccgaccgctacagcgaaaggaaagagagtcatcaggagctcgcggcacgggtcaatcaggccaaaa

SEQ ID NO: 386255 - DNA, 75 bp, synthetic construct
  source 1..75: mol_type = other DNA
agagaaacgttgccggcttgccaggtgcaagtagcatcattctggcagaactgacaaagcgggtgcaccggattt

SEQ ID NO: 386256 - DNA, 75 bp, synthetic construct
  source 1..75: mol_type = other DNA
aaaaactgaaccgcatgctggaggaaatgtttgaagagtccgatatgtggttggtttcagagttcccgactgttc

SEQ ID NO: 386257 - DNA, 75 bp, synthetic construct
  source 1..75: mol_type = other DNA
gctgcgcgccctgtccgagtggtcagagggacaagtctggtgcagcccggaacgccacggtcagattaccagtgt

SEQ ID NO: 386258 - DNA, 75 bp, synthetic construct
  source 1..75: mol_type = other DNA
ctacagaggaatcgtgagaacgaggcgaatattagcgatgcccacccacaatgtcaaagcctgttttttaaattt

SEQ ID NO: 386259 - DNA, 75 bp, synthetic construct
  source 1..75: mol_type = other DNA
gtttgttaactgcaatgggcgcagacgtccgcatttttaatccatctggccttccacttcctgatgatgcaccgg

SEQ ID NO: 386260 - DNA, 75 bp, synthetic construct
  source 1..75: mol_type = other DNA
cgtcagtgccgtgattgattacctgacaacgctttcttatgtcgacaatacccgaattggtgcgatgggaatttg

SEQ ID NO: 386261 - DNA, 75 bp, synthetic construct
  source 1..75: mol_type = other DNA
ttcttgagcagctgcgccagatgaaaaatatgggcggcatggccagcctgatgggcaaactgccgggcatggggc

SEQ ID NO: 386262 - DNA, 75 bp, synthetic construct
  source 1..75: mol_type = other DNA
ctgaaagaagcgaagctgaaattctacgatgtgctgctggtggatactgccggtcgtctgcacgttgacgaagcg

SEQ ID NO: 386263 - DNA, 75 bp, synthetic construct
  source 1..75: mol_type = other DNA
tggtcgtctgcacgttgacgaagcgatgatggacgagatcaaacaagtccatgcgtcgattaatccggttgaaac

SEQ ID NO: 386264 - DNA, 75 bp, synthetic construct
  source 1..75: mol_type = other DNA
caaaccgatcaaattcctcggtgttggtgagaaaacagaggcgctggaaccgttccatccggaccgcatcgcttc

SEQ ID NO: 386265 - DNA, 75 bp, synthetic construct
  source 1..75: mol_type = other DNA
tccttgagcaactgcgccagatgaaaaatatgggcggcatggccagcttgatgggcaaactgccgggcatggggc

SEQ ID NO: 386266 - DNA, 75 bp, synthetic construct
  source 1..75: mol_type = other DNA
gaaattagccagcaagctgaaaaaaggtgacggcttcgatctcaacgactttcttgagcaactgcgccagatgaa

SEQ ID NO: 386267 - DNA, 75 bp, synthetic construct
  source 1..75: mol_type = other DNA
tttttgaacgttggctctctcaggcgtgtgaagccaaactggcagaccctaccgcgatggtggtcgctaccgtgg

SEQ ID NO: 386268 - DNA, 75 bp, synthetic construct
  source 1..75: mol_type = other DNA
gcgattactgctgagcttaaaaagagagtaaaaagcggtcaaatagccagagccatagagcttgtagcctgccct

SEQ ID NO: 386269 - DNA, 75 bp, synthetic construct
  source 1..75: mol_type = other DNA
gagcgggtaaaccagttagaaaaagagcgccctattttgctaagggcgtatcgtgatgatgacccattgtatctg

SEQ ID NO: 386270 - DNA, 75 bp, synthetic construct
  source 1..75: mol_type = other DNA
ggtgaaattacgatggacgaggcaatcaagcgccggacggctgaatggtcagtgagtaataccggattaaccgga

SEQ ID NO: 386271 - DNA, 75 bp, synthetic construct
  source 1..75: mol_type = other DNA
gacattaacggcgcgtgtgtgcagtgatacgcaacaattaagggcgtggatagtaagggatttaagaaaatacat

SEQ ID NO: 386272 - DNA, 75 bp, synthetic construct
  source 1..75: mol_type = other DNA
actgcgatggtcgtcgctaccgttgatgaacatggccaaccgtatcagcgcattgttttactaaaacattacgat

SEQ ID NO: 386273 - DNA, 75 bp, synthetic construct
  source 1..75: mol_type = other DNA
aacgcaatgtaaaggggcttaaatgggccagagagattatcctggcagaactgacgaagcgggtgcatgagattt

SEQ ID NO: 386274 - DNA, 75 bp, synthetic construct
  source 1..75: mol_type = other DNA
gtatccggcggcaaaggtcgaacaggttaagggtggcctgctgctgtattgttcccctcccccaattccatataa

SEQ ID NO: 386275 - DNA, 75 bp, synthetic construct
  source 1..75: mol_type = other DNA
gacgattattcgtagcgagccgcagggcgaatttcctgatgtgaaatatcgcttcttccgtaagtcttgccagca

SEQ ID NO: 386276 - DNA, 75 bp, synthetic construct
  source 1..75: mol_type = other DNA
tgaacaaggtgccggaaggcgtctcgcgcctgatgattattcgtagcgagccgcagggcgaatttcctgatgtga

SEQ ID NO: 386277 - DNA, 75 bp, synthetic construct
  source 1..75: mol_type = other DNA
ggcagggtaaaggcattgttgcagcttattttgcctcactttattatcgccgtggattacgggttgcggcaaatt

SEQ ID NO: 386278 - DNA, 75 bp, synthetic construct
  source 1..75: mol_type = other DNA
ctaagccatactttcaaaacaacattcagcatattgataagagaaatgaagggccggagtcccttgaagaaagaa

SEQ ID NO: 386279 - DNA, 75 bp, synthetic construct
  source 1..75: mol_type = other DNA
gctgcttgccgcttacagcttggcttcaagggccgcacgttcaacggccaacccgttgagcaatttgacgcgtgg

SEQ ID NO: 386280 - DNA, 75 bp, synthetic construct
  source 1..75: mol_type = other DNA
gattctggctgccgtcaccctgtatacagagagaaaagcgtatgaaaaagcccccgccactcatcgccccggtcc

SEQ ID NO: 386281 - DNA, 75 bp, synthetic construct
  source 1..75: mol_type = other DNA
actggcctccagccgacagcagggatttgaaatgctgttcaatgaagtttatgcccaggtctatgaccgggtgct

SEQ ID NO: 386282 - DNA, 75 bp, synthetic construct
  source 1..75: mol_type = other DNA
ggacgcgccgcaaaatgcctgttcagcgaaaacggcggtgatattggccatacgccggaatgtcactggcaggta

SEQ ID NO: 386283 - DNA, 75 bp, synthetic construct
  source 1..75: mol_type = other DNA
tcctctcgataaccgcgctctgtacgcgctaaaaggctcggcattgtcgttagatgtttatacgtggctggcaca

SEQ ID NO: 386284 - DNA, 75 bp, synthetic construct
  source 1..75: mol_type = other DNA
gtgacagacaaaccattaccagcgaagcaaataaaaacggtaaacaccggcatcgcaattaaagagaatccccca

SEQ ID NO: 386285 - DNA, 75 bp, synthetic construct
  source 1..75: mol_type = other DNA
ccatcggcttcaccgaattgaaggccgccccgttttactttattgggctaacctgcgcgatcagtttgctcagga

SEQ ID NO: 386286 - DNA, 75 bp, synthetic construct
  source 1..75: mol_type = other DNA
actgaatgttgacggtgaaagggtgacgttctggtcaggcccgtcggggacggcatcaaagggggatactctgac

SEQ ID NO: 386287 - DNA, 75 bp, synthetic construct
  source 1..75: mol_type = other DNA
aattgcaccagattacggtcaggaagccacgacgaagctcatcaccactgcacgttatggcaaagagcaactcat

SEQ ID NO: 386288 - DNA, 75 bp, synthetic construct
  source 1..75: mol_type = other DNA
gatgattcgcctggtatcagcattgggtacatcttcacagatgatgatgttcctgctgaccctggtgatgagcat

SEQ ID NO: 386289 - DNA, 75 bp, synthetic construct
  source 1..75: mol_type = other DNA
gatgatggcggaatggcttggcggtgatgcgtcaccaggtatcaacgttggctacattttcgctgatgcagatgt

SEQ ID NO: 386290 - DNA, 75 bp, synthetic construct
  source 1..75: mol_type = other DNA
aacgcaatgtagaggggctcgaaggggccagagaaattattctggccgagctgacgaagcgggtgcaccagattt

SEQ ID NO: 386291 - DNA, 75 bp, synthetic construct
  source 1..75: mol_type = other DNA
aaaggaattttgatggtcttcccggtgcaaaagatatcattctgggcgaattgaccaagagggttcaccggattt

SEQ ID NO: 386292 - DNA, 75 bp, synthetic construct
  source 1..75: mol_type = other DNA
tgcaaaagatatcattctgggcgagttaactaagagggttcaccggatcttccccgatgctgatgttcgggttaa

SEQ ID NO: 386293 - DNA, 75 bp, synthetic construct
  source 1..75: mol_type = other DNA
ataaccgaagaaatgaacacgcttaattacccgtggggagcggtggcgatgcctggtgaatatgtctggatgaat

SEQ ID NO: 386294 - DNA, 75 bp, synthetic construct
  source 1..75: mol_type = other DNA
gaggaatggaccgtgaattcgaattcgtcgcggatgtggcggcaaacaaggcaaacgcattagttccgcgatata

SEQ ID NO: 386295 - DNA, 75 bp, synthetic construct
  source 1..75: mol_type = other DNA
acgttctggtcaggcccgtcggggacggcatcaaagggggatactctgactgacaaaatgctttcgtttgatgtg

SEQ ID NO: 386296 - DNA, 75 bp, synthetic construct
  source 1..75: mol_type = other DNA
gaaaaaaagtggtgtgattgacgattgcctaacagtaccaacagaacacgtgaaggtaagctttagagaatcatt

SEQ ID NO: 386297 - DNA, 75 bp, synthetic construct
  source 1..75: mol_type = other DNA
ataacgcgaatgacacctttgatgttgctaattatatctataccactaaaggcgaaaatattatccataacgacg

SEQ ID NO: 386298 - DNA, 75 bp, synthetic construct
  source 1..75: mol_type = other DNA
ttagctggtttatgaacggcgttgagacggcaaacgaatgcagattaataacgcgcgggcggctggcttttataa

SEQ ID NO: 386299 - DNA, 75 bp, synthetic construct
  source 1..75: mol_type = other DNA
ctgaaaactggcttcagggctggggcgggacgctggttgtcgacggactgaaccgccccgggaatcctggagact

SEQ ID NO: 386300 - DNA, 75 bp, synthetic construct
  source 1..75: mol_type = other DNA
ctatattgaaatacattgaaagaaacattgaggcttcctcaattaatataaatactctggttgaatattcaggct

SEQ ID NO: 386301 - DNA, 75 bp, synthetic construct
  source 1..75: mol_type = other DNA
ctggccgaattggccaggtacatgcagctaacatcgccagccacagcgcgaccacactctggtccgtggttgacc

SEQ ID NO: 386302 - DNA, 75 bp, synthetic construct
  source 1..75: mol_type = other DNA
tactcacgctgctatagactacaaagcctatgctaaggccctgaatgagtaccgccaggcagatgaagatctgaa

SEQ ID NO: 386303 - DNA, 75 bp, synthetic construct
  source 1..75: mol_type = other DNA
tgattacctggctggcgtactggctgatgctcggctacgtcatcatcccgttccgctggctgtccggtacataca

SEQ ID NO: 386304 - DNA, 75 bp, synthetic construct
  source 1..75: mol_type = other DNA
ggttaaacagcgcattcatgttgttatgcagtggggatgggcgcacggtttttgtgtagcaaatcctgttgatgt

SEQ ID NO: 386305 - DNA, 75 bp, synthetic construct
  source 1..75: mol_type = other DNA
ggcaggccattcacattctggaaaatatacgtggtttgcatgatgaactagtgtttccttctcccagaaagcagc

SEQ ID NO: 386306 - DNA, 75 bp, synthetic construct
  source 1..75: mol_type = other DNA
tgaatgggggtggtaagtcgacctacatcgcgctgctgttatcgatttttgagccgtccgttagtgacttcaccc

SEQ ID NO: 386307 - DNA, 75 bp, synthetic construct
  source 1..75: mol_type = other DNA
gcctgactcatttgcggtaaatgtttatcatttattgcatgcaacacaggtattacatatgtcaagtaatcacga

SEQ ID NO: 386308 - DNA, 75 bp, synthetic construct
  source 1..75: mol_type = other DNA
agttttactcacccgtaaaaggtaaaactgttagcgtcttcggtgaaacctgtgccactcccgtcggccctgccg

SEQ ID NO: 386309 - DNA, 75 bp, synthetic construct
  source 1..75: mol_type = other DNA
gagcagttaggtaagcgcagagcactgcttgaatatgatctcgtgcagcatcggttcaacaaacaaaaagcgata

SEQ ID NO: 386310 - DNA, 75 bp, synthetic construct
  source 1..75: mol_type = other DNA
aacgagtccttcctgaaggatgtgctggctaactggctggcgtttcttgatccggctaaacagctggaaagcatc

SEQ ID NO: 386311 - DNA, 75 bp, synthetic construct
  source 1..75: mol_type = other DNA
gatgcggctgagcggctgcgggaactggtagcgcatgaagttgaacgtcagggagagttagaggggattcgtcgt

SEQ ID NO: 386312 - DNA, 75 bp, synthetic construct
  source 1..75: mol_type = other DNA
gcgctggcgctgaaagatcagactgaacggttacgcggggccggagccgagttaagccagttacgcctggaagag

SEQ ID NO: 386313 - DNA, 75 bp, synthetic construct
  source 1..75: mol_type = other DNA
gcgcccggaatgcagcatatgccgcctcccgacgagatgaagggcatgtcgccacaggatgcgctgcgtgccgtg

SEQ ID NO: 386314 - DNA, 75 bp, synthetic construct
  source 1..75: mol_type = other DNA
ttgagaataataatcttctttattattaacttactcttatcgaaagcatgggctgtagatattcccatcaatata

SEQ ID NO: 386315 - DNA, 75 bp, synthetic construct
  source 1..75: mol_type = other DNA
tacagcaaaaatatataaaaatgataacatctcaattaatgagggagagttcaacgctactgcacttataaacgt

SEQ ID NO: 386316 - DNA, 75 bp, synthetic construct
  source 1..75: mol_type = other DNA
ctttctgcccgtctacaggagaaaaaagtcttctgggtggggggcattgaagggtacaaaacggacgaactggaa

SEQ ID NO: 386317 - DNA, 75 bp, synthetic construct
  source 1..75: mol_type = other DNA
ccggtatcagcagatctaccgttttcgtggcgcggatgatgccctgtctcatccgtctctggccggtgccgaccg

SEQ ID NO: 386318 - DNA, 75 bp, synthetic construct
  source 1..75: mol_type = other DNA
ggtgcagggtggtactggttggcgaccgttaccagcagatttatcgttttcgtggtgccagcgatgcactgtcgc

SEQ ID NO: 386319 - DNA, 75 bp, synthetic construct
  source 1..75: mol_type = other DNA
atgcagtggggctgggcgcatggtttttgtgtggcgaatcctgttgatgtggttgatcatttgcttccacagcaa

SEQ ID NO: 386320 - DNA, 75 bp, synthetic construct
  source 1..75: mol_type = other DNA
tgaccttatcagaaacggcaagccgggttaaacagcgcattcatgttgttatgcagtggggctgggcgcatggtt

SEQ ID NO: 386321 - DNA, 75 bp, synthetic construct
  source 1..75: mol_type = other DNA
caatattgtgcaccaaccgcccgctgcggcattgttgctggaacggctggaaaaagtttgccagtggttaaacag

SEQ ID NO: 386322 - DNA, 75 bp, synthetic construct
  source 1..75: mol_type = other DNA
ttgagaataacagtctttttattaacgttcctttcctttttatctgatttatgggcggttgatattccaatcaac

SEQ ID NO: 386323 - DNA, 75 bp, synthetic construct
  source 1..75: mol_type = other DNA
atgcagaattgtctcctggatgggaaaatccaaagcatgtaaggcagtggttatcgacgcttgagaattacgcgt

SEQ ID NO: 386324 - DNA, 75 bp, synthetic construct
  source 1..75: mol_type = other DNA
tggaggcagttaccgctttttgtggcgaccagtgtgtataccgatgaaccttataatgttacccgcgcactgtta

SEQ ID NO: 386325 - DNA, 75 bp, synthetic construct
  source 1..75: mol_type = other DNA
cacatacttacgctatagatacagattgccgctcccctgaggacatgctcccatgtcgcaatcacgaccgcgtat

SEQ ID NO: 386326 - DNA, 75 bp, synthetic construct
  source 1..75: mol_type = other DNA
gaagaacagtacgcaattgccgtcgatctggcgttcgagttcgatcataaagtgatcgttgagcaagggatcaaa

SEQ ID NO: 386327 - DNA, 75 bp, synthetic construct
  source 1..75: mol_type = other DNA
gtcattttcccgattgtccacggtacgctgggcgaagatggttccttgcagggaatgctgcgggtcgccaattta

SEQ ID NO: 386328 - DNA, 75 bp, synthetic construct
  source 1..75: mol_type = other DNA
tctaaactgggtttaccgctgttcgttaaacccgctaaccagggctcttctgttggcgtcagcaaagtgactaac

SEQ ID NO: 386329 - DNA, 75 bp, synthetic construct
  source 1..75: mol_type = other DNA
tgtcaccaaacgtctgctacgcgatgccgggctgaacattgcgccatttattaccctgacgcgcgccaatcgtca

SEQ ID NO: 386330 - DNA, 75 bp, synthetic construct
  source 1..75: mol_type = other DNA
ccagcggtctgggttacaccgatctgatcacgcgtttgattgagctggcgctggagcgtcacgctgcggataacg

SEQ ID NO: 386331 - DNA, 75 bp, synthetic construct
  source 1..75: mol_type = other DNA
ccagcggcttgagttacaccgacctaatcacgcgtttgattgagctggcactggaacgtcatgctgcggataacg

SEQ ID NO: 386332 - DNA, 75 bp, synthetic construct
  source 1..75: mol_type = other DNA
attatccgacacccgggatcctgttgtactggtatgtggtgacatgcaggaagcgttgtttcaggaaggtccgct

SEQ ID NO: 386333 - DNA, 75 bp, synthetic construct
  source 1..75: mol_type = other DNA
tttaaaaacagtcggagtgaagacattaccctgacggacgctgaactggcattatccgacacccgggatcctgtt

SEQ ID NO: 386334 - DNA, 75 bp, synthetic construct
  source 1..75: mol_type = other DNA
cgccacaaaatggctggtgaatgccctggtggatattaaggcaaaagcaggctggctgattgtggtcagtggtca

SEQ ID NO: 386335 - DNA, 75 bp, synthetic construct
  source 1..75: mol_type = other DNA
tatgtcgtttcgaatacgggaaccttgcaaagatataatatggtgagtagcttgtatggtgacagattatttaag

SEQ ID NO: 386336 - DNA, 75 bp, synthetic construct
  source 1..75: mol_type = other DNA
aaacaccgtggataattgtccggggggataagccagttgtatgtccggttaatcatgcacctcaggcattcactg

SEQ ID NO: 386337 - DNA, 75 bp, synthetic construct
  source 1..75: mol_type = other DNA
gacgggtttcacactgccggtggtgttgagtgccgaattttccgggcctgaaacaccgtggataattgtccgggg

SEQ ID NO: 386338 - DNA, 75 bp, synthetic construct
  source 1..75: mol_type = other DNA
cagacagaaaagtgtcaacgtatatcaggactagtcatgtagcctatgaggatgagaacctccgggggcagggag

SEQ ID NO: 386339 - DNA, 75 bp, synthetic construct
  source 1..75: mol_type = other DNA
tgttgccatccctatcctcactattcggagataaggttttcccatttgtctttgagttctattataaatacaaag

SEQ ID NO: 386340 - DNA, 75 bp, synthetic construct
  source 1..75: mol_type = other DNA
catattgcagcttgaaaatatatttagcgaatactcactgagatatattgacagggatctggctgaaattctgag

SEQ ID NO: 386341 - DNA, 75 bp, synthetic construct
  source 1..75: mol_type = other DNA
gtcaactctacaggttgacagatcaccataaactgaccgctgcaacgtttaaaaatcttgctgatattaagttag

SEQ ID NO: 386342 - DNA, 75 bp, synthetic construct
  source 1..75: mol_type = other DNA
tcactgcacggcgattggtattacacctagcatctggaaacgctctttgccattgtccttatccatgaccaaaga

SEQ ID NO: 386343 - DNA, 75 bp, synthetic construct
  source 1..75: mol_type = other DNA
tatagcgggctttttgctatatctgataatcaatttcctcttcactgttttccatcacctgccgcttgatatcct

SEQ ID NO: 386344 - DNA, 75 bp, synthetic construct
  source 1..75: mol_type = other DNA
cataaagcaatatttcccgaatctgaaagtgaacaaggtggatgaacctcagtttgcattagtgaaagcaatggt

SEQ ID NO: 386345 - DNA, 75 bp, synthetic construct
  source 1..75: mol_type = other DNA
accttcgatcgctcagacgaatcagcgaaggctctggaatctggccgctgtgatactctggcctcggatcaatca

SEQ ID NO: 386346 - DNA, 75 bp, synthetic construct
  source 1..75: mol_type = other DNA
atcaaggaactccagcggcagtatcagctcacctcgatctacgtcacacacgaccaggcggaagcgctggcgatg

SEQ ID NO: 386347 - DNA, 75 bp, synthetic construct
  source 1..75: mol_type = other DNA
tcgacgtaggcctgataagacgcgccagcgtcgcatcaggcaaatgtaccggcccattgtcggattcggcgcgac

SEQ ID NO: 386348 - DNA, 75 bp, synthetic construct
  source 1..75: mol_type = other DNA
gtgaccatattcgatagcgaattttcacaagaaacctttctgcaatatttacgggaaagaacgggaatgattctg

SEQ ID NO: 386349 - DNA, 75 bp, synthetic construct
  source 1..75: mol_type = other DNA
gtggatttgctctcccgtaatacgacctggacttcatctcgcgatgccgggatgggaatggcatttactggcgtc

SEQ ID NO: 386350 - DNA, 75 bp, synthetic construct
  source 1..75: mol_type = other DNA
tctccaggaaacccggggcagatagccacactggctgccgccagcgtgctgcttgccgttgcaaatcaggcgcat

SEQ ID NO: 386351 - DNA, 75 bp, synthetic construct
  source 1..75: mol_type = other DNA
attgctggaggcgtatgggctggatgaactgactggcccctttgaaagtattgtcgagatgtcatgtttgatgca

SEQ ID NO: 386352 - DNA, 75 bp, synthetic construct
  source 1..75: mol_type = other DNA
ttgcagggctatcgggtcattagcggattattagagatttatcgtcctttattaagcctgtcgttatcagacttt

SEQ ID NO: 386353 - DNA, 75 bp, synthetic construct
  source 1..75: mol_type = other DNA
ttcaccgcagggcgttaaaaccgaacatgagatcttgcggatctttgaaagcgatcgcgggcgtattattaactc

SEQ ID NO: 386354 - DNA, 75 bp, synthetic construct
  source 1..75: mol_type = other DNA
tttattccataagctctcaacgcgtcatcgactggcttatgtggaggccatgagtaaattaccgtcagattctcc

SEQ ID NO: 386355 - DNA, 75 bp, synthetic construct
  source 1..75: mol_type = other DNA
taaaacgtttccccattgaatcacgcttattccacaagctctcaacgcgccatcggctggcctatgtcgaggctg

SEQ ID NO: 386356 - DNA, 75 bp, synthetic construct
  source 1..75: mol_type = other DNA
ttttaaaatatacccgtccggcgtggtggcgtggtgatacgcctgagacgcataactatttaatgaaaaagccgg

SEQ ID NO: 386357 - DNA, 75 bp, synthetic construct
  source 1..75: mol_type = other DNA
atcatccacgtaaccgcctggacggaactcgaagcgcgtaaccgttgcccgtcaggttgcgttgctgtattcgcc

SEQ ID NO: 386358 - DNA, 75 bp, synthetic construct
  source 1..75: mol_type = other DNA
aaggcgaccacgaaagggtcgccagtggagataaaggaaatcaagcgcatcaccaactatgccatgagtgtagct

SEQ ID NO: 386359 - DNA, 75 bp, synthetic construct
  source 1..75: mol_type = other DNA
caggtggtacgctatttttccctcctcccctgcctttgcattctttcattttcgtctccggcagccatgctgtct

SEQ ID NO: 386360 - DNA, 75 bp, synthetic construct
  source 1..75: mol_type = other DNA
ctgctgcgtggtggcattacgtttacgggaaggggaagaaccgcttaacgaactgcggcgcaaaattcgtcagga

SEQ ID NO: 386361 - DNA, 75 bp, synthetic construct
  source 1..75: mol_type = other DNA
gagtgttcattcctgctgcgttaaaagcgcaattgcaggtgatgtgtgaagctgagggcgttacccaggctgaga

SEQ ID NO: 386362 - DNA, 75 bp, synthetic construct
  source 1..75: mol_type = other DNA
cggttaaaagacaggctgagtgaactggcggatgaggaaggtattacccaggcgcagatgcttgaaaaactgatt

SEQ ID NO: 386363 - DNA, 75 bp, synthetic construct
  source 1..75: mol_type = other DNA
tgtgtgcagaggaaggggtcactcaggcagagttgatagaaaggcttatcgagaaagaggcctgtcacaggaaca

SEQ ID NO: 386364 - DNA, 75 bp, synthetic construct
  source 1..75: mol_type = other DNA
gaacaggctgccgcgcaggagagtgcaaatctttccagtaaggcaattgatgttaatggtgttaagctgttggtt

SEQ ID NO: 386365 - DNA, 75 bp, synthetic construct
  source 1..75: mol_type = other DNA
gaaagtgggcgacgcggtgcaggccgatgttgatgaagcgcgccgtgctcgtattcgtctgaatcactccgcaac

SEQ ID NO: 386366 - DNA, 75 bp, synthetic construct
  source 1..75: mol_type = other DNA
gggtggtggacgtcctgacatggcgcaagccggtggtacgggatgctgcggccttacctgcagcgttagccagtg

SEQ ID NO: 386367 - DNA, 75 bp, synthetic construct
  source 1..75: mol_type = other DNA
atctgagcaataaatcgctgcgcgtaatcgctgaccacattcgttcttgtgcgttcctgatcgcggatggcgtaa

SEQ ID NO: 386368 - DNA, 75 bp, synthetic construct
  source 1..75: mol_type = other DNA
gtcaggcgtttctcgactttttccacagtaaggggcatcaggtagttgccagcagttccctggttccccataacg

SEQ ID NO: 386369 - DNA, 75 bp, synthetic construct
  source 1..75: mol_type = other DNA
atcgaaaccaacatcatggatctcgaagcggcgaaagcgaaaggtgcgatggcgctgttcggcgagaagtatgat

SEQ ID NO: 386370 - DNA, 75 bp, synthetic construct
  source 1..75: mol_type = other DNA
gcgttgttggacgaagagttagcgaaactttctggtgatacgctggatggcgaaacggctttccgtctgtacgat

SEQ ID NO: 386371 - DNA, 75 bp, synthetic construct
  source 1..75: mol_type = other DNA
gaagcagcaatggaagagcagcgccgtcgcgcacgtgaagccagtggttttggcgctgattacaacgcgatgatc

SEQ ID NO: 386372 - DNA, 75 bp, synthetic construct
  source 1..75: mol_type = other DNA
atgcaggccaggaagctgtggtcgtgctggatcaaacgccattctatgcggaatccggcggtcaggttggtgata

SEQ ID NO: 386373 - DNA, 75 bp, synthetic construct
  source 1..75: mol_type = other DNA
ccaccgttcatgcagacagcgatcgcttaagcgaagtcgcgcatctgctgaaaggcgatagcaataatctggctg

SEQ ID NO: 386374 - DNA, 75 bp, synthetic construct
  source 1..75: mol_type = other DNA
ctgaaagtgggcgacgcggtgcaggctgatgttgatgaggctcgtcgcgcccgtattcgtctgaatcactccgca

SEQ ID NO: 386375 - DNA, 75 bp, synthetic construct
  source 1..75: mol_type = other DNA
agaaaggttctctggttaacgacaaagtgctgcgtttcgacttctcacataatgaagcgatgaagccagaggaaa

SEQ ID NO: 386376 - DNA, 75 bp, synthetic construct
  source 1..75: mol_type = other DNA
gacggcggtacggacattaatccgctgtatcgtctcaacaaacgtcagggtaaacagttactggcggcattaggt

SEQ ID NO: 386377 - DNA, 75 bp, synthetic construct
  source 1..75: mol_type = other DNA
ccaacatcctgcttgaacgtgccggagaggaaaagcgcgtggcaggtaacggggggcaggatgctgtcgtcagcg

SEQ ID NO: 386378 - DNA, 75 bp, synthetic construct
  source 1..75: mol_type = other DNA
ccgttaccagcagatttaccggtttcgcggggcggataacgcgctcaatgcccggcaactggcgcaggcagatcg

SEQ ID NO: 386379 - DNA, 75 bp, synthetic construct
  source 1..75: mol_type = other DNA
ttcaccgacattaccgatccgcttctttcgcaggaagagcggcaggatgagactaacctgttgtacgtggctgtc

SEQ ID NO: 386380 - DNA, 75 bp, synthetic construct
  source 1..75: mol_type = other DNA
atgattacattcaaaccaacgcgaaacatcgacctgatagaagcagtaggaaatcaccctgacattattgccggg

SEQ ID NO: 386381 - DNA, 75 bp, synthetic construct
  source 1..75: mol_type = other DNA
tacttcaaaggcgtggatgacgtgacgttttacagcgccacacgtgaagaactaatcgacttcctgaatcacggg

SEQ ID NO: 386382 - DNA, 75 bp, synthetic construct
  source 1..75: mol_type = other DNA
acaagcctgaatgccgttacttcgaggtgaacgtgcacgggcagttcggcggcattgtttactatcaggagattc

SEQ ID NO: 386383 - DNA, 75 bp, synthetic construct
  source 1..75: mol_type = other DNA
gacgttatctgccttttgatgagttgcagtaccgcatcaaaaaaggagaaaacgtcgatgtggcgtggacgctta

SEQ ID NO: 386384 - DNA, 75 bp, synthetic construct
  source 1..75: mol_type = other DNA
ccgttaccagcagatttaccgctttcgtggtgcagataatgcgctttctcatcctgctctgaacgatgcagaccg

SEQ ID NO: 386385 - DNA, 75 bp, synthetic construct
  source 1..75: mol_type = other DNA
caggccattcgcctgctggatatctgtttcccgttgccggtgaaactgaagcttctgcgggagcataccgtcacg

SEQ ID NO: 386386 - DNA, 75 bp, synthetic construct
  source 1..75: mol_type = other DNA
gttaaagaaggattcgcgcaagagaaaagaattaataaccagcaagcagtgtacgtcgcacactacccgctgtag

SEQ ID NO: 386387 - DNA, 75 bp, synthetic construct
  source 1..75: mol_type = other DNA
aaactcgatagtgtgctgtttagctctggtgtgcttaaacgcctgaatccgcgccaggtaacgctcctgaatgtg

SEQ ID NO: 386388 - DNA, 75 bp, synthetic construct
  source 1..75: mol_type = other DNA
gctaccagtacactgaatcagacggtatggatctgacttatttccttgaatatcaggccgatgtcattaaacgcg

SEQ ID NO: 386389 - DNA, 75 bp, synthetic construct
  source 1..75: mol_type = other DNA
ggcattgtttactatcaggagattcagccgctgacattcgattgccacgccatgtacctgccagaggttcgcggc

SEQ ID NO: 386390 - DNA, 75 bp, synthetic construct
  source 1..75: mol_type = other DNA
cagcacaaactttgaatcaaacagaaacaaaataattgctcaagcaataaacttcatttccgaaaaccctgaaga

SEQ ID NO: 386391 - DNA, 75 bp, synthetic construct
  source 1..75: mol_type = other DNA
attaatgcaaacagtagagcaggcattgttgataaggattaccagataaatataagaaaagaagaaaacaaacct

SEQ ID NO: 386392 - DNA, 75 bp, synthetic construct
  source 1..75: mol_type = other DNA
tacgattaaaaaacctgaaacatcaagccagtaagttcttaaccaaaaaaaacctgcttcctattgcaaataaga

SEQ ID NO: 386393 - DNA, 75 bp, synthetic construct
  source 1..75: mol_type = other DNA
aacataaacgccgtccgccaataccgttttcgatgatttctggaaaagtaataatttgcacctattggattgtgc

SEQ ID NO: 386394 - DNA, 75 bp, synthetic construct
  source 1..75: mol_type = other DNA
tgtttgccaaacccgaggagtccgcacagattaacaaagatgtggaggaacttgactggtggatcagaaaccagt

SEQ ID NO: 386395 - DNA, 75 bp, synthetic construct
  source 1..75: mol_type = other DNA
cggtatgttgtactctcaaaatagaatactagtggcaaagaaaggcaaaaccacattgataaccatagctggttt

SEQ ID NO: 386396 - DNA, 75 bp, synthetic construct
  source 1..75: mol_type = other DNA
ctgaaccagcttgcacgcgtgggaggaatcgacccgctgattggtcgtgagaaggaactggagcgcgccattcag

SEQ ID NO: 386397 - DNA, 75 bp, synthetic construct
  source 1..75: mol_type = other DNA
tttttcattgctcatgaaaacgataaaagctttttcatttggtggcgatcttcaaacccttgcatcaaaaccggg

SEQ ID NO: 386398 - DNA, 75 bp, synthetic construct
  source 1..75: mol_type = other DNA
atgattacattcaaaccaacgcgcaacattgacctgatcgaagccgtaggaaatcaccctgacattatcgccggg

SEQ ID NO: 386399 - DNA, 75 bp, synthetic construct
  source 1..75: mol_type = other DNA
atggcgcgtgcaggtttaggtcacgaacataaaccggtcggttcgttcctgtttgccggccctactggggtcggg

SEQ ID NO: 386400 - DNA, 75 bp, synthetic construct
  source 1..75: mol_type = other DNA
tctgatcctggcagccagccaaacagcgaagaacaagctggtggggaggaacgtatggagaatttcacgacgaac

SEQ ID NO: 386401 - DNA, 75 bp, synthetic construct
  source 1..75: mol_type = other DNA
atcgcggcgactttgaaaaacgtttcaaagcattgcttaaacaacttgagcaggatacaaacagcatcctgttta

SEQ ID NO: 386402 - DNA, 75 bp, synthetic construct
  source 1..75: mol_type = other DNA
ttatgattgcccgtttcacaccgtggaaatttatcttcctgaccggtcatcacacgttgtttatgtcgatgatgg

SEQ ID NO: 386403 - DNA, 75 bp, synthetic construct
  source 1..75: mol_type = other DNA
tgtggggagcaaaaaggaaggtggtcatgaccagaaagtgacagtggcgaatgaccagaccattacggtacaaaa

SEQ ID NO: 386404 - DNA, 75 bp, synthetic construct
  source 1..75: mol_type = other DNA
caaagcaaaccgaaggtggacgggccacagagcgccattgtcaccgggcctgcgggagaggaaatcttctgtgat

SEQ ID NO: 386405 - DNA, 75 bp, synthetic construct
  source 1..75: mol_type = other DNA
gttgatcctgaagtccctgcttgccacggtgacgacgttattgcgttgatgcacgatacaggcgaaaccaccttc

SEQ ID NO: 386406 - DNA, 75 bp, synthetic construct
  source 1..75: mol_type = other DNA
ttttaatcacgctgcaccacaaaccattccttacgctattgaacgttatcaagttgaaactcagcgtctgtatca

SEQ ID NO: 386407 - DNA, 75 bp, synthetic construct
  source 1..75: mol_type = other DNA
ggttttgctaacaccaccttcagtgatgctgactttggcgcactgggtattttgttagggattatcgttcgctaa

SEQ ID NO: 386408 - DNA, 75 bp, synthetic construct
  source 1..75: mol_type = other DNA
ggctaccgtgaggtggcccggcaggagaatgtaccggcagaagccctgtattccctggcactgacggagtcatcc

SEQ ID NO: 386409 - DNA, 75 bp, synthetic construct
  source 1..75: mol_type = other DNA
gacccggttaatgcggcgaactatacgcgtggcgtcagccaggcattgaagcgacatagtgacctggtggcgcaa

SEQ ID NO: 386410 - DNA, 75 bp, synthetic construct
  source 1..75: mol_type = other DNA
atattcccgaagcggaagctattcttgccagcattaaaccggcaggcgtggtcagccgtgccgatgtagtgctgc

SEQ ID NO: 386411 - DNA, 75 bp, synthetic construct
  source 1..75: mol_type = other DNA
gcgggtgggccaggaggtgattgttgacttcctgaacggggacccggaccagccgataatcatggggcggaccta

SEQ ID NO: 386412 - DNA, 75 bp, synthetic construct
  source 1..75: mol_type = other DNA
acaaccgctccccgggcgacctgccgggaacgaagacgcagatgaccatccggtcaaaaacctataaaggaagcg

SEQ ID NO: 386413 - DNA, 75 bp, synthetic construct
  source 1..75: mol_type = other DNA
actggggctggaacgggcatcacttccgttccgcctgggaggcctttgatccttataccaatctgcatgtggcgg

SEQ ID NO: 386414 - DNA, 75 bp, synthetic construct
  source 1..75: mol_type = other DNA
aaactggcctgagccttacattaagattaacggtaattgctctataattggtacagtgattttctcaggaaaacc

SEQ ID NO: 386415 - DNA, 75 bp, synthetic construct
  source 1..75: mol_type = other DNA
aaggagctgggttacagcgcacagggtaatgatagtgttgtgggagccaaaacgccgccagcgatggtttctgga

SEQ ID NO: 386416 - DNA, 75 bp, synthetic construct
  source 1..75: mol_type = other DNA
ctggccgtgcgtgctgagcgtgagcaactgaaagcggaactggcgaaattggaaacgcagatggcgggttatttg

SEQ ID NO: 386417 - DNA, 75 bp, synthetic construct
  source 1..75: mol_type = other DNA
gtgatgcgtcggagttgattgaagcgatgatggcaaatgagcgcttcgtgttgccgaaaagtgccagtttctatg

SEQ ID NO: 386418 - DNA, 75 bp, synthetic construct
  source 1..75: mol_type = other DNA
aaaaacagaagaacaccatcctgcgtcagctgctggaagactttgccggtgaagatcttaacctgaagccaagcc

SEQ ID NO: 386419 - DNA, 75 bp, synthetic construct
  source 1..75: mol_type = other DNA
tggttcgttgttaatgaagtgcgggcgtaagattgtctccgggcatgacagccgtaactatgcgttgttcggtca

SEQ ID NO: 386420 - DNA, 75 bp, synthetic construct
  source 1..75: mol_type = other DNA
ctatcaacaaagccctgtgggccgcgtgcgataccttccgtggcaccatcagtgccgatacctataaagacttta

SEQ ID NO: 386421 - DNA, 75 bp, synthetic construct
  source 1..75: mol_type = other DNA
atcggcagagcgctgaatatcagtaccggaacggtaaaagcgcatctggaatccctgtatcgccgtctggaagtg

SEQ ID NO: 386422 - DNA, 75 bp, synthetic construct
  source 1..75: mol_type = other DNA
acatgtgctgcggctctcgtatgttttggttcgacaaggaggacaagcgcgccgtgttcagtgatatccgcgccg

SEQ ID NO: 386423 - DNA, 75 bp, synthetic construct
  source 1..75: mol_type = other DNA
gaaaagcgtgttccaggatatttcgtttaacactgaccgcctgggtgaagaaaaacagaagaacaccatcctgcg

SEQ ID NO: 386424 - DNA, 75 bp, synthetic construct
  source 1..75: mol_type = other DNA
gtgatgcgccggagctgattgaagcgatgatggcgaacgaacgtttcgtgctgccgaaaagcgccagtttctatg

SEQ ID NO: 386425 - DNA, 75 bp, synthetic construct
  source 1..75: mol_type = other DNA
ctggcggtacgtgctgagcgtgagcaactgaaagcggaattggcgaagctggaaacggagatggctggatatttg

SEQ ID NO: 386426 - DNA, 75 bp, synthetic construct
  source 1..75: mol_type = other DNA
gctctgcatgcaatcgaagaagccaacggaaccaaactgaaagatgccgggaaaagcgtgttccaggatatttcg

SEQ ID NO: 386427 - DNA, 75 bp, synthetic construct
  source 1..75: mol_type = other DNA
cataaaggcaagaaccagattcagttctacgatccgcaacagatggaggccgctcagcaacggctgactgaagag

SEQ ID NO: 386428 - DNA, 75 bp, synthetic construct
  source 1..75: mol_type = other DNA
aaggtttgctggaacagatccgcgccaagatcagccactacatcaccctgatggttgaaggcagtaatatttgcg

SEQ ID NO: 386429 - DNA, 75 bp, synthetic construct
  source 1..75: mol_type = other DNA
attatgtcgccggaaatggacccttactggctgctgaaagagctggatcaattcccgacgcgtccgcaggaccgc

SEQ ID NO: 386430 - DNA, 75 bp, synthetic construct
  source 1..75: mol_type = other DNA
gtcgttagggcgcttcgatcagtatatgttgccgttctatcaggcctcgctgacccagggtgaagatccggcgtt

SEQ ID NO: 386431 - DNA, 75 bp, synthetic construct
  source 1..75: mol_type = other DNA
tcataccagtaccttgacaggatcgaagtgaaaggtaaagacggagcaagatggcactttggtgcagttgcgcag

SEQ ID NO: 386432 - DNA, 75 bp, synthetic construct
  source 1..75: mol_type = other DNA
ctgcatcagcggtgactggtatttccagtatagacggcactacaaatagcaatgttgttcacgtccctgcgcttg

SEQ ID NO: 386433 - DNA, 75 bp, synthetic construct
  source 1..75: mol_type = other DNA
acgcagtaattatgcgtcaatattccccatgtatagttcttccggcgtggttaccttcgaggaagggtgtatcag

SEQ ID NO: 386434 - DNA, 75 bp, synthetic construct
  source 1..75: mol_type = other DNA
ataaaaggcgacctgatgatagtgatgttcagacaggagaaaccaaatgacagaacagacgatgacaaatcgcga

SEQ ID NO: 386435 - DNA, 75 bp, synthetic construct
  source 1..75: mol_type = other DNA
aaaacggcgcaaacaggagagacgccagaaagcgttagaggcgttctatgacgcatttgaacttagccgcattga

SEQ ID NO: 386436 - DNA, 75 bp, synthetic construct
  source 1..75: mol_type = other DNA
cagaaagtgttagaggcgttctatgacgcatttgaacttagccgcattgagccaggcacaacagccaagatagcg

SEQ ID NO: 386437 - DNA, 75 bp, synthetic construct
  source 1..75: mol_type = other DNA
tcgcgatgtttaacctgctgaaagtgatggaaatctgcctgcatgaaaatgaaggcaatgccacgctgacttatg

SEQ ID NO: 386438 - DNA, 75 bp, synthetic construct
  source 1..75: mol_type = other DNA
ctggcgctatcatgttatctgggtgcgcaactattgttggtgatgaaacgcaacttgtgcaagtgaacagcaatc

SEQ ID NO: 386439 - DNA, 75 bp, synthetic construct
  source 1..75: mol_type = other DNA
ctgcacaggcacttcagatattgaaagaaaaactccatgcctggcgtgatggaccagattcggcctggcgctcaa

SEQ ID NO: 386440 - DNA, 75 bp, synthetic construct
  source 1..75: mol_type = other DNA
gatcctgaaaaaatcgtatgaagtgatgcatggggaattggggaatgcggattcgatccagagctggtcgaatgc

SEQ ID NO: 386441 - DNA, 75 bp, synthetic construct
  source 1..75: mol_type = other DNA
cgtctcgaaaaatcggaacgactatttttgcttgctgaagcgtcagtggaaagcggcgagatgggggctgatcgc

SEQ ID NO: 386442 - DNA, 75 bp, synthetic construct
  source 1..75: mol_type = other DNA
tggcattgctgaacgccttgatcccacaacagcgctatttgggcctgctggcgaggtggcaaagcatctgcccgt

SEQ ID NO: 386443 - DNA, 75 bp, synthetic construct
  source 1..75: mol_type = other DNA
agccatgacggcaacgttaattcaatgctgcacgacgacatcacgcgatatgaggcccgcttcgacgcagcaggt

SEQ ID NO: 386444 - DNA, 75 bp, synthetic construct
  source 1..75: mol_type = other DNA
atggtggcagccgttgtcctggtgttcgtttttattttttgcaccgttttgctgttccatctggtccagcagaat

SEQ ID NO: 386445 - DNA, 75 bp, synthetic construct
  source 1..75: mol_type = other DNA
gctctaggttttgcctttgaatctagaaagcaatgtcgttcttcgctttataatcgaggattagcgcaaaaagat

SEQ ID NO: 386446 - DNA, 75 bp, synthetic construct
  source 1..75: mol_type = other DNA
gtgctgcatatcattgtggccgagagattgagcggctggctaagtttgtcgttgaaaatcgacttgtatcaagtg

SEQ ID NO: 386447 - DNA, 75 bp, synthetic construct
  source 1..75: mol_type = other DNA
ccggaagatttactcaacaaaaaagcttcttgtgtgccgccaggctgtaatggtctgatgacggtgctggactga

SEQ ID NO: 386448 - DNA, 75 bp, synthetic construct
  source 1..75: mol_type = other DNA
cgctgatgatgaatggcaaagcactgccgaaagacccggtagcgtactggccgattatgtcttctattccagaaa

SEQ ID NO: 386449 - DNA, 75 bp, synthetic construct
  source 1..75: mol_type = other DNA
gatcctgaaaaaatcgtatgaagtgatgcatggggaattggggaattggggaatgcggattcgatccagagctgg

SEQ ID NO: 386450 - DNA, 75 bp, synthetic construct
  source 1..75: mol_type = other DNA
ccgttacggatgccgctcaatgaactgggggggggcagtaaaggactcgaccactttcaggacgtctgcatcgtg

SEQ ID NO: 386451 - DNA, 75 bp, synthetic construct
  source 1..75: mol_type = other DNA
caaattgagcaggaacttatcgcccccgaaaatcgcagcggttgcctagcggtaattgaagaagtgatgctcgac

SEQ ID NO: 386452 - DNA, 75 bp, synthetic construct
  source 1..75: mol_type = other DNA
acggaagttaaaggcggtatgtggctgcatcttattggcaataaccgtattttggctgaagaagtggtatggcag

SEQ ID NO: 386453 - DNA, 75 bp, synthetic construct
  source 1..75: mol_type = other DNA
ttcctgccgggaaagtgactggtctgattggtcacaacggttctggtaaatccactctgctcaaaatgcttggcc

SEQ ID NO: 386454 - DNA, 75 bp, synthetic construct
  source 1..75: mol_type = other DNA
cgtgacgccagaaaacctggcgcagtggatagacgcaggttgtgcaggggcgggcttaggcagcgatctctatcg

SEQ ID NO: 386455 - DNA, 75 bp, synthetic construct
  source 1..75: mol_type = other DNA
gtgtgccaattatcgacgaagcccagacatggggcgcgaaacagacattcagtgctggcctttctggtgaactgt

SEQ ID NO: 386456 - DNA, 75 bp, synthetic construct
  source 1..75: mol_type = other DNA
cctacggttctgtgctcggatcttgtaggtctgataagacgcgttagcgtcgcatcaggcaaaaaacggcaacga

SEQ ID NO: 386457 - DNA, 75 bp, synthetic construct
  source 1..75: mol_type = other DNA
gggctactggcaaatctgtccatctggtggtatacgcaggagaaagcatttcccgtttcatttgccattcagggg

SEQ ID NO: 386458 - DNA, 75 bp, synthetic construct
  source 1..75: mol_type = other DNA
ccaaaggctctgcctgcgctggccactcaggcattgatggtggacggggaaggttataagacgacttatcagtat

SEQ ID NO: 386459 - DNA, 75 bp, synthetic construct
  source 1..75: mol_type = other DNA
attcattttacttcgcaacggcaaatgggaatatgactacattgcaccggcgaataacgaacaatcgtcagaaga

SEQ ID NO: 386460 - DNA, 75 bp, synthetic construct
  source 1..75: mol_type = other DNA
ctgcaggctcagcggttgtcggtggtgacgctgcaaggggaatggatctccggcgacaaaccgtcgaaagaggtc

SEQ ID NO: 386461 - DNA, 75 bp, synthetic construct
  source 1..75: mol_type = other DNA
cgaaagcccggaagcctggcgctggctgctggcttctgcggcgttgccagccttgctgattacgcttttacgctg

SEQ ID NO: 386462 - DNA, 75 bp, synthetic construct
  source 1..75: mol_type = other DNA
taatatatttagtggaggagaatttgatataaaaacctcccctcaacttttaggtctgaaagataatgtttgggg

SEQ ID NO: 386463 - DNA, 75 bp, synthetic construct
  source 1..75: mol_type = other DNA
tcaacaaaatgatagtgatttgattaaaaaagtaagtgattggttttccaatagagataaactaaacactaatta

SEQ ID NO: 386464 - DNA, 75 bp, synthetic construct
  source 1..75: mol_type = other DNA
atggtgatgatccggcagtattcagaccaatacaaaagttaattaacggaacatggtataacgtatcgcaggtat

SEQ ID NO: 386465 - DNA, 75 bp, synthetic construct
  source 1..75: mol_type = other DNA
aaacaatttgcaattgatgtagcaagattaaaattagaatatgataattctcttgaggagaatgaaaatgaaaca

SEQ ID NO: 386466 - DNA, 75 bp, synthetic construct
  source 1..75: mol_type = other DNA
ctatctggtggtggtgcccgtctgttcgctgatcctcgcggtgttcctcgcccatgcgctgattggtccgtttgg

SEQ ID NO: 386467 - DNA, 75 bp, synthetic construct
  source 1..75: mol_type = other DNA
cctgaaatatcgcttcccgatgctgtgcgcgatgattggttctggtctggcaggattactatgcggcctgaacgg

SEQ ID NO: 386468 - DNA, 75 bp, synthetic construct
  source 1..75: mol_type = other DNA
gtgagccactgtattactcgcctgcgctttgtcctcaaccaaccggccaatgccagaccgaaagaaattgagcaa

SEQ ID NO: 386469 - DNA, 75 bp, synthetic construct
  source 1..75: mol_type = other DNA
atgcgtggctctgtcatcattccggtagccctgcacgtcctggtggctgttgccacattgctgtggttgttgtgg

SEQ ID NO: 386470 - DNA, 75 bp, synthetic construct
  source 1..75: mol_type = other DNA
cgcatcgtgccggattacctttatctggtcgtggttccggtcttttcgctgatcctcgccgtattcctcgctcat

SEQ ID NO: 386471 - DNA, 75 bp, synthetic construct
  source 1..75: mol_type = other DNA
cggcgctgttagccgggctggcgctgggctttattgaaactcgccttaagcgcatcgtgccggattatctctatc

SEQ ID NO: 386472 - DNA, 75 bp, synthetic construct
  source 1..75: mol_type = other DNA
acatcgttaaacagaaaatggcagagaataacggcggctataaagcgattaactacggttacaccgacgatcgcg

SEQ ID NO: 386473 - DNA, 75 bp, synthetic construct
  source 1..75: mol_type = other DNA
gccagcgtagaacaggcgttcaatatgggcgcggtggcggttggcgcgaccatttattttggctcggaagagtca

SEQ ID NO: 386474 - DNA, 75 bp, synthetic construct
  source 1..75: mol_type = other DNA
tatctattttggctcggaagagtcacgtcgccagattgaagaaatttctgcggcctttgaacgcgcgcatgagct

SEQ ID NO: 386475 - DNA, 75 bp, synthetic construct
  source 1..75: mol_type = other DNA
aattacggttataccgacgatcgcgtgtacagcaagttgaccagcgaaaacccgattgacctggtgcgttatcag

SEQ ID NO: 386476 - DNA, 75 bp, synthetic construct
  source 1..75: mol_type = other DNA
cgtaatatgcagacgctgtataacaccgggcgtctggccggaaccgggtatctttctattctgccggttgaccag

SEQ ID NO: 386477 - DNA, 75 bp, synthetic construct
  source 1..75: mol_type = other DNA
actacgtagaccgcgtgatgattgacaataatcgcccgccagcggtgttacgtaatatgcagacgttgtacaaca

SEQ ID NO: 386478 - DNA, 75 bp, synthetic construct
  source 1..75: mol_type = other DNA
tcgtaatcccatggtttgtgatttatacctggctgccaactatcgcccaaactattggtctggaagatgcgctga

SEQ ID NO: 386479 - DNA, 75 bp, synthetic construct
  source 1..75: mol_type = other DNA
agccattattgcccagctacgcgttaccattgcgccggatgatattgccattacgctacatcataaattgtgcca

SEQ ID NO: 386480 - DNA, 75 bp, synthetic construct
  source 1..75: mol_type = other DNA
atattctggaaatcgcccagcgcgagaacgaagccacctgttttggtcgcagaacgccagatgacagcgtccttg

SEQ ID NO: 386481 - DNA, 75 bp, synthetic construct
  source 1..75: mol_type = other DNA
ggtagaacgcatagcccaactgtcacctgatgtgattttctctttttattatcgccatttgatcagcgacgagat

SEQ ID NO: 386482 - DNA, 75 bp, synthetic construct
  source 1..75: mol_type = other DNA
gaatggtgaaacgtgccgatgctggggccattgtagcccaactgcgcattgccattgcgccagacgatatcgcca

SEQ ID NO: 386483 - DNA, 75 bp, synthetic construct
  source 1..75: mol_type = other DNA
acggtaaaggatatcaggacgtggcacatcgtaagcctggcatccgcaatgcccgccgctgcctggattgggaac

SEQ ID NO: 386484 - DNA, 75 bp, synthetic construct
  source 1..75: mol_type = other DNA
aagctgattgatggcggaaaacaaaaacgctgctttactgatattcgggacggcatcgaagcactgtttcgcatt

SEQ ID NO: 386485 - DNA, 75 bp, synthetic construct
  source 1..75: mol_type = other DNA
acggcaagggatatcaggacgtagagcatcgtaaaccaagcatccgtaatgcccgccgctgcctggactgggaac

SEQ ID NO: 386486 - DNA, 75 bp, synthetic construct
  source 1..75: mol_type = other DNA
tgaggaagaggacgagattgatttgctggccgtgcgtgctgagtgggaggaattgaaaacggaactggcgaagct

SEQ ID NO: 386487 - DNA, 75 bp, synthetic construct
  source 1..75: mol_type = other DNA
atcgaaaaaatcgttaagacctaccgcaatggcgataacgtcgagaaatacgcttatcttgccagcctgaaggaa

SEQ ID NO: 386488 - DNA, 75 bp, synthetic construct
  source 1..75: mol_type = other DNA
cgaaaattgatatgcaggaaaccattgacgaaacactggatttcttcctgcgcacggtcgatcttacggataaat

SEQ ID NO: 386489 - DNA, 75 bp, synthetic construct
  source 1..75: mol_type = other DNA
ccattttccaccgtttgctggtttccgtgtggtggaaagcagcagctattacgggaaaggatatcaggatgtgga

SEQ ID NO: 386490 - DNA, 75 bp, synthetic construct
  source 1..75: mol_type = other DNA
gaaacgggaattccagtttatgcaccagataatgtcaatcatccactgtgggtggaacgaatcgcccaaatgtcg

SEQ ID NO: 386491 - DNA, 75 bp, synthetic construct
  source 1..75: mol_type = other DNA
ttttaaatggaatgaaacgcaaatacctgttcgccagatattggcactgaccgacagaaagcctgttatcggtca

SEQ ID NO: 386492 - DNA, 75 bp, synthetic construct
  source 1..75: mol_type = other DNA
gaagatgtactgaaaatgaatccagacggtatcttcctctccaacggtcctggcgacccggcaccgtgtgattac

SEQ ID NO: 386493 - DNA, 75 bp, synthetic construct
  source 1..75: mol_type = other DNA
caccgataaaccggcgttcagcttccagggtcaccctgaagccagccctggtccacacgacgccgcgccgttgtt

SEQ ID NO: 386494 - DNA, 75 bp, synthetic construct
  source 1..75: mol_type = other DNA
ccctatagctggacacaagggagctggacactgaccggcggcctgccagaagcgaaaaaagaagacgagctgccg

SEQ ID NO: 386495 - DNA, 75 bp, synthetic construct
  source 1..75: mol_type = other DNA
gctggcggcaacgctggtagtaatggcctgtttgccttccggcagttcattaacgctgctgctttttgttctctt

SEQ ID NO: 386496 - DNA, 75 bp, synthetic construct
  source 1..75: mol_type = other DNA
gcacacctgaccgacggttatgtcctcggcgtcattggttacgccattattcagcttacgcccgccatgcaactg

SEQ ID NO: 386497 - DNA, 75 bp, synthetic construct
  source 1..75: mol_type = other DNA
cattaacgctgctgctttttgttctcttcagcaccaccatttcggcagtcagtaatctggtgggcattttgcctg

SEQ ID NO: 386498 - DNA, 75 bp, synthetic construct
  source 1..75: mol_type = other DNA
gggcgttgaccaacagcctgactcagtggctacaggggatgcagcagggcagcattgttatgctggcggtgatca

SEQ ID NO: 386499 - DNA, 75 bp, synthetic construct
  source 1..75: mol_type = other DNA
gtggcttcagggaatgcagcagggcagcattgttatgctggcggtgatcatgggattgatgctggcgttcgatat

SEQ ID NO: 386500 - DNA, 75 bp, synthetic construct
  source 1..75: mol_type = other DNA
gtgacggcagtctgcgtgaacgtgctgaaaagtctggcgcgtaaaaatgggtcttcgactgatgagaaggaagac

SEQ ID NO: 386501 - DNA, 75 bp, synthetic construct
  source 1..75: mol_type = other DNA
gcccaggtgaaacggatatgggccgaggtcagccaggccgaagcgaagcagcacggcgcgttcgtggaggacgca

SEQ ID NO: 386502 - DNA, 75 bp, synthetic construct
  source 1..75: mol_type = other DNA
ataaaaatgatgctgccgttttgcttgttgatcaccaggctggtttactttcccttgtacgagatatcgaacccg

SEQ ID NO: 386503 - DNA, 75 bp, synthetic construct
  source 1..75: mol_type = other DNA
gtgagtgcaccggcaaccattcttgatatgtgctgtggcagccgcatgttctggttcgataagaatgacgaccgg

SEQ ID NO: 386504 - DNA, 75 bp, synthetic construct
  source 1..75: mol_type = other DNA
ggatcctgactatcactatgaggtcaactgcctcgaataccgtccaggcacgggggttcctgtaacgccagagaa

SEQ ID NO: 386505 - DNA, 75 bp, synthetic construct
  source 1..75: mol_type = other DNA
aggtggggaatgatccttatgcgatccccctgcgtgcagacaccagcaagccgaagctgactcagcaggatgtga

SEQ ID NO: 386506 - DNA, 75 bp, synthetic construct
  source 1..75: mol_type = other DNA
gcgtctgctggatgccgcgggtctgtcaatggctctgaacaaatcggtggtgaataacgatcctcagggttatcc

SEQ ID NO: 386507 - DNA, 75 bp, synthetic construct
  source 1..75: mol_type = other DNA
ttaagtagctatggcgatctcgatccgcaggaaatgccgctgctgatccttaacggctttgaatatgtgactcag

SEQ ID NO: 386508 - DNA, 75 bp, synthetic construct
  source 1..75: mol_type = other DNA
atttgaccagctatggtgatctaaatccggaagaagttccgttgctgatcctcaacggctttgaatatgtgactc

SEQ ID NO: 386509 - DNA, 75 bp, synthetic construct
  source 1..75: mol_type = other DNA
ctcagaaagaggtcaccattaagtccaatgcgaacgttcctgtgactgtcaccgtggcgctggccgacgacctga

SEQ ID NO: 386510 - DNA, 75 bp, synthetic construct
  source 1..75: mol_type = other DNA
tgccagcttcacctttactggcgtggtaaaagcaccgttctataaagacggcgcatggaaaaacgatctgaactc

SEQ ID NO: 386511 - DNA, 75 bp, synthetic construct
  source 1..75: mol_type = other DNA
acaacacgacaattgctaccttcgacacccagtcagaagctgcgcgtagcctgcgtgcggttgaaaaagtgtcgt

SEQ ID NO: 386512 - DNA, 75 bp, synthetic construct
  source 1..75: mol_type = other DNA
tcaacccactgaaatcattctttccgaaggccaactggtggatagcctggggaacggtgttggtggcgttgacta

SEQ ID NO: 386513 - DNA, 75 bp, synthetic construct
  source 1..75: mol_type = other DNA
cgctgacgcgcctgatgctgggccgttcctggtgggatctgaacatcaaagttgatgtcgagaagtatccgggag

SEQ ID NO: 386514 - DNA, 75 bp, synthetic construct
  source 1..75: mol_type = other DNA
tgaagtcgcgaacaacgtgctggcgctgtacatgcaggatcgctatctcggcaagatgaaccgtgtcgctgacga

SEQ ID NO: 386515 - DNA, 75 bp, synthetic construct
  source 1..75: mol_type = other DNA
acgcgcaggagctggcgaattctgaaaataagaaaaccaacgccatctctctggtgacgtccagcgacagttgcc

SEQ ID NO: 386516 - DNA, 75 bp, synthetic construct
  source 1..75: mol_type = other DNA
ccggttactggtggcatgtatgttccacagtatacgcaactaagccttaacgccgacactgcaaaagcgatggtg

SEQ ID NO: 386517 - DNA, 75 bp, synthetic construct
  source 1..75: mol_type = other DNA
gcgcgtctggttttgtgcgtctgttggatgccgcaggtctgtcgatggcactgaacaagtcggtggtgaataacg

SEQ ID NO: 386518 - DNA, 75 bp, synthetic construct
  source 1..75: mol_type = other DNA
acttccagcgacagttgcccggcggatgcagaacaactttgtctgaccttctcgtcagtggtcgatcgcgcacgc

SEQ ID NO: 386519 - DNA, 75 bp, synthetic construct
  source 1..75: mol_type = other DNA
aaagcgccgttctataaagacggcgaatggaaaaacgctctgaactcccctgcgccgttgggcgagctggaatca

SEQ ID NO: 386520 - DNA, 75 bp, synthetic construct
  source 1..75: mol_type = other DNA
gtggtctggcgatccctatgctgtgcctcgcgtgcagataccagcaaaccgaagctgactcagcaggatgtgacc

SEQ ID NO: 386521 - DNA, 75 bp, synthetic construct
  source 1..75: mol_type = other DNA
aggctcgctggttctcgctgacgacgcgcaatgttaatgacggccagattcagggcgttatcaacaagctgtggg

SEQ ID NO: 386522 - DNA, 75 bp, synthetic construct
  source 1..75: mol_type = other DNA
tgaagttcgcggggcgaatattgatcagcttattcatcgctattcgacgaccgggcaaaataatacccgtgttgt

SEQ ID NO: 386523 - DNA, 75 bp, synthetic construct
  source 1..75: mol_type = other DNA
caccaattccggccgtggtgtaaccggagaaaacggggaattttcctttagttggggggaaaccatctcctttgg

SEQ ID NO: 386524 - DNA, 75 bp, synthetic construct
  source 1..75: mol_type = other DNA
gaccctgggcggaagccagcgggtaactggtgctacctgtaatggtgaatccagcgatggctttacatttacgcc

SEQ ID NO: 386525 - DNA, 75 bp, synthetic construct
  source 1..75: mol_type = other DNA
gcggtcaggcggtggtgaatatctccaacgcggcattcccgattctgatggcgcgtaatgataaaaactactggc

SEQ ID NO: 386526 - DNA, 75 bp, synthetic construct
  source 1..75: mol_type = other DNA
tgttccagttgatgcaccgtaaagcacgcggcgatgaggtcagcaatgacaagtttggcggcagaaattactgtg

SEQ ID NO: 386527 - DNA, 75 bp, synthetic construct
  source 1..75: mol_type = other DNA
cgctgccgacacgctgatgctgtgtgcctcctgggtcgcccagacggatctttcggagttctttaagaaatggaa

SEQ ID NO: 386528 - DNA, 75 bp, synthetic construct
  source 1..75: mol_type = other DNA
gtgtcagctaatgcggaacagttttatcagtatcaacctactgaaattattctctccgaaggtcgcctagtggat

SEQ ID NO: 386529 - DNA, 75 bp, synthetic construct
  source 1..75: mol_type = other DNA
acctggaaatatcaggaagaaggcaagcctgatgataaaccgaaactggaagttgctagctggcaggaagacgtt

SEQ ID NO: 386530 - DNA, 75 bp, synthetic construct
  source 1..75: mol_type = other DNA
cagataccaaacgagatgggtttggcggtgatgtgaattgcagctgcaacgacagcaaccagaagatcagcacct

SEQ ID NO: 386531 - DNA, 75 bp, synthetic construct
  source 1..75: mol_type = other DNA
gaagaaccgagaaagcgtttaagcctttctgaaaaagcaatatcactcggcatcattagtaaatcaaatacagat

SEQ ID NO: 386532 - DNA, 75 bp, synthetic construct
  source 1..75: mol_type = other DNA
aaatgaaatttattgcacgctatgttgcaacaaatgcagtcgtaacggcgggtacagcgaacgccgattcacaat

SEQ ID NO: 386533 - DNA, 75 bp, synthetic construct
  source 1..75: mol_type = other DNA
acatgcctacagctttaacaggaaacatggataaatactatatccctgttttagaagatttaagaaaagcgatat

SEQ ID NO: 386534 - DNA, 75 bp, synthetic construct
  source 1..75: mol_type = other DNA
acagcgacagaatgttatcaaggcttgcagatagcggtaatattgttatccatagttcagttgggtatccggttg

SEQ ID NO: 386535 - DNA, 75 bp, synthetic construct
  source 1..75: mol_type = other DNA
atgcgaaaaataaaaacaaaaatctacttgcctacagctttaacagggaatatggataaacactatatccctgtt

SEQ ID NO: 386536 - DNA, 75 bp, synthetic construct
  source 1..75: mol_type = other DNA
taaaagcatcaaatcatttatatttgaaaaaaaagatcatacactaaaagttatatctttctttataatttcagg

SEQ ID NO: 386537 - DNA, 75 bp, synthetic construct
  source 1..75: mol_type = other DNA
ctcagcaatatggggttatagcctattctattacactactcagtatttctgtggttattagtaattttggtacta

SEQ ID NO: 386538 - DNA, 75 bp, synthetic construct
  source 1..75: mol_type = other DNA
atctcaaagaggcgcgcgaccatctgaacgaagacgccaccaatgacgaggttgacgaggagattcagaacgagc

SEQ ID NO: 386539 - DNA, 75 bp, synthetic construct
  source 1..75: mol_type = other DNA
agccgttgctgcagctcttgagcagatgcctcgcttcaacagttcgttgtcggaagacggtcagcgtctgaccct

SEQ ID NO: 386540 - DNA, 75 bp, synthetic construct
  source 1..75: mol_type = other DNA
ccaggatttaccttaagcggacttggggcgctggcggaagcctcgctgacctgtgacagggtggtacagttctga

SEQ ID NO: 386541 - DNA, 75 bp, synthetic construct
  source 1..75: mol_type = other DNA
aactatcgatggatttaaaatggtttgctattccttatgtatgcaattacgggatatcttttttattgaaaagat

SEQ ID NO: 386542 - DNA, 75 bp, synthetic construct
  source 1..75: mol_type = other DNA
acagcgacagaatgttatcaaggcctgcagatagcggtaatattgttatccatagttcacttggatatccggttt

SEQ ID NO: 386543 - DNA, 75 bp, synthetic construct
  source 1..75: mol_type = other DNA
ctcaactatatggaaaaaccgctgacgcgtctgatgctgggccgttcctggtgggatctgaacatcaaagttgat

SEQ ID NO: 386544 - DNA, 75 bp, synthetic construct
  source 1..75: mol_type = other DNA
agtcagaagctgcgcgtagcctgcgtgcggttgaaaaagtgtcgtttagccttgaggacgcgcaagaactggcgg

SEQ ID NO: 386545 - DNA, 75 bp, synthetic construct
  source 1..75: mol_type = other DNA
agggcgacagtaaggatgatgtttctgctaacttcacctttaccggtgtagtaaaagcgccgttctataaagatg

SEQ ID NO: 386546 - DNA, 75 bp, synthetic construct
  source 1..75: mol_type = other DNA
gcgcgataccgccactttcaacctgccgtttatttcgctggggcaagtcggtgagggcaaactgatggttatcgg

SEQ ID NO: 386547 - DNA, 75 bp, synthetic construct
  source 1..75: mol_type = other DNA
agaaccttgaggccagcaattacaagggcggtctgaaacaattcgctgaggaactggatacctttgccagctcga

SEQ ID NO: 386548 - DNA, 75 bp, synthetic construct
  source 1..75: mol_type = other DNA
atcaagggcaacagcaaggagaataataaatctgccagcttcacctttaccggtgtggtgaaagcgccgttctat

SEQ ID NO: 386549 - DNA, 75 bp, synthetic construct
  source 1..75: mol_type = other DNA
gcacaaagggcgggcctggcaaatccaccgttgcccagcaaattgccgtttgcctgaaagtcaaaaagaagaaga

SEQ ID NO: 386550 - DNA, 75 bp, synthetic construct
  source 1..75: mol_type = other DNA
ttacttaacaggtcattgccaaaagcgataagcacttttaaggaccatattaatgaatatgaagcagcaaaaagt

SEQ ID NO: 386551 - DNA, 75 bp, synthetic construct
  source 1..75: mol_type = other DNA
ttacttaacaggtcattgccaaaagcgataagcacttttaaggatcacatcaacgaatatgaatcagtaaaaagt

SEQ ID NO: 386552 - DNA, 75 bp, synthetic construct
  source 1..75: mol_type = other DNA
cgctgcggacacgctgatgctgtgtgcctcctgggtcgctcagacggacctttccgcattctttaagaaatggaa

SEQ ID NO: 386553 - DNA, 75 bp, synthetic construct
  source 1..75: mol_type = other DNA
tttcgaatcgggagttaataatgaagatatttcaaaaataaaaacaatgattttgtcaatggtgctcaaaagtgg

SEQ ID NO: 386554 - DNA, 75 bp, synthetic construct
  source 1..75: mol_type = other DNA
gaactgcgcagggaactttatcagtttaagcaggcggttaaggggatacgtgacgggatgtttagtgtgctgaac

SEQ ID NO: 386555 - DNA, 75 bp, synthetic construct
  source 1..75: mol_type = other DNA
ttcccgttgaatataacgatcgctttattcgtggaattgcggtgttcgcaccgtggcgaaaaacgccggggatct

SEQ ID NO: 386556 - DNA, 75 bp, synthetic construct
  source 1..75: mol_type = other DNA
gattataaacgacgccctcttcctgccccgcccgacctctcgctgttagacccgctttgttatgccgcaacgact

SEQ ID NO: 386557 - DNA, 75 bp, synthetic construct
  source 1..75: mol_type = other DNA
atgaccatcattgccggccttcccgttgaatataacgatcgctttattcgtggaattgcggtgttcgcaccgtgg

SEQ ID NO: 386558 - DNA, 75 bp, synthetic construct
  source 1..75: mol_type = other DNA
gaaaaaccgaataaagaaacagcggagtcttatattgcctccggtgaatattactggaacagcggaatgttcatg

SEQ ID NO: 386559 - DNA, 75 bp, synthetic construct
  source 1..75: mol_type = other DNA
tggatcgcagcggccagccggttgcatttgacggttcaacggcaagcgcatccataaaactgaacgaaggtacaa

SEQ ID NO: 386560 - DNA, 75 bp, synthetic construct
  source 1..75: mol_type = other DNA
gtgtattatgtgctgccatggttcctgcttttgcctctgcggcaacagtgactacccctggcggtgaagtccact

SEQ ID NO: 386561 - DNA, 75 bp, synthetic construct
  source 1..75: mol_type = other DNA
gttgtatttttctacatagatccatatgaggaggaaatggtctatctcaacacagacctcaaaagctatgcagaa

SEQ ID NO: 386562 - DNA, 75 bp, synthetic construct
  source 1..75: mol_type = other DNA
ttaaatttgacttcgaaaagacagacaaagttgtagttgaatataatcttgaaaaaattgggatggagcaacgat

SEQ ID NO: 386563 - DNA, 75 bp, synthetic construct
  source 1..75: mol_type = other DNA
gtcttatccaccaggataacagcaccgatgcgatggaagagatcaagaagatctttacaccggaattccgtaacc

SEQ ID NO: 386564 - DNA, 75 bp, synthetic construct
  source 1..75: mol_type = other DNA
tcgcgccgatcgcggttcgttattgttagttggtcaacgcacaccgcagggttggcaaggcgatatcattccatt

SEQ ID NO: 386565 - DNA, 75 bp, synthetic construct
  source 1..75: mol_type = other DNA
tatcaacttatcagatactcactgaaggcaaaccaattttattacgtcattgtcatatccatccaaatgaaaatg

SEQ ID NO: 386566 - DNA, 75 bp, synthetic construct
  source 1..75: mol_type = other DNA
tctatgagaatattacaaaaaaattagatcactcatctataaattgccctccaaacatcaaactacatttgcttg

SEQ ID NO: 386567 - DNA, 75 bp, synthetic construct
  source 1..75: mol_type = other DNA
tctatcttcctgctgatgcggaagtaccgtataacagaatcgtcttcgctcatggcttttatgccagcgccatcc

SEQ ID NO: 386568 - DNA, 75 bp, synthetic construct
  source 1..75: mol_type = other DNA
ttctgttagttacgattttcccggaaaagcggacctaattactaaccacgattttcaagagttatatcttttatt

SEQ ID NO: 386569 - DNA, 75 bp, synthetic construct
  source 1..75: mol_type = other DNA
cgaaaacgctcaaagccgtcgatggtgtcactcttcgcctgtatgaaggggaaacattaggtgtggtaggggaat

SEQ ID NO: 386570 - DNA, 75 bp, synthetic construct
  source 1..75: mol_type = other DNA
gactacgccgttatggagaaaaccgctgatgcggtggtggtcggtctcgatgctgactggagcgacgttggctcc

SEQ ID NO: 386571 - DNA, 75 bp, synthetic construct
  source 1..75: mol_type = other DNA
acaaaagaaaacggtaaacatgtaaaaggttataccaagaatgcccctaacgacggcaacgcaattccgagacat

SEQ ID NO: 386572 - DNA, 75 bp, synthetic construct
  source 1..75: mol_type = other DNA
atattgtgtttgaaatcattgatatgttgcagccttattattatctaatttctaaatttaaagatgatattgaca

SEQ ID NO: 386573 - DNA, 75 bp, synthetic construct
  source 1..75: mol_type = other DNA
ccctcatcgtttgacggtcgctattttggcgcagttacaacgtcacagataatttcgactgtattaccagttttt

SEQ ID NO: 386574 - DNA, 75 bp, synthetic construct
  source 1..75: mol_type = other DNA
gtgccgcgaaatgctgcaaaacagcccgatggcgctgcgctgcctgaaagctgcgctgaacgccgactgtgacgg

SEQ ID NO: 386575 - DNA, 75 bp, synthetic construct
  source 1..75: mol_type = other DNA
atgatttatcctgatgaagcaatgctttacgcaccggttgaatggcacgactgctccgaaggtttcgaggacatt

SEQ ID NO: 386576 - DNA, 75 bp, synthetic construct
  source 1..75: mol_type = other DNA
cccgaacgtccggcacgcttcataaacgcattacaaaattattatcacacgccggaaattacggcggaacagttc

SEQ ID NO: 386577 - DNA, 75 bp, synthetic construct
  source 1..75: mol_type = other DNA
aaaagtgatcattgccgacgaagccgtttcggcgctggatgtttctattcgcgggcagattatcaacttgttgct

SEQ ID NO: 386578 - DNA, 75 bp, synthetic construct
  source 1..75: mol_type = other DNA
cgacactggcaacgatgcagattgttcgaggtctggcgtacatcatttcagacggtaaagcggtcggtatcgaag

SEQ ID NO: 386579 - DNA, 75 bp, synthetic construct
  source 1..75: mol_type = other DNA
gggcagaaaaaagcacgtgaaatctggttcctgtgccgtcagtacgacgcaaaacaggcgctggatatgggcctg

SEQ ID NO: 386580 - DNA, 75 bp, synthetic construct
  source 1..75: mol_type = other DNA
ctggtgatgaccaccaacgccggggtacgtgaaactgagcgtaaatccattggtcttatccaccaggataacagc

SEQ ID NO: 386581 - DNA, 75 bp, synthetic construct
  source 1..75: mol_type = other DNA
ttgaaacagccagccactcagaacaaggccgggaattgttgagcaggctggaagcactggagaaaggagaaagca

SEQ ID NO: 386582 - DNA, 75 bp, synthetic construct
  source 1..75: mol_type = other DNA
tcctaccgttgacggtaaatttgtttccgcatttagcccggaaggattaaacacgggtttttgtggagcgtggaa

SEQ ID NO: 386583 - DNA, 75 bp, synthetic construct
  source 1..75: mol_type = other DNA
accatgttgaccgtgcgcctgggatcggtaatttcgcccatgatgggtggcttactgctggcgactggcggcgtc

SEQ ID NO: 386584 - DNA, 75 bp, synthetic construct
  source 1..75: mol_type = other DNA
taataccgcaaccgccagaccactgacacaaaaagcgatgatggagggtagctatcgtgccacagagaaaatgct

SEQ ID NO: 386585 - DNA, 75 bp, synthetic construct
  source 1..75: mol_type = other DNA
cacggcgaaattgttgctaacgcattaaatggtgaagcgttagaagcaatgtttaaatccctgggcaaagccgcg

SEQ ID NO: 386586 - DNA, 75 bp, synthetic construct
  source 1..75: mol_type = other DNA
aaagcgattaaagaagagatcgcagcaaacgcagataaagaagtagcagaaaaacgcgccgcagtagcaaaagtg

SEQ ID NO: 386587 - DNA, 75 bp, synthetic construct
  source 1..75: mol_type = other DNA
gttttggtttgttgattatcggcgtgttgttattgctggtgctggtggagttgcgacattttcgccagacgccgc

SEQ ID NO: 386588 - DNA, 75 bp, synthetic construct
  source 1..75: mol_type = other DNA
gcagccgaataccaagagcacaatgaccgtaggcaccaacctggataccgtttatttcaaacgtcatggtcaggt

SEQ ID NO: 386589 - DNA, 75 bp, synthetic construct
  source 1..75: mol_type = other DNA
acgttcaccgagttcctgaactgctacgccaacgatgcttacaccaaaggtacgctgtgctccgcagagctgaaa

SEQ ID NO: 386590 - DNA, 75 bp, synthetic construct
  source 1..75: mol_type = other DNA
ccggttgcttccgcaagcgcgagcggttttggtttgttgattatcggcgtgttgttgttgctggtgctggtggag

SEQ ID NO: 386591 - DNA, 75 bp, synthetic construct
  source 1..75: mol_type = other DNA
cgctgaccggcggcgcgatgtttgttggcctgatggttggcggtgtgctggcggatcgctatgagcgcaaaaaag

SEQ ID NO: 386592 - DNA, 75 bp, synthetic construct
  source 1..75: mol_type = other DNA
gcagatccagatgatgacgcattccacctggcaggtggggctttcggtgacgctgaccggcggcgcgatgtttgt

SEQ ID NO: 386593 - DNA, 75 bp, synthetic construct
  source 1..75: mol_type = other DNA
gaacacctatccgatttattcatcctgaaagaaaaaatccaggccaataagaaagaggaaaccgacatgccttta

SEQ ID NO: 386594 - DNA, 75 bp, synthetic construct
  source 1..75: mol_type = other DNA
gcagcgacgaaaaacagacccgcagcccgctgtcgctgtattcggaataccagcggatggagattgagtttcgcg

SEQ ID NO: 386595 - DNA, 75 bp, synthetic construct
  source 1..75: mol_type = other DNA
tgtcactgtttttgatcggcgtgctgattgtcgtcgggaaagtgctggccggtggcgagcccatcaccgcccggc

SEQ ID NO: 386596 - DNA, 75 bp, synthetic construct
  source 1..75: mol_type = other DNA
atgctcggcattgcaggttatcaggtggtggaaatcgccattcagcgccgctttaagtcacaacagggggatagc

SEQ ID NO: 386597 - DNA, 75 bp, synthetic construct
  source 1..75: mol_type = other DNA
aacataaaccagtcggttcgttcctgtttgctggtcctaccggggtcgggaaaaccgaggtgacggtgcagcttt

SEQ ID NO: 386598 - DNA, 75 bp, synthetic construct
  source 1..75: mol_type = other DNA
tggtcgctatctttagcgaacaggagtcgcaggcggcatatctgttgcgtaaacatgaagtcagccgtctcgatg

SEQ ID NO: 386599 - DNA, 75 bp, synthetic construct
  source 1..75: mol_type = other DNA
catggcaatttttaatctgccaatgcatttgtttctctcctggccactggataaagaccttataaaccatgtgac

SEQ ID NO: 386600 - DNA, 75 bp, synthetic construct
  source 1..75: mol_type = other DNA
ggagatgggcgccgatgattatgtcatcaaaccgctggagctgcgtgaactcgtggtgcgggtaaaaaatctgct

SEQ ID NO: 386601 - DNA, 75 bp, synthetic construct
  source 1..75: mol_type = other DNA
gcgcaaccgcacactcaggacaactgctatcgctttgcgggttattgcctgaatgtgtcgcgccatacgctggag

SEQ ID NO: 386602 - DNA, 75 bp, synthetic construct
  source 1..75: mol_type = other DNA
cgtgtttatgtggaaaaatgggtggatgttgaaaccgccagccattcagaacaaggccgcgaattattaagccga

SEQ ID NO: 386603 - DNA, 75 bp, synthetic construct
  source 1..75: mol_type = other DNA
atgtcggtatatggctatcccgtgccaaccacaccgtggctgaatactgctcccggtttatttattgacggctat

SEQ ID NO: 386604 - DNA, 75 bp, synthetic construct
  source 1..75: mol_type = other DNA
aagatgagccggttacccaagctcgattacaaacctacttcactcaggaggggtataccgtttccgttacggcaa

SEQ ID NO: 386605 - DNA, 75 bp, synthetic construct
  source 1..75: mol_type = other DNA
tggtggtgcgggtgaaaaatctgctctggcgcatcgacctcgcgcggcaggtgcaaccacttactcaggacaact

SEQ ID NO: 386606 - DNA, 75 bp, synthetic construct
  source 1..75: mol_type = other DNA
ggagctggcgcgtctggtgcaaaaagctggcgccgatatgatcgagtgtaacttctcatgtccgcagatgacctc

SEQ ID NO: 386607 - DNA, 75 bp, synthetic construct
  source 1..75: mol_type = other DNA
atgagatgtgcgccaaagcctacgacacaggttggggcggcgtggtgtttaaaacgatcggttttttttatcgcc

SEQ ID NO: 386608 - DNA, 75 bp, synthetic construct
  source 1..75: mol_type = other DNA
accgggcggataattctcaggttaaactttataacgactctgcttatagcacaatcgacgctgacggtaaggctg

SEQ ID NO: 386609 - DNA, 75 bp, synthetic construct
  source 1..75: mol_type = other DNA
gtaccagaaaaattgcggagaaaacacgggaacgcctgaaaaaattaatctggctggcggcgcaggatgtgaaga

SEQ ID NO: 386610 - DNA, 75 bp, synthetic construct
  source 1..75: mol_type = other DNA
ctggacagggatgctcttatttcagtaatgcgggtacgttcacggcaaaagtcgattaatttagaaccatatctt

SEQ ID NO: 386611 - DNA, 75 bp, synthetic construct
  source 1..75: mol_type = other DNA
attgtcgggcagtgaaacgtggttccacgctgccaatgctggcgaagatgacgccgaatatcggtgatatgtgcg

SEQ ID NO: 386612 - DNA, 75 bp, synthetic construct
  source 1..75: mol_type = other DNA
agtttcggggatattgcccataaaggcgaaaccggcaccggctttggttcactggtgggaactggcagttatatc

SEQ ID NO: 386613 - DNA, 75 bp, synthetic construct
  source 1..75: mol_type = other DNA
ttgcccataaaggcgaaaccggcaccggctttggttcactggtgggaactggcagttatatcacgcctgatttcg

SEQ ID NO: 386614 - DNA, 75 bp, synthetic construct
  source 1..75: mol_type = other DNA
tggagcgagtttaagactctgttgggtaccagaaaaattgcaggtaagacactggaacgcctgaagaaattgatc

SEQ ID NO: 386615 - DNA, 75 bp, synthetic construct
  source 1..75: mol_type = other DNA
gccattatcatgcagaaatcggggatcccggatatcgatcaggctaactgcatgatcaaactggaatcggacggc

SEQ ID NO: 386616 - DNA, 75 bp, synthetic construct
  source 1..75: mol_type = other DNA
gcacttacgccgccaggttgcgcgccttgtaggtatgaaacaacataaagttcatgtcattaaagaacgcgtagg

SEQ ID NO: 386617 - DNA, 75 bp, synthetic construct
  source 1..75: mol_type = other DNA
aagacgcgccggtcgttcacgatgaacccgtcgtatatgttgccggtgcaccagatactctggaagaagacaata

SEQ ID NO: 386618 - DNA, 75 bp, synthetic construct
  source 1..75: mol_type = other DNA
ttcgtgagcagctcattatcgccaccgccgatttgagtggggcaacaaaaggccagcttgaagcctggctggaga

SEQ ID NO: 386619 - DNA, 75 bp, synthetic construct
  source 1..75: mol_type = other DNA
ggcggtcctgtcactggaggaacatcagaaggcctggctgctatggaactacagcgaaaacacgcgctgggagaa

SEQ ID NO: 386620 - DNA, 75 bp, synthetic construct
  source 1..75: mol_type = other DNA
cttgatagcgacgctctcatggcggtaacgcgatcacgttcacaacaaaaggcgtcaaatttagatgtaagtctt

SEQ ID NO: 386621 - DNA, 75 bp, synthetic construct
  source 1..75: mol_type = other DNA
cgctggataatacgccgatttctggtaagcagtcgtacgcaaaaggttcatccattgcactggtcagccaggttg

SEQ ID NO: 386622 - DNA, 75 bp, synthetic construct
  source 1..75: mol_type = other DNA
agactatcacttatttaagtgatattggttgtctggagattcagggggccagtctacatacccacaaactttcgc

SEQ ID NO: 386623 - DNA, 75 bp, synthetic construct
  source 1..75: mol_type = other DNA
gacccggtcactggtcggaaagttaaccctgacggcccggcgatgagcggcagccagtcccgcgcaaagggatca

SEQ ID NO: 386624 - DNA, 75 bp, synthetic construct
  source 1..75: mol_type = other DNA
cttgatagtgatgctttactgcgagcagtgagaacacgatcacaacaaaaatcagcaaattcgcagcaaggtatt

SEQ ID NO: 386625 - DNA, 75 bp, synthetic construct
  source 1..75: mol_type = other DNA
ttcgtgagcaacttatggcagctactgctgacttgaacggagcaacgaaaggccagctcgaagcctggcaggagc

SEQ ID NO: 386626 - DNA, 75 bp, synthetic construct
  source 1..75: mol_type = other DNA
tgcaatgaaacacatttttcatcggctggatggtgaagctttattgttggtggagggagcacgttcagaacaaaa

SEQ ID NO: 386627 - DNA, 75 bp, synthetic construct
  source 1..75: mol_type = other DNA
tgaatatcgggagctggcatcattggtaggagtaacacccaaaaactggtccaggacatttactgagcactgggt

SEQ ID NO: 386628 - DNA, 75 bp, synthetic construct
  source 1..75: mol_type = other DNA
ctggacagggatgcgcttatttcagtaatgcgggtacgatcacggcaacagtcgcttaatttagaaccatatctt

SEQ ID NO: 386629 - DNA, 75 bp, synthetic construct
  source 1..75: mol_type = other DNA
gggcagttaatggcctggcttgagaacgcccaatttgatacgggaacgtttaaacgtaaaaagcctcgagtgctg

SEQ ID NO: 386630 - DNA, 75 bp, synthetic construct
  source 1..75: mol_type = other DNA
cgcggttttgtctctcgatgaacatcagaaagcatggttgctttggtgttacagcgaaagcgttcgatgggggca

SEQ ID NO: 386631 - DNA, 75 bp, synthetic construct
  source 1..75: mol_type = other DNA
tgcaatgaagcacatttttctacagcttgatagcgaagctttattgcttctaacgagaacacgttcaaaacaaaa

SEQ ID NO: 386632 - DNA, 75 bp, synthetic construct
  source 1..75: mol_type = other DNA
cgcgggataatccaccgatcccgggtaaacaatcactggcgaaaggctcatcaattgccctggtcagtccggttg

SEQ ID NO: 386633 - DNA, 75 bp, synthetic construct
  source 1..75: mol_type = other DNA
gatgaggtaactggcaagattattatgctggataatccgccgatttccggtaagcagtcgtacgcaaaaggttca

SEQ ID NO: 386634 - DNA, 75 bp, synthetic construct
  source 1..75: mol_type = other DNA
gatgtggtaactggcaagatgattacgctggataatccgccgatttccgttaaacagtcgtacgcaaaaggttca

SEQ ID NO: 386635 - DNA, 75 bp, synthetic construct
  source 1..75: mol_type = other DNA
taccgctgctgtattgcaggagctgggttatagcgacgatgaaattgctgcaatgaagcaaaaccacgccatctg

SEQ ID NO: 386636 - DNA, 75 bp, synthetic construct
  source 1..75: mol_type = other DNA
ttaaaattgaacgtcccggcgttggtgacgtaacgcgtcaccagctgcgagatattcctgatatcgatgcgcttt

SEQ ID NO: 386637 - DNA, 75 bp, synthetic construct
  source 1..75: mol_type = other DNA
tgcaatgaaacacatttttcaccggctggatagtgaggctttattgtttgtgacgagaacacgttcaaaacaaaa

SEQ ID NO: 386638 - DNA, 75 bp, synthetic construct
  source 1..75: mol_type = other DNA
acgtacctggaatgttggccctggcagccgtgttggtgttattgggttaggcggattaggccatatggcggtaaa

SEQ ID NO: 386639 - DNA, 75 bp, synthetic construct
  source 1..75: mol_type = other DNA
actcagggaggctactccaaacatattgtggtacgtgaagaatttgtactgcggatccctgaaaatatggattta

SEQ ID NO: 386640 - DNA, 75 bp, synthetic construct
  source 1..75: mol_type = other DNA
gatcaatattgatcagataaacgatgcttttgcccgccttgcaaaaggggatatggcgcatcgttttgtcattga

SEQ ID NO: 386641 - DNA, 75 bp, synthetic construct
  source 1..75: mol_type = other DNA
atggatatcacccggcgtgaaccgggaccgcatgatgtcaaaatcgaaatcgcttactgtggcgtctgccattcc

SEQ ID NO: 386642 - DNA, 75 bp, synthetic construct
  source 1..75: mol_type = other DNA
taacggtttgtggacggcgcagaacgtgacgggcgatgccataggcgcggcgctgctgggtggtttgggcgcgat

SEQ ID NO: 386643 - DNA, 75 bp, synthetic construct
  source 1..75: mol_type = other DNA
gccggacgcgcagcgccgggatgctgttgtgtaccgctggcggtgctgtggccgggttaaccgggctgggcggcg

SEQ ID NO: 386644 - DNA, 75 bp, synthetic construct
  source 1..75: mol_type = other DNA
caaacgaaagaagccgcgcattctggatgaggtaactggcaggatgattacgctggataatccgccgatttccgg

SEQ ID NO: 386645 - DNA, 75 bp, synthetic construct
  source 1..75: mol_type = other DNA
ctggcagcaaaaggcaaatttataccttcggaagacggtttttcgaccgatcagagtaagatttgccgtcactga

SEQ ID NO: 386646 - DNA, 75 bp, synthetic construct
  source 1..75: mol_type = other DNA
acgtttgaagaagttgatctggctggcggcacaggatgtgaagaacgagctggcagggcgtaagacctatgaata

SEQ ID NO: 386647 - DNA, 75 bp, synthetic construct
  source 1..75: mol_type = other DNA
ttgccgcagctttttgaagttcgcgcctcgcatgtgctgggaacacttcccgcgaacaggtcagcgaatttctct

SEQ ID NO: 386648 - DNA, 75 bp, synthetic construct
  source 1..75: mol_type = other DNA
tggagcgagtttaagactctgttgggtaccagaaaaattgcaggtaaaacactggaacgcctgaagaagttgatc

SEQ ID NO: 386649 - DNA, 75 bp, synthetic construct
  source 1..75: mol_type = other DNA
gtcggagtgaccccgaagaactggtcagaaacgtttacagaacggtgggaggagatgaaaaccaccttgcggcgc

SEQ ID NO: 386650 - DNA, 75 bp, synthetic construct
  source 1..75: mol_type = other DNA
gtgaacaggcacgttttcacacctgctcggcagaagggatgactgcgggagagctggtggcgtttctggcagcaa

SEQ ID NO: 386651 - DNA, 75 bp, synthetic construct
  source 1..75: mol_type = other DNA
cgtttagaggggcgtgatcctaacacgctggttggtttaccgctaatcgcgctgtgtcagatgttacgtcgggaa

SEQ ID NO: 386652 - DNA, 75 bp, synthetic construct
  source 1..75: mol_type = other DNA
aaatctcttttgaatgtgcagcaccagaggtcgacgaaaccccacgcagcgacgaatcaccgcgacagttggtgc

SEQ ID NO: 386653 - DNA, 75 bp, synthetic construct
  source 1..75: mol_type = other DNA
tataaagcctggttgttgtggtgttacagcggaagtatttgctgggagtatcagatcaccataacccactgggcg

SEQ ID NO: 386654 - DNA, 75 bp, synthetic construct
  source 1..75: mol_type = other DNA
ctggatagtgaggccttattgtttgtgatgagaacacgttcagaacaaaagacggcattttcaaagaaaagtatt

SEQ ID NO: 386655 - DNA, 75 bp, synthetic construct
  source 1..75: mol_type = other DNA
cctcgccctggcgccgcgctctacttgaaaaactgcaaatctctttcgaatgtgccgcgccggaggtcgacgaaa

SEQ ID NO: 386656 - DNA, 75 bp, synthetic construct
  source 1..75: mol_type = other DNA
cggaagaaaatgcccgtctacaattacgcaaagccagcggcaatattgtcaccttctatactgggctggcactgt

SEQ ID NO: 386657 - DNA, 75 bp, synthetic construct
  source 1..75: mol_type = other DNA
atttactggcattacggggccgtatggaagcggcccagattagccagacactgaacactccgcagccaatgatta

SEQ ID NO: 386658 - DNA, 75 bp, synthetic construct
  source 1..75: mol_type = other DNA
atggcttcacttattcaggtgcgcgatttgctggcgttacggggccgtatggaagcggcccagataagccagaca

SEQ ID NO: 386659 - DNA, 75 bp, synthetic construct
  source 1..75: mol_type = other DNA
gagtgaaattctttaccaagcatgccgatatccagactatccagatatccaaagggttattattacccaagccaa

SEQ ID NO: 386660 - DNA, 75 bp, synthetic construct
  source 1..75: mol_type = other DNA
tattgatggaacagcctgtcaaagccaccaccgggacgctgtatgacctggcttccaataccaagatgtacgcca

SEQ ID NO: 386661 - DNA, 75 bp, synthetic construct
  source 1..75: mol_type = other DNA
acattccgcataaccgcgctccgctggatcggggacgtaaagaggtgctgaaacatgtgcatcgtttgtggggat

SEQ ID NO: 386662 - DNA, 75 bp, synthetic construct
  source 1..75: mol_type = other DNA
ggctgcctctctggcaattgtaaaagctgcccggaaggcaaagcctgcctgcgcgagtggtgggcgctgcgttaa

SEQ ID NO: 386663 - DNA, 75 bp, synthetic construct
  source 1..75: mol_type = other DNA
ccttgggctacgtggtgaaaaataatattgaagactataacgctggtgtcgcaaacgatctggataagattgtat

SEQ ID NO: 386664 - DNA, 75 bp, synthetic construct
  source 1..75: mol_type = other DNA
ctgctggatatcaacttacccgatgaaaatggcctgatgttaacccgcgccctgcgagaacgctcaacggtgggg

SEQ ID NO: 386665 - DNA, 75 bp, synthetic construct
  source 1..75: mol_type = other DNA
tggcctggggtattttctgaggccgcgcataatttagcatttgaaacattagagcatgcaacacgtgctgaccat

SEQ ID NO: 386666 - DNA, 75 bp, synthetic construct
  source 1..75: mol_type = other DNA
tctttggacaaattttttctcctaggcgaaagaattaaagatgtaacatttgtagagccaacgcctggagcaggg

SEQ ID NO: 386667 - DNA, 75 bp, synthetic construct
  source 1..75: mol_type = other DNA
caagcatgccgatatccagactatccggatatacaaaaggccatcattactcaaggaaacccctatgaagccaag

SEQ ID NO: 386668 - DNA, 75 bp, synthetic construct
  source 1..75: mol_type = other DNA
ttagtaaagaaacacacctgcggctgtctgttgcaaaaaactatcaggatttgctggaagcaatacaaaacctgg

SEQ ID NO: 386669 - DNA, 75 bp, synthetic construct
  source 1..75: mol_type = other DNA
atgaagatcaaagctgttggtgcatattccgctaaacaaccactggaaccgatggatatcacccggcgtgaaccg

SEQ ID NO: 386670 - DNA, 75 bp, synthetic construct
  source 1..75: mol_type = other DNA
caacgtcgcggcaaaatcaggtcttaaccgggcgatactggatcagggctgggcagaaatgcgccgccagctcga

SEQ ID NO: 386671 - DNA, 75 bp, synthetic construct
  source 1..75: mol_type = other DNA
gccatgttccaggatattaaacggatttgtcagtcgccaacggaagaagacaaatactggttcccggatatcgcc

SEQ ID NO: 386672 - DNA, 75 bp, synthetic construct
  source 1..75: mol_type = other DNA
cgttttgcctctgtctatcgcagtttcgaagatatcaaagaatttggcgaagagatcgcgcgcctggaggattaa

SEQ ID NO: 386673 - DNA, 75 bp, synthetic construct
  source 1..75: mol_type = other DNA
agagtcataccgggtgacaatgctgttatgctgtcaaccgaaagggatgctgaaatgaacactaagcatctgaat

SEQ ID NO: 386674 - DNA, 75 bp, synthetic construct
  source 1..75: mol_type = other DNA
atagtgacttagccttccttcttttcaactccagtgatcgcggagtccctgtttcttttgaagccatttggaaag

SEQ ID NO: 386675 - DNA, 75 bp, synthetic construct
  source 1..75: mol_type = other DNA
caataggcctggatgcaggtataacgaagctggcaacactttcagacggcacggtctttgaaccggtaaacagct

SEQ ID NO: 386676 - DNA, 75 bp, synthetic construct
  source 1..75: mol_type = other DNA
agcaaagtatcacctcactgaaactgtgtgaggccaacgttatcactaccgggaaataccacgttccggcagtgc

SEQ ID NO: 386677 - DNA, 75 bp, synthetic construct
  source 1..75: mol_type = other DNA
gatgattcgggccgatcaaattaatgaagcctatgagcgatttctgatagtgcctggtttaatcagggctttatt

SEQ ID NO: 386678 - DNA, 75 bp, synthetic construct
  source 1..75: mol_type = other DNA
aacatggcattgtggctgatatagagatgattcgggccgatcaaattaatgaagcctatgagcgggtaatgactc

SEQ ID NO: 386679 - DNA, 75 bp, synthetic construct
  source 1..75: mol_type = other DNA
agatgattggcaatctggtgatggagcaattgaaaaagctcgataaagtcgcctatatccgttttgcctctgtct

SEQ ID NO: 386680 - DNA, 75 bp, synthetic construct
  source 1..75: mol_type = other DNA
atgcattgcccattctgtttcgccgtggacactaaggtaattgactctcgtctcgtgggcgagggttcatccgta

SEQ ID NO: 386681 - DNA, 75 bp, synthetic construct
  source 1..75: mol_type = other DNA
tcatcacgctggtttgcccgtattgcagccagcattactacgcaaaagtcccggttatggaatttatcccttgtg

SEQ ID NO: 386682 - DNA, 75 bp, synthetic construct
  source 1..75: mol_type = other DNA
gcagaggtgttcgtatactttctgcttacgcgcagaataagtctcatgaaattgaagtgacctatccttcagtac

SEQ ID NO: 386683 - DNA, 75 bp, synthetic construct
  source 1..75: mol_type = other DNA
ttggctggttgcttgtggacccattcaatggcggtatgtatacactgagtccggaaagtctgaatcccgggctgg

SEQ ID NO: 386684 - DNA, 75 bp, synthetic construct
  source 1..75: mol_type = other DNA
tctctgtcagcttttttctgacggggtgtgcaaccattgtcggagataaaacgcagactgtacaggtaaacagta

SEQ ID NO: 386685 - DNA, 75 bp, synthetic construct
  source 1..75: mol_type = other DNA
gctccaaccatacttgatatttacaaggcggaatatcatgagaatgtggttaattttatagaaaaaatagaaaac

SEQ ID NO: 386686 - DNA, 75 bp, synthetic construct
  source 1..75: mol_type = other DNA
agttttgtacctgagtcagggccaggagtcatcaatcagcaccgatttacttgagacgattattgtctcggatgt

SEQ ID NO: 386687 - DNA, 75 bp, synthetic construct
  source 1..75: mol_type = other DNA
gagtaagggttggcctggaatttttgctgaagccgcacaaaccctagcatttgaaacattagagcatgctactcg

SEQ ID NO: 386688 - DNA, 75 bp, synthetic construct
  source 1..75: mol_type = other DNA
tccaaataaaagccagtcagagcttgaagaaatgatcctgactgcctttaagaaggtaccgaatgaactgaacaa

SEQ ID NO: 386689 - DNA, 75 bp, synthetic construct
  source 1..75: mol_type = other DNA
acggcttggccctgacaactgaaacagtcagcccggaagcaacctttgacccgatgccgcaggctgaaaatctgt

SEQ ID NO: 386690 - DNA, 75 bp, synthetic construct
  source 1..75: mol_type = other DNA
tcccctgaaacccgtaacggtaaaaaaccggataagatcactgttgtttgtaattacagagaataatctcagcct

SEQ ID NO: 386691 - DNA, 75 bp, synthetic construct
  source 1..75: mol_type = other DNA
tgaccagtgatgagacgctgcgaattgtggatgagtactgtcatacccacaaactttcgcgctctaaggtaatca

SEQ ID NO: 386692 - DNA, 75 bp, synthetic construct
  source 1..75: mol_type = other DNA
tggccgtcatcttcttctttgcttctgctctgctgtactctcaggctgcaaccgcaaaagcactgatgccgatgg

SEQ ID NO: 386693 - DNA, 75 bp, synthetic construct
  source 1..75: mol_type = other DNA
atgaaacgtttaattatggctacgatggtcacagcgattttggcatcatcaactgtatgggctgctgataatgca

SEQ ID NO: 386694 - DNA, 75 bp, synthetic construct
  source 1..75: mol_type = other DNA
gtgcagcgcatctaaacagggtttcagcgattcccgctggatgacttacaaacaggcacaggcagcaggtggaca

SEQ ID NO: 386695 - DNA, 75 bp, synthetic construct
  source 1..75: mol_type = other DNA
aggggacactctggtccgatgctaatagctctaatccatcaatttcgggtgctgcatataaagtcctgcttgacg

SEQ ID NO: 386696 - DNA, 75 bp, synthetic construct
  source 1..75: mol_type = other DNA
ttacgcgcagaataaaatagatgaaactgaagtgatatatccttcagtacatgttgcgccacttcagatcaaaga

SEQ ID NO: 386697 - DNA, 75 bp, synthetic construct
  source 1..75: mol_type = other DNA
taaatatcaggtaatatccattaataatgaaaccagcccgagaacagaacatcccgttggtactggggggcatgt

SEQ ID NO: 386698 - DNA, 75 bp, synthetic construct
  source 1..75: mol_type = other DNA
actggcgcaggatggcgtaccgatggttgaaatggaaaaaggcgctgacctgatgcaggcgctggtcgattctga

SEQ ID NO: 386699 - DNA, 75 bp, synthetic construct
  source 1..75: mol_type = other DNA
cgtgctgaccatatagattctgatagatatctaataaaatcaatttattataatttatttagtggcgaagattct

SEQ ID NO: 386700 - DNA, 75 bp, synthetic construct
  source 1..75: mol_type = other DNA
catggtcaagctcggcagtctgctgagcaatgatcctcgtcatgtatatcttgtggcgcagccaggcagtttcat

SEQ ID NO: 386701 - DNA, 75 bp, synthetic construct
  source 1..75: mol_type = other DNA
gtgaaggttggtgcggaagcagtcgataacattctgaacatactggcatcgagtatgctggcagtgaccacattt

SEQ ID NO: 386702 - DNA, 75 bp, synthetic construct
  source 1..75: mol_type = other DNA
tggcaacttccctccagaaacagccggtagatgtgagctctccacgagttgggagcgaaaccctaatgttgatgt

SEQ ID NO: 386703 - DNA, 75 bp, synthetic construct
  source 1..75: mol_type = other DNA
ggcttgggatattacagcagaacggtaaattccctgatccggcctcaataaatctcgactcgctgactggagcag

SEQ ID NO: 386704 - DNA, 75 bp, synthetic construct
  source 1..75: mol_type = other DNA
atgaacgccaaaagagcgctcaagaattgcacctatgtaggctcttattgtaaatctaaggtgttgggcgcttgt

SEQ ID NO: 386705 - DNA, 75 bp, synthetic construct
  source 1..75: mol_type = other DNA
gctggcgcaggacggcgtaccgatggttgagatggaaaaaggcgctgatctgatgcaggcgctggtcgattctga

SEQ ID NO: 386706 - DNA, 75 bp, synthetic construct
  source 1..75: mol_type = other DNA
aacgcttccagcaggcgggccacaagccggttgcgctggtaggcggcgcgacgggtctgattggcgacccgagct

SEQ ID NO: 386707 - DNA, 75 bp, synthetic construct
  source 1..75: mol_type = other DNA
tagtaaaagccaggtctacgttgagttttataaaccatccgagcagttgggggttcgattcggcgatgggctaat

SEQ ID NO: 386708 - DNA, 75 bp, synthetic construct
  source 1..75: mol_type = other DNA
ctgaatcgctgaaaaccatcacggcagaaatgaacacgatggattccaaccttaaaggtcagatttccagcgtgg

SEQ ID NO: 386709 - DNA, 75 bp, synthetic construct
  source 1..75: mol_type = other DNA
agttcaccgggcgcggctaccaatggactttcggcggcatgaatacgggccacacctattacgtttatgtgcgca

SEQ ID NO: 386710 - DNA, 75 bp, synthetic construct
  source 1..75: mol_type = other DNA
acaagaaaactgacgccagcgtgaaccgccttgatcaagcaatcgctgacgaatcaagcgcccgtgcgcaggcaa

SEQ ID NO: 386711 - DNA, 75 bp, synthetic construct
  source 1..75: mol_type = other DNA
ctcatattgtatggctttgtattctccgacaatgctagtatcaagaggaacaggatcatttagcgcatcaactac

SEQ ID NO: 386712 - DNA, 75 bp, synthetic construct
  source 1..75: mol_type = other DNA
gcaacgattacattgacatctggtgaatatagatcaacttataacgtaacgtttagttgcggaggtcaaagtaaa

SEQ ID NO: 386713 - DNA, 75 bp, synthetic construct
  source 1..75: mol_type = other DNA
ttggtgacgttgctaacatgggtgttggtccagatcgagtacttgggtataacggaagttataaagcaaccatca

SEQ ID NO: 386714 - DNA, 75 bp, synthetic construct
  source 1..75: mol_type = other DNA
gcatctttcgacgatgtaaattcaagtatcacggaatggtcacaggctatggcaacggcagacgaggcattatca

SEQ ID NO: 386715 - DNA, 75 bp, synthetic construct
  source 1..75: mol_type = other DNA
ggttaacgcgcaggtgaagcacgacacgccacttgtaaggacggtatcagatccgaacgtgacgcgagtccggtt

SEQ ID NO: 386716 - DNA, 75 bp, synthetic construct
  source 1..75: mol_type = other DNA
agtcagacgttgccgttcattgtgtttcaggtattacatctcagcatgtttccgtaactgttacagaaaactaca

SEQ ID NO: 386717 - DNA, 75 bp, synthetic construct
  source 1..75: mol_type = other DNA
ctgtaaactcaaacattacagaatggtcgcaggcaatggctacggctgacgaggcattatcaagcaaaatcgatc

SEQ ID NO: 386718 - DNA, 75 bp, synthetic construct
  source 1..75: mol_type = other DNA
ccaggctattgctgacgagtcaagcgcccgcgctcaagctatcagtggcgtaaatgcgtcaatttcaacccttga

SEQ ID NO: 386719 - DNA, 75 bp, synthetic construct
  source 1..75: mol_type = other DNA
aatgacactcccatcactgacgcaagcggaaacacatcagtccctggtgttagcgtggcatggcgtaatggtacg

SEQ ID NO: 386720 - DNA, 75 bp, synthetic construct
  source 1..75: mol_type = other DNA
tgttgtgtgaatcccctaaaggagtggggatagtgatcccacttgtaacatcatggccggattcagtcgtagtaa

SEQ ID NO: 386721 - DNA, 75 bp, synthetic construct
  source 1..75: mol_type = other DNA
tagttggttttgctgaagccagaaaggagtttcatgcccaattgttactgaatacgctcacaattaatactgccg

SEQ ID NO: 386722 - DNA, 75 bp, synthetic construct
  source 1..75: mol_type = other DNA
tattaatgccagagattgaattcagtaagtttatagaagaaaaatccaatcaagtggctgatatagcagcacatt

SEQ ID NO: 386723 - DNA, 75 bp, synthetic construct
  source 1..75: mol_type = other DNA
ttccgtcacagatgccgacactgaaatgggcctgtctgaaactggcgaaactggggcgatggcatgacagcaaac

SEQ ID NO: 386724 - DNA, 75 bp, synthetic construct
  source 1..75: mol_type = other DNA
cgcacttaaacaatccgcaaatggtaaagaggttgactggtcgcctcagaaactggccattgaaggtatcgaccg

SEQ ID NO: 386725 - DNA, 75 bp, synthetic construct
  source 1..75: mol_type = other DNA
aatgggacgatcagcatgtggctggcgtttttcagtcggccgtgctcaaagacgttaacaatacagttatcacac

SEQ ID NO: 386726 - DNA, 75 bp, synthetic construct
  source 1..75: mol_type = other DNA
ctggatttgatggacggtcacttttgcccacaatttaccgttggcccttgggctatttcacaattgccaaaacaa

SEQ ID NO: 386727 - DNA, 75 bp, synthetic construct
  source 1..75: mol_type = other DNA
tgaagaccttaaaacagctacagacgaccttaaaacagctacagacaaccttaaaacagacacagacgcgcttaa

SEQ ID NO: 386728 - DNA, 75 bp, synthetic construct
  source 1..75: mol_type = other DNA
attagaaacggcactgtttttgctgtatcgactgaagtggcaaaacccgttttgtgccggatcaccagtgtagca

SEQ ID NO: 386729 - DNA, 75 bp, synthetic construct
  source 1..75: mol_type = other DNA
ttgatgctaaatatattgccgctggggatacaatcagccttcttgatagcgatggcaagtttaaaaaacatcaga

SEQ ID NO: 386730 - DNA, 75 bp, synthetic construct
  source 1..75: mol_type = other DNA
tgtcaatataagtcgtaagaatcgtcacattttcaacagcaccacaatctctggcagaaaacccaacatcactgg

SEQ ID NO: 386731 - DNA, 75 bp, synthetic construct
  source 1..75: mol_type = other DNA
attagtggtgaagtctttggtgatgttggtagtattgaggctgattttcgagaaatcagcacattgattcatcgg

SEQ ID NO: 386732 - DNA, 75 bp, synthetic construct
  source 1..75: mol_type = other DNA
ttgatcaggagatctgctcaagagacaggtcaaagatgggggacaacgtctggtgctgtataacagcacaggcct

SEQ ID NO: 386733 - DNA, 75 bp, synthetic construct
  source 1..75: mol_type = other DNA
gcggttattgatcatgatcagtacactgacacgcctacccgcacttatcacctgcgcgggctgattgttgacgtt

SEQ ID NO: 386734 - DNA, 75 bp, synthetic construct
  source 1..75: mol_type = other DNA
tcttgcctgcctgaaaatcggtgcggtttccgtgccgctgttgccttcctggcgggaagcagaactggtgtcggt

SEQ ID NO: 386735 - DNA, 75 bp, synthetic construct
  source 1..75: mol_type = other DNA
agcaggttcgccgcctggaggaacaaaatacgatattaaaaaaggctaccgcgctcttgatgtccgactcgctga

SEQ ID NO: 386736 - DNA, 75 bp, synthetic construct
  source 1..75: mol_type = other DNA
cgagagcgtcaggggattgcgccctctgccacacctattactccagaccagcaacgtatccgcgaactggaaaat

SEQ ID NO: 386737 - DNA, 75 bp, synthetic construct
  source 1..75: mol_type = other DNA
gcttcaggaggctgttggcttaccgaatctggcaccgcgctatgccattgatgctcctgctgacgcgcctgatgg

SEQ ID NO: 386738 - DNA, 75 bp, synthetic construct
  source 1..75: mol_type = other DNA
ctcaagtcgtcctacgctgtcgctgagtgcactgctgaaacagtatggtatccgccttacggctaatcaggcata

SEQ ID NO: 386739 - DNA, 75 bp, synthetic construct
  source 1..75: mol_type = other DNA
cgttatctataacggcggcatttataagaacgcctggtgggtaggcgcggcaaattgcccaggcgatgcgaaaga

SEQ ID NO: 386740 - DNA, 75 bp, synthetic construct
  source 1..75: mol_type = other DNA
cacaaggagcaggacagtgctgaacgaaactcccgcactggcacccgatggtcagccgtaccgactgttaacttt

SEQ ID NO: 386741 - DNA, 75 bp, synthetic construct
  source 1..75: mol_type = other DNA
aaacatctgcaactgcgtaacaacagcttcggcggcgtggacatggtgatcagcggcaatgtgccgcagggtgcc

SEQ ID NO: 386742 - DNA, 75 bp, synthetic construct
  source 1..75: mol_type = other DNA
ctgcaacacccattacccctgaacagcaacgtattcgcgagctggaaaagcaggttcgccgactggaggaacaaa

SEQ ID NO: 386743 - DNA, 75 bp, synthetic construct
  source 1..75: mol_type = other DNA
tgcacagctaattgttgataagggctactcatatcgacaagccagtgaagcgatgaatgtcggttctaccacgct

SEQ ID NO: 386744 - DNA, 75 bp, synthetic construct
  source 1..75: mol_type = other DNA
aaaaccagtttgttggctgtaactgcgggatcatggatcagctaatttccgcactcggcaagaaagatcatgcct

SEQ ID NO: 386745 - DNA, 75 bp, synthetic construct
  source 1..75: mol_type = other DNA
gtgatgatcgcaaagtacgcgttatggctgccgattatgaaaatcagattgacgagttttcccttgatgcgccca

SEQ ID NO: 386746 - DNA, 75 bp, synthetic construct
  source 1..75: mol_type = other DNA
ccgcgcgagacgcagccgcatttcttcgaatcccggttccctgagctgttaaagctgctcgataccgttcattga

SEQ ID NO: 386747 - DNA, 75 bp, synthetic construct
  source 1..75: mol_type = other DNA
cgtgatggttacaacgaaaccacgttagaggcgttcgggtgcacatcacgcgggcaagcataccgcgcgggcaag

SEQ ID NO: 386748 - DNA, 75 bp, synthetic construct
  source 1..75: mol_type = other DNA
acggtactgtttacgcgactgacggtaaattcagaggcactgtagaagctacatcctttgttggtgacgttgcga

SEQ ID NO: 386749 - DNA, 75 bp, synthetic construct
  source 1..75: mol_type = other DNA
gcgcgtttactcgttcaagtatcgcacgcgcagaatgctacaacgccgtgatcgtatcctggactgaccctgaaa

SEQ ID NO: 386750 - DNA, 75 bp, synthetic construct
  source 1..75: mol_type = other DNA
aggacagagactaaagcggaaatcgaccgcattgacaacgttatcgctgaagagaaaaaagcgacagcggaatca

SEQ ID NO: 386751 - DNA, 75 bp, synthetic construct
  source 1..75: mol_type = other DNA
gccagcgtttcacgtctcgataaggccattgcagacgaaaccaacgcacgcagcgagtcaatcagcggtgttaac

SEQ ID NO: 386752 - DNA, 75 bp, synthetic construct
  source 1..75: mol_type = other DNA
aggacagaaacgaaggccgaaattgaccgcattgacaacgttattgctgaagagaaaaaggcaacggctgaatca

SEQ ID NO: 386753 - DNA, 75 bp, synthetic construct
  source 1..75: mol_type = other DNA
tggtcagttatatcgacaaagccctggtcaccgatcgcaccagtgctccgaaaatcacggtattagttgggcacg

SEQ ID NO: 386754 - DNA, 75 bp, synthetic construct
  source 1..75: mol_type = other DNA
ttgcatcgcgttccttctgcggtcagctataccgtgcgtcagctggaagagtggctgggggggggggggggtggg

SEQ ID NO: 386755 - DNA, 75 bp, synthetic construct
  source 1..75: mol_type = other DNA
tgcaatcttgaagggtgagataaaaaatgggaatgatgtggctgataaagttgggaaagaatggggggagaaatt

SEQ ID NO: 386756 - DNA, 75 bp, synthetic construct
  source 1..75: mol_type = other DNA
aatgatacgcctgttacagacgcgaacggcaatacaagtgtccctggtgttagcgtggcgtggcgtaacggcacg

SEQ ID NO: 386757 - DNA, 75 bp, synthetic construct
  source 1..75: mol_type = other DNA
catgagtcaagaatagactcccttgaagtatccagcgaaaaagttggcagcgaactggcgcaagcaaaagcaagc

SEQ ID NO: 386758 - DNA, 75 bp, synthetic construct
  source 1..75: mol_type = other DNA
aatgacactcctgttactgacgcaaacgggaatacatcaattccggggattagtatagcctggcgcaacggcacg

SEQ ID NO: 386759 - DNA, 75 bp, synthetic construct
  source 1..75: mol_type = other DNA
ttgtcccttccctgccatatctgctggatggactggtgatcaccctgaaaatcaccgtcacggcagtcgtgattg

SEQ ID NO: 386760 - DNA, 75 bp, synthetic construct
  source 1..75: mol_type = other DNA
ggatgggctggtgatcaccctgaaaatcaccgtcacggcagtcgtgattggtattttgtggggcaccatgctggc

SEQ ID NO: 386761 - DNA, 75 bp, synthetic construct
  source 1..75: mol_type = other DNA
ggatgaagccgccattcgcgcccgtgccgatcgcctggccgatctcgcggttcaggtctggcaagcgcctgctct

SEQ ID NO: 386762 - DNA, 75 bp, synthetic construct
  source 1..75: mol_type = other DNA
ggtcaagagcttattatttattttgtggaaaactcaaagaaaataaaaaataccatacatgataaaaaacaaaag

SEQ ID NO: 386763 - DNA, 75 bp, synthetic construct
  source 1..75: mol_type = other DNA
atcaccatcacggcggtggtcattgggattttgtggggcacgatgttggcggtaatgcgtttatccagctttgcg

SEQ ID NO: 386764 - DNA, 75 bp, synthetic construct
  source 1..75: mol_type = other DNA
tgccgggttttctgcaaaacgtgctgggattatcgccaaaaaatgatatccgtttaatttcggcgatggtggcgt

SEQ ID NO: 386765 - DNA, 75 bp, synthetic construct
  source 1..75: mol_type = other DNA
atgcttgatgaaaaaagttcgaatgccgcatctgtcgtggtgctgtgtaccgcgcctgatgaagcgacggcccag

SEQ ID NO: 386766 - DNA, 75 bp, synthetic construct
  source 1..75: mol_type = other DNA
ccgactgggacgaagctcaaacgctggtgatcgaacctttggtacaagggggcgtaaatgagtcggcgagcatgg

SEQ ID NO: 386767 - DNA, 75 bp, synthetic construct
  source 1..75: mol_type = other DNA
tggatttgttcgaaaccaaaatcgagcagttggcggatgaaattgaaaatatctacagcgatctggaacagctta

SEQ ID NO: 386768 - DNA, 75 bp, synthetic construct
  source 1..75: mol_type = other DNA
atgtcacctcgtcagataagggaaatcatcgcttcacggaaagacgtcagaatgaaagctacagaagcccgccta

SEQ ID NO: 386769 - DNA, 75 bp, synthetic construct
  source 1..75: mol_type = other DNA
atgaaagctacagaagcccgcctactcgattttttaaaacgttcgcagcagtttgttattcccatttatcaacgg

SEQ ID NO: 386770 - DNA, 75 bp, synthetic construct
  source 1..75: mol_type = other DNA
atgcttgatgaaaaaagttcgaatgccgcgtctgtcgtggtgctgtgtaccgcgcctgatgaagcgacggcccaa

SEQ ID NO: 386771 - DNA, 75 bp, synthetic construct
  source 1..75: mol_type = other DNA
ccgggcttgttgctgaaagtgaatgaagcaataactgatttgcaaacattggcagcttcatacaatgcatcggca

SEQ ID NO: 386772 - DNA, 75 bp, synthetic construct
  source 1..75: mol_type = other DNA
tattatcttgcctctcttgtcgcctttgctttatggaaagaagcgcctgataccattgaactgttcagaacacga

SEQ ID NO: 386773 - DNA, 75 bp, synthetic construct
  source 1..75: mol_type = other DNA
gttcataccgtcctcaacgaaagaatattatcttgcctctctcgtcgcctttgctttatggaaagaggcacctga

SEQ ID NO: 386774 - DNA, 75 bp, synthetic construct
  source 1..75: mol_type = other DNA
ttgcgcctgataacccacaaaactgcatcaggaatgttaatttatttttaaaggaaaagtattgtaatgtttcaa

SEQ ID NO: 386775 - DNA, 75 bp, synthetic construct
  source 1..75: mol_type = other DNA
ccgtcaccaactttgcgctggatatgctgcgcattggctttaacggtaaaacagccgcagaaaactccgatcctg

SEQ ID NO: 386776 - DNA, 75 bp, synthetic construct
  source 1..75: mol_type = other DNA
gcgtaatcagtttgccgctggcttgaacatgggaattgccgggatcccgtggtggacaaccgatattggtggttt

SEQ ID NO: 386777 - DNA, 75 bp, synthetic construct
  source 1..75: mol_type = other DNA
cgaaatttacgcggcctacgacaagctgaccatcaagggcgcagaagcggcagaagagcccgcacctggcggcgc

SEQ ID NO: 386778 - DNA, 75 bp, synthetic construct
  source 1..75: mol_type = other DNA
ttctcgctatgttcctgaaacaaaggggatcccgctaacacaaattgagcagcttgccggaaataaactgcgtga

SEQ ID NO: 386779 - DNA, 75 bp, synthetic construct
  source 1..75: mol_type = other DNA
ctgaaaagataaaaggttttgggatggggctggcggtgagtctgatgtggatagccaacttcctcatctcactgt

SEQ ID NO: 386780 - DNA, 75 bp, synthetic construct
  source 1..75: mol_type = other DNA
tatttcaaacaataattaataaatcgccttttgtgaatcattgggaacgggttatgtgtttggctcttatgtcag

SEQ ID NO: 386781 - DNA, 75 bp, synthetic construct
  source 1..75: mol_type = other DNA
ataagaagcaatgcgaaagaaatgcttgatgaactcagaactgtttacggtctgagaacaggagagttttttgaa

SEQ ID NO: 386782 - DNA, 75 bp, synthetic construct
  source 1..75: mol_type = other DNA
aggccaaaggcggtaaggcacgcgcggcaaaaatgacagcagagcaaagaaaagaatcctcaagaaaggctgttg

SEQ ID NO: 386783 - DNA, 75 bp, synthetic construct
  source 1..75: mol_type = other DNA
gttcagcctaaggtttttgttcgcattttcgatggtaatagagttattttagttaaatcagattctggaatataa

SEQ ID NO: 386784 - DNA, 75 bp, synthetic construct
  source 1..75: mol_type = other DNA
tgcctgcattccgtctgtatcgtatgcgcgcccgtagccagtcaatggttgacggtaacgcctacgagctgctgc

SEQ ID NO: 386785 - DNA, 75 bp, synthetic construct
  source 1..75: mol_type = other DNA
cgaactgcgatcgcgaaagctttcgccgcatcgcccataacatgcctgaagccccggcagaacgcccgcaggttg

SEQ ID NO: 386786 - DNA, 75 bp, synthetic construct
  source 1..75: mol_type = other DNA
agaagcgcgtcagtgagggcaaaccaatccctccggtcagaaaacaaatctcggctccgcgccacgtgcccgggc

SEQ ID NO: 386787 - DNA, 75 bp, synthetic construct
  source 1..75: mol_type = other DNA
ttggtgtcaaagttcagccttctggcagcaagattttctatttccgctattacgtggaaaaagggaaaaaagaaa

SEQ ID NO: 386788 - DNA, 75 bp, synthetic construct
  source 1..75: mol_type = other DNA
agcagtttgatgaaatcaatatcgttcgtggtcagccagtatctggtggacgtctgggggtgaagatttacccca

SEQ ID NO: 386789 - DNA, 75 bp, synthetic construct
  source 1..75: mol_type = other DNA
cgaactgtgaccgcgagagtttccgccgcatcgcccatggcatgcctgaggctccggcagagtgcccgggtgtcg

SEQ ID NO: 386790 - DNA, 75 bp, synthetic construct
  source 1..75: mol_type = other DNA
aatatgagcattacatcagcgactgacagggctgccgcttcgctttccgatggtggtagtgttggtgctatgaaa

SEQ ID NO: 386791 - DNA, 75 bp, synthetic construct
  source 1..75: mol_type = other DNA
aactgcaataccagatgagccttagtgcgttgagcgggcaaatcaaaggcatgatgaacgttttacagagcggaa

SEQ ID NO: 386792 - DNA, 75 bp, synthetic construct
  source 1..75: mol_type = other DNA
cctccggcggtatggtggggctgggtgcactgctcggtaccggcacacagtctcgctatgccagccgtggcttta

SEQ ID NO: 386793 - DNA, 75 bp, synthetic construct
  source 1..75: mol_type = other DNA
ctggggggaataacgatagccagctatcttctgccgccaacggtgtttaattatatcgaatgtgattacaatcgg

SEQ ID NO: 386794 - DNA, 75 bp, synthetic construct
  source 1..75: mol_type = other DNA
tgactggtcaccagagaagctggtgcttgagggtatagatagatccggtattcttgggccattgatggaatataa

SEQ ID NO: 386795 - DNA, 75 bp, synthetic construct
  source 1..75: mol_type = other DNA
catttgataccgttgactgaatcagcattacaggaattatcctgtgtgcaggagttaacaaaagaaaaatccagc

SEQ ID NO: 386796 - DNA, 75 bp, synthetic construct
  source 1..75: mol_type = other DNA
cacttaataagatgatttttgaaattcgtggttatgaatcattttccgaaatggaaacagcattactagattttt

SEQ ID NO: 386797 - DNA, 75 bp, synthetic construct
  source 1..75: mol_type = other DNA
ggaaaaactgaataacgcgctggcagcaattaaagctgacggcacgtatcagaaaatcaatgaccagtggttccc

SEQ ID NO: 386798 - DNA, 75 bp, synthetic construct
  source 1..75: mol_type = other DNA
ttcactctaaccggatccgttcttacctgatggctgcatttaactatggactgaaagcagataacgatccgatga

SEQ ID NO: 386799 - DNA, 75 bp, synthetic construct
  source 1..75: mol_type = other DNA
cggatgacgacgagcgactgcgcgtacaatctgaacttggtcagagcctggcaactcgcccggaactggaagaca

SEQ ID NO: 386800 - DNA, 75 bp, synthetic construct
  source 1..75: mol_type = other DNA
tccttcttcttctttgaagatgcggaagatcacgccggtaactccactgtggcatttaccatccgtgatggtcgc

SEQ ID NO: 386801 - DNA, 75 bp, synthetic construct
  source 1..75: mol_type = other DNA
ggcgcatgaatgctagatttcttatgatggatggtgtgagaagattaatgattatagctaatgatttaacaatga

SEQ ID NO: 386802 - DNA, 75 bp, synthetic construct
  source 1..75: mol_type = other DNA
tggcctttttgcttgccgcgccgccttttaactacagcgatggaacgattggtctgtttggccttgcaggagccg

SEQ ID NO: 386803 - DNA, 75 bp, synthetic construct
  source 1..75: mol_type = other DNA
atgccgccggtctgctatttctagttccactgggtgatatgtttgaacgccgcaggctgatcgtctcaatgacct

SEQ ID NO: 386804 - DNA, 75 bp, synthetic construct
  source 1..75: mol_type = other DNA
tagtctggcgcgttccatcatgtatttccgggcttttaatcctgagtttaaagttttcacggcgcgagatttacg

SEQ ID NO: 386805 - DNA, 75 bp, synthetic construct
  source 1..75: mol_type = other DNA
tggcaaaaaagtatggtgcctggctcattgaaggaaaggatccccaggcagaactggaacgacaacagtttgcag

SEQ ID NO: 386806 - DNA, 75 bp, synthetic construct
  source 1..75: mol_type = other DNA
ggcaatctggtttggtcaaacttccgtactggcgctgattatcggcatcctggtgctggatctcaccgtccaggg

SEQ ID NO: 386807 - DNA, 75 bp, synthetic construct
  source 1..75: mol_type = other DNA
gtctgccacaaatgaaatcagaaacccacctcaactacccacagttgttgggttccgttttcagcatgtttatca

SEQ ID NO: 386808 - DNA, 75 bp, synthetic construct
  source 1..75: mol_type = other DNA
tggtggcgatgttcagcctcgactggcgaatggcgctggtggcgataatgattttcccggtggtgctggtggtaa

SEQ ID NO: 386809 - DNA, 75 bp, synthetic construct
  source 1..75: mol_type = other DNA
ttactggcagatgtaccaactgcaacttgcaggagaagaactggctgccagcgtacgtgaagaggaatcgttgag

SEQ ID NO: 386810 - DNA, 75 bp, synthetic construct
  source 1..75: mol_type = other DNA
agaaacaccgcaaatcctgatccttgatgaagcaaccgccagtattgattccggtactgaacaggcgattcagca

SEQ ID NO: 386811 - DNA, 75 bp, synthetic construct
  source 1..75: mol_type = other DNA
cgccagcaatacggcaatgatgatcgcccgttacagagcggcaccatcgaagtcgataacgtgtcatttgcttat

SEQ ID NO: 386812 - DNA, 75 bp, synthetic construct
  source 1..75: mol_type = other DNA
gaaaccgtgcaactggcggagctggcgcgcagcatgagcgacggtatttatacgccgctgggcgagcaggggaat

SEQ ID NO: 386813 - DNA, 75 bp, synthetic construct
  source 1..75: mol_type = other DNA
gcggcccagggacgctactggcagatgtatcaactgcaacttgcgggcgaagagctggcagccagcgtgcgtgaa

SEQ ID NO: 386814 - DNA, 75 bp, synthetic construct
  source 1..75: mol_type = other DNA
ttgcgctgctgcaggaaaaaggcgcgctgctgcacgttgagaaaatgcagcacagctatccgtgctgctggcgtc

SEQ ID NO: 386815 - DNA, 75 bp, synthetic construct
  source 1..75: mol_type = other DNA
tgtgagccttttggcccggaacagcgtaaggggctgtggctttaccatgttctggagccggaaacctgggccagg

SEQ ID NO: 386816 - DNA, 75 bp, synthetic construct
  source 1..75: mol_type = other DNA
ccatgacgtttgaagaatttgttccggcattttcttcctggtttgccggtaaccggtgtggagtggcagtgctga

SEQ ID NO: 386817 - DNA, 75 bp, synthetic construct
  source 1..75: mol_type = other DNA
gaaacggtgcaactggcagagctggcgcgcagcatgagcgacggcatttatacgccgttgggcgagcaggggaat

SEQ ID NO: 386818 - DNA, 75 bp, synthetic construct
  source 1..75: mol_type = other DNA
gtgaaaccggaagagatggtggtactggatcgctgggccgtaggttgtgcgaaagcggcacaggaagacatcctc

SEQ ID NO: 386819 - DNA, 75 bp, synthetic construct
  source 1..75: mol_type = other DNA
gtatcggcgtgaccgattacaccattctcggcacggtaaaaggtgcggagctggagctgctgcgctttacccatc

SEQ ID NO: 386820 - DNA, 75 bp, synthetic construct
  source 1..75: mol_type = other DNA
gtgctggcggatactttcctcgctaacgtaacgctggggcgcgacatttccgaagagcgtgtctggcaggcactg

SEQ ID NO: 386821 - DNA, 75 bp, synthetic construct
  source 1..75: mol_type = other DNA
gcctgaagtgcaggaaagtaaaaaagcagagagtcccggcattattgataaagaattcttcaagaaaatcggtga

SEQ ID NO: 386822 - DNA, 75 bp, synthetic construct
  source 1..75: mol_type = other DNA
cgaaggcctgtttggtctggcagacagtgaagcgatgaacgatgcgttctgggacgagctgttgaaagtgcgtgg

SEQ ID NO: 386823 - DNA, 75 bp, synthetic construct
  source 1..75: mol_type = other DNA
gacgccgcagtggttcgtcagcatggatcagaaaggtctgcgtgcgcagtcactgaaagagatcaaaggcgtgca

SEQ ID NO: 386824 - DNA, 75 bp, synthetic construct
  source 1..75: mol_type = other DNA
gaaaacaccgaatggcatcgcgtggtgctgtttggcaagctcgcggaagtggccagcgagtatctgcgcaagggc

SEQ ID NO: 386825 - DNA, 75 bp, synthetic construct
  source 1..75: mol_type = other DNA
gcagaacgctcaggcgcaaccgaagcctcagcagaatgggcagtcacagagtgctgacgcgacgaaaaaaggtgg

SEQ ID NO: 386826 - DNA, 75 bp, synthetic construct
  source 1..75: mol_type = other DNA
agataatcccggtattattgataaagagttcttcaataaaatcggtgaggatttcgaccctaagaagttcaacaa

SEQ ID NO: 386827 - DNA, 75 bp, synthetic construct
  source 1..75: mol_type = other DNA
tgatccgcgatctctacgttaccgtggtcgcaaccgttttgcgtagcgccgcacttgtgggtgcgatgctggtgg

SEQ ID NO: 386828 - DNA, 75 bp, synthetic construct
  source 1..75: mol_type = other DNA
gacaatatggtggcgaaaaataatctgccgttgaagatggttgttggtctggcggtggcgtatgttgggctgcaa

SEQ ID NO: 386829 - DNA, 75 bp, synthetic construct
  source 1..75: mol_type = other DNA
cgtttttgagctgatggacggaccgcgccagcaatatggcaatgatgatcgcccgttgcagagcggcaccatcga

SEQ ID NO: 386830 - DNA, 75 bp, synthetic construct
  source 1..75: mol_type = other DNA
gaacaaactgggcgcggatattctgcgtctgtgggtggcatcaaccgactacaccggtgaaatggccgtttctga

SEQ ID NO: 386831 - DNA, 75 bp, synthetic construct
  source 1..75: mol_type = other DNA
agcggggagaaaataccgttactcagtacagcgaatacctggaccaatcgacaaacattcagcggtggcctttct

SEQ ID NO: 386832 - DNA, 75 bp, synthetic construct
  source 1..75: mol_type = other DNA
gatgccaccctgacggcgctggccgggcttgctactgcggcagacaggtttccgtattttacggggaatgatgtt

SEQ ID NO: 386833 - DNA, 75 bp, synthetic construct
  source 1..75: mol_type = other DNA
tcctggatggccagaagtaaacgtgggctggcagtgctgaccggagttcgtgcagatgagtccctgaacaggttt

SEQ ID NO: 386834 - DNA, 75 bp, synthetic construct
  source 1..75: mol_type = other DNA
gcccagtaccagtgcaccattgaacatattcagaagatgcgggaaatgtaccatgatgtgacggaaaccttttac

SEQ ID NO: 386835 - DNA, 75 bp, synthetic construct
  source 1..75: mol_type = other DNA
cgcaacaagatagctgtctatctgcgctggtatcagacgcggggcttcccggatgacattcccgatgaacaggag

SEQ ID NO: 386836 - DNA, 75 bp, synthetic construct
  source 1..75: mol_type = other DNA
gttattggaactgtctctggggggactatgactataggtacagctatcgacttcggcattgaagaatctcagaag

SEQ ID NO: 386837 - DNA, 75 bp, synthetic construct
  source 1..75: mol_type = other DNA
atgaatgataatttttttacggagaaagtccttactggagagaatgttctgcgtgcagcaattgctcgtattgag

SEQ ID NO: 386838 - DNA, 75 bp, synthetic construct
  source 1..75: mol_type = other DNA
cagctatgcgatgttcctgctggatgtgatgccggaaagaacagcagaacattaccgtaataaaattgctgtcta

SEQ ID NO: 386839 - DNA, 75 bp, synthetic construct
  source 1..75: mol_type = other DNA
cgcaacatgcgtgtctgtgaaccttttggtcctgaacaacgtaagggactgtggctttaccatgttctggagccg

SEQ ID NO: 386840 - DNA, 75 bp, synthetic construct
  source 1..75: mol_type = other DNA
atacttaaacacgctaagcaagatgaacggattatatatattcaccagccaaatcgagggttgattgaaacatta

SEQ ID NO: 386841 - DNA, 75 bp, synthetic construct
  source 1..75: mol_type = other DNA
gcaaaaaatattttttgattcaatgaggtttacgactgaatattatattaagcaccatgagtatttgctgggttt

SEQ ID NO: 386842 - DNA, 75 bp, synthetic construct
  source 1..75: mol_type = other DNA
ttatcactggtgtgaccgtctacatcataggtcaaataataaccaaatgcgcattggaaacgtacatctcgttca

SEQ ID NO: 386843 - DNA, 75 bp, synthetic construct
  source 1..75: mol_type = other DNA
tgtcccagcgcaaactgagatatgccgatgataagccctggaccacggcatcgcctgaagggttttactacacca

SEQ ID NO: 386844 - DNA, 75 bp, synthetic construct
  source 1..75: mol_type = other DNA
aaatccttatcggagaaaatgttttgcgtgccgcaatcgcccgcattgagtggatttttgaaacatttccgtcgg

SEQ ID NO: 386845 - DNA, 75 bp, synthetic construct
  source 1..75: mol_type = other DNA
cgatatatggatatataacgccagaacacatgccatttataatccattgtatgacctgatgttcagagcgggggt

SEQ ID NO: 386846 - DNA, 75 bp, synthetic construct
  source 1..75: mol_type = other DNA
caaggcaatgggcgttgacgttaaccgtgtgtactcgctcgatgaactggtgagggggaacgatatcctctttag

SEQ ID NO: 386847 - DNA, 75 bp, synthetic construct
  source 1..75: mol_type = other DNA
cggatgacatcccggatgaacaggagaatgacctggggagccgggatatcccgtcctggcgacgtatctgtaaga

SEQ ID NO: 386848 - DNA, 75 bp, synthetic construct
  source 1..75: mol_type = other DNA
ggtgaatggctggcgaagtttgatatcaaagtcacctatacctggctggggatcgcggtggcgatggcctttacc

SEQ ID NO: 386849 - DNA, 75 bp, synthetic construct
  source 1..75: mol_type = other DNA
gctcttttccgtgaacggtttttacggcgagtggctggcgaaatttgatatcaaagtcacctacacctggcttgg

SEQ ID NO: 386850 - DNA, 75 bp, synthetic construct
  source 1..75: mol_type = other DNA
tctggctttatcacattcttgagcctgacacctgggccagaatgtgtgcacgggtttccggtgctgccagtgggg

SEQ ID NO: 386851 - DNA, 75 bp, synthetic construct
  source 1..75: mol_type = other DNA
ctcatggatggccggatggcatccctgatgagcaggataatgaccagggatgtaaagatattccctcctggcgtc

SEQ ID NO: 386852 - DNA, 75 bp, synthetic construct
  source 1..75: mol_type = other DNA
atatgacatattttccctttttccggtatgccatgacgtttgaagaatttgttccggcattttcttcctggtttg

SEQ ID NO: 386853 - DNA, 75 bp, synthetic construct
  source 1..75: mol_type = other DNA
ttggtcctgaacaacgtaagggactgtggctttaccatgttctggagccggatacctgggccaggatgtgtgagc

SEQ ID NO: 386854 - DNA, 75 bp, synthetic construct
  source 1..75: mol_type = other DNA
gatatgcaggccgagttgattgacttttgccaggccaaaggggattacaccgaaaatcggcagattgcagaacag

SEQ ID NO: 386855 - DNA, 75 bp, synthetic construct
  source 1..75: mol_type = other DNA
gcgcaacgtggcgaaagcgttaggaaaaccgctggaccggctacgcatggttacgctggataaaccccgtcttcg

SEQ ID NO: 386856 - DNA, 75 bp, synthetic construct
  source 1..75: mol_type = other DNA
gtttctgcaaagtggtgctgccggaactttctccggcgctggtggcgggcgtggcgctgtcgtttacccgtagtc

SEQ ID NO: 386857 - DNA, 75 bp, synthetic construct
  source 1..75: mol_type = other DNA
cccggaatatgaagaagcggcggaaacgcttggtgcaacgcgctggcagagtttctgcaaagtggtgctgccgga

SEQ ID NO: 386858 - DNA, 75 bp, synthetic construct
  source 1..75: mol_type = other DNA
tgggtggcacttcccctgaccacggtaaacggcgtctcgcagtttcagccggagtggatatgctgggagccagga

SEQ ID NO: 386859 - DNA, 75 bp, synthetic construct
  source 1..75: mol_type = other DNA
actcactctccggtagttgacagcatttctgtcaaacgtcgtggtgctgttcgtaaagctaaactgtactacctg

SEQ ID NO: 386860 - DNA, 75 bp, synthetic construct
  source 1..75: mol_type = other DNA
aaggttccaaaaaacgtctgcaggcattcgagggcgtggttatcgctattcgtaaccgcggtctgcactctgcat

SEQ ID NO: 386861 - DNA, 75 bp, synthetic construct
  source 1..75: mol_type = other DNA
gcgagccgcaggtggagagccgctacctctgtgacccgctgggacggcgaatggcgaaacgggtatggcggcggg

SEQ ID NO: 386862 - DNA, 75 bp, synthetic construct
  source 1..75: mol_type = other DNA
tctataaaaactaatggtgttttaggaatggataatcgtaaatctgcatatgcgggtaggggggggggagttcca

SEQ ID NO: 386863 - DNA, 75 bp, synthetic construct
  source 1..75: mol_type = other DNA
atgagcaacatcactatttatcacaacccggcctgcggcacgtcgcgtaacacgctggagatgatccgcaacagc

SEQ ID NO: 386864 - DNA, 75 bp, synthetic construct
  source 1..75: mol_type = other DNA
gcgaacgctgccagttaatactgacccagcttgttatggcgggtctggcagattatcagttcggttgttacagac

SEQ ID NO: 386865 - DNA, 75 bp, synthetic construct
  source 1..75: mol_type = other DNA
aaaccgccagagtggtgtttaatgaattgagcgtcaccgaaccggcgacagtcggggagattgcgcagaatactt

SEQ ID NO: 386866 - DNA, 75 bp, synthetic construct
  source 1..75: mol_type = other DNA
cgacggtgacagtgatacggcggttaacccgtatcacgcccagtacattctgcgccgccgcgatgattacctgga

SEQ ID NO: 386867 - DNA, 75 bp, synthetic construct
  source 1..75: mol_type = other DNA
atgagcaacattaccatttatcacaacccggcctgcggtacgtcgcgtaatacgctggagatgatccgcaacagc

SEQ ID NO: 386868 - DNA, 75 bp, synthetic construct
  source 1..75: mol_type = other DNA
cgagagcgccaaggtattgcgccttctgcaacacccattacccctgaacagcaacgtattcgcgagctggaaaag

SEQ ID NO: 386869 - DNA, 75 bp, synthetic construct
  source 1..75: mol_type = other DNA
tccggagatgccaccgtccgcggtgatgtctcctggtattgagtatatggaggacggtcttcccgatccggtgaa

SEQ ID NO: 386870 - DNA, 75 bp, synthetic construct
  source 1..75: mol_type = other DNA
agatgcgcaacaacgcgcgttcaccaaggaagatggcgagaaagtggttgatgaagcgggtaaacgcctgaaata

SEQ ID NO: 386871 - DNA, 75 bp, synthetic construct
  source 1..75: mol_type = other DNA
ttctgcaacgtgacgcatatcagaccggtcagggccgttataaagcgacgcttcagcgtggagtaatggcccccc

SEQ ID NO: 386872 - DNA, 75 bp, synthetic construct
  source 1..75: mol_type = other DNA
aaccatacccggctgagtgcgttctggacccgggaggaggctgtgctgacaacgcaaaaacgaaaatttgcgctg

SEQ ID NO: 386873 - DNA, 75 bp, synthetic construct
  source 1..75: mol_type = other DNA
acctttcacgcgaacgttgccagttaatactgactcagcttgttatggcgggtctggcagactatcagttcggtt

SEQ ID NO: 386874 - DNA, 75 bp, synthetic construct
  source 1..75: mol_type = other DNA
tacctcgattaacaacatcaaaaaattctggtcgctgacagcgaaaggctgcatgttcggcaagaacatcaccag

SEQ ID NO: 386875 - DNA, 75 bp, synthetic construct
  source 1..75: mol_type = other DNA
acaccattgaaattatcgagaaatacttctggagcgaagaagagcagatgtgcctggagtcctgggacgaagcct

SEQ ID NO: 386876 - DNA, 75 bp, synthetic construct
  source 1..75: mol_type = other DNA
tacgcgctctacaccgtcaccggcgatcgccagtacgaaacctggtatcagacatggtgggactactgcattaag

SEQ ID NO: 386877 - DNA, 75 bp, synthetic construct
  source 1..75: mol_type = other DNA
atggtagtgtccgctattgccagtacacctcactcgacggaaaatgcgccatgcgccatgcgccatgcgccatgc

SEQ ID NO: 386878 - DNA, 75 bp, synthetic construct
  source 1..75: mol_type = other DNA
cacaacttgttgcgccagaaatggaaaaaatggcggtggcgttattctgaccatcacttctatggcggcagaaaa

SEQ ID NO: 386879 - DNA, 75 bp, synthetic construct
  source 1..75: mol_type = other DNA
tgcaacaaataattatgcatattggtataatatttcatctgaaacatcgcaatatatgcaaagtgtatggtataa

SEQ ID NO: 386880 - DNA, 75 bp, synthetic construct
  source 1..75: mol_type = other DNA
ggatcgttgaacaacgcgaacgatacagccctaccgcgattaacaacatcaaaaaattctggtcgctgaccgcga

SEQ ID NO: 386881 - DNA, 75 bp, synthetic construct
  source 1..75: mol_type = other DNA
gtcagagcgccgcaccgtctcagcaggtgccgcagccgttaccagacgattatccgccgatggatgatgatgccc

SEQ ID NO: 386882 - DNA, 75 bp, synthetic construct
  source 1..75: mol_type = other DNA
agagtcctgccgctccggcacaacctgctggctcccctgaaaaatccccgaaaaaaggcggcagaaaaccccgtc

SEQ ID NO: 386883 - DNA, 75 bp, synthetic construct
  source 1..75: mol_type = other DNA
atgaaatggtttaacaccttaagtcacaaccgttggctggaacaggaaaccgatcgcatctttgattttggtaaa

SEQ ID NO: 386884 - DNA, 75 bp, synthetic construct
  source 1..75: mol_type = other DNA
tgctgcattgtctggtgatcccgcgtatcccgttagcgccaggcctggctccggcggttgcggcgggtctgctgg

SEQ ID NO: 386885 - DNA, 75 bp, synthetic construct
  source 1..75: mol_type = other DNA
caaatagttcataaagcgatggatagtgatgataaattgatagttgtagatgcaacaaataattatgcatattgg

SEQ ID NO: 386886 - DNA, 75 bp, synthetic construct
  source 1..75: mol_type = other DNA
tgcctgacatatattgctaaagataagcgtgatgcgacatttaaacctgattatctggatggtttagtcatgcat

SEQ ID NO: 386887 - DNA, 75 bp, synthetic construct
  source 1..75: mol_type = other DNA
aggatttatctcaaccgccgtccacatagtgaccacatcgacaatacaaaccccgtttcgacggggtttcttatg

SEQ ID NO: 386888 - DNA, 75 bp, synthetic construct
  source 1..75: mol_type = other DNA
atgctgaaacagcaggatatgaccgaaaccgccagagcagtttttaatgaattaagtgccaccgcaccggcgaca

SEQ ID NO: 386889 - DNA, 75 bp, synthetic construct
  source 1..75: mol_type = other DNA
taaacgcgctggtggcggtgaatacctgtctttcagcttgctggctttttcgacaagagttattggtgtgtcacg

SEQ ID NO: 386890 - DNA, 75 bp, synthetic construct
  source 1..75: mol_type = other DNA
aaaccgccagagtggtgtttgatgaattaagcgtcaccgaaccggcgacagtcggggagattgcgcagaatactt

SEQ ID NO: 386891 - DNA, 75 bp, synthetic construct
  source 1..75: mol_type = other DNA
ttaatactgacccagcttgttatggcgggcctggcagattatcagtttggttgttacagacgccttccgcagtga

SEQ ID NO: 386892 - DNA, 75 bp, synthetic construct
  source 1..75: mol_type = other DNA
gagtcatttctgcgctcaccggcgtttactgtgcctgaatccgcccagcgttgggcaaatcagatccgccaggaa

SEQ ID NO: 386893 - DNA, 75 bp, synthetic construct
  source 1..75: mol_type = other DNA
atgctaaaacagcaggatatgaccgaaaccgccagagtggtgtttaatgaattaagcgtcaccgaaccggcgaca

SEQ ID NO: 386894 - DNA, 75 bp, synthetic construct
  source 1..75: mol_type = other DNA
atgctaaaacagctagatatgacagaaacggcgaaagttgtttttaatgaattaagcgtcgaaccggcaacagtc

SEQ ID NO: 386895 - DNA, 75 bp, synthetic construct
  source 1..75: mol_type = other DNA
gtcaaaaaatatttcatcattttactggcgctcgctgcaattgccggactgggtactcatgccgcctggagtagc

SEQ ID NO: 386896 - DNA, 75 bp, synthetic construct
  source 1..75: mol_type = other DNA
taaacgcgctggtggttgcgaatacgggtctttcagcttgctggctttttcgacaagagttattggtgtgtcacg

SEQ ID NO: 386897 - DNA, 75 bp, synthetic construct
  source 1..75: mol_type = other DNA
atgtcagaaaaacggtacagaacattaaacgcgctggtggttgcgaatactggtctttcagcttgctggctgttc

SEQ ID NO: 386898 - DNA, 75 bp, synthetic construct
  source 1..75: mol_type = other DNA
aacagcaggatatgacagaaaccgccagagtggtgtttaatgaattaagcgttaccgacccggcgacagtcgggg

SEQ ID NO: 386899 - DNA, 75 bp, synthetic construct
  source 1..75: mol_type = other DNA
ggcggcgattttatccatacactggtggatggcgaaggggtaagctggattggttatggtgccctgatcaccgcc

SEQ ID NO: 386900 - DNA, 75 bp, synthetic construct
  source 1..75: mol_type = other DNA
tggatgttgcgggttattttccgcgtcaatgtcgagacagaagcccagcagcacgagtcttcacgcaccaatggc

SEQ ID NO: 386901 - DNA, 75 bp, synthetic construct
  source 1..75: mol_type = other DNA
tcagtatcctggctttagtggctgtcgttgggttatttatcggcaatattaaattccgtggcgttgggttgggta

SEQ ID NO: 386902 - DNA, 75 bp, synthetic construct
  source 1..75: mol_type = other DNA
tttgtcatttatcaccaagtgaacaagaaagcatgtataatcaaattgcgattaagatctccaataaggaataca

SEQ ID NO: 386903 - DNA, 75 bp, synthetic construct
  source 1..75: mol_type = other DNA
atgagtatatttatttcatggcttgctctgattatttcagtggcctgcgccattgggattatgcgaattattcat

SEQ ID NO: 386904 - DNA, 75 bp, synthetic construct
  source 1..75: mol_type = other DNA
ttctgattatttcggtggcctgcgccattggaattatgcgaattattcattcagtaaaaaagattgaacgttttt

SEQ ID NO: 386905 - DNA, 75 bp, synthetic construct
  source 1..75: mol_type = other DNA
gagtacgccattcataaagagaaagagtttacctttaacaaaattcgccaaccaaaccgtaaccgtctgctgtgg

SEQ ID NO: 386906 - DNA, 75 bp, synthetic construct
  source 1..75: mol_type = other DNA
ccgggcgatcaggtttcggtggcagacttgaacaaaggtgtgattatccagtccggtaatgacgcctgtattgcg

SEQ ID NO: 386907 - DNA, 75 bp, synthetic construct
  source 1..75: mol_type = other DNA
cagctgaaaaacctgaaagcgagttatacgttaacggaaccgcagcttaccgcaccgctgaaaaaaggtcaggtt

SEQ ID NO: 386908 - DNA, 75 bp, synthetic construct
  source 1..75: mol_type = other DNA
taatttagccattaaagatgtgccaattcttaatggcgataaagttatctgctcacgattgaaacgagaagaaac

SEQ ID NO: 386909 - DNA, 75 bp, synthetic construct
  source 1..75: mol_type = other DNA
cgaaaggcaccgatttgcgtgtcgaacgcgtggtggtcaccaatgaaaatgtgctcggcaagcgtattcgcgacc

SEQ ID NO: 386910 - DNA, 75 bp, synthetic construct
  source 1..75: mol_type = other DNA
tggggaatgcgcagcaaaactgcaacaggttcagatgctgccagtgtttattggcatcgggcttggcgtattgtt

SEQ ID NO: 386911 - DNA, 75 bp, synthetic construct
  source 1..75: mol_type = other DNA
aaggagttcggtaataccggcgctgagatcgcacagtttattgccgatttttcttcgagtatggtttttacaaaa

SEQ ID NO: 386912 - DNA, 75 bp, synthetic construct
  source 1..75: mol_type = other DNA
aaattcaaaatacgcgtagaagtatcaggtgaaggtgagggatacgctttggttcgtctcaaggcagacctttcc

SEQ ID NO: 386913 - DNA, 75 bp, synthetic construct
  source 1..75: mol_type = other DNA
ttgaagaactgcttgcccagcaaaaagcgtgcgacgctgcgccgaccctgcgttgtcgcagtgaagtcgggcaga

SEQ ID NO: 386914 - DNA, 75 bp, synthetic construct
  source 1..75: mol_type = other DNA
tatcaacaccgtcattctcactttataaaacgctcaccacgcaaagtaaccgcatctccagtcgccagtgccgat

SEQ ID NO: 386915 - DNA, 75 bp, synthetic construct
  source 1..75: mol_type = other DNA
ggtcatcaacgccctgatgcgcgacatctacccgaaagaagagttctcccggatgatgtcgtttgtcatgctggt

SEQ ID NO: 386916 - DNA, 75 bp, synthetic construct
  source 1..75: mol_type = other DNA
tatggttgagctggcattacattttctggattctggccgtggctgcgattctggcttcggcaatgatcttctttc

SEQ ID NO: 386917 - DNA, 75 bp, synthetic construct
  source 1..75: mol_type = other DNA
ttactggggctaggattctggtcgctggtagtgggtgtggcggcgtttgttggctgcgtatcgatggtgtcttct

SEQ ID NO: 386918 - DNA, 75 bp, synthetic construct
  source 1..75: mol_type = other DNA
ctgagcctgcaatgtacggcatcaacctgaaatatcgcttcccgatgctgtgcgcgatgattggttctggtctgg

SEQ ID NO: 386919 - DNA, 75 bp, synthetic construct
  source 1..75: mol_type = other DNA
cagcgacggtggctgcaccacgccgggcgatgtcgcgaaagcctttggcggcggtgccgatttcgtcatgcttgg

SEQ ID NO: 386920 - DNA, 75 bp, synthetic construct
  source 1..75: mol_type = other DNA
gttgaaaataccgcgcgtgatattttgggcggcctgcgttcagcttgtacatacgttggggcttcacgcctgaaa

SEQ ID NO: 386921 - DNA, 75 bp, synthetic construct
  source 1..75: mol_type = other DNA
atggtgattatttttctttttatctattctaaaattacaccgcacaacgaatggcagttaatcaaaaacaataat

SEQ ID NO: 386922 - DNA, 75 bp, synthetic construct
  source 1..75: mol_type = other DNA
ttcagcggcacgttgttgggttacgttattccattatccagtgcggcaatcaatgcggtgagtattccagattat

SEQ ID NO: 386923 - DNA, 75 bp, synthetic construct
  source 1..75: mol_type = other DNA
atgcatatactggattcacttcttgcctttagcgcctatttttttattggcgtggctatggtgattatttttctg

SEQ ID NO: 386924 - DNA, 75 bp, synthetic construct
  source 1..75: mol_type = other DNA
tctttgaaaccgtgacgccaattaaacctgatgccacctttgtgactcagcgcgtctggtttggtgataagagcg

SEQ ID NO: 386925 - DNA, 75 bp, synthetic construct
  source 1..75: mol_type = other DNA
agtggatggcaaaacaggtttatctcaacgtcggtaacttcctgctcggcgtggcggcgctgggtctggacgcgg

SEQ ID NO: 386926 - DNA, 75 bp, synthetic construct
  source 1..75: mol_type = other DNA
aagtgaactgccaatgatgaccgcccgtcgtctcagttcaggcagcaaactggctgttgaatgcggtctgacaat

SEQ ID NO: 386927 - DNA, 75 bp, synthetic construct
  source 1..75: mol_type = other DNA
acgcgaaccacattattgtaggcaacgataataacttcccgttttcctccagccgctggcctaatatggcggatg

SEQ ID NO: 386928 - DNA, 75 bp, synthetic construct
  source 1..75: mol_type = other DNA
ctgttggcgaaaaaaaaagcggcgatgcgatctgcatcagatggggaaacctacatggttcaagagatgaacaaa

SEQ ID NO: 386929 - DNA, 75 bp, synthetic construct
  source 1..75: mol_type = other DNA
ccgtacacaactcttccgtgggtaacctgaccattgcggccaaacagccgatcgtttcgtcatcgctttcggctg

SEQ ID NO: 386930 - DNA, 75 bp, synthetic construct
  source 1..75: mol_type = other DNA
tggctgttgaatgcggtctggcaatgctacgccgccatcagccagacgccgttttgtataccagtcgtcatggcg

SEQ ID NO: 386931 - DNA, 75 bp, synthetic construct
  source 1..75: mol_type = other DNA
gggttatcactgctcttattgccatcttattcttaaaatcagcaataacctacaaaataaaaaagcgaaataaaa

SEQ ID NO: 386932 - DNA, 75 bp, synthetic construct
  source 1..75: mol_type = other DNA
atccaccattgacaattacatatcaaaaatacaggataatcacaatacgccatggatattaaataacgaaagcgt

SEQ ID NO: 386933 - DNA, 75 bp, synthetic construct
  source 1..75: mol_type = other DNA
tataataaacaccgatctggtcattggcgaaaaaattcatttcaggacactaagcaatcgttctttatattttaa

SEQ ID NO: 386934 - DNA, 75 bp, synthetic construct
  source 1..75: mol_type = other DNA
atgtgaattatttccatacaactatagttaaaaatggacagatcattaatcaaccaacaaatgcatttcagtctg

SEQ ID NO: 386935 - DNA, 75 bp, synthetic construct
  source 1..75: mol_type = other DNA
gctggatgtgccagaagaggtcaatcacttcctcaaagccgtagccgggcaaggtgccacgctcgatatgttgac

SEQ ID NO: 386936 - DNA, 75 bp, synthetic construct
  source 1..75: mol_type = other DNA
tgccagtgcgggtacaatgccacgtattcagggtttccttaccgtgccatcctctcatgatctcggtactgcctt

SEQ ID NO: 386937 - DNA, 75 bp, synthetic construct
  source 1..75: mol_type = other DNA
tcataagccttgggaacataatcaaggtctcgcaagtgagtttgcagatggcaggataactgatgccagtattgc

SEQ ID NO: 386938 - DNA, 75 bp, synthetic construct
  source 1..75: mol_type = other DNA
ccaaccaaacaaaactggctggatttgattcgcgcctccagtgctattcccggtttttatcgcaccggagtttca

SEQ ID NO: 386939 - DNA, 75 bp, synthetic construct
  source 1..75: mol_type = other DNA
ggaaatcttatcgatctcgactggctggtggaggcgactgcaagccagatgccgttgcagatggataccgccgcg

SEQ ID NO: 386940 - DNA, 75 bp, synthetic construct
  source 1..75: mol_type = other DNA
tgaaaccagctatcgcgccatccagcaattcattgaaaagccgccgggcaagctgcggattttggaaatttatcc

SEQ ID NO: 386941 - DNA, 75 bp, synthetic construct
  source 1..75: mol_type = other DNA
aatgatgggaatggcgcttctgttcatatagaactaagaccttatatgtctgaacctgcgcacaccccatattaa

SEQ ID NO: 386942 - DNA, 75 bp, synthetic construct
  source 1..75: mol_type = other DNA
agcatatccataccgtatctatactgtcccggaaggggcattagtaaaaaacatactaactaatgaatatctagg

SEQ ID NO: 386943 - DNA, 75 bp, synthetic construct
  source 1..75: mol_type = other DNA
ccgttaaacgtgaccaatgacagtaatgcagcagcggttcatatagatctaagaccttttctgtctgaaccggcc

SEQ ID NO: 386944 - DNA, 75 bp, synthetic construct
  source 1..75: mol_type = other DNA
gagcaggctcccgatcgtgtgaccctttaccgaatactggaacggctaatgcaggtcagtattgtccagcgttat

SEQ ID NO: 386945 - DNA, 75 bp, synthetic construct
  source 1..75: mol_type = other DNA
aggactttttgaatgcgataactgccatcatgttattcctattgagcaggatccagccctggaagcggccattga

SEQ ID NO: 386946 - DNA, 75 bp, synthetic construct
  source 1..75: mol_type = other DNA
tcaccagccttgggagcataatgaaaatctcgcgcaggaatttgctgatggaaggataacagatgcaagtattgc

SEQ ID NO: 386947 - DNA, 75 bp, synthetic construct
  source 1..75: mol_type = other DNA
ctataccacaaaacgcgaatttttcgatccattgcgctttgtccgtggaggaaatcttatcgatctcgactggct

SEQ ID NO: 386948 - DNA, 75 bp, synthetic construct
  source 1..75: mol_type = other DNA
atgcggtcgctatttcctggccacggtcggtaaaatgctaaccgaaaaagcaccgttcactcgccatctggtgcc

SEQ ID NO: 386949 - DNA, 75 bp, synthetic construct
  source 1..75: mol_type = other DNA
gctctggtgtgcgaaggcggcggacagcgtggaattttcacggctggcgtgctggatgagtttatgcgcgcgcag

SEQ ID NO: 386950 - DNA, 75 bp, synthetic construct
  source 1..75: mol_type = other DNA
aaacgaatcggaaaatcgatactggaaaaaactctaactcggtggccagtttttgttgaccacttcagtctggca

SEQ ID NO: 386951 - DNA, 75 bp, synthetic construct
  source 1..75: mol_type = other DNA
ggtactgaccggaaattggttacagaaaaactatgaattgaaacaagccatacacgcccaatctcctgatacaga

SEQ ID NO: 386952 - DNA, 75 bp, synthetic construct
  source 1..75: mol_type = other DNA
ttgccagtaaaaccgatgggcacggaaggagtgttacagcaagtgagttgcgatggctgtacagacaccgttaca

SEQ ID NO: 386953 - DNA, 75 bp, synthetic construct
  source 1..75: mol_type = other DNA
gctttgaagcggaacagtatgacccacagcgggtacgcgcggcggctaaaaaaaaaaaaaaaaaaaaaaaaaaaa

SEQ ID NO: 386954 - DNA, 75 bp, synthetic construct
  source 1..75: mol_type = other DNA
cctgtcaggattatctcgcgcaccttgatggttttaatatcgaatggctggcacatgatgagcaggcggtagatg

SEQ ID NO: 386955 - DNA, 75 bp, synthetic construct
  source 1..75: mol_type = other DNA
aaagtcgttaagaatttaagccgtcgctttgaagcggaacagtatgacccacagcgggtacgcgcggcggcttac

SEQ ID NO: 386956 - DNA, 75 bp, synthetic construct
  source 1..75: mol_type = other DNA
gcattgtgtaaagctctttgtccaagaaatggagaacattgctgtttgggttgcggatagcgctgtcagcaagga

SEQ ID NO: 386957 - DNA, 75 bp, synthetic construct
  source 1..75: mol_type = other DNA
atgggcaatccggtgttaaacccggcgacgctggtgtttatggggtttgtcctcggctggggttttgcggcgatt

SEQ ID NO: 386958 - DNA, 75 bp, synthetic construct
  source 1..75: mol_type = other DNA
acacaggcaccggtcgaaattgatatgccggaagtgcagggcggattctttagccgctggggtagggcgctatgg

SEQ ID NO: 386959 - DNA, 75 bp, synthetic construct
  source 1..75: mol_type = other DNA
gtcgacaaaacaggcacgctcacggaaggttcgcctacggtgacagggattatcagtctcaatccgggtggggaa

SEQ ID NO: 386960 - DNA, 75 bp, synthetic construct
  source 1..75: mol_type = other DNA
gtcatgaaacggatattaatgcagaagatgtcctgcctggcgataagctccgcatcagacctggagagagtattc

SEQ ID NO: 386961 - DNA, 75 bp, synthetic construct
  source 1..75: mol_type = other DNA
taccgccacaatacaacacatggctgcagctgcttctggcctctccagtcgtgttgtgctgtggctggccattct

SEQ ID NO: 386962 - DNA, 75 bp, synthetic construct
  source 1..75: mol_type = other DNA
catggtcagcggcctgcaacaacttttcaccctgatttgttttatatcgggtcgatcattgccgagcctgcgcgt

SEQ ID NO: 386963 - DNA, 75 bp, synthetic construct
  source 1..75: mol_type = other DNA
tggatgagctggaaaaccgcgccttatatctacgacgaattgcaggatctcccctaccgccaggtcggtgtggtg

SEQ ID NO: 386964 - DNA, 75 bp, synthetic construct
  source 1..75: mol_type = other DNA
ctattggcaatcctcgccagtaaatcccgcgataacagccgcacgccaatgcaatggagcaacggcgataacgca

SEQ ID NO: 386965 - DNA, 75 bp, synthetic construct
  source 1..75: mol_type = other DNA
atatctaccagggcgaagagattggcatgaccaacccgcatttcacgcgcattactgactatcgcgacgtagaga

SEQ ID NO: 386966 - DNA, 75 bp, synthetic construct
  source 1..75: mol_type = other DNA
ttccggctatgcaccaggtgccggaagatgcgcaggggtatcccgccgtcacgcccgaacagttacttgaattac

SEQ ID NO: 386967 - DNA, 75 bp, synthetic construct
  source 1..75: mol_type = other DNA
ccggggtgattaatcagtattaccgctaccgtattcagggggcaataaatgcctataacagcggtaaggtgaatt

SEQ ID NO: 386968 - DNA, 75 bp, synthetic construct
  source 1..75: mol_type = other DNA
tgttagtcctgatcggcttgctgctgttgactgtgctcggcctcgatcgctggatgagctggaaaactgcgcctt

SEQ ID NO: 386969 - DNA, 75 bp, synthetic construct
  source 1..75: mol_type = other DNA
aaaaccgcgcggtactggtcaccgtggggttatcgagcggttccgggttatcgctgtttgagcatagcgacgttg

SEQ ID NO: 386970 - DNA, 75 bp, synthetic construct
  source 1..75: mol_type = other DNA
ttgccagtaaaaccgatggacacggaagaagtgttacagcaagtgagttgcgatggttatacagacaccggtaca

SEQ ID NO: 386971 - DNA, 75 bp, synthetic construct
  source 1..75: mol_type = other DNA
acctgggtaaatatttcctgctcatcaataatatgctggtcgtgctggggttctttgttgtcttcccgctgatct

SEQ ID NO: 386972 - DNA, 75 bp, synthetic construct
  source 1..75: mol_type = other DNA
gaacaaagaaagcccttaccgccagttttatatctggcgcgatggcgaaccagaaacgccaccgaacaactggcg

SEQ ID NO: 386973 - DNA, 75 bp, synthetic construct
  source 1..75: mol_type = other DNA
actatttatgaaaaagaagcgcaacccggtggctggctgtgtaacggtattccgcaatttcgtttgccgcaaacc

SEQ ID NO: 386974 - DNA, 75 bp, synthetic construct
  source 1..75: mol_type = other DNA
aaaaccgcgcggtactggtcaccgtggggttatcgagcggttccgggctaccgctgtttgagcatagcgacgttg

SEQ ID NO: 386975 - DNA, 75 bp, synthetic construct
  source 1..75: mol_type = other DNA
gccacttcgcgggcatgacgggcatggcgatggaagagcgttttagcctctcatgctggcaaaaaggtccgctgg

SEQ ID NO: 386976 - DNA, 75 bp, synthetic construct
  source 1..75: mol_type = other DNA
ttatacatccagccacattcaattttgccggaaatgaaaaaccgagagattttcgtgtcgccattcccggtggtg

SEQ ID NO: 386977 - DNA, 75 bp, synthetic construct
  source 1..75: mol_type = other DNA
ggatttagtcgttttaatggatgaagcccaccgttactacgccagcgcgggcgcgcaggcgcttaacgatctgaa

SEQ ID NO: 386978 - DNA, 75 bp, synthetic construct
  source 1..75: mol_type = other DNA
aaagtacgcattgaacacgacgatttcttcaatggcgcttataaaggcaaagtaataactgttcactctaaccag

SEQ ID NO: 386979 - DNA, 75 bp, synthetic construct
  source 1..75: mol_type = other DNA
tattgaaacagaaagcaaaatcattggtagcgtcgagttcaataagccaacgcacgtaaccgccggaccggtaac

SEQ ID NO: 386980 - DNA, 75 bp, synthetic construct
  source 1..75: mol_type = other DNA
cgatctgcttgcaatggttgaagatgaaatcatcctcgccttgccggtagtttcggtgcatgattctgaacactg

SEQ ID NO: 386981 - DNA, 75 bp, synthetic construct
  source 1..75: mol_type = other DNA
aaaagatgatttcattattgttgtttgattcccgaagagcatttggccgggtacttttgtgtgagcgggatgata

SEQ ID NO: 386982 - DNA, 75 bp, synthetic construct
  source 1..75: mol_type = other DNA
gtggacgatttgaccgcacaagccttaagagattttactgcgcgctactgcgatgcgtggcatgagcagcataaa

SEQ ID NO: 386983 - DNA, 75 bp, synthetic construct
  source 1..75: mol_type = other DNA
tggtcatctggtgactcagaaacggttaaaactgccgcccacgctatttatcgcaacactggaagaagagttaga

SEQ ID NO: 386984 - DNA, 75 bp, synthetic construct
  source 1..75: mol_type = other DNA
ctgcttgggctgggattctggtcgctggttgtcggtgtagcggcgtttgttggctgtgtatcgatggtgtcatcc

SEQ ID NO: 386985 - DNA, 75 bp, synthetic construct
  source 1..75: mol_type = other DNA
caccgccggtactaattactggtgatgactatcaggaagggcgaggcgttcgtctggattatgcgattgctgaaa

SEQ ID NO: 386986 - DNA, 75 bp, synthetic construct
  source 1..75: mol_type = other DNA
attttagctatcttgcaaacctgccagatttagttgttttgatggatgaagcccaccgttactacgctagtgcgg

SEQ ID NO: 386987 - DNA, 75 bp, synthetic construct
  source 1..75: mol_type = other DNA
atgagccaaagcaacgccataaaaattgccaatcggattagtgcacgactgtcactgcgcgatccgcaggatgaa

SEQ ID NO: 386988 - DNA, 75 bp, synthetic construct
  source 1..75: mol_type = other DNA
tttccgactcagataggagagatcagccgctcacgtgatcaggtgtccgaattcttgtcctatccgatcacgttc

SEQ ID NO: 386989 - DNA, 75 bp, synthetic construct
  source 1..75: mol_type = other DNA
gttgctgccgtgcgttattgaaagccgatggcacgccagctgcgccgttgattagctggcaggatgcacgcgtaa

SEQ ID NO: 386990 - DNA, 75 bp, synthetic construct
  source 1..75: mol_type = other DNA
gattataagacctgggcatggagtgaagatgccgcagtcatggagaagtttaatatcccccgtcatatgctgttt

SEQ ID NO: 386991 - DNA, 75 bp, synthetic construct
  source 1..75: mol_type = other DNA
atagtaataaatgcatcagtatttaataaaggtaaggataaagaaaaaaatgtagaaataaaagtcccaaacggt

SEQ ID NO: 386992 - DNA, 75 bp, synthetic construct
  source 1..75: mol_type = other DNA
ccaacgagctggcagatggtcgagatggcaggcaatgacctaaccagcggcatcctgagagccgtaaatgccatg

SEQ ID NO: 386993 - DNA, 75 bp, synthetic construct
  source 1..75: mol_type = other DNA
tggctacgcgacatgttaggcgagtcgttaattcaggatgccagggcgcaggatctttcaccggaagatttactc

SEQ ID NO: 386994 - DNA, 75 bp, synthetic construct
  source 1..75: mol_type = other DNA
atctgacacatcgcttaaccggcgagtttaaagacaatatcgccaactattttggtcagtggccggtggattata

SEQ ID NO: 386995 - DNA, 75 bp, synthetic construct
  source 1..75: mol_type = other DNA
gccctgtattgtggtgctatcgccgtgaatggaaggggcaaaccttgctggtcattgccaaccttagccgtgaga

SEQ ID NO: 386996 - DNA, 75 bp, synthetic construct
  source 1..75: mol_type = other DNA
gggccacgagcacacgagtttttgcatgagatgaaccgcgatgtgtttacgcctcgcggtttaatgaccgtgggt

SEQ ID NO: 386997 - DNA, 75 bp, synthetic construct
  source 1..75: mol_type = other DNA
gaatgcaaaattttatgatctggaggggtggagtgatgatccgattgataatgattactttagtagtttagtctc

SEQ ID NO: 386998 - DNA, 75 bp, synthetic construct
  source 1..75: mol_type = other DNA
ctgaaattttcaacgtggatccgcgaacgattgaacgctggcagtctcaggggctatcttgcgtctccggaggta

SEQ ID NO: 386999 - DNA, 75 bp, synthetic construct
  source 1..75: mol_type = other DNA
ctggagcataacctcaaccatattatgggcgtcaggtacagtcacgctgctgattataaatgcagtatttttctg

SEQ ID NO: 387000 - DNA, 75 bp, synthetic construct
  source 1..75: mol_type = other DNA
gtcttcaaagcgaacgatattgtcattgcgttgttgcaggaaaaaggcgcgctgttgcacgttgagaaaatgcaa

SEQ ID NO: 387001 - DNA, 75 bp, synthetic construct
  source 1..75: mol_type = other DNA
cgatcaggatgcgctgaaagcaaaatttgccgtaagcaacgttaacggcccaatctcgctggtgatctggaccac

SEQ ID NO: 387002 - DNA, 75 bp, synthetic construct
  source 1..75: mol_type = other DNA
agcgaagcgatgaacgatgcgttctgggacgaactgttgcaagtacgcggcgaagtgaacaaagtcattgagcag

SEQ ID NO: 387003 - DNA, 75 bp, synthetic construct
  source 1..75: mol_type = other DNA
ctgcgtattcagcgtctggggcaggaacagcattatctggggccgcttaacgggccggaactgctggtggtgctg

SEQ ID NO: 387004 - DNA, 75 bp, synthetic construct
  source 1..75: mol_type = other DNA
cacgccgtggacgctgcctgctaaccgcgcaatctccattgcacctgatttcgactatgcgctggtgcagatcga

SEQ ID NO: 387005 - DNA, 75 bp, synthetic construct
  source 1..75: mol_type = other DNA
tttgccgtaagcaacgttaacggcccaatctcgctggtgatctggaccactacgccgtggactctgcctgccaac

SEQ ID NO: 387006 - DNA, 75 bp, synthetic construct
  source 1..75: mol_type = other DNA
actcggcactgcttatggtcacatcgcgcttagcgtagataacgccgctgaagcgtgcgaaaaaatccgtcaaaa

SEQ ID NO: 387007 - DNA, 75 bp, synthetic construct
  source 1..75: mol_type = other DNA
tacagaaaaataaaagaaatttcaccacgagtgaataatacaggtgaaaggatcccagaggagagcggacatgcg

SEQ ID NO: 387008 - DNA, 75 bp, synthetic construct
  source 1..75: mol_type = other DNA
gccttgcagcacataagccattgtcggcaccgacaacgctgaaggcggggccgttgttgagttctgaaaaactga

SEQ ID NO: 387009 - DNA, 75 bp, synthetic construct
  source 1..75: mol_type = other DNA
ggtttgactccggatctacccactcttccgttgttgacgtgcgtccggaatttgccggtcacgcagcggacatgt

SEQ ID NO: 387010 - DNA, 75 bp, synthetic construct
  source 1..75: mol_type = other DNA
ggtcacctgcacaaaggcgcgaagccagttcactggtgcgttgactgccgttctgcgctggcggaagcggaagtt

SEQ ID NO: 387011 - DNA, 75 bp, synthetic construct
  source 1..75: mol_type = other DNA
ttatcgcatttgtggaagatccggacggttataaaattgaattgatcgaagagaaagacgccggtcgcggtctgg

SEQ ID NO: 387012 - DNA, 75 bp, synthetic construct
  source 1..75: mol_type = other DNA
cataaaaaataacgatataaaagatgtcaataaagtttttgttaagataactaatgaaaataacagtggtcatac

SEQ ID NO: 387013 - DNA, 75 bp, synthetic construct
  source 1..75: mol_type = other DNA
cagtctttttcctgctggcggcatttcagcaagatgtcgggatctggccgccgctcggcgcaatgctcggtcttg

SEQ ID NO: 387014 - DNA, 75 bp, synthetic construct
  source 1..75: mol_type = other DNA
cggatatattgatttggggaaattatatccaaccagtgcaggtactccacagggcggaataatatctccaacgct

SEQ ID NO: 387015 - DNA, 75 bp, synthetic construct
  source 1..75: mol_type = other DNA
gatgaaggctatatacacactaaaaagaaggggttacaaacctcttccgctacggcgtatatatatcccgaaatc

SEQ ID NO: 387016 - DNA, 75 bp, synthetic construct
  source 1..75: mol_type = other DNA
gcaatccaaatagcctattcgctgaagtatgctcgtattatctgttcaggccttgatttaacgggtagctgttcg

SEQ ID NO: 387017 - DNA, 75 bp, synthetic construct
  source 1..75: mol_type = other DNA
tattaacctcggttattgttcatgccataccgttgcttttgctgcaatccaaatagcctattcgctgaagtatgc

SEQ ID NO: 387018 - DNA, 75 bp, synthetic construct
  source 1..75: mol_type = other DNA
atgacaagccgcagccgtcaggctgcctactcggggatcttcattaacgaaaccaccggcgaatttccgcaaaaa

SEQ ID NO: 387019 - DNA, 75 bp, synthetic construct
  source 1..75: mol_type = other DNA
gatgaaggctatatacacactgaaaagaaggggttacaaacctcttccgctacggcgtatatatatcccaaaatc

SEQ ID NO: 387020 - DNA, 75 bp, synthetic construct
  source 1..75: mol_type = other DNA
gttcccgggtcagcgaagccagaatcccggcgctgcgtgagcgggccaatggcctgttattgcaagggcagtggc

SEQ ID NO: 387021 - DNA, 75 bp, synthetic construct
  source 1..75: mol_type = other DNA
atttaatctgaaaccaaagatatattattcacatcacgacaaaccccaaaagaaaaagggaaagaaaaaaaacgt

SEQ ID NO: 387022 - DNA, 75 bp, synthetic construct
  source 1..75: mol_type = other DNA
tgggccagatactatcgtcatgttgtttcaaaaaagatctttcagaaagtcagtcatgaaatatggaaagcacta

SEQ ID NO: 387023 - DNA, 75 bp, synthetic construct
  source 1..75: mol_type = other DNA
gtgcacccaccgacatcgtgactcactggcacaataacaactgggccaagtgccgtcgcgaggtcagaaggctgc

SEQ ID NO: 387024 - DNA, 75 bp, synthetic construct
  source 1..75: mol_type = other DNA
ggtaaaggaattcctgaaaagggtccgccagacgataaaagacaatccgacagtcagccagagcacactgatatg

SEQ ID NO: 387025 - DNA, 75 bp, synthetic construct
  source 1..75: mol_type = other DNA
cccaccgttcgttgtttgcacagcaccctgaattatgcccgacaggaaataatcgtcatcgctggtctgagctgg

SEQ ID NO: 387026 - DNA, 75 bp, synthetic construct
  source 1..75: mol_type = other DNA
agtcgtttgcgctggatattctgcgaattggttttaatggtaagtcatttgctgaaaatactaatccagcgacca

SEQ ID NO: 387027 - DNA, 75 bp, synthetic construct
  source 1..75: mol_type = other DNA
cattcagcaatgagcaatttgcgctggatatgctgcgcgtggcgtttaacggcgtgagtgttgccgagactacca

SEQ ID NO: 387028 - DNA, 75 bp, synthetic construct
  source 1..75: mol_type = other DNA
taatgatccacgcctggtggttcttgtcggcgctgatctggtcgcggcggagtcgttccgtctgtatcagaaagc

SEQ ID NO: 387029 - DNA, 75 bp, synthetic construct
  source 1..75: mol_type = other DNA
ttatttccggtatggatatcacgcctgagcgtagcaagcaggtatcgtttaccacgccctactacgaaaactcag

SEQ ID NO: 387030 - DNA, 75 bp, synthetic construct
  source 1..75: mol_type = other DNA
ggagaaactgaataaggcactggcagccgttaaagcagacggtacatatcagaaaatcagcgatcagtggttccc

SEQ ID NO: 387031 - DNA, 75 bp, synthetic construct
  source 1..75: mol_type = other DNA
gcaattaactgtgttagctggttctgatctcgttgcagctgaacaacagcgaatgtttgatcagactgacaaacc

SEQ ID NO: 387032 - DNA, 75 bp, synthetic construct
  source 1..75: mol_type = other DNA
acgccgctgtctaacctgcacatctacacccagcgcaatacccgtatgcgtaaggcggagtttgttgaagatcgt

SEQ ID NO: 387033 - DNA, 75 bp, synthetic construct
  source 1..75: mol_type = other DNA
catcggctggcatgagcgtatgaaaacgctgctgggtggcaatcagattatgaccgatcccgtggtgctcgatga

SEQ ID NO: 387034 - DNA, 75 bp, synthetic construct
  source 1..75: mol_type = other DNA
cctgcgcaaagccctgctggaaagcacggaatttctgagtttcatcacctgcatggacgttccgcacccgcaagg

SEQ ID NO: 387035 - DNA, 75 bp, synthetic construct
  source 1..75: mol_type = other DNA
gtatccggaactgtacgccgcgtttgatgaaagtgcggtagctatcggggcacctgtcgcgcctccggcaggcga

SEQ ID NO: 387036 - DNA, 75 bp, synthetic construct
  source 1..75: mol_type = other DNA
gcatggaaggttacggcgtcgagcatgacgagctgtatgcggcattcgacaaaatcacccttgcgaccggcgaag

SEQ ID NO: 387037 - DNA, 75 bp, synthetic construct
  source 1..75: mol_type = other DNA
tgacccgcgcctggtggtgctggtaggtgctgacctggtggccgctgaacagtaccgcctgttccaggctgctga

SEQ ID NO: 387038 - DNA, 75 bp, synthetic construct
  source 1..75: mol_type = other DNA
aacgaatggctgaaaaccaatccgcaactgggcgttgctactgaaaaagtgaccgatccgcaatacttcggcacc

SEQ ID NO: 387039 - DNA, 75 bp, synthetic construct
  source 1..75: mol_type = other DNA
tcatgaagcgcctggcgctcaccacggctctttgcacagcctttatctctgctgcacatgccgatgacctgaata

SEQ ID NO: 387040 - DNA, 75 bp, synthetic construct
  source 1..75: mol_type = other DNA
gaaacccggggcggttcaaacatcccgctgctgattaccgccggaagttctgctctgctcggtgtgtttgcgttt

SEQ ID NO: 387041 - DNA, 75 bp, synthetic construct
  source 1..75: mol_type = other DNA
gcgttctattacatctttgccaacggttatctgaccgaagtcggcatgaaaaacgccactggctggatgacgctc

SEQ ID NO: 387042 - DNA, 75 bp, synthetic construct
  source 1..75: mol_type = other DNA
tatccagaatctggcgtggagattgcccaccgttcgttgtttgcacagcaccctgaattatgcccgacaggaaat

SEQ ID NO: 387043 - DNA, 75 bp, synthetic construct
  source 1..75: mol_type = other DNA
acattacaggaatgagctttggttttcgcgcattatgcgaggagtggagtatcgcgcaaaaaccgtatttgcgta

SEQ ID NO: 387044 - DNA, 75 bp, synthetic construct
  source 1..75: mol_type = other DNA
ctggcggcgggtaatgatgtgcgctgcctgtatgagcatgactatacccaactgctggggcgcaccaaatccggc

SEQ ID NO: 387045 - DNA, 75 bp, synthetic construct
  source 1..75: mol_type = other DNA
gaacgacctgaaacatcagcttagtattggcgcactaaaacctggcgcacgcctgattactaaaaatctggcgga

SEQ ID NO: 387046 - DNA, 75 bp, synthetic construct
  source 1..75: mol_type = other DNA
gcaatggcaggataacccaaaccttgttgtcctggttggcgctgacctgctcgctgcggaggaagtccgcctcta

SEQ ID NO: 387047 - DNA, 75 bp, synthetic construct
  source 1..75: mol_type = other DNA
gtcagcgatcgtaaacagtttgagaacagctactggcgttatgaaggttacgcccttgggaatccggagctgtat

SEQ ID NO: 387048 - DNA, 75 bp, synthetic construct
  source 1..75: mol_type = other DNA
ggcaaaatggatattaaagtcatgctcggcctggatgcgctgatcctgctgcgcgataaaaacttcctcgtcttt

SEQ ID NO: 387049 - DNA, 75 bp, synthetic construct
  source 1..75: mol_type = other DNA
tcgctgcgcaacagaccacttttgccgggttctttccgttactgctggcctactcgctaacctatatgccgacca

SEQ ID NO: 387050 - DNA, 75 bp, synthetic construct
  source 1..75: mol_type = other DNA
tctatgtcgataaaaaagcccccgtgcatatgcgtaccgccgcgcaggggctgatcacgctctgctgccagggct

SEQ ID NO: 387051 - DNA, 75 bp, synthetic construct
  source 1..75: mol_type = other DNA
agaaaagtgtaatggtaattagtctatggatgggagcacatcttgtcatatcgggagagataagcatcgggcagt

SEQ ID NO: 387052 - DNA, 75 bp, synthetic construct
  source 1..75: mol_type = other DNA
gagcaccaccgggcttactgcgcaggcgtatggtgccaaaaatcctcaggcattagcgcgtgcgctggtgcagcc

SEQ ID NO: 387053 - DNA, 75 bp, synthetic construct
  source 1..75: mol_type = other DNA
ggcgttgcgcgggctttctctggcggctatctggcggcgtcactggcgcaatggtacctggtttgccgcaacgtg

SEQ ID NO: 387054 - DNA, 75 bp, synthetic construct
  source 1..75: mol_type = other DNA
tagatgggcaagcattcctgacgaccaaatatctcggcgcgcaggggttgtttgttgctgttatcgttgcattga

SEQ ID NO: 387055 - DNA, 75 bp, synthetic construct
  source 1..75: mol_type = other DNA
agttgctgtcaagttaaactcacaaaaacatgttgcagcggtgagagatggattcgtttttacgtttccaattat

SEQ ID NO: 387056 - DNA, 75 bp, synthetic construct
  source 1..75: mol_type = other DNA
aagtcaatccagaaattgaaatcatcctgatttccgccaccagcggcgaagggatggatcagtggctgaactggc

SEQ ID NO: 387057 - DNA, 75 bp, synthetic construct
  source 1..75: mol_type = other DNA
ctggctcatctatctgggcgcccggttgacttacaatggactgacaggagagttttctgctgatttccttcaggg

SEQ ID NO: 387058 - DNA, 75 bp, synthetic construct
  source 1..75: mol_type = other DNA
tgatggggagttctcagcgaaccttctgttcctgattgttttctttcatgtggttttgttatttatcactctgct

SEQ ID NO: 387059 - DNA, 75 bp, synthetic construct
  source 1..75: mol_type = other DNA
gaaaaacgggcagacgttcagccatatcgccatcaactggcatagcgagcataaacgctggtctgagcattacgc

SEQ ID NO: 387060 - DNA, 75 bp, synthetic construct
  source 1..75: mol_type = other DNA
gcgcgcgactggggagtgacattatcgctgttaacgcggttctgatgacgctactcacctttaccgcctatgcgc

SEQ ID NO: 387061 - DNA, 75 bp, synthetic construct
  source 1..75: mol_type = other DNA
tggcaacattcttaacattgctctggatgtctggctggtgatggggctgcatatgaatgtccagggagctgcgtt

SEQ ID NO: 387062 - DNA, 75 bp, synthetic construct
  source 1..75: mol_type = other DNA
atggcattcctcacttcatctgataaagcactctggcatctcgccttacccatgattttctccaatatcaccgtt

SEQ ID NO: 387063 - DNA, 75 bp, synthetic construct
  source 1..75: mol_type = other DNA
ttatggttggattcttatgtttagctgtcgcgacattgatttatttacccttcgtcattgccgctaataaagtca

SEQ ID NO: 387064 - DNA, 75 bp, synthetic construct
  source 1..75: mol_type = other DNA
atgaaagtcgccacaccaccgaacgcgccattaactttgttaaacagcgtactgacaacgtgatcgtcatcgatt

SEQ ID NO: 387065 - DNA, 75 bp, synthetic construct
  source 1..75: mol_type = other DNA
gatttcccagaataattataaagaaataccgaacattacaaggtaaagtcgtatggggtgatgctgccaacttac

SEQ ID NO: 387066 - DNA, 75 bp, synthetic construct
  source 1..75: mol_type = other DNA
aatttgattttaaaaataaatgttagatttcccagaataattataaagaaataccgaacattacaaggtaaagtc

SEQ ID NO: 387067 - DNA, 75 bp, synthetic construct
  source 1..75: mol_type = other DNA
cccattaatcgccacaataaaagatgatgtattttgcactcttcatgattactataaccacaataatgaaaccaa

SEQ ID NO: 387068 - DNA, 75 bp, synthetic construct
  source 1..75: mol_type = other DNA
ggccattgctactcttttagtcaccccagtagaaatgtatgggttgttcttctacccgcgcgtcagtgccctgcg

SEQ ID NO: 387069 - DNA, 75 bp, synthetic construct
  source 1..75: mol_type = other DNA
gcgccagatgtttcctaagcacggctttaatgataactggcgtactgcaccgacgttggtgtccgactatcgctt

SEQ ID NO: 387070 - DNA, 75 bp, synthetic construct
  source 1..75: mol_type = other DNA
aaacgatctcatttacacattaatccagacgccgctcaaacatatgggaacgaatatctttgcggtaattatcct

SEQ ID NO: 387071 - DNA, 75 bp, synthetic construct
  source 1..75: mol_type = other DNA
ggtgtggcgacaatgatctatttaccttttgttattgccgccaacaaagtcaataacatgacaactaacggataa

SEQ ID NO: 387072 - DNA, 75 bp, synthetic construct
  source 1..75: mol_type = other DNA
tactggttggttttttatgtttaggtgtggcgacaatgatctatttaccttttgttattgccgccaacaaagtca

SEQ ID NO: 387073 - DNA, 75 bp, synthetic construct
  source 1..75: mol_type = other DNA
gccaccggcaacgctgaaggctggcccgctgttgagttcagaaaaattgattgcaattggtgcctcaacgggcgg

SEQ ID NO: 387074 - DNA, 75 bp, synthetic construct
  source 1..75: mol_type = other DNA
gaagtggtcgatcttaaccaggtaagccagcaaatgttggcaaaaattagtgccggacaggcgatacgtatttaa

SEQ ID NO: 387075 - DNA, 75 bp, synthetic construct
  source 1..75: mol_type = other DNA
cggatgacggtacggtgttgcctatagccgctacctttgccggtgcaccttcgctgacggtcgatgcggttattg

SEQ ID NO: 387076 - DNA, 75 bp, synthetic construct
  source 1..75: mol_type = other DNA
caagattacgaaagcccgctccccgcaaggactgacgccaggtagtttctgtccatggctgcttttcgcatctta

SEQ ID NO: 387077 - DNA, 75 bp, synthetic construct
  source 1..75: mol_type = other DNA
tatgtcggaatacttttcgccaccgtaccccgccagggctacgttgggtatcgccgccctgccgcagggggctgt

SEQ ID NO: 387078 - DNA, 75 bp, synthetic construct
  source 1..75: mol_type = other DNA
ctacagccgtggtgctcggcttcctgctctacaggggcggtattcgcctcaatcttggcgcgttttttaaatgga

SEQ ID NO: 387079 - DNA, 75 bp, synthetic construct
  source 1..75: mol_type = other DNA
tcagccatcacatgttgggaccattaccgtctatgaaggttccagtccggggacgctgaatgattttctcggtgc

SEQ ID NO: 387080 - DNA, 75 bp, synthetic construct
  source 1..75: mol_type = other DNA
tgcactttaaagaacgctatgacgttgttatctcgcgcctgaaccgtgctggtgttgaattagttgcaagtagcg

SEQ ID NO: 387081 - DNA, 75 bp, synthetic construct
  source 1..75: mol_type = other DNA
taatttagccattaaagatgtgccgattctcaatggcgataaagttatttgctcacgattgaaacgagaagaaac

SEQ ID NO: 387082 - DNA, 75 bp, synthetic construct
  source 1..75: mol_type = other DNA
tggatgctgcgggttattttccgcgtcaatgttgagactgaggcccagcagcacgagtccacgcgaaccaacggc

SEQ ID NO: 387083 - DNA, 75 bp, synthetic construct
  source 1..75: mol_type = other DNA
tcagtaccgaagaatcaaaagatgagacaagaataaaaatacaatatgaagtctcaactgattcttatgctaatt

SEQ ID NO: 387084 - DNA, 75 bp, synthetic construct
  source 1..75: mol_type = other DNA
tccttcagaattgccttgtgctacggtcattttaccgcagggaaaaaggtggatttataaagaagattaaactta

SEQ ID NO: 387085 - DNA, 75 bp, synthetic construct
  source 1..75: mol_type = other DNA
aaaaagatgttgaaaacctgattgaaaataaaacatctgatgatgttattatttttctttcgggccctacatcgc

SEQ ID NO: 387086 - DNA, 75 bp, synthetic construct
  source 1..75: mol_type = other DNA
tgatgaaaaatatgtataccatgccttttacgttcatggtggaagtccataaaaactggtttatttctcataatg

SEQ ID NO: 387087 - DNA, 75 bp, synthetic construct
  source 1..75: mol_type = other DNA
ggctggcggcacagatagagccggtttatttgcctgagcgaaaaatacatctttatcactgtgaccaccggggcc

SEQ ID NO: 387088 - DNA, 75 bp, synthetic construct
  source 1..75: mol_type = other DNA
gtccttttaccgccgagaaaaaggcggtttgataaagaagataaaatttaatatattaagtcagattcataaaga

SEQ ID NO: 387089 - DNA, 75 bp, synthetic construct
  source 1..75: mol_type = other DNA
gatgctcatccatattatgatggattaggaaaaggaattaagaaatattttaattttactacattgcatgattac

SEQ ID NO: 387090 - DNA, 75 bp, synthetic construct
  source 1..75: mol_type = other DNA
ctggcctttggcccctacccggggatctcgctgttgcaggctcgccgtttacgggaagcggcacgcaataacatt

SEQ ID NO: 387091 - DNA, 75 bp, synthetic construct
  source 1..75: mol_type = other DNA
ttctgcgaaggcacgggaggggcactccatcgaacaactctgtgcaacagctgcactggcggggggagcgataaa

SEQ ID NO: 387092 - DNA, 75 bp, synthetic construct
  source 1..75: mol_type = other DNA
atgctgtcagtgttgctgaagttactgattatcttggtattaaccccccgagcctctacgcggcttttggcagta

SEQ ID NO: 387093 - DNA, 75 bp, synthetic construct
  source 1..75: mol_type = other DNA
ttagcctttggcccctacccggagatctcgctgttgcaggcgcgtcgtttacgggaagctgcacgcaataacatt

SEQ ID NO: 387094 - DNA, 75 bp, synthetic construct
  source 1..75: mol_type = other DNA
ttgagtgaatcggggctgtggagcaaagaagcgattgaaaaacaaatgagtcaccaggaaagaaacagcgtccgc

SEQ ID NO: 387095 - DNA, 75 bp, synthetic construct
  source 1..75: mol_type = other DNA
atgaaaaagaaactgctcaaagcgaacccggcgctgtatctggacggcgaatttgccgcgccagaaacgaatcac

SEQ ID NO: 387096 - DNA, 75 bp, synthetic construct
  source 1..75: mol_type = other DNA
tcttcagaaatttagccttattgaaggcaggagaaatctttagatgcacagataacacaaagaatcatggggttt

SEQ ID NO: 387097 - DNA, 75 bp, synthetic construct
  source 1..75: mol_type = other DNA
aagcttggtacaatatatgctcctgatggaatttcaatgcatgtggatcgtcgtaatgatagtgtaaatattgaa

SEQ ID NO: 387098 - DNA, 75 bp, synthetic construct
  source 1..75: mol_type = other DNA
ctgtcggaagggtacggcgaaccacacgagcgagggacattaatcaatctttatcttacgcaggacgatctggca

SEQ ID NO: 387099 - DNA, 75 bp, synthetic construct
  source 1..75: mol_type = other DNA
aactgccaggatctggagcagcttgccggagtcagtcaagggttcattatctgcacaccaaaccatctccacgtt

SEQ ID NO: 387100 - DNA, 75 bp, synthetic construct
  source 1..75: mol_type = other DNA
ggcattggcaaaagcactcgaatatggaaatccaacatttaagagcaaaggtatatttatcccggggcgtgtgaa

SEQ ID NO: 387101 - DNA, 75 bp, synthetic construct
  source 1..75: mol_type = other DNA
atggcaatcagatagaaccgtgtgcggtactggcaaaagcactcgaatatggaaatccagcctttaagagtaaag

SEQ ID NO: 387102 - DNA, 75 bp, synthetic construct
  source 1..75: mol_type = other DNA
tgacgtggctgacgacgctgaccgcacggaacaggtgcaggagaaagcgtcagtggaggaaatcagtctgccact

SEQ ID NO: 387103 - DNA, 75 bp, synthetic construct
  source 1..75: mol_type = other DNA
gtggcgctcgatgccgccctgctggaaaaactccgggctgttgcagagtcccttcgggaagcagaaggctgggaa

SEQ ID NO: 387104 - DNA, 75 bp, synthetic construct
  source 1..75: mol_type = other DNA
taaaggtgtcggtctgctgcagaatctggttgttcatgccctgcctggtgaccgttacggtgtcgccgcaggtgg

SEQ ID NO: 387105 - DNA, 75 bp, synthetic construct
  source 1..75: mol_type = other DNA
agcgtcagtggaggaaatcagtctgccgctgctgacgaaaatgtcttccgaacgcacgctggcagtccaggcagc

SEQ ID NO: 387106 - DNA, 75 bp, synthetic construct
  source 1..75: mol_type = other DNA
cagtctgccggagccggaagcggtgctgacggaggcagaagaagaacgcctgaacgaactgatggcacgttacga

SEQ ID NO: 387107 - DNA, 75 bp, synthetic construct
  source 1..75: mol_type = other DNA
atatgaaagacaaccgctgggctccaggctggatgtgtgcaccacatccacagacagatgccactgaacgcaccg

SEQ ID NO: 387108 - DNA, 75 bp, synthetic construct
  source 1..75: mol_type = other DNA
gattacgggtattcagacgatatcccgttctgactggcctgactgtgataaccgccccgccctgcgcggggcatc

SEQ ID NO: 387109 - DNA, 75 bp, synthetic construct
  source 1..75: mol_type = other DNA
gggggagatgcgggagcagacggaatggcatcgcgtggtgctgttcggcaagctcgcggaggtggctggtgaata

SEQ ID NO: 387110 - DNA, 75 bp, synthetic construct
  source 1..75: mol_type = other DNA
aggtggccacgtcagaaagctggcgcgacaaacagacgggggagatgcgggagcagacggaatggcatcgcgtgg

SEQ ID NO: 387111 - DNA, 75 bp, synthetic construct
  source 1..75: mol_type = other DNA
gccgaaggctgggaatggtgcgccgggcgcatggagcctgtcggtgagtgccgtgaggatgccggaacataccgc

SEQ ID NO: 387112 - DNA, 75 bp, synthetic construct
  source 1..75: mol_type = other DNA
tgcagagttccacatgaaagacaaccgctgggtgcctggctggatgtgtacaccatgtccacaggcagagacgga

SEQ ID NO: 387113 - DNA, 75 bp, synthetic construct
  source 1..75: mol_type = other DNA
gagcaggtctacatcgaaggccagcttcgcacccgtagctgggaggataacggtatcacccgttacgtcaccgaa

SEQ ID NO: 387114 - DNA, 75 bp, synthetic construct
  source 1..75: mol_type = other DNA
cgtacggtgccgtattctgcggagtccgtcagcgaactggcagagtccattaagggcgtaggcctgttgcagaat

SEQ ID NO: 387115 - DNA, 75 bp, synthetic construct
  source 1..75: mol_type = other DNA
gcaagggaggccggtcatgttgtccgtgagatggagcggtggatggtgccgaacaaactccgggaggtggcgtga

SEQ ID NO: 387116 - DNA, 75 bp, synthetic construct
  source 1..75: mol_type = other DNA
cggccctgttaccggagggatggtcacgggacatgacgacgttcctgtcactcagtcaggaggtgctgttatccc

SEQ ID NO: 387117 - DNA, 75 bp, synthetic construct
  source 1..75: mol_type = other DNA
acgacgttcctgtcactcagtcaggaggtgctgttatccctgctcagtttctgcaccgcatgcagccttaacggt

SEQ ID NO: 387118 - DNA, 75 bp, synthetic construct
  source 1..75: mol_type = other DNA
ataatattgaagcggtgacgggtagtgactccaacttactgatagtgttttatgttcagataatgcccgatgacc

SEQ ID NO: 387119 - DNA, 75 bp, synthetic construct
  source 1..75: mol_type = other DNA
ggggtatatatcggcggcctgcgcaataatattgaagcggtgacgaaactgcttaaattaccgcagcatgttctg

SEQ ID NO: 387120 - DNA, 75 bp, synthetic construct
  source 1..75: mol_type = other DNA
ccgggttgcgtattttcatgaaaggagatcactcaataacttccatcgagatcgggtaataacatttgaacagat

SEQ ID NO: 387121 - DNA, 75 bp, synthetic construct
  source 1..75: mol_type = other DNA
tgcggtttcgtgtcagggaacgcagtcgccataaatccgcgctggtcatgcagaagtacagccgccagcaggcac

SEQ ID NO: 387122 - DNA, 75 bp, synthetic construct
  source 1..75: mol_type = other DNA
ttgccgaggctggtatggcggcaagggaggccggtcacgctgtccgtgagatggaacggtggatggtgccgaaca

SEQ ID NO: 387123 - DNA, 75 bp, synthetic construct
  source 1..75: mol_type = other DNA
accgggtggcagagcatgacctggaaaccctgttctggcagtggggcgagcgttttccgtcactggccggaatgg

SEQ ID NO: 387124 - DNA, 75 bp, synthetic construct
  source 1..75: mol_type = other DNA
ataccctgccaggtgaccgttacggtgtcgccgcaggtggtcgccgactggcagcactcaacatgctggcagagc

SEQ ID NO: 387125 - DNA, 75 bp, synthetic construct
  source 1..75: mol_type = other DNA
cgcggaagccagtatggcggcaagggaggccggtcatgctgtccgtgagatggagcggtggatggtgccgaacaa

SEQ ID NO: 387126 - DNA, 75 bp, synthetic construct
  source 1..75: mol_type = other DNA
attctggcaggtcatcacagaggctggtatggcggcaagggaggccagtcatgctgtccgtgagatggagcggtg

SEQ ID NO: 387127 - DNA, 75 bp, synthetic construct
  source 1..75: mol_type = other DNA
gcactgatccccctcagcgcagaacaacaggccgccatgcaggctgtggctgtcaccgaacaacgtcgtcgtcag

SEQ ID NO: 387128 - DNA, 75 bp, synthetic construct
  source 1..75: mol_type = other DNA
tccccctcagcgcagaacaacaggccgccatgcaggctgtggctgtcacagaacaacgtcgtcttcacggacgca

SEQ ID NO: 387129 - DNA, 75 bp, synthetic construct
  source 1..75: mol_type = other DNA
acagagcaacaggccgcatggcgggcggtggcggagacggaaaaacgccgccatcagggtaacacgctggcggaa

SEQ ID NO: 387130 - DNA, 75 bp, synthetic construct
  source 1..75: mol_type = other DNA
tactgttatccctgctcagtttctgcaccgcgtgcagcatccacggcgttcagacccgcgagtgtggtcacacgt

SEQ ID NO: 387131 - DNA, 75 bp, synthetic construct
  source 1..75: mol_type = other DNA
gaaaggggatgctgccagccatgctgaacagtggctatcaggtacgcgctgggttcctggatggatgcggtcacc

SEQ ID NO: 387132 - DNA, 75 bp, synthetic construct
  source 1..75: mol_type = other DNA
agaaactggagtccgccgcgctggcaatcgaactgcaggaaggatggtcatggtcgctggcacgggagggtgcag

SEQ ID NO: 387133 - DNA, 75 bp, synthetic construct
  source 1..75: mol_type = other DNA
cggaagtgcagaccattcgtcgtctggtgaccgaaagtgaagtggcggtggcggggaacagtaaattccgcttcg

SEQ ID NO: 387134 - DNA, 75 bp, synthetic construct
  source 1..75: mol_type = other DNA
cgacgcactggaaaaccagtgtgaggaatccgacctgctggaagcagaaatgaagctgatgcgctgcatggcgaa

SEQ ID NO: 387135 - DNA, 75 bp, synthetic construct
  source 1..75: mol_type = other DNA
cacatgtcacgcagtccgctggattcgctggagagcgccatcggttttcacatgcgcgactggtggcagccgaca

SEQ ID NO: 387136 - DNA, 75 bp, synthetic construct
  source 1..75: mol_type = other DNA
tgctgattgaaacccagggcgaggtctgcctccttccccttcccggcgatgctgcagagcggttgtttccgtcgg

SEQ ID NO: 387137 - DNA, 75 bp, synthetic construct
  source 1..75: mol_type = other DNA
cgtgccgctggcctcactgattaaatcaccgctgaatgtgcgcacggtgccgtattctgcggagtccgtcagcga

SEQ ID NO: 387138 - DNA, 75 bp, synthetic construct
  source 1..75: mol_type = other DNA
cattccgcaggaactggcgactgccgcatcgatgactgaaaacggtcatcgtcgggatatgcaccctgccgaaca

SEQ ID NO: 387139 - DNA, 75 bp, synthetic construct
  source 1..75: mol_type = other DNA
cggtattacccgttacgtcactgaaatccttgtgaaaaccacgggcaccatgcagatgctgaggagtgcatgtca

SEQ ID NO: 387140 - DNA, 75 bp, synthetic construct
  source 1..75: mol_type = other DNA
atcaatccgggcgtggacacaggagcagaaagcggcctgtggcgtggtggtcagcctgtatgacggtgagcttta

SEQ ID NO: 387141 - DNA, 75 bp, synthetic construct
  source 1..75: mol_type = other DNA
tcgccgactggcagcactcaacatgctggcagagcgtgacatcattcaggttgactggcctgtccgtgtgaaggt

SEQ ID NO: 387142 - DNA, 75 bp, synthetic construct
  source 1..75: mol_type = other DNA
ccgccacgttcagcgaatgctgaaactggcggaccttgccccagtgatcctcgatgcgctggcagaagaccacat

SEQ ID NO: 387143 - DNA, 75 bp, synthetic construct
  source 1..75: mol_type = other DNA
ccgccacgttcagcgaatgctgaaactggcggaccttgccccagtgatcctagatgcgctggcagaagaccccat

SEQ ID NO: 387144 - DNA, 75 bp, synthetic construct
  source 1..75: mol_type = other DNA
acgatattctgaacgccgccgaggcgggcaatccgctaaccatcagcggcagcagcaccgccgaagcggggcaga

SEQ ID NO: 387145 - DNA, 75 bp, synthetic construct
  source 1..75: mol_type = other DNA
tggtgcgccggacgcatggagcctgtcggtgaatgccgtgaagatgcccgggcataccgcaacctgccggagccg

SEQ ID NO: 387146 - DNA, 75 bp, synthetic construct
  source 1..75: mol_type = other DNA
ggcgatacggtcaccgtgacgcttggcggcaacacttatactgcacaagttcaggccgatttaagctggagcttc

SEQ ID NO: 387147 - DNA, 75 bp, synthetic construct
  source 1..75: mol_type = other DNA
tgctgttcggcaagctcgcggaagtggccggtgaatatctgcacaagggcgagcaggtctacatcgaggggcaac

SEQ ID NO: 387148 - DNA, 75 bp, synthetic construct
  source 1..75: mol_type = other DNA
gaaaggccgtggacgtaaggccgcgcagccagagcctcagccgcaaccgccggagggggaggattacgggttttc

SEQ ID NO: 387149 - DNA, 75 bp, synthetic construct
  source 1..75: mol_type = other DNA
aacttcttcggacaccttaaaaagctgcagattatcgacgccctgaatgacgccggactgtccggtgccgcacgg

SEQ ID NO: 387150 - DNA, 75 bp, synthetic construct
  source 1..75: mol_type = other DNA
ccgccacgttcagcgaatgctgaaactggcagaccttgccccagtgatcctggatgcgctggcagaagaccgcat

SEQ ID NO: 387151 - DNA, 75 bp, synthetic construct
  source 1..75: mol_type = other DNA
atgagcgcacgttcacgggcactggttcccctcagcacagagcaacaggccgcatggcgggcggtggcggagaca

SEQ ID NO: 387152 - DNA, 75 bp, synthetic construct
  source 1..75: mol_type = other DNA
gaagcggtgctgacggaggcagaagaagaacgcctgaacgaactgatggcacgttacgatgcgctggaaaaccag

SEQ ID NO: 387153 - DNA, 75 bp, synthetic construct
  source 1..75: mol_type = other DNA
cattccgcaggagctggcgacagctgcatcaatgactgaaaacggtcatcgtcgggatatgcaccctgccgaaca

SEQ ID NO: 387154 - DNA, 75 bp, synthetic construct
  source 1..75: mol_type = other DNA
tattccgcaggagctggcgacagccgcatcaatgactgaaaacggtcatcgtcgggatatgcaccctgccgaaca

SEQ ID NO: 387155 - DNA, 75 bp, synthetic construct
  source 1..75: mol_type = other DNA
tcgccacaaatccgcactggtcatgcaaaagtacagccgccagcaggcgagggaggcagagcagaaagcccgtgc

SEQ ID NO: 387156 - DNA, 75 bp, synthetic construct
  source 1..75: mol_type = other DNA
ccagacgaactgcgcaccgatttgttcagcgatgacggggacggttatgtcgaccgcgtggcgctcgatgctgcc

SEQ ID NO: 387157 - DNA, 75 bp, synthetic construct
  source 1..75: mol_type = other DNA
gattccgcaggagctggcgactgccgcatcaatgactgaaaacggtcatcgtcgggatatgcaccctgccgaaca

SEQ ID NO: 387158 - DNA, 75 bp, synthetic construct
  source 1..75: mol_type = other DNA
cattccgcaggagctggcgactgcggcatcaatgactgaaaacggtcatcgtcgggatatgcaccctgccgaaca

SEQ ID NO: 387159 - DNA, 75 bp, synthetic construct
  source 1..75: mol_type = other DNA
atggagcggtggatggtcgggaggcggcgtgaagtggcgttactcactgcgctggaaactgccttatccctgtcc

SEQ ID NO: 387160 - DNA, 75 bp, synthetic construct
  source 1..75: mol_type = other DNA
tcgccgactggcagtactcaacatgctggcagagcgcaacatccttccggctgactggcctgtacgcgtgaaggt

SEQ ID NO: 387161 - DNA, 75 bp, synthetic construct
  source 1..75: mol_type = other DNA
tggtgtcctggcgttatggaaacgtatgtgtccagcgtggtgtgcagttacgcagtgaggatgatgtggctgacg

SEQ ID NO: 387162 - DNA, 75 bp, synthetic construct
  source 1..75: mol_type = other DNA
gcaacaggccgcatggcgggcggtggcggagacagaaaaacgccgccatcagggtaacacgctggcggaatatcc

SEQ ID NO: 387163 - DNA, 75 bp, synthetic construct
  source 1..75: mol_type = other DNA
gaacggaagccgcaggatatcgctgtctgacctgcgatttttcatgccgtccctgacagcagaagaactgcgcgg

SEQ ID NO: 387164 - DNA, 75 bp, synthetic construct
  source 1..75: mol_type = other DNA
ttgactcgctggagagcgctatcggattccacatgcgcgactggtggcagccgacaaaagcaaacttcttcggac

SEQ ID NO: 387165 - DNA, 75 bp, synthetic construct
  source 1..75: mol_type = other DNA
ttatccctgctcagcttctgtaccgcgtgcagtcttaacggtgtccagacccgcgagtgtggtcacacgtcacgc

SEQ ID NO: 387166 - DNA, 75 bp, synthetic construct
  source 1..75: mol_type = other DNA
acttcgataatctgccgcattgcatgacggtaaacgaagctctggatatggtcctatctacaagaaaagaaaagg

SEQ ID NO: 387167 - DNA, 75 bp, synthetic construct
  source 1..75: mol_type = other DNA
gaaaggtgctgcgcgtcgtaaaatgatcgttgccttcatcctgatgctcgaagccattatcttcttcgtgcttta

SEQ ID NO: 387168 - DNA, 75 bp, synthetic construct
  source 1..75: mol_type = other DNA
ataagtgcgctaacgtctatcgtcacggctccgtcgtgtactgggcggatgagtggaaggcgaaagaagacgaat

SEQ ID NO: 387169 - DNA, 75 bp, synthetic construct
  source 1..75: mol_type = other DNA
aagattacaaggcaacagaatcagagcttgaaacgcatctgaataagtctcctgttccgccgcagatacgtcgaa

SEQ ID NO: 387170 - DNA, 75 bp, synthetic construct
  source 1..75: mol_type = other DNA
cggttacgatccatctggagtcagggaaggcgtaaagtctatcctaaaacgcttagcgcggattaaagcgggggg

SEQ ID NO: 387171 - DNA, 75 bp, synthetic construct
  source 1..75: mol_type = other DNA
gacggtaaacgaagctctgaatatggtcctatctacacgaaaagaaaaggaattttatattcctacaggttttcg

SEQ ID NO: 387172 - DNA, 75 bp, synthetic construct
  source 1..75: mol_type = other DNA
acgcaggaaactgcactgtctgccctgctggcgcagacggcggaagtgagcgtgccgctggcctcactgattaaa

SEQ ID NO: 387173 - DNA, 75 bp, synthetic construct
  source 1..75: mol_type = other DNA
tgcagatgctggtacgtgccgtaggtgctcagactcagccggaagaggggcaacagttcagcggtcagcctcagc

SEQ ID NO: 387174 - DNA, 75 bp, synthetic construct
  source 1..75: mol_type = other DNA
ctgtctgccctgctggcgcagacggaggaagtgagcgtgccgctggattcactgattaaatcaccgctgaatgtg

SEQ ID NO: 387175 - DNA, 75 bp, synthetic construct
  source 1..75: mol_type = other DNA
ggccacgtcagaaagctggcgtgacaaacagacgggggagatacgggagcagacagaatggcatcgcgtggtgct

SEQ ID NO: 387176 - DNA, 75 bp, synthetic construct
  source 1..75: mol_type = other DNA
tggggcggtaaaccggaagtgcagaccattcgtcgtctggtgaccgaaagtgaagtggcggtggcagggaacagt

SEQ ID NO: 387177 - DNA, 75 bp, synthetic construct
  source 1..75: mol_type = other DNA
ttgcgcctgtcatcctcgatgcgctggcagaagaccgcatcaccaccgaacactgtcaggcgctggcgctggaga

SEQ ID NO: 387178 - DNA, 75 bp, synthetic construct
  source 1..75: mol_type = other DNA
tccggtgccgcacgggacgcggagaagatgaataaaggggacgcggctgaacatgcagagcaccacatgaaagac

SEQ ID NO: 387179 - DNA, 75 bp, synthetic construct
  source 1..75: mol_type = other DNA
tcaccgaaagtgaagtggcggtggcagggaacagtaaattccgcttcgtgggggctgatgccttctcgccagagg

SEQ ID NO: 387180 - DNA, 75 bp, synthetic construct
  source 1..75: mol_type = other DNA
ttaccgaaagtgaagtggcggtggccgggaacagtaaattccgcttcgtgggggctgatgccttctcgccagatg

SEQ ID NO: 387181 - DNA, 75 bp, synthetic construct
  source 1..75: mol_type = other DNA
ttaccgaaagtgaagtggcggtggctgggaacagtaaattccgcttcgtgggggctgatgccttctcgccagacg

SEQ ID NO: 387182 - DNA, 75 bp, synthetic construct
  source 1..75: mol_type = other DNA
tgaccgaaagtgaagtggcggtggcagggaacagtaaattccgcttcgtgggggctgatgccttctcgccagacg

SEQ ID NO: 387183 - DNA, 75 bp, synthetic construct
  source 1..75: mol_type = other DNA
tcaccgaaagtgaagtggcggtggcggggaacagtaaattccgcttcgtgggggctgatgccttctcgccagaag

SEQ ID NO: 387184 - DNA, 75 bp, synthetic construct
  source 1..75: mol_type = other DNA
tcaccgaaagtgaagtggcggtggctgggaacagtaaattccgcttcgtgggggctgatgccttctcgccagatg

SEQ ID NO: 387185 - DNA, 75 bp, synthetic construct
  source 1..75: mol_type = other DNA
tatctttcggttattccggcggcagatgtcattgctgctgtcgataaattactgccctcctccacgacaggtacg

SEQ ID NO: 387186 - DNA, 75 bp, synthetic construct
  source 1..75: mol_type = other DNA
ccgaacaatcattaaagaaagccactgtagattcaattggtcaacgcaacagttatgtgaaaacatggggttgcg

SEQ ID NO: 387187 - DNA, 75 bp, synthetic construct
  source 1..75: mol_type = other DNA
gggcttttgaccaggtctgacagagaggtgcagggtgaaaattgccatattgtcccgggatggaacgctctattc

SEQ ID NO: 387188 - DNA, 75 bp, synthetic construct
  source 1..75: mol_type = other DNA
taaccgaaagtgaagtggcggtggcggggaacagtaaattccgcttcgtgggggctgatgccttctcgccagacg

SEQ ID NO: 387189 - DNA, 75 bp, synthetic construct
  source 1..75: mol_type = other DNA
taaccgaaagtgaagtggcggtggccgggaacagtaaattccgcttcgtgggggctgatgccttctcgccagagg

SEQ ID NO: 387190 - DNA, 75 bp, synthetic construct
  source 1..75: mol_type = other DNA
atgcctgtaacgaagtgtgaaccagaaaccacccgcaaagcaagccttaaatctgtaaaaacgcaggaaacagtc

SEQ ID NO: 387191 - DNA, 75 bp, synthetic construct
  source 1..75: mol_type = other DNA
tgaccgaaagtgaagtggcggtggccgggaacagtaaattccgcttcgtgggggctgatgccttctcgccagaag

SEQ ID NO: 387192 - DNA, 75 bp, synthetic construct
  source 1..75: mol_type = other DNA
gccggagggatggtcacgggacatgacgacgttcctgtcactcagccaggaggtactgttgtccctgctcagctt

SEQ ID NO: 387193 - DNA, 75 bp, synthetic construct
  source 1..75: mol_type = other DNA
gccgtggacgtaaggcagcgcagccggagcctcagccgcaaccgccggagggtgacgattacgggttttcagatg

SEQ ID NO: 387194 - DNA, 75 bp, synthetic construct
  source 1..75: mol_type = other DNA
atgactgaactgtatcgccacctgggcgcggataccgacgttccggcaggtgatatcggcgttggtggtcgtgaa

SEQ ID NO: 387195 - DNA, 75 bp, synthetic construct
  source 1..75: mol_type = other DNA
caggaaggcaaaacacctgcgcagactggcgacctgctgggctattcaccccgccacgttcagcgaatgctgaaa

SEQ ID NO: 387196 - DNA, 75 bp, synthetic construct
  source 1..75: mol_type = other DNA
acagtcggaagctggcatgcacgctggagtgaccgggtggcagagcatgacctggaaaccctgttctggcagtgg

SEQ ID NO: 387197 - DNA, 75 bp, synthetic construct
  source 1..75: mol_type = other DNA
acgctgaccgcacggaacaggtgcaggaaaaagcgtcagtggaggaaatcagtctgccgctgctgacgaaaatgt

SEQ ID NO: 387198 - DNA, 75 bp, synthetic construct
  source 1..75: mol_type = other DNA
ttgttcccgtcagtgcggttccgtgtcagggaacgcagtcgccataaatccgcactggtcatgcagaagtacagc

SEQ ID NO: 387199 - DNA, 75 bp, synthetic construct
  source 1..75: mol_type = other DNA
tcgctgaccagcgatgcgccatcggggaaggacggtgccgcattcctggcgctgatggcagaaaaagcccgtctt

SEQ ID NO: 387200 - DNA, 75 bp, synthetic construct
  source 1..75: mol_type = other DNA
cggaagtgagcgtgccgctggcctcactgattaaatcaccgctgaatgtgcgcacggtgccgtattctgcggagt

SEQ ID NO: 387201 - DNA, 75 bp, synthetic construct
  source 1..75: mol_type = other DNA
aacgggggcgcagtggcaaacctgcaggtggccacatcagaaagctggcgtgacaaacagacgggggagatgcgg

SEQ ID NO: 387202 - DNA, 75 bp, synthetic construct
  source 1..75: mol_type = other DNA
atgccctgctaggtgaccgttacggtgtcgccgcaggctgcactcaacatgctggcagagcgcaacatccttccg

SEQ ID NO: 387203 - DNA, 75 bp, synthetic construct
  source 1..75: mol_type = other DNA
tataaggggatgattatgcctgtaacgaagtgtgaaccagaaaccacccgcaaagcaagccgtaaatctgcaaaa

SEQ ID NO: 387204 - DNA, 75 bp, synthetic construct
  source 1..75: mol_type = other DNA
atccgcgctggtcatgcagaagtacagccgccagcaggcgagggaggcagagcagaaagcccgtgcgtaccaggc

SEQ ID NO: 387205 - DNA, 75 bp, synthetic construct
  source 1..75: mol_type = other DNA
ataaacgtaatcaccaatagttgcattaagttactaactaggccgaaatcagttaacatatcggtagaagaagct

SEQ ID NO: 387206 - DNA, 75 bp, synthetic construct
  source 1..75: mol_type = other DNA
cgcacggtgccgtattctgcggagtccgtcagcgaactggcggagtccattaagggcgtcggactgctgcagaat

SEQ ID NO: 387207 - DNA, 75 bp, synthetic construct
  source 1..75: mol_type = other DNA
aaatgcattcagtcttatatcagtactggttggagacatggctatatagtctgtcaatattcaaaaaatggacgg

SEQ ID NO: 387208 - DNA, 75 bp, synthetic construct
  source 1..75: mol_type = other DNA
cggaaacagtcggaagctggcatgcacgctggagtgatcgggtggcagagcatgacctggaaaccctgttctggc

SEQ ID NO: 387209 - DNA, 75 bp, synthetic construct
  source 1..75: mol_type = other DNA
aaggccgcgcagccggagcctcagctgcaaccgccggagggtgacgattacgggttttcagacgatatcccgttc

SEQ ID NO: 387210 - DNA, 75 bp, synthetic construct
  source 1..75: mol_type = other DNA
atggcagttcgtggcattaacaaggtcatcctcgcaggacgcctgggaaaggatccggaagtccgttacatcccc

SEQ ID NO: 387211 - DNA, 75 bp, synthetic construct
  source 1..75: mol_type = other DNA
ctggccgccttggtaaaggttttgttggagaaacttttgataacgcaggctggaatattactttccttgataaag

SEQ ID NO: 387212 - DNA, 75 bp, synthetic construct
  source 1..75: mol_type = other DNA
ggttaaataacccactcctcccagtttattccttgacggctgcggagatagcgctggccggtttaaaacctacca

SEQ ID NO: 387213 - DNA, 75 bp, synthetic construct
  source 1..75: mol_type = other DNA
agcaacaagtattgttgctgacccttaaccgtcccgccgcacgtaatgcgctaaataatgcccttctgacgcaac

SEQ ID NO: 387214 - DNA, 75 bp, synthetic construct
  source 1..75: mol_type = other DNA
cgatgacggggacggttatgtcgaccgcgtggcgctcgatgccgccctgctggaaaaactccaggctgtcgccga

SEQ ID NO: 387215 - DNA, 75 bp, synthetic construct
  source 1..75: mol_type = other DNA
aaaaagtgatcttaattttattcgagcactagaggattatacggcttatagatccagaaaagattttaaagttat

SEQ ID NO: 387216 - DNA, 75 bp, synthetic construct
  source 1..75: mol_type = other DNA
ggccggaatggaacgctggcagtggcaggatatgccattctggcaggtcatcgcagaggctggtatggcagcaag

SEQ ID NO: 387217 - DNA, 75 bp, synthetic construct
  source 1..75: mol_type = other DNA
ggggctgatgccttctcgccagatgaactgcgcactgacttgttcagcgacgacgagggtggctatgtggactgc

SEQ ID NO: 387218 - DNA, 75 bp, synthetic construct
  source 1..75: mol_type = other DNA
ccgtggcgggcgatgatgtgattaacaacgtcgaacacactcaggcgcagattatcagcggcaccgccacgggcg

SEQ ID NO: 387219 - DNA, 75 bp, synthetic construct
  source 1..75: mol_type = other DNA
ctgccctgttaccggagggatgggcatgggatatgacgacgttcctgtcactcagccaggagttgctgttatccc

SEQ ID NO: 387220 - DNA, 75 bp, synthetic construct
  source 1..75: mol_type = other DNA
tcaaccaggggaatgggacgtttgtctgggggcagaacaccattaacaccttcctcagcacggcgggcagcggtg

SEQ ID NO: 387221 - DNA, 75 bp, synthetic construct
  source 1..75: mol_type = other DNA
gcagttcgacgaatacgatacggtgtgcgaggaaagtgaagcactggaagcggaaatgatggcaattgaatgcgc

SEQ ID NO: 387222 - DNA, 75 bp, synthetic construct
  source 1..75: mol_type = other DNA
aagttgcccgtaaggccaccgccaaatccgcagcccccaaagcggcagccgcactgaaagccgcgctggatgcag

SEQ ID NO: 387223 - DNA, 75 bp, synthetic construct
  source 1..75: mol_type = other DNA
caggcgctggcgctggagaacgacaccgcgcgtcaggtgcaggtgtttgaagccgcctgccagtcgggatggggc

SEQ ID NO: 387224 - DNA, 75 bp, synthetic construct
  source 1..75: mol_type = other DNA
tccgcttcgtgggggctgatgctttctcacctgacgaactgcgcaccgatttgttcagcgacgacgagggtggct

SEQ ID NO: 387225 - DNA, 75 bp, synthetic construct
  source 1..75: mol_type = other DNA
acgctggagtgaccgggtggcagagcatgacctggaaaccctgttctggcagtggggcgagcgtttcccgtcact

SEQ ID NO: 387226 - DNA, 75 bp, synthetic construct
  source 1..75: mol_type = other DNA
cgcagcgaggatgatgcggctgacgacgctgaccgcacggaacaggtgccggataaagcggctgtggaggaaatc

SEQ ID NO: 387227 - DNA, 75 bp, synthetic construct
  source 1..75: mol_type = other DNA
cgcagcgaggatgatgcggctgacgacgctgaccgcacggaacaggtgctggacaaagcggctgtggaggaaatc

SEQ ID NO: 387228 - DNA, 75 bp, synthetic construct
  source 1..75: mol_type = other DNA
cgcagcgaggatgatgcggctgacgacgctgaccgcacggaacaggtgcaggaaaaagcggcagtggaggaaatc

SEQ ID NO: 387229 - DNA, 75 bp, synthetic construct
  source 1..75: mol_type = other DNA
aacgggggcgcagtggcaaacctgcaggtggctacgtcagaaagctggcgcgacaaacagacgggggagatgcgg

SEQ ID NO: 387230 - DNA, 75 bp, synthetic construct
  source 1..75: mol_type = other DNA
gagcctgttgctgattatgttcgtcactcctggacgccccgttaccgctcatgaagaaatccatcaccactcttg

SEQ ID NO: 387231 - DNA, 75 bp, synthetic construct
  source 1..75: mol_type = other DNA
caggggctgggcgcgggctgttgttacgtggtggcgttcgccattttacgcgacacactggacgatcgacgtcgg

SEQ ID NO: 387232 - DNA, 75 bp, synthetic construct
  source 1..75: mol_type = other DNA
tttattttaaaagaaacgcgccctgcggcccccgcagcttcggacaaaccacgagaaaatagcgagtcgctgctt

SEQ ID NO: 387233 - DNA, 75 bp, synthetic construct
  source 1..75: mol_type = other DNA
ctggtctgggtgtttcaattttgcctgcgtcatttaaacgtgttcagctcaacgaaatgcgctgggtgccgattg

SEQ ID NO: 387234 - DNA, 75 bp, synthetic construct
  source 1..75: mol_type = other DNA
agcggtggagcatcttcgcgcactggagaaaaaaggcgtcatcacgataaagcgtggcgtggcccgggggatcac

SEQ ID NO: 387235 - DNA, 75 bp, synthetic construct
  source 1..75: mol_type = other DNA
cgacacgctggacgatcgacgtcgggcaaaagtgctgtcattactcaacggtattacctgcatcattccggtgtt

SEQ ID NO: 387236 - DNA, 75 bp, synthetic construct
  source 1..75: mol_type = other DNA
tatctttctgttatccccgcggaagatgttatcgccgctacggaaaagctgctgccagaagatgccccttcagtt

SEQ ID NO: 387237 - DNA, 75 bp, synthetic construct
  source 1..75: mol_type = other DNA
gtggtatctgtcagggaattacgtgggggcttaatgacgacgttaactcaatgccagcagcaggtgctggatatg

SEQ ID NO: 387238 - DNA, 75 bp, synthetic construct
  source 1..75: mol_type = other DNA
agcgtgaccagcccggatgacagtctgcgtcaggctaccgacagcgccctgcgtggggttatcggtaaatacacc

SEQ ID NO: 387239 - DNA, 75 bp, synthetic construct
  source 1..75: mol_type = other DNA
atggcagctgcgatgttatttgccggtaaagtggccgatcgttcagggagaaagccggtcgccatccccggcgcg

SEQ ID NO: 387240 - DNA, 75 bp, synthetic construct
  source 1..75: mol_type = other DNA
gcgcactgcttgccggtgaggaaaacggcaggctgcgtgcagcccactggttacatgagaggggcctgaaagtat

SEQ ID NO: 387241 - DNA, 75 bp, synthetic construct
  source 1..75: mol_type = other DNA
acacggtttcctgaactgggtgcgttaattgatcatgccgtactctttattggtgtggattctgcgccagggcat

SEQ ID NO: 387242 - DNA, 75 bp, synthetic construct
  source 1..75: mol_type = other DNA
aaggcactgaacaaccacgctctctggcggcggctttctatgaacccattaatggcaccctccagttagatgtgg

SEQ ID NO: 387243 - DNA, 75 bp, synthetic construct
  source 1..75: mol_type = other DNA
gagtactggtattatcgtctgagtgttttacttcttattattctggtttgttttaccatgggagtaatgatagga

SEQ ID NO: 387244 - DNA, 75 bp, synthetic construct
  source 1..75: mol_type = other DNA
gagcagacggaatggcaccgcgtggtgctgttcggcaagctcgcggaagtggctggtgaatatctgcgcaagggc

SEQ ID NO: 387245 - DNA, 75 bp, synthetic construct
  source 1..75: mol_type = other DNA
tgactgggaagcccagtaccagtgcaccattgaacatattcagaagatgcggaatatgtacggggatgtgacgga

SEQ ID NO: 387246 - DNA, 75 bp, synthetic construct
  source 1..75: mol_type = other DNA
tggtgatacggcggtggttatggacgcaaacatcaatacttttgcattcatctatcagctgccaggtggggcgct

SEQ ID NO: 387247 - DNA, 75 bp, synthetic construct
  source 1..75: mol_type = other DNA
ccacgaattatgagtatgccagaagccattaaaatgactggtggtctttaccgggattctcttgctgataatcct

SEQ ID NO: 387248 - DNA, 75 bp, synthetic construct
  source 1..75: mol_type = other DNA
gttaagcaactgactggttatgaatatgaccagtgcttcggtaataacaatgttggctttaaatttgaaaacaaa

SEQ ID NO: 387249 - DNA, 75 bp, synthetic construct
  source 1..75: mol_type = other DNA
ggctcattattggcatcactatctggtttggtctggggacgggggggggtatattacattccgtggagtgtatat

SEQ ID NO: 387250 - DNA, 75 bp, synthetic construct
  source 1..75: mol_type = other DNA
tatatggcaagtaaattgacaactgaaaatggttacagacaaatgttaccaaatcgagatattggaaaagaaatt

SEQ ID NO: 387251 - DNA, 75 bp, synthetic construct
  source 1..75: mol_type = other DNA
aagaagtccgggccggcgcattgcagtcctcgctgtccattctgttacatacccattatgcaatccgcctgtggg

SEQ ID NO: 387252 - DNA, 75 bp, synthetic construct
  source 1..75: mol_type = other DNA
cttcagtggctgtatgccatcgatgtgctgattgaaacacagggcgaggtctgcctccttccacttcctggggat

SEQ ID NO: 387253 - DNA, 75 bp, synthetic construct
  source 1..75: mol_type = other DNA
cttcagtggttgtatgccatcgatgtgctgattgaaacacagggcgaggtctgcctccttcctcttcctggcgat

SEQ ID NO: 387254 - DNA, 75 bp, synthetic construct
  source 1..75: mol_type = other DNA
cttcagtggatgtatgccatcgatgtgctgattgaaacacagggcgaggtctgcctccttccccttcctggggat

SEQ ID NO: 387255 - DNA, 75 bp, synthetic construct
  source 1..75: mol_type = other DNA
tgacaaacagactggggagatgcgggagcagacagaatggcagcgcgtggtgctgttcggcaagctcgcggaagt

SEQ ID NO: 387256 - DNA, 75 bp, synthetic construct
  source 1..75: mol_type = other DNA
tgacaaacagacaggggagatgcgggagcagactgaatggcaacgcgtggtgctgttcggcaagctcgcggaagt

SEQ ID NO: 387257 - DNA, 75 bp, synthetic construct
  source 1..75: mol_type = other DNA
cttcagtgggtgtatgccatcgatgtgctgattgaaacacagggcgaggtctgcctccttccgcttcctggagat

SEQ ID NO: 387258 - DNA, 75 bp, synthetic construct
  source 1..75: mol_type = other DNA
cctggctggatgtgtgcaccgcatccacagacagatgccactgaacgcaccggtaacctggctgatgccgcctga

SEQ ID NO: 387259 - DNA, 75 bp, synthetic construct
  source 1..75: mol_type = other DNA
acgggacatgacgacgttcctgtcactcagccaggaggtgctgttgtccctgctcagtttctgcactgcatgcag

SEQ ID NO: 387260 - DNA, 75 bp, synthetic construct
  source 1..75: mol_type = other DNA
ggcagtccaggcagcactgatgcagcaaccggacaaatccctgacactgctggcatggacgctctgcctgaatgt

SEQ ID NO: 387261 - DNA, 75 bp, synthetic construct
  source 1..75: mol_type = other DNA
gtggctgtatgccatcgatgtgctgattgaaacacagggcgaggtctgcctccttccccttcccggtgatgcagc

SEQ ID NO: 387262 - DNA, 75 bp, synthetic construct
  source 1..75: mol_type = other DNA
gcaggtctacatcgaaggtcagcttcgcacccgtagctgggaggataacggtatcacccgttacgtcaccgaaat

SEQ ID NO: 387263 - DNA, 75 bp, synthetic construct
  source 1..75: mol_type = other DNA
ttatccgcaacctgattaccgaaagtgaagtggcggtggcggggaacagtaaattccgcttcgtgggggctgatg

SEQ ID NO: 387264 - DNA, 75 bp, synthetic construct
  source 1..75: mol_type = other DNA
tgacaaacagactggggagatgcgggagcagacggaatggcaacgcgtggtgctgttcggcaagctcgcggaagt

SEQ ID NO: 387265 - DNA, 75 bp, synthetic construct
  source 1..75: mol_type = other DNA
tgcagatgttggggagtgcaccacagcagaacgctcaggcgcaaccgcagcctcagcagaatggtcagccacaga

SEQ ID NO: 387266 - DNA, 75 bp, synthetic construct
  source 1..75: mol_type = other DNA
gtggcgtgaaaacgaaaggccgtggacgtaaggccgcgcagcccgagcctcagccgcaaccgccggagggggagg

SEQ ID NO: 387267 - DNA, 75 bp, synthetic construct
  source 1..75: mol_type = other DNA
attccacatgcgcgactggtggcagccgacgaaagcaaacttcttcggacacctgaaaaagccgcagattatcgc

SEQ ID NO: 387268 - DNA, 75 bp, synthetic construct
  source 1..75: mol_type = other DNA
agcgtcagtggaggaaatcagtctgccactgctgacgaaaatgtcttccgaacgcacgctggcagtccaggcggc

SEQ ID NO: 387269 - DNA, 75 bp, synthetic construct
  source 1..75: mol_type = other DNA
ggggcagactattaccgttattttcggtggtaaaagttacaccaccacggttgccgcggataatacctgggggct

SEQ ID NO: 387270 - DNA, 75 bp, synthetic construct
  source 1..75: mol_type = other DNA
gagcagacggaatggcaccgcgtggtgctgttcggcaagctcgcggaagtggcaggtgaatatctgcgtaagggg

SEQ ID NO: 387271 - DNA, 75 bp, synthetic construct
  source 1..75: mol_type = other DNA
gagcagaccgaatggcaacgcgtggtgctgttcggcaagctcgcggaagtggcaggggaatatctgcgcaagggg

SEQ ID NO: 387272 - DNA, 75 bp, synthetic construct
  source 1..75: mol_type = other DNA
tgacaaacagacgggggagatgcgggagcagactgaatggcagcgcgtggtgctgttcggcaagctcgcggaagt

SEQ ID NO: 387273 - DNA, 75 bp, synthetic construct
  source 1..75: mol_type = other DNA
tgacaaacagaccggggagatgcgggagcagactgaatggcaccgcgtggtgctgttcggcaagctcgcggaagt

SEQ ID NO: 387274 - DNA, 75 bp, synthetic construct
  source 1..75: mol_type = other DNA
cgacgagggtggctatgtggactgcgtggcactcgatgctgcactgttggaaaaactccaggttgtcgctgaaca

SEQ ID NO: 387275 - DNA, 75 bp, synthetic construct
  source 1..75: mol_type = other DNA
cgatgacatcatcaacgccacggagaaaggcgcagatctggcgatttccggcaccagcgaccagcctgcgggcac

SEQ ID NO: 387276 - DNA, 75 bp, synthetic construct
  source 1..75: mol_type = other DNA
gagcagacggaatggcaacgcgtggtgctgttcggcaagctcgcggaagtggcaggcgaatatctgcgcaagggg

SEQ ID NO: 387277 - DNA, 75 bp, synthetic construct
  source 1..75: mol_type = other DNA
aactgcgcactgacctgttcagcgacgacgagggtggctatgtggactgcgtggcgctcgatgccgccctgctgg

SEQ ID NO: 387278 - DNA, 75 bp, synthetic construct
  source 1..75: mol_type = other DNA
aggccgtggacgtaaggccgcgcagccagagcctcagccgcaaccgccggagggggaggattacgggttttcaga

SEQ ID NO: 387279 - DNA, 75 bp, synthetic construct
  source 1..75: mol_type = other DNA
ggagaaagcctccgtggaggaaatcagtctgccactgctgacgaaaatgtcctcagagcgcacgctggcagtcta

SEQ ID NO: 387280 - DNA, 75 bp, synthetic construct
  source 1..75: mol_type = other DNA
tcgccgactggctgcactcaacatgctggcagagcgcaacatccttccggcggactggcctgtccgtgtgaaggt

SEQ ID NO: 387281 - DNA, 75 bp, synthetic construct
  source 1..75: mol_type = other DNA
agccctgaatgaggccggactgtccggtgccgcacgggacgcggagaagatgaagaaaggtgatgcggctgaaca

SEQ ID NO: 387282 - DNA, 75 bp, synthetic construct
  source 1..75: mol_type = other DNA
gtctgatggttttctgtactgcctgttccgtggatggtgtgcaaacccgcaattgtggtcacacgtcacgcagtc

SEQ ID NO: 387283 - DNA, 75 bp, synthetic construct
  source 1..75: mol_type = other DNA
actgattaaatcaccgctgaatgtgcgcacggtgccgtattccgcagagtccgtcagtgaactggctgattccat

SEQ ID NO: 387284 - DNA, 75 bp, synthetic construct
  source 1..75: mol_type = other DNA
cgactggcaggcgctgggtaacggtgagttaacggttaacgcctcggtgaccaacgccgttggcaacaccggtag

SEQ ID NO: 387285 - DNA, 75 bp, synthetic construct
  source 1..75: mol_type = other DNA
accgtgcctgcctcggcggtcagtgcgctgggcgaagcgacctacagcgtgacggcgagcgtcaccaatgctcag

SEQ ID NO: 387286 - DNA, 75 bp, synthetic construct
  source 1..75: mol_type = other DNA
cgctgggtgcctggctggatgtgtgcaccacgtccacaggcagagacggaaaccatggagtaccgtgacaaccag

SEQ ID NO: 387287 - DNA, 75 bp, synthetic construct
  source 1..75: mol_type = other DNA
ggaatgtaaacattattcgctgaccagcgatgcgccgtcagggaaggaaggtgccgcattcatggcgctgatggc

SEQ ID NO: 387288 - DNA, 75 bp, synthetic construct
  source 1..75: mol_type = other DNA
tggcaactctgccagacggcgcggcgaacgtgcaggccagcgttagcagcgcgagcggtaacagtgcctcggcga

SEQ ID NO: 387289 - DNA, 75 bp, synthetic construct
  source 1..75: mol_type = other DNA
gcggagaagatgaagaaaggcgatgcggctgaacatgcagagcaccatatgaaagacaaccgctgggtgcctggc

SEQ ID NO: 387290 - DNA, 75 bp, synthetic construct
  source 1..75: mol_type = other DNA
cggattccgcgcaatggcgcaggaaggcaaaacacctgcacaaatcggtgatttgctgggctattcaccccgcca

SEQ ID NO: 387291 - DNA, 75 bp, synthetic construct
  source 1..75: mol_type = other DNA
ccgccgaagcgggcgtggcgcaaatcatcagcgggcaggtgactggagccgccgttggcgacacggtaaccgtca

SEQ ID NO: 387292 - DNA, 75 bp, synthetic construct
  source 1..75: mol_type = other DNA
gccgctggcgatacggtcaccgtgacgctgggcgggaacacttacacagcggaggttcagcccgatttaagctgg

SEQ ID NO: 387293 - DNA, 75 bp, synthetic construct
  source 1..75: mol_type = other DNA
acctgccgccttcctcgctgtttatcatcttagcgttggtgatcattgctgcgtgggtgctgatgttaaaaggga

SEQ ID NO: 387294 - DNA, 75 bp, synthetic construct
  source 1..75: mol_type = other DNA
tgcagcaaccggacaaatccctgacactgctggcatggacgctctgcctgaatgtgtttggcagcggagcgtaca

SEQ ID NO: 387295 - DNA, 75 bp, synthetic construct
  source 1..75: mol_type = other DNA
tcatcaaagcggaaatggagctttttgctgcgcaggcaaaagacgtcgatatcattgttaccactgcgcttattc

SEQ ID NO: 387296 - DNA, 75 bp, synthetic construct
  source 1..75: mol_type = other DNA
cacctcgctgcacctgcgtatcaccgatcccaacggtattaacatctattacggcaataccgtgaagctgtacaa

SEQ ID NO: 387297 - DNA, 75 bp, synthetic construct
  source 1..75: mol_type = other DNA
catcttgacgttggcgatcattgccgcatggttgctgatgttaaaaggcattcgcaccagcctctggagacaacc

SEQ ID NO: 387298 - DNA, 75 bp, synthetic construct
  source 1..75: mol_type = other DNA
catcttagcgttggtgattattgctgcgtgggtactgatgttaaaagggattcgtgcaaaaccgtgggggcagcc

SEQ ID NO: 387299 - DNA, 75 bp, synthetic construct
  source 1..75: mol_type = other DNA
gagtctgatgcaggagaaagcccgtctggaggctctgttaccggaaggatggcagaaagatttcaccacattctt

SEQ ID NO: 387300 - DNA, 75 bp, synthetic construct
  source 1..75: mol_type = other DNA
ggttgacagcgtcacgctggtggtactttttttcgcactcatcaactgcgcctattccgtttttgccacagtgtt

SEQ ID NO: 387301 - DNA, 75 bp, synthetic construct
  source 1..75: mol_type = other DNA
tgcgccgggcgagtatatgttgattgaccatattgcgccgccaggaatgaaagccagctatttttccgcccagtc

SEQ ID NO: 387302 - DNA, 75 bp, synthetic construct
  source 1..75: mol_type = other DNA
gttttattacaagataaagcactgttgtggtttacctgctctggttttctggcttctttcgtgagcggagccttt

SEQ ID NO: 387303 - DNA, 75 bp, synthetic construct
  source 1..75: mol_type = other DNA
tgtggaactggcgtacctgcccggtaaacctgctgccgtatctggcgtgggcgctatcggtcgaccggtgggatg

SEQ ID NO: 387304 - DNA, 75 bp, synthetic construct
  source 1..75: mol_type = other DNA
cttccgggaactggagcgtgactgttcaggcgtctgcggttggtacgctcggtgaagcgacttatacggtgactg

SEQ ID NO: 387305 - DNA, 75 bp, synthetic construct
  source 1..75: mol_type = other DNA
atgaaaagtggccggaagcgacaaaacgcgccgttatccgcgatgcgtatttcatccactgtcataagggcacta

SEQ ID NO: 387306 - DNA, 75 bp, synthetic construct
  source 1..75: mol_type = other DNA
gcaagccattgccgaagccggatttaccgccactgcaagggcatgtgaggcacatccgctgctcctcgcactgga

SEQ ID NO: 387307 - DNA, 75 bp, synthetic construct
  source 1..75: mol_type = other DNA
tgtggaacccggacacctgtccggcaaatctgctgccgtggctggcgtgggcgttttcggtcgacaggtgggatg

SEQ ID NO: 387308 - DNA, 75 bp, synthetic construct
  source 1..75: mol_type = other DNA
tacgccacaaacaaggcaacagtcactgggtgaccaatgcccagttactgggcgatttcagtatcgataactacc

SEQ ID NO: 387309 - DNA, 75 bp, synthetic construct
  source 1..75: mol_type = other DNA
gaaatgtatcaggagcttgagcgtctgattaatgacgccaaaccggcaagccgtcacctgacggggctggctatc

SEQ ID NO: 387310 - DNA, 75 bp, synthetic construct
  source 1..75: mol_type = other DNA
agctaattacattgtggctaaccccagcaccctgaccggttctatcggtatcttcggcgtgatcaccaccgtaga

SEQ ID NO: 387311 - DNA, 75 bp, synthetic construct
  source 1..75: mol_type = other DNA
cgtgctcgatagcggcatcactgacgaaatgtatcaggagcttgagcgcctgattgaagacgccaaaccggcaag

SEQ ID NO: 387312 - DNA, 75 bp, synthetic construct
  source 1..75: mol_type = other DNA
tatgccgccggggaaattgtcgtcggtggtgagttttatccggcttcggccattcatctgattgataacctgcga

SEQ ID NO: 387313 - DNA, 75 bp, synthetic construct
  source 1..75: mol_type = other DNA
cgctgctgcactctctgagattcagcgcgtgccggtaccgttgcgcaccctgtggaactggcgtacctgcccggt

SEQ ID NO: 387314 - DNA, 75 bp, synthetic construct
  source 1..75: mol_type = other DNA
gctcgtcgccgctggaagttgccgccgctgctgcactctctgagattcagcgcgtgccggtaccgctgcgcaccc

SEQ ID NO: 387315 - DNA, 75 bp, synthetic construct
  source 1..75: mol_type = other DNA
tccaggccagcgtcagcaacgtcgcgggtaacaacgcccaggcaacgcatgtttatagcgtcgatgccaccgcgc

SEQ ID NO: 387316 - DNA, 75 bp, synthetic construct
  source 1..75: mol_type = other DNA
aagaccatagatatactgataaatcatcttgcagacagatttttcgagagccatattagtaataatattaacata

SEQ ID NO: 387317 - DNA, 75 bp, synthetic construct
  source 1..75: mol_type = other DNA
ggaacgtgggtaatcacttctttcggggtggcgaatgccatctcgatcccgcttaccggctggctggcaaagcgc

SEQ ID NO: 387318 - DNA, 75 bp, synthetic construct
  source 1..75: mol_type = other DNA
gcatccgtcagtgtgacactggacacacctgtcgtggaatgcacagaccttctgagaacagcgacgcttgacgtc

SEQ ID NO: 387319 - DNA, 75 bp, synthetic construct
  source 1..75: mol_type = other DNA
cccccggcttctggcctgcggtatccgggacgtgttactggaagacctgttacagcggaatatcccgctatcgca

SEQ ID NO: 387320 - DNA, 75 bp, synthetic construct
  source 1..75: mol_type = other DNA
ggtttgacctatctaactgatacgaaagatgactatatcctgctaataaaagcaactgattatttatctagctat

SEQ ID NO: 387321 - DNA, 75 bp, synthetic construct
  source 1..75: mol_type = other DNA
attttgacctccgtcgcccgacaaagcaccaaagatattaatgcctggaaaagagatgaacagacagtttaccca

SEQ ID NO: 387322 - DNA, 75 bp, synthetic construct
  source 1..75: mol_type = other DNA
aactggaaacaggctggctgcgctggaacaccacgcgcgcgggagccttcaatgtatggttgccaccatcacctg

SEQ ID NO: 387323 - DNA, 75 bp, synthetic construct
  source 1..75: mol_type = other DNA
gtgagcgcagaactcatgcggctgctgagcaacatcatccgcaccgggatcatctctgaagttgatgaggaatcc

SEQ ID NO: 387324 - DNA, 75 bp, synthetic construct
  source 1..75: mol_type = other DNA
ccagtccggcccccggcaaaagcctgaaagaaatcgtggtcagcgcgccggacggcgcggtgttccgctacgacg

SEQ ID NO: 387325 - DNA, 75 bp, synthetic construct
  source 1..75: mol_type = other DNA
aacaggtggtaattgcctgcattggcggcaacccggaaaccgccatgataattggcagcctgtggagtgatgcca

SEQ ID NO: 387326 - DNA, 75 bp, synthetic construct
  source 1..75: mol_type = other DNA
gcgaacaggtggtaattgcctgcatcggcggcaacccggaaaccgccatgataattggcagtctgtggagtgatg

SEQ ID NO: 387327 - DNA, 75 bp, synthetic construct
  source 1..75: mol_type = other DNA
tggcggcaacccggaaaccgccatgataattggcagcctgtggagtgatgccagtccggcccccggcaaaagcct

SEQ ID NO: 387328 - DNA, 75 bp, synthetic construct
  source 1..75: mol_type = other DNA
ggtgcggcgctgaccatcaccggcagcagcacggcggaagccgggcagacggtgaccgtcacgctcaatggcgca

SEQ ID NO: 387329 - DNA, 75 bp, synthetic construct
  source 1..75: mol_type = other DNA
taattatggccaatggattggtgtgttactttctgaaatgaataaaaaacaattttgggtaccaccaggtttcgc

SEQ ID NO: 387330 - DNA, 75 bp, synthetic construct
  source 1..75: mol_type = other DNA
cgacgttagcatggcagtttctacgccgcgcggtctggtaacgccggttctgcgtgatgtcgataccctcggcat

SEQ ID NO: 387331 - DNA, 75 bp, synthetic construct
  source 1..75: mol_type = other DNA
cgccagttgcagccccggcggcgcaaccagtcctggctgctcgtagcgaaaaacgtgttccgatgactcgcctgc

SEQ ID NO: 387332 - DNA, 75 bp, synthetic construct
  source 1..75: mol_type = other DNA
atgcagatggagctaataagccgcaaggagttcgatagtcgggtaactagcggtgaactcgacaacttgcaggct

SEQ ID NO: 387333 - DNA, 75 bp, synthetic construct
  source 1..75: mol_type = other DNA
caggagaacagaagtctatattcataaccttaatgaagatggatttgcaccagtgcttgtaaaggctactccgca

SEQ ID NO: 387334 - DNA, 75 bp, synthetic construct
  source 1..75: mol_type = other DNA
tctaagtccagaaaaggtgttttacgagggttgcattatcagttagaaccttatgctcaaggaaaactggtgcgc

SEQ ID NO: 387335 - DNA, 75 bp, synthetic construct
  source 1..75: mol_type = other DNA
tgacagaggtattagatgggatgacccctatataggaattaaatgggagaatgagtacaatgtaagattgtcaga

SEQ ID NO: 387336 - DNA, 75 bp, synthetic construct
  source 1..75: mol_type = other DNA
tcgaagtccacgaaaggtgttttacgcggactgcattatcagttagaaccttatgcgcaagggaaattggtgcgc

SEQ ID NO: 387337 - DNA, 75 bp, synthetic construct
  source 1..75: mol_type = other DNA
agtttttggtgatgagcgtggtttcttttttgagagctttaaccagaagatttttgaggaagctgtaggccgcaa

SEQ ID NO: 387338 - DNA, 75 bp, synthetic construct
  source 1..75: mol_type = other DNA
tcccagtcccaaaaaggtgtattgcgcgggctgcactatcagctggatccgcacgctcagggcaaactggttcgc

SEQ ID NO: 387339 - DNA, 75 bp, synthetic construct
  source 1..75: mol_type = other DNA
actgaatatacaatggccgatagacatgccaattatgtcatctaaagacaacgcgttaattagtttttcagaatt

SEQ ID NO: 387340 - DNA, 75 bp, synthetic construct
  source 1..75: mol_type = other DNA
aggcatttgtacaagataatcgatcacgctcagcaagaaatgtgcttcgaggtttacattttcaaaaaaataatc

SEQ ID NO: 387341 - DNA, 75 bp, synthetic construct
  source 1..75: mol_type = other DNA
cagcgtttttttgctgatacacctggaaaaatgggattacttgctgtttatacgggtactgttttcatattatct

SEQ ID NO: 387342 - DNA, 75 bp, synthetic construct
  source 1..75: mol_type = other DNA
ccaggaagtcctttatataaagaataatgttcctttgtgttcctcgctggaacataaaagcccgcctgacacttt

SEQ ID NO: 387343 - DNA, 75 bp, synthetic construct
  source 1..75: mol_type = other DNA
aaggtggcaaggtgcggcctgtagcgcagcccatctcatggaaatgcgtcgggtatcttacagttatcgctatat

SEQ ID NO: 387344 - DNA, 75 bp, synthetic construct
  source 1..75: mol_type = other DNA
taatcccagacagatcgcgcttgaactcactgaacgcgagtttgccgatccgaaaaccagcgccccgataatttc

SEQ ID NO: 387345 - DNA, 75 bp, synthetic construct
  source 1..75: mol_type = other DNA
tgttgctgccgggttatgtgaagggaacgaaccgttgccggaaaagcgccccgtgattttagaggcgcagaatgt

SEQ ID NO: 387346 - DNA, 75 bp, synthetic construct
  source 1..75: mol_type = other DNA
gtcgatggtattgaccccgctgagttgaataataaggtcgctgaaaacggttattcactccgcgtggtggatgct

SEQ ID NO: 387347 - DNA, 75 bp, synthetic construct
  source 1..75: mol_type = other DNA
agtggttacgtcaacatggcgttcattacggtcagggctggttgtacagcaaggccttaccaaaagaagatttca

SEQ ID NO: 387348 - DNA, 75 bp, synthetic construct
  source 1..75: mol_type = other DNA
aacgttccccagtgttcgtctctggagcatgaaagtccgcccgataccttccccgagccaggtaaaatttcgaaa

SEQ ID NO: 387349 - DNA, 75 bp, synthetic construct
  source 1..75: mol_type = other DNA
gaagcccatctcatggaaatgcgtcgggtatcttacagttatcgctatattcaggaagtggtttatatcgataac

SEQ ID NO: 387350 - DNA, 75 bp, synthetic construct
  source 1..75: mol_type = other DNA
ggaaaaatgggaatacttgcagtttatacgggtactgttttcatatcatctcttccgttaagtctaatatatatt

SEQ ID NO: 387351 - DNA, 75 bp, synthetic construct
  source 1..75: mol_type = other DNA
tattcctcccgcgtcgctattcgggccaataaggtggcgacacaagggaaagatgcgctgcaagagctggaaaga

SEQ ID NO: 387352 - DNA, 75 bp, synthetic construct
  source 1..75: mol_type = other DNA
atctggctggcccatcagcaggtagaaacatcatttattgaagagctgaatacctattcctcccgcgtcgctatt

SEQ ID NO: 387353 - DNA, 75 bp, synthetic construct
  source 1..75: mol_type = other DNA
ctccttagccaatggcaaaattgtcggtgctgaggcactggcgcgctggccgcagacagacggtagttggttgtc

SEQ ID NO: 387354 - DNA, 75 bp, synthetic construct
  source 1..75: mol_type = other DNA
tgctctttgtgatagtatgagccgggatgtaaaaaatcgtacggcagatagcatagcaaacttgcttgcagacaa

SEQ ID NO: 387355 - DNA, 75 bp, synthetic construct
  source 1..75: mol_type = other DNA
gtgtccactgcaaaccaaaaaccaactgaaagcgtcagtttaaacgcttttaaacaaccgaaggcgttctatctc

SEQ ID NO: 387356 - DNA, 75 bp, synthetic construct
  source 1..75: mol_type = other DNA
tgtgttctggtgcgttcctgattctgccgctgggtgcgaaattcgcgtctgacgcaggtatcgtgtctgtaagct

SEQ ID NO: 387357 - DNA, 75 bp, synthetic construct
  source 1..75: mol_type = other DNA
gaattttcgattcaaatcaaagtatcaccagagatgtattcaggctgtttcactggtataaatcaaggtgatgag

SEQ ID NO: 387358 - DNA, 75 bp, synthetic construct
  source 1..75: mol_type = other DNA
ctctggcggttgccgtcgcagcaggcgtaatgtctgctcaggcaatggctgtggatttccacggttacgctcgtt

SEQ ID NO: 387359 - DNA, 75 bp, synthetic construct
  source 1..75: mol_type = other DNA
tcacatgttgcgtatcctcgaccatggtgcgatctccatgggcgataactgggacatgatgtacgtcggtatgta

SEQ ID NO: 387360 - DNA, 75 bp, synthetic construct
  source 1..75: mol_type = other DNA
ctttcagctcttttggtataagttgccatagagaaggctcctttaggaactctttccgagggaagaatgatgagg

SEQ ID NO: 387361 - DNA, 75 bp, synthetic construct
  source 1..75: mol_type = other DNA
caatgggtcagaggactatcaagttatccacaaatacgctgaacaaccgaattttgacctccgtcgcccgacaaa

SEQ ID NO: 387362 - DNA, 75 bp, synthetic construct
  source 1..75: mol_type = other DNA
ggcctgggtaacctgactttccagatgaaagcccgttccagcggcggattaaccgttcgcacagagaccggcgcc

SEQ ID NO: 387363 - DNA, 75 bp, synthetic construct
  source 1..75: mol_type = other DNA
ccattctggatcatcattggtagcccgattctggccgctatctataacaagatgggcgacactctaccgatgccg

SEQ ID NO: 387364 - DNA, 75 bp, synthetic construct
  source 1..75: mol_type = other DNA
ctgctgaccgcgccgaaactgcatcgcatgacccaggacgatgctgcagacaaagcggcgaaagctgccgtagcg

SEQ ID NO: 387365 - DNA, 75 bp, synthetic construct
  source 1..75: mol_type = other DNA
gccgctgggtgcgaaattcgcgtctgacgccggtatcgtttctgtaagctggctggtagctagctacggcctgca

SEQ ID NO: 387366 - DNA, 75 bp, synthetic construct
  source 1..75: mol_type = other DNA
gccgcaggagatatcgtttcactgcgtgatgtgattgagagtgataaagcgactcttttgggagatgccgttgcc

SEQ ID NO: 387367 - DNA, 75 bp, synthetic construct
  source 1..75: mol_type = other DNA
cgaaactcctgacccgcggcgtgatacacgccgacgagaccgggctgcgtatcctggacacgaaaaaaggcggta

SEQ ID NO: 387368 - DNA, 75 bp, synthetic construct
  source 1..75: mol_type = other DNA
tgcgcccctgtatcgtcagaataacatcttcgcccgcgcggatgttgacctgccagagagcacgctgtcagatat

SEQ ID NO: 387369 - DNA, 75 bp, synthetic construct
  source 1..75: mol_type = other DNA
ggtgcattacacaaagcgatcgtctatgcgctggcgcggcgtgtggaactgagtctgttcctggaggatggcgcg

SEQ ID NO: 387370 - DNA, 75 bp, synthetic construct
  source 1..75: mol_type = other DNA
actatatccgtgatgcggtgagtgaaaagctggagtatattcccgttcacttcgtggtgaaccgttatgtccgtc

SEQ ID NO: 387371 - DNA, 75 bp, synthetic construct
  source 1..75: mol_type = other DNA
tgccgatatcgccgcgcttaccgcacatctggataaactgctcccgcaatcccctgaagaagacgaaaaagcgtc

SEQ ID NO: 387372 - DNA, 75 bp, synthetic construct
  source 1..75: mol_type = other DNA
attaattatatcctgaaccggcgcgatgaactgagctgcttcctgggtgacggagccgtgcccctggacaacaat

SEQ ID NO: 387373 - DNA, 75 bp, synthetic construct
  source 1..75: mol_type = other DNA
tgccgaaaaagagcgggaattactggagaaaagccggcgcatccagcttctggaagaaatgctgaaactggttcg

SEQ ID NO: 387374 - DNA, 75 bp, synthetic construct
  source 1..75: mol_type = other DNA
cttcgactgccagaccgggcgtggtcatgaacatcctgaaaactggcttcagggctggagtgggacgctggttgt

SEQ ID NO: 387375 - DNA, 75 bp, synthetic construct
  source 1..75: mol_type = other DNA
tgagacaatagaatgcttcgttaaatactcaaacgacgatgactataaacaccaggtggattctgcgatagaaag

SEQ ID NO: 387376 - DNA, 75 bp, synthetic construct
  source 1..75: mol_type = other DNA
tcaccggcaccagtaatcagcccgcaggcaccacaataacggtgacgctgaacgggcaaaattacaccgctacca

SEQ ID NO: 387377 - DNA, 75 bp, synthetic construct
  source 1..75: mol_type = other DNA
gaataacctgccttatgccgaatctattgaggatggacattctcaacaagcgccaacaggtgtgtatgctaatgc

SEQ ID NO: 387378 - DNA, 75 bp, synthetic construct
  source 1..75: mol_type = other DNA
atacgtcagtggagaaaggacgggaccgtcagttgtgtgcttcgactgccggaccggacgtagccatgagtatcc

SEQ ID NO: 387379 - DNA, 75 bp, synthetic construct
  source 1..75: mol_type = other DNA
cagacgcagctgcgatccacaatacccgtgaagcagttcgcagccagcctggcctgggtaacctgactttccaga

SEQ ID NO: 387380 - DNA, 75 bp, synthetic construct
  source 1..75: mol_type = other DNA
ggagacgcttgtccgcagccggaaaaccatcatcaatgtcaccacgccaccaaagtggaaggtgaaaaagcagaa

SEQ ID NO: 387381 - DNA, 75 bp, synthetic construct
  source 1..75: mol_type = other DNA
caaaatggaaggtgaaaaagcagaaactggcggagaaggctgcccgggaagcagagctgacagcaaaaaaagcgc

SEQ ID NO: 387382 - DNA, 75 bp, synthetic construct
  source 1..75: mol_type = other DNA
gctggccgagaaagcagcccgggaggcagagctggcggcaaaaaaagcgcaggccagacaggcgctgtccattta

SEQ ID NO: 387383 - DNA, 75 bp, synthetic construct
  source 1..75: mol_type = other DNA
cgcggcggaatatcccgctttcgcataaaaaactgcgcagggcgctgaaggctgttacccgttcagaaagctatc

SEQ ID NO: 387384 - DNA, 75 bp, synthetic construct
  source 1..75: mol_type = other DNA
acctgtccgcagccggaaaaccatcatcaatgtcaccacgccaccaaaatggaaggtgaaaaagcagaagctggc

SEQ ID NO: 387385 - DNA, 75 bp, synthetic construct
  source 1..75: mol_type = other DNA
aaaacccaggatctgatcatcagcggcgtctccagcggcctggtggcaggcactacggtcactgtgatgttgaac

SEQ ID NO: 387386 - DNA, 75 bp, synthetic construct
  source 1..75: mol_type = other DNA
aggccagacaggcgctgtccatttatctgaacctgcccacactggatgaggctgtgaacaccctgaagccctggt

SEQ ID NO: 387387 - DNA, 75 bp, synthetic construct
  source 1..75: mol_type = other DNA
taaaaaactgcgcagggcactgaaggccatcacccgttcagaaagctatcttggcgccatgaaagccggtgcctg

SEQ ID NO: 387388 - DNA, 75 bp, synthetic construct
  source 1..75: mol_type = other DNA
gctggccgagaaagcggcccgggaagcagagctggcggcaaaaaaagcgcaggccagacaggcgctgtccattta

SEQ ID NO: 387389 - DNA, 75 bp, synthetic construct
  source 1..75: mol_type = other DNA
acggagcatatttctcaggaggaagaagtgtatgcggcagagcgtctggataaaatccgccgccagaaccggata

SEQ ID NO: 387390 - DNA, 75 bp, synthetic construct
  source 1..75: mol_type = other DNA
tgacactgaagcggaaaacagagggaacaatacctgtccgcagccggaaaaccatcatcaatgtcaccacgccac

SEQ ID NO: 387391 - DNA, 75 bp, synthetic construct
  source 1..75: mol_type = other DNA
tgacactgaaacggaaaacggaaggggaaacaccgatccggagccggaaaaccatcatcaatgtcaccacgccac

SEQ ID NO: 387392 - DNA, 75 bp, synthetic construct
  source 1..75: mol_type = other DNA
aaaactgcgcagggcgctgaaggccatcacccgttcagaaagctatctgtgtgccatgaaagccggtgcctgccg

SEQ ID NO: 387393 - DNA, 75 bp, synthetic construct
  source 1..75: mol_type = other DNA
ttccagcacaagttatctcgcgcaattgttgacgaaaaccaagcggtaattgtcgagacattgaaaacggcaaat

SEQ ID NO: 387394 - DNA, 75 bp, synthetic construct
  source 1..75: mol_type = other DNA
cgatgtggtgaccgtcacgctgaacggtaaaaactacaccacaacgctggacgcctccggtaactggagtgtggg

SEQ ID NO: 387395 - DNA, 75 bp, synthetic construct
  source 1..75: mol_type = other DNA
tcatggaaagctgaaaagcatcactatcacccgttcagcaacggggaaatactatgcttcaattctctgtgatga

SEQ ID NO: 387396 - DNA, 75 bp, synthetic construct
  source 1..75: mol_type = other DNA
caggacgcgcaggtcagccaactgccggttagcgttgtcgtaccgcagtctacttactctggcgaagcggatgtt

SEQ ID NO: 387397 - DNA, 75 bp, synthetic construct
  source 1..75: mol_type = other DNA
cgccggggcatacgcgctggccgttgacggtggcgtttcaggatcccgcgcaggtggagattatcgccggggcgc

SEQ ID NO: 387398 - DNA, 75 bp, synthetic construct
  source 1..75: mol_type = other DNA
gatgttacgctcccgcaggctgaagcaggcgtgccgttacgcgtgcgctggcagactgaattatctttacagggg

SEQ ID NO: 387399 - DNA, 75 bp, synthetic construct
  source 1..75: mol_type = other DNA
tatgcggcagcgcgtctggataaaatccgccgccagaaccggataaaggcagaacttcaggccgtgcttgatgag

SEQ ID NO: 387400 - DNA, 75 bp, synthetic construct
  source 1..75: mol_type = other DNA
atgacagagcagaagcgaccggtactgacactgaagcggaaaacagagggaacaatacctgtccgcagccggaaa

SEQ ID NO: 387401 - DNA, 75 bp, synthetic construct
  source 1..75: mol_type = other DNA
tgtcgagacgctgaaagcagctaacatgatgaaaaaccacaatctggcaagagtgataggtgatgcaggctggca

SEQ ID NO: 387402 - DNA, 75 bp, synthetic construct
  source 1..75: mol_type = other DNA
aagcgtatgcggcagcgcgtctggagaaaatccgttgccagaaccggataaaagcagagctcagggctgtacttg

SEQ ID NO: 387403 - DNA, 75 bp, synthetic construct
  source 1..75: mol_type = other DNA
aggaggaggaagcgtatgcggcagcgcgtctggataaaatccgccgccagaaccggataaaggcagaacttcagg

SEQ ID NO: 387404 - DNA, 75 bp, synthetic construct
  source 1..75: mol_type = other DNA
aagtgtatgcggcagcgcgtctggataaaatccgccgccagaaccggataaaggcagaacttcaggccgtgcttg

SEQ ID NO: 387405 - DNA, 75 bp, synthetic construct
  source 1..75: mol_type = other DNA
tgccggagcgccgccgtaccgcgtggcttcgctattaagccacaaacactcccgctgtgaagtgatttctggggt

SEQ ID NO: 387406 - DNA, 75 bp, synthetic construct
  source 1..75: mol_type = other DNA
gcgcttcttcagtgccgggccgtgaatttctggcgcggattaagctctaatatgctcagccgcatgatgtgcgat

SEQ ID NO: 387407 - DNA, 75 bp, synthetic construct
  source 1..75: mol_type = other DNA
acgacgatagggcgcaagagatactggatgcgctggaaaaaaaacatggcgcacttatccagtgccgggcagtga

SEQ ID NO: 387408 - DNA, 75 bp, synthetic construct
  source 1..75: mol_type = other DNA
cgacgggtttctgtatcaccttattggcagtaccgtcagttcggatatctcccgcgacaacccagaaaaaaccgg

SEQ ID NO: 387409 - DNA, 75 bp, synthetic construct
  source 1..75: mol_type = other DNA
aaaaatgaaatggtgggaaaaagattatgaagaactagaactgattctttcagaatttaaatgtccagactcgga

SEQ ID NO: 387410 - DNA, 75 bp, synthetic construct
  source 1..75: mol_type = other DNA
gcgcagccagccaggcagtcagggatttgttaggttctactcccgtgcggctttatccgttcggtatgcaggacg

SEQ ID NO: 387411 - DNA, 75 bp, synthetic construct
  source 1..75: mol_type = other DNA
tcagcgcaccagatttataacgtgaacacctgggcaaccattaacagcggctttatgaaaaagtttcgcgtacca

SEQ ID NO: 387412 - DNA, 75 bp, synthetic construct
  source 1..75: mol_type = other DNA
gccaaatcggtggcaatacgcctgtatccggtgtcgtccactctggggatagccgagggtatcgaaactgcgctt

SEQ ID NO: 387413 - DNA, 75 bp, synthetic construct
  source 1..75: mol_type = other DNA
actggtgtcagtggtgtcggtgaagattctctcgttcatccaccagcaggatattgcatcactggtgtccggtgt

SEQ ID NO: 387414 - DNA, 75 bp, synthetic construct
  source 1..75: mol_type = other DNA
cacgttaccgttaattgaacagatgatggcttgccgtgaaaccatgaccagttcagagtttcgcgagcgtattgt

SEQ ID NO: 387415 - DNA, 75 bp, synthetic construct
  source 1..75: mol_type = other DNA
tgactgaagatgaaacgcttgagcaggcctacgatatttttctcgaactggctgccgacaatctcgatccagctg

SEQ ID NO: 387416 - DNA, 75 bp, synthetic construct
  source 1..75: mol_type = other DNA
aaatctccaggctatttacgcgctggcgacggacgataaaggcgagctgtgctacctgcaccgcaccctgcttga

SEQ ID NO: 387417 - DNA, 75 bp, synthetic construct
  source 1..75: mol_type = other DNA
aagtcaactctcctgactgaaataagaatcagtgatagtgattcccggtattacaactttaaaactcttaactct

SEQ ID NO: 387418 - DNA, 75 bp, synthetic construct
  source 1..75: mol_type = other DNA
cacctgccgaactggggctacctgataatttctatgctgaagagtggcaacgcgttgtccagccaaatgcggttt

SEQ ID NO: 387419 - DNA, 75 bp, synthetic construct
  source 1..75: mol_type = other DNA
aaaaatggcgtgtatttctgcatccgagccagcgaaaattggtggagtcgcccgctaatggtccggtacgagtac

SEQ ID NO: 387420 - DNA, 75 bp, synthetic construct
  source 1..75: mol_type = other DNA
atgtcctgttctcgttcggttgtattactgaataacgccttaaaaatcgccgttatgaaaaatggcgatttatct

SEQ ID NO: 387421 - DNA, 75 bp, synthetic construct
  source 1..75: mol_type = other DNA
ctgatgcgacaaccgataatgttgcaccacggttgctgagaaatattttagcactgcttaataatcctgccgtag

SEQ ID NO: 387422 - DNA, 75 bp, synthetic construct
  source 1..75: mol_type = other DNA
ggcatcagcgtatttatcgcaataaggtcgttcttggtcagtgtggtattaacgtccgtggtcgtcgcagtaaaa

SEQ ID NO: 387423 - DNA, 75 bp, synthetic construct
  source 1..75: mol_type = other DNA
ttatcccgtattcaacgggcgaaaatctggccagtctttgaagaattcagagcacaaatggcgcgtgccaaactg

SEQ ID NO: 387424 - DNA, 75 bp, synthetic construct
  source 1..75: mol_type = other DNA
tctcaacaccagtgtcagcctcgaacaatattttggtcagcgtgtcgatctgtttaattctggtacgggttatca

SEQ ID NO: 387425 - DNA, 75 bp, synthetic construct
  source 1..75: mol_type = other DNA
acgggttatcacaatcccgtcgcattgagtctgggattaaattacacccctgtgcccttagtcacggtgacggcc

SEQ ID NO: 387426 - DNA, 75 bp, synthetic construct
  source 1..75: mol_type = other DNA
atggtttttcattttttaccggaagttaccgacgttttgagccgtttcgttcctcgcattattccgttttattta

SEQ ID NO: 387427 - DNA, 75 bp, synthetic construct
  source 1..75: mol_type = other DNA
gcccgcagtttggcctgaacccagagttcatcggtccggctgccattacgctggcgcatcgttataacgaagata

SEQ ID NO: 387428 - DNA, 75 bp, synthetic construct
  source 1..75: mol_type = other DNA
accagggacagcgtgtctcttccaatgagatcacgctaacgcttgccgaacctttcgatgcaatggcaaaggacg

SEQ ID NO: 387429 - DNA, 75 bp, synthetic construct
  source 1..75: mol_type = other DNA
aacacgttttatgacaacttgttggatgaaaatcttcagcgggcaggctttggtgctgaagcctggggagaatat

SEQ ID NO: 387430 - DNA, 75 bp, synthetic construct
  source 1..75: mol_type = other DNA
tggcgtgtggcggcgcattttctggtgtcgttcattatcggcgtgctgggcgcagaggttctggcatcctggctg

SEQ ID NO: 387431 - DNA, 75 bp, synthetic construct
  source 1..75: mol_type = other DNA
gctggataccaataccctggctgataacgtcgatttagataacgcggtcgctaacgttgttcccactcgtggggc

SEQ ID NO: 387432 - DNA, 75 bp, synthetic construct
  source 1..75: mol_type = other DNA
aaagcaaaaagcactggagtcaaaattgtataaagaaattcgcgccggtaaagattgtaaggcaacagagtcaga

SEQ ID NO: 387433 - DNA, 75 bp, synthetic construct
  source 1..75: mol_type = other DNA
gaattagcaatatggtacggtaatgagtatgtgcggttgtctaatccgttaacttttgacaaccctgccctgacc

SEQ ID NO: 387434 - DNA, 75 bp, synthetic construct
  source 1..75: mol_type = other DNA
aaaaccctcaaacaggaacagatgcgcgcggttacagaaattgtgaccagtaaagatcgctttgttgccgcacat

SEQ ID NO: 387435 - DNA, 75 bp, synthetic construct
  source 1..75: mol_type = other DNA
tgtcctaacgccaggcctttgctctataattgctgttttattcggtaagtctacctttaaaaaagctaaaacaaa

SEQ ID NO: 387436 - DNA, 75 bp, synthetic construct
  source 1..75: mol_type = other DNA
aggtttatctgactggacttccacagtcagggcaattacaggtttcatggggcaaagataaaaactcaaactgta

SEQ ID NO: 387437 - DNA, 75 bp, synthetic construct
  source 1..75: mol_type = other DNA
ggtttccggccttgcagacggcacggtgatcatcagcgccaccatcaccgacagcgcaggcaacagcagcacgca

SEQ ID NO: 387438 - DNA, 75 bp, synthetic construct
  source 1..75: mol_type = other DNA
tacagcgtggtccgaaccgtttccgtaaaaaagataaactcaactggttactggatttactgtatgagcaaaaca

SEQ ID NO: 387439 - DNA, 75 bp, synthetic construct
  source 1..75: mol_type = other DNA
acgcgacggcgacgccacggtacaggccagcgtcagcactattaatggcaacacggcttcggcaacccacgccta

SEQ ID NO: 387440 - DNA, 75 bp, synthetic construct
  source 1..75: mol_type = other DNA
ctggatttactgcatgaacaaaacagagttgtaccggttattgagggaaaaacgtggtatgtcgcacctaacttt

SEQ ID NO: 387441 - DNA, 75 bp, synthetic construct
  source 1..75: mol_type = other DNA
aagctattgtattgagaaggggatcctctgtatgaaaaaaaatgacattttacagcgtggtccgaaccgtttccg

SEQ ID NO: 387442 - DNA, 75 bp, synthetic construct
  source 1..75: mol_type = other DNA
ctccggcgatgacattattaacgccgccgaacacgggcaggcgctggtgatctccggttccagcactggcggcga

SEQ ID NO: 387443 - DNA, 75 bp, synthetic construct
  source 1..75: mol_type = other DNA
agctgcgttacaacagcaaaaataacacgttcgatatggcccatttttcagatgaacagattcgcgctttttccc

SEQ ID NO: 387444 - DNA, 75 bp, synthetic construct
  source 1..75: mol_type = other DNA
gacggtattcgggctgtttaccggaacggatttcgggattgtgtttggtgcgttcgccggggcgttatttgtggc

SEQ ID NO: 387445 - DNA, 75 bp, synthetic construct
  source 1..75: mol_type = other DNA
gcaaccggccctggctgcacgtagcgaaaaacgtgtgccgatgactcgcctgcgtaagcgtgtggcagagcgtct

SEQ ID NO: 387446 - DNA, 75 bp, synthetic construct
  source 1..75: mol_type = other DNA
gacggtattcgggctgtttaccggaacggatttcgggattgtgtttggtgcattcgcgggggcgttgtttgtggc

SEQ ID NO: 387447 - DNA, 75 bp, synthetic construct
  source 1..75: mol_type = other DNA
tgttttttggtgggccgctggtggctcttttttatttacaggagaaaaaaggtatgtctgaacccttgtccggtt

SEQ ID NO: 387448 - DNA, 75 bp, synthetic construct
  source 1..75: mol_type = other DNA
gtcctgtcattcatccaccagcaggagattacatcactggtatccggtctgttctcccgtcagcggggaggaggt

SEQ ID NO: 387449 - DNA, 75 bp, synthetic construct
  source 1..75: mol_type = other DNA
actggtatcggtgatttcggtgaagattctgtcgttcatccaccagcaggatattgcatcactggtatccggcct

SEQ ID NO: 387450 - DNA, 75 bp, synthetic construct
  source 1..75: mol_type = other DNA
gttgccgctttcgtgaaggcaaaggacaaaaagatagacgagaaaagcgtggtctttatcgatgaagcgggcgtg

SEQ ID NO: 387451 - DNA, 75 bp, synthetic construct
  source 1..75: mol_type = other DNA
cgtatcgatgcaggcgctgatccacggcgataaggctattatcgccgcccatgaaaaagcggttgccgctgccgt

SEQ ID NO: 387452 - DNA, 75 bp, synthetic construct
  source 1..75: mol_type = other DNA
tacgtttgatttggcgcatttcagccaggagcagatagcccaattcagccagcgcagccagcagattgaggccga

SEQ ID NO: 387453 - DNA, 75 bp, synthetic construct
  source 1..75: mol_type = other DNA
gcttagctggtggcgctttaactggggcgagtgtttacggacttttaaccggaacggattatggtgttgtgttcg

SEQ ID NO: 387454 - DNA, 75 bp, synthetic construct
  source 1..75: mol_type = other DNA
gtgggcgataaagtgatggtgacgcgtaacgataagacgctggatgtggcgaacggcgaccgcttcaccgtgacc

SEQ ID NO: 387455 - DNA, 75 bp, synthetic construct
  source 1..75: mol_type = other DNA
gaattttctggagcgcgttgactccacgcaggccgaacgccgggacagtaaatactaccaggtagggcaaattat

SEQ ID NO: 387456 - DNA, 75 bp, synthetic construct
  source 1..75: mol_type = other DNA
agtacaactgccggatgcggtgattactctcaagcagggggtagggcgactgattcgcgacgccgacgatcgcgg

SEQ ID NO: 387457 - DNA, 75 bp, synthetic construct
  source 1..75: mol_type = other DNA
gtgacggacgattttgcaccagacggtcagctggcgaaagcgataccaggctttaagccgcgagaaccacagcga

SEQ ID NO: 387458 - DNA, 75 bp, synthetic construct
  source 1..75: mol_type = other DNA
gaggatgaggataagccggaggtggatccgtttgcggcgctggaagacgcgctgagccttgcagcacagtcatga

SEQ ID NO: 387459 - DNA, 75 bp, synthetic construct
  source 1..75: mol_type = other DNA
tttgattacagccgccaggcgttactctgtgtgccgcgcaatctgccgcaaaccaaccagccaggttctgctcgc

SEQ ID NO: 387460 - DNA, 75 bp, synthetic construct
  source 1..75: mol_type = other DNA
tatctcgactggctcgaaagcattacaagatcaactctacagccgtgatttgccgacggtgtcaaaggcgctgaa

SEQ ID NO: 387461 - DNA, 75 bp, synthetic construct
  source 1..75: mol_type = other DNA
agtctgccgcccgcgccgcgcacccgtgacattgcccgtgcggttcgtttccttgcgataccatcctccaggtaa

SEQ ID NO: 387462 - DNA, 75 bp, synthetic construct
  source 1..75: mol_type = other DNA
gcgctgctacaggcagaactgccgctgaaaaaagcggcggcgctggcggcagaaattcacggcgtgaagaaaaat

SEQ ID NO: 387463 - DNA, 75 bp, synthetic construct
  source 1..75: mol_type = other DNA
cgtgaatccctggttcaggataaggtaaaaacaaccaatcaaatgcatgcttttctgctggaatttggcattagc

SEQ ID NO: 387464 - DNA, 75 bp, synthetic construct
  source 1..75: mol_type = other DNA
tacaaaaactggaacaccagtctggcaaattggccgattgggtcagggatctactgtgtaggaaaagcaactttg

SEQ ID NO: 387465 - DNA, 75 bp, synthetic construct
  source 1..75: mol_type = other DNA
ctggggcgaggatgaggacaagcaggagatggatccgtttgcagagctggaaaatgctctgttatttgcctcaga

SEQ ID NO: 387466 - DNA, 75 bp, synthetic construct
  source 1..75: mol_type = other DNA
ttaaaagcaacaaaaatgacttcgttgatgctgaagctatctgtgaagcagcatcacgtccatctatgcgtttcg

SEQ ID NO: 387467 - DNA, 75 bp, synthetic construct
  source 1..75: mol_type = other DNA
atttcaactgagattggcgacgggaagcagtacgccagcagccgtgactttgcggcggcaacagggctggtaccc

SEQ ID NO: 387468 - DNA, 75 bp, synthetic construct
  source 1..75: mol_type = other DNA
tggtgattatcgacaagttgccgtttacctccccagatgacccgttgttaaaagcgcgcatggaagattgccgtt

SEQ ID NO: 387469 - DNA, 75 bp, synthetic construct
  source 1..75: mol_type = other DNA
tatccgtaatgcacagatcgtgaaagcggttttcggggcgcaggggatgaatgttgcactgaaggacgccatgct

SEQ ID NO: 387470 - DNA, 75 bp, synthetic construct
  source 1..75: mol_type = other DNA
taatggcgcaaaagccaggtagctggatttttacctcggcaacgctgtcggtgaacgacgatctgcatcatttca

SEQ ID NO: 387471 - DNA, 75 bp, synthetic construct
  source 1..75: mol_type = other DNA
gtgcgggtaacgcactactggtcgcgaccagtagtttctgggaaggggttgatgtacgcggcgatacgctgtcgc

SEQ ID NO: 387472 - DNA, 75 bp, synthetic construct
  source 1..75: mol_type = other DNA
ctcaagtactattgaccgactgaagcaaatgcaaaataagatcattagcttcatgtttatacataaagaggcggc

SEQ ID NO: 387473 - DNA, 75 bp, synthetic construct
  source 1..75: mol_type = other DNA
attatgagatgcatattgaggctgaaaaaaatagaagcccaagaatgtcttctttgattgatcagttgaaattaa

SEQ ID NO: 387474 - DNA, 75 bp, synthetic construct
  source 1..75: mol_type = other DNA
cagcgggagaaaatcaaccgcagtctggatgtgctggaaggatatctggtcgatggcacgctcaaaaccgatacg

SEQ ID NO: 387475 - DNA, 75 bp, synthetic construct
  source 1..75: mol_type = other DNA
gttacaaaagtgcgccgaccgccttgcccagagcgcgcaggattttcgtctgcaactcggtgagcctggttatcg

SEQ ID NO: 387476 - DNA, 75 bp, synthetic construct
  source 1..75: mol_type = other DNA
aaagggcgctcaaactacctctgcctcgaacgtctcgaacagcaggcgctggcggggggcgatctgccggtacaa

SEQ ID NO: 387477 - DNA, 75 bp, synthetic construct
  source 1..75: mol_type = other DNA
tcatcgaagctaacaacggtcgttgttttatgctttgtacctcgcacgccatgatgcgcgatctggccgagcagt

SEQ ID NO: 387478 - DNA, 75 bp, synthetic construct
  source 1..75: mol_type = other DNA
tttgattacagccgtcaggcgttactgtgtgtaccgcgtaatctgccgcaaaccaatcaaccgggttctgctcgt

SEQ ID NO: 387479 - DNA, 75 bp, synthetic construct
  source 1..75: mol_type = other DNA
gacgtgcgcggcgatacgctgtcgctggtgattatcgacaagttgccgtttacctcgccagatgacccgctgtta

SEQ ID NO: 387480 - DNA, 75 bp, synthetic construct
  source 1..75: mol_type = other DNA
ctggtgatgcgcccttacggcgcgacgtttctcgccagtctgccgccagcgccgcgcacccgtgacattgcccgt

SEQ ID NO: 387481 - DNA, 75 bp, synthetic construct
  source 1..75: mol_type = other DNA
aaaaacgcgaaataactgaatctgttatcgcgatttatcagaacgaattaaatctcctgtctgatgtggtcaatt

SEQ ID NO: 387482 - DNA, 75 bp, synthetic construct
  source 1..75: mol_type = other DNA
tagcgacgacgcgtttattcatcgtgcagaaatgtacctcaaagaactgcggctgccagaaattcagcccgacgg

SEQ ID NO: 387483 - DNA, 75 bp, synthetic construct
  source 1..75: mol_type = other DNA
aaggagaaatcaacgaactggtgaatctgccagacgtggtgggaatggaaattaccctaaacggcgagatttttt

SEQ ID NO: 387484 - DNA, 75 bp, synthetic construct
  source 1..75: mol_type = other DNA
ctgagcagtggcaacagttgtctttccctctgttctggcagggctgcgaattacaggtcactctcgacgcgcagc

SEQ ID NO: 387485 - DNA, 75 bp, synthetic construct
  source 1..75: mol_type = other DNA
tggcggtgaaggccagtacggtcaatgcgccatgaaggtcgatttcaaagaaaaagctgccgaaccaccagcgcg

SEQ ID NO: 387486 - DNA, 75 bp, synthetic construct
  source 1..75: mol_type = other DNA
cgttccatctgtttagcgatccgacggttgcccgaagtttactgcgttatcgctggcacaacttgcctggcgcgc

SEQ ID NO: 387487 - DNA, 75 bp, synthetic construct
  source 1..75: mol_type = other DNA
gacgttcagcagtgctataccgccaaagagcgccgtttgctgcaacataccagcgcgcaacttcgcacaggtgaa

SEQ ID NO: 387488 - DNA, 75 bp, synthetic construct
  source 1..75: mol_type = other DNA
ccacctccggcgtggaagcggggcaaaccatcaccgttatcttcggcggcaaaagctacaccaccacggttgccg

SEQ ID NO: 387489 - DNA, 75 bp, synthetic construct
  source 1..75: mol_type = other DNA
tattgatgcacatcctcgtgcagatgctccgggtgtctatgtcggggaaaagaaaatttgctcgctcggcttacg

SEQ ID NO: 387490 - DNA, 75 bp, synthetic construct
  source 1..75: mol_type = other DNA
taatgccgggtgatattccggtgatccagagcgaccgtggcggtcaggtgacttatcacggcccaggtcagcagg

SEQ ID NO: 387491 - DNA, 75 bp, synthetic construct
  source 1..75: mol_type = other DNA
aaggtgaaatcaacgaactggtgaacctgcctgatgtcgtggggatggagattgccttgaatggtgaactttttg

SEQ ID NO: 387492 - DNA, 75 bp, synthetic construct
  source 1..75: mol_type = other DNA
cgagatgcaaatcctcaaacaagctgatgtggtgatgctcaattacatgctgccggagcagttctcagcggcatc

SEQ ID NO: 387493 - DNA, 75 bp, synthetic construct
  source 1..75: mol_type = other DNA
cagtgcgcagcttcatgcaggcgagacagtgacgttgcaaaaactggtgtggatcgactggcgggatgacaggca

SEQ ID NO: 387494 - DNA, 75 bp, synthetic construct
  source 1..75: mol_type = other DNA
acgtcgttcccgcctggcaattcggtcaccagcgccagtgctggcaggacggtggacgtaaaaattgcgccaaag

SEQ ID NO: 387495 - DNA, 75 bp, synthetic construct
  source 1..75: mol_type = other DNA
tcctgatgttctttttctgcctgattaccccggatgtatttgttccgtggctggcaggcggcgcgttactgctgc

SEQ ID NO: 387496 - DNA, 75 bp, synthetic construct
  source 1..75: mol_type = other DNA
atgccctggtgaatctcagcaatagtaaagactggtacacgctggtgaaacgcgctaatgcagggaaactcgatg

SEQ ID NO: 387497 - DNA, 75 bp, synthetic construct
  source 1..75: mol_type = other DNA
gctggataacctggtggcaacctctaccgcgccgtttatcacgcatgaaacggcgcgagcggcacaatcactaaa

SEQ ID NO: 387498 - DNA, 75 bp, synthetic construct
  source 1..75: mol_type = other DNA
acgtcagggacgctatctttcactgcatgacgaagttaaaaacttcccgctgcaacactggctacgcagtacgat

SEQ ID NO: 387499 - DNA, 75 bp, synthetic construct
  source 1..75: mol_type = other DNA
gcgcaaactcatgcctgaagaacgtaacgccgttgaaaattatctcgacagcctgacgcaggttttgcaggttcc

SEQ ID NO: 387500 - DNA, 75 bp, synthetic construct
  source 1..75: mol_type = other DNA
cggcaccgatctctctggcgctgaatgccgaaagcaacaacgtcatgatgctgacacacgctatcacgcgttatg

SEQ ID NO: 387501 - DNA, 75 bp, synthetic construct
  source 1..75: mol_type = other DNA
atgtcctgttctcgttcagttgtattactgaataacgccttaaaaatcaccgttatgaaaaatggcgatttatct

SEQ ID NO: 387502 - DNA, 75 bp, synthetic construct
  source 1..75: mol_type = other DNA
ctgacgaaattaacgacagaaattgccagttattgcgctgatgaatttaagaaccttaacgacaaaaggagctgg

SEQ ID NO: 387503 - DNA, 75 bp, synthetic construct
  source 1..75: mol_type = other DNA
gcgagcgtgacgaacgcatcgcgaaggtgcagggcaatcacaacccgtatgtgcaacgcacttgccaggcgcgaa

SEQ ID NO: 387504 - DNA, 75 bp, synthetic construct
  source 1..75: mol_type = other DNA
tatcgccgtcggttcgctgctggtgttgtttatgctgctgttctggatcccattagatatgccgctgaaattcac

SEQ ID NO: 387505 - DNA, 75 bp, synthetic construct
  source 1..75: mol_type = other DNA
cgctggatatgccgctgaaattcaccctctcgtggatgaaaggcgcgcagaccattgaagccaccagcgtgaaac

SEQ ID NO: 387506 - DNA, 75 bp, synthetic construct
  source 1..75: mol_type = other DNA
ctgacgaaattaacgacagaaattgctagctattgcgctgatgaatttaaaaaacttaacgacaaaaggagctgg

SEQ ID NO: 387507 - DNA, 75 bp, synthetic construct
  source 1..75: mol_type = other DNA
agcgggaagaagtgagggcgcgcattgtggaattcgtgcgcctgagcggacgagaaacttttcgacaactggcag

SEQ ID NO: 387508 - DNA, 75 bp, synthetic construct
  source 1..75: mol_type = other DNA
tctatcatcggcgcacaggtcgcgctggatatgggacacggcccgatcattgccgttgtcgcggctgtgacgact

SEQ ID NO: 387509 - DNA, 75 bp, synthetic construct
  source 1..75: mol_type = other DNA
acggctgatgctggagatccttgctcgcacacagcttcagacgtgggcgaacgcaggaatgttaaatgcgccgct

SEQ ID NO: 387510 - DNA, 75 bp, synthetic construct
  source 1..75: mol_type = other DNA
tttacccgctggcgtgctggtgcgtataacgcctggtcgctaccgggacgttgttttattgctctggaggagctg

SEQ ID NO: 387511 - DNA, 75 bp, synthetic construct
  source 1..75: mol_type = other DNA
atgccggaatgttaaatgcgccacttagcctgcgcctgacattggtggaaaaactggcggcgatgcttgatcccg

SEQ ID NO: 387512 - DNA, 75 bp, synthetic construct
  source 1..75: mol_type = other DNA
tgttacgggaaattattcgccagtatggccgaacctgccgccgctatgattatgaagtgatcaccattaacgagc

SEQ ID NO: 387513 - DNA, 75 bp, synthetic construct
  source 1..75: mol_type = other DNA
aactggcgcaggcgaataatgcattgcaactgttactgggaagctacggcaagctgccgcaagcgcagacagcgg

SEQ ID NO: 387514 - DNA, 75 bp, synthetic construct
  source 1..75: mol_type = other DNA
cagttatctggaagtgctggatgccgaacgttctttatttgcaacccgacaaactttactcgacctgaattatgc

SEQ ID NO: 387515 - DNA, 75 bp, synthetic construct
  source 1..75: mol_type = other DNA
ttaggacactatccgctcggctgggtcaaacatcctgaatatgtgattatcgtcgccaccgctgcggttctcact

SEQ ID NO: 387516 - DNA, 75 bp, synthetic construct
  source 1..75: mol_type = other DNA
agagtatcaatgcggccccgaccacgcgtcactattaccatcagtggtttgcctcttcgaccgttccgacgggcg

SEQ ID NO: 387517 - DNA, 75 bp, synthetic construct
  source 1..75: mol_type = other DNA
ataaaaataatgattttctcaacttacggaagagacttgaagattctttgaatctacaacaaagttactatgaaa

SEQ ID NO: 387518 - DNA, 75 bp, synthetic construct
  source 1..75: mol_type = other DNA
aaccagaagctggcggaatatctggtgctgtataacagcaaaagaccccacaaggcgctcgcactaatgacgccc

SEQ ID NO: 387519 - DNA, 75 bp, synthetic construct
  source 1..75: mol_type = other DNA
aacactggcatcccgatgtgctgaaagagattcgacgcctcaggacagagctgccgaacctcggtaaagagcaga

SEQ ID NO: 387520 - DNA, 75 bp, synthetic construct
  source 1..75: mol_type = other DNA
tatttactgcgaagctcaataaaatgcaattgaatatagttttcaatataattgcagacataaaacactcgggta

SEQ ID NO: 387521 - DNA, 75 bp, synthetic construct
  source 1..75: mol_type = other DNA
aaggacacacttttgccagagggcgttacaggaaagcttaacatttgattctgtatacataataaatcaccttac

SEQ ID NO: 387522 - DNA, 75 bp, synthetic construct
  source 1..75: mol_type = other DNA
tggggcttcatccttccagacctcagagtaaacctgaaaccggaaagcttcaggcacccgcagttatcttaccct

SEQ ID NO: 387523 - DNA, 75 bp, synthetic construct
  source 1..75: mol_type = other DNA
tgaaatccgtcgctacgacagagacatgaacataatttgccgggaatgccgtaacagcgaatcaatgcaacgtgt

SEQ ID NO: 387524 - DNA, 75 bp, synthetic construct
  source 1..75: mol_type = other DNA
agccagaacataatttgccgtgagtgccgtcagagtgaggttatgcagcgtgtgctggcgttttatcagggtaat

SEQ ID NO: 387525 - DNA, 75 bp, synthetic construct
  source 1..75: mol_type = other DNA
gagcgacgggagcaggctggcattcagtcagacgttgccttgtggatgtactggcttgtggcgatttatacatgt

SEQ ID NO: 387526 - DNA, 75 bp, synthetic construct
  source 1..75: mol_type = other DNA
atgcaaatgcagcatctgatggttggctatcctaaatactaccaaacggccgattatgcgttgaggctttcagtg

SEQ ID NO: 387527 - DNA, 75 bp, synthetic construct
  source 1..75: mol_type = other DNA
ctccgatagtgatactgcgccagcgacggggaatggggcgatccagtcttcagcgcaacgtccgcgcgtacagtc

SEQ ID NO: 387528 - DNA, 75 bp, synthetic construct
  source 1..75: mol_type = other DNA
cgcctgaacataatttgtcgtgagtgccccagagcgaagttatgcagcgtgtgctggctttctatcaggggaatt

SEQ ID NO: 387529 - DNA, 75 bp, synthetic construct
  source 1..75: mol_type = other DNA
gaaatcgcaacctcgcttgatgcctcgcccatttaaggcgataattagcacaaacttgtgtttcgcaaatccaac

SEQ ID NO: 387530 - DNA, 75 bp, synthetic construct
  source 1..75: mol_type = other DNA
ctgggagcgtgccttagaggcgtttcagaaaagcgcttgccaactctataacaacattagcccaagcaaagatca

SEQ ID NO: 387531 - DNA, 75 bp, synthetic construct
  source 1..75: mol_type = other DNA
acaggattagtccggttaagacgaagagattcagtgagttgggctttactgagcgcaaaaatcttcaggaatggt

SEQ ID NO: 387532 - DNA, 75 bp, synthetic construct
  source 1..75: mol_type = other DNA
tgttgagtcagtccaaacaggacattgaacatacttttggtgcagaacttgagtggatgaggctggatgagaaga

SEQ ID NO: 387533 - DNA, 75 bp, synthetic construct
  source 1..75: mol_type = other DNA
aaaagctgcacacggtgaaagtcctttctgcaagctgttatagccccgatgagtgggaacggcagtgtaaagcgg

SEQ ID NO: 387534 - DNA, 75 bp, synthetic construct
  source 1..75: mol_type = other DNA
aaaagcagtgcacggtgaaagtgatatcggcaagctgttatagcgttgaggagtgggcgcggcagtgtcaatccg

SEQ ID NO: 387535 - DNA, 75 bp, synthetic construct
  source 1..75: mol_type = other DNA
gaacgtgaatcatttaattcagcagcagaccaccggttagcagaattaatcaccggaaagttatatgacaggata

SEQ ID NO: 387536 - DNA, 75 bp, synthetic construct
  source 1..75: mol_type = other DNA
ctgggtaccgatacggtaggaaaaaccggttttatcgaaaacgtgtatgccaaccagattgcgttcggaaaaata

SEQ ID NO: 387537 - DNA, 75 bp, synthetic construct
  source 1..75: mol_type = other DNA
cgggctgagccgtatatgtactggatagccgggcaagttaaaaaacgtaacatgcctatggaactggtactacta

SEQ ID NO: 387538 - DNA, 75 bp, synthetic construct
  source 1..75: mol_type = other DNA
tacgtctgccaacgaccgatgaaagccgtgctctggcgcgtgtgcacctgagcagcccggttgaaatggcgaagg

SEQ ID NO: 387539 - DNA, 75 bp, synthetic construct
  source 1..75: mol_type = other DNA
ggatattatgatgaagacagaaaccatataaactctgcaggggatttaaattatttacttaaaagaagtgaaatg

SEQ ID NO: 387540 - DNA, 75 bp, synthetic construct
  source 1..75: mol_type = other DNA
gacacgcagctgctgcagcgcaatggccagacacccgatttcagcaacaccctgtttctgctcgacgagagctcg

SEQ ID NO: 387541 - DNA, 75 bp, synthetic construct
  source 1..75: mol_type = other DNA
acgaaccgaagaagtagccgttgtgcggggagcaatccccgcatatccggttgtcaggtcagagtggtaaggcac

SEQ ID NO: 387542 - DNA, 75 bp, synthetic construct
  source 1..75: mol_type = other DNA
aatgccctttactgtattaaccgggaaaagcagtgcacggtgaaagtgatatcggcaagctgttatagcgttgag

SEQ ID NO: 387543 - DNA, 75 bp, synthetic construct
  source 1..75: mol_type = other DNA
ggcaattactgacgatggggaagaaccggcatcgaaagtaacccactggatgacgctaccggagccaccgcagga

SEQ ID NO: 387544 - DNA, 75 bp, synthetic construct
  source 1..75: mol_type = other DNA
aatcagtacgacccacacaatgctgcccgccatgaatgatcagttgatggcgttcggttatgtgaaggggtggaa

SEQ ID NO: 387545 - DNA, 75 bp, synthetic construct
  source 1..75: mol_type = other DNA
aaacataccgaagcggcttttcagttcgccaacgttgctgattcctacgcagccaattcggcgcaaggcgatgtg

SEQ ID NO: 387546 - DNA, 75 bp, synthetic construct
  source 1..75: mol_type = other DNA
ggccggttgttccagtaatgcgcagtataatagcagtgcatcaggcaatgtcggcaccgcctggggtggggatgt

SEQ ID NO: 387547 - DNA, 75 bp, synthetic construct
  source 1..75: mol_type = other DNA
acaagttgccagttaatacaccttgccaagatgcgccagcccatatctggctgcaaacagctggagtatggccag

SEQ ID NO: 387548 - DNA, 75 bp, synthetic construct
  source 1..75: mol_type = other DNA
ccaggaactgaacgcgatcgacgttctgtaagatattcctttctgcttatctcaaggcccgctctgcgggtcttt

SEQ ID NO: 387549 - DNA, 75 bp, synthetic construct
  source 1..75: mol_type = other DNA
catgattgacctgtctgaagaatctctgcaagagaacattgaaatctgctctaaatacctggagcgcatgtccaa

SEQ ID NO: 387550 - DNA, 75 bp, synthetic construct
  source 1..75: mol_type = other DNA
ggttacactgagctatatgctcacgtggaaagaattgaaagacagattcatgaacaaattggtagctggaagaaa

SEQ ID NO: 387551 - DNA, 75 bp, synthetic construct
  source 1..75: mol_type = other DNA
taacgggaaaagccggtgttaaaactcgctatctccacctcaataaaatactcgttactaaaggggccagagtta

SEQ ID NO: 387552 - DNA, 75 bp, synthetic construct
  source 1..75: mol_type = other DNA
atcactaaagccagcatccacacactgactcgctatgcccatgcgtgcggtatcaaaaaacctgtaattgccctt

SEQ ID NO: 387553 - DNA, 75 bp, synthetic construct
  source 1..75: mol_type = other DNA
atgaaatataaatcacttagccaggtacatgctgaagcgatgcatgatcctgaataccgcgcagcgtatgaggct

SEQ ID NO: 387554 - DNA, 75 bp, synthetic construct
  source 1..75: mol_type = other DNA
atgacagaagccgaaatactgggattaatccgccgtgatggtatccagcttaatggcgtggatatgcgcaacata

SEQ ID NO: 387555 - DNA, 75 bp, synthetic construct
  source 1..75: mol_type = other DNA
atgaccgaagccgaaatgctcaaaatgattcgctgcattaccggagccagccaggcagcaggcaaacagaaggcc

SEQ ID NO: 387556 - DNA, 75 bp, synthetic construct
  source 1..75: mol_type = other DNA
gtcataccgtcgccgcgtagagatgtaccgggagaaagaaaaaattacttaccagtggaagaagccggaacggtt

SEQ ID NO: 387557 - DNA, 75 bp, synthetic construct
  source 1..75: mol_type = other DNA
cgctagtgtgccaccattgaatttttcaacacctaacgtgggagttagccagaaaaaaatagatgctgaaattaa

SEQ ID NO: 387558 - DNA, 75 bp, synthetic construct
  source 1..75: mol_type = other DNA
acgcagccggacagcgtgatagccgaaaattacgcgcgtgtggtggctgaggtgatgcgccgtgacggtatcgag

SEQ ID NO: 387559 - DNA, 75 bp, synthetic construct
  source 1..75: mol_type = other DNA
ctacaatcgccgcgtggcactgtatcgggagaaagaaaaaataacgtaccactggaagaagccggagcggttacg

SEQ ID NO: 387560 - DNA, 75 bp, synthetic construct
  source 1..75: mol_type = other DNA
aaaattacgcgcgtgtggtggctgaggtgatgcgccgtgacggtattcacaagcaacaatttgcgtattgcaatg

SEQ ID NO: 387561 - DNA, 75 bp, synthetic construct
  source 1..75: mol_type = other DNA
ctaccgtcgccgcgttgagatgtatcgggagaaggaaaaaattacgtaccactggaagaagccggagcggttgcg

SEQ ID NO: 387562 - DNA, 75 bp, synthetic construct
  source 1..75: mol_type = other DNA
gatgatacgcccgacgcgccggtggtgacgcgtgaagcgcaactggatattcagtcgcaatcccaaccgccgacg

SEQ ID NO: 387563 - DNA, 75 bp, synthetic construct
  source 1..75: mol_type = other DNA
atgacaatgaccgaagccgaaatgctcaaaatgattcgccgcattaccggagccagccaagcagcaggcaaacag

SEQ ID NO: 387564 - DNA, 75 bp, synthetic construct
  source 1..75: mol_type = other DNA
gctaaagttggtgggatatatgcgaataataaatatccagctgactttatatataataatatactcatacaagcc

SEQ ID NO: 387565 - DNA, 75 bp, synthetic construct
  source 1..75: mol_type = other DNA
cacgaagcaaagattaataatcttccagaggtcagtgtttggggttctggcaatgcgttacgagaatttcttcat

SEQ ID NO: 387566 - DNA, 75 bp, synthetic construct
  source 1..75: mol_type = other DNA
gtggattattgtagaggattacgtacaaatataacaaatgacagaatgcttgaatttaaaaacaaatcaacggaa

SEQ ID NO: 387567 - DNA, 75 bp, synthetic construct
  source 1..75: mol_type = other DNA
ggcgacccggccaaagacaagaacctgttgctgaccacgatcctcgccgacgcgatcaacctgggcctgaccaag

SEQ ID NO: 387568 - DNA, 75 bp, synthetic construct
  source 1..75: mol_type = other DNA
gttcttcaaccgccttggggaaatcagggatcggagcttcgagcagcagcgctaccgggccagcggcctcaacct

SEQ ID NO: 387569 - DNA, 75 bp, synthetic construct
  source 1..75: mol_type = other DNA
atccgcgacctcggcgaaaccaagctgtacgtgccgcagggcgtgcaagcctacccgacgttgcgcccgctgatc

SEQ ID NO: 387570 - DNA, 75 bp, synthetic construct
  source 1..75: mol_type = other DNA
acttgaaggacggggccgaggccaaagacaggacgttgctgctgtccgcaatcctcggtgatgcgatcaacctcg

SEQ ID NO: 387571 - DNA, 75 bp, synthetic construct
  source 1..75: mol_type = other DNA
cagtacctggaagagcgtttgcagctgctggacgagcagttggccaccgtcacccgcctggccaaggacaacgag

SEQ ID NO: 387572 - DNA, 75 bp, synthetic construct
  source 1..75: mol_type = other DNA
aaaatcaaagttatcgcgccagtggattgactttattgacggcggctatttccttatggaacacagtttacatgg

SEQ ID NO: 387573 - DNA, 75 bp, synthetic construct
  source 1..75: mol_type = other DNA
taggggctagcagagctgatatagcagtgatcaatgggcttatacatggttatgagttgaagagcaagagtgata

SEQ ID NO: 387574 - DNA, 75 bp, synthetic construct
  source 1..75: mol_type = other DNA
tcgttcaaaacataatttgttaatgctttttcatacaagtgggatgcatagtttattccttgatgaattgtgttt

SEQ ID NO: 387575 - DNA, 75 bp, synthetic construct
  source 1..75: mol_type = other DNA
ctggatgctatgtctttgccttcgtccatgaataaaatacagaacgtaactataggtgataaactctggctggtc

SEQ ID NO: 387576 - DNA, 75 bp, synthetic construct
  source 1..75: mol_type = other DNA
ggcctcgaccggaaattctacgaaatctgcgccctgtccgagctgaagaacgccctgcgctccggcgacatctgg

SEQ ID NO: 387577 - DNA, 75 bp, synthetic construct
  source 1..75: mol_type = other DNA
atacaggaaggtcaaccggaagagcagccgcaaaccacacagacgcaaccattccagtcagacagcggcattgac

SEQ ID NO: 387578 - DNA, 75 bp, synthetic construct
  source 1..75: mol_type = other DNA
tcacctatgaaagtattactcaggagcactgtgttgcaggaaccagtgcatatagcttatgggaagagagactct

SEQ ID NO: 387579 - DNA, 75 bp, synthetic construct
  source 1..75: mol_type = other DNA
gcaaccattccagccagatagcggaattgataatcaatggcgctcttaccgtgtcgaacccggtaaaacgatggc

SEQ ID NO: 387580 - DNA, 75 bp, synthetic construct
  source 1..75: mol_type = other DNA
acacaaagtagcgccagtgcgttccgcagcgttacgccgtgaactgaaagcccgtatcaccgttgccagctactt

SEQ ID NO: 387581 - DNA, 75 bp, synthetic construct
  source 1..75: mol_type = other DNA
acgcgcagaaacagcagatccgcgaaatcatgaaaggccagcgtgaccagatgaaacgtccgccgctggaagaac

SEQ ID NO: 387582 - DNA, 75 bp, synthetic construct
  source 1..75: mol_type = other DNA
aaacattgaaagaaagaaaaaaaatgtgatgcgtgaagtacgggtgcaggggagtgatgcatttgttattcgcag

SEQ ID NO: 387583 - DNA, 75 bp, synthetic construct
  source 1..75: mol_type = other DNA
atggaatatgagcagcgcaaaggagaactcccccgcctgtcgcaacgctggctcgctaagcgtctggaggtggtc

SEQ ID NO: 387584 - DNA, 75 bp, synthetic construct
  source 1..75: mol_type = other DNA
aacacctcgcctacctggagagtaccaacattacgctgattgatatgggtatgggatatgacctgcgtaaagccg

SEQ ID NO: 387585 - DNA, 75 bp, synthetic construct
  source 1..75: mol_type = other DNA
tgaaaccaatattgttagcgcaaaagcgttacacaaagcgttgggcgtgggaaaagacttctctacatggatcac

SEQ ID NO: 387586 - DNA, 75 bp, synthetic construct
  source 1..75: mol_type = other DNA
aggcatattaacaacataatgtacatgccgaataaattgctatctaaaacaatagtttcagtaacatttgaaaac

SEQ ID NO: 387587 - DNA, 75 bp, synthetic construct
  source 1..75: mol_type = other DNA
agctgcatcggctggtttaccaatgttgctaagtgatgttggtggctgtagtgagttaattgataatctaaaccc

SEQ ID NO: 387588 - DNA, 75 bp, synthetic construct
  source 1..75: mol_type = other DNA
ttgggacatggaaattgtcggaatcgataatagtaatccgtacagaaaaattataattgatgatgcattaattaa

SEQ ID NO: 387589 - DNA, 75 bp, synthetic construct
  source 1..75: mol_type = other DNA
ttgagcaacgtgtattaaatacactcaatgaattttctggttatactcatgttatggttataggtggtggcgcag

SEQ ID NO: 387590 - DNA, 75 bp, synthetic construct
  source 1..75: mol_type = other DNA
ttagatatttctcaggtaatggggaaattatcgggaatcagtaaaatatacggagactcatctcttggtgtatct

SEQ ID NO: 387591 - DNA, 75 bp, synthetic construct
  source 1..75: mol_type = other DNA
tcctacgcagccaattcggcgcaaggcgatgtgcgtaataccggtgtaatcggctttgccgcctttgaattacaa

SEQ ID NO: 387592 - DNA, 75 bp, synthetic construct
  source 1..75: mol_type = other DNA
catgatcgacctgtctgaagaatctctgcaagagaacatcgaaatctgctctaaatacctggagcgcatgtccaa

SEQ ID NO: 387593 - DNA, 75 bp, synthetic construct
  source 1..75: mol_type = other DNA
acagtcccttccagcaaaaactcgccgcgctgtttgccgatgccaaagcgcagggcatcaaaaatccggtgatgg

SEQ ID NO: 387594 - DNA, 75 bp, synthetic construct
  source 1..75: mol_type = other DNA
tcaccactgacgccgccattgatagtggcgtattgctggaacggttgattgcgcaaaacccggttagttacaact

SEQ ID NO: 387595 - DNA, 75 bp, synthetic construct
  source 1..75: mol_type = other DNA
ggtggaacgccaggcaattcctgaacaaaccacgtttgaacagatggttgctcgcgccgccgcacttaccgccac

SEQ ID NO: 387596 - DNA, 75 bp, synthetic construct
  source 1..75: mol_type = other DNA
ggggtcaacggcaaattcgtcgtgaaaatggtgaaccaagctataacctgtttggcgtcaaagcctctgccaact

SEQ ID NO: 387597 - DNA, 75 bp, synthetic construct
  source 1..75: mol_type = other DNA
gatgatggttaaacagatgacaccagagcagccgttgccagatgaagcaacgccagcggcaccgatgaaattccc

SEQ ID NO: 387598 - DNA, 75 bp, synthetic construct
  source 1..75: mol_type = other DNA
aacaacacgataaacgttctgacatcaaagaacgtgaatggcaggtggataaagcacgtatcatgaaaaacgctc

SEQ ID NO: 387599 - DNA, 75 bp, synthetic construct
  source 1..75: mol_type = other DNA
gtacacggtgtttacaagccgggtaacgttgttctgactccgactatcctgcgcgactctcaggaatatgtttct

SEQ ID NO: 387600 - DNA, 75 bp, synthetic construct
  source 1..75: mol_type = other DNA
ggctgcgtgccggtcagacttctatgatcgctcgtctggaaaaagcattccaggaactgaacgcgatcgacgttc

SEQ ID NO: 387601 - DNA, 75 bp, synthetic construct
  source 1..75: mol_type = other DNA
cgcttctgcactgtacacccagccggaagacgttgattacgcatacaccgaactgagcaaaatcagcccgcgttt

SEQ ID NO: 387602 - DNA, 75 bp, synthetic construct
  source 1..75: mol_type = other DNA
atcctggcagtcgttctcccgtcaggaaaaacaagcttccgcccgccgtttcacccgcagccagtcgctgaacgt

SEQ ID NO: 387603 - DNA, 75 bp, synthetic construct
  source 1..75: mol_type = other DNA
ctatccgtcgttatttcatccagtgcgaggaagaattacagcgtagcgtgcctgaaatcgccgcccgctatcgtc

SEQ ID NO: 387604 - DNA, 75 bp, synthetic construct
  source 1..75: mol_type = other DNA
cggaatggcgaaagaactggcaatgatcgaacgcaatgatcagggtcgcgctatccgtcgttatttcatccagtg

SEQ ID NO: 387605 - DNA, 75 bp, synthetic construct
  source 1..75: mol_type = other DNA
accacagaaatcatcacaacacctccacccggtgatttttatcggcttgatggtgataagtgggtgtatgacgca

SEQ ID NO: 387606 - DNA, 75 bp, synthetic construct
  source 1..75: mol_type = other DNA
catcaatgaaggttttagactggctggataccgaacaattatcctttgttttgcctgacagtgttgtttcggtaa

SEQ ID NO: 387607 - DNA, 75 bp, synthetic construct
  source 1..75: mol_type = other DNA
aatgcccagcggcatattgccgccgttgaggcgctggaagatatccaggcagttcaggcgtatgactactccacg

SEQ ID NO: 387608 - DNA, 75 bp, synthetic construct
  source 1..75: mol_type = other DNA
catattgcggcagtggatgccctgggcgatattgccgccgttgaggcttacgactggtccctggggtggcaacca

SEQ ID NO: 387609 - DNA, 75 bp, synthetic construct
  source 1..75: mol_type = other DNA
ttccgcccggtctgatgtggcaaaccaaaaataacgggctgattgaactgaccaacgcaatcgccgcacagtttg

SEQ ID NO: 387610 - DNA, 75 bp, synthetic construct
  source 1..75: mol_type = other DNA
agctgtaaatgaattagaatttcttttgcctaaacttctatcatctatcatcaacaattcgtataaaaaccggca

SEQ ID NO: 387611 - DNA, 75 bp, synthetic construct
  source 1..75: mol_type = other DNA
gccgcgaactcacggtggcagagcttgaagatcggttagcaccggatctcggtctggatgataacggttcgttgc

SEQ ID NO: 387612 - DNA, 75 bp, synthetic construct
  source 1..75: mol_type = other DNA
attatggttatgggatggaaaagcagagagttatggctggggaagaaattctgcacaggaagcactgttctccgt

SEQ ID NO: 387613 - DNA, 75 bp, synthetic construct
  source 1..75: mol_type = other DNA
caccgtcagctttgatgaaaccctaaaaccgtttgtgcgcgatgcgtccggcagtcgcctgaaagacctgcccaa

SEQ ID NO: 387614 - DNA, 75 bp, synthetic construct
  source 1..75: mol_type = other DNA
ccaggtgactttccagtatgacgacggcaaaatcgttggtatcgatgctgtcgtgctttccactcagcactctga

SEQ ID NO: 387615 - DNA, 75 bp, synthetic construct
  source 1..75: mol_type = other DNA
aaaacatcgttgctgcaggtctggccgaccgttgtgaaattcaggtttcctacgcgatcggcgtggcagaaccga

SEQ ID NO: 387616 - DNA, 75 bp, synthetic construct
  source 1..75: mol_type = other DNA
cccgcaggatggaggctggatcggctggatgatcaaacctctgtggccgctggtcgttaatcatggaaatcgatg

SEQ ID NO: 387617 - DNA, 75 bp, synthetic construct
  source 1..75: mol_type = other DNA
aagccacacaccggggaacggatgaccttgcgcgtttgttcagccgtttcgccaggacaaaacaactgcgtaaag

SEQ ID NO: 387618 - DNA, 75 bp, synthetic construct
  source 1..75: mol_type = other DNA
gtataacccgcggtctgcgcgacgatgaagcacatccgtatgtctatggccgctatgttaacgacagtgaattta

SEQ ID NO: 387619 - DNA, 75 bp, synthetic construct
  source 1..75: mol_type = other DNA
cattaggccataaagatggctggtcctctgataatcgcgcttttcttcgccaaatgttaacacctgaaatgattg

SEQ ID NO: 387620 - DNA, 75 bp, synthetic construct
  source 1..75: mol_type = other DNA
ggctcggcgatgacctatttcgacattcgcataccaggcctgaaaatgacggtggtagctgcggatggccagtat

SEQ ID NO: 387621 - DNA, 75 bp, synthetic construct
  source 1..75: mol_type = other DNA
ataacggcatcatctttacgccacagtctgacctggtgatcctgaactacatcgccaactatatcattcaaaaca

SEQ ID NO: 387622 - DNA, 75 bp, synthetic construct
  source 1..75: mol_type = other DNA
ctcctactggacgatgggcttcaaccagcatacccgtggcgtgtgggccaacaacctggtctacaacctgcacct

SEQ ID NO: 387623 - DNA, 75 bp, synthetic construct
  source 1..75: mol_type = other DNA
ggtctacaacctgcacctgctgaccggcaaaatttcccagccgggttgcggtccgttctccctgaccgggcagcc

SEQ ID NO: 387624 - DNA, 75 bp, synthetic construct
  source 1..75: mol_type = other DNA
tacatcctttaccgcctccaccgggcggttttttttattctgaaccctaaaaaaagaaacacggacactgataat

SEQ ID NO: 387625 - DNA, 75 bp, synthetic construct
  source 1..75: mol_type = other DNA
gattaaagaattatctttctctacattcaatctcaaaagactggataaagaaatagacttcatctattccactct

SEQ ID NO: 387626 - DNA, 75 bp, synthetic construct
  source 1..75: mol_type = other DNA
atggaaataaatgtcactgcgccggcattgctgacggatgagcatatacttcagccatttgactgtgggaatgaa

SEQ ID NO: 387627 - DNA, 75 bp, synthetic construct
  source 1..75: mol_type = other DNA
tccgtatccccgggctgaaaatgacggtcgtggctgcagatggccagtatgtaaacccggttaccgttgacgaat

SEQ ID NO: 387628 - DNA, 75 bp, synthetic construct
  source 1..75: mol_type = other DNA
ggttgtgtttagggctggggagagtcggggaagactacgaaagcccgctctcctgcgacgacttttatcacagga

SEQ ID NO: 387629 - DNA, 75 bp, synthetic construct
  source 1..75: mol_type = other DNA
cttgcttacctctataaaggaaagccaacaccgctaaaatatagcgatgtgttacatcgagcaggttgctctgaa

SEQ ID NO: 387630 - DNA, 75 bp, synthetic construct
  source 1..75: mol_type = other DNA
gcttgatatcctcgccgctatcggtagtgatatcgccctgatgcagcttaacggcattgctcagaaactgaaatt

SEQ ID NO: 387631 - DNA, 75 bp, synthetic construct
  source 1..75: mol_type = other DNA
gtaaaagcgcaggcggcaagccagctgttgcaaaccctgcgcaaccacgacggacgctatcttattctctactct

SEQ ID NO: 387632 - DNA, 75 bp, synthetic construct
  source 1..75: mol_type = other DNA
gcacgcctcttcacgactgatgattgttgaggagagcgaggatacgctggccttagcggagaaagtgatagcagc

SEQ ID NO: 387633 - DNA, 75 bp, synthetic construct
  source 1..75: mol_type = other DNA
tacgctaaatcgtcacggcctgtttaccacgccggagatcgcccatcgctttagcgcaatagtacaggcgctgtc

SEQ ID NO: 387634 - DNA, 75 bp, synthetic construct
  source 1..75: mol_type = other DNA
gggccatcgtaaagccgtaaataagaaacgtgcagcaagctatatccgcaaaatccgtgaaatgctggtcgcagg

SEQ ID NO: 387635 - DNA, 75 bp, synthetic construct
  source 1..75: mol_type = other DNA
aaatgaagtttattgcacgctatgtggcaaccaatgcgaccgtaacggctggtacagcgaacgctgattcacaat

SEQ ID NO: 387636 - DNA, 75 bp, synthetic construct
  source 1..75: mol_type = other DNA
agttcgaccgtgatttttctctggtgcaggctgtaccgcgtaacgtgcccaccagcagggagaaagcacgcgcca

SEQ ID NO: 387637 - DNA, 75 bp, synthetic construct
  source 1..75: mol_type = other DNA
ccggtttttccggagctgatgtcagtaaagaacaggctgccataagggcacttgtagaaagagtagtgaccaact

SEQ ID NO: 387638 - DNA, 75 bp, synthetic construct
  source 1..75: mol_type = other DNA
gtaacgccagtcccgaatgtcatggtttataccagcggcaaaaaaaatgccgatggtggtggagggcagcggcga

SEQ ID NO: 387639 - DNA, 75 bp, synthetic construct
  source 1..75: mol_type = other DNA
atgggcaccagaaaccaaagcactcccgctggtggcggcgggaaatgtaggaggtgcgaatgaacattctgttag

SEQ ID NO: 387640 - DNA, 75 bp, synthetic construct
  source 1..75: mol_type = other DNA
gtattccagctggcgagcgtgggctttattgagggattaagcggataccgcgatttccgccgccgggatgagaaa

SEQ ID NO: 387641 - DNA, 75 bp, synthetic construct
  source 1..75: mol_type = other DNA
actaccgcgccggtgctgaaggccacgcggcagtcgtaccacttcacggacgtctccgcgcagttcctcaatgac

SEQ ID NO: 387642 - DNA, 75 bp, synthetic construct
  source 1..75: mol_type = other DNA
caaatcatggcccagtggtttgcggtgaaagcctgcaagaagccgccaacaatatggaagagctggaggaaacgg

SEQ ID NO: 387643 - DNA, 75 bp, synthetic construct
  source 1..75: mol_type = other DNA
tttatttttaattcgcaaaaaagaaaacatggacactgataatgcccgtgcggtaatgccatgcaagttagcgat

SEQ ID NO: 387644 - DNA, 75 bp, synthetic construct
  source 1..75: mol_type = other DNA
tacgatgaaaacgtggttgatatggctaaatgtgtcaagccatcagcacgcggtgaacttgaaattactacactg

SEQ ID NO: 387645 - DNA, 75 bp, synthetic construct
  source 1..75: mol_type = other DNA
agtggttgtcggcggaaggggtggcggctcaggccgaacgcctgaagaaaaccgagtacggtgcttatctgaagc

SEQ ID NO: 387646 - DNA, 75 bp, synthetic construct
  source 1..75: mol_type = other DNA
acatctactttggccagagcttcggtaaaaagctggaagcggcggcggcaaagacctccggtgccacggtgtttg

SEQ ID NO: 387647 - DNA, 75 bp, synthetic construct
  source 1..75: mol_type = other DNA
cttcccgtacccgcaaatggatgtgaactttaagcgggtgaaagaaaataaagaaaacgaagcggtaactcgtta

SEQ ID NO: 387648 - DNA, 75 bp, synthetic construct
  source 1..75: mol_type = other DNA
tgggacgtgctggaacgtattaaacgcgagtttgatgctgctggtatcagcttcccatatccgcaaatggatgtg

SEQ ID NO: 387649 - DNA, 75 bp, synthetic construct
  source 1..75: mol_type = other DNA
ttttagcattacacagagattatttcaaatatctacggtccctcttacgatttataacatcccgttatgggctgc

SEQ ID NO: 387650 - DNA, 75 bp, synthetic construct
  source 1..75: mol_type = other DNA
aagctaacgcgagccaagtttatgcggtgctgacagaccgtggcgcgcaattagaagctgcggcgctggcgtcag

SEQ ID NO: 387651 - DNA, 75 bp, synthetic construct
  source 1..75: mol_type = other DNA
acggcggcgttatctttgcttacctgggggggattgcgctgcacgtctggacgatcaaaggttatttcgaaacta

SEQ ID NO: 387652 - DNA, 75 bp, synthetic construct
  source 1..75: mol_type = other DNA
gggcggaattgcgctgcacgtctggacgattaaaggttatttcgaaacgatcgacggctcgctggaagaagcggc

SEQ ID NO: 387653 - DNA, 75 bp, synthetic construct
  source 1..75: mol_type = other DNA
agttacgccatccagccgtcgccggacggcctggcgcaggcctttatcattggcgagaagttcatcggcaacgat

SEQ ID NO: 387654 - DNA, 75 bp, synthetic construct
  source 1..75: mol_type = other DNA
ctgttaacgtagttattgataacagtagtggaatgagtcaggccgatgctgataagcgatatttgcagataagca

SEQ ID NO: 387655 - DNA, 75 bp, synthetic construct
  source 1..75: mol_type = other DNA
atattaacagataaaggggaactgtactcagttgcacgttcaccggatattttaaaacctacggacagcaacggc

SEQ ID NO: 387656 - DNA, 75 bp, synthetic construct
  source 1..75: mol_type = other DNA
cacaaactatccgcgttttcaatttacttgatggaaccaatgaatttattggcgaaagtgacgcatatattccgc

SEQ ID NO: 387657 - DNA, 75 bp, synthetic construct
  source 1..75: mol_type = other DNA
gctttttcgccattccaaaactaagtaatgacgcttatctccaggtacagatcaaagactgggaacaattgaatt

SEQ ID NO: 387658 - DNA, 75 bp, synthetic construct
  source 1..75: mol_type = other DNA
gatgcgctgtggcttaacggtaacgcatataatgacgcttcgcaggttcataaaatactggctttttacgatgct

SEQ ID NO: 387659 - DNA, 75 bp, synthetic construct
  source 1..75: mol_type = other DNA
tcgccatgttgcttaccgggtgtctgtcctccgcctggggggcgcagttaactcaaccgctaacactcaaagacg

SEQ ID NO: 387660 - DNA, 75 bp, synthetic construct
  source 1..75: mol_type = other DNA
cgatgatccgcaggttattatcgctaaggtctatgccccaaaaaccgtcactgcgaaagcggtggtgcgttatat

SEQ ID NO: 387661 - DNA, 75 bp, synthetic construct
  source 1..75: mol_type = other DNA
gagcgaccagccgggcgcaagtatgccgcacaggcagcaccagcttcggcgcgaccagaaagtttcaccgcgcaa

SEQ ID NO: 387662 - DNA, 75 bp, synthetic construct
  source 1..75: mol_type = other DNA
gtgagttcaggtgcaaaggttatctcggcatttatccgggagacagttgcaggcactacgccagcaagtggtgac

SEQ ID NO: 387663 - DNA, 75 bp, synthetic construct
  source 1..75: mol_type = other DNA
gtttcggcgcggaatggtcaggtgattctctgacaatggggaatgagcgaataacattttctctggcgacctatg

SEQ ID NO: 387664 - DNA, 75 bp, synthetic construct
  source 1..75: mol_type = other DNA
gtgtttaattacttgtgtagggtggctaatgaacgtattttttatgcccgtggtaataacagaaatatcgatgag

SEQ ID NO: 387665 - DNA, 75 bp, synthetic construct
  source 1..75: mol_type = other DNA
cggctcctggtggtcacagtgggtaaagccggggcgttattacgttacaaccagtgataaacaatatctgacacc

SEQ ID NO: 387666 - DNA, 75 bp, synthetic construct
  source 1..75: mol_type = other DNA
gactgagcggcttccgcttcttcgcccggatgcgtcgaacctgacatggtcgatggattttgtcatggatgcact

SEQ ID NO: 387667 - DNA, 75 bp, synthetic construct
  source 1..75: mol_type = other DNA
cggcatttatccgggagacagttgcaggcaccacgccagcaagtggtgactggagtttattaaaacgcacaagct

SEQ ID NO: 387668 - DNA, 75 bp, synthetic construct
  source 1..75: mol_type = other DNA
tgtgtgcattccgaagcgagtttgtcgatagggattatacaaactatattacgctaatttttgagtcagcaaata

SEQ ID NO: 387669 - DNA, 75 bp, synthetic construct
  source 1..75: mol_type = other DNA
atgtcttctgtttctacatcgggttctggcgcacctaagtcgtcattcagcttcgggcgtatctgggatcagtac

SEQ ID NO: 387670 - DNA, 75 bp, synthetic construct
  source 1..75: mol_type = other DNA
ctactctggcgacgatgcagattgtgcgcggcctggcgtatatcatctctgatggtaaagcggttggcatcgagg

SEQ ID NO: 387671 - DNA, 75 bp, synthetic construct
  source 1..75: mol_type = other DNA
cctggtcaatggctttgttatcgccaaactgaaaataaatgccctgatcacgacactggcaacgatgcagattgt

SEQ ID NO: 387672 - DNA, 75 bp, synthetic construct
  source 1..75: mol_type = other DNA
cagatggtgacttgtgggctttcattggcgacgagcgaaagatgggaattccggaaaacgaccggattcgcgaac

SEQ ID NO: 387673 - DNA, 75 bp, synthetic construct
  source 1..75: mol_type = other DNA
tctggcgacacgctttcaagcatcgcttcacgtctcggcgtaagcacaaagaatttgcagcagtggaacaatctg

SEQ ID NO: 387674 - DNA, 75 bp, synthetic construct
  source 1..75: mol_type = other DNA
tgtccgcactaaaatcattatctttgttctttctggtctggtatcggcaatcgccgggattgtactggcttcacg

SEQ ID NO: 387675 - DNA, 75 bp, synthetic construct
  source 1..75: mol_type = other DNA
tcgagttgccgcaggtggaagaaaccggctgttttggcgcagcgcttgccgcccgcgtcggtacaggcgtttatc

SEQ ID NO: 387676 - DNA, 75 bp, synthetic construct
  source 1..75: mol_type = other DNA
ttgttcctgtcaatattttctctgtaacgcaattattgcatttacttatagttatattatcttttattttttctc

SEQ ID NO: 387677 - DNA, 75 bp, synthetic construct
  source 1..75: mol_type = other DNA
atgtttttatacctctcaatatttatatgcatttctattctatctttttttcctaaccagaaatatttgttaaaa

SEQ ID NO: 387678 - DNA, 75 bp, synthetic construct
  source 1..75: mol_type = other DNA
cctggcgattggcgggaacgaagaggctgcgcgtctggcgggtgtaccggttgttcgcaccaaaattattatctt

SEQ ID NO: 387679 - DNA, 75 bp, synthetic construct
  source 1..75: mol_type = other DNA
atgaaagcttctttgcccttggttacgctaactggttcggtctgcctgcgccaatctggctcaccgtcgcgtgtc

SEQ ID NO: 387680 - DNA, 75 bp, synthetic construct
  source 1..75: mol_type = other DNA
gcctggtcaatggctttgttatcgccaaactgaaaataaatgctctgatcacgacactggcaacgatgcagattg

SEQ ID NO: 387681 - DNA, 75 bp, synthetic construct
  source 1..75: mol_type = other DNA
ggttaccggcgcatctggcagttattgcgccgggagggccttcacgtcaaccacaagcgcgtttaccgcatctat

SEQ ID NO: 387682 - DNA, 75 bp, synthetic construct
  source 1..75: mol_type = other DNA
atgcctttcccttgcccgccaggcgggagcactgaaaaacgccacgttgccctctggtatgcagcaactgaacat

SEQ ID NO: 387683 - DNA, 75 bp, synthetic construct
  source 1..75: mol_type = other DNA
tttcacaggcagatgttggcgtggttgatgactggaaagcggtgctggaggcactggtgacaaccattcacgcag

SEQ ID NO: 387684 - DNA, 75 bp, synthetic construct
  source 1..75: mol_type = other DNA
cagtggcagcgaacgcctgcggacgttgttctctttccgccgggaacgtttggcgatgaactgtcgacccggctg

SEQ ID NO: 387685 - DNA, 75 bp, synthetic construct
  source 1..75: mol_type = other DNA
gatgttggcgtggttgatgactggaaagcggtgctggaggcactggtgacaaacattcacgcagattgccaataa

SEQ ID NO: 387686 - DNA, 75 bp, synthetic construct
  source 1..75: mol_type = other DNA
acaggtgctggatgcgctggtggaacagtggcagcgaacgcctgcggacgttgttctctttccgccgggaacgtt

SEQ ID NO: 387687 - DNA, 75 bp, synthetic construct
  source 1..75: mol_type = other DNA
tgtccccggcgcgcttcccgactggctggttagcacagaggatctgaaaaatgttacccgtgacccattagctga

SEQ ID NO: 387688 - DNA, 75 bp, synthetic construct
  source 1..75: mol_type = other DNA
acaaaaaacaaccgacctgatggcttatattcattacctttctgacaggcggattggattcagaaacagaattga

SEQ ID NO: 387689 - DNA, 75 bp, synthetic construct
  source 1..75: mol_type = other DNA
ttgaccaagacgttactggacggccccggtcgcgtgctggagtcggtttatccccgctttttagtggatatggcg

SEQ ID NO: 387690 - DNA, 75 bp, synthetic construct
  source 1..75: mol_type = other DNA
ggccgccgacttgatcctgccgaccgcaatgtgggtagagaaagagggggcttacggtaacgccgaacgccgtac

SEQ ID NO: 387691 - DNA, 75 bp, synthetic construct
  source 1..75: mol_type = other DNA
aaagaagggggacgatatgatttacctatcgccattgcgttgctggcggcctcagaacagcttacagccaatatg

SEQ ID NO: 387692 - DNA, 75 bp, synthetic construct
  source 1..75: mol_type = other DNA
gcgcagccctgggagtaaatgcgcccccaatcactgttgaggtacatatcagtaaaggtctacccggcttaacga

SEQ ID NO: 387693 - DNA, 75 bp, synthetic construct
  source 1..75: mol_type = other DNA
aaacaaatttctctgaatgaatatgaggaagcatttaaaaaatctgattttaaaattttactggggcgcctgaca

SEQ ID NO: 387694 - DNA, 75 bp, synthetic construct
  source 1..75: mol_type = other DNA
ctggctggcagaacaggatttcagcggttgtacactgacgcactggcgaattgaacctcagcccgtagtggcgga

SEQ ID NO: 387695 - DNA, 75 bp, synthetic construct
  source 1..75: mol_type = other DNA
cggcgtaccgccaattaaagaactgcttaaacgcaccgaagaacatattaaaggcatggtggtgccgggcacgct

SEQ ID NO: 387696 - DNA, 75 bp, synthetic construct
  source 1..75: mol_type = other DNA
acattggcctgccggacttctttattccgcaaggaactcaggaagaaatgcgcgccgaactcggcctcgatgccg

SEQ ID NO: 387697 - DNA, 75 bp, synthetic construct
  source 1..75: mol_type = other DNA
ctcaaacgtaccgaagaacatattaaaggcatggtggtgcctggcacgttgtttgaagagctgggctttaactac

SEQ ID NO: 387698 - DNA, 75 bp, synthetic construct
  source 1..75: mol_type = other DNA
ggttaccagcgcatctggcagttattacgtcgggagggccttcacgtcaaccacaagcgggtataccgcatttac

SEQ ID NO: 387699 - DNA, 75 bp, synthetic construct
  source 1..75: mol_type = other DNA
tcgaccacattcatcactgaattacctgacgccggctgaatttgcagcgggctggcgaaacgggaaatatgaaga

SEQ ID NO: 387700 - DNA, 75 bp, synthetic construct
  source 1..75: mol_type = other DNA
ccaatccagagtcgacccgctatctcactttcctgaaagggcgagtagggcgcaaagtggctgatttctttatgg

SEQ ID NO: 387701 - DNA, 75 bp, synthetic construct
  source 1..75: mol_type = other DNA
ggcatggtcgagttttcacgtaaattcccggatcgttacttcgacgtggcaatcgccgagcaacacgcggtgacc

SEQ ID NO: 387702 - DNA, 75 bp, synthetic construct
  source 1..75: mol_type = other DNA
cgaaagacaacaagctgatggcgattactccggcgatgcgtgaaggttccggcatggtcgagttttcacgtaaat

SEQ ID NO: 387703 - DNA, 75 bp, synthetic construct
  source 1..75: mol_type = other DNA
cggaatgtgccaaaacgcgcccggtgctggagggcagtttcagacatgcggtctcttgcctgaaagtcgatccgc

SEQ ID NO: 387704 - DNA, 75 bp, synthetic construct
  source 1..75: mol_type = other DNA
cgtcgtggtgagaaactggcgatccttaactttggtacgctgatgccagaagcggcgaaagtcgctgaatcgctg

SEQ ID NO: 387705 - DNA, 75 bp, synthetic construct
  source 1..75: mol_type = other DNA
gccgattggtaaaggtatcgtgaagcgtcgcggtgaaaaactggcgatcctcaactttggtactttgatgcagga

SEQ ID NO: 387706 - DNA, 75 bp, synthetic construct
  source 1..75: mol_type = other DNA
aacgccacgctggtcgatatgcgttttgtgaaaccgcttgatgaagcgttaattctggaaatggccgccagccat

SEQ ID NO: 387707 - DNA, 75 bp, synthetic construct
  source 1..75: mol_type = other DNA
ttcagttcgacagactggatttcactaacttttacgaagacctgatgaataaccagaaaatcccggacagtggtg

SEQ ID NO: 387708 - DNA, 75 bp, synthetic construct
  source 1..75: mol_type = other DNA
tctgctccggtggcgtgaacacgcactgtacataccatacccggaacggatgggggcaaatccatcaggcgtttg

SEQ ID NO: 387709 - DNA, 75 bp, synthetic construct
  source 1..75: mol_type = other DNA
atggagttcaaaatgtgacagggagagtgtgacatatgagtgtaaggcttcagttaaggaaacactcagtatcat

SEQ ID NO: 387710 - DNA, 75 bp, synthetic construct
  source 1..75: mol_type = other DNA
cctctattcctccattagctatgctgataaggatgtagatcttaccgcgaatattgtatccagcacttgtcaagt

SEQ ID NO: 387711 - DNA, 75 bp, synthetic construct
  source 1..75: mol_type = other DNA
gcgggatcgcttgcacaggcgaataatcaaatttttagtaatgaatatgaacagcaggctaccggggcgaaaaac

SEQ ID NO: 387712 - DNA, 75 bp, synthetic construct
  source 1..75: mol_type = other DNA
aaccagaaaatcccggacagtggtgttctgacgcagaaagtaaaagaacagattgctgaccagctgaagcaggca

SEQ ID NO: 387713 - DNA, 75 bp, synthetic construct
  source 1..75: mol_type = other DNA
atgaaacgcgttatcgtgatgatgctggctgcgctgaccaccttcggaacgggattgcaggccagtgataaatac

SEQ ID NO: 387714 - DNA, 75 bp, synthetic construct
  source 1..75: mol_type = other DNA
cgctggggaaagccaaagagaaactgctcaccgtttatgtcggcacgtactgctcgaagaaggcgctgggtgtgt

SEQ ID NO: 387715 - DNA, 75 bp, synthetic construct
  source 1..75: mol_type = other DNA
actgccaataccaaccagatggtggtggagtttatggggatgcagttgccaggctcttcttttgttcatccggat

SEQ ID NO: 387716 - DNA, 75 bp, synthetic construct
  source 1..75: mol_type = other DNA
tgttcaggataaagccgatatcgtcacgaacggcacgtacgataagtgtgaaaccgtgaatgtcagtaaaacgga

SEQ ID NO: 387717 - DNA, 75 bp, synthetic construct
  source 1..75: mol_type = other DNA
ggacgattaatatcgacgggaaaacctataccgtttacagcgactgctgggcctggaaagacacgtatctgaaac

SEQ ID NO: 387718 - DNA, 75 bp, synthetic construct
  source 1..75: mol_type = other DNA
gcctgcagaagaagaaagcctactgccagtttgattcgaaactggcacagattgttcaggctcaggggcgtaagg

SEQ ID NO: 387719 - DNA, 75 bp, synthetic construct
  source 1..75: mol_type = other DNA
ctgtatgcgcgcaaagacattaaacagctgggcattgcgccgatgaccagtatgttcagctgcggtactaatgaa

SEQ ID NO: 387720 - DNA, 75 bp, synthetic construct
  source 1..75: mol_type = other DNA
tggcattgtttgtagtaatggcaattatttgttatttcccgcagcttagtctgatgctgccaggattattttcga

SEQ ID NO: 387721 - DNA, 75 bp, synthetic construct
  source 1..75: mol_type = other DNA
gttttcagcagcggttaatattgcctctgcccccattggcctgatgatcccaccgagcaatgtgttgattgttta

SEQ ID NO: 387722 - DNA, 75 bp, synthetic construct
  source 1..75: mol_type = other DNA
ggtgaagtcatgcagctggtggagacagacaaggaacggcatcaggttacgatgcgacggctggaatgttccagg

SEQ ID NO: 387723 - DNA, 75 bp, synthetic construct
  source 1..75: mol_type = other DNA
acagtaaacaacactggaaaaaccatcgtcgacggcacaggcgccaccggaactgaaatcgcgggtaacaacgcg

SEQ ID NO: 387724 - DNA, 75 bp, synthetic construct
  source 1..75: mol_type = other DNA
ggtattctgatcgacggtgataaagccatcgtcaacaatgacggcgacaacgccatcagcaacggcggcaccggc

SEQ ID NO: 387725 - DNA, 75 bp, synthetic construct
  source 1..75: mol_type = other DNA
cggtatgacggttaccgatccggattccattggtattctgatcgacggcgacaaattaacggtgatgaagccact

SEQ ID NO: 387726 - DNA, 75 bp, synthetic construct
  source 1..75: mol_type = other DNA
acggcaacgacataaacgttactctggaactgaccggcgaaagaaacttttatgtgcgcgttccggatgcctatc

SEQ ID NO: 387727 - DNA, 75 bp, synthetic construct
  source 1..75: mol_type = other DNA
agacattaaacagctgggcattgcgccgatgaccagtatgttcagctgcggtactaatgaacgtcggatgtgcga

SEQ ID NO: 387728 - DNA, 75 bp, synthetic construct
  source 1..75: mol_type = other DNA
tgagtttgcattccagtatcgtctgtactggagtgcgcaaccgcctgttcattgcccattagcgcgcgttatggc

SEQ ID NO: 387729 - DNA, 75 bp, synthetic construct
  source 1..75: mol_type = other DNA
atggtacatgaccgcatagcggaggaactggaggcgaaaggcttttaccggagggcggcggcgcgatggggtgaa

SEQ ID NO: 387730 - DNA, 75 bp, synthetic construct
  source 1..75: mol_type = other DNA
gctgacagaatggcgatttcggaatccggctatgagccacctgctattttatggggaatagttctcatgccagtc

SEQ ID NO: 387731 - DNA, 75 bp, synthetic construct
  source 1..75: mol_type = other DNA
ctaaatgcatgaaggtaacaattcaggacaaagtgacggacaagttctacaaagccacggctacactggataacg

SEQ ID NO: 387732 - DNA, 75 bp, synthetic construct
  source 1..75: mol_type = other DNA
gccgggtacgtgtactttttacggtacagccaacaccaatcagatggtggttgaatttatggggatgcagttgcc

SEQ ID NO: 387733 - DNA, 75 bp, synthetic construct
  source 1..75: mol_type = other DNA
taaacaaacaatttatgcctctgcttcggcacaaggaacaggttcagcaacgcaaaatttaaatttgtctgttgc

SEQ ID NO: 387734 - DNA, 75 bp, synthetic construct
  source 1..75: mol_type = other DNA
cactctgaagatgatcaaccgcctggtggaacacgacagtggcgtgatccgttttgccggagaagagattcgttc

SEQ ID NO: 387735 - DNA, 75 bp, synthetic construct
  source 1..75: mol_type = other DNA
tgtgggagtggcgcgtgcactggctgccgatccgcaagtcttactgatggatgaaccggcgcactggacccggta

SEQ ID NO: 387736 - DNA, 75 bp, synthetic construct
  source 1..75: mol_type = other DNA
aaccgagttggcgcacatcgttgatgagacgctggcggcaaataaccttgatcgttcccaactggactggctggt

SEQ ID NO: 387737 - DNA, 75 bp, synthetic construct
  source 1..75: mol_type = other DNA
ccacattgccgcgccaaacgaaaccgtttctaccatgggcttcgaagcggcgacgcgtgcaattgaaatggcggg

SEQ ID NO: 387738 - DNA, 75 bp, synthetic construct
  source 1..75: mol_type = other DNA
tgcatcctatgacctggatgtaaacggtgtaatgctgggtggtgatacccgcttcatgactgaagatggtagctg

SEQ ID NO: 387739 - DNA, 75 bp, synthetic construct
  source 1..75: mol_type = other DNA
tgtacttctgtacggtggtctgtgtgctgtatcttctttcgggtgggtacagggcagtgcgcgattgctggcgca

SEQ ID NO: 387740 - DNA, 75 bp, synthetic construct
  source 1..75: mol_type = other DNA
tggcgcaggcagattgataaaagggccgcagagaaaatcagcgccagtcagtcagccggaagcaaacccgaagag

SEQ ID NO: 387741 - DNA, 75 bp, synthetic construct
  source 1..75: mol_type = other DNA
gcagcgagaaaatcatcgccacggaaacaggcagtgtctggtcgccgaaagttttattacaagataaagcactgt

SEQ ID NO: 387742 - DNA, 75 bp, synthetic construct
  source 1..75: mol_type = other DNA
aagcgcactttgccaaactgctggcaaaccaggaagaagggacacaaatccgcgtatttgtgatcaatcccggca

SEQ ID NO: 387743 - DNA, 75 bp, synthetic construct
  source 1..75: mol_type = other DNA
tcggattgaaacaatacttattgctcaggagaataagggaactcatacagtcaacctgaatattaaggatggctc

SEQ ID NO: 387744 - DNA, 75 bp, synthetic construct
  source 1..75: mol_type = other DNA
ggggcgtcaaaagagctttgggatagccgccctgaggggagcggctggagctggaaggattttacctgggatatc

SEQ ID NO: 387745 - DNA, 75 bp, synthetic construct
  source 1..75: mol_type = other DNA
gtttctactatgggattcgaagcggcgacgcgtgcaattgaaatggcgggcatcgataaagaccagattggactg

SEQ ID NO: 387746 - DNA, 75 bp, synthetic construct
  source 1..75: mol_type = other DNA
actgggaatcgatcggtggaacgtggggtgggagattcagtaaaccggacggaaatcattttagtctggaacata

SEQ ID NO: 387747 - DNA, 75 bp, synthetic construct
  source 1..75: mol_type = other DNA
cctccacaaccagtggtgcaagcaacacgtcgtccaccagtcagggcgatattatggaccaacgccgcgctaacg

SEQ ID NO: 387748 - DNA, 75 bp, synthetic construct
  source 1..75: mol_type = other DNA
aaggcaccggatctggcggtggtaattcatcgcaaggcccgcgcccgcagcttggcggtcgtgtcgttaccatcg

SEQ ID NO: 387749 - DNA, 75 bp, synthetic construct
  source 1..75: mol_type = other DNA
aggttacacgcatgaccggtaatggtaatgaatggatgccgatcggtaagatgatcgatgagaaagtggtggtga

SEQ ID NO: 387750 - DNA, 75 bp, synthetic construct
  source 1..75: mol_type = other DNA
tgaagatgtcaacacggttgcgggctttggtctctcgcgttacaccctcgaaccgtggctgaataatggcaaact

SEQ ID NO: 387751 - DNA, 75 bp, synthetic construct
  source 1..75: mol_type = other DNA
aaaaacagtttgcatacgcagcgactggccgtcgattttaatctgtttatcaaaggcgaatataagacagacagt

SEQ ID NO: 387752 - DNA, 75 bp, synthetic construct
  source 1..75: mol_type = other DNA
acttcaataagaacatgaacgtatataccgcttatcagatcaacctgcttgataagagtgattatgttctcgctc

SEQ ID NO: 387753 - DNA, 75 bp, synthetic construct
  source 1..75: mol_type = other DNA
gtgaaatctggcgcggttaagtatgctctggtcgtcggttccgatgtactggcgcgcacctgcgatccagcagat

SEQ ID NO: 387754 - DNA, 75 bp, synthetic construct
  source 1..75: mol_type = other DNA
gaacgcgaaaaaaggcagcggcatttccagcagtctgcacacgcaacgtctggccgtggacttcaatctgttcat

SEQ ID NO: 387755 - DNA, 75 bp, synthetic construct
  source 1..75: mol_type = other DNA
tgtttaccgtcatggtggccaacctgatccactgggcagaagaacgcggctaccggctgacgtttggtgaagcgt

SEQ ID NO: 387756 - DNA, 75 bp, synthetic construct
  source 1..75: mol_type = other DNA
gccaacagcctgcactgccagcggctggccgtggattttaacctgtttattaacggtgaatatcagacccgcaca

SEQ ID NO: 387757 - DNA, 75 bp, synthetic construct
  source 1..75: mol_type = other DNA
cgtaaaatgcacgccgcagggataaatcaccgcgactgctacatttgccactttttgcttcatttaccatttact

SEQ ID NO: 387758 - DNA, 75 bp, synthetic construct
  source 1..75: mol_type = other DNA
cctgacgcagagagacatatggcggtttatgaaggtttattttgggaagtctttacgtgaagttttattacagga

SEQ ID NO: 387759 - DNA, 75 bp, synthetic construct
  source 1..75: mol_type = other DNA
atgcttttgcagaggtcaaaaaaactgaacggcgaggtctttcgtgaactggagactcgtcgtacattacgcttt

SEQ ID NO: 387760 - DNA, 75 bp, synthetic construct
  source 1..75: mol_type = other DNA
acagagatccagacgttagaagagtatgatcaggacgctacgggtaaacttgctggctatcgtaaacttgaatca

SEQ ID NO: 387761 - DNA, 75 bp, synthetic construct
  source 1..75: mol_type = other DNA
cagatgttcgcgtaaagcgtatgcttattaagcgtgtcgcgatgatggtgcgcgatatgcatgctgcgggcatta

SEQ ID NO: 387762 - DNA, 75 bp, synthetic construct
  source 1..75: mol_type = other DNA
ctgatatacgtgttaagcgtatgctgattacacgagtggcaaccatggtgcgtaaaatgcacgcagcaggaataa

SEQ ID NO: 387763 - DNA, 75 bp, synthetic construct
  source 1..75: mol_type = other DNA
tacatggcagcaatgatccgcacactcaccccgctgatgaccaaaacacaaagtcagaaaaagctgcagtcactc

SEQ ID NO: 387764 - DNA, 75 bp, synthetic construct
  source 1..75: mol_type = other DNA
aaattcgcgctcgcgcctttcaaagcagagtttccacgcccgcaggcgtttcccaactggcaaacgctggagctg

SEQ ID NO: 387765 - DNA, 75 bp, synthetic construct
  source 1..75: mol_type = other DNA
tccgtcgtgagttttatcaggtgctgctgccgctgatgcaggagatgggtaaaactattttcgccatcagtcatg

SEQ ID NO: 387766 - DNA, 75 bp, synthetic construct
  source 1..75: mol_type = other DNA
tggcacaaagggacgaccctaaaggagattataaaaaatctgctctcattgcggatgcccgttttaggtgcagac

SEQ ID NO: 387767 - DNA, 75 bp, synthetic construct
  source 1..75: mol_type = other DNA
cattatggcgttgaccgctggcgtcagcatgaccgtttcattctccacgccgtttgcgctgggaatttttaagcc

SEQ ID NO: 387768 - DNA, 75 bp, synthetic construct
  source 1..75: mol_type = other DNA
agccgctaaagcaaaagcccaggaatacatggcggcaatgatccgcacgcttaccccgctgatgaccaaaacaca

SEQ ID NO: 387769 - DNA, 75 bp, synthetic construct
  source 1..75: mol_type = other DNA
ttgatagcgaagcattagccggaaaccgtttcgtaacttatcagggatcgagcgcatctaatccatttagtgctg

SEQ ID NO: 387770 - DNA, 75 bp, synthetic construct
  source 1..75: mol_type = other DNA
gctgctgataacgcggtatcaactgattcggttacgctgaataaagataagacgactctggatcaagatgttgtt

SEQ ID NO: 387771 - DNA, 75 bp, synthetic construct
  source 1..75: mol_type = other DNA
gctcttactgggaaggtaatgcttataccttcaatagcggcgataaagcgggtagtaatctggatataaatcttt

SEQ ID NO: 387772 - DNA, 75 bp, synthetic construct
  source 1..75: mol_type = other DNA
gatatccatgccctttctgcaagcgagaattcagccggtaccacaacaaatgtaaacatgaacgttgcccgctct

SEQ ID NO: 387773 - DNA, 75 bp, synthetic construct
  source 1..75: mol_type = other DNA
accagtcagggcgatattatggaccaacgccgcgccaacgcgcagcgtaacgactaccagcgtcagggggaataa

SEQ ID NO: 387774 - DNA, 75 bp, synthetic construct
  source 1..75: mol_type = other DNA
ggggtactctttagcctcctccgttctggtaaaaactcaagaatggctgccgctgatgaattaatagcatctccg

SEQ ID NO: 387775 - DNA, 75 bp, synthetic construct
  source 1..75: mol_type = other DNA
ataatgtcacgctcaatggcacaaccataaatgctcaaggcaataagaactccagcaacggctctacggcaattt

SEQ ID NO: 387776 - DNA, 75 bp, synthetic construct
  source 1..75: mol_type = other DNA
gatggcgggattttggcaaggggtattgctaccgaaggccggatcttacgtcagggtgattttggtttgggtgct

SEQ ID NO: 387777 - DNA, 75 bp, synthetic construct
  source 1..75: mol_type = other DNA
cattcctgaggcgcgccgggttgcaatgcctggctgcaaaacatgcgccagttgccaggaagttttagagctcat

SEQ ID NO: 387778 - DNA, 75 bp, synthetic construct
  source 1..75: mol_type = other DNA
tccgccgtgagttttatcaggtattactgccgctgatgcaggagatgggcaaaacgattttcgccatcagtcatg

SEQ ID NO: 387779 - DNA, 75 bp, synthetic construct
  source 1..75: mol_type = other DNA
gcgaggtaatgtgtatgtgcagaactcgtcaggtatacgtagaagacgccgtagagttataagtaaaggcgtaac

SEQ ID NO: 387780 - DNA, 75 bp, synthetic construct
  source 1..75: mol_type = other DNA
ttgaatgagatgagtaattatattttgaataataatcatgatttaaaagcacagccgatacagcagagcttagat

SEQ ID NO: 387781 - DNA, 75 bp, synthetic construct
  source 1..75: mol_type = other DNA
ttagagagttttggaaaaatgaaattattgcgtttcttgccttaacttgtctaaagggggttggttactggacgc

SEQ ID NO: 387782 - DNA, 75 bp, synthetic construct
  source 1..75: mol_type = other DNA
ttacgctcaactctaaccctgaacgttataaatctcttttccctgagataagcgatgaactttaccagtgcatga

SEQ ID NO: 387783 - DNA, 75 bp, synthetic construct
  source 1..75: mol_type = other DNA
acctaaatcatgggcgattggttctctgggccgctttggtaacgaatactccggctggtttgatttgcagttatg

SEQ ID NO: 387784 - DNA, 75 bp, synthetic construct
  source 1..75: mol_type = other DNA
ttgtttttactcctaaatcctcccgtgctgtaactccatcggcattagaacaacgcattctgactcacatcaaag

SEQ ID NO: 387785 - DNA, 75 bp, synthetic construct
  source 1..75: mol_type = other DNA
ttgcaggatatcgacctgattatggatattccggttaagctgaccgtcgaactgggtcgcacacggatgaccatc

SEQ ID NO: 387786 - DNA, 75 bp, synthetic construct
  source 1..75: mol_type = other DNA
tctgtgggctgaagcgttgagcgaacaaaaatcaaccagcagcaaaagcgctgccgacgcggtgttccagcaatt

SEQ ID NO: 387787 - DNA, 75 bp, synthetic construct
  source 1..75: mol_type = other DNA
atgaaagtgggcgatttttcaacgggcatggcgcttagcggcgacaacaacagcgtgacgctggcggcgaaagat

SEQ ID NO: 387788 - DNA, 75 bp, synthetic construct
  source 1..75: mol_type = other DNA
gcattagagcatcgccagcgatgtgaatcgtttaaatgggaagatggaaccgatgagcaaggacgccagactgtt

SEQ ID NO: 387789 - DNA, 75 bp, synthetic construct
  source 1..75: mol_type = other DNA
atataataatggcggagctatctttgctaaagaaaactcaacgataaatcttgcgaatgttattttcgacagtaa

SEQ ID NO: 387790 - DNA, 75 bp, synthetic construct
  source 1..75: mol_type = other DNA
ttgcgaatgttattttagacagcaacgttgcaggaggctatggcggagcaatctattctgcgggaacaaacgatg

SEQ ID NO: 387791 - DNA, 75 bp, synthetic construct
  source 1..75: mol_type = other DNA
agcgatgaactttaccagtgcatgatcttggtatgtatgggctttacaatagaagaaattgttaacagggaaaaa

SEQ ID NO: 387792 - DNA, 75 bp, synthetic construct
  source 1..75: mol_type = other DNA
tattcgtctgactgaagacataccagatgcgagacaggaactgcttaaccgcctgttgtccggtaaaaaactgac

SEQ ID NO: 387793 - DNA, 75 bp, synthetic construct
  source 1..75: mol_type = other DNA
acgccacgtacgctggatattgaccgggtgcagtcgatgatgcctgaatgcggaattgaaccaaaaattctgatc

SEQ ID NO: 387794 - DNA, 75 bp, synthetic construct
  source 1..75: mol_type = other DNA
ccattttattgcgccagaccagctttaaggcactggaagaggttgtccagtttgtggggcaaaagcaggggacgc

SEQ ID NO: 387795 - DNA, 75 bp, synthetic construct
  source 1..75: mol_type = other DNA
gcagtgtttaccgatgtctggctgtttgatcaactgctggggccggaggggcaacccgctaatccgcaactggtt

SEQ ID NO: 387796 - DNA, 75 bp, synthetic construct
  source 1..75: mol_type = other DNA
gatgctgggggctatcggactggtattctggatggcgaacagcctcggttgggctgataccaacgttgcggcgac

SEQ ID NO: 387797 - DNA, 75 bp, synthetic construct
  source 1..75: mol_type = other DNA
gtttgcttatcaggataacgcgttttccgttgggccgattaacctcaccatcaaacgtggtgaactgctgtttct

SEQ ID NO: 387798 - DNA, 75 bp, synthetic construct
  source 1..75: mol_type = other DNA
ctgggtaatgaaacgcaggcatgcaatcacggtgatgccagtcgcgaagcatttgagcaggcgttgggggggccg

SEQ ID NO: 387799 - DNA, 75 bp, synthetic construct
  source 1..75: mol_type = other DNA
agcttatcgagaacgaaattttgcgccagaaagcggcggagattctgcgtcagcgcgatatcttcaccccacgtt

SEQ ID NO: 387800 - DNA, 75 bp, synthetic construct
  source 1..75: mol_type = other DNA
ttcagccccgaggtctggaagcggcagagttaatggatcttgcagagcggaaagtgatgcagatttcagcttcac

SEQ ID NO: 387801 - DNA, 75 bp, synthetic construct
  source 1..75: mol_type = other DNA
cgatccacagcccttaattgaacgtggttgggtagtggcgcaacccattacctatgaagatttcttgcccgttag

SEQ ID NO: 387802 - DNA, 75 bp, synthetic construct
  source 1..75: mol_type = other DNA
gcatggattggcatggtttcgttatcgcctgacgccgtcgggtgaggcacatcgtcgggcgattcatcccggtga

SEQ ID NO: 387803 - DNA, 75 bp, synthetic construct
  source 1..75: mol_type = other DNA
ggataatctcactcaccaaatgcatttacaggaaaccttccgcacttttcctgacagtgagtttttaatgcgtca

SEQ ID NO: 387804 - DNA, 75 bp, synthetic construct
  source 1..75: mol_type = other DNA
gaccgtatctttacccgcgtaggggcagcggatgatctggcttccgggcgttcaacctttatggtggagatgacc

SEQ ID NO: 387805 - DNA, 75 bp, synthetic construct
  source 1..75: mol_type = other DNA
gatatcagttccgggcgttttcgcctgagcgaaccggctgaccgcgaaacgatggcggcagagctgcaacgcact

SEQ ID NO: 387806 - DNA, 75 bp, synthetic construct
  source 1..75: mol_type = other DNA
ttcaacctttatggtggaaatgaccgaaaccgccaatattctgcataacgccaccgagtacagtctggtgctgat

SEQ ID NO: 387807 - DNA, 75 bp, synthetic construct
  source 1..75: mol_type = other DNA
ggcgtcgaaaacgcgccgcgcggcctttgcgctgccggttgcctgttgcaatatgcgaaagatacccagcgcacg

SEQ ID NO: 387808 - DNA, 75 bp, synthetic construct
  source 1..75: mol_type = other DNA
gtcgaagctctggaaaatcttgatccggattcactcaccccgcgtcaggcgctggagtggatttatcgcttgaag

SEQ ID NO: 387809 - DNA, 75 bp, synthetic construct
  source 1..75: mol_type = other DNA
atggctgcagagctgcaacgtaccaacccggcagagctgttgtatgcagaagatttcgccgagatgtcgctgatt

SEQ ID NO: 387810 - DNA, 75 bp, synthetic construct
  source 1..75: mol_type = other DNA
aggcgtcgccaacgtgcatctcgatgcgctggagcacggagacactatcgcctttatgcacagcgtacaggacgg

SEQ ID NO: 387811 - DNA, 75 bp, synthetic construct
  source 1..75: mol_type = other DNA
atgcgccagaccgcactgattgcgctgatggcctatatcggcagctacgtaccggcgcaaaaagttgagattggc

SEQ ID NO: 387812 - DNA, 75 bp, synthetic construct
  source 1..75: mol_type = other DNA
gcaacagagcgcgaacgcgctggcagaacttgacgtactggttaacctggcggaacgggcctataccctgaatta

SEQ ID NO: 387813 - DNA, 75 bp, synthetic construct
  source 1..75: mol_type = other DNA
caccatcagcgatgaagccctgttgcaggagcgtcaggacaacctgctggcggctatctggcaggacagcaaagg

SEQ ID NO: 387814 - DNA, 75 bp, synthetic construct
  source 1..75: mol_type = other DNA
acaagcgctgcgtgagaagatgggcgagtttgccgaactgcgcgacctgctggagcgagcaatcatcgacacgcc

SEQ ID NO: 387815 - DNA, 75 bp, synthetic construct
  source 1..75: mol_type = other DNA
taagattaaagcgttgacgttgtttgccacccactatttcgagctgacccagttaccggagaaaatggaaggcgt

SEQ ID NO: 387816 - DNA, 75 bp, synthetic construct
  source 1..75: mol_type = other DNA
tggggattggtggtagtgcaactaatgatggcggcgcaggcatggcagaagcgctgggcgtacgtttttatgatg

SEQ ID NO: 387817 - DNA, 75 bp, synthetic construct
  source 1..75: mol_type = other DNA
ggtaattcatcaattattggttctggttctgtagttattcgtgatgttcctgacaatgtagtagtggccggggct

SEQ ID NO: 387818 - DNA, 75 bp, synthetic construct
  source 1..75: mol_type = other DNA
agcaattgtttcaacgagatcctctatcggaacatgtatttatattggtaaaatggctatagtaaattgtgattc

SEQ ID NO: 387819 - DNA, 75 bp, synthetic construct
  source 1..75: mol_type = other DNA
ctgggtgatggaatttttattggtaaaatgtgtatacttaaccgtgatactagaatacatgatgccgttgtaata

SEQ ID NO: 387820 - DNA, 75 bp, synthetic construct
  source 1..75: mol_type = other DNA
agcgtggtatggcggcttgtcagacgctgtttaccattcttgacagtgaacaggagaaagacgaagggaagcgcg

SEQ ID NO: 387821 - DNA, 75 bp, synthetic construct
  source 1..75: mol_type = other DNA
cagtaaaaacatgcagaacaccatggggcaggtgaccaccagtgctgaacagatgctgaaaggccacaaagaagt

SEQ ID NO: 387822 - DNA, 75 bp, synthetic construct
  source 1..75: mol_type = other DNA
ggcaataatttctaaaggcgcaattcttgggtcatgcatctatgttggtaagatggcaatagtaaattgtgattc

SEQ ID NO: 387823 - DNA, 75 bp, synthetic construct
  source 1..75: mol_type = other DNA
tgtctgcggcggtggggctgtcccataacatgtttgatggtgcgctgttcctcggtgtgtgcgacaagattgtcc

SEQ ID NO: 387824 - DNA, 75 bp, synthetic construct
  source 1..75: mol_type = other DNA
cttgaacttgtttcgcctcgtcaaatttcaggagattctgtttgtgtcaatggttcagcctcctcatcccatgag

SEQ ID NO: 387825 - DNA, 75 bp, synthetic construct
  source 1..75: mol_type = other DNA
catattgatatttcaggactggatgaccgtttgacccaggtcgatatcctagtagcctgcgatgtcgttaatccc

SEQ ID NO: 387826 - DNA, 75 bp, synthetic construct
  source 1..75: mol_type = other DNA
tacgagttaataggatttatcgataaatataaaagtggttatcatcaatcatatccaatattaggtaatgatatt

SEQ ID NO: 387827 - DNA, 75 bp, synthetic construct
  source 1..75: mol_type = other DNA
acggtgaagtcgcggcaaccaaagtgggtgcactgtccaaaggtcagttgaaagagttcctcgacgccaacctgg

SEQ ID NO: 387828 - DNA, 75 bp, synthetic construct
  source 1..75: mol_type = other DNA
tcttggaggtgaaagccctcccgcgagctgactacagcgagcgaaaggaagtgcaactgcgtgagggtgaccgag

SEQ ID NO: 387829 - DNA, 75 bp, synthetic construct
  source 1..75: mol_type = other DNA
ttcaacctttatggtggagatgaccgaaaccgctaatattctgcataacgccaccgagtacagtctggtgttgat

SEQ ID NO: 387830 - DNA, 75 bp, synthetic construct
  source 1..75: mol_type = other DNA
cggcctgcgggacggattcagcggcgacgcgtcgatctgggcgcggctggataccgtctgggaaaaggctcaagc

SEQ ID NO: 387831 - DNA, 75 bp, synthetic construct
  source 1..75: mol_type = other DNA
gctgggctcatgcccgccgaaagatccacgatgtgcacgtccgcatcccgtcagcactgacggaagaagccctgg

SEQ ID NO: 387832 - DNA, 75 bp, synthetic construct
  source 1..75: mol_type = other DNA
atgattgatatcactctggatttttctggccttgaagagatatcccgcgatctggaattactgagccgtgccgaa

SEQ ID NO: 387833 - DNA, 75 bp, synthetic construct
  source 1..75: mol_type = other DNA
cccgccgtgcaatgtatcagcgccagcttagcgagattgaggttgagaaacacgcgcgcaggctgctcgatgatt

SEQ ID NO: 387834 - DNA, 75 bp, synthetic construct
  source 1..75: mol_type = other DNA
aaaaaagtttatatcctggtggtcccgaaagattcccgtggcggcacccggttatgtactgggtcgtatgtgata

SEQ ID NO: 387835 - DNA, 75 bp, synthetic construct
  source 1..75: mol_type = other DNA
taaatgaaataagggcgctggttggccctgaaagaaatggcgagacggcagaatacgcaatttacgactcattca

SEQ ID NO: 387836 - DNA, 75 bp, synthetic construct
  source 1..75: mol_type = other DNA
tgacagatacccgccagtggcggttatgtccacaggttcgtgtggccgatatcgtcagagtggcgcccgaccgga

SEQ ID NO: 387837 - DNA, 75 bp, synthetic construct
  source 1..75: mol_type = other DNA
tgcgttcacagggaatgagtatttctgtaggatttatgtggatagcaaactttatggtttcacagttctttccta

SEQ ID NO: 387838 - DNA, 75 bp, synthetic construct
  source 1..75: mol_type = other DNA
atccagcaacaatggcagatgaagcgagccatgctttcaccacgttatacaacgcgaagttctgatttactgcgg

SEQ ID NO: 387839 - DNA, 75 bp, synthetic construct
  source 1..75: mol_type = other DNA
agtcagaatgtcaatcatcatgagctgaccataaccaagcccgttgataaatcttcgccattactggcaaaagcg

SEQ ID NO: 387840 - DNA, 75 bp, synthetic construct
  source 1..75: mol_type = other DNA
gtctggcggatattgcacgggatctggagacgctcagcagggctgaaaacaataaggtactgcgcgatgccaccc

SEQ ID NO: 387841 - DNA, 75 bp, synthetic construct
  source 1..75: mol_type = other DNA
gaaagccagcgatccccgaaatgcattttactggcgctttgtggagctgggaacgataaacatgcccgcgcatcc

SEQ ID NO: 387842 - DNA, 75 bp, synthetic construct
  source 1..75: mol_type = other DNA
gacgtgatgggggagtttcaccgttacgccaaagagaaaagcctccagcctggtgggcccgagagattcccgtgg

SEQ ID NO: 387843 - DNA, 75 bp, synthetic construct
  source 1..75: mol_type = other DNA
cgtttgccgccgccattaccgctggtggctcgttagtcaccccgatcataccgcctggaatagccctgattattt

SEQ ID NO: 387844 - DNA, 75 bp, synthetic construct
  source 1..75: mol_type = other DNA
catcgtgatgggcgtaagagcgcaacaaaaagaaaaaacccgccgttcgctgtggaagccgcatttagccaatta

SEQ ID NO: 387845 - DNA, 75 bp, synthetic construct
  source 1..75: mol_type = other DNA
ttctgaatacttgaattttaattcacgcttagaaagtcgctatagctatgaactgatgaagaaagcaagtgaata

SEQ ID NO: 387846 - DNA, 75 bp, synthetic construct
  source 1..75: mol_type = other DNA
gccacgggttataacgaagaactggatgaatggcgtgcgctggctgatggcgcgactgattatctggaacgtctg

SEQ ID NO: 387847 - DNA, 75 bp, synthetic construct
  source 1..75: mol_type = other DNA
cgcccgcaaaactaacgctaaaccctcgcgtgaaagctggcctacgtgcaaagaggtggtgttctcgctgggaca

SEQ ID NO: 387848 - DNA, 75 bp, synthetic construct
  source 1..75: mol_type = other DNA
tggctcgttagtcaccccgatcataccgcctggaatagccctgattatttacggtctggttgccgacgtctctat

SEQ ID NO: 387849 - DNA, 75 bp, synthetic construct
  source 1..75: mol_type = other DNA
ctaaaagaaatcttgagaagtatgcatgctaatggagaatgcactctcgatggatccggtttgcctacaaagggt

SEQ ID NO: 387850 - DNA, 75 bp, synthetic construct
  source 1..75: mol_type = other DNA
ccctggggggaataacaccggcgcagtggctgatggaggaatacaggcggggaaaggcggcaggatttatcaagt

SEQ ID NO: 387851 - DNA, 75 bp, synthetic construct
  source 1..75: mol_type = other DNA
ctcaggtaacgcctaccatccaccagggcgaagtttcggatgcatgccgaacgcagccaccctgggagggataac

SEQ ID NO: 387852 - DNA, 75 bp, synthetic construct
  source 1..75: mol_type = other DNA
atgtctttaaatattttgataatttactttctgggcatggtcgggcaatttaataagattgctatctttttaatt

SEQ ID NO: 387853 - DNA, 75 bp, synthetic construct
  source 1..75: mol_type = other DNA
ccgaacgactggccgccatgcaccgggccgtaaataccccggcggcgaacgatgaatggcttccggaggccgcgt

SEQ ID NO: 387854 - DNA, 75 bp, synthetic construct
  source 1..75: mol_type = other DNA
ttttattgtcctgcaaatttcaagtcttcccgtgaaggatgaagagcgtcttcagaaaatgctggcaggctgtcg

SEQ ID NO: 387855 - DNA, 75 bp, synthetic construct
  source 1..75: mol_type = other DNA
gtgcagatgattcaacatttctgaaaccaaacagtgcagaaaaaattcgctggagtttaacagaaatcaatacca

SEQ ID NO: 387856 - DNA, 75 bp, synthetic construct
  source 1..75: mol_type = other DNA
tagtgatactgatgggattgctattatcaccatcagcgttcgctgaagatattaatgttgattttacggcaacag

SEQ ID NO: 387857 - DNA, 75 bp, synthetic construct
  source 1..75: mol_type = other DNA
gattgatacaaccctgacaggaaatcaatcaggaagttcacccgcgctaattatccccctggccagtgatacaac

SEQ ID NO: 387858 - DNA, 75 bp, synthetic construct
  source 1..75: mol_type = other DNA
accgaagtagccgatcgtgtagtggtgatgagccagggcaatatcgagcaggctgatgcgccggaccaggtatgg

SEQ ID NO: 387859 - DNA, 75 bp, synthetic construct
  source 1..75: mol_type = other DNA
catgcgcggctgtataacggcgacgagcgtattgaaacccgcgatgaggaacttgctctcgcacaaagcgcctga

SEQ ID NO: 387860 - DNA, 75 bp, synthetic construct
  source 1..75: mol_type = other DNA
cacgctgctgcgcattatcgccgggctggagcatcaaaccagcgggcatattcgcttccacggcaccgacgtcag

SEQ ID NO: 387861 - DNA, 75 bp, synthetic construct
  source 1..75: mol_type = other DNA
tcgcgatactgacagggatactgttatctccaggtgtatttgctaccgatataaatgtcgattttacggccacag

SEQ ID NO: 387862 - DNA, 75 bp, synthetic construct
  source 1..75: mol_type = other DNA
taccctcaagcagatagcctcgctgaatatctcaaaatgcacggcggcagtcacaatgccagcacggcaccatat

SEQ ID NO: 387863 - DNA, 75 bp, synthetic construct
  source 1..75: mol_type = other DNA
gccgtacttctcgcgagatgagcgacgtaaaattttgccctccatcactctgaaagaggtgctggcctaccgcga

SEQ ID NO: 387864 - DNA, 75 bp, synthetic construct
  source 1..75: mol_type = other DNA
gataatcggtaataatatcaccgaagacggaaatgacagttatacgttaacattacccaatatgggtctggatca

SEQ ID NO: 387865 - DNA, 75 bp, synthetic construct
  source 1..75: mol_type = other DNA
gtcgttgataatggcaatgatagttataccctgataatccccaagatgggactggataagatagtcaataaagcg

SEQ ID NO: 387866 - DNA, 75 bp, synthetic construct
  source 1..75: mol_type = other DNA
tgaaagcaacaacctgtaatattacacttaccggaactaatgtcactgataatggaaatgataagtacaccttag

SEQ ID NO: 387867 - DNA, 75 bp, synthetic construct
  source 1..75: mol_type = other DNA
atgagcaggataatccggaagactggcacagacgaaatactcttccgtctgagtaaacaccatcatttatatgag

SEQ ID NO: 387868 - DNA, 75 bp, synthetic construct
  source 1..75: mol_type = other DNA
aagagttagggatctcccgcgcccagtttgaccagttcttgcgtatgatgcagggcggtgcgcagtttggtggcg

SEQ ID NO: 387869 - DNA, 75 bp, synthetic construct
  source 1..75: mol_type = other DNA
tgcaacgccaaaatataagtacagatatatagaaaaagtaaagaaagtttataataaacattctttaaaaatggg

SEQ ID NO: 387870 - DNA, 75 bp, synthetic construct
  source 1..75: mol_type = other DNA
acgtgaaacagaggctgggaaaggtgtacctggaaattttcgtgcgctagcgacgtttaatttcatctatcaata

SEQ ID NO: 387871 - DNA, 75 bp, synthetic construct
  source 1..75: mol_type = other DNA
acgctgccatttatgaccatttacttgagtcgccagtacaccatgctaaacattggctggaccatcggtccgccg

SEQ ID NO: 387872 - DNA, 75 bp, synthetic construct
  source 1..75: mol_type = other DNA
acctgtcgctggcatggggtgcgggtcttcagttcagcccggcagaaacggtgactattgaccttgcttatgaag

SEQ ID NO: 387873 - DNA, 75 bp, synthetic construct
  source 1..75: mol_type = other DNA
ggcagcactggacaaatcgatggaaaaagagcgcgcggagatggagaaaattctgggaccagtccccacctcctt

SEQ ID NO: 387874 - DNA, 75 bp, synthetic construct
  source 1..75: mol_type = other DNA
taccctgaatgatattgatatctccggcctcgatccgcgtttaaaagattgcgctattcgcgtcgcctgcgatgt

SEQ ID NO: 387875 - DNA, 75 bp, synthetic construct
  source 1..75: mol_type = other DNA
gggcgttaatattgtggcggcatgcatatcatgccgccacgctgactattaataaaaacctggcaacggctaaaa

SEQ ID NO: 387876 - DNA, 75 bp, synthetic construct
  source 1..75: mol_type = other DNA
atgcggcacctgtcgggtgttgtgtggcaatacgattctcgaacagtggcaatatcccgcaggcaccttcggtat

SEQ ID NO: 387877 - DNA, 75 bp, synthetic construct
  source 1..75: mol_type = other DNA
attaatgtagagtttacagccactgtcaaagcgacaacctgtaacatcacacttactggtaataacgtcacgaat

SEQ ID NO: 387878 - DNA, 75 bp, synthetic construct
  source 1..75: mol_type = other DNA
ctcattatgctgatgtcatcaaaaaatctctccatgttgatgtgaaggatgtgcctggggcgggcgcggcgggcg

SEQ ID NO: 387879 - DNA, 75 bp, synthetic construct
  source 1..75: mol_type = other DNA
tgatgtcaccaatccgctggtgggcgataacggcgcatcgcgcatctttggcccacaaaagggagccagtgaagc

SEQ ID NO: 387880 - DNA, 75 bp, synthetic construct
  source 1..75: mol_type = other DNA
ctcaatttgttacgtgaaaaaggcattgataaacagtattttgatgaactggcgaatgtactggacattgatttc

SEQ ID NO: 387881 - DNA, 75 bp, synthetic construct
  source 1..75: mol_type = other DNA
aaagcgtgatgacgacgaaccgcagaatccactgacgcaagctgtagccgtcgagccagaagatgagtgcgacgg

SEQ ID NO: 387882 - DNA, 75 bp, synthetic construct
  source 1..75: mol_type = other DNA
cacactgacggcacaaatgccatgcgagacttccagccagatcactaattccaccaacggcatcgaaccgcctcg

SEQ ID NO: 387883 - DNA, 75 bp, synthetic construct
  source 1..75: mol_type = other DNA
gacacattattcgtttgaagagatcgaagaactcggcaattacattaagccgaaacgtgacgatctttttggcta

SEQ ID NO: 387884 - DNA, 75 bp, synthetic construct
  source 1..75: mol_type = other DNA
cccgagacattccggaaacaaatgaaatggttggctgaaaacaactggaaaacactgtcatcagatgaactggag

SEQ ID NO: 387885 - DNA, 75 bp, synthetic construct
  source 1..75: mol_type = other DNA
cattcacataaacgctgggacaggttgtctgtatcacgtgctgaacagtgccggctcatgaaagaagatattctg

SEQ ID NO: 387886 - DNA, 75 bp, synthetic construct
  source 1..75: mol_type = other DNA
ttggccgtatccgtgcgctgggcagcgagatccgcaatggtgaagccacccataccggagttattccattcctga

SEQ ID NO: 387887 - DNA, 75 bp, synthetic construct
  source 1..75: mol_type = other DNA
tctgatccgatcattcagctgatcgcctctttggcgctggcgtttgttctgtatgcggcgagcttcccaagtgtc

SEQ ID NO: 387888 - DNA, 75 bp, synthetic construct
  source 1..75: mol_type = other DNA
attgattttcggtggtcaggaagtggaaacgaaacgctttgataaagtcagcaaccgaatgcgtcttcaggggat

SEQ ID NO: 387889 - DNA, 75 bp, synthetic construct
  source 1..75: mol_type = other DNA
ggtcaggtgaccaccagcgcagaacagatgctgaagggccacaaagaagtattgatttttggtggtcaggaggtg

SEQ ID NO: 387890 - DNA, 75 bp, synthetic construct
  source 1..75: mol_type = other DNA
atcataatgttgtatctgttttgtttgaggcaatgaaaggctatttgcaggatggtagctggaaagcgggttaca

SEQ ID NO: 387891 - DNA, 75 bp, synthetic construct
  source 1..75: mol_type = other DNA
cacaaaaaagtagatgctcatccatattatgatggattaggaaaaggaattaagaaatattttaattttactaca

SEQ ID NO: 387892 - DNA, 75 bp, synthetic construct
  source 1..75: mol_type = other DNA
ccatggacttcatcaataagatggataacggtctcgatacagtgattggtgaaaacggcgtgctgctctctggcg

SEQ ID NO: 387893 - DNA, 75 bp, synthetic construct
  source 1..75: mol_type = other DNA
gccggactctcaggaaagtatgagatggttatgtattgaatcaatgccaccaatagaaaaaagtactaaaataaa

SEQ ID NO: 387894 - DNA, 75 bp, synthetic construct
  source 1..75: mol_type = other DNA
taccatgattcgcgttcctgttgagcatacgctggatgcagtcaatattgccgatcggtacgatgctaaagcagt

SEQ ID NO: 387895 - DNA, 75 bp, synthetic construct
  source 1..75: mol_type = other DNA
ccttaaaatgaggaattctgtggctcctttcagcgtccaagttatatcagtcagcgacgagcatcttgtcgatct

SEQ ID NO: 387896 - DNA, 75 bp, synthetic construct
  source 1..75: mol_type = other DNA
acttttggtcgcgtccctaataaagacagcaaaaaaccagaaattaccgtaccagtagtgactgatgcgcaaaag

SEQ ID NO: 387897 - DNA, 75 bp, synthetic construct
  source 1..75: mol_type = other DNA
aatacctcaaaatgcacggcggcagccacaatgccagcacggcgccgtatcgcaccgctttctatctggaagtcg

SEQ ID NO: 387898 - DNA, 75 bp, synthetic construct
  source 1..75: mol_type = other DNA
ttcggcattggtcgtgcctgttgggtcgctggaggatccagaggcttatcaggggctggcgcattatcttgagca

SEQ ID NO: 387899 - DNA, 75 bp, synthetic construct
  source 1..75: mol_type = other DNA
ctattagcttgcagtgtcctacttgcggtactaccacactactcaatgaccaagacattgagcaagttcgctgtg

SEQ ID NO: 387900 - DNA, 75 bp, synthetic construct
  source 1..75: mol_type = other DNA
tatccgtaaaccgcgcccgatgggggctgtctcaggcttgttcctgattggctatggcgcgtttcgcatcattgt

SEQ ID NO: 387901 - DNA, 75 bp, synthetic construct
  source 1..75: mol_type = other DNA
aatctattttcgatacttacggcgtgcttccgcgccatccctcgcaactgtatgaactgctgcttgaaggtgtgg

SEQ ID NO: 387902 - DNA, 75 bp, synthetic construct
  source 1..75: mol_type = other DNA
aaggtaaattctacgcgctgccgcaatccccgcagttgttcaaacagctactgatgatgtccggctttgaccgct

SEQ ID NO: 387903 - DNA, 75 bp, synthetic construct
  source 1..75: mol_type = other DNA
gttatcgccttcccgaaaaccacggcggcagcgtgtctgatgactgaagcaccgagctttgctaacccgactgca

SEQ ID NO: 387904 - DNA, 75 bp, synthetic construct
  source 1..75: mol_type = other DNA
atcatcgaagccatcctggatcgtactgccgcgcaagatggcgatatgattttcttcggtgccgacaacaagaaa

SEQ ID NO: 387905 - DNA, 75 bp, synthetic construct
  source 1..75: mol_type = other DNA
caaagcttaattacctcactattaattgtatttcaaactaataatcgcactccattttctctttttaaaaaacat

SEQ ID NO: 387906 - DNA, 75 bp, synthetic construct
  source 1..75: mol_type = other DNA
atatgaccattggtaagcgtaaactgaccgccgtatgtagccatcagacgagaattggtaacttagacgcccatc

SEQ ID NO: 387907 - DNA, 75 bp, synthetic construct
  source 1..75: mol_type = other DNA
tctcaattattaatagtaaacaaactcgtgtaaatccatcaattgtatatgatttattttcgcttgcagaacgca

SEQ ID NO: 387908 - DNA, 75 bp, synthetic construct
  source 1..75: mol_type = other DNA
tcttgcagcgcgaggtattaattttaaagcgggtgaatttggcactaatgaatctgaaataaataagcttgtgaa

SEQ ID NO: 387909 - DNA, 75 bp, synthetic construct
  source 1..75: mol_type = other DNA
atgatatatcccgttccggtggcacagaacgagttgcgacatttctctctaatcaaatgtttttatccggatttt

SEQ ID NO: 387910 - DNA, 75 bp, synthetic construct
  source 1..75: mol_type = other DNA
tcgacagcaagtttgtcaggtcagaacaagcaatcgagttccgtgagcaacttgctcctgggatcttcaaaccag

SEQ ID NO: 387911 - DNA, 75 bp, synthetic construct
  source 1..75: mol_type = other DNA
atgggggtagtacgagttccctacctcttggctgagctgaaagaacgcggatgtgctgatgaatctgctctggcg

SEQ ID NO: 387912 - DNA, 75 bp, synthetic construct
  source 1..75: mol_type = other DNA
tgtcaaaacacgccaatgtggaaatcggtcttgccctgcgttctgaccgctgggcaggggcggatttctgggagc

SEQ ID NO: 387913 - DNA, 75 bp, synthetic construct
  source 1..75: mol_type = other DNA
aactgcagtacgcccgggatgtgcgtgacggcaaaattcatgatccgcattttctgccggtgatttttgagcatc

SEQ ID NO: 387914 - DNA, 75 bp, synthetic construct
  source 1..75: mol_type = other DNA
acatttggtgagtgttccgaggaatgggtatttgactttgttaatgccatttttggtggctatgaagcagagact

SEQ ID NO: 387915 - DNA, 75 bp, synthetic construct
  source 1..75: mol_type = other DNA
ggctggggccatgcttgggtgcatgaaaccgcggtggtcagacggaagagtgaagcatcccggtttcaggatttt

SEQ ID NO: 387916 - DNA, 75 bp, synthetic construct
  source 1..75: mol_type = other DNA
tcagcccctgatggcctggtgtgtcggtaatgcccgggtggagcctaaaggtaacgccattcttatcaccaaaca

SEQ ID NO: 387917 - DNA, 75 bp, synthetic construct
  source 1..75: mol_type = other DNA
cctgggtgcatgaaaccgcggtggtcagacggaagagtgaggcatcccggtttcaggattttgtggcctgtggag

SEQ ID NO: 387918 - DNA, 75 bp, synthetic construct
  source 1..75: mol_type = other DNA
tgcatgtttacattttctattacgattaaaatctcgtcttattttaagtgagcatgtggcttttgaatcctcatc

SEQ ID NO: 387919 - DNA, 75 bp, synthetic construct
  source 1..75: mol_type = other DNA
cgacgttgatgaacgccatcgcgctgatcgccagtcaaacctggcgcgatcatccggtggatttattgctctcgt

SEQ ID NO: 387920 - DNA, 75 bp, synthetic construct
  source 1..75: mol_type = other DNA
ccttattgatgatcggtagtttactgacgttactgcccgtagcgctgatctcgcgctatcgccatcagcgtgact

SEQ ID NO: 387921 - DNA, 75 bp, synthetic construct
  source 1..75: mol_type = other DNA
gccgattattgctctggcctggcactatggctggcagggcgcgttgattgcgacgctgatgaacgccattgcgct

SEQ ID NO: 387922 - DNA, 75 bp, synthetic construct
  source 1..75: mol_type = other DNA
gtaacggcgttgggcggcaccttgaccatatcctgtctgcacggcacgcgcgtcagtgtctctctaccccaacgt

SEQ ID NO: 387923 - DNA, 75 bp, synthetic construct
  source 1..75: mol_type = other DNA
acgcccacgtcagttggatgacctcactcttgagcaggccatccgttcactgatgcgagaaatggaactggaggg

SEQ ID NO: 387924 - DNA, 75 bp, synthetic construct
  source 1..75: mol_type = other DNA
tgattgcgacgctgatgaacgccattgcgttgattgccagccagacatggcatgatcatccggtggatttattgc

SEQ ID NO: 387925 - DNA, 75 bp, synthetic construct
  source 1..75: mol_type = other DNA
ttaaggagcgggtgatccgtaacagtctgcggccccctgccgtgcccggtatcggacgcacagagaaatacggta

SEQ ID NO: 387926 - DNA, 75 bp, synthetic construct
  source 1..75: mol_type = other DNA
ttaaggagcgggtgatccgaaacagtctgcggccccctgccgtgcccggtatcggacgcacggagaaatacggca

SEQ ID NO: 387927 - DNA, 75 bp, synthetic construct
  source 1..75: mol_type = other DNA
ttaaggagcgggtgatccgaaacagtctgcggccccctgccgtgcccggtatcggacgcaccgagaaatacggga

SEQ ID NO: 387928 - DNA, 75 bp, synthetic construct
  source 1..75: mol_type = other DNA
ttgatgctgcaatgcccgcgtggttactggtctgtgttgctgggggcggaatggttgctgatttactggttggcg

SEQ ID NO: 387929 - DNA, 75 bp, synthetic construct
  source 1..75: mol_type = other DNA
ttaccgttattgcctgcttttttatcttctctgccgcatggttttgcctgtggagtatcagcctgcacctggttg

SEQ ID NO: 387930 - DNA, 75 bp, synthetic construct
  source 1..75: mol_type = other DNA
ttaaggagcgggtgatccgtaacagtctgcggccccctgccgtgcccggtatcggacgcactgagaaatacggaa

SEQ ID NO: 387931 - DNA, 75 bp, synthetic construct
  source 1..75: mol_type = other DNA
cgctggcagggtagtacctgggctgtcagagaaggtcagacgctgggcaatgtggtgatccagcggattgatccg

SEQ ID NO: 387932 - DNA, 75 bp, synthetic construct
  source 1..75: mol_type = other DNA
ggcgataatgaagcattaattaaaattaaaaccgtcgggatttgcggtacagatattcatgcctgggcgggcaat

SEQ ID NO: 387933 - DNA, 75 bp, synthetic construct
  source 1..75: mol_type = other DNA
cagttgcgcctggcgagcaggtgctggtggtcggggcggggccaatcggtcttggcgcggcggcaatcgctaaag

SEQ ID NO: 387934 - DNA, 75 bp, synthetic construct
  source 1..75: mol_type = other DNA
ccgacggtattgacccacaagcagcggcgttgattgagccttttgcgattagcgctcatgcggtgcgtcgcgcag

SEQ ID NO: 387935 - DNA, 75 bp, synthetic construct
  source 1..75: mol_type = other DNA
gaaacaggttgcttctattcttcatgacccggaagccagcgaaaacgataagtatgtggcgctgcaattcttaag

SEQ ID NO: 387936 - DNA, 75 bp, synthetic construct
  source 1..75: mol_type = other DNA
cgctcaccggcaccattattgtgggtcgagatattgcacacgccaagctgaaagagctgattgacgccggtaaag

SEQ ID NO: 387937 - DNA, 75 bp, synthetic construct
  source 1..75: mol_type = other DNA
gcaccgcaatcatcgtcggtaaaaaaggtcagcgcgtgtggaccggcggcggtgatgaagaagcactgtcgaaag

SEQ ID NO: 387938 - DNA, 75 bp, synthetic construct
  source 1..75: mol_type = other DNA
gcactgaactgaacgtcgaggtaccgctgtcggatgatctcaatgtcagtctgaacgccatgacacagcatcgca

SEQ ID NO: 387939 - DNA, 75 bp, synthetic construct
  source 1..75: mol_type = other DNA
ggaagatcaaaactgtacgaattgatgttagaggatgatgaagaccttgccgaactggccgacggcggcacagtt

SEQ ID NO: 387940 - DNA, 75 bp, synthetic construct
  source 1..75: mol_type = other DNA
gtctggtctgccagttggaaagcaccgcgcgtagcctacgctccacatttgacctgccggacgagccgacaggca

SEQ ID NO: 387941 - DNA, 75 bp, synthetic construct
  source 1..75: mol_type = other DNA
agcgtgcagcgccgggctaaatatctgctgctggagctgcctgagggctggattatcattcatttggggatgtct

SEQ ID NO: 387942 - DNA, 75 bp, synthetic construct
  source 1..75: mol_type = other DNA
atgcctgaattaccagaagttgaaaccagccgtcgcggaatagaaccgcatctcgttggtgcgactattcttcat

SEQ ID NO: 387943 - DNA, 75 bp, synthetic construct
  source 1..75: mol_type = other DNA
cgcaggcacagcgggcggaagaggcccggcagcaggcggtcgtcgccggagcaaaacgaccggacattcctgatt

SEQ ID NO: 387944 - DNA, 75 bp, synthetic construct
  source 1..75: mol_type = other DNA
tattaatgccagcaaaacccggcagcagctcaacgatgtcgcggggaaaatgaaaattattgaggcacggttaat

SEQ ID NO: 387945 - DNA, 75 bp, synthetic construct
  source 1..75: mol_type = other DNA
aaggtctacccgtttttcagcccgtctccctgcgtccacaagaaaaccagcaactggtcgctgatctgcaggctg

SEQ ID NO: 387946 - DNA, 75 bp, synthetic construct
  source 1..75: mol_type = other DNA
gcatctgtcatcgatacgacaacaaaggctgcgccaggaacaatccttgaagccaataaacaaggcattcaggta

SEQ ID NO: 387947 - DNA, 75 bp, synthetic construct
  source 1..75: mol_type = other DNA
caacataatctgactcaggttttgtttaatcttcctgcgggtaactggcaagagggtgaacggggtattgcatgt

SEQ ID NO: 387948 - DNA, 75 bp, synthetic construct
  source 1..75: mol_type = other DNA
aaaaattcaggcaacactgaatatgcttcacgacagcattaacaagctgggcgaagctataaaaaaggatgaaga

SEQ ID NO: 387949 - DNA, 75 bp, synthetic construct
  source 1..75: mol_type = other DNA
ggaccaacaaaaaaattctttaatattataaaaaagaagaaagggcgtattcggtggagtaaaacttttgatgcg

SEQ ID NO: 387950 - DNA, 75 bp, synthetic construct
  source 1..75: mol_type = other DNA
ggatgtcggtttagacactggcgacatgctctataagctctcctgcccgattaccacagaagatactagtggtac

SEQ ID NO: 387951 - DNA, 75 bp, synthetic construct
  source 1..75: mol_type = other DNA
cgatgcggcaaaagctgccttttaccccgacatcaacctgatggcctttctgcaacaagatgcgctgcacttaag

SEQ ID NO: 387952 - DNA, 75 bp, synthetic construct
  source 1..75: mol_type = other DNA
caggatggtccgcagctcgacttttctgcggatatggagcggcaaaaaatgtcggcagaagggttaatggggccg

SEQ ID NO: 387953 - DNA, 75 bp, synthetic construct
  source 1..75: mol_type = other DNA
atttttctgcggatatggaacggcaaaaaatgtcggcagaagggttaatggggccgtttgccctggacgatcctg

SEQ ID NO: 387954 - DNA, 75 bp, synthetic construct
  source 1..75: mol_type = other DNA
gtaaatgacgtgcgcgggcggccagccaggttcagacactggcggagaaaaaccagcatcaggcgcaaattgagc

SEQ ID NO: 387955 - DNA, 75 bp, synthetic construct
  source 1..75: mol_type = other DNA
cggatatgcaggtggctgaacagcgcattcagctagctgaagcccaggcgaaggcagttgccactcaggatggtc

SEQ ID NO: 387956 - DNA, 75 bp, synthetic construct
  source 1..75: mol_type = other DNA
ggctggagtatcacgataatcaactcacttccttaattaataacgcactacagaacgcaccggatatgcaggtgg

SEQ ID NO: 387957 - DNA, 75 bp, synthetic construct
  source 1..75: mol_type = other DNA
cgcaatactcagaaaattttccgctgggtggagaaagacactcctgatgcggttaaaaaaattcaggcgttgtta

SEQ ID NO: 387958 - DNA, 75 bp, synthetic construct
  source 1..75: mol_type = other DNA
atgacaactcaaatctctgttgaaaccatctccccgttcacccataaccagattcctgttattaccaccgaactt

SEQ ID NO: 387959 - DNA, 75 bp, synthetic construct
  source 1..75: mol_type = other DNA
tgccctgaaggtgtgcaaacagcattcacccaagaacaatatgataaattaataagatacattaatattttcttt

SEQ ID NO: 387960 - DNA, 75 bp, synthetic construct
  source 1..75: mol_type = other DNA
cgttgcatcagcgatcgttctgttcgatcagatgaatcgtggtggcccggcgggaaatgccgtggtgatgcacta

SEQ ID NO: 387961 - DNA, 75 bp, synthetic construct
  source 1..75: mol_type = other DNA
ggtgagagacgctgatgattttgtcgcagtggcaatcgccggtttcaatcagatgaaccgtggtggcccggcagg

SEQ ID NO: 387962 - DNA, 75 bp, synthetic construct
  source 1..75: mol_type = other DNA
tgccgcctttgctggtggccagaatgcgtagccacagctcagcctatttcagggagctgctggagacacgagaac

SEQ ID NO: 387963 - DNA, 75 bp, synthetic construct
  source 1..75: mol_type = other DNA
attacggcacaaatcgtcagcatcattcgtgagctggcagaaacgaatattacccaggtgatcgtcacccacgaa

SEQ ID NO: 387964 - DNA, 75 bp, synthetic construct
  source 1..75: mol_type = other DNA
aaccaaatatggagcgataggtatatctatattatgggcgattgtgaattttatatattttgttttatggaactt

SEQ ID NO: 387965 - DNA, 75 bp, synthetic construct
  source 1..75: mol_type = other DNA
tgttctagccgttgaaatttatccaggagaaatacatagtgtgaaatgtctttctgaaaaggggttgcttatgga

SEQ ID NO: 387966 - DNA, 75 bp, synthetic construct
  source 1..75: mol_type = other DNA
atagcgatcgttatccactgcacctttctggtggccagcaacaacgtgttgctatcgcccgagcgctgatgatgg

SEQ ID NO: 387967 - DNA, 75 bp, synthetic construct
  source 1..75: mol_type = other DNA
tctgtggccgcatctcaccgtgcagcaaaacctgatcgaagcgccctgccgcgtactcggcttgagtaaagatca

SEQ ID NO: 387968 - DNA, 75 bp, synthetic construct
  source 1..75: mol_type = other DNA
gccgagtggtgtatatggaaaacggtcatatcgtagaactaaaaccgccagccgagtggtgtatatggaaaacgg

SEQ ID NO: 387969 - DNA, 75 bp, synthetic construct
  source 1..75: mol_type = other DNA
gcgcagtcacagttcagcctattttcgggaactgctggagacgcgggagcggctggtgagggatgcagatgattt

SEQ ID NO: 387970 - DNA, 75 bp, synthetic construct
  source 1..75: mol_type = other DNA
aaaaggttttgacgataaccgtggtctgcgcatcgacctgctgctcgccagccaaccgctggcagaatgttgcgt

SEQ ID NO: 387971 - DNA, 75 bp, synthetic construct
  source 1..75: mol_type = other DNA
gccagccgttggcggaatgctgcgtagaaaccggcattgattatgaaatccgcagtatggaaaaaccgtcagatc

SEQ ID NO: 387972 - DNA, 75 bp, synthetic construct
  source 1..75: mol_type = other DNA
ccgcaaacgctggctgcgtaccggtaaatgctctttcctgccggaagaacgcgaatggatggagagactgattaa

SEQ ID NO: 387973 - DNA, 75 bp, synthetic construct
  source 1..75: mol_type = other DNA
agaaaccggcatcgactatgaaatccgcagtatggaaaaaccgtcagatcacgcacctgtgtgggcgaccttccg

SEQ ID NO: 387974 - DNA, 75 bp, synthetic construct
  source 1..75: mol_type = other DNA
gatatgaatatcagccccaccgacctggatatcggcattggcgaagagaaccgcaaacgctggctgcggactggt

SEQ ID NO: 387975 - DNA, 75 bp, synthetic construct
  source 1..75: mol_type = other DNA
acggcctgcgcgccagacctcaccagcttgaagccatcgtcgaaaagcaccagccggatgtgattggcctgcagg

SEQ ID NO: 387976 - DNA, 75 bp, synthetic construct
  source 1..75: mol_type = other DNA
tcgcccatgaggttaacccgcaaaatcaggtgggctgtatgctggcgggcggtaacttctacccttacagctgca

SEQ ID NO: 387977 - DNA, 75 bp, synthetic construct
  source 1..75: mol_type = other DNA
gatatcgccctgatggcagagatgggattcaaggttttccgtacctcaattgcctggagccgcctcttcccgcag

SEQ ID NO: 387978 - DNA, 75 bp, synthetic construct
  source 1..75: mol_type = other DNA
tattgcggtggcaattactggtttcaaccagattaatcgcggtggcccggcaggaaatgccgtggtgatgcacta

SEQ ID NO: 387979 - DNA, 75 bp, synthetic construct
  source 1..75: mol_type = other DNA
ggcggagatgaacgccaacaacagcagtgcggcgaacgtggtgaaatcgctgcgtaacccgtatctacaggtgag

SEQ ID NO: 387980 - DNA, 75 bp, synthetic construct
  source 1..75: mol_type = other DNA
tgctttgaagcatttgatggtctggtgaaatactggcttaccttcaatgaaatcaacattatgttgcatagcccg

SEQ ID NO: 387981 - DNA, 75 bp, synthetic construct
  source 1..75: mol_type = other DNA
gatatcgccctgatggcagagatggggttcaaagtgttccgtacctcaattgcctggagccgcctctttccgcag

SEQ ID NO: 387982 - DNA, 75 bp, synthetic construct
  source 1..75: mol_type = other DNA
tgggcgggggctgatttctgggaagagcagggccgttgtatcagcctggacgatatcctgcgtcgtgctgatgtg

SEQ ID NO: 387983 - DNA, 75 bp, synthetic construct
  source 1..75: mol_type = other DNA
ggaaaaattgacccgctgatggcgctgttcaatgcggtctccctgatgtcccttaacccggaaccgaaaaagaaa

SEQ ID NO: 387984 - DNA, 75 bp, synthetic construct
  source 1..75: mol_type = other DNA
cctcccgcccggaagggtttgtggtgtatacgaccacccagtcgaatgaaccgccagccggggtgttcagacaga

SEQ ID NO: 387985 - DNA, 75 bp, synthetic construct
  source 1..75: mol_type = other DNA
gggatgtgcgcgacggcaaaattcatgatccgcactttctgccggtgatatttgaacaccctcctgaaatggtgg

SEQ ID NO: 387986 - DNA, 75 bp, synthetic construct
  source 1..75: mol_type = other DNA
ctggctgccggatgcgcactcacaggctccgaccgccggttccgtggacctcgcggggatcttgctgaaaaccgc

SEQ ID NO: 387987 - DNA, 75 bp, synthetic construct
  source 1..75: mol_type = other DNA
gatcctgttgctggtggtgctgctggtactgctgggcttctttccgcagccgattctggatacctcgcactccgc

SEQ ID NO: 387988 - DNA, 75 bp, synthetic construct
  source 1..75: mol_type = other DNA
tggtgtggaatacctgttaatgctgggcttcttcatcgccttcgcagtcaaaatgccggtggttccgctgcatgg

SEQ ID NO: 387989 - DNA, 75 bp, synthetic construct
  source 1..75: mol_type = other DNA
atgacggcgctgttactgaactggcggcaggcggcgggctacaccattctggccccgaccgtggaggtggcggct

SEQ ID NO: 387990 - DNA, 75 bp, synthetic construct
  source 1..75: mol_type = other DNA
gtgatctttgaacaccctcctgaaatggtggaaagcggggctcacctgctgatggaaaacctcgccatggtcaat

SEQ ID NO: 387991 - DNA, 75 bp, synthetic construct
  source 1..75: mol_type = other DNA
gtgaaacatgccgatgccagcgcggtcacgctgcaaggctggcagcatgatgagcggttaatgctggtgattgaa

SEQ ID NO: 387992 - DNA, 75 bp, synthetic construct
  source 1..75: mol_type = other DNA
atcatgatgacggcgctgttactgaactggcggcaggcggcgggctacacgattctggccccgactgtggaggtg

SEQ ID NO: 387993 - DNA, 75 bp, synthetic construct
  source 1..75: mol_type = other DNA
catgatccgcactttctgccggtgatttttgagcatcctcctgaaatggtggaaagcggggctcacctgctgatg

SEQ ID NO: 387994 - DNA, 75 bp, synthetic construct
  source 1..75: mol_type = other DNA
ggtggctgccgatccgaatacggtatccggtatcaagtccgtggggacgctgattgatgaactgtggttatttgg

SEQ ID NO: 387995 - DNA, 75 bp, synthetic construct
  source 1..75: mol_type = other DNA
acctttgggctggtctttgcatctgtttattcgctggcgatgttgcatcgcgcttacttcggtaaagcgaaaagc

SEQ ID NO: 387996 - DNA, 75 bp, synthetic construct
  source 1..75: mol_type = other DNA
aactgcagtacgcccgggatgtgcgcgacggtaaaattcatgatccacattttctgccggtgatttttgagcatc

SEQ ID NO: 387997 - DNA, 75 bp, synthetic construct
  source 1..75: mol_type = other DNA
tgtcaccgaaagcccttatgttggagataaaggaggggccatttgacccacggaaagctaaggctttttctaaat

SEQ ID NO: 387998 - DNA, 75 bp, synthetic construct
  source 1..75: mol_type = other DNA
tgtcaccgaatgcccttatgttggagataaaggaaggaccatttgacccactgaaagctaaggctttttctaagt

SEQ ID NO: 387999 - DNA, 75 bp, synthetic construct
  source 1..75: mol_type = other DNA
ccgatgagagtgtggtggggataagccagggctggaagctgggcggggccatcaaaaaccaccgagcgcaaactg

SEQ ID NO: 388000 - DNA, 75 bp, synthetic construct
  source 1..75: mol_type = other DNA
ggatgacacggcggaagtggcggagtatgtgcgtcgtattcatgaggctgagttactggaccatatcggtattga

SEQ ID NO: 388001 - DNA, 75 bp, synthetic construct
  source 1..75: mol_type = other DNA
gctgatggaaaacctcgccatggttaacccgaatctcggttattcggtggatgaggcttttctgtaccgggagta

SEQ ID NO: 388002 - DNA, 75 bp, synthetic construct
  source 1..75: mol_type = other DNA
aaaattagcaaatcaagcaaaaaaattatttactaggcttgcaaatagtggcgaaggcggtgaatttattctttt

SEQ ID NO: 388003 - DNA, 75 bp, synthetic construct
  source 1..75: mol_type = other DNA
tgatgttgatcgccatcctggcgctggtttttgttcactacaatgcgaccggcgtctggaccttcaactatgaag

SEQ ID NO: 388004 - DNA, 75 bp, synthetic construct
  source 1..75: mol_type = other DNA
tgtggcaacgcttgggatgccgggcactggtaacttcgtcggtgaatttatgattctgttcggcagcttccaggt

SEQ ID NO: 388005 - DNA, 75 bp, synthetic construct
  source 1..75: mol_type = other DNA
aatgggaattattcctcgttttaaaaggtgttgtagagttctgtctttatgatgatagtggatcttttataaaaa

SEQ ID NO: 388006 - DNA, 75 bp, synthetic construct
  source 1..75: mol_type = other DNA
aggtggcctggatgaaacgtcagacgccccccacgctggagagcaaaattatcctcgtgcagggcagtattccgg

SEQ ID NO: 388007 - DNA, 75 bp, synthetic construct
  source 1..75: mol_type = other DNA
tctctgagcaagcactgatgatggaggttaaggaaggcccgtttgactcgaattatgccaaggtgtttccgaatt

SEQ ID NO: 388008 - DNA, 75 bp, synthetic construct
  source 1..75: mol_type = other DNA
agatattttcctgaacgggaaaattcacctcaacggaccgatcgtccaggacaaagcccagatgaaggatacaac

SEQ ID NO: 388009 - DNA, 75 bp, synthetic construct
  source 1..75: mol_type = other DNA
ctgatgcaggggatctacaccacccaggatggacgcagtgatgtggccatcagctgttgctgtatggtgagcggt

SEQ ID NO: 388010 - DNA, 75 bp, synthetic construct
  source 1..75: mol_type = other DNA
cgacgcgtcagtgctgatttcaacaggtatcgacgccacgcaaaccaaccacggtcgccaacatctcgacgaaac

SEQ ID NO: 388011 - DNA, 75 bp, synthetic construct
  source 1..75: mol_type = other DNA
tgccagttcattgattgctatagttgcatttatccttggtgttggcttgaccttaatccttacactcattaagtc

SEQ ID NO: 388012 - DNA, 75 bp, synthetic construct
  source 1..75: mol_type = other DNA
atgtttgaatctattcttgaaggcggaaacattaatttcgttattgataatggtgcttctacgttcttgccatta

SEQ ID NO: 388013 - DNA, 75 bp, synthetic construct
  source 1..75: mol_type = other DNA
tgcgaacctaaaactaaatgtattgagcctaaacagcagacaatgaaacctacagaaaaaactcccggcatgtca

SEQ ID NO: 388014 - DNA, 75 bp, synthetic construct
  source 1..75: mol_type = other DNA
agaaagctgcacgcgaaaaaatggaacaacaaaaaaacggctctcttaatactttccagcaaggtttaaaagcgc

SEQ ID NO: 388015 - DNA, 75 bp, synthetic construct
  source 1..75: mol_type = other DNA
aactcaatatcaaccagctggcagggataaccggcgtacaccgtcagacggttgccgcgagactgaaaaatgttg

SEQ ID NO: 388016 - DNA, 75 bp, synthetic construct
  source 1..75: mol_type = other DNA
acccgccgatgatgtgcgaaaagagatggctatatggggggaaatcgtaagcgaggaactggcaaaactccccaa

SEQ ID NO: 388017 - DNA, 75 bp, synthetic construct
  source 1..75: mol_type = other DNA
tcttgcagcatcaacagaaaactggcgtcaatggtggcagaaacgtcgtatcacggtaaatggcggcgaagcgca

SEQ ID NO: 388018 - DNA, 75 bp, synthetic construct
  source 1..75: mol_type = other DNA
cacatggtggagattatggagagaaaatcacagtcggagcacgacaaaagaaaacttaaaacaataaaaataatt

SEQ ID NO: 388019 - DNA, 75 bp, synthetic construct
  source 1..75: mol_type = other DNA
cattatcaaatttggtagtggcggtgttcatgttcctgcagagccagagccagagccagagccagagccagagcc

SEQ ID NO: 388020 - DNA, 75 bp, synthetic construct
  source 1..75: mol_type = other DNA
ggatatattatctgatacttatgaagatatgaagagattaaatttaggtgggactgatcaatttttccattgtat

SEQ ID NO: 388021 - DNA, 75 bp, synthetic construct
  source 1..75: mol_type = other DNA
agcaactatttcttcgagaatctgttcaagtatgagtgggtacagacccgcagtccggctggagcaatccagttc

SEQ ID NO: 388022 - DNA, 75 bp, synthetic construct
  source 1..75: mol_type = other DNA
cccggtgtcgcggaatatgtgaacaacggaggaaaacatcatgcagtatgcgaaacctgtcactctgaacgttga

SEQ ID NO: 388023 - DNA, 75 bp, synthetic construct
  source 1..75: mol_type = other DNA
aggcaactgcagccagcggcagaggagacggacggtatccgtcagggctgcatgatggcgctgaaatcagcacgg

SEQ ID NO: 388024 - DNA, 75 bp, synthetic construct
  source 1..75: mol_type = other DNA
tttgcaagagcatggtttaaactgacccaccgggatatgggaccggcagcccgatatcttggtaatgaagttcct

SEQ ID NO: 388025 - DNA, 75 bp, synthetic construct
  source 1..75: mol_type = other DNA
ctgatttaattgttctttcgggtaatgctgcaatcgaagatgcggccagaaaagccggggtggaacttgagattc

SEQ ID NO: 388026 - DNA, 75 bp, synthetic construct
  source 1..75: mol_type = other DNA
cgaaagagctgtttgaaggccgtgaccgcgaaaccggcgaagtgaaatacactgccagccgtgcggatctggtat

SEQ ID NO: 388027 - DNA, 75 bp, synthetic construct
  source 1..75: mol_type = other DNA
ccgattgtcgttgaccttcgtcagcagagcttcaccattgaagggctggcggttggggttattcgcaacggcgac

SEQ ID NO: 388028 - DNA, 75 bp, synthetic construct
  source 1..75: mol_type = other DNA
acgtgatgcagacctttttcccgaatatcccggtggccaccccgaccacgtttctggtgaacgtaaacacgctgg

SEQ ID NO: 388029 - DNA, 75 bp, synthetic construct
  source 1..75: mol_type = other DNA
caatacgcttgaagcgctgccgcttttacagggcgcatcagatgctgccggttttatggcgcggatggataccgt

SEQ ID NO: 388030 - DNA, 75 bp, synthetic construct
  source 1..75: mol_type = other DNA
tgtcgctgttactgtcgaacatcctgctggatgaactggataaagaactggagcgtcgtggacacagcttctgcc

SEQ ID NO: 388031 - DNA, 75 bp, synthetic construct
  source 1..75: mol_type = other DNA
ggatcaaacggaaactgcggtgcctgttgtggcggcagtggaagaggccgggaacccggacgaagaacctgcaaa

SEQ ID NO: 388032 - DNA, 75 bp, synthetic construct
  source 1..75: mol_type = other DNA
caaatcagtgaaagtgacaatcaatgccctgacgccagtgctgcgtggatggataagctacttcaggctgacgga

SEQ ID NO: 388033 - DNA, 75 bp, synthetic construct
  source 1..75: mol_type = other DNA
attgtgtcggcatttctggcattaccaccgccggttgcagaaggcgaaatggacgcgcatgagcgcaaagcctgg

SEQ ID NO: 388034 - DNA, 75 bp, synthetic construct
  source 1..75: mol_type = other DNA
attcaacagcaaatacgtggagaatatcacttgggcgatattgagctgttttatcctggtgccagtcttggcata

SEQ ID NO: 388035 - DNA, 75 bp, synthetic construct
  source 1..75: mol_type = other DNA
ttttaccgtctcgtgggattactcgttatgcaaacgcgctattgatgaaaactgctttttcagcgatgaagtccc

SEQ ID NO: 388036 - DNA, 75 bp, synthetic construct
  source 1..75: mol_type = other DNA
tctgcaattccggataattgtaagcgtgcagcaagaaccgtattgacggggatgtgttattcagtcggcagtgct

SEQ ID NO: 388037 - DNA, 75 bp, synthetic construct
  source 1..75: mol_type = other DNA
atgaaagacgacaacagcaccgacaaaaaaaaaccggccccccgtctccgccgcatcggtgacatcgggataaac

SEQ ID NO: 388038 - DNA, 75 bp, synthetic construct
  source 1..75: mol_type = other DNA
cgatatcgcgatgtatcaggagaaaaaacacaaactgaaaaccccttttgtcgcgcattcagacaggcactcctg

SEQ ID NO: 388039 - DNA, 75 bp, synthetic construct
  source 1..75: mol_type = other DNA
tggttgagcaattacgtgaagccaatgccgctctgattgcgcaatcttacaccgactctttgaccggcctgccga

SEQ ID NO: 388040 - DNA, 75 bp, synthetic construct
  source 1..75: mol_type = other DNA
ggatctcatggttgtcgctcatgtataacctgagacttgaacgcacactaatagcactgacggtcatacatcggg

SEQ ID NO: 388041 - DNA, 75 bp, synthetic construct
  source 1..75: mol_type = other DNA
tgatgcggcaattgtcggtataggagcaataaaccagaaagatgatgcaaccattattcgagcaggttacatcac

SEQ ID NO: 388042 - DNA, 75 bp, synthetic construct
  source 1..75: mol_type = other DNA
tgggcgacattctgggttacttcttcgatggtgaaggagaagtgatcccggagatgaagattcacgatgaactga

SEQ ID NO: 388043 - DNA, 75 bp, synthetic construct
  source 1..75: mol_type = other DNA
acataggaaccaaatcaggcaaaggcctgagtggtcaactggtagggggaaaattcgacggaaaaataacggtgg

SEQ ID NO: 388044 - DNA, 75 bp, synthetic construct
  source 1..75: mol_type = other DNA
gatgacattcgctttgtcatgagcagtgaacaggggcgtcgggttgtctggtcggtactggagaaaggccgtgtg

SEQ ID NO: 388045 - DNA, 75 bp, synthetic construct
  source 1..75: mol_type = other DNA
gtgaacaggggcgtcgggttgtctggtcggtactggagaaaggccgtgtgttttccgctatctcgccgatggacg

SEQ ID NO: 388046 - DNA, 75 bp, synthetic construct
  source 1..75: mol_type = other DNA
ggtggatgctgcgcagctgccgccatatgctgggccagcataaaacgcgcctgaagcgcctcatgcccgaccggc

SEQ ID NO: 388047 - DNA, 75 bp, synthetic construct
  source 1..75: mol_type = other DNA
gaaaaatatcggctacagcgaaaacgacattcaggagttggtcagcaaagtgaggtgtactggcaatagcggaca

SEQ ID NO: 388048 - DNA, 75 bp, synthetic construct
  source 1..75: mol_type = other DNA
accaaaggtaaagatccctactacgccggttgcggtctgtacaaatgcgccgacggctacatcgtgatggaactg

SEQ ID NO: 388049 - DNA, 75 bp, synthetic construct
  source 1..75: mol_type = other DNA
atggatcatctacccatgccgaaattcggaccgctggccggattgcgcgttgtcttctccggtatcgaaatcgcc

SEQ ID NO: 388050 - DNA, 75 bp, synthetic construct
  source 1..75: mol_type = other DNA
acgacgtgctgaaaaaactgtttgatgatgccggtctgattctggtcgactttaagctggagtttggcctgtaca

SEQ ID NO: 388051 - DNA, 75 bp, synthetic construct
  source 1..75: mol_type = other DNA
tatcagtccgagcgcgagcgccttaaatttcagcatgaaactgttcagcttgtgcccgtcagtgatgtcaggcgg

SEQ ID NO: 388052 - DNA, 75 bp, synthetic construct
  source 1..75: mol_type = other DNA
tttgcccgtcgtggcattaccgatgaagtcctgtggcagcacaacccgaaactggttatcgctcacctgtccggt

SEQ ID NO: 388053 - DNA, 75 bp, synthetic construct
  source 1..75: mol_type = other DNA
cctgtggactgacggtcttggcgtgatgacacgcggggtgaccgatgacagcggtaccttgcagttacaacatat

SEQ ID NO: 388054 - DNA, 75 bp, synthetic construct
  source 1..75: mol_type = other DNA
gtgaagcgaagccgggatcagagatcctgtggactgacggtcttggcgtgatgacacgcggggtgaccgatgaca

SEQ ID NO: 388055 - DNA, 75 bp, synthetic construct
  source 1..75: mol_type = other DNA
tcgacaaaaaagagttcaaaactggcgaagcggtcagcggcaaactgcaactgctttacccggatggcgagccgg

SEQ ID NO: 388056 - DNA, 75 bp, synthetic construct
  source 1..75: mol_type = other DNA
aagaacgctttgccgaactgaatatcgcctgcgccaaagtgctgaccgtaccggaactggaaagcaatccacagt

SEQ ID NO: 388057 - DNA, 75 bp, synthetic construct
  source 1..75: mol_type = other DNA
aaagatccctactacgccggttgcggtctgtataaatgtgccgacggctacatcgtgatggaactggtgggcatt

SEQ ID NO: 388058 - DNA, 75 bp, synthetic construct
  source 1..75: mol_type = other DNA
catactgatgtgatcctgaaaaaatcgtatgaagtgatgcatggggaattggggaatgtggattcgatccagagc

SEQ ID NO: 388059 - DNA, 75 bp, synthetic construct
  source 1..75: mol_type = other DNA
atgtctctcactaaatcactgctgttcaccctgttactgacagctgctgccgtgcaggcctccacccgggatgaa

SEQ ID NO: 388060 - DNA, 75 bp, synthetic construct
  source 1..75: mol_type = other DNA
gaaaagccggctccccgctggttccgcctcagcaacggtaggcaggttaacctggccgactggaaggtggtgctg

SEQ ID NO: 388061 - DNA, 75 bp, synthetic construct
  source 1..75: mol_type = other DNA
cgcagtgcgggctgacggtggagcggctggcggcacagatagagccggtttattgcctgagcgaaaatacatctt

SEQ ID NO: 388062 - DNA, 75 bp, synthetic construct
  source 1..75: mol_type = other DNA
gtactcgttgaaatttcttcatctccagagaagtactacaagttacgtatccatcaagaacgtgttatggaaggt

SEQ ID NO: 388063 - DNA, 75 bp, synthetic construct
  source 1..75: mol_type = other DNA
atggattcagaaacagttcacggaacggccaggtctggcgttaccagcgtgccggcgggcgggccgttattctgg

SEQ ID NO: 388064 - DNA, 75 bp, synthetic construct
  source 1..75: mol_type = other DNA
gatgcaatcgctgaaggtgatgttcagtctgttaattactttattgcgcaaaaatacactgaagcactccaggca

SEQ ID NO: 388065 - DNA, 75 bp, synthetic construct
  source 1..75: mol_type = other DNA
gtggtgctgtttatgcaggggcattgcccttactgtcaccagtttgacccggtactgaagcagctggcacagcag

SEQ ID NO: 388066 - DNA, 75 bp, synthetic construct
  source 1..75: mol_type = other DNA
gctgccgcttttacagggcgcatcggatgccgccggttttatggcgcggatggataccgttctgcagatgtacgg

SEQ ID NO: 388067 - DNA, 75 bp, synthetic construct
  source 1..75: mol_type = other DNA
aacagctggcgctgcagtacggattttccgtatttccctataccctggatggtcagggtgatacggcctttccgc

SEQ ID NO: 388068 - DNA, 75 bp, synthetic construct
  source 1..75: mol_type = other DNA
gggcaacggatgccgccggttttatggcacggatggataccgttctgcagatgtatggagggaaaaaaggtgcga

SEQ ID NO: 388069 - DNA, 75 bp, synthetic construct
  source 1..75: mol_type = other DNA
gaaaagccggccccccgctggttccgcctcagcaacggcaggcaggttaacctggccgactggaaggtggtgctg

SEQ ID NO: 388070 - DNA, 75 bp, synthetic construct
  source 1..75: mol_type = other DNA
aaagtctgaatggcaccgctactttccttcgcgcccaggcacaaagtaacgtgacgcaaatgatgcgcatgttta

SEQ ID NO: 388071 - DNA, 75 bp, synthetic construct
  source 1..75: mol_type = other DNA
tatcattgaaaaagaaacggttaaagctctggtagatgcaggccaggtggtgatcaccgttggcggtggtggtat

SEQ ID NO: 388072 - DNA, 75 bp, synthetic construct
  source 1..75: mol_type = other DNA
tggcaaaccgcgtcacgccggacagcctgccgccggtggagtggctgacctacggcagcggttatctggcgggca

SEQ ID NO: 388073 - DNA, 75 bp, synthetic construct
  source 1..75: mol_type = other DNA
ggaagtcatggctatcgccttcgaagctgaagccattattcgcggcaagctctatgaggccttcaccgtattgaa

SEQ ID NO: 388074 - DNA, 75 bp, synthetic construct
  source 1..75: mol_type = other DNA
gggcttaccatatcgcacgtcagtaaggatgatgcaggcatcaaccaaatatttatctccagcgctgaaatcaaa

SEQ ID NO: 388075 - DNA, 75 bp, synthetic construct
  source 1..75: mol_type = other DNA
gggcttaccataccgaacttctgtgcggatgatgcaagcatcgactaaatacttatcccccgcactgaaatcaaa

SEQ ID NO: 388076 - DNA, 75 bp, synthetic construct
  source 1..75: mol_type = other DNA
ttgaactaatggaagatgctccgctgagtgatggcctcaacgttagtcttaatgccatgaccgaacatcgcctcg

SEQ ID NO: 388077 - DNA, 75 bp, synthetic construct
  source 1..75: mol_type = other DNA
gttgttcatgaggcacgcttttatatggcgcagagcgcggaagcaatgctggaagccggtaaacgattgatcctt

SEQ ID NO: 388078 - DNA, 75 bp, synthetic construct
  source 1..75: mol_type = other DNA
tcgcgatattgcacacgccaagctgaaagagctgattgacgccggtaaagaactgccgcagtacatcaaagatca

SEQ ID NO: 388079 - DNA, 75 bp, synthetic construct
  source 1..75: mol_type = other DNA
taacctgcgctattcacagaatgcggcgctggacatgtacaaagaggtcaacaccggcactaacctgcctgcgca

SEQ ID NO: 388080 - DNA, 75 bp, synthetic construct
  source 1..75: mol_type = other DNA
ccgcgatatccagctggaacaggaactgctggaagaggcacagaaactcggtcttggcgcgcagtttggcggtaa

SEQ ID NO: 388081 - DNA, 75 bp, synthetic construct
  source 1..75: mol_type = other DNA
acgccgcgccggagtgggtaacaaaccccacgcctaaaatcgaacgcccggactggatgaccaccgataaggaga

SEQ ID NO: 388082 - DNA, 75 bp, synthetic construct
  source 1..75: mol_type = other DNA
gtctgggtgcgcagtttggtggtaaatacttcgctcacgacatccgcgtgattcgcctgccacgtcacggcgcat

SEQ ID NO: 388083 - DNA, 75 bp, synthetic construct
  source 1..75: mol_type = other DNA
cttctacctcggtagtatcggcggtccggcggcagtactggcgcagcagagcatcaagcatctggaatgcgtcgc

SEQ ID NO: 388084 - DNA, 75 bp, synthetic construct
  source 1..75: mol_type = other DNA
cttgaaatagattttaaaggggaggtcgttagtaaatggactttctcttcggagaataacaactctaagacaggc

SEQ ID NO: 388085 - DNA, 75 bp, synthetic construct
  source 1..75: mol_type = other DNA
cccccttatcgcctcaagtttgctggcgctagggggaggaaaaccgtggtatgtcgctctgtttttatttgctgt

SEQ ID NO: 388086 - DNA, 75 bp, synthetic construct
  source 1..75: mol_type = other DNA
ggtatttttgctctctgtaaccattttcttacttcggagcagtttctctcctggggatggcgcattccgttttgg

SEQ ID NO: 388087 - DNA, 75 bp, synthetic construct
  source 1..75: mol_type = other DNA
gtactggcgcaatgctggcgcacttccagcagcttgcgatacgccactggctggtgggtctcgcaaactgttcac

SEQ ID NO: 388088 - DNA, 75 bp, synthetic construct
  source 1..75: mol_type = other DNA
gatcgtcgatcacttcacctatgtgtttatgggcgacggctgcctgatggaaggtatttcccacgaagtctgttc

SEQ ID NO: 388089 - DNA, 75 bp, synthetic construct
  source 1..75: mol_type = other DNA
agcaggaagaaacatccgtgacattatttcagggaaaaatgagtaccgacggaaataactattccatcatcaaag

SEQ ID NO: 388090 - DNA, 75 bp, synthetic construct
  source 1..75: mol_type = other DNA
cgaaaaaggaaccaaccctgaagaactgattggcgcagcgcatgccgcatgtttctcaatggcgctttcattaat

SEQ ID NO: 388091 - DNA, 75 bp, synthetic construct
  source 1..75: mol_type = other DNA
ccagtggcctggaaggagcctggtcgacatcgccaacccagttcacaatgcagtatctgaagaatttatataaat

SEQ ID NO: 388092 - DNA, 75 bp, synthetic construct
  source 1..75: mol_type = other DNA
tggacaaagaccgtttccgccagagcctcggtggcctgatcgaagcctatgaagccgtcgcccgccgcctgggtg

SEQ ID NO: 388093 - DNA, 75 bp, synthetic construct
  source 1..75: mol_type = other DNA
gattgatggtaaagacattaagtcgctgaaagagcaggttatggatttgggtatccctgcatctgagctgataaa

SEQ ID NO: 388094 - DNA, 75 bp, synthetic construct
  source 1..75: mol_type = other DNA
tgattgacgcagagaaactcaccttcaccgtttgtggcatcgaatacaaaatgagaaaagcgaaaacaaatccgt

SEQ ID NO: 388095 - DNA, 75 bp, synthetic construct
  source 1..75: mol_type = other DNA
taattcttttgactctctctggtagtctctctcctgctgtggctaatgataaaaaggggactgagaaattctact

SEQ ID NO: 388096 - DNA, 75 bp, synthetic construct
  source 1..75: mol_type = other DNA
cagttcaaatcctgaattacgtgcggtggcagaagtatatgcctcggatgatgcgagaaataagtttattcatga

SEQ ID NO: 388097 - DNA, 75 bp, synthetic construct
  source 1..75: mol_type = other DNA
gcattcgaaaaccccaggccacccggagattggttatacgcccggtgttgaaaccaccaccggtccacttggaca

SEQ ID NO: 388098 - DNA, 75 bp, synthetic construct
  source 1..75: mol_type = other DNA
aaactacacttgatagtggcaatgaacaatggacttattcgatggacaacaatcagtttgatgatcctacccacg

SEQ ID NO: 388099 - DNA, 75 bp, synthetic construct
  source 1..75: mol_type = other DNA
tttttatttccgtttcctttacttctggttgctcaacatcaggcaatcaacatctcaaaaacgaaacatcacaaa

SEQ ID NO: 388100 - DNA, 75 bp, synthetic construct
  source 1..75: mol_type = other DNA
gaattcaaagccgcctgtgaaaaatatcactacacatcggcgcaaattcttccccacgacagctatctgattaac

SEQ ID NO: 388101 - DNA, 75 bp, synthetic construct
  source 1..75: mol_type = other DNA
tttttattgcgtcatttttaattactggctgttctacatcaggcaaccaaaaaataaaaaatgaaactgctcaaa

SEQ ID NO: 388102 - DNA, 75 bp, synthetic construct
  source 1..75: mol_type = other DNA
tattcaaaaagctaaagcaggctgcccggtttctcaggtgctgaaagcggaaattacgctggattatcagttgaa

SEQ ID NO: 388103 - DNA, 75 bp, synthetic construct
  source 1..75: mol_type = other DNA
gggctcacagacgcaggccaaaacgctggaaatcgaatttaaaggagaaacggtcagcaaatggtcgttctctga

SEQ ID NO: 388104 - DNA, 75 bp, synthetic construct
  source 1..75: mol_type = other DNA
cgtacaggtcaagattatgcattatggctaagactattaaagtcaggggaaaaagcatacaaactagaccagatt

SEQ ID NO: 388105 - DNA, 75 bp, synthetic construct
  source 1..75: mol_type = other DNA
catataattcatggccatatattaaggaaacttatgattcaatcgcaaatcaatcttataaaaattgggaatggc

SEQ ID NO: 388106 - DNA, 75 bp, synthetic construct
  source 1..75: mol_type = other DNA
agaaggctggtttaccgacgatacggcaaaacgttttgaagcctatcactggcatgtgatccatgaaatcgacgg

SEQ ID NO: 388107 - DNA, 75 bp, synthetic construct
  source 1..75: mol_type = other DNA
attgccgaatccatcaacattgcgctggataaaactcaaggtgtgacagcggtgattgaaaacaccgccggtcag

SEQ ID NO: 388108 - DNA, 75 bp, synthetic construct
  source 1..75: mol_type = other DNA
ccggacttaagaactggacaagattatgctacttggttaaaaatacttaaaagaggcacaagagcatacttgctt

SEQ ID NO: 388109 - DNA, 75 bp, synthetic construct
  source 1..75: mol_type = other DNA
tggataaaaagaaaataccaccgttgaattatgaagatatgctaaagaagaatgctactctagggtgctcgacag

SEQ ID NO: 388110 - DNA, 75 bp, synthetic construct
  source 1..75: mol_type = other DNA
tgaacgatgcacgttaccaggcgaaatacgtttcagccatctggcaaaaactgctcccgagtcaggctgattttt

SEQ ID NO: 388111 - DNA, 75 bp, synthetic construct
  source 1..75: mol_type = other DNA
gctcaggactgcgcttataaatttcttatctgcgaggataaacccggcatgccccgccctgctatcgactcctgg

SEQ ID NO: 388112 - DNA, 75 bp, synthetic construct
  source 1..75: mol_type = other DNA
tggcgagacggcagatcacccaattaaggtgaacggtcatcacgaaatcacatccaccagcaggacgtgtgacca

SEQ ID NO: 388113 - DNA, 75 bp, synthetic construct
  source 1..75: mol_type = other DNA
gattctgtgaaccagaaccagcaagaaacggaacagaacgaccagaaagcggaacaaaacagcccaaatacgcaa

SEQ ID NO: 388114 - DNA, 75 bp, synthetic construct
  source 1..75: mol_type = other DNA
ctttggctctaccgccaacccgcagatgtttgctcttgcccgtgaacatgccgataaaaccgggcgtgaagcagt

SEQ ID NO: 388115 - DNA, 75 bp, synthetic construct
  source 1..75: mol_type = other DNA
atgtttgcccttgcccgtgaacatgccgacaaaaccggacgtgaggcggtgatgttcagctcttttttacgcgct

SEQ ID NO: 388116 - DNA, 75 bp, synthetic construct
  source 1..75: mol_type = other DNA
atgatgcactgctgcaattacgggaatttatcggacgaaaactccggtgaattttttgttcaggtctggggtaac

SEQ ID NO: 388117 - DNA, 75 bp, synthetic construct
  source 1..75: mol_type = other DNA
atttcgacgcaagaacgactattccattcgaaggtgaacgccataacgctctgaacgatgcacgttaccaggcga

SEQ ID NO: 388118 - DNA, 75 bp, synthetic construct
  source 1..75: mol_type = other DNA
gaaaactcaacaggaaaaatccaccctgtcactgccgccattcgtcgcgaatacaagcagacatggaaaacactg

SEQ ID NO: 388119 - DNA, 75 bp, synthetic construct
  source 1..75: mol_type = other DNA
tggcaccattaaatggtggcttaagcaatcacgggaggcgcaatctgccattctgaccgatgaaatcccgttaga

SEQ ID NO: 388120 - DNA, 75 bp, synthetic construct
  source 1..75: mol_type = other DNA
ggccgttctacttcctctttaccgacaaggatggcgaaaaatacggtcgcgcaaacaaactttctggtctggata

SEQ ID NO: 388121 - DNA, 75 bp, synthetic construct
  source 1..75: mol_type = other DNA
agggcgtgtttgaagatgaaggaacaaatcagagcgcaactgatactctctcgtcgccagtaccagaaactgatg

SEQ ID NO: 388122 - DNA, 75 bp, synthetic construct
  source 1..75: mol_type = other DNA
agaagatagcgctgttgcggtggccactgccattgaagccggtgatgagcgtcgcgcacgcgcaaaatttcactg

SEQ ID NO: 388123 - DNA, 75 bp, synthetic construct
  source 1..75: mol_type = other DNA
cccttcgctacgaccgccagactatttttggccttgtccgtgaacgtccgatcgacattcacaaagatcccgtag

SEQ ID NO: 388124 - DNA, 75 bp, synthetic construct
  source 1..75: mol_type = other DNA
gcaggcaaaatttcaggtattttaaccgacttcacctttcatgatctgaaggcgaaaggaatttcagactatgaa

SEQ ID NO: 388125 - DNA, 75 bp, synthetic construct
  source 1..75: mol_type = other DNA
ccataaaaccagaacacatccgtcgatacatggacaagagaggggagcagagtaaaacgcaagccaaccatgaaa

SEQ ID NO: 388126 - DNA, 75 bp, synthetic construct
  source 1..75: mol_type = other DNA
ggggtcgagtattgccgggacgctgggtggtgttttctggcataactatggctggaacggcgtcggcgcatttat

SEQ ID NO: 388127 - DNA, 75 bp, synthetic construct
  source 1..75: mol_type = other DNA
gtgaattttttgttcaggtctggggaaatggagccaacttcgacaacacgattttgcgccgttcatacgaacggc

SEQ ID NO: 388128 - DNA, 75 bp, synthetic construct
  source 1..75: mol_type = other DNA
catggttaagttcgacacatgtgaaaacatcaccgttgatatggtgattagcgcacaggaattgttgcaggaaga

SEQ ID NO: 388129 - DNA, 75 bp, synthetic construct
  source 1..75: mol_type = other DNA
ctgaatcagatccgatgaacgtcacttttgacaagctggcccctgaagtacagaacgctgtcatggttaagttcg

SEQ ID NO: 388130 - DNA, 75 bp, synthetic construct
  source 1..75: mol_type = other DNA
ggtaagttttttgatccggcaaccggagagatggggccagaattcagcaaaactatcgatctggaaaccgcaggc

SEQ ID NO: 388131 - DNA, 75 bp, synthetic construct
  source 1..75: mol_type = other DNA
atcaatgcgcaaacagcccgaagcacttggctatgaccgtcagactatttttggccttgttcgcgaacgtccgat

SEQ ID NO: 388132 - DNA, 75 bp, synthetic construct
  source 1..75: mol_type = other DNA
cattgacggcagcatccatcgctgggcaaaaaatgaagttatcgacaacggccgcgaagactggaagcgtatctc

SEQ ID NO: 388133 - DNA, 75 bp, synthetic construct
  source 1..75: mol_type = other DNA
acagcctgatgcccttcgctacgaccgccagactatttttggccttgtccgtgaacgtccgatcgacattcacaa

SEQ ID NO: 388134 - DNA, 75 bp, synthetic construct
  source 1..75: mol_type = other DNA
agtgcaacaggaagtggaaaaagtctgcaccgcctgcggtcagaccggcggcggcaactgccctgattgtggcgc

SEQ ID NO: 388135 - DNA, 75 bp, synthetic construct
  source 1..75: mol_type = other DNA
cagaaactgatgcagtggaaacggcaattccggacaacgaaaaaccgaatgcaaagtggaagtcgaaccatctgt

SEQ ID NO: 388136 - DNA, 75 bp, synthetic construct
  source 1..75: mol_type = other DNA
gggtacgaacaggccacggcgtacaccctcacagggcagctacagagcaggcacctgaaccttccgcagcttgac

SEQ ID NO: 388137 - DNA, 75 bp, synthetic construct
  source 1..75: mol_type = other DNA
cagaaactgatgcagtggaaacggcaattccggtcaacgaaaaaaccgaatgcaaagtggaagtcgaaccatctg

SEQ ID NO: 388138 - DNA, 75 bp, synthetic construct
  source 1..75: mol_type = other DNA
gatgctgaatatatgcaggaaaaccgctgggatgaggagtctgcttcctttgtcccggtcgagactgaatccgat

SEQ ID NO: 388139 - DNA, 75 bp, synthetic construct
  source 1..75: mol_type = other DNA
tgacgtcattaaaaggtggctgaagcaatcacgtgaagcgcagtctgccattatgaccgatgaaatcccgttaga

SEQ ID NO: 388140 - DNA, 75 bp, synthetic construct
  source 1..75: mol_type = other DNA
acacgtctgttgttgatcttgcccgcgccagagtcaaccggcagcacactgaaaactcagcaggaaaaatcaacc

SEQ ID NO: 388141 - DNA, 75 bp, synthetic construct
  source 1..75: mol_type = other DNA
cagaaccagcaagaaacggaacagaacggccagaaagcggaacaaaacagcccaaatgcgttacaaaacgagcca

SEQ ID NO: 388142 - DNA, 75 bp, synthetic construct
  source 1..75: mol_type = other DNA
gttgagctggggaaagccatagacttcgatgccagaacggctattccattcgaaggtgagcgccataatgcactt

SEQ ID NO: 388143 - DNA, 75 bp, synthetic construct
  source 1..75: mol_type = other DNA
cgaccttgaaaccatgggaaaaaatcctgatgccccgattatctcaataggtgcaatatttttcgatccgcaaac

SEQ ID NO: 388144 - DNA, 75 bp, synthetic construct
  source 1..75: mol_type = other DNA
ataaaatcacatccaccagcaggttgtggcaccatctgatgattgacattgaaacaatgggaaaaaatcctgatg

SEQ ID NO: 388145 - DNA, 75 bp, synthetic construct
  source 1..75: mol_type = other DNA
gtcatggttaagttcgacacatgtgaaaacatcaccgttgatatggttattagcgcacaggaattgttgcaggaa

SEQ ID NO: 388146 - DNA, 75 bp, synthetic construct
  source 1..75: mol_type = other DNA
cggggctactgaaatcacgaaagaagaatatttcgcccgcaaaaacggtacatactcaggttcacaacaaaatac

SEQ ID NO: 388147 - DNA, 75 bp, synthetic construct
  source 1..75: mol_type = other DNA
aacaaatacatcactgaatacctgactaccaagggcgtgtttgaagatgacgaaggaacaaatcagggcacagct

SEQ ID NO: 388148 - DNA, 75 bp, synthetic construct
  source 1..75: mol_type = other DNA
ccctgattgtggcgcggtgatgggcgacgcaacctgccaggaaacattcgatgaagaaaatcaggctgaagctca

SEQ ID NO: 388149 - DNA, 75 bp, synthetic construct
  source 1..75: mol_type = other DNA
ctgtttcccggcgagataagctacagccgcagcgagtcactctggctggcgcggggcggggtggcggagcagcac

SEQ ID NO: 388150 - DNA, 75 bp, synthetic construct
  source 1..75: mol_type = other DNA
tgcagcggggggatcctcttgggttgtctggtgagacactggttcttggttctgccacaacagtaacaggaacaa

SEQ ID NO: 388151 - DNA, 75 bp, synthetic construct
  source 1..75: mol_type = other DNA
acgggcttaccgcaaaatgtagataccgctgaagattcagaacaaccagagccgataaaagttaccgctgactaa

SEQ ID NO: 388152 - DNA, 75 bp, synthetic construct
  source 1..75: mol_type = other DNA
catggcaacattcgacggccatatcgttgaagcgttgatgaaaatgccagaagttaacgccatgtatccggagct

SEQ ID NO: 388153 - DNA, 75 bp, synthetic construct
  source 1..75: mol_type = other DNA
aaaactgaaggatgcccttttacggttccgggaattcatcagcgaacattcagatgagaaattcgtgcaggtatg

SEQ ID NO: 388154 - DNA, 75 bp, synthetic construct
  source 1..75: mol_type = other DNA
gccgataagttgcttgctgtatcacgtagtgaatttgttgcagggattagcgacccgaatgatccgaaatgggtg

SEQ ID NO: 388155 - DNA, 75 bp, synthetic construct
  source 1..75: mol_type = other DNA
cattgacggcagcatccatcgctgggcaaaaaatgaagttatcaacaacgaccgcgaagactggaagcgtatctc

SEQ ID NO: 388156 - DNA, 75 bp, synthetic construct
  source 1..75: mol_type = other DNA
aggaaccggaaaagatctgcacagcctgcggtcagaccggcggcggcaactgccctgattgtggcgcggtgatgg

SEQ ID NO: 388157 - DNA, 75 bp, synthetic construct
  source 1..75: mol_type = other DNA
gctgggatgaggaaggcgcttcctttgtcccggtcgaaccagaatccgatccgatgaacgtcaattttgacaagc

SEQ ID NO: 388158 - DNA, 75 bp, synthetic construct
  source 1..75: mol_type = other DNA
ggaactaacaccaacgcgcccatagtggttattggtgctgtgtttttcgatccgcagacaggggaaatcgggcca

SEQ ID NO: 388159 - DNA, 75 bp, synthetic construct
  source 1..75: mol_type = other DNA
gctgatattctccagccgtcagcagcacaaactgatgcagtggaaactgaagtatctgataccaaaaaaaatgaa

SEQ ID NO: 388160 - DNA, 75 bp, synthetic construct
  source 1..75: mol_type = other DNA
cttgatgatcgaccttgaaacaatgggaaccaacaccaatgcgcccatcgtggttattggtgcggttttcttcga

SEQ ID NO: 388161 - DNA, 75 bp, synthetic construct
  source 1..75: mol_type = other DNA
ctggcaattccgttaccatcgacctctaactaagctgagaactaagcaaagctttggtgcctaccctgccgtctc

SEQ ID NO: 388162 - DNA, 75 bp, synthetic construct
  source 1..75: mol_type = other DNA
cagcgtattaacgaagtcatgatttatgcgcagaacacaggcttgattgatgctgttcccagcgtaaacatcgga

SEQ ID NO: 388163 - DNA, 75 bp, synthetic construct
  source 1..75: mol_type = other DNA
ccgtcaaggaaatcgaatcagcaaaacccaaagaagcggactacgttctttatgatggcgatggccttgagctac

SEQ ID NO: 388164 - DNA, 75 bp, synthetic construct
  source 1..75: mol_type = other DNA
ggctttaatgcggatgtaatcgaagcggcattggctcattccgataaaaatgaagttagaaaggcatataaccgt

SEQ ID NO: 388165 - DNA, 75 bp, synthetic construct
  source 1..75: mol_type = other DNA
atggcttttgagagacctaaaaagaaaaatatgccgactttacgaccggaagaactacctaagctgatgcgctct

SEQ ID NO: 388166 - DNA, 75 bp, synthetic construct
  source 1..75: mol_type = other DNA
gaagctgctgaggctcgatgggatgaaatcgattttgatgctaacgaatggaaaattcctgcagcccgaatgaag

SEQ ID NO: 388167 - DNA, 75 bp, synthetic construct
  source 1..75: mol_type = other DNA
accatgggaaaaaatcctgatgccccgattatctcaataggtgcaatatttttcgatccgcaaaccggagatatg

SEQ ID NO: 388168 - DNA, 75 bp, synthetic construct
  source 1..75: mol_type = other DNA
tagtggttattattccaatattattggcgttgaaggcggagcgtattatgtttataaattaggtgctcgtgctga

SEQ ID NO: 388169 - DNA, 75 bp, synthetic construct
  source 1..75: mol_type = other DNA
ctcctgctctgctgaccgtaatatcaaagcgaagatcaaccgtcaggggatctggatcgaaaaactggaacataa

SEQ ID NO: 388170 - DNA, 75 bp, synthetic construct
  source 1..75: mol_type = other DNA
tatgatggcgatggccttgagctactcattaaatccagcgggagtaaaatctggcagtttcgctacattcgccct

SEQ ID NO: 388171 - DNA, 75 bp, synthetic construct
  source 1..75: mol_type = other DNA
aggtctggggaaatggagccaacttcgacaacgtgattttacgccgttcatacgaacggcaggggatcccctgcc

SEQ ID NO: 388172 - DNA, 75 bp, synthetic construct
  source 1..75: mol_type = other DNA
gtcgcgcccgcgcaaaatttcactggcaattcctggaacattatccggttgctcaggactgcgcttataaatttc

SEQ ID NO: 388173 - DNA, 75 bp, synthetic construct
  source 1..75: mol_type = other DNA
tgcaaatccagcatcaggtgttggtatggcatttgagaaacctaaaaagaaaaatatgccaacactacgcccaga

SEQ ID NO: 388174 - DNA, 75 bp, synthetic construct
  source 1..75: mol_type = other DNA
ggcctggtgatattgatgccggaaacattgacggcagcatccatcgctgggcaaaaaatgaagttatcgacaaag

SEQ ID NO: 388175 - DNA, 75 bp, synthetic construct
  source 1..75: mol_type = other DNA
agttcaggaagatgatccggaggaaatggaaggcgctgaacatccacacaaggagaacactggcggcaatcagca

SEQ ID NO: 388176 - DNA, 75 bp, synthetic construct
  source 1..75: mol_type = other DNA
aacaagaagaacactggcggcaatcagcatcacaatagcgataatgaaactggcgagacggcagatcactcaatt

SEQ ID NO: 388177 - DNA, 75 bp, synthetic construct
  source 1..75: mol_type = other DNA
tgaagttcgtagagcatacaacaggtcaacctacttgagtcaacggagagagttgatgagttggtgggcggaaat

SEQ ID NO: 388178 - DNA, 75 bp, synthetic construct
  source 1..75: mol_type = other DNA
agaattacctaagctgatgcgttctttggtcatgtcaaacctatccgttccgactcgttgccttattgaatggca

SEQ ID NO: 388179 - DNA, 75 bp, synthetic construct
  source 1..75: mol_type = other DNA
actcctgacccttgttcgcccctcagaagcttctggcactcgatgggcagaggtagatctcgatgcaaagttatg

SEQ ID NO: 388180 - DNA, 75 bp, synthetic construct
  source 1..75: mol_type = other DNA
ggataggtgctttccccgctctttcacttgctgatgctcgacggttaagagcggattaccttgctctgttggcta

SEQ ID NO: 388181 - DNA, 75 bp, synthetic construct
  source 1..75: mol_type = other DNA
tgtcacctcaagcacttgaggtacttgaagtaatgaaacctatcagtgcccatcgtgtacacgtattccctagta

SEQ ID NO: 388182 - DNA, 75 bp, synthetic construct
  source 1..75: mol_type = other DNA
aaaatatgccgacgcttcggccagaagaattaccaaagctgatgcgttctctagtaatgtcaaatctatctgtta

SEQ ID NO: 388183 - DNA, 75 bp, synthetic construct
  source 1..75: mol_type = other DNA
gcaaacaaactttctggtctggataaggcgctggctgccggggctactgaaatcacaaaagaagaatattttgcc

SEQ ID NO: 388184 - DNA, 75 bp, synthetic construct
  source 1..75: mol_type = other DNA
atgagtaaaatctttatttgcgctgccattcctgatgaacaggccataaaagacgagggtgctgttgctgtggcc

SEQ ID NO: 388185 - DNA, 75 bp, synthetic construct
  source 1..75: mol_type = other DNA
gcgctgaacaaatacatcactgaatacctgactacaaagggcctatttgaacatgaagaaacagaccagagccct

SEQ ID NO: 388186 - DNA, 75 bp, synthetic construct
  source 1..75: mol_type = other DNA
acggatggattcctatgtcgatcaactgcaatcccacggcggaagcatgatcatgctagcgaaaggcaaccgcag

SEQ ID NO: 388187 - DNA, 75 bp, synthetic construct
  source 1..75: mol_type = other DNA
ttctggtctggataaggcactggctgctggcgccactgaaatcacaaaagaagaatattttgcccgaaaaaatgg

SEQ ID NO: 388188 - DNA, 75 bp, synthetic construct
  source 1..75: mol_type = other DNA
gcgatcaacatgccaatggcaataatgaaacaggcgagacagcaaatcccttaattaaggtgaacggtcatcacg

SEQ ID NO: 388189 - DNA, 75 bp, synthetic construct
  source 1..75: mol_type = other DNA
cctcacaatgcactcgatgatgcacgtcaccaggcaaaacaagtttcagctatctggcaaaaactgatcccgagt

SEQ ID NO: 388190 - DNA, 75 bp, synthetic construct
  source 1..75: mol_type = other DNA
caaacaggattttcgcctgcttgggcaaaccagcgtggaccgcttgctgcaactctctcagggccaggcggtgaa

SEQ ID NO: 388191 - DNA, 75 bp, synthetic construct
  source 1..75: mol_type = other DNA
cagatggcgctgggcgcaatgcgcgccattaccgagtccgggctgcgcgttggtgcggatatctcggtagtggga

SEQ ID NO: 388192 - DNA, 75 bp, synthetic construct
  source 1..75: mol_type = other DNA
aaccagagccgataaaagttaccgctgacgaagtaaacaaaattatgcaggcagccaatatcagccagcctgacg

SEQ ID NO: 388193 - DNA, 75 bp, synthetic construct
  source 1..75: mol_type = other DNA
cgtcagccgcgctgcccctgctgttccgtccccgcgagattcagggaacaatgtacggtgatggtgggatgggcg

SEQ ID NO: 388194 - DNA, 75 bp, synthetic construct
  source 1..75: mol_type = other DNA
tgatgacgcccgttaccaggcaaaatacgtttcagttatctggcaaaaactgatcccgaatcaggctgattttta

SEQ ID NO: 388195 - DNA, 75 bp, synthetic construct
  source 1..75: mol_type = other DNA
aaggtgagcgccataatgcacttgatgacgcccgttaccaggcaaaatacgtttcagttatctggcaaaaactga

SEQ ID NO: 388196 - DNA, 75 bp, synthetic construct
  source 1..75: mol_type = other DNA
agtaaaagtcaccgctgacgaagtaaacaaaattatgcaggcagccaatatcaaccagcctgacgccgataagtt

SEQ ID NO: 388197 - DNA, 75 bp, synthetic construct
  source 1..75: mol_type = other DNA
gcagagcgcaaagagactggaaaatacacgtctgttgttgatctcgccagcgccagagtcaatcaacagcacact

SEQ ID NO: 388198 - DNA, 75 bp, synthetic construct
  source 1..75: mol_type = other DNA
gcactgaccaggtcagaggcggtattacagaaaagccaggagataacggaagaggcagattcggcactgagaaac

SEQ ID NO: 388199 - DNA, 75 bp, synthetic construct
  source 1..75: mol_type = other DNA
tctcttatcagaccgtttcccgcgtggtgaaccaggccagccacgtttctgcgaaaacgcgggaaaaagtggaag

SEQ ID NO: 388200 - DNA, 75 bp, synthetic construct
  source 1..75: mol_type = other DNA
gggcgacgcaacataccaggaaacattcgatgaagagtatcaggttgaagttcaggaagatgatccggaggaaat

SEQ ID NO: 388201 - DNA, 75 bp, synthetic construct
  source 1..75: mol_type = other DNA
gcgccataatgcacttgatgacgcccgttatcaggcaaaatacgtttcagctatctggcaaaaactgatcccgag

SEQ ID NO: 388202 - DNA, 75 bp, synthetic construct
  source 1..75: mol_type = other DNA
cggcatacgccggaaaaagatatcctggaaaaaattaaccgcgaggtggttactgagcgtgaaacagaagaagaa

SEQ ID NO: 388203 - DNA, 75 bp, synthetic construct
  source 1..75: mol_type = other DNA
gtgacccggaggccagcgaaaaatgataaatatgtggcgctgcaattcctgcgtaactccgacatcgcggcgaaa

SEQ ID NO: 388204 - DNA, 75 bp, synthetic construct
  source 1..75: mol_type = other DNA
tacctctaacccattctcacgcacgctgccgaacttcccgattgaagggcgcgatcttaacccgctgttacagga

SEQ ID NO: 388205 - DNA, 75 bp, synthetic construct
  source 1..75: mol_type = other DNA
tctgccattatgaccgatgaaatcccgttagatgatgcactgttacaattgcgggaatttatcgacgaaaactcc

SEQ ID NO: 388206 - DNA, 75 bp, synthetic construct
  source 1..75: mol_type = other DNA
cataatgcacttgatgacgcccgttaccaggcaaaatacgtttcagctatctggcaaaaactgatcccgagtcag

SEQ ID NO: 388207 - DNA, 75 bp, synthetic construct
  source 1..75: mol_type = other DNA
gctgggatgaggactctgcttcctttgtcccggttgagactgaatcagatccgatgaacgtcacttttgacaagc

SEQ ID NO: 388208 - DNA, 75 bp, synthetic construct
  source 1..75: mol_type = other DNA
agcggcaatggcagcgctgaattacattcccaaccgcgtggcacagcaactggcaggcaaacagtcgttgctgat

SEQ ID NO: 388209 - DNA, 75 bp, synthetic construct
  source 1..75: mol_type = other DNA
gcttccggtgctaatgctggcggtgggaacaaaaccgatcgcaatccgaatttagtacacaccctcgacacactg

SEQ ID NO: 388210 - DNA, 75 bp, synthetic construct
  source 1..75: mol_type = other DNA
gaagcgttgatgaaaatgccagaagttaacgccatgtatccggagcttaagctgcatgccatcgggtgggttaag

SEQ ID NO: 388211 - DNA, 75 bp, synthetic construct
  source 1..75: mol_type = other DNA
caccgccggtaccgccagcgaagtcacccgtcactgcgtgctgaccaataccaaaaccaaagtgaagtttgtgat

SEQ ID NO: 388212 - DNA, 75 bp, synthetic construct
  source 1..75: mol_type = other DNA
gccgtaactacggtgtagcatacgacatcggtgcgtggactgacgtcctgccagaattcggtggtgacacttgga

SEQ ID NO: 388213 - DNA, 75 bp, synthetic construct
  source 1..75: mol_type = other DNA
gagcctggccgaagatcggttggaaaaaggatctgcaatatggcattgtaccggagaaagaacttttttggcgtt

SEQ ID NO: 388214 - DNA, 75 bp, synthetic construct
  source 1..75: mol_type = other DNA
ttccgataaagataaaacccgcctcgcatttgctggtctccactttggtgattatggttcgatcgactatggccg

SEQ ID NO: 388215 - DNA, 75 bp, synthetic construct
  source 1..75: mol_type = other DNA
caactatggtgtagcttatgatattggcgcttggactgacgtgctgcctgagtttggtggagatacctggactca

SEQ ID NO: 388216 - DNA, 75 bp, synthetic construct
  source 1..75: mol_type = other DNA
acgcaggcgcagcgggcggaagccttccgtaaacagcgcgcctcttccttatcttccccggccagtccccgttct

SEQ ID NO: 388217 - DNA, 75 bp, synthetic construct
  source 1..75: mol_type = other DNA
gcacaatatcagttcgatttcggtctgcgtccgtccgttgcttacctgcaatctaaaggtaaggatcttggagta

SEQ ID NO: 388218 - DNA, 75 bp, synthetic construct
  source 1..75: mol_type = other DNA
gtcggagctaaaagatgagaagcaacgcctactagaagagagccaaaaaccgaaagcggcagtgctgacagttga

SEQ ID NO: 388219 - DNA, 75 bp, synthetic construct
  source 1..75: mol_type = other DNA
ccgatggaagaatcattcctggggcacgtaaaaagaaaggtcaggcagaaacgaggcgtactttggaaactgatg

SEQ ID NO: 388220 - DNA, 75 bp, synthetic construct
  source 1..75: mol_type = other DNA
atgaagtggctgaggctattctgggccatactaaaggtgggattgaagggatctataacctttatcaatatgacg

SEQ ID NO: 388221 - DNA, 75 bp, synthetic construct
  source 1..75: mol_type = other DNA
catcttgatgactttgaaatacaggaagcctttgtcaccaaagaattaccgctaaagctcgcacagttgcgtgaa

SEQ ID NO: 388222 - DNA, 75 bp, synthetic construct
  source 1..75: mol_type = other DNA
ccggcgatccgaccggttacggggcggcgacctcgcgggttttcgctatttatgaaaattttccgggaaccatgt

SEQ ID NO: 388223 - DNA, 75 bp, synthetic construct
  source 1..75: mol_type = other DNA
acattagcgaacgcggcatagcgatatgccgccccgttgtttcatatcttgatgttgaaagagatgaatccgggg

SEQ ID NO: 388224 - DNA, 75 bp, synthetic construct
  source 1..75: mol_type = other DNA
taactgaagctaatggtgatggtttcggtttctccactacttatgagtatgaaggattcggtgtaggtgcaacct

SEQ ID NO: 388225 - DNA, 75 bp, synthetic construct
  source 1..75: mol_type = other DNA
cacttcatcgaggatcatcagtgcgccgaactcatcgcacagcttacgcacggcggtgagatatcccggcggcgg

SEQ ID NO: 388226 - DNA, 75 bp, synthetic construct
  source 1..75: mol_type = other DNA
tatgaggggatctctcagggcgtagcagcagcgattcgttatgcccgtgcgctgggtaataaaaaaattaactgt

SEQ ID NO: 388227 - DNA, 75 bp, synthetic construct
  source 1..75: mol_type = other DNA
ctgcgttatgccgcgaatatgctgatgaaagaagatattttattactgattgaacctatcaaccattttgatatt

SEQ ID NO: 388228 - DNA, 75 bp, synthetic construct
  source 1..75: mol_type = other DNA
gatcacatcgttcggaatgagtgacggcgtgccgtgtaccattaacagcctgattcgcggcgattatgagcggca

SEQ ID NO: 388229 - DNA, 75 bp, synthetic construct
  source 1..75: mol_type = other DNA
acttgcgtgcactttcggaatccgcagagctagagttcaagctagctcaagggaaagacggacaaggtaaattac

SEQ ID NO: 388230 - DNA, 75 bp, synthetic construct
  source 1..75: mol_type = other DNA
tggatctgtacggaaaagttaatgctaagcactacttctcttctaacgatgcagatgatggcgacacaacttatg

SEQ ID NO: 388231 - DNA, 75 bp, synthetic construct
  source 1..75: mol_type = other DNA
aagacctgaagcaggtgcgcaaaatcagcaaaaacccggcagactgggacgaaccgctgattgcccgcagtactg

SEQ ID NO: 388232 - DNA, 75 bp, synthetic construct
  source 1..75: mol_type = other DNA
gcggcaatgaccgggctggtgccggaagacctggctgaaatggatctggctgattatcaggcactgcagaaacga

SEQ ID NO: 388233 - DNA, 75 bp, synthetic construct
  source 1..75: mol_type = other DNA
aatatcagttcgatttcggtctgcgcccgtccgttgcttacctgcaatctaaaggtaaggatcttggagtatggg

SEQ ID NO: 388234 - DNA, 75 bp, synthetic construct
  source 1..75: mol_type = other DNA
cagtgtggttttcgcggcgttgaatttatgtttccttatgactacgacattgaagaattaaaacaggtgctggcg

SEQ ID NO: 388235 - DNA, 75 bp, synthetic construct
  source 1..75: mol_type = other DNA
cggggatgggtgagagcgacaaaggcgctgacgcaggcgcaggggctgctggcgagatggttccggtttcagccg

SEQ ID NO: 388236 - DNA, 75 bp, synthetic construct
  source 1..75: mol_type = other DNA
gtatcctcccggaagacctcgataacatggatcttgccgactatatggagctgcagaaacgatttcagaaaatca

SEQ ID NO: 388237 - DNA, 75 bp, synthetic construct
  source 1..75: mol_type = other DNA
gacggaaaataaagaagcaaaacagaagcggttggaagagagccaaaagcagcaagtccaggattttacagtggc

SEQ ID NO: 388238 - DNA, 75 bp, synthetic construct
  source 1..75: mol_type = other DNA
tccgctgggtagagaaagacacccctgatgcggttaaaaaaattcaggcgttgttaccagctatcgaaaaagcaa

SEQ ID NO: 388239 - DNA, 75 bp, synthetic construct
  source 1..75: mol_type = other DNA
ctgtctcgtaatacccagaaaattttccgctgggtagaaaaaaacacccctgatgcggttaaaaaaattcaggcg

SEQ ID NO: 388240 - DNA, 75 bp, synthetic construct
  source 1..75: mol_type = other DNA
gcgcagccacagttcaacttattttcgggagctggtggagacgcgggagcgactggtgagagacgctgatgattt

SEQ ID NO: 388241 - DNA, 75 bp, synthetic construct
  source 1..75: mol_type = other DNA
tgatgcggttaaaaaaattcaggcgttgttaccagcgatcgaaaaggcaatgccacctctgctggtggcccgaat

SEQ ID NO: 388242 - DNA, 75 bp, synthetic construct
  source 1..75: mol_type = other DNA
cgcagccacagttctgaatattaccgtgagatcgtcgaacggagggatcggctggtgaaggatgtcgatgatttt

SEQ ID NO: 388243 - DNA, 75 bp, synthetic construct
  source 1..75: mol_type = other DNA
cgggaactagtggagacgcgggaacgactggtgagagacgctgatgattttgtcgcagtggcgatcgctggtttc

SEQ ID NO: 388244 - DNA, 75 bp, synthetic construct
  source 1..75: mol_type = other DNA
atgaaaatcaagcatgaacacatccgcatggcgatgaatgcctgggcgtatccggacggtgagaaagtacctgca

SEQ ID NO: 388245 - DNA, 75 bp, synthetic construct
  source 1..75: mol_type = other DNA
acggtgattgctgaccagggcggcagggatgctgctcctttttttgagggtatcaaccggcaggcaccggcttct

SEQ ID NO: 388246 - DNA, 75 bp, synthetic construct
  source 1..75: mol_type = other DNA
gactggtgagagacgctgatgattttgtcgcagtggcaatcgccggtttcaatcagatgaaccgtggtggtccgg

SEQ ID NO: 388247 - DNA, 75 bp, synthetic construct
  source 1..75: mol_type = other DNA
gcatggcgatgaatgcctgggcacatccggacggcgagaaagtaccggctgcagagattaccaaagcgtatttcg

SEQ ID NO: 388248 - DNA, 75 bp, synthetic construct
  source 1..75: mol_type = other DNA
tgttgcgtcagcggtcgttttgtatgaccagatgaatcgcggcggcccggcaggtaatgccgtggtggtgcacta

SEQ ID NO: 388249 - DNA, 75 bp, synthetic construct
  source 1..75: mol_type = other DNA
gaaaagctgatcggtcatcagttcctctccagcgatatctattttattgatttcctgccatcggaattgcactgg

SEQ ID NO: 388250 - DNA, 75 bp, synthetic construct
  source 1..75: mol_type = other DNA
ggatgttgctctttatggtgatgcgaagtttgccagtgacagtgatttaaaaaaatcaaaactgcttaagtggga

SEQ ID NO: 388251 - DNA, 75 bp, synthetic construct
  source 1..75: mol_type = other DNA
atttctttataaacttcgccccggaatggattgaagagctaagagtaaaacccgtcttttctattggtacagttg

SEQ ID NO: 388252 - DNA, 75 bp, synthetic construct
  source 1..75: mol_type = other DNA
gagctttggaaaatcactagcaaggtcagagaacaaatactaggtaacaaagtttatcttcttgacccgttcaac

SEQ ID NO: 388253 - DNA, 75 bp, synthetic construct
  source 1..75: mol_type = other DNA
gatgtttcttgatgagttcccttcgattggttatatgccaattattaaaaagggatcagggtatattgcaggttt

SEQ ID NO: 388254 - DNA, 75 bp, synthetic construct
  source 1..75: mol_type = other DNA
cgtattttatggacaggctgatgatggtaagccccaaacttaccgagttaaccgcctctctgaataagactaaaa

SEQ ID NO: 388255 - DNA, 75 bp, synthetic construct
  source 1..75: mol_type = other DNA
acgttacgagaaaaccctgactttgacccgacactgaaacatgactgtctgatgttcctggatgagtttccgtct

SEQ ID NO: 388256 - DNA, 75 bp, synthetic construct
  source 1..75: mol_type = other DNA
aagtaaaggcggtataattattggtagttataaaggtaagttattacgttacacacagcctgattttatctctat

SEQ ID NO: 388257 - DNA, 75 bp, synthetic construct
  source 1..75: mol_type = other DNA
ttcttgattatgaaggttctatgatggtgctcgatcctaaacaggagtgttatacgataacaagtaaatacaggc

SEQ ID NO: 388258 - DNA, 75 bp, synthetic construct
  source 1..75: mol_type = other DNA
tctgcacaattaggttatacaactattaagactaaggggaaaagcaggaacacaagtaaaggtggtacatcgagg

SEQ ID NO: 388259 - DNA, 75 bp, synthetic construct
  source 1..75: mol_type = other DNA
attatctatgctgtcagcgaagaggacgatgccgctaagatatcagaaaaacttgggtatattactacgacctca

SEQ ID NO: 388260 - DNA, 75 bp, synthetic construct
  source 1..75: mol_type = other DNA
gaaatgattttgaccttcgccagttgcgccgggaagatatcactgtttatgttggcgttaatgctgaagatatgt

SEQ ID NO: 388261 - DNA, 75 bp, synthetic construct
  source 1..75: mol_type = other DNA
tggcgaataataactgagagcaatatacggacggatatcaggttaaccgctatcccctctcttttatcaggtatg

SEQ ID NO: 388262 - DNA, 75 bp, synthetic construct
  source 1..75: mol_type = other DNA
gcaaaccgggatacacgttgcccagtcgataattgattacttcgcaggaagggagataaaaaacggttgtgagtt

SEQ ID NO: 388263 - DNA, 75 bp, synthetic construct
  source 1..75: mol_type = other DNA
aacattcgatgaagagaatcaggttgaagttcagaaagatgatccggaggaaatggaaggcgctgaacatccaca

SEQ ID NO: 388264 - DNA, 75 bp, synthetic construct
  source 1..75: mol_type = other DNA
agaaaaacaggatgatgaaaaaaaaccgcaaccatcttgcgcaatggcagatgaacaggcaacggctgaaacagt

SEQ ID NO: 388265 - DNA, 75 bp, synthetic construct
  source 1..75: mol_type = other DNA
acagctattgaagctggcgacgaacgccgtgctcgagcaaaatttcactggcaattcctggaacattatccggct

SEQ ID NO: 388266 - DNA, 75 bp, synthetic construct
  source 1..75: mol_type = other DNA
acatgccctgactgtggctcagtaatgggtgacgcaacttaccatgagacattctgcgaggaacattcagatgaa

SEQ ID NO: 388267 - DNA, 75 bp, synthetic construct
  source 1..75: mol_type = other DNA
ctaccactacgacagccagcaccgtctggtgttctacacgcggatacagcacggtgagccaccggtagagagccg

SEQ ID NO: 388268 - DNA, 75 bp, synthetic construct
  source 1..75: mol_type = other DNA
ctaccactacgacagccagcaccgtctggtgttctacacgcggatacagcacggtgagccgccggtggagagccg

SEQ ID NO: 388269 - DNA, 75 bp, synthetic construct
  source 1..75: mol_type = other DNA
ctaccactacgacagccagcaccgtctggtgttctacacgcggatacagcacggtgagccgcgggtcgagagccg

SEQ ID NO: 388270 - DNA, 75 bp, synthetic construct
  source 1..75: mol_type = other DNA
attacaaaatcaatctgctcgatgaaaacaacttcactaaagcactcggtgtaagcactgacgacatcgtagctg

SEQ ID NO: 388271 - DNA, 75 bp, synthetic construct
  source 1..75: mol_type = other DNA
aattgttccaggcaatgaacctctgccagatccccggacgtgcaggagcactgcttacgacgcttcttcgccata

SEQ ID NO: 388272 - DNA, 75 bp, synthetic construct
  source 1..75: mol_type = other DNA
gcggtctgctcagttttacatcggcacataccgacgcctggcgtcagcagggctatgaagacacgatgctggcga

SEQ ID NO: 388273 - DNA, 75 bp, synthetic construct
  source 1..75: mol_type = other DNA
ctaccactacgacagccagcaccgtctggtgttctacacgcggatacagcacggtgagcccccggtcgagagccg

SEQ ID NO: 388274 - DNA, 75 bp, synthetic construct
  source 1..75: mol_type = other DNA
gcacagataaatccggttaatcaggtaaaagttaccgctgacgaagtaaacaaaattatgcaggcagccaatatc

SEQ ID NO: 388275 - DNA, 75 bp, synthetic construct
  source 1..75: mol_type = other DNA
gcacaatccgctatttttaccgatgaaatctcgttagatgttgctctccggctattcatagaatttatcgaaaaa

SEQ ID NO: 388276 - DNA, 75 bp, synthetic construct
  source 1..75: mol_type = other DNA
agatcccttaattgcggtgaacggtcatcacgttatcacatccaccagcagagtgtggattcacctgtcggtcga

SEQ ID NO: 388277 - DNA, 75 bp, synthetic construct
  source 1..75: mol_type = other DNA
agcctgaaccagaagagcaacaagaaccggaaaaagtctgcaccgcctgcggtcagaccggcagcggcaactgtc

SEQ ID NO: 388278 - DNA, 75 bp, synthetic construct
  source 1..75: mol_type = other DNA
tggcgaggcgtcagatcccttaattaaggcgaacggtcatcataatctcacatccaccagcagagcggggattca

SEQ ID NO: 388279 - DNA, 75 bp, synthetic construct
  source 1..75: mol_type = other DNA
ctattccattcgaaggcgtaccccacaatgcgctggacgatgcccgtcaccaggcaaaacaagtttcagcaatct

SEQ ID NO: 388280 - DNA, 75 bp, synthetic construct
  source 1..75: mol_type = other DNA
caacgtaattttacgccgttcatatgaacggcaggggatcccctgcccatggctttactacaacgatcgcgatgt

SEQ ID NO: 388281 - DNA, 75 bp, synthetic construct
  source 1..75: mol_type = other DNA
tcattaaatggtggctaaagcaatcacgtgaagcgcagtctgccattatgaccgatgaaatcccgttagatgatg

SEQ ID NO: 388282 - DNA, 75 bp, synthetic construct
  source 1..75: mol_type = other DNA
gccataatgccctgcacgatgcgcgttaccaggcaaaatacgtttcagctatctggcaaaaactattcccgaatc

SEQ ID NO: 388283 - DNA, 75 bp, synthetic construct
  source 1..75: mol_type = other DNA
ctaccactacgacagccagcaccgtctggtgttctacacgcggatacagcacggtgagccacaggtcgagagccg

SEQ ID NO: 388284 - DNA, 75 bp, synthetic construct
  source 1..75: mol_type = other DNA
tgacggcggaacagatggccgcgcagatggaggcggaatacatcccggagaggaaacttcatctttaccactgtg

SEQ ID NO: 388285 - DNA, 75 bp, synthetic construct
  source 1..75: mol_type = other DNA
gcagaatccgatactcaaaaaaatgaaatcctggtggaagctgaaccatctgtagagcgtgaaggaccattttat

SEQ ID NO: 388286 - DNA, 75 bp, synthetic construct
  source 1..75: mol_type = other DNA
gcttgccgcttctcgaggtgagtttgttgaagggattagcgacccgaatgattcgaaatgggttaaggggattga

SEQ ID NO: 388287 - DNA, 75 bp, synthetic construct
  source 1..75: mol_type = other DNA
tactgacacgcaagtcaacgcaggaaaacttctccctgaagtatttgcttccggcaaaaatgcagaagtttgggc

SEQ ID NO: 388288 - DNA, 75 bp, synthetic construct
  source 1..75: mol_type = other DNA
ctgcaatcccacggcggcagcatgatcatgctggcgaaaggtaaccgcagtcagcaggttaccgacgcgtgtcat

SEQ ID NO: 388289 - DNA, 75 bp, synthetic construct
  source 1..75: mol_type = other DNA
cctgtccggttggtatgggcgtctcctgctccgcagaccgtaacatcaaagcgaaaattaaccgtgaagggatct

SEQ ID NO: 388290 - DNA, 75 bp, synthetic construct
  source 1..75: mol_type = other DNA
ccgcgatgtgcaactggaacaggaactgctgaaagaggctcagaaactcggcctcggcgcgcagtttggtggtaa

SEQ ID NO: 388291 - DNA, 75 bp, synthetic construct
  source 1..75: mol_type = other DNA
gtgtcgcatctgagtgacggttctttatgggatcgtcgggtttttccggacacaacgatccttgagatccgtccc

SEQ ID NO: 388292 - DNA, 75 bp, synthetic construct
  source 1..75: mol_type = other DNA
cagtatccggtttccacccgtttgtcgctcaccggcacgattatcgttggtcgcgatattgcgcacgctaagctg

SEQ ID NO: 388293 - DNA, 75 bp, synthetic construct
  source 1..75: mol_type = other DNA
aatcgacctgtacgcggtagatggcgacgagtacaaattcctctgcgttgccaaaggtggcggctctgccaacaa

SEQ ID NO: 388294 - DNA, 75 bp, synthetic construct
  source 1..75: mol_type = other DNA
gtgctgtcggtaaaccgataggtttacttttcattgctgaaaaaattgttccaggcaatgaacctctgccagatc

SEQ ID NO: 388295 - DNA, 75 bp, synthetic construct
  source 1..75: mol_type = other DNA
tcaggcactgacccggtcagaggcggtattgcagaaaagcctggatataacggaagaggcagatttggcactgag

SEQ ID NO: 388296 - DNA, 75 bp, synthetic construct
  source 1..75: mol_type = other DNA
ctgacggcggaacagatggccgcgcagatggaggatgcatacatcccggagcggaggctgcatctttaccactgt

SEQ ID NO: 388297 - DNA, 75 bp, synthetic construct
  source 1..75: mol_type = other DNA
ggatagaaaaactggaacacaacccaggtcagtatattcctgaagagctgcgtcaggcgggtgaaggcgacgcgg

SEQ ID NO: 388298 - DNA, 75 bp, synthetic construct
  source 1..75: mol_type = other DNA
aggccagcgcgtgtggaccggtggcggtgatgaagaagcgctgtcgaaaggcgtctataacacctatatcgaaga

SEQ ID NO: 388299 - DNA, 75 bp, synthetic construct
  source 1..75: mol_type = other DNA
atgggaggatggcgaaatatgcagggaaatacccctgtaacacctctggtcgatgccggatgcaatatggtgatt

SEQ ID NO: 388300 - DNA, 75 bp, synthetic construct
  source 1..75: mol_type = other DNA
caacccgatttccaggccgcaggcaaagatggagttcagttcgtatcaattgaagatatctttatgcagtctcat

SEQ ID NO: 388301 - DNA, 75 bp, synthetic construct
  source 1..75: mol_type = other DNA
ggaacggaactaccaaaaagcggaacaaaacagcccaaatgcgttacaaaacgagccagaaacgaaacaacctga

SEQ ID NO: 388302 - DNA, 75 bp, synthetic construct
  source 1..75: mol_type = other DNA
gtttgagaatgaagaaacagacctgggcactgttgatgttctccagtcatcagaaacacaaactgatgcagtgga

SEQ ID NO: 388303 - DNA, 75 bp, synthetic construct
  source 1..75: mol_type = other DNA
gaaacattcgatgacgagaatcaggttgaagttcaggaagacgattcggagaaaatggaaggcgctgaacatcca

SEQ ID NO: 388304 - DNA, 75 bp, synthetic construct
  source 1..75: mol_type = other DNA
accactggtgttgcaacctatcgtaacaacgacttctttggtctggttgatggtctgaactttgctgctcagtac

SEQ ID NO: 388305 - DNA, 75 bp, synthetic construct
  source 1..75: mol_type = other DNA
tttttggtgaccaggatttagtcaaatatgttgatgttggcgcaacttattatttcaacaaaaatatgtctacct

SEQ ID NO: 388306 - DNA, 75 bp, synthetic construct
  source 1..75: mol_type = other DNA
ttgggtaaacttctcccaggagtatttgcttccggcgaaaatgcagaagtctgggctgcaggtctgaaatacgac

SEQ ID NO: 388307 - DNA, 75 bp, synthetic construct
  source 1..75: mol_type = other DNA
cggccgccaccgttgagtcataccagcaaaccggtacacacgttgcccagtcgataattgattacttcgcaggaa

SEQ ID NO: 388308 - DNA, 75 bp, synthetic construct
  source 1..75: mol_type = other DNA
cggccgccaccgttgagtcataccagcaaaccgggatatacgttgccaggtcgataatagatttctttgcaggaa

SEQ ID NO: 388309 - DNA, 75 bp, synthetic construct
  source 1..75: mol_type = other DNA
ggctacggtaatataggtaaaaccctggcgaaaaggttgtctggttttgatgttgagcttttagcttttgacaaa

SEQ ID NO: 388310 - DNA, 75 bp, synthetic construct
  source 1..75: mol_type = other DNA
gcgctggatgacgcccgtcaccaggcaaaatacgttacagctacgatacaaaaactgatcccgagtcaggctgat

SEQ ID NO: 388311 - DNA, 75 bp, synthetic construct
  source 1..75: mol_type = other DNA
gaacgaccagaaagcggaacaaaacagcccaaatgcgttacaaaacgagccagaaacgaaacaacctgagccagt

SEQ ID NO: 388312 - DNA, 75 bp, synthetic construct
  source 1..75: mol_type = other DNA
tgtgcggccattgccggaaaagattgttatcaggcggacacgctatcactactgcctggtgtgaaaataatatcg

SEQ ID NO: 388313 - DNA, 75 bp, synthetic construct
  source 1..75: mol_type = other DNA
ccgctgacgtgggcttcccatgcattattcgtccatcctttaccatgggcggtagcggcggcggtatcgcttata

SEQ ID NO: 388314 - DNA, 75 bp, synthetic construct
  source 1..75: mol_type = other DNA
gttacccgctggtggtgcgcccgtcttacgttctcggcggtcgcgcgatggaaatcgtttacgacgaagccgacc

SEQ ID NO: 388315 - DNA, 75 bp, synthetic construct
  source 1..75: mol_type = other DNA
tgcccgcggtctggatctctccccgaccaaagagctgctgattgatgagtcgttgataggctggaaagagtacga

SEQ ID NO: 388316 - DNA, 75 bp, synthetic construct
  source 1..75: mol_type = other DNA
cgcgaatggacgcacttcaccagcatgacttacattgatgagttttcagaactgcatggcaaagatgttccggtg

SEQ ID NO: 388317 - DNA, 75 bp, synthetic construct
  source 1..75: mol_type = other DNA
tgatctgcgtgcgcgaatatttccccgataccttttcaacggcggttcggcaaaagtctcgctggattatcggca

SEQ ID NO: 388318 - DNA, 75 bp, synthetic construct
  source 1..75: mol_type = other DNA
gacaactgcatcatcgtttgctctatcgaaaacttcgacgcgatgggtatccacaccggtgactctattactgta

SEQ ID NO: 388319 - DNA, 75 bp, synthetic construct
  source 1..75: mol_type = other DNA
aaagccaccggcgtaccgctggcaaaagtggcggcgcgtgtgatggctggcaaatcgctggctgagcagggcgta

SEQ ID NO: 388320 - DNA, 75 bp, synthetic construct
  source 1..75: mol_type = other DNA
ggcctggaagtgggcgcgaccggtttcgatccgaaagtgagcctcgatgatccggaagccctgactaaaatccgc

SEQ ID NO: 388321 - DNA, 75 bp, synthetic construct
  source 1..75: mol_type = other DNA
gctgacactgtggccggatattgagctgatcagtgggcaacgtctgttgcaactgctgaatggcaccttactgag

SEQ ID NO: 388322 - DNA, 75 bp, synthetic construct
  source 1..75: mol_type = other DNA
gatggctggcaaatcgctggctgagcagggcgtaaccaaagaagttatcccgccgtattactcggtgaaagaagt

SEQ ID NO: 388323 - DNA, 75 bp, synthetic construct
  source 1..75: mol_type = other DNA
tgccatcgaccgtgcagaagaccgtgaacgcttccagcatgcggttgaccgtctgaaattgaaacaaccggcgaa

SEQ ID NO: 388324 - DNA, 75 bp, synthetic construct
  source 1..75: mol_type = other DNA
cccgattgccaaagtggcggcgaaactggcggtgggttacaccctcgacgagctgatgaacgacatcaccggcgg

SEQ ID NO: 388325 - DNA, 75 bp, synthetic construct
  source 1..75: mol_type = other DNA
ttgttctgcggggacaaattgtcacggggttacgccactggtatgcgcgccgacgcggtcacgatccgcgggcaa

SEQ ID NO: 388326 - DNA, 75 bp, synthetic construct
  source 1..75: mol_type = other DNA
agcgtaatgtcttctcaggcatccgttctgcttatccagacccacaggcactgattggtcgtcacaccattatgg

SEQ ID NO: 388327 - DNA, 75 bp, synthetic construct
  source 1..75: mol_type = other DNA
gccgacgatgcccacggtacgccgatcatgctgaaagcccagcagcttggtattaccccggagcagatgattggc

SEQ ID NO: 388328 - DNA, 75 bp, synthetic construct
  source 1..75: mol_type = other DNA
tggcaagcgaactggctgacccgcagttgtacaaaaccttcacggatgccgctgaagtgattggtgaagcgtggg

SEQ ID NO: 388329 - DNA, 75 bp, synthetic construct
  source 1..75: mol_type = other DNA
gtgatggctgccggtcctggcgggaaagatatcttcctgctaagcccggatgctggtgctaaaccgggtcatcag

SEQ ID NO: 388330 - DNA, 75 bp, synthetic construct
  source 1..75: mol_type = other DNA
tcaggaaaccatcacctttgacgacttcgccaaagttgacctgcgcgtggcgctgatcgaaaacgcagagtttgt

SEQ ID NO: 388331 - DNA, 75 bp, synthetic construct
  source 1..75: mol_type = other DNA
gcgcgttgcaggagcaggtggcaaacaaaatgcaggagtggtttgaatctggcctgcaacagtgggatatctccc

SEQ ID NO: 388332 - DNA, 75 bp, synthetic construct
  source 1..75: mol_type = other DNA
tgatgagttttcagagctgcatggcaaagatgttccggtgcgtgaagccctcgccggacaagtgcccagcgcagg

SEQ ID NO: 388333 - DNA, 75 bp, synthetic construct
  source 1..75: mol_type = other DNA
aggactttgaccggcttctcctgcagaccggccgccgcggtctgtttgtccacacgggccgtaccgggaagatga

SEQ ID NO: 388334 - DNA, 75 bp, synthetic construct
  source 1..75: mol_type = other DNA
tggacggacaggtgctgattgacggcgagcggtggctgattcaggccaaacgctatggccgcaccatccgaccgt

SEQ ID NO: 388335 - DNA, 75 bp, synthetic construct
  source 1..75: mol_type = other DNA
cagtgggatatctcccgcgacgcaccttacttcggttttgaaattccgaacgcgccgggtaaatatttctacgtc

SEQ ID NO: 388336 - DNA, 75 bp, synthetic construct
  source 1..75: mol_type = other DNA
gaagattttgttcagcgcgtgaatgccgatatcgttaacaaagtggtgaacctggcgtcacgctgtgctggtttt

SEQ ID NO: 388337 - DNA, 75 bp, synthetic construct
  source 1..75: mol_type = other DNA
tggctcacgcgttccatgccttcaggcaacaatgcatggactgccagttgcgacacgaccgaagatcaaaatggt

SEQ ID NO: 388338 - DNA, 75 bp, synthetic construct
  source 1..75: mol_type = other DNA
cgtaacccctcatacagcggcgatggtggtcttgatggtcaggtggtgattggcggtgagtgctggctgatacag

SEQ ID NO: 388339 - DNA, 75 bp, synthetic construct
  source 1..75: mol_type = other DNA
gggccgtgattaccgtgtgaccttcgttgacccgtatacagcttatggtgtcggattcgttcaggcgcattgtga

SEQ ID NO: 388340 - DNA, 75 bp, synthetic construct
  source 1..75: mol_type = other DNA
tgcaattctgattgtgacgactgagcgactgacgcagggacagactggccgtgatgccgatatagtgacgtatca

SEQ ID NO: 388341 - DNA, 75 bp, synthetic construct
  source 1..75: mol_type = other DNA
gaccgttcactggaagcgaagcgtatggccgccggacagaacatcaacggggccattctcatcgtgacgcagttc

SEQ ID NO: 388342 - DNA, 75 bp, synthetic construct
  source 1..75: mol_type = other DNA
gcgtctgcaccagcgcgttcttcccgacaggaatattcaccggaatttgaacaggcctggcaggaatatccaaaa

SEQ ID NO: 388343 - DNA, 75 bp, synthetic construct
  source 1..75: mol_type = other DNA
agtggtcgtgtttccgcacgccttacggaactggaagaacgagtgtttgaactggagaagcgcattaatgcgcaa

SEQ ID NO: 388344 - DNA, 75 bp, synthetic construct
  source 1..75: mol_type = other DNA
gtatctgtagccggacgtgaggacccgtacttcaaagccagttacgacaacgtggactacagccagatcccggca

SEQ ID NO: 388345 - DNA, 75 bp, synthetic construct
  source 1..75: mol_type = other DNA
gaagactatcaatgataggcagattctggagagcaacgggcttgttctgcatccatgtttagacatgctgacaga

SEQ ID NO: 388346 - DNA, 75 bp, synthetic construct
  source 1..75: mol_type = other DNA
gtgatcgagaggtcacgccgtaacaggaaagggagaatttttgtagacgtgaagactatcaatgataggcagatt

SEQ ID NO: 388347 - DNA, 75 bp, synthetic construct
  source 1..75: mol_type = other DNA
tgattatctgaatgaaagaatcaccccgcctaattacacaacgaacaaagatacccctaagaaatgggcgcgttc

SEQ ID NO: 388348 - DNA, 75 bp, synthetic construct
  source 1..75: mol_type = other DNA
aatttgatttaaacttgcttgtcatttttgaatgcatatatcagcatcttagcattagcaaggccgcagaatcgt

SEQ ID NO: 388349 - DNA, 75 bp, synthetic construct
  source 1..75: mol_type = other DNA
cactgctgaagagcaccgtggctaatccgcgtgaaaccggccttgctgaatatgagcactacgaatggccgggag

SEQ ID NO: 388350 - DNA, 75 bp, synthetic construct
  source 1..75: mol_type = other DNA
ctcggaggatgaggggtatctggcgagctgggagtacgacgcggcgggcaacctgctggacaggcgcgcgggggg

SEQ ID NO: 388351 - DNA, 75 bp, synthetic construct
  source 1..75: mol_type = other DNA
aaccccgaaaccatgctggaaggtgtgaaacgctacgcgggctgggtatctgcgatgggcaatagcggcacacaa

SEQ ID NO: 388352 - DNA, 75 bp, synthetic construct
  source 1..75: mol_type = other DNA
aaactggaacaacctcttcctgcggttaaactttatatttcctataacaaggcttcgttgaacaaccttgtcttc

SEQ ID NO: 388353 - DNA, 75 bp, synthetic construct
  source 1..75: mol_type = other DNA
tatatataacgccctctgctgttagtcagtcgttacaacgtttacgtgcgcaatttaatgacccgttattcattc

SEQ ID NO: 388354 - DNA, 75 bp, synthetic construct
  source 1..75: mol_type = other DNA
gaatggtgaaagaggttctgaaagccgtcgccagaggggatggcaatgccgaagtcgttgtcacatatcaggggt

SEQ ID NO: 388355 - DNA, 75 bp, synthetic construct
  source 1..75: mol_type = other DNA
gccaactggcgcgcgctaaaacaggtacttcaacacggcgatccacgtcgcgtggcgtgggataaaacaacgcat

SEQ ID NO: 388356 - DNA, 75 bp, synthetic construct
  source 1..75: mol_type = other DNA
aaatctggagaagacacttgccgtgaatactggtgcgctgctgacaatgtcagtcagtgtcaacgggggaacgcc

SEQ ID NO: 388357 - DNA, 75 bp, synthetic construct
  source 1..75: mol_type = other DNA
tatatttcctataacaaatactcgttaaacaatctggtcttctcccgtttcatagaccgcttaaatgatagcttc

SEQ ID NO: 388358 - DNA, 75 bp, synthetic construct
  source 1..75: mol_type = other DNA
caaaccggaggtttagtcggtactcttgataaagcgcccatgattgacttcagcagtgtcaatgtgggctcaaac

SEQ ID NO: 388359 - DNA, 75 bp, synthetic construct
  source 1..75: mol_type = other DNA
ccacattcatgcacatcagctataacaacttcatcactgaagttaacaacctgaacaaacgcatgggcgatttga

SEQ ID NO: 388360 - DNA, 75 bp, synthetic construct
  source 1..75: mol_type = other DNA
gttctgccagacaggaatattcaccggaatttgagcaggcctggcaggaataccccaaacgtgctggtggtaatt

SEQ ID NO: 388361 - DNA, 75 bp, synthetic construct
  source 1..75: mol_type = other DNA
atggctggcatatcccaaacgtgctggtggcaattcaaaatctgcagccttcaaagcctggaaagcccgtttgaa

SEQ ID NO: 388362 - DNA, 75 bp, synthetic construct
  source 1..75: mol_type = other DNA
ctgggcgacaattccgttctgacacagcccacctcatttacacaggatgactgggagaacaggacgttcagcttt

SEQ ID NO: 388363 - DNA, 75 bp, synthetic construct
  source 1..75: mol_type = other DNA
tctccaggattcccggggcggttcagagggaccaatttgatatattctcttattcctcagagttttctctcacag

SEQ ID NO: 388364 - DNA, 75 bp, synthetic construct
  source 1..75: mol_type = other DNA
ccattacaaaaccggcgacttcctgatttatgaatcggtgtttgaaaagctctgttctgaaaagggacttaagac

SEQ ID NO: 388365 - DNA, 75 bp, synthetic construct
  source 1..75: mol_type = other DNA
tgccaaagcgtacaaggatgaaaggcttgttcggttggtggcggaagagccagatccggaaatgcgtaacatcct

SEQ ID NO: 388366 - DNA, 75 bp, synthetic construct
  source 1..75: mol_type = other DNA
cgcatttgacatgattcttgaatcgtcaaatgtgtcacatgaccagtctaaggaatggagtcgtgggattgctat

SEQ ID NO: 388367 - DNA, 75 bp, synthetic construct
  source 1..75: mol_type = other DNA
gactgggaaggtgatgcaattgaattactgaacgaactggccagagtcagggggatgcagtttaactacaatggt

SEQ ID NO: 388368 - DNA, 75 bp, synthetic construct
  source 1..75: mol_type = other DNA
tttcaacggggtctcatcttctgacagctaacagcgatcgcctttcctttgactgggaaggtgatgcaattgaat

SEQ ID NO: 388369 - DNA, 75 bp, synthetic construct
  source 1..75: mol_type = other DNA
ggtgtattttccggccaacttccggtttcaacggggtctcatcttctgacagctaacagcgatcgcctttccttt

SEQ ID NO: 388370 - DNA, 75 bp, synthetic construct
  source 1..75: mol_type = other DNA
aggtgtggggggttggtggacgaaccacaagtaagcttcatgcaatgggcataaccactgcgctggagctggctc

SEQ ID NO: 388371 - DNA, 75 bp, synthetic construct
  source 1..75: mol_type = other DNA
gtgagcagcgcttcccggagcccgtgattgccttctccagtaactacgagctgtatgccagcatgagcgccagag

SEQ ID NO: 388372 - DNA, 75 bp, synthetic construct
  source 1..75: mol_type = other DNA
atgtatgctctggcggatgtgaacagcttttattgcagtgttgagaaatgcttcagacccgatttacgcgataaa

SEQ ID NO: 388373 - DNA, 75 bp, synthetic construct
  source 1..75: mol_type = other DNA
ggcgagccgtactttaagcagaaagatatcttcagacaacgcggtgtagtgtgcttcagcagcaattatgaactt

SEQ ID NO: 388374 - DNA, 75 bp, synthetic construct
  source 1..75: mol_type = other DNA
gcgtcatgctgtctgacttttacgatcctggcatgtttcaactaggactattcgatgacgtatcgacccgctcca

SEQ ID NO: 388375 - DNA, 75 bp, synthetic construct
  source 1..75: mol_type = other DNA
gcgttctgcgcgtgtagaacgggggctcagcgagccgcatcatccctcgggggaattaaccgattttcgtatccg

SEQ ID NO: 388376 - DNA, 75 bp, synthetic construct
  source 1..75: mol_type = other DNA
ttatcgccatatatgggccgttggtgatattcatggcgattatcaattattacaatcccgcttacaccaactctc

SEQ ID NO: 388377 - DNA, 75 bp, synthetic construct
  source 1..75: mol_type = other DNA
taaaaaatgatacggcaagagatgaggcacttcaggctctggcaaaaaactttggtctgggcgatatgttcgcgg

SEQ ID NO: 388378 - DNA, 75 bp, synthetic construct
  source 1..75: mol_type = other DNA
tggagtgtgcgggggatttctacgccagcggaagataaagtcacggtgaaacgggcgattgccagtgccagccgc

SEQ ID NO: 388379 - DNA, 75 bp, synthetic construct
  source 1..75: mol_type = other DNA
ctggtgtccggaggcgtccagtctccgggacgcgtggcgcatgaaccttctcatcaggtaaaaactgcgctggca

SEQ ID NO: 388380 - DNA, 75 bp, synthetic construct
  source 1..75: mol_type = other DNA
aaacaatatgcctcgtttgaatcgcagttgcgggatatcagtgtcactggtgatctggattcaaggcaggaacag

SEQ ID NO: 388381 - DNA, 75 bp, synthetic construct
  source 1..75: mol_type = other DNA
tttcggcagttctgtctcttcctggtttaaagaaacgctcgggattaattcacccagccgggtttttatggggtt

SEQ ID NO: 388382 - DNA, 75 bp, synthetic construct
  source 1..75: mol_type = other DNA
taaagcctttgcggctgcgctgaaatatctcggcgttgatctgccggcgaagttcaccgacttcggtggtcatct

SEQ ID NO: 388383 - DNA, 75 bp, synthetic construct
  source 1..75: mol_type = other DNA
gtcttaacgtgctacgcctgttaaaccaaccctggtttacctccgtgaaaggcaaccacgaagcgatggcgcttg

SEQ ID NO: 388384 - DNA, 75 bp, synthetic construct
  source 1..75: mol_type = other DNA
gctgaaatttcatcgccttccacatattattgaaatcactaacgacataataaaatatgtcatcgcacatgcaga

SEQ ID NO: 388385 - DNA, 75 bp, synthetic construct
  source 1..75: mol_type = other DNA
atgccatctacacgctatcaaaaaatcaatgcccatcactatcgccatatatgggccgttggtgatattcatggt

SEQ ID NO: 388386 - DNA, 75 bp, synthetic construct
  source 1..75: mol_type = other DNA
acgacgccaagagatattgcagtcatgctcaatcaactgacaagagagggaggagtagagaaaattgtatcaccg

SEQ ID NO: 388387 - DNA, 75 bp, synthetic construct
  source 1..75: mol_type = other DNA
atgtaacctatcatttacatgatgattgctttaatctggacaaaatgcgcgatgcatggatgttgataaaaacaa

SEQ ID NO: 388388 - DNA, 75 bp, synthetic construct
  source 1..75: mol_type = other DNA
gtcttaacgtactacgcctgttaaaccagccctggtttatctccgttaaaggcaaccacgaagcgatggcgcttg

SEQ ID NO: 388389 - DNA, 75 bp, synthetic construct
  source 1..75: mol_type = other DNA
gcttaattatctctggcgtgaagaacgcccggaggtcacaaaaaaggtgacctgggccgcaagtctgggcgaccg

SEQ ID NO: 388390 - DNA, 75 bp, synthetic construct
  source 1..75: mol_type = other DNA
atggcgctgaagaactggatccgttgttcgatcaggcggtgcagtttgtcactgaaaaacgcaaagcgtcaattt

SEQ ID NO: 388391 - DNA, 75 bp, synthetic construct
  source 1..75: mol_type = other DNA
gctgaaattccatcaccttccacatattattgaaatcactaacgacaccataaaatatgtcatcgcacatgcaga

SEQ ID NO: 388392 - DNA, 75 bp, synthetic construct
  source 1..75: mol_type = other DNA
ggtacgccaaaaatcttgacgatggcagcgtggaagtggttgcttgcggtgaagaagggcaggtggaaaaattaa

SEQ ID NO: 388393 - DNA, 75 bp, synthetic construct
  source 1..75: mol_type = other DNA
gaagcagagaagaaggaagccgctgatcgtgccgagcgcgaaaagcaggaagctatcgcagccgaacaacgcaaa

SEQ ID NO: 388394 - DNA, 75 bp, synthetic construct
  source 1..75: mol_type = other DNA
ctaattgaccagggtattcctgatgactgggcgaaggaatgtgttgtcgccatcgctcgcgggaaagtacccgca

SEQ ID NO: 388395 - DNA, 75 bp, synthetic construct
  source 1..75: mol_type = other DNA
catgctttataaagcacagccagaagatgtgcgtttcatcatgatcgacccgaaaatgctggagctttcggttta

SEQ ID NO: 388396 - DNA, 75 bp, synthetic construct
  source 1..75: mol_type = other DNA
cagcgtctgaatgactggcgcaaagcccaaactgacgaagtgctggaaaacccggacccgcgaggtgcggcatga

SEQ ID NO: 388397 - DNA, 75 bp, synthetic construct
  source 1..75: mol_type = other DNA
cgctggtgccggtgctgggcgtgccagtacagagcgccgcactgagcggtgtcgatagcctctactccatcgtac

SEQ ID NO: 388398 - DNA, 75 bp, synthetic construct
  source 1..75: mol_type = other DNA
tatactaaattcccagccgggttcaggttgtaaaaatagatccagaaacccagaattagaaagtagcaagtcttt

SEQ ID NO: 388399 - DNA, 75 bp, synthetic construct
  source 1..75: mol_type = other DNA
tctatctttgctctgggtatcatgccgtacatttcggcatcaattattatccagctgctaacggtggttcatcca

SEQ ID NO: 388400 - DNA, 75 bp, synthetic construct
  source 1..75: mol_type = other DNA
cgtatatttcggcatcgatcattatccagctgctgacagtggttcacccaacgttggcagaaattaagaaagaag

SEQ ID NO: 388401 - DNA, 75 bp, synthetic construct
  source 1..75: mol_type = other DNA
ccatcattgagatgtttaacatgttctctggtggtgctcttagccgtgcttctatctttgctctggggatcatgc

SEQ ID NO: 388402 - DNA, 75 bp, synthetic construct
  source 1..75: mol_type = other DNA
tacatttcctataataaatcttctttaaacaatctggtattctcacgatttattgaccgcctaaatgagtgtttt

SEQ ID NO: 388403 - DNA, 75 bp, synthetic construct
  source 1..75: mol_type = other DNA
cgggcagggtatacagcagcagtggcagatgaagcgtgaaatgctgtcgcctcgatacactacgagattttcaga

SEQ ID NO: 388404 - DNA, 75 bp, synthetic construct
  source 1..75: mol_type = other DNA
cgttctacgcatcatgcgagacggtatttagacctgatctgagggggcggccagtggtcgtgctctcgaataatg

SEQ ID NO: 388405 - DNA, 75 bp, synthetic construct
  source 1..75: mol_type = other DNA
ttaaaccatgtctggcgtgaagggtaccgctatatgaaggcaggagtcatgctggctgatttcacaccatcgggt

SEQ ID NO: 388406 - DNA, 75 bp, synthetic construct
  source 1..75: mol_type = other DNA
aaacgggtggggtggtggacttatctaacctggatcgccagcgcaaactgatggctgcacttccggttgatgagg

SEQ ID NO: 388407 - DNA, 75 bp, synthetic construct
  source 1..75: mol_type = other DNA
cggttggcgttggtattgcccagacaaagactctggcgaaactggctaatcatgctgccaaaaaatggcagagac

SEQ ID NO: 388408 - DNA, 75 bp, synthetic construct
  source 1..75: mol_type = other DNA
gaaccgtactacggtaacagcgcgtcggttaagttgctcactccgacacaggatagccgggatatcattgcagca

SEQ ID NO: 388409 - DNA, 75 bp, synthetic construct
  source 1..75: mol_type = other DNA
atgaagccccggcgcaatgtaaatgtaccagtcgaaccggagcaacctgaaaagcagcagagaacgctcaatcgc

SEQ ID NO: 388410 - DNA, 75 bp, synthetic construct
  source 1..75: mol_type = other DNA
cggaacagcctgaaaagcaaaagaaaacgctcaatcgctatggctctgcatcaaaactgtcaagccgtcagcaaa

SEQ ID NO: 388411 - DNA, 75 bp, synthetic construct
  source 1..75: mol_type = other DNA
gaaaaacaacagcaaactctcaatcgctatggctccgcgtcaaagctgtcaagccgtcagcaaattcctgtctga

SEQ ID NO: 388412 - DNA, 75 bp, synthetic construct
  source 1..75: mol_type = other DNA
ctgaatatggcaattgataaggagttgtcccgtacaaccagtgatgcgctgtttctggcgctgcgccgggtgaaa

SEQ ID NO: 388413 - DNA, 75 bp, synthetic construct
  source 1..75: mol_type = other DNA
atgacgtggaaagacagacttcaggacgcgtcatttcgcggcgtgccgtttaaggttgaagaagaaagtgcggga

SEQ ID NO: 388414 - DNA, 75 bp, synthetic construct
  source 1..75: mol_type = other DNA
cccggaagtctggtgaaaaatcagcaggcggttgtggctgttggtggttccactgaacgtcagtccgatattatt

SEQ ID NO: 388415 - DNA, 75 bp, synthetic construct
  source 1..75: mol_type = other DNA
aattaaaattgtcgctccgggtggtcttgatgtggttgcccctctggttgatttttctgagaaagtaaccattca

SEQ ID NO: 388416 - DNA, 75 bp, synthetic construct
  source 1..75: mol_type = other DNA
gtattcccgtgcggcggaggatgtacgttgacttttccggtaaaagccggtgatgagtgtttggtgatttttgcc

SEQ ID NO: 388417 - DNA, 75 bp, synthetic construct
  source 1..75: mol_type = other DNA
atctgaacgggaaacaacaaagaatcagatccgtgtcgccttgcctggcattattcagtcattcgatcctgatgc

SEQ ID NO: 388418 - DNA, 75 bp, synthetic construct
  source 1..75: mol_type = other DNA
atgccaattccaactcaatcacagatcggcggagagcagcagaccgcgcaggccattgccgattcggtgtctacc

SEQ ID NO: 388419 - DNA, 75 bp, synthetic construct
  source 1..75: mol_type = other DNA
gcgtttccgcggtcgtgagatggcgcaccagcaaatcggtatggaggtgcttaatcgcgtgaaagacgatttgca

SEQ ID NO: 388420 - DNA, 75 bp, synthetic construct
  source 1..75: mol_type = other DNA
gatgcattttgtattgtcggtccccagtcgcaggcgaggaagattagcggtattaataccagtgtcacacagttg

SEQ ID NO: 388421 - DNA, 75 bp, synthetic construct
  source 1..75: mol_type = other DNA
ttgagcttaatcctgatacccggaaaattaaaattgtcgctcccggggggcttgatgtggtcgcccctctggctg

SEQ ID NO: 388422 - DNA, 75 bp, synthetic construct
  source 1..75: mol_type = other DNA
taaaagaaggcgacgaatgcctgcttatctttgccgaccgttgcatcgatttctggtggcagagcggcggcgttc

SEQ ID NO: 388423 - DNA, 75 bp, synthetic construct
  source 1..75: mol_type = other DNA
cttcgcggtattgttggcgacggctccaccgaattaaaaccgctggtggatgtgccggttatctttcctcgcggc

SEQ ID NO: 388424 - DNA, 75 bp, synthetic construct
  source 1..75: mol_type = other DNA
atggcagtatctgaccagactcgcagcggcgaccttgccgaaacattcaaatctgaacgggaaacaacaaggaac

SEQ ID NO: 388425 - DNA, 75 bp, synthetic construct
  source 1..75: mol_type = other DNA
atggcagtatctgaccagactcgcagcggcgaccttgccgaaacattcaaatctgagcgggaaaccattaaaaac

SEQ ID NO: 388426 - DNA, 75 bp, synthetic construct
  source 1..75: mol_type = other DNA
cgttaactttcccggtaaaagccggcgatgaatgcctggtgatttttgccgatcgctgcatcgatttctggtggc

SEQ ID NO: 388427 - DNA, 75 bp, synthetic construct
  source 1..75: mol_type = other DNA
ggccattgccgattcggtgtctacccagatgcgcgtagcgatgcccggcatcattcagtcgttcgatcctgatac

SEQ ID NO: 388428 - DNA, 75 bp, synthetic construct
  source 1..75: mol_type = other DNA
gttgattattattatctgacaggcaataaaccgaatgccaccgtaatggtcgatattgatcgtcagggctttgtt

SEQ ID NO: 388429 - DNA, 75 bp, synthetic construct
  source 1..75: mol_type = other DNA
aactgtacggcggtagagctgatggcgaaaacgctgcgtgaaagtgcggaacctgtcacgattgtgtctaccgga

SEQ ID NO: 388430 - DNA, 75 bp, synthetic construct
  source 1..75: mol_type = other DNA
aaagcggtctcgacggcccggcattaccggaaccgacgttcgcaccgcaaaactgtacggcggtagagctgatgg

SEQ ID NO: 388431 - DNA, 75 bp, synthetic construct
  source 1..75: mol_type = other DNA
caatagtcggttttaacgggggaacatcatcgttcacgacactgacaacagataatctggacgcggttcagtcag

SEQ ID NO: 388432 - DNA, 75 bp, synthetic construct
  source 1..75: mol_type = other DNA
ctgaccactataccctgctgcagatgggggctgaccgtaagcacgaactgggaagtatggacctgtttaccggcg

SEQ ID NO: 388433 - DNA, 75 bp, synthetic construct
  source 1..75: mol_type = other DNA
gcttaggtcgattgaatagagaagggatgtgtcaaaaaggtcaacatgatttaattatggccatatctttactag

SEQ ID NO: 388434 - DNA, 75 bp, synthetic construct
  source 1..75: mol_type = other DNA
tcaggaagggatatctattaattttcccggctgtcgttgcctgcgcatttacgcgtgctaacgcagcgtcgcaga

SEQ ID NO: 388435 - DNA, 75 bp, synthetic construct
  source 1..75: mol_type = other DNA
actcattaaccggttttgctaatggcattttgaatatcgacgcaggcggcaatgttaccgtaaaccagggcggtt

SEQ ID NO: 388436 - DNA, 75 bp, synthetic construct
  source 1..75: mol_type = other DNA
attcgttcggttgaaacggataacgacggcaaccgcgttaccaaaaattacccgctgctggtggatgtgccggtg

SEQ ID NO: 388437 - DNA, 75 bp, synthetic construct
  source 1..75: mol_type = other DNA
attatcgccgacaacgtgcacggcgaaagtggactggacggcccggcattaccggaacccgcatttgcgccgcaa

SEQ ID NO: 388438 - DNA, 75 bp, synthetic construct
  source 1..75: mol_type = other DNA
agataacgccgtattgtcgctggcggggaatcaggccgatttacgggcaatgcagagcgatccgcaatcgatcgt

SEQ ID NO: 388439 - DNA, 75 bp, synthetic construct
  source 1..75: mol_type = other DNA
agttggcccagcacgaagacacctctacggtacagcttagcggtaacctgctgactgaacgttggggcgatgatg

SEQ ID NO: 388440 - DNA, 75 bp, synthetic construct
  source 1..75: mol_type = other DNA
cgaactgctgctgttcaagcagatgggcactgccacggtggacggtatccagctgcgtttcaccggctccattca

SEQ ID NO: 388441 - DNA, 75 bp, synthetic construct
  source 1..75: mol_type = other DNA
cggctatctctaacgtctctgtatggcgtcagggtgatgtatgcgctccgcataagccgttgttgctgttgtatg

SEQ ID NO: 388442 - DNA, 75 bp, synthetic construct
  source 1..75: mol_type = other DNA
ttcagcccgacggcgttttgccgcaggatgattcgtttatggctaagccggcgattaatctggcgaaatacaaag

SEQ ID NO: 388443 - DNA, 75 bp, synthetic construct
  source 1..75: mol_type = other DNA
gctgtagtaactgatggtgaaaattcaataaaatcagtgggttggaatgatgtcgccaacggtcagattccttgc

SEQ ID NO: 388444 - DNA, 75 bp, synthetic construct
  source 1..75: mol_type = other DNA
aatacaggcctgactttccagatcctgatattaaatcctgcccaaataaatgggcatcacacaagatttacagat

SEQ ID NO: 388445 - DNA, 75 bp, synthetic construct
  source 1..75: mol_type = other DNA
tgaaaacataaagttcatccagttagattataaagataattgctatttcgtcgtgaaagatggaggcaatgaaaa

SEQ ID NO: 388446 - DNA, 75 bp, synthetic construct
  source 1..75: mol_type = other DNA
tccagcaaatccgtaaacagcgcgacccgttatttcgcaaaaatgtattacgcgcttataaataccagtgcgcga

SEQ ID NO: 388447 - DNA, 75 bp, synthetic construct
  source 1..75: mol_type = other DNA
taatgtcaataaatgccccagatgaacatcgaacaaactatttgcggaaactacataagttttcagaaaagcaga

SEQ ID NO: 388448 - DNA, 75 bp, synthetic construct
  source 1..75: mol_type = other DNA
taattgagaatttgcttgatcataatagtgaattgaagtttgataaaaaaacgattaataaatttatatcaattt

SEQ ID NO: 388449 - DNA, 75 bp, synthetic construct
  source 1..75: mol_type = other DNA
gcaataaggctcccggcagcatcaaagttaacggggctgatggtaaggaggctgtgagtctgaatggtcaggatg

SEQ ID NO: 388450 - DNA, 75 bp, synthetic construct
  source 1..75: mol_type = other DNA
taaagttaaagaaaatttaataaaaataagggcgagtgattcaagttctactgtttttaaaggacttaatttgcc

SEQ ID NO: 388451 - DNA, 75 bp, synthetic construct
  source 1..75: mol_type = other DNA
gttggttggaacgatgtagcaaaaggtcaagttccttgttctatgaggtcatttgatgggttattgcatgatttt

SEQ ID NO: 388452 - DNA, 75 bp, synthetic construct
  source 1..75: mol_type = other DNA
gtggataaattaactgatttttataatggtttagatttacagcgttataagatagttaaggatttcactgagaat

SEQ ID NO: 388453 - DNA, 75 bp, synthetic construct
  source 1..75: mol_type = other DNA
gctgattgtacccattgcggtacgtcttggtctgggatcggtacttggctacctgattgccggctgcattattgg

SEQ ID NO: 388454 - DNA, 75 bp, synthetic construct
  source 1..75: mol_type = other DNA
caaacaaatccaggagaatcttttgatttttcaactgactataatatttatgcggcaaaaaaatattctaaaaaa

SEQ ID NO: 388455 - DNA, 75 bp, synthetic construct
  source 1..75: mol_type = other DNA
gcaattgctgctgcgtcacctgcctgccgacgtgaagatccatcataacaacagcggctattttctctggctcga

SEQ ID NO: 388456 - DNA, 75 bp, synthetic construct
  source 1..75: mol_type = other DNA
cttaccaactgctggaaagtcaggggcgaattattgcgcgtccgcagtccggctattacgtcgcgccacgcccga

SEQ ID NO: 388457 - DNA, 75 bp, synthetic construct
  source 1..75: mol_type = other DNA
agttgcgctttaccggctctatccagcgtgacgataccggagaagtgcaggccgtagagcttgtagtgcgtgggc

SEQ ID NO: 388458 - DNA, 75 bp, synthetic construct
  source 1..75: mol_type = other DNA
ggtaaagccacggtggatggcatccagctgcgctttaccggctctattcagcgtgacgataccggggaagtgcag

SEQ ID NO: 388459 - DNA, 75 bp, synthetic construct
  source 1..75: mol_type = other DNA
caactggcaggggatcgttgagtccctgactctgccgaaattcacccgcaagtttgagaagtatcgcggcggcgg

SEQ ID NO: 388460 - DNA, 75 bp, synthetic construct
  source 1..75: mol_type = other DNA
gaggggatgacgctgcattttgtcaccgaccgtaagccgctatcgcgcgaggagattttgaggatggttgagagg

SEQ ID NO: 388461 - DNA, 75 bp, synthetic construct
  source 1..75: mol_type = other DNA
cctatgcacaaattggcgtcgaaagcgccgtaatgagcgccagccagcagcagctggtcaccatgctatttgatg

SEQ ID NO: 388462 - DNA, 75 bp, synthetic construct
  source 1..75: mol_type = other DNA
ggctgcgctggcaggtcgcggaattgatcggcatgacgctggcgctctcctctacggcgattgccatgcaggcga

SEQ ID NO: 388463 - DNA, 75 bp, synthetic construct
  source 1..75: mol_type = other DNA
gctggctgtgcttgaggacgcaattttcagtgctgcccgtcagtccatcgaaaaagaaatgatgagtacgcaggg

SEQ ID NO: 388464 - DNA, 75 bp, synthetic construct
  source 1..75: mol_type = other DNA
tctacgctctggccagtcggaaaccgcaattaaaaacggtcatgcaaaactggatgcaacgtagtcagcaaaccc

SEQ ID NO: 388465 - DNA, 75 bp, synthetic construct
  source 1..75: mol_type = other DNA
cctgccaggccataactgacatgatctacagctcgcaggttgcaacgccggataacatggaactgatgtatcaac

SEQ ID NO: 388466 - DNA, 75 bp, synthetic construct
  source 1..75: mol_type = other DNA
acctgaattgttgaacctgctttcacacctccgcgaaggtgatacgctcatgactcactcgattgatcgccttgc

SEQ ID NO: 388467 - DNA, 75 bp, synthetic construct
  source 1..75: mol_type = other DNA
tgtaacaaaattattacagagaaagaatcagggaaatccaccagcgaaagacctgaattgttgaacttgctttct

SEQ ID NO: 388468 - DNA, 75 bp, synthetic construct
  source 1..75: mol_type = other DNA
ccattcaacaacagatattttggtttagcgccgaactcgccagtgaaagcgaacagccgtcagcgcagcagcgtt

SEQ ID NO: 388469 - DNA, 75 bp, synthetic construct
  source 1..75: mol_type = other DNA
cgggggaattgaggatctcattccccagatagcggagttgtctgtgttgcgttgcggcgatacaagttctgtttc

SEQ ID NO: 388470 - DNA, 75 bp, synthetic construct
  source 1..75: mol_type = other DNA
aaaaggcggtgatggtggtgcctctaaagcccaggcgaaggcccagcagcaggcaattgatttgcagcgcgagca

SEQ ID NO: 388471 - DNA, 75 bp, synthetic construct
  source 1..75: mol_type = other DNA
tccggatgtggacctgagtttgtacgatcacatcattgtttgcctgtctggaggcaaagactcgattgctgcgta

SEQ ID NO: 388472 - DNA, 75 bp, synthetic construct
  source 1..75: mol_type = other DNA
gcgatcaaattgatgaagtcgataaagagctgctgaatttattagcgaagcgtctggaactggttgccgaagtgg

SEQ ID NO: 388473 - DNA, 75 bp, synthetic construct
  source 1..75: mol_type = other DNA
caactttatgcggatattattatgtcatcggaacgtaatctggcgttgatcaaacgttactataagcgttttggt

SEQ ID NO: 388474 - DNA, 75 bp, synthetic construct
  source 1..75: mol_type = other DNA
cgtctggaactggttgctgaagtgggcgaggtgaaaagccgctttggactgcctatttatgttccggagcgcgag

SEQ ID NO: 388475 - DNA, 75 bp, synthetic construct
  source 1..75: mol_type = other DNA
atggcgatttataccagaacaggcgattcaggaaatacgtccctatttaccgggcaacgtgtcagcaaaactcat

SEQ ID NO: 388476 - DNA, 75 bp, synthetic construct
  source 1..75: mol_type = other DNA
atgattcaggaaattacaaaacgttatcacgaggccaaccacacttcagcattgaaggaacgcacgatgtcgctc

SEQ ID NO: 388477 - DNA, 75 bp, synthetic construct
  source 1..75: mol_type = other DNA
ctgaggcggaagccctcggcgtgccgccggatctgattgaagatatcctgcggcgggttatgcgtgaatcctact

SEQ ID NO: 388478 - DNA, 75 bp, synthetic construct
  source 1..75: mol_type = other DNA
tttcagtggtcagattaaggtccgctttacactccgcaaagactccgtcagttcccatgccttacctggtgaaga

SEQ ID NO: 388479 - DNA, 75 bp, synthetic construct
  source 1..75: mol_type = other DNA
taagcctcgggtatgcattaacctatttgattggcctggtgagtttgattgtcggtgcgcgttacttgcctaagt

SEQ ID NO: 388480 - DNA, 75 bp, synthetic construct
  source 1..75: mol_type = other DNA
tggctgttacattgaacgtattcggcgtaacgggattctggcaaatccagacggtgatgccgtactacaaatggg

SEQ ID NO: 388481 - DNA, 75 bp, synthetic construct
  source 1..75: mol_type = other DNA
gcgctggtagcggtattaataacggcctgggcgcgattggcggtcagatgttgattgccggattgattgtcagtc

SEQ ID NO: 388482 - DNA, 75 bp, synthetic construct
  source 1..75: mol_type = other DNA
cgaagcgtgaagagtacggcgatatggcagaacagaaatgctcgaagatcctggcattcgcacacatcatgatgg

SEQ ID NO: 388483 - DNA, 75 bp, synthetic construct
  source 1..75: mol_type = other DNA
gccgcgaatgatttctttggttctggtttatataaaacacaggcagatcaggcccgttatcagaaccttgtctca

SEQ ID NO: 388484 - DNA, 75 bp, synthetic construct
  source 1..75: mol_type = other DNA
aggtttatttaccggtgatccgcgcctaccgcgtcggcccggagctggtagcctggaccgacggcaaaaatctgc

SEQ ID NO: 388485 - DNA, 75 bp, synthetic construct
  source 1..75: mol_type = other DNA
gaaccaatcccgcagcaaaaaggcgaaggcgatagcgtccatgccgggacagtggtacaggacggcagtgtgctg

SEQ ID NO: 388486 - DNA, 75 bp, synthetic construct
  source 1..75: mol_type = other DNA
atgtcacaaattatcgacctgaccctggacggcctgtcctgcggtcactgcgttaaacgcgtgaaagaaagtctc

SEQ ID NO: 388487 - DNA, 75 bp, synthetic construct
  source 1..75: mol_type = other DNA
tatcggtctgattaatctcggtcatatgctggaagcgcgcgcgcgtcagcgttcttctaaggcgctggagaaatt

SEQ ID NO: 388488 - DNA, 75 bp, synthetic construct
  source 1..75: mol_type = other DNA
aaccgcgcactgttattcggcgcaatgatgggcgcacgcacctgcgcgccggcaatggagatcatcagtgataca

SEQ ID NO: 388489 - DNA, 75 bp, synthetic construct
  source 1..75: mol_type = other DNA
gggttgctatatcgagcgtatccgccgtaatgggattctggcgaacccggatggcgatgccgtgctgcaaatggg

SEQ ID NO: 388490 - DNA, 75 bp, synthetic construct
  source 1..75: mol_type = other DNA
gattgaagccgatatttcagctcaggcatcgcaaggagcaacgcctgtgctgctggcggttgacgggaaagcggt

SEQ ID NO: 388491 - DNA, 75 bp, synthetic construct
  source 1..75: mol_type = other DNA
ggcccggacagcggcagtctggcgaagcaggtggtggtctggtgcgatggacgccagccggaagcatatcaatgg

SEQ ID NO: 388492 - DNA, 75 bp, synthetic construct
  source 1..75: mol_type = other DNA
cgaaagctggtgtggcactatccagtggatttgtccgagtccgtatcggcctcatcatgggcgcaaaaactggtt

SEQ ID NO: 388493 - DNA, 75 bp, synthetic construct
  source 1..75: mol_type = other DNA
ctcatctgcggttgcgtcaccgcagcaggcgcgctggcgtacatcttcatggtacatcaacccattagcgatccg

SEQ ID NO: 388494 - DNA, 75 bp, synthetic construct
  source 1..75: mol_type = other DNA
tctgctgattggtatggcactgttctgtattcactttgccggaacatcctgctggggcttgatccacgtcgcagt

SEQ ID NO: 388495 - DNA, 75 bp, synthetic construct
  source 1..75: mol_type = other DNA
gagccgattttaacggcacggtacttggcacgcgcgtgacagagcaccacgaaacgccagggcttggcgataaaa

SEQ ID NO: 388496 - DNA, 75 bp, synthetic construct
  source 1..75: mol_type = other DNA
gcgagcttctgttcaaggttgatgaagtagaaaaaacagactgtctgcggttcaatccggctatggcctactacg

SEQ ID NO: 388497 - DNA, 75 bp, synthetic construct
  source 1..75: mol_type = other DNA
gtgtctcaatggctctattacttatagacagataagcacagagggtaagtggaagcagatcaaaaagtttctttc

SEQ ID NO: 388498 - DNA, 75 bp, synthetic construct
  source 1..75: mol_type = other DNA
cgcccgcgcaggcgaacgtttctcttcgccggttgctatcgttctggatgagggccagcaggctactgtcaggga

SEQ ID NO: 388499 - DNA, 75 bp, synthetic construct
  source 1..75: mol_type = other DNA
cagttttggttccctggtattaaagaatgcggactttggtctggggcgcaatgccacactgaacacaatcattca

SEQ ID NO: 388500 - DNA, 75 bp, synthetic construct
  source 1..75: mol_type = other DNA
aggttcaggctttcagtagcctcaatatcgccagtggtcgcccgaccgtcgttctggctgataaccggcaggttg

SEQ ID NO: 388501 - DNA, 75 bp, synthetic construct
  source 1..75: mol_type = other DNA
tggtatcaactacactgcgtggctgtatctggcctggcttcctggttacctgcaaacagcctataacctggattt

SEQ ID NO: 388502 - DNA, 75 bp, synthetic construct
  source 1..75: mol_type = other DNA
ggccggtagtgcggtaaattcccgggaaggctcccggattgcagtccaaacggctggcgattaccttttcaatca

SEQ ID NO: 388503 - DNA, 75 bp, synthetic construct
  source 1..75: mol_type = other DNA
caatcccgatccgagaagcctgtggaaggtggtagagccaccagcagacgcttcctaccctaagtcccatctgga

SEQ ID NO: 388504 - DNA, 75 bp, synthetic construct
  source 1..75: mol_type = other DNA
gcattacactggcactatttgcagcgggttctacagggttaactgcggccatcaaccagatgaccaaaacgacaa

SEQ ID NO: 388505 - DNA, 75 bp, synthetic construct
  source 1..75: mol_type = other DNA
gctaagtcgacaggaaaaccggatcaacgccgacgcgataataaagatactcctggcaatacctcgggactaaag

SEQ ID NO: 388506 - DNA, 75 bp, synthetic construct
  source 1..75: mol_type = other DNA
accaatgttgagggcattcctcttacatctcgaaggataactatcatgggtctaaaaccaggtccaaaaccaatt

SEQ ID NO: 388507 - DNA, 75 bp, synthetic construct
  source 1..75: mol_type = other DNA
ctgcacttatgttgcacagaaggagtgagcacagaaagaagtcttgaacttttccgggcatataactatactccc

SEQ ID NO: 388508 - DNA, 75 bp, synthetic construct
  source 1..75: mol_type = other DNA
ttcgcagaacttcagcgttccggcacctttacggggtgtaaacaccggattagggttctttacctggcggtaata

SEQ ID NO: 388509 - DNA, 75 bp, synthetic construct
  source 1..75: mol_type = other DNA
atgcaagagaacgaaaccaaaaaaaacaaaagcaccgtagtattgagcctcagagttcctgaatctgaagctgct

SEQ ID NO: 388510 - DNA, 75 bp, synthetic construct
  source 1..75: mol_type = other DNA
catatgggcaaaagttacgcggttctgaatacctgaacaatacctcctggcagcagatcaaacagtgggctcagc

SEQ ID NO: 388511 - DNA, 75 bp, synthetic construct
  source 1..75: mol_type = other DNA
tccgtatcggcctcatcatgggcgcaaaaactggtttctgggcattgggcgttttaccgctgatgagcaggagca

SEQ ID NO: 388512 - DNA, 75 bp, synthetic construct
  source 1..75: mol_type = other DNA
gtggtaacagtgctggaaacagaaacaggtcgttactctgacacgctgcgttcagcgctggtttctctggatggc

SEQ ID NO: 388513 - DNA, 75 bp, synthetic construct
  source 1..75: mol_type = other DNA
cccaggggccagaagaatgctgtctcgccgtcaaaaaggtgctggacaggctgattaaagaagctacccaacagc

SEQ ID NO: 388514 - DNA, 75 bp, synthetic construct
  source 1..75: mol_type = other DNA
tccggtatgagacgttgcgttcgtcggggccgggcggtcaacatgttaataagaccgactcggcggtgcgcgcca

SEQ ID NO: 388515 - DNA, 75 bp, synthetic construct
  source 1..75: mol_type = other DNA
atgggcattaagcgaaagctggtgcggcactattcagtggatttgtccgagtccgtatcggcctcatcatgggcg

SEQ ID NO: 388516 - DNA, 75 bp, synthetic construct
  source 1..75: mol_type = other DNA
cgtttacctgatcgccagcggtcgtatgtgtgttgccgggcttaactctgcgaacgtgcagcgcgttgcaaaggc

SEQ ID NO: 388517 - DNA, 75 bp, synthetic construct
  source 1..75: mol_type = other DNA
tacaccggactgagtgcggcacaggtcgatcgcctgcgtgatgagtttggcgtctacctgatagccagcggacgc

SEQ ID NO: 388518 - DNA, 75 bp, synthetic construct
  source 1..75: mol_type = other DNA
ttgaaagcaacagttcgccgcaactactccagcccgccgaattttggtgcgcaggtggtggctgcagtgctgaat

SEQ ID NO: 388519 - DNA, 75 bp, synthetic construct
  source 1..75: mol_type = other DNA
aaagaagcggtggagtatgcacaatcgcgaaaatggatagcgcatgtgcccttgttaccttcggacaaggaatag

SEQ ID NO: 388520 - DNA, 75 bp, synthetic construct
  source 1..75: mol_type = other DNA
tcttactgctgtggccgcaggagagcaggtcgttcctgcctctgaacttgctgctgccatgaagcagattaaaga

SEQ ID NO: 388521 - DNA, 75 bp, synthetic construct
  source 1..75: mol_type = other DNA
ctgcctctgaacttgctgccgccatgaagcagattaaagaactccagcgcctgctcggcaagaaaacgatggaaa

SEQ ID NO: 388522 - DNA, 75 bp, synthetic construct
  source 1..75: mol_type = other DNA
aaggggtgcatctgcatgatgaggatccggcccgcgtctggcgaacgcagcgtgaaggaccggaaggctggcgtg

SEQ ID NO: 388523 - DNA, 75 bp, synthetic construct
  source 1..75: mol_type = other DNA
gcatcatctcaggtattagccatggcgaaatcagccaggttttaaatacgctacgcgagaaagaacattttaaat

SEQ ID NO: 388524 - DNA, 75 bp, synthetic construct
  source 1..75: mol_type = other DNA
aacgccgactgcgtaccacacaggaaaagatcgctattgttcagccgagttttgaacaaggagtggtagtctctc

SEQ ID NO: 388525 - DNA, 75 bp, synthetic construct
  source 1..75: mol_type = other DNA
tgtttacctgatcgccagcgggcgtatgtgcgtggcggggcttaactctgcaaacgtgcagcgtgtggcaaaggc

SEQ ID NO: 388526 - DNA, 75 bp, synthetic construct
  source 1..75: mol_type = other DNA
acaacagcgcgtagcaaccattcaaacccttggcggctcaggggcattgaaagtgggcgcggatttcctgaaacg

SEQ ID NO: 388527 - DNA, 75 bp, synthetic construct
  source 1..75: mol_type = other DNA
atgctttcaattcaacaaccactgctgattttcaccgatctcgatggcaccctgttagatagtcacagttatgac

SEQ ID NO: 388528 - DNA, 75 bp, synthetic construct
  source 1..75: mol_type = other DNA
atgtatcttaaaataagagataggcttggatatctgtctaacactagttctaattttgagattgctggcgttttg

SEQ ID NO: 388529 - DNA, 75 bp, synthetic construct
  source 1..75: mol_type = other DNA
gtcgacaaggacgaggcccggcagcaaattaatgattacatattgaactactacaacagtatcagacctcaccat

SEQ ID NO: 388530 - DNA, 75 bp, synthetic construct
  source 1..75: mol_type = other DNA
gcggtgatgtgacctatatctggacgggtaagcgctgggcgtacctcgccgttgttctcgacctgttcgcaagaa

SEQ ID NO: 388531 - DNA, 75 bp, synthetic construct
  source 1..75: mol_type = other DNA
tgtttttggcggattgtatatgttgcgttcacgaaccggtgtggcaaatgaaagttcgaacatacagacaatcat

SEQ ID NO: 388532 - DNA, 75 bp, synthetic construct
  source 1..75: mol_type = other DNA
gaagtcggttattgaagaccgttttcagttgcagggtaatcagggcgcggcttgcctgtttgcgggatcacctac

SEQ ID NO: 388533 - DNA, 75 bp, synthetic construct
  source 1..75: mol_type = other DNA
acaacagcgtcagacctcaccattataacggtgggctgacgccggaagagtcagagaacagataccatttttact

SEQ ID NO: 388534 - DNA, 75 bp, synthetic construct
  source 1..75: mol_type = other DNA
gtcatttttccctgattccgcactgacaggtaaagctctgtcgatggcctgggaagcacgggggaaaccggctaa

SEQ ID NO: 388535 - DNA, 75 bp, synthetic construct
  source 1..75: mol_type = other DNA
ttctgagcacgccaattcacttaccggatggatcattctatggcacgctttgcgccgccagcagtgagaagcgcc

SEQ ID NO: 388536 - DNA, 75 bp, synthetic construct
  source 1..75: mol_type = other DNA
aagcccgctaatttgctgtatcactcggatcaaggtagccactataccagcagaaatttcagacagttactgtgg

SEQ ID NO: 388537 - DNA, 75 bp, synthetic construct
  source 1..75: mol_type = other DNA
agcgcctgctcggcaaaaaaacgatggaaaatgaactattgaatcacatggtgccattgaacgtcatcttgggtg

SEQ ID NO: 388538 - DNA, 75 bp, synthetic construct
  source 1..75: mol_type = other DNA
ccggcgcggaaactgctgggataacagcccaatggaacgcttcttcaggagtctgaagaacgaatggatgccggt

SEQ ID NO: 388539 - DNA, 75 bp, synthetic construct
  source 1..75: mol_type = other DNA
accgactcgttaaccgggctaccgaatcggcgggcgatttttgaaaatctgacgacgctgttttctctcgcccgg

SEQ ID NO: 388540 - DNA, 75 bp, synthetic construct
  source 1..75: mol_type = other DNA
tggacgggtaaacgttgggcttatttagccgttgtgcttgatctgttttcccgtaaaccggttggctgggcgatg

SEQ ID NO: 388541 - DNA, 75 bp, synthetic construct
  source 1..75: mol_type = other DNA
caggaaaaaatcgcaattattcaacagactatggagccgggcatgacggtgtcccacgtggcgcgtttgcatgga

SEQ ID NO: 388542 - DNA, 75 bp, synthetic construct
  source 1..75: mol_type = other DNA
tcactcgacgcacagcgaagagaaccgtcagttgtctgagcttatctatactcgcctgaaagagaacggttttat

SEQ ID NO: 388543 - DNA, 75 bp, synthetic construct
  source 1..75: mol_type = other DNA
ctggctaaccgttatgtcgatgaacaggctccgtgggtggtggcgaaacaggaaggacgcgatgccgacctgcag

SEQ ID NO: 388544 - DNA, 75 bp, synthetic construct
  source 1..75: mol_type = other DNA
ggaagtcttactgctgtcgccgccggagaacaggttgttcctgcctctgaacttgctgccgccatgaagcagatt

SEQ ID NO: 388545 - DNA, 75 bp, synthetic construct
  source 1..75: mol_type = other DNA
agactccaccgccgagctgtaccacttcatcggtaaagatattgtttacttccacagcctgttctggcctgccat

SEQ ID NO: 388546 - DNA, 75 bp, synthetic construct
  source 1..75: mol_type = other DNA
aatccgttcaaagcactgtataaccgcatcgatatgaagcaggttgaagcactggtggaagcgtctaaagaagaa

SEQ ID NO: 388547 - DNA, 75 bp, synthetic construct
  source 1..75: mol_type = other DNA
cggccacgagatcaacttcatctgcgccgacgatgcccacggcacgccgatcatgcttaaagctcagcagcttgg

SEQ ID NO: 388548 - DNA, 75 bp, synthetic construct
  source 1..75: mol_type = other DNA
gtcaagaagttaccgcacagcggaatcatttggcctggttaaacagactaacgcaccagttgtgttctggttcga

SEQ ID NO: 388549 - DNA, 75 bp, synthetic construct
  source 1..75: mol_type = other DNA
atcgttaatgttagattataatattgatataccaattaatcttaataatataatttacctttgtaattatttttt

SEQ ID NO: 388550 - DNA, 75 bp, synthetic construct
  source 1..75: mol_type = other DNA
tgttcctgcctctgaacttgctgccgccatgaagcagattaaagagctccagcgcctgctcggacaagaaaacga

SEQ ID NO: 388551 - DNA, 75 bp, synthetic construct
  source 1..75: mol_type = other DNA
ccgataaaggaaccagagacgccagctatcgtcgcggaatctgctgacgagctgttggcgttgctaacatcagta

SEQ ID NO: 388552 - DNA, 75 bp, synthetic construct
  source 1..75: mol_type = other DNA
ccagccgaaacaacctgcgaaagatccgataaaggaaccagagacgccagctatcgtcgcggaatctgctgacga

SEQ ID NO: 388553 - DNA, 75 bp, synthetic construct
  source 1..75: mol_type = other DNA
atgatcaatgcactgggattgctggaagtggacggcatggtcgccgcgatagatgcagcggatgccatgctcaaa

SEQ ID NO: 388554 - DNA, 75 bp, synthetic construct
  source 1..75: mol_type = other DNA
aaagccgcgaatttggtaaagcgatccgtgaaatcatggcactggctgatctggctaaccgctatgtcgatgaac

SEQ ID NO: 388555 - DNA, 75 bp, synthetic construct
  source 1..75: mol_type = other DNA
ggaaaatgaactcattaaagaagcggttgaagatgggcgtgcaaaaaagtggataacgcacgtgcccttattgcc

SEQ ID NO: 388556 - DNA, 75 bp, synthetic construct
  source 1..75: mol_type = other DNA
ctgctgtggccgcaggagagcaggtcgttcctgcctctgaacttgctgctgccatgaagcagattaaagactcca

SEQ ID NO: 388557 - DNA, 75 bp, synthetic construct
  source 1..75: mol_type = other DNA
aagcaataccaggaaggaagtcttaccgctgtcgccgccggagaacaggttgttcctgcctctgaacttgttgcc

SEQ ID NO: 388558 - DNA, 75 bp, synthetic construct
  source 1..75: mol_type = other DNA
aagttgagatcctcaaaaaagcggtggggtatgcgcaagcgcgaaaatggatagcgcatgtgcccttgttacctt

SEQ ID NO: 388559 - DNA, 75 bp, synthetic construct
  source 1..75: mol_type = other DNA
tgttcctgcctctgaacttgctgccgccatgaagcagattaaagaactccagcgcctgctgaacaaaacgccgga

SEQ ID NO: 388560 - DNA, 75 bp, synthetic construct
  source 1..75: mol_type = other DNA
agccagccagttatttctctggcgcaagcaataccaggaaggaagtcttactgctgtggccgccggagaacaggt

SEQ ID NO: 388561 - DNA, 75 bp, synthetic construct
  source 1..75: mol_type = other DNA
tggaagttgagatcctcaaagaagcggtggagtatgcacaatcgcgaaaatggatagcgcatgtgcccttgttac

SEQ ID NO: 388562 - DNA, 75 bp, synthetic construct
  source 1..75: mol_type = other DNA
ggaaaatgaactcctcaaagaagccgttgaatatggacgggcaaaaaggtggatagcgcacgcgcccttattgcc

SEQ ID NO: 388563 - DNA, 75 bp, synthetic construct
  source 1..75: mol_type = other DNA
cgacaactatcactcgacgcacagcgaagagaaccgccagttgtcagaacttatttattctcgcctgaaagagaa

SEQ ID NO: 388564 - DNA, 75 bp, synthetic construct
  source 1..75: mol_type = other DNA
ggaaaacgagctgctgaaagaagccgttgaatatggccgacaaaaaaagtggatagcgcacgtgcccttgttgcc

SEQ ID NO: 388565 - DNA, 75 bp, synthetic construct
  source 1..75: mol_type = other DNA
ccggggatggggagtaagcttagtcagccgttgtctccgggtgtcgcgtgcgcagtttgcacgtcattctcagac

SEQ ID NO: 388566 - DNA, 75 bp, synthetic construct
  source 1..75: mol_type = other DNA
ctcattgtgatcgtcgtgggtattaccattttctttgtactgaatgacaaagaagaagcgccttccgttgatgag

SEQ ID NO: 388567 - DNA, 75 bp, synthetic construct
  source 1..75: mol_type = other DNA
tttccgaacaagacgatggcacagatcattaccactcgtcggggattatcgcctcgctggaagccgggtatcagt

SEQ ID NO: 388568 - DNA, 75 bp, synthetic construct
  source 1..75: mol_type = other DNA
gggcgtgatattgaaatgcgcgccgacggtgaagtggcagttgatgcgggggtagacacgcagtggggcgcactg

SEQ ID NO: 388569 - DNA, 75 bp, synthetic construct
  source 1..75: mol_type = other DNA
taccgacgaaaaccgtcagcttatctttactgatagccaacaacaaagtgagatggaaattaccgctgacgttga

SEQ ID NO: 388570 - DNA, 75 bp, synthetic construct
  source 1..75: mol_type = other DNA
ggcgtacctcgccgttgttctcgacctgttcgcaagaaaaccagtgggctgggccatgtcgttctcgccggacag

SEQ ID NO: 388571 - DNA, 75 bp, synthetic construct
  source 1..75: mol_type = other DNA
atcagggcgtgcagcaggatgattttaccgccgctaaccatgcgcgcgtgtcacaatcgcagggtgatgatattc

SEQ ID NO: 388572 - DNA, 75 bp, synthetic construct
  source 1..75: mol_type = other DNA
ttgcaggtggcgacaatttgcatatcggcggcgacgggaaagatggcgtctacgtggtggtcgatgcgagcgacg

SEQ ID NO: 388573 - DNA, 75 bp, synthetic construct
  source 1..75: mol_type = other DNA
taacactgccgaaggttatggcggggcgatatataccaatagcgtgacggctccctatcttattgatatttctgt

SEQ ID NO: 388574 - DNA, 75 bp, synthetic construct
  source 1..75: mol_type = other DNA
ccgatccggatcccacgcccgcttatcagccggtgttgaatgcaaaaattggtggatatcttaataacattcggg

SEQ ID NO: 388575 - DNA, 75 bp, synthetic construct
  source 1..75: mol_type = other DNA
gtcggggatcgtcgcctcgctggaagcagggtatcagtggttaccggggcatagtgtggtaatcgaaccgcaggc

SEQ ID NO: 388576 - DNA, 75 bp, synthetic construct
  source 1..75: mol_type = other DNA
aaattaccgccgacgttgacacccgctcagagacgacaggtcatggtcgggatattgaaatgcgtgccgatggtg

SEQ ID NO: 388577 - DNA, 75 bp, synthetic construct
  source 1..75: mol_type = other DNA
ccacgccggatcctgatccaacacccgacccggaacctacgcctgcttaccagccggtgttgaatgccaaagttg

SEQ ID NO: 388578 - DNA, 75 bp, synthetic construct
  source 1..75: mol_type = other DNA
gttcgccgtgaccgagccaaatcaggtgtggtgtcagcccggttcctgtctcttcaggaaaaacgagccgttacc

SEQ ID NO: 388579 - DNA, 75 bp, synthetic construct
  source 1..75: mol_type = other DNA
taacagagaccagttatagtttcggtgctgtgttttttttacaatattgtgataacacattgctggcgggagttt

SEQ ID NO: 388580 - DNA, 75 bp, synthetic construct
  source 1..75: mol_type = other DNA
aatgtacgcaatcatactcccgggtctttcgggtggatgcctcgaatgaagagctaaccgtggagtgtgctgtga

SEQ ID NO: 388581 - DNA, 75 bp, synthetic construct
  source 1..75: mol_type = other DNA
cagcagactgaccatcaaagcgctgaaaatggcctgggaaatccgcagtaaaccagccggggtaatgttccacag

SEQ ID NO: 388582 - DNA, 75 bp, synthetic construct
  source 1..75: mol_type = other DNA
cgcagcagattctggcggcgggcttcggcgaagcgaccatgaataccttaaaacggctcagcgggtttatctcgg

SEQ ID NO: 388583 - DNA, 75 bp, synthetic construct
  source 1..75: mol_type = other DNA
atgaagaaattacgggtaaccgtagaaccttttcagggaacaattccgttccgtattttgcagcgtggtcgtgtt

SEQ ID NO: 388584 - DNA, 75 bp, synthetic construct
  source 1..75: mol_type = other DNA
aatgtacgcaattacactccaggacctttcaggtgaatgccacgaatgaagagctaaccgttgagtgtacgatga

SEQ ID NO: 388585 - DNA, 75 bp, synthetic construct
  source 1..75: mol_type = other DNA
agggaagtcagtatacaggactgaaatatcaacagcttctctggcgttacaggataaagcaaagtgtcagccgac

SEQ ID NO: 388586 - DNA, 75 bp, synthetic construct
  source 1..75: mol_type = other DNA
cgtaagcttcagcgaggcagctcacgccataacggattatatcgttggatattacagcgcactaagaccgcacga

SEQ ID NO: 388587 - DNA, 75 bp, synthetic construct
  source 1..75: mol_type = other DNA
gttccatagcgacagtaataatgccggtatcagtttttatcatcactctgtttgctgtttaaccagactggtgtg

SEQ ID NO: 388588 - DNA, 75 bp, synthetic construct
  source 1..75: mol_type = other DNA
taaccatcaaagcgctggaaatggcgtgggaaacccgaggtaaaccagcgggagtgatgttccacagtgaccagg

SEQ ID NO: 388589 - DNA, 75 bp, synthetic construct
  source 1..75: mol_type = other DNA
gagcaagaagcatcgccacaatggcccccccacccggagaggctaccagatgggacgctggcttgctggcaggct

SEQ ID NO: 388590 - DNA, 75 bp, synthetic construct
  source 1..75: mol_type = other DNA
cgtgttagtggatgagaacaatagcgcagcaggctatggagatggtccttccactgcggcgggtggctttatgta

SEQ ID NO: 388591 - DNA, 75 bp, synthetic construct
  source 1..75: mol_type = other DNA
tctggacaggtaagcgctgggcgtacctcgccgttgtttgcagtggtgcgccgacaaagccccatttttcgtctt

SEQ ID NO: 388592 - DNA, 75 bp, synthetic construct
  source 1..75: mol_type = other DNA
tgaaacttggtggtcgtccggaatatcgtcagggcgtggtgactgataacggcaacgtgatcctcgacgtccacg

SEQ ID NO: 388593 - DNA, 75 bp, synthetic construct
  source 1..75: mol_type = other DNA
cgcagcttcggcagcatggcaggcagtaatgccgcatatgaactgaccagcacatacacccccgcaggccagtta

SEQ ID NO: 388594 - DNA, 75 bp, synthetic construct
  source 1..75: mol_type = other DNA
tctggtgcagtgatgtgacctatagtgtgcccagagttcagggtaagcagggacgcccaaatgaaccactagtct

SEQ ID NO: 388595 - DNA, 75 bp, synthetic construct
  source 1..75: mol_type = other DNA
cattatacgagcaggcagttccggcagttattgtggcgataccagatcaggcagagtatgagccggcgcggaaat

SEQ ID NO: 388596 - DNA, 75 bp, synthetic construct
  source 1..75: mol_type = other DNA
ttcctggtttcgccgactccgcccccgtagaacgcctgatcacccatgaaaaactcgcgtttatgacggaaaagt

SEQ ID NO: 388597 - DNA, 75 bp, synthetic construct
  source 1..75: mol_type = other DNA
cgatggcctgatgggcggcggcttcctttataccaatgaaaataccctgtcgctggggctggtttgtggtctgca

SEQ ID NO: 388598 - DNA, 75 bp, synthetic construct
  source 1..75: mol_type = other DNA
cagcgcgatggcaaagttgtcggcgtagaagccgatggcgatgtgattgaagcgaaaacggtgatccttgctgac

SEQ ID NO: 388599 - DNA, 75 bp, synthetic construct
  source 1..75: mol_type = other DNA
acgggtatggcggcgggagcgtgacctgacggggtggatgtcgctgtcgcgtaaaccggaggtgacatggtacgg

SEQ ID NO: 388600 - DNA, 75 bp, synthetic construct
  source 1..75: mol_type = other DNA
ggacagcagggatatcattaacgccgctacgcgatctctggatgccatctggcaagcgggccatcgctaccaaaa

SEQ ID NO: 388601 - DNA, 75 bp, synthetic construct
  source 1..75: mol_type = other DNA
gccccgcgtcgagatttacagtattgatgaggcattctgcgatctgaccggtgtgcgtaattgtcgcgatctgac

SEQ ID NO: 388602 - DNA, 75 bp, synthetic construct
  source 1..75: mol_type = other DNA
acgtattatgagtgaggaaggactcactcctcgcgaagccacacgtaaatcgatggggcagatccagggggcact

SEQ ID NO: 388603 - DNA, 75 bp, synthetic construct
  source 1..75: mol_type = other DNA
gtcggggaagccgcaccgggcgtcagtacgggtacagcgatggatattatggaatcgttagtgaagcagttgccg

SEQ ID NO: 388604 - DNA, 75 bp, synthetic construct
  source 1..75: mol_type = other DNA
cggctccggtggtcagcatgcggtaggtactggcgtaatggggggaatgatctccgctaccattctggcgattta

SEQ ID NO: 388605 - DNA, 75 bp, synthetic construct
  source 1..75: mol_type = other DNA
aaagatgtaaccgacgccattgagtcacagaacgcgcagattgcggtcggacagcttggcggtacaccttctgta

SEQ ID NO: 388606 - DNA, 75 bp, synthetic construct
  source 1..75: mol_type = other DNA
cattttgaatatcgacgcaggcggcaatgttacagtaaaccagggcggtttttccggctcgattcagggtgaagg

SEQ ID NO: 388607 - DNA, 75 bp, synthetic construct
  source 1..75: mol_type = other DNA
aaggcgacgcggcagatcttgccgctctccaggacgatccgcagtcgatcgtgttaaacggcggtgtgctcgatc

SEQ ID NO: 388608 - DNA, 75 bp, synthetic construct
  source 1..75: mol_type = other DNA
gcgatgcgccatctgcatcggcgggcggctttatgtacatcgattcaagtcaggtcaggtttgatatcgctggta

SEQ ID NO: 388609 - DNA, 75 bp, synthetic construct
  source 1..75: mol_type = other DNA
cggactggaatacaaggtggcgtatgaaaccacctcgtttgttaaagcctccattgaagacgtggtgaaaacgct

SEQ ID NO: 388610 - DNA, 75 bp, synthetic construct
  source 1..75: mol_type = other DNA
ggcgtgacggtgcgtaaaaccggcgataccaacattctgaccattgccttcgtctctaccgatggttcgatggat

SEQ ID NO: 388611 - DNA, 75 bp, synthetic construct
  source 1..75: mol_type = other DNA
gctttcgcgacctcacgctgggagacaggctcgccgcgtctggaacgctataacggttattctgcggttgagatt

SEQ ID NO: 388612 - DNA, 75 bp, synthetic construct
  source 1..75: mol_type = other DNA
gccacgctacttaagccactgaaaaaaggtgagcatcacgggcaaaaaggcttttttgcctggtttaaccagatg

SEQ ID NO: 388613 - DNA, 75 bp, synthetic construct
  source 1..75: mol_type = other DNA
gatcgtcgaatttgctaacgagatgaaccaaacctgtttgaagcgacgctccacgcctgccgtcagcgtttacgc

SEQ ID NO: 388614 - DNA, 75 bp, synthetic construct
  source 1..75: mol_type = other DNA
actttatggatcgcggtcgcgtgaagaaagtctatgtgcaggcagctgcgccatatcgcatgctgccagatgaca

SEQ ID NO: 388615 - DNA, 75 bp, synthetic construct
  source 1..75: mol_type = other DNA
cgacacattttcaactgcggttcgacaaaaatctcgctggatcatcggcattgttttccagggctttaaaaccca

SEQ ID NO: 388616 - DNA, 75 bp, synthetic construct
  source 1..75: mol_type = other DNA
tgacctatatcgatgaattttccgagctgcacggcaaagacgttacggtgcgtgaagctctcgccggacaggtac

SEQ ID NO: 388617 - DNA, 75 bp, synthetic construct
  source 1..75: mol_type = other DNA
ccgatggaattgcgtctgttcaactatctggtcgagcgtaaagatctgattcagatcccggtgtatccgtttgaa

SEQ ID NO: 388618 - DNA, 75 bp, synthetic construct
  source 1..75: mol_type = other DNA
taacatcacttctgggatatctggaaaccctgtcaatgaagtcggattcgctatcatcagaggactgtcataaat

SEQ ID NO: 388619 - DNA, 75 bp, synthetic construct
  source 1..75: mol_type = other DNA
tcgccgacatcatgaacgatatgttcaccattgacggcaaaccaaaccagccggtacgcaaaatgatcatgggac

SEQ ID NO: 388620 - DNA, 75 bp, synthetic construct
  source 1..75: mol_type = other DNA
cagcagtctggcgcaatacaaacgtgagctggaacaaagttgtgttatgcgcgatatgcagcatttccgcaagat

SEQ ID NO: 388621 - DNA, 75 bp, synthetic construct
  source 1..75: mol_type = other DNA
gaccacgctcgactacgaaaactatcatatctttgttggcacctaccccaacgaccccgatactcaacgtgatgt

SEQ ID NO: 388622 - DNA, 75 bp, synthetic construct
  source 1..75: mol_type = other DNA
taccgaagatctgggaaaaatcactttccgcccgtccatcacggcttatgtggtgggagatgactgctttgacca

SEQ ID NO: 388623 - DNA, 75 bp, synthetic construct
  source 1..75: mol_type = other DNA
aagtctgtgttgacggggaagttcgggtcagcacatcgaaaagtgaagggcgtattgtccgctttgacctgaagt

SEQ ID NO: 388624 - DNA, 75 bp, synthetic construct
  source 1..75: mol_type = other DNA
cacaggcgctggcagagcaaaacggcgtggcgtgggaatccatcgatgcctggcagatcccgtcctcgctgattg

SEQ ID NO: 388625 - DNA, 75 bp, synthetic construct
  source 1..75: mol_type = other DNA
catcgtgcagcgggtgattttcgtcactggctactacgggggctgctatctgtcctgcgtcttttctggggcaac

SEQ ID NO: 388626 - DNA, 75 bp, synthetic construct
  source 1..75: mol_type = other DNA
tttcctttctatttttagcggcagcgcatggttaatgaccctgctgcgtattttcatgaaaggagatcactcaat

SEQ ID NO: 388627 - DNA, 75 bp, synthetic construct
  source 1..75: mol_type = other DNA
cacttgggatgacggtgatggcgaagacctgtatctcaaagaggtaacccactggatgccgctaccggagccgcc

SEQ ID NO: 388628 - DNA, 75 bp, synthetic construct
  source 1..75: mol_type = other DNA
tattgttttgctttctaccgctattggactggcggggatggcggtttctggctggctggtacaaggcgttcaggg

SEQ ID NO: 388629 - DNA, 75 bp, synthetic construct
  source 1..75: mol_type = other DNA
acgatcacccgatgctgcgaactggcgtaaaacagcttatcagtatggcaccagatatcaccgtggttggcgaag

SEQ ID NO: 388630 - DNA, 75 bp, synthetic construct
  source 1..75: mol_type = other DNA
cgcggcacaaccctgaagtggcggctggctgactctcatacgcagtacggtattttgctggcgaccctgccgcag

SEQ ID NO: 388631 - DNA, 75 bp, synthetic construct
  source 1..75: mol_type = other DNA
acctgccagccagatatgagctgtgacgataaaggatgtcaactttgcccgcgcgggatattacccattggcgat

SEQ ID NO: 388632 - DNA, 75 bp, synthetic construct
  source 1..75: mol_type = other DNA
gatgtcagccagtttgttgccgggcttgatcagctggtatctggttttgaccgcaccacggaaatgcgcattgag

SEQ ID NO: 388633 - DNA, 75 bp, synthetic construct
  source 1..75: mol_type = other DNA
ggatcgctacgaatgcaaagctatcgcctactggcggcggtgccattaagcgagaaagacaagccattgctgcag

SEQ ID NO: 388634 - DNA, 75 bp, synthetic construct
  source 1..75: mol_type = other DNA
ctgacccgttcttattgcaacgaataatggataagaaactggaagggtacgatatgccaacggcggacccagtga

SEQ ID NO: 388635 - DNA, 75 bp, synthetic construct
  source 1..75: mol_type = other DNA
ttctttttccagagtacttgtcagttctgccacgaagaaagtcaaatcctccagtttatggagaattactattct

SEQ ID NO: 388636 - DNA, 75 bp, synthetic construct
  source 1..75: mol_type = other DNA
tcatcaggtaaaaactgcgctggcaatgacgcaaaaagcggctattggcaagctggcggcaagtcttgttcagcc

SEQ ID NO: 388637 - DNA, 75 bp, synthetic construct
  source 1..75: mol_type = other DNA
aacgataatcaggtcaaactgaccgtccaggataatggctgcggcgtgcctgaaaatgccatccgcagcaatcac

SEQ ID NO: 388638 - DNA, 75 bp, synthetic construct
  source 1..75: mol_type = other DNA
ttatgcggcaatggataacccgaccaacgaaaacctgtcccgctattatactgcgcaacgtttaatgctggatat

SEQ ID NO: 388639 - DNA, 75 bp, synthetic construct
  source 1..75: mol_type = other DNA
accgttaataaatccgaaatggaatcagacccattcttacttcaaaaaataatggaccaaaaactcgaaggctat

SEQ ID NO: 388640 - DNA, 75 bp, synthetic construct
  source 1..75: mol_type = other DNA
aatacccgaaccgcgacaaaccctataccgaagacctggggaaaatcactttccgcccgtccatcacggcttatg

SEQ ID NO: 388641 - DNA, 75 bp, synthetic construct
  source 1..75: mol_type = other DNA
ggtggcgacggatgttaaagaagggatcgatcttcaggcgctggaactggcgttgcaggagtatccggtgaaagc

SEQ ID NO: 388642 - DNA, 75 bp, synthetic construct
  source 1..75: mol_type = other DNA
gtttccgcttcaacaactcaatcgttccctggcccaggtaagcaaaaccgcaacggcgatgagcgtgattgaaaa

SEQ ID NO: 388643 - DNA, 75 bp, synthetic construct
  source 1..75: mol_type = other DNA
gaaagtcaggggcatattatcgcgcgaccgcagtcgggttattacgttgcaccacaggcattaaaaatgccgaaa

SEQ ID NO: 388644 - DNA, 75 bp, synthetic construct
  source 1..75: mol_type = other DNA
ggactgaaactcagcaaagttctggcgggcagcctcgttcgcggttttatgagcgctgcacgtgccgttctctgg

SEQ ID NO: 388645 - DNA, 75 bp, synthetic construct
  source 1..75: mol_type = other DNA
tgggtttcagaacagcacaaataaaaggcaattatgtgtattcctataatagtcgtataaaaattaaattagatg

SEQ ID NO: 388646 - DNA, 75 bp, synthetic construct
  source 1..75: mol_type = other DNA
atgaatcgaaaggaaaagcagcatatcatttctataaaaaagtattactctcagattaatgaactgggtctttct

SEQ ID NO: 388647 - DNA, 75 bp, synthetic construct
  source 1..75: mol_type = other DNA
tcggtggccatcttatcgacgggttaataaacggcatcaaaaacaaatgggagtcgctcaaaactaccgtcacag

SEQ ID NO: 388648 - DNA, 75 bp, synthetic construct
  source 1..75: mol_type = other DNA
gcactgggggaaggcggtaaactccgctggctggtgacaggctttggtgctgtcgccagaggagccagaacactg

SEQ ID NO: 388649 - DNA, 75 bp, synthetic construct
  source 1..75: mol_type = other DNA
tcggtggccatcttatcgacgggctgataaacggcatcaaaaacaaatgggagtcgctcaaaaccaccgtcacag

SEQ ID NO: 388650 - DNA, 75 bp, synthetic construct
  source 1..75: mol_type = other DNA
aactttattttggacgggaaaaaccgctgcctgcgaaagcgtgggatcgccacgatggcgttttgcattgctctt

SEQ ID NO: 388651 - DNA, 75 bp, synthetic construct
  source 1..75: mol_type = other DNA
gaaatatgacgataaaacccgtaagactctgggagagcaaatcaaagggtggtcgctcaaatacaaccagtatca

SEQ ID NO: 388652 - DNA, 75 bp, synthetic construct
  source 1..75: mol_type = other DNA
cagttttcgttccgcgatgagcagtacccggcgtactctggattctctcggcgacacctcacgccgactgacgga

SEQ ID NO: 388653 - DNA, 75 bp, synthetic construct
  source 1..75: mol_type = other DNA
taaagcctttgcggctgcgctgaaatatttcggcgttactctgccggcaaagttcaccgacttcggtggccatct

SEQ ID NO: 388654 - DNA, 75 bp, synthetic construct
  source 1..75: mol_type = other DNA
gaactctgctaatacggttgctcaaaatgctcaatcgacagctaaccaggcaatccaggatgcggcagaaaaagc

SEQ ID NO: 388655 - DNA, 75 bp, synthetic construct
  source 1..75: mol_type = other DNA
aatactgctgcgtctactgcacaaaacgcgcaaacagccgcgaataaagcgcagacaacagcaaatgaggccaat

SEQ ID NO: 388656 - DNA, 75 bp, synthetic construct
  source 1..75: mol_type = other DNA
gatggcatgtacgctgggctttggcgcgatagtctttacacagcgagccgtattttttgcacctatcggcgaagc

SEQ ID NO: 388657 - DNA, 75 bp, synthetic construct
  source 1..75: mol_type = other DNA
gcattcctgggtactactgtcaccagtaatgacgatacgttagcgctgcagagttcagcggcaggctctgcccaa

SEQ ID NO: 388658 - DNA, 75 bp, synthetic construct
  source 1..75: mol_type = other DNA
ttgacctttcctgacacttcccttgttcgcaataatattctgggcggtgttattcattttaaaggtgaagtggta

SEQ ID NO: 388659 - DNA, 75 bp, synthetic construct
  source 1..75: mol_type = other DNA
tgccgttccaggctcgttatattgcactcgggcagtccgtagctggtactgcaaacgctgatgcgaccttcaaag

SEQ ID NO: 388660 - DNA, 75 bp, synthetic construct
  source 1..75: mol_type = other DNA
acgcgctccagtcgcccctcgactggtttaattttttcgatttctggcaactgccggaaattcaggacaaggagt

SEQ ID NO: 388661 - DNA, 75 bp, synthetic construct
  source 1..75: mol_type = other DNA
gcgcggcagagtgaagtgaaaggattatggggaatgcgcctgatgctgctggtctggcgtctgctgggaagaacg

SEQ ID NO: 388662 - DNA, 75 bp, synthetic construct
  source 1..75: mol_type = other DNA
ccgaagtgatggtgcgcctctactggcagggaaacaccagctatttcgtgccgacccgcgtcacctatccgctgg

SEQ ID NO: 388663 - DNA, 75 bp, synthetic construct
  source 1..75: mol_type = other DNA
gaaaatgattggtggaccgattggtggcatgatttcagataagatcctgaaatcgccgagtaaatatctatgcta

SEQ ID NO: 388664 - DNA, 75 bp, synthetic construct
  source 1..75: mol_type = other DNA
atcagtgatacgaaaacagagctgaataccaatatcaacaatgccaaaaatgagtcaattagcacatcaaaaaac

SEQ ID NO: 388665 - DNA, 75 bp, synthetic construct
  source 1..75: mol_type = other DNA
cgttatattgctctcgggcagtccgtagctggtactgcaaacgcagatgcgaccttcaaagttcaatatctataa

SEQ ID NO: 388666 - DNA, 75 bp, synthetic construct
  source 1..75: mol_type = other DNA
aaggtgtttgaggactttgtcagctgcagtgtgattgccctggagaaccggcttcagttcagtgaagcacgggag

SEQ ID NO: 388667 - DNA, 75 bp, synthetic construct
  source 1..75: mol_type = other DNA
tacgtatggcctcagaaaaaattttatctgttaacaaagaaaatgatagaatcttgggtaagaaggtatgttata

SEQ ID NO: 388668 - DNA, 75 bp, synthetic construct
  source 1..75: mol_type = other DNA
cgccgtcgtgtgttgcatacgtttgcgcattaccagggcaactggcccggtcgtttacgtcatgtcctgaatcag

SEQ ID NO: 388669 - DNA, 75 bp, synthetic construct
  source 1..75: mol_type = other DNA
gcgtcagggaagataacgaagaccgctataaacgatgctttgcgccgtatgaaaaaatcaggcattaccaagcca

SEQ ID NO: 388670 - DNA, 75 bp, synthetic construct
  source 1..75: mol_type = other DNA
cctggcgttctgttcagacgaagaagggctgttagtggacggtgtgattgcttctgtactgatgaatgatgacta

SEQ ID NO: 388671 - DNA, 75 bp, synthetic construct
  source 1..75: mol_type = other DNA
gtgattttctgggcagtgtgttcatgcaactggaactgggggataaataccgtagtcagtttttcacgccatgga

SEQ ID NO: 388672 - DNA, 75 bp, synthetic construct
  source 1..75: mol_type = other DNA
aggctacaccggttcgtacgacagggtggcagcctttgcccggttgtggcgtcagcagcagacggtcagcaaaca

SEQ ID NO: 388673 - DNA, 75 bp, synthetic construct
  source 1..75: mol_type = other DNA
ttataagacgatggtatttccgtgaaggattgtcgaaacgggagattgccagacgtactggtttatccagaaata

SEQ ID NO: 388674 - DNA, 75 bp, synthetic construct
  source 1..75: mol_type = other DNA
ttattacaagcaaaactgaaggcttacctactgtaattttagatgcggctgtgtatggagttaattttatttctc

SEQ ID NO: 388675 - DNA, 75 bp, synthetic construct
  source 1..75: mol_type = other DNA
tggcggagccagcctgtggcgcaggatgtatggtgctcgcatttgccactgtgctgcgcgatgccggttattcac

SEQ ID NO: 388676 - DNA, 75 bp, synthetic construct
  source 1..75: mol_type = other DNA
tgccgaaggccaacacattgccgagcatccaagattgtttggcagtggccacgctcggcgtggccacacacaata

SEQ ID NO: 388677 - DNA, 75 bp, synthetic construct
  source 1..75: mol_type = other DNA
gtggcagcacatctgcaactgagcattgaacccatcagcgataccagccgctacgaacaattaggaggtggttat

SEQ ID NO: 388678 - DNA, 75 bp, synthetic construct
  source 1..75: mol_type = other DNA
gcctccgggaaaatcaccaagacagccatcaatgacgctttacgtcgcatgaagaagtcaggcctgacaaaacca

SEQ ID NO: 388679 - DNA, 75 bp, synthetic construct
  source 1..75: mol_type = other DNA
tatgggaaatttctgctgaacgcatgaaaatgcgccgtcctcatatcatcccgctatctacccaagcgttagcca

SEQ ID NO: 388680 - DNA, 75 bp, synthetic construct
  source 1..75: mol_type = other DNA
tttaccgggcgtttaccaaagagcatccacataaaccccacgccattattgcaactgtagaatccaaatcaggta

SEQ ID NO: 388681 - DNA, 75 bp, synthetic construct
  source 1..75: mol_type = other DNA
gccgcgcgaagcctgcggaaaaaacgtataccaaagccgatggcaacggtctgtctctacaaattgagcccaacg

SEQ ID NO: 388682 - DNA, 75 bp, synthetic construct
  source 1..75: mol_type = other DNA
cataacctgttgttgttgcatgacaaaccagagcgaccgaagcgtgaacataagggcaagatagcggtggcagaa

SEQ ID NO: 388683 - DNA, 75 bp, synthetic construct
  source 1..75: mol_type = other DNA
cagcatatgggtatcgccgtgtctgggcgatactcagacggcagtcccgaaatgaaggcttgccgttcgtgaatg

SEQ ID NO: 388684 - DNA, 75 bp, synthetic construct
  source 1..75: mol_type = other DNA
acgttcgcactggactgttgcgctcgtgaagccatagactgggccgcaagcacggggggttatgaccaagcaacg

SEQ ID NO: 388685 - DNA, 75 bp, synthetic construct
  source 1..75: mol_type = other DNA
acctgacggatacgctatctgcgaactcggtgatctttatggctttgtttcctgcgtcaataacgttctcgtcaa

SEQ ID NO: 388686 - DNA, 75 bp, synthetic construct
  source 1..75: mol_type = other DNA
aacatttaaaggcttcctatccgattgaaatgctagatttaatacaaaaaaaacacaaggtcggacagattgttt

SEQ ID NO: 388687 - DNA, 75 bp, synthetic construct
  source 1..75: mol_type = other DNA
atctgaaaaatattcgctcaggtacacctgcaacgattcgcctgatgagtgacagcggcaaaactttcgagggta

SEQ ID NO: 388688 - DNA, 75 bp, synthetic construct
  source 1..75: mol_type = other DNA
cgcatttacttatcctgacaggtctacgaactggagaactacgagcaggtgagtggcgagaggtggattttgata

SEQ ID NO: 388689 - DNA, 75 bp, synthetic construct
  source 1..75: mol_type = other DNA
gagctacagttggctcacgtcgataagaactcaattcgtgggacctataaccatgctcagtatctagaagggagg

SEQ ID NO: 388690 - DNA, 75 bp, synthetic construct
  source 1..75: mol_type = other DNA
tgagtgatatggctttgactgtgttggtaaggcgcatcggctatgcaggtcgcgttacagggcatggattccgcc

SEQ ID NO: 388691 - DNA, 75 bp, synthetic construct
  source 1..75: mol_type = other DNA
caacgatcctgaaaaccccttgctggatctggtgtgtgccaaaataaccgcgtgggaagaatcagcgcccgaatt

SEQ ID NO: 388692 - DNA, 75 bp, synthetic construct
  source 1..75: mol_type = other DNA
gaaagcggaagaggcagctaaaaaggctaaggaagccgcagaaaaagcacagaaagaacgtgaggatgcaatcaa

SEQ ID NO: 388693 - DNA, 75 bp, synthetic construct
  source 1..75: mol_type = other DNA
tgccgggcgtgagtacgttgaaagccagttcagtggcggtcaaaactaccttgtctacgccatcattatggccat

SEQ ID NO: 388694 - DNA, 75 bp, synthetic construct
  source 1..75: mol_type = other DNA
gtgtgcggtaaaggttcccgctccaccgaagagatgaatttgcccaaaaatctgagcttcctgcgcgacagttcc

SEQ ID NO: 388695 - DNA, 75 bp, synthetic construct
  source 1..75: mol_type = other DNA
aagttgtcgtgatgtcgcgtaacagccctgataccggtatccgtgtcctaaataccattcgccatgacaaactcg

SEQ ID NO: 388696 - DNA, 75 bp, synthetic construct
  source 1..75: mol_type = other DNA
agatggtcatggaagctatcaagcgtcatgctaaattagttgctcaaacggtagaagacgcacagcgccgtaaga

SEQ ID NO: 388697 - DNA, 75 bp, synthetic construct
  source 1..75: mol_type = other DNA
tagctctgggcttaatctctcaggaagacgcagccgcgaaacgccaggcgctaatcgatcagaatactgaaaacg

SEQ ID NO: 388698 - DNA, 75 bp, synthetic construct
  source 1..75: mol_type = other DNA
cctctgggtttaagcgcaacctatggacaaacaggaaacaaggttgcagccggaaccgtccagtcagtcattggt

SEQ ID NO: 388699 - DNA, 75 bp, synthetic construct
  source 1..75: mol_type = other DNA
ttcgctgaaacgggtcgacgaatcactgacggcaatgtttggcgacctgaataagcaggccagcgagcttctcgg

SEQ ID NO: 388700 - DNA, 75 bp, synthetic construct
  source 1..75: mol_type = other DNA
cgcggcacgaccctgaaatggcgactggcagattcccatatgcagtacggcattttgctggcgaccctgcctcag

SEQ ID NO: 388701 - DNA, 75 bp, synthetic construct
  source 1..75: mol_type = other DNA
agataacaggtggcaggatgtcgttgctggcactggagcagatggcagaacaggggaaagcatggcccctgattg

SEQ ID NO: 388702 - DNA, 75 bp, synthetic construct
  source 1..75: mol_type = other DNA
gttgttatgccaacaggcggttgcaccgttgatagtcgtaatgtcaccgtgaatctcccggactttcctggaagc

SEQ ID NO: 388703 - DNA, 75 bp, synthetic construct
  source 1..75: mol_type = other DNA
aataatgtgacctaccccttcccgttgacgacaaataccaatgtattggatattggtgataagacaccgatgcca

SEQ ID NO: 388704 - DNA, 75 bp, synthetic construct
  source 1..75: mol_type = other DNA
actggctcgctcaggtgcaaataacgttggcctgaccgcgttacgtggtctggctggagttgctgatatttacaa

SEQ ID NO: 388705 - DNA, 75 bp, synthetic construct
  source 1..75: mol_type = other DNA
tacgacgcagtctgcggtacgtgttgaagaaggtaccctgaaaggcgatgttgcggatatttttccttatgcttc

SEQ ID NO: 388706 - DNA, 75 bp, synthetic construct
  source 1..75: mol_type = other DNA
ggacgctggtgaatgccaccgatggcgtgacgctgacaggcgagcttaataccagccttgaaactgacagcctga

SEQ ID NO: 388707 - DNA, 75 bp, synthetic construct
  source 1..75: mol_type = other DNA
gtgttgaacggtaatactgctggcaataccacggttgtgattaatcccattacagggattggtgagccgacatct

SEQ ID NO: 388708 - DNA, 75 bp, synthetic construct
  source 1..75: mol_type = other DNA
gctataacgaagcgctaatcactggcgaaagggggatcgagaagattgattccgtactgggtaagccagaattag

SEQ ID NO: 388709 - DNA, 75 bp, synthetic construct
  source 1..75: mol_type = other DNA
ctcgtgaaggcatgacagccacaaatccaaaaacggggcagcaaatcatttataggaatgggaaatggcaaccga

SEQ ID NO: 388710 - DNA, 75 bp, synthetic construct
  source 1..75: mol_type = other DNA
caaggtgatgttgcggatatcttcccttatgcttcgtcgctatgggtcggtgacggggcaacgttcgttactggc

SEQ ID NO: 388711 - DNA, 75 bp, synthetic construct
  source 1..75: mol_type = other DNA
gcgatgggacgctggtgaatgccaccgatggcgtgacgttgacaggtgagcttaataccaaccttgaaactgaca

SEQ ID NO: 388712 - DNA, 75 bp, synthetic construct
  source 1..75: mol_type = other DNA
cgcaatctattcttctggtactaatgatactggtgccgtcgatttacgtgtcactaacgccatgtttcgcaataa

SEQ ID NO: 388713 - DNA, 75 bp, synthetic construct
  source 1..75: mol_type = other DNA
gcaaatgcatttctggcctttagcaataagcaaatagaggatttgatcgaaactggctttttgattgaggtgaaa

SEQ ID NO: 388714 - DNA, 75 bp, synthetic construct
  source 1..75: mol_type = other DNA
ggctgcaatacgcgtggtttaacaatgatgtttccgaacaagacgatggcacagatcattaccactcgtcgggga

SEQ ID NO: 388715 - DNA, 75 bp, synthetic construct
  source 1..75: mol_type = other DNA
aagcagggggcctggctggataactggttgcagtacgcgtggtttagcaatgatgtttctgaacatgaagatggc

SEQ ID NO: 388716 - DNA, 75 bp, synthetic construct
  source 1..75: mol_type = other DNA
ctggcgatacgctgacggtaaacggtgattacaccggcggcggtacgttactgttcgacagcgaattaaacggcg

SEQ ID NO: 388717 - DNA, 75 bp, synthetic construct
  source 1..75: mol_type = other DNA
gcggtgccgtattcagccttactgacaggagtattactgaaacgcgtgatattaggctcttgtgtgggtgatgct

SEQ ID NO: 388718 - DNA, 75 bp, synthetic construct
  source 1..75: mol_type = other DNA
tgtgtgctgattgccatgaacgttgtgcagtacacactaattaactggttgccaacaatattcatgacccagggg

SEQ ID NO: 388719 - DNA, 75 bp, synthetic construct
  source 1..75: mol_type = other DNA
tttgccatcgtcgcgtttggcttgcttgtctgctggagtaatgccgttggtggcttgatcctcgcgcagctgaaa

SEQ ID NO: 388720 - DNA, 75 bp, synthetic construct
  source 1..75: mol_type = other DNA
atttaggcggaacagtcgatgccaacaatgacattacggcaaaacttttaccggaaaactctcgctctcatgcca

SEQ ID NO: 388721 - DNA, 75 bp, synthetic construct
  source 1..75: mol_type = other DNA
gcgtgaatttgccgaaacgggcgtggactttatctccgtcggtgcgctaactaaacacgtacaagcactcgacct

SEQ ID NO: 388722 - DNA, 75 bp, synthetic construct
  source 1..75: mol_type = other DNA
gatactgccgatcaatattctagcctcgcagataaggttactgatggaagagttctgaatgcagggaaagccatt

SEQ ID NO: 388723 - DNA, 75 bp, synthetic construct
  source 1..75: mol_type = other DNA
ttactattttatgccatttttatttataagtgatctccatgataaaggacagtatattgaaaggataagatacgt

SEQ ID NO: 388724 - DNA, 75 bp, synthetic construct
  source 1..75: mol_type = other DNA
attaaaaacaaaagacaaattggattcatttaaagcagttagagatgaattacatttttttctgtcacaacaggg

SEQ ID NO: 388725 - DNA, 75 bp, synthetic construct
  source 1..75: mol_type = other DNA
aagccgttcagccaccaccggagccggtggtagagccagaaccggaacctgagccgatccctgaaccgccaaaag

SEQ ID NO: 388726 - DNA, 75 bp, synthetic construct
  source 1..75: mol_type = other DNA
cgaatgttccagcgccggacaagtaaccgtcgatgatctcccggcagaggaagacgccggaactgaacaagagac

SEQ ID NO: 388727 - DNA, 75 bp, synthetic construct
  source 1..75: mol_type = other DNA
acgtcataccattaatccaggcgaagccactggtggacagccttatgtgtggttgaaaatggtttccccggtgga

SEQ ID NO: 388728 - DNA, 75 bp, synthetic construct
  source 1..75: mol_type = other DNA
ctaccccagccagtggttgagagttagcaatcgccgtgtggtgttgttttcattttctggaattgccagagaggg

SEQ ID NO: 388729 - DNA, 75 bp, synthetic construct
  source 1..75: mol_type = other DNA
gcgcgaatttgccgaaacaggcgtggactttatctctgtcggcgcactgaccaaacacgtacaggcactcgacct

SEQ ID NO: 388730 - DNA, 75 bp, synthetic construct
  source 1..75: mol_type = other DNA
tttacttttctgggggttaaagagtttgccagaagggtggatcaacattgctgaacgttggcaatggctatcatt

SEQ ID NO: 388731 - DNA, 75 bp, synthetic construct
  source 1..75: mol_type = other DNA
agggctggactcaatattgcacacatggccgatgttatggatccgaagtccgttaaactgggaacatcatcagcc

SEQ ID NO: 388732 - DNA, 75 bp, synthetic construct
  source 1..75: mol_type = other DNA
ttccctggttattactggtaggatggcgactaaacgcatggcgaacgttgcctgcgctgtgcgtggctggaggca

SEQ ID NO: 388733 - DNA, 75 bp, synthetic construct
  source 1..75: mol_type = other DNA
gccgatggtgtaaaggatggtcgttttatcgtgacgcctcctctgtttgcgatgaagggaaaaaaagagaatacc

SEQ ID NO: 388734 - DNA, 75 bp, synthetic construct
  source 1..75: mol_type = other DNA
tgttgcgcactggccaacaaattagcccggatagcgtgggtaatcacaacacagcagactgtgttcgaaaggtaa

SEQ ID NO: 388735 - DNA, 75 bp, synthetic construct
  source 1..75: mol_type = other DNA
agaatcgagaatcagtcaggaaggttggcggattgggtcagggcgttgttggcaagaaaacactccagcgtagta

SEQ ID NO: 388736 - DNA, 75 bp, synthetic construct
  source 1..75: mol_type = other DNA
ggctggcaatggtcattgcgcgaaacggcaaagcgattctctatgacacgggactggcctggcccgaaggggata

SEQ ID NO: 388737 - DNA, 75 bp, synthetic construct
  source 1..75: mol_type = other DNA
tggagcagttgggatgtatggatatgctgcctggcggcaattttactgatggatcccgttgctattctttcgcaa

SEQ ID NO: 388738 - DNA, 75 bp, synthetic construct
  source 1..75: mol_type = other DNA
gggttatggtttcttgccgaccggtctttggctttacttttctgggggttaaagagtttgccggaagggtggatc

SEQ ID NO: 388739 - DNA, 75 bp, synthetic construct
  source 1..75: mol_type = other DNA
aataacgctcctgctcatgccagtgcaaatagtcatatttcatggcattagcctgacctcgtttatagcaaatct

SEQ ID NO: 388740 - DNA, 75 bp, synthetic construct
  source 1..75: mol_type = other DNA
tctctcgcaaagtttatggctctctgccgctgcggtcgcggcactgattttttggtatcagtggtttccctgtcc

SEQ ID NO: 388741 - DNA, 75 bp, synthetic construct
  source 1..75: mol_type = other DNA
atggcgattgccttcgaacaaagttaagcatcgctatcaacaacagggttatcaatggctggataccccacatca

SEQ ID NO: 388742 - DNA, 75 bp, synthetic construct
  source 1..75: mol_type = other DNA
atgacccttgatttacctcgccgcttcccatggccgacgttactttcggtctgcattcatggtgctgttgtggcg

SEQ ID NO: 388743 - DNA, 75 bp, synthetic construct
  source 1..75: mol_type = other DNA
ctcgttggcagggatcagaacactggtactcattcggactaatgcccttctcgtgtcaggtgatgctgccaactt

SEQ ID NO: 388744 - DNA, 75 bp, synthetic construct
  source 1..75: mol_type = other DNA
aggcaacggctgaaacagtggaaccggacacaactgaacatcatcaggacacgcagccgctggatgctcagtcac

SEQ ID NO: 388745 - DNA, 75 bp, synthetic construct
  source 1..75: mol_type = other DNA
ttaccttcagagcctgcttactgctgtgcgcgccgcgcatcatgaactggataaactgacgaactatcaccttag

SEQ ID NO: 388746 - DNA, 75 bp, synthetic construct
  source 1..75: mol_type = other DNA
gagtctacccgaccctccgtcttcccgatttgcgcggtgagtttatccgtggatgggatgacggacgaaaggttg

SEQ ID NO: 388747 - DNA, 75 bp, synthetic construct
  source 1..75: mol_type = other DNA
gccttgaacctggcgaaaaaagtatggtacgtctttccagtactccggaaataaataagctccctcaggatagag

SEQ ID NO: 388748 - DNA, 75 bp, synthetic construct
  source 1..75: mol_type = other DNA
atcgatgacactgaatatcgccaatgataacaaacagctcccctacctggcgcaggcctggatagagaatgagaa

SEQ ID NO: 388749 - DNA, 75 bp, synthetic construct
  source 1..75: mol_type = other DNA
ttatggcatcaattctagcgatgctgctattggaaacgcgagttacgttgagcaatggtggaattatgaaagtgt

SEQ ID NO: 388750 - DNA, 75 bp, synthetic construct
  source 1..75: mol_type = other DNA
gtgaagaaaatcatttgtctgatcatcacgctactgctaacactccccgcttacgcgaagttaactgcccatgaa

SEQ ID NO: 388751 - DNA, 75 bp, synthetic construct
  source 1..75: mol_type = other DNA
gaagcccgcatcaacgccatgctggagggattagcacagaaaaaggatttgatatttgtgcgcaacggtgatgaa

SEQ ID NO: 388752 - DNA, 75 bp, synthetic construct
  source 1..75: mol_type = other DNA
cgatgacccggacggaactattccggatgatgtggagaaaagcgaatccccggacagcgacgatgactgttctga

SEQ ID NO: 388753 - DNA, 75 bp, synthetic construct
  source 1..75: mol_type = other DNA
tgatattagctggaagctgcagttgaatcagtggacaattttttacgagccacgggcgctgtgctggatattaat

SEQ ID NO: 388754 - DNA, 75 bp, synthetic construct
  source 1..75: mol_type = other DNA
gtggacgattttttacgagccacgggcactgtgctggatattaatgcctgaaacgttaaaagggctgtggaaaca

SEQ ID NO: 388755 - DNA, 75 bp, synthetic construct
  source 1..75: mol_type = other DNA
ggcccggcgtgtaatcggcagcacattgttgctaaagggactggaaggggaggtggcagtcatcacatccccgga

SEQ ID NO: 388756 - DNA, 75 bp, synthetic construct
  source 1..75: mol_type = other DNA
cagtcgcaacatcgaccgtctacgtgcggaagaggatgtccgcaacctgcaagttgctcgcgctgctcaggcaga

SEQ ID NO: 388757 - DNA, 75 bp, synthetic construct
  source 1..75: mol_type = other DNA
actcaggattggaagaccagtcgtaacagataaagtctacgatccaagccaggataaggcagaccctgacgccaa

SEQ ID NO: 388758 - DNA, 75 bp, synthetic construct
  source 1..75: mol_type = other DNA
aaaattgacaaaagttttgtcgatcgttgtctgaccgaaaaacgcatccttgccttacttgaagccattaccagc

SEQ ID NO: 388759 - DNA, 75 bp, synthetic construct
  source 1..75: mol_type = other DNA
gcatcagcccggctgaattcgacaagttcatctccacctggatgaaaacagactatgtggatcagggattgctgg

SEQ ID NO: 388760 - DNA, 75 bp, synthetic construct
  source 1..75: mol_type = other DNA
tacaggcatcactcgtacgccttccggtgctaacgctggcggcggaaatcttaccgatcgtggcgaaggctttac

SEQ ID NO: 388761 - DNA, 75 bp, synthetic construct
  source 1..75: mol_type = other DNA
cgacactgaggaccagaatcagtccaaagtggaacaaattgccccagaagcgggacaaaacagcccggatacgca

SEQ ID NO: 388762 - DNA, 75 bp, synthetic construct
  source 1..75: mol_type = other DNA
atcatgtcctcctgtaacatatataactacaccgggaactccagctatacccggaaccccggatatggaatttat

SEQ ID NO: 388763 - DNA, 75 bp, synthetic construct
  source 1..75: mol_type = other DNA
acacgacccggcatacccggatgaacagccgactgcgccgctggcgcgctacacgtacacggccagcggagaact

SEQ ID NO: 388764 - DNA, 75 bp, synthetic construct
  source 1..75: mol_type = other DNA
ccacagggcagcttgtccacagtgaagacgagggacttatcaccctctggcactacgatgcgtcggaccgcatca

SEQ ID NO: 388765 - DNA, 75 bp, synthetic construct
  source 1..75: mol_type = other DNA
ccttccgctccatcacgagaggtaaaaaacccggcagcttcagcgagaactgatatcagggctaattactggagt

SEQ ID NO: 388766 - DNA, 75 bp, synthetic construct
  source 1..75: mol_type = other DNA
caactgcgtaaagcggatcctgcggtctggggcgatccttctgttcttgatccacaaaaactgcctgccgggcag

SEQ ID NO: 388767 - DNA, 75 bp, synthetic construct
  source 1..75: mol_type = other DNA
ttgattatgctgatgccagatcccgctgcattaaaagaagcgccgaacgatgctactttcgcccagattactgca

SEQ ID NO: 388768 - DNA, 75 bp, synthetic construct
  source 1..75: mol_type = other DNA
gataccggacatggcttcttttgccagtggtgatggatggatgaaattacccaacgggaaaatcctgcaatatgg

SEQ ID NO: 388769 - DNA, 75 bp, synthetic construct
  source 1..75: mol_type = other DNA
tgcgtaaaaaaagattattatgaaaatttaatttatcaaaccgatcgggtacgtggtgaaggcattcaatcaatt

SEQ ID NO: 388770 - DNA, 75 bp, synthetic construct
  source 1..75: mol_type = other DNA
tgtgcgcaactctgggcttaggtggattaactgcacaggcacatgctgcatctggtgatagtaccgtatcccttg

SEQ ID NO: 388771 - DNA, 75 bp, synthetic construct
  source 1..75: mol_type = other DNA
cgcagaatctgccgccggtactggcggaaccacatgcaggctgggtaaatgcactggaacaagaatggctacgcc

SEQ ID NO: 388772 - DNA, 75 bp, synthetic construct
  source 1..75: mol_type = other DNA
gtgatcctcatcgtggtaacttcattattaaaaatggtgaagttcgaattattgatctctctgggaaacgtgctt

SEQ ID NO: 388773 - DNA, 75 bp, synthetic construct
  source 1..75: mol_type = other DNA
gataccgattacggtaaattgatacttaaggttttctctccgaaaattaagcgcaatgagcgtttttttaaatct

SEQ ID NO: 388774 - DNA, 75 bp, synthetic construct
  source 1..75: mol_type = other DNA
gcagtaaaacgcattcaaaccgaagccgcagccggacgtaaaacgggcggctcggtagatctcttgtgggtaaat

SEQ ID NO: 388775 - DNA, 75 bp, synthetic construct
  source 1..75: mol_type = other DNA
gggcggcgcacaactgacgtttatcgcccgccgcgatgttacgccacagccaccacaaacgccgcaagccttact

SEQ ID NO: 388776 - DNA, 75 bp, synthetic construct
  source 1..75: mol_type = other DNA
atgcgccattatgtgtggttgctgggaatgttatcgctgttttctttgacaacgcatgccagcgactggcaggaa

SEQ ID NO: 388777 - DNA, 75 bp, synthetic construct
  source 1..75: mol_type = other DNA
gcaatttggcggtaattatccagaagggtccggccatgcgattgctgattacgatggaatatcagcacaccagcc

SEQ ID NO: 388778 - DNA, 75 bp, synthetic construct
  source 1..75: mol_type = other DNA
tacccctggctggcaaaggcttatccgaccaataaattaccggatttacggggcgaatttatccgtggctgggat

SEQ ID NO: 388779 - DNA, 75 bp, synthetic construct
  source 1..75: mol_type = other DNA
ttgtcaaaaaccttggtttgggggaaggctctgcgctgcccgttggtgtgcccgttccgtggccctcagcaacac

SEQ ID NO: 388780 - DNA, 75 bp, synthetic construct
  source 1..75: mol_type = other DNA
atacggtcaatttccatcagaaaaacatgcagaaaaaaatcaatgcaccgaataagacgcaggttgcctgttacg

SEQ ID NO: 388781 - DNA, 75 bp, synthetic construct
  source 1..75: mol_type = other DNA
tctgcgctgcatgattattgatgatccggtagctggtacgccattagtggtgccgctcggacgaacggcaccgtc

SEQ ID NO: 388782 - DNA, 75 bp, synthetic construct
  source 1..75: mol_type = other DNA
tctgcgctgcatgattattgacgatccggttgccggaacgccgctcgtggtgccgctcggacgaacggcaccttc

SEQ ID NO: 388783 - DNA, 75 bp, synthetic construct
  source 1..75: mol_type = other DNA
tggcaaatataccgttgcggaaaatctgactgtagaaattcctgatggtcacttcacggcaattatcggaccaaa

SEQ ID NO: 388784 - DNA, 75 bp, synthetic construct
  source 1..75: mol_type = other DNA
agaggggctttttacgatgcaggaacacgatcagcgagaatgccgaataacacaactactatagacaaaaccgat

SEQ ID NO: 388785 - DNA, 75 bp, synthetic construct
  source 1..75: mol_type = other DNA
gcttataactggacattcgacgcatctcgctcagttcgcacagcatctgaaacccgctcccgtaacatcgccttt

SEQ ID NO: 388786 - DNA, 75 bp, synthetic construct
  source 1..75: mol_type = other DNA
ctgcgcttttttttgatgcttccttgatggttccaactgcaaatgaaaaccgcccacgtaacctgtcatttaatt

SEQ ID NO: 388787 - DNA, 75 bp, synthetic construct
  source 1..75: mol_type = other DNA
tttattgtggaatgatgacttatttagcgaagcgcagccgctatgggaagccgcgcgtgcacatggtatacgccg

SEQ ID NO: 388788 - DNA, 75 bp, synthetic construct
  source 1..75: mol_type = other DNA
atacggtcaatttccaccagaaaaacatgcagaaaaaattaatgcaccaaataagacccaggttgcctgttacgc

SEQ ID NO: 388789 - DNA, 75 bp, synthetic construct
  source 1..75: mol_type = other DNA
gtctaccatgaaatagagcttcaggctcagcagctggagtacgattactattcgttatgtgttcgccacccggta

SEQ ID NO: 388790 - DNA, 75 bp, synthetic construct
  source 1..75: mol_type = other DNA
ttatatcatgcttatcgaatatatcgatggcgtagagttgtgtgatatccccgatattgatgaaacgttaaaaaa

SEQ ID NO: 388791 - DNA, 75 bp, synthetic construct
  source 1..75: mol_type = other DNA
tccaataagcaagcagggatatatgccagtgttcctttaagtaagcttttacctagaactgatccgacgagtagt

SEQ ID NO: 388792 - DNA, 75 bp, synthetic construct
  source 1..75: mol_type = other DNA
attattggaatagccgagaggtgagtcgaaattactcgctgactcatagctttagctggaatgatatttatttca

SEQ ID NO: 388793 - DNA, 75 bp, synthetic construct
  source 1..75: mol_type = other DNA
gtgcgcaatttagttttatcaattcgcatatcctatcgtgacaaagtaactagaaaaactaaagaggttggtgtg

SEQ ID NO: 388794 - DNA, 75 bp, synthetic construct
  source 1..75: mol_type = other DNA
tctggccggtgttccggagaaaggtcggcttacggtgaacaatggaggaaaacagtgtcatgtcgattttagcct

SEQ ID NO: 388795 - DNA, 75 bp, synthetic construct
  source 1..75: mol_type = other DNA
gtattgatggtgaaaatattgacttgtctgtattctcacatcccggaggtggaattgaaggagagcaggacgtca

SEQ ID NO: 388796 - DNA, 75 bp, synthetic construct
  source 1..75: mol_type = other DNA
tcttcctagtgacaccgtccttggtgaaacatctaaaactgcagtgcctgctaaaggtgcagtcgttgtgctgga

SEQ ID NO: 388797 - DNA, 75 bp, synthetic construct
  source 1..75: mol_type = other DNA
gtaaaaagttcgctgggcggacgttgggcatttattactgcctatacctactggttcgtaaacctgttctttttc

SEQ ID NO: 388798 - DNA, 75 bp, synthetic construct
  source 1..75: mol_type = other DNA
ctgacgctgattaacccgacaccctattacctgacggtaacagagttgaatgccggagcccgggttcttgaaaat

SEQ ID NO: 388799 - DNA, 75 bp, synthetic construct
  source 1..75: mol_type = other DNA
aagatttcgtcgtagcgcgaattctctgacgctgattaacccgacaccctattacctgacggtaacagagttgaa

SEQ ID NO: 388800 - DNA, 75 bp, synthetic construct
  source 1..75: mol_type = other DNA
gcaccggtattatcgttgtttcaatgctgattgcgatatttgccgtagggtttgtcgcttcgacattcccgactg

SEQ ID NO: 388801 - DNA, 75 bp, synthetic construct
  source 1..75: mol_type = other DNA
ttcctcggcgttaccacctggatctttatggccgcaggtggcgcggagtccgtcgcggtgtacgttaacgacgtc

SEQ ID NO: 388802 - DNA, 75 bp, synthetic construct
  source 1..75: mol_type = other DNA
attaacgtcttcgtcagcagcaaagagttgaaatttaccggcggatcggtgcaggtattccacggcatggcggcg

SEQ ID NO: 388803 - DNA, 75 bp, synthetic construct
  source 1..75: mol_type = other DNA
caaacaaggttgtatttaaagttgattttgcatcattgcagaaagcacgcgatgcagggaagaaatttcaaaaag

SEQ ID NO: 388804 - DNA, 75 bp, synthetic construct
  source 1..75: mol_type = other DNA
gctttcttataaccgcacggaaagtatggatgccagcagcagggaatggctgggctccggcaatcctgacacact

SEQ ID NO: 388805 - DNA, 75 bp, synthetic construct
  source 1..75: mol_type = other DNA
ctatttgtacattaattacactacctgtggggctacaggccgcgaccagtcattcttcttcgatggctaaagata

SEQ ID NO: 388806 - DNA, 75 bp, synthetic construct
  source 1..75: mol_type = other DNA
tgacgcttattggagcagttctcttgcctctgataagcagttttaataatgtagtgactactatgtcatctccag

SEQ ID NO: 388807 - DNA, 75 bp, synthetic construct
  source 1..75: mol_type = other DNA
aagcagtggcacttatctggatccggcactcgtcaaacgtatcgaagttgtccgcgggccaaactccagtctgta

SEQ ID NO: 388808 - DNA, 75 bp, synthetic construct
  source 1..75: mol_type = other DNA
gtgactctggataatgccttcaacaagcttgccatgaatggcaaaggtgtgccgctttcaggcagaactgtcagt

SEQ ID NO: 388809 - DNA, 75 bp, synthetic construct
  source 1..75: mol_type = other DNA
tgaatattaccgccagcagcagtcaccggaaggctctgccacgttatatcctgaaggagatattagtttttcatc

SEQ ID NO: 388810 - DNA, 75 bp, synthetic construct
  source 1..75: mol_type = other DNA
attttcttccccccggagagacaaacggtttaagtctgtggggaaatatcgccagtggtgaccacagcacaggct

SEQ ID NO: 388811 - DNA, 75 bp, synthetic construct
  source 1..75: mol_type = other DNA
cagaacctccggtgttaatgttgtcaacaggagtcatactctgatttttccgggagcccatcagttaagttatgg

SEQ ID NO: 388812 - DNA, 75 bp, synthetic construct
  source 1..75: mol_type = other DNA
tccgtagaccaacgtcaagacaaccttaaagacgttcaggaacgtttaggtgaatccgtagggaataccaaatgg

SEQ ID NO: 388813 - DNA, 75 bp, synthetic construct
  source 1..75: mol_type = other DNA
caatgccggctttaccgccgagcgtgccgggcaattaagtcgtctgacgggaagtcatgttccggcaggaactgg

SEQ ID NO: 388814 - DNA, 75 bp, synthetic construct
  source 1..75: mol_type = other DNA
ccggggagatgaaccaacgccgatgatcctctgtggcgatcgtctttatttgaatcgcatgtggtgtaacgagcg

SEQ ID NO: 388815 - DNA, 75 bp, synthetic construct
  source 1..75: mol_type = other DNA
ggagaactgaaagccgaacgcctgtcccccagggcggcgatttcagtctcaccgacagactggctgatgatgtac

SEQ ID NO: 388816 - DNA, 75 bp, synthetic construct
  source 1..75: mol_type = other DNA
ggtgagattgctgaaaaagcaagctctgcatcttcaaaggctgctggtgcggcttctgaggttgcaaataaagct

SEQ ID NO: 388817 - DNA, 75 bp, synthetic construct
  source 1..75: mol_type = other DNA
tgatgcgcatatttacgttcaatctctgcaaaaatcccgttcatcgtttcgctgtctggtgggataacttcaacg

SEQ ID NO: 388818 - DNA, 75 bp, synthetic construct
  source 1..75: mol_type = other DNA
atgtccaattacactggagcagcctgaaaatggtgttttcattaagaattcaggaaattctgcggtttgcaccct

SEQ ID NO: 388819 - DNA, 75 bp, synthetic construct
  source 1..75: mol_type = other DNA
ggcagtcagtcaccggctgtaccgggcggaagacagaacggaacgtctggtgctggttgcatgcctgctgactgt

SEQ ID NO: 388820 - DNA, 75 bp, synthetic construct
  source 1..75: mol_type = other DNA
gcttaaccttgcctcctgtgatgtggcggctgtagctggtcttgtgatgacggtgctgaccgttggtctggtgtc

SEQ ID NO: 388821 - DNA, 75 bp, synthetic construct
  source 1..75: mol_type = other DNA
tccagcaggggaatctggagctgtataaacaagatgttcgcagaacgcaggatgatatcaccaaccgtctgcgtg

SEQ ID NO: 388822 - DNA, 75 bp, synthetic construct
  source 1..75: mol_type = other DNA
ggaacgatggccggtgttaagctactgatgcccggttatgagtttgcgcagaaaaactcagaattgcaggccgtg

SEQ ID NO: 388823 - DNA, 75 bp, synthetic construct
  source 1..75: mol_type = other DNA
gcctcggcggatgatgcggccggtgcacagattatcatcgcgaaagcgggtggggatgttgatgccattcaggcg

SEQ ID NO: 388824 - DNA, 75 bp, synthetic construct
  source 1..75: mol_type = other DNA
gtggtggaagggctgaaagcggcatttgcgccggtgggggaactgttcacgccacttaagccggtgtttgactgg

SEQ ID NO: 388825 - DNA, 75 bp, synthetic construct
  source 1..75: mol_type = other DNA
gattatctccaaggtcaaaaagatggtcttgaatgggctgcgcagcttgcagaagcaaatcacccacaaactggc

SEQ ID NO: 388826 - DNA, 75 bp, synthetic construct
  source 1..75: mol_type = other DNA
tcctgtaatacaggctgatgtcgcgcaggcaattgaaaaactcaaacggaaattagtggaatgcaatcgctataa

SEQ ID NO: 388827 - DNA, 75 bp, synthetic construct
  source 1..75: mol_type = other DNA
tggcgtcaaccatcggcctcattgtcggtggcgcgctggcgcttactggcatcatcggtgccattggtcttgtag

SEQ ID NO: 388828 - DNA, 75 bp, synthetic construct
  source 1..75: mol_type = other DNA
tcgcttagctggggaattgatcatggtcgatacgtttaatgatgaagtgtttaattactatcttgaacaaaaagg

SEQ ID NO: 388829 - DNA, 75 bp, synthetic construct
  source 1..75: mol_type = other DNA
agagcggaacgtctggcgctgttggcctgcctgctggctgttattccggcccttaaccttgcccccagtgatgca

SEQ ID NO: 388830 - DNA, 75 bp, synthetic construct
  source 1..75: mol_type = other DNA
agagcggaacgtctggcgctgttggcctgcctgctggctgttattccggctcttaaccttgcctccagtgatgca

SEQ ID NO: 388831 - DNA, 75 bp, synthetic construct
  source 1..75: mol_type = other DNA
agagcggaacgtctggcgctgttggcctgcctgctggctgttattccggcacttaaccttgccaccagtgatgca

SEQ ID NO: 388832 - DNA, 75 bp, synthetic construct
  source 1..75: mol_type = other DNA
agagcggaacgtctggcgctgttggcctgcctgctggcggttattccggcacttaaccttgcctccagtgatgca

SEQ ID NO: 388833 - DNA, 75 bp, synthetic construct
  source 1..75: mol_type = other DNA
agagcggaacgtctggcgctgttggcctgcctgctggccgttattccggctcttaaccttgcccccagtgatgca

SEQ ID NO: 388834 - DNA, 75 bp, synthetic construct
  source 1..75: mol_type = other DNA
agagcggaacgtctggcgctgttggcctgcctgctggctgttattccggcgcttaaccttgccgccagtgatgca

SEQ ID NO: 388835 - DNA, 75 bp, synthetic construct
  source 1..75: mol_type = other DNA
tgcaggaaaatcattaccccgtttctggcccggggattttttcccgacgttctatgcctgtcatctggctgtgct

SEQ ID NO: 388836 - DNA, 75 bp, synthetic construct
  source 1..75: mol_type = other DNA
attatttcatcagaaagggggccgtgcagcaagaaacagaagacggaatttggttcataatgaatgtaaatagtt

SEQ ID NO: 388837 - DNA, 75 bp, synthetic construct
  source 1..75: mol_type = other DNA
cgtcaaaagcgcgaagagttgtttaattatttcatcagaaagggggccgtgcagcaagaaacagaagacggaatt

SEQ ID NO: 388838 - DNA, 75 bp, synthetic construct
  source 1..75: mol_type = other DNA
agagcggaacgtctggcgctgttggcctgcctgctggcagttattccggcgcttaaccttgcctccagtgatgca

SEQ ID NO: 388839 - DNA, 75 bp, synthetic construct
  source 1..75: mol_type = other DNA
agagcggaacgtctggcgctgttggcctgcctgctggcagttattccggctcttaaccttgccaccagtgatgca

SEQ ID NO: 388840 - DNA, 75 bp, synthetic construct
  source 1..75: mol_type = other DNA
ttccggctgaactggtgcggctgctggacagactggaggaagaaatccgggcagaccgcgtgagcagtgaaagcc

SEQ ID NO: 388841 - DNA, 75 bp, synthetic construct
  source 1..75: mol_type = other DNA
aacaaagagtcagacacacttgaccagaccgccgccagaactcatgccgccacgtatggcaccggtggttatatt

SEQ ID NO: 388842 - DNA, 75 bp, synthetic construct
  source 1..75: mol_type = other DNA
aattggagcaatgtcttttattatggaagatgttccggataactgtacttatgttaccaagaaagaatctagggt

SEQ ID NO: 388843 - DNA, 75 bp, synthetic construct
  source 1..75: mol_type = other DNA
gcacattagcaacgatgagtatttccctgaaaacccagtctatcatgctggcctcccagcaatcctttgagtcgc

SEQ ID NO: 388844 - DNA, 75 bp, synthetic construct
  source 1..75: mol_type = other DNA
gagcgctataaaaaactggctggaacgcattacgtatcagatatcgaataccagcagaagcaaattgacgtttct

SEQ ID NO: 388845 - DNA, 75 bp, synthetic construct
  source 1..75: mol_type = other DNA
ctataactactgtgcagatgcagttaaaggcgtagaggatgcctgccgtgctgttagctatagccaagccgacaa

SEQ ID NO: 388846 - DNA, 75 bp, synthetic construct
  source 1..75: mol_type = other DNA
gaagtcctggcgaaccactgtacaaaactatgccactctactatcacgctgccttgccagcgccggtagtgccgg

SEQ ID NO: 388847 - DNA, 75 bp, synthetic construct
  source 1..75: mol_type = other DNA
atgttatttgatcgtctgcagttgtcagtgaacggagatgctgatcagaccctgttgatgcttggcggtgcgggc

SEQ ID NO: 388848 - DNA, 75 bp, synthetic construct
  source 1..75: mol_type = other DNA
gttatttattccggtacggtagccgccgcgatggaaggccgccatttaggttttccggcgcttgccgtctcgctt

SEQ ID NO: 388849 - DNA, 75 bp, synthetic construct
  source 1..75: mol_type = other DNA
cgccgggccgaatctgggggatgatgtaatttattccggtacggtggccgccgcgatggaaggccgtcatttagg

SEQ ID NO: 388850 - DNA, 75 bp, synthetic construct
  source 1..75: mol_type = other DNA
cagacgtattaattttcgaaccgaaagtttttggtgatgagcgtggtttcttttttgagagctttaaccagaagg

SEQ ID NO: 388851 - DNA, 75 bp, synthetic construct
  source 1..75: mol_type = other DNA
gtgacaacagtcagcagcagcaggccatactacagcgaattgcctccctgaaaccacagattaaaagtgcagagc

SEQ ID NO: 388852 - DNA, 75 bp, synthetic construct
  source 1..75: mol_type = other DNA
gtcgtctgaaaggtgaggaactggcgcaatataatttgtggctggattatctggacgcactggaactggttgata

SEQ ID NO: 388853 - DNA, 75 bp, synthetic construct
  source 1..75: mol_type = other DNA
atgcgcatattgctgagtaatgatgacggggttcacgcacccggtatacaaacgctggcgaaagctttgcgtgag

SEQ ID NO: 388854 - DNA, 75 bp, synthetic construct
  source 1..75: mol_type = other DNA
taaacaattggtcagccaactgaaaaaagcaaaacctgattgcaaattaccagatagggcgatggattatctttt

SEQ ID NO: 388855 - DNA, 75 bp, synthetic construct
  source 1..75: mol_type = other DNA
aactccggatggttggataagctgtagtgagcgaatgccgaataccaaaacagccgttcttgttgccgtggagtt

SEQ ID NO: 388856 - DNA, 75 bp, synthetic construct
  source 1..75: mol_type = other DNA
aattcctggtgcgtcgtggaaaccgtcacactggatgcctctaccagaaccgccgcaggaggttaaccgtggcta

SEQ ID NO: 388857 - DNA, 75 bp, synthetic construct
  source 1..75: mol_type = other DNA
ataactactgcgcagatgcagttaagggcgttgagtatgcctgccacgctgccatgcttcagggtagccaacctg

SEQ ID NO: 388858 - DNA, 75 bp, synthetic construct
  source 1..75: mol_type = other DNA
caagttgacggtacaagtgactacatcaaggatggagagtggcctattgataatgggacaattgaagtatacgcc

SEQ ID NO: 388859 - DNA, 75 bp, synthetic construct
  source 1..75: mol_type = other DNA
attcgccgctccacccgttccagtagtaccggaagaaaaaccaatgcctaatcctcttagcatgtacgcggttga

SEQ ID NO: 388860 - DNA, 75 bp, synthetic construct
  source 1..75: mol_type = other DNA
ggaagaaatgtattggcaggatgcgccagttgaaggcagcagcaaagcggctgcatacgctacaggctggaacga

SEQ ID NO: 388861 - DNA, 75 bp, synthetic construct
  source 1..75: mol_type = other DNA
attttcgggaaatcgcggaaacgtcaaccaactatccggtaattcctagtgagctgttgtccgcaatcctgaagg

SEQ ID NO: 388862 - DNA, 75 bp, synthetic construct
  source 1..75: mol_type = other DNA
gaaaacaagaattcgtcaaccaataattttcgggaaatcgcggaaacgtcaaccaactatccggtaattcctagt

SEQ ID NO: 388863 - DNA, 75 bp, synthetic construct
  source 1..75: mol_type = other DNA
tattctgggctttaacggatgaaagcaataaagagcaagcggacgttattcctgtttatgctgccgcgcctgcgt

SEQ ID NO: 388864 - DNA, 75 bp, synthetic construct
  source 1..75: mol_type = other DNA
gggttgtccctgatggagacagtgcgccagttgcgtcgttctggaatcattacggggcacatgtaactcactgga

SEQ ID NO: 388865 - DNA, 75 bp, synthetic construct
  source 1..75: mol_type = other DNA
tgcctgatgtggctcagcgtctgatgcagcatcttgcagagcatggcattcaaccagcccggaatatggctgaac

SEQ ID NO: 388866 - DNA, 75 bp, synthetic construct
  source 1..75: mol_type = other DNA
ttggattttgggcaatggctggaacagcaacgcgggaaaatcgatgtggactgtggttgtgtgtccactgaaaca

SEQ ID NO: 388867 - DNA, 75 bp, synthetic construct
  source 1..75: mol_type = other DNA
cctgagcacgtggacaactcacgtggtgaaataacaaaaaccataagcatatcctgtacgtataagagtggctca

SEQ ID NO: 388868 - DNA, 75 bp, synthetic construct
  source 1..75: mol_type = other DNA
tgccgaaaatgtgaaaaaccaggtgctggaaaaattgggcctgaacagcgaaaaacagaaagaagacaccaacta

SEQ ID NO: 388869 - DNA, 75 bp, synthetic construct
  source 1..75: mol_type = other DNA
ggccggataaccgcatcaccgaagacgcgcattatgtctaccgctacgatgaatacggcaggctgacggagaaga

SEQ ID NO: 388870 - DNA, 75 bp, synthetic construct
  source 1..75: mol_type = other DNA
taatggtattcgttggccaggaggcggcggttctgcgttagcattttatgatggcggtgggttcacttatgtcaa

SEQ ID NO: 388871 - DNA, 75 bp, synthetic construct
  source 1..75: mol_type = other DNA
tactcataccgttccattaaggagaccaaacagtggcggtatgaatttcgactggcttgatggttcatcaagtgg

SEQ ID NO: 388872 - DNA, 75 bp, synthetic construct
  source 1..75: mol_type = other DNA
atcctgcccgtataagagtggctctctctggataaaagttacgggaaatactatgggaggaggtcagaataatgt

SEQ ID NO: 388873 - DNA, 75 bp, synthetic construct
  source 1..75: mol_type = other DNA
gcaaagcgcactgcaattaataaaaccaaaaaagccgatgtaaaagctattgcggatgcctggcagattaacggc

SEQ ID NO: 388874 - DNA, 75 bp, synthetic construct
  source 1..75: mol_type = other DNA
ggaacctgtatgcgtatccgctgaacccggtgcagcggggggatcctcttgggttgtctggtgagacactggttc

SEQ ID NO: 388875 - DNA, 75 bp, synthetic construct
  source 1..75: mol_type = other DNA
aatcctggtgtgggcaaaaccgaagcggcccgtgaatatcgccgcaccaataacaatgtctggatgatcaccatt

SEQ ID NO: 388876 - DNA, 75 bp, synthetic construct
  source 1..75: mol_type = other DNA
tgaccggaaaactcacgcagagtgaagatgaggggcttatcaccctctggcattacgatgcgtcagaccgtatca

SEQ ID NO: 388877 - DNA, 75 bp, synthetic construct
  source 1..75: mol_type = other DNA
ctttgatgatttatcgcgcctgttcagccgtcttgcccgtacaaaacaacttcgcaaggccaaaaaggcggatgt

SEQ ID NO: 388878 - DNA, 75 bp, synthetic construct
  source 1..75: mol_type = other DNA
aattgcggatgcctggcagattaccgggaaaaatgaacgggaattattacagcagattgcacaaacgcctggtgc

SEQ ID NO: 388879 - DNA, 75 bp, synthetic construct
  source 1..75: mol_type = other DNA
gcaccattaataacgggcagaatattgttgttgattttgggaatattaatcctgagcatgtggacaactcacgtg

SEQ ID NO: 388880 - DNA, 75 bp, synthetic construct
  source 1..75: mol_type = other DNA
gcgcagggcaaccagcatgaaggcattatcaccagcggtactttctccccgacgctgggttacagcattgcgctg

SEQ ID NO: 388881 - DNA, 75 bp, synthetic construct
  source 1..75: mol_type = other DNA
ggcgtgcaggcgggcgatctgtttattgccaccactggttataccggtgaagcgggctacgaaattgcgctgccc

SEQ ID NO: 388882 - DNA, 75 bp, synthetic construct
  source 1..75: mol_type = other DNA
ttggtgaaacggcgattgtgcaaattcgcaaccgtgaaatgccggttaaagtgacgaaacctgtttttgtgcgta

SEQ ID NO: 388883 - DNA, 75 bp, synthetic construct
  source 1..75: mol_type = other DNA
accgcttatcagatcaacctgcttgataagagtgattatgttctcgctcatggactgaacaccgacgaccaactc

SEQ ID NO: 388884 - DNA, 75 bp, synthetic construct
  source 1..75: mol_type = other DNA
agcgggctatgaaattgcgctgccaaatgaaaaagcagcagatttctggcgtgcgctggtggaagcgggcgttaa

SEQ ID NO: 388885 - DNA, 75 bp, synthetic construct
  source 1..75: mol_type = other DNA
agggggctacgaaattgcgctgcccaatgaaaaagcggcggatttctggcgagcgctggtggaagcgggcgttaa

SEQ ID NO: 388886 - DNA, 75 bp, synthetic construct
  source 1..75: mol_type = other DNA
atggctcgtttatcattatttatatcgttgcttctgacatcggtcgctgtactggctgatgtgcagattaacatc

SEQ ID NO: 388887 - DNA, 75 bp, synthetic construct
  source 1..75: mol_type = other DNA
tggttcaggaaatggttacagagtgacagcaggtctggacacagcacgttcaacgttcacctttacttcagtgcc

SEQ ID NO: 388888 - DNA, 75 bp, synthetic construct
  source 1..75: mol_type = other DNA
ctatgggaggaggtcagaataatgtactggcaacaaatataactcattttggtatagcgctgtatcagggaaaag

SEQ ID NO: 388889 - DNA, 75 bp, synthetic construct
  source 1..75: mol_type = other DNA
ccgaatgctcgcgccggtgaaaagtgggttttcatcccggaatttaatcgcgcagttcgtgaggcgttctacaac

SEQ ID NO: 388890 - DNA, 75 bp, synthetic construct
  source 1..75: mol_type = other DNA
ggttaagtttgcagagttacttggtaagccagaaacggctgtagtcaagatggtaaaagagaataaattgccagt

SEQ ID NO: 388891 - DNA, 75 bp, synthetic construct
  source 1..75: mol_type = other DNA
tgagtcttgtcccaagaataatgtagatatttatgttaagttaacttcaaatctttttaagaataatgatgcaat

SEQ ID NO: 388892 - DNA, 75 bp, synthetic construct
  source 1..75: mol_type = other DNA
gactgcgcacgcttgtagaaaatgaagaaaccacctttaaacaaattgctcttgagagcgggctttctaccggaa

SEQ ID NO: 388893 - DNA, 75 bp, synthetic construct
  source 1..75: mol_type = other DNA
catcaatctgatattccagctgaagcaggaatggatgtttctggccgggcgaggagcctttccgctgtttgccct

SEQ ID NO: 388894 - DNA, 75 bp, synthetic construct
  source 1..75: mol_type = other DNA
tacggcattgccgggctgctgatgctggctgtcagccaccggctgtaccgtgcggaagacagaatggaacgtctg

SEQ ID NO: 388895 - DNA, 75 bp, synthetic construct
  source 1..75: mol_type = other DNA
cggtgctgaccgttggtctggtgtcgtgtgcaggaaaatcattaccccgtttctggcccggggattttttcccga

SEQ ID NO: 388896 - DNA, 75 bp, synthetic construct
  source 1..75: mol_type = other DNA
gctgtttgccctggtgtgggggatgaatctgtcccgtcatgcgcatatccggcagtctgccattaaccggctgtg

SEQ ID NO: 388897 - DNA, 75 bp, synthetic construct
  source 1..75: mol_type = other DNA
cagttctggtattactttgccggctttccctggtatgaggggaatatcctgtttgcctttgcagtggcggcacag

SEQ ID NO: 388898 - DNA, 75 bp, synthetic construct
  source 1..75: mol_type = other DNA
gggggcctttccgctgtttgccctggtgtgggggctgaatctctcccgtcatgtgcatatccggcagtcagccat

SEQ ID NO: 388899 - DNA, 75 bp, synthetic construct
  source 1..75: mol_type = other DNA
gtgactatcaatacatcgccactttccagacgatcaagcaaccggttaaagccaggacgttcactggctgcccgg

SEQ ID NO: 388900 - DNA, 75 bp, synthetic construct
  source 1..75: mol_type = other DNA
ccgggctgctgatgctggcagtcagtcaccggctgtaccgggcggaagacagaacggaacgtctggcgctggttg

SEQ ID NO: 388901 - DNA, 75 bp, synthetic construct
  source 1..75: mol_type = other DNA
agagcggaacgtctggcgctgttggcctgcctgctggcggttattccggctcttaaccttgccgccagtgatgca

SEQ ID NO: 388902 - DNA, 75 bp, synthetic construct
  source 1..75: mol_type = other DNA
ttgtgatgacggtgctgaccgttggtctggtgtcgtgtgcaggaaaatcattaccccgtttctggcccggagatt

SEQ ID NO: 388903 - DNA, 75 bp, synthetic construct
  source 1..75: mol_type = other DNA
cacgtaacgattcactggctgcacggaccgatacctggttgcagtcgtttctggtctggtcacccggacagcggg

SEQ ID NO: 388904 - DNA, 75 bp, synthetic construct
  source 1..75: mol_type = other DNA
ctttgctgttgcggcacaggtgctgacatggtgtgaaacgcccagccggtggtgtttcgcagggactatgttgct

SEQ ID NO: 388905 - DNA, 75 bp, synthetic construct
  source 1..75: mol_type = other DNA
gatggcactgtgggggcctttgtccggcaccagttacggcattgccgggctgctgatgctggcggtcagtcaccg

SEQ ID NO: 388906 - DNA, 75 bp, synthetic construct
  source 1..75: mol_type = other DNA
tgaaagacggctcaggaaaaccggtacagaactgcacaatccagctgaaagcaaaacgtaacagtaccacggtgg

SEQ ID NO: 388907 - DNA, 75 bp, synthetic construct
  source 1..75: mol_type = other DNA
gctgtttgctctggtgtgggggctgaatctgtcccgccatgcgcatatccggcagtcagccattaaccggttatg

SEQ ID NO: 388908 - DNA, 75 bp, synthetic construct
  source 1..75: mol_type = other DNA
gtgtacagggaaatcattaccccgtttctggcccggggattttttcccgacgttctatgcctgccatcttactgt

SEQ ID NO: 388909 - DNA, 75 bp, synthetic construct
  source 1..75: mol_type = other DNA
ccggacaggccgtgtcgtcggctcagtcagcgtcttccagcgcaggaacggcatcagcaaaggccactgaagcat

SEQ ID NO: 388910 - DNA, 75 bp, synthetic construct
  source 1..75: mol_type = other DNA
ggtcgccgtgggcgcagctttacacctcggctcatcctcctgcagagttttatccagtcggtgcaccaatcccgt

SEQ ID NO: 388911 - DNA, 75 bp, synthetic construct
  source 1..75: mol_type = other DNA
ccggcacatctgccagtgaggcggcaacccatgcgactgatgctgcaggctcagcacgcgcagccagcacgtcag

SEQ ID NO: 388912 - DNA, 75 bp, synthetic construct
  source 1..75: mol_type = other DNA
gatactgattgttgcatggatacccctgtctcagaccagctatggcgttccggggctgctgttactggcggtcag

SEQ ID NO: 388913 - DNA, 75 bp, synthetic construct
  source 1..75: mol_type = other DNA
accagttacggcattgccgggctactaatgctggcggtcagccacaggctgtacagggagaaagacagaacggaa

SEQ ID NO: 388914 - DNA, 75 bp, synthetic construct
  source 1..75: mol_type = other DNA
gccgatgagcgtcagcttactttcgttgccttcgcgcatgttgttaggccagaccagatgggcggtatagttacg

SEQ ID NO: 388915 - DNA, 75 bp, synthetic construct
  source 1..75: mol_type = other DNA
cggtgctgaccgttggtctggtgtcgtgtacagggaaatcattaccccgtttctggcccggggattttttcccga

SEQ ID NO: 388916 - DNA, 75 bp, synthetic construct
  source 1..75: mol_type = other DNA
cccggacagcgggatatcatcaaaacggtggtactggtgctgatggtactggaccacatcaatctgatattccag

SEQ ID NO: 388917 - DNA, 75 bp, synthetic construct
  source 1..75: mol_type = other DNA
aaaatgatcgtccgtaaaggtgaattgtctttttacgatatttttaccctcgctcgcgccgaatcaacatcttaa

SEQ ID NO: 388918 - DNA, 75 bp, synthetic construct
  source 1..75: mol_type = other DNA
acgatctggatctgatcaccactgcgccgaccgtagtgtatgaagttgaaaccacgtcaagagaagttatctacg

SEQ ID NO: 388919 - DNA, 75 bp, synthetic construct
  source 1..75: mol_type = other DNA
atgagtaccgggcagacctataacgccgaccgtctgggcatcttcacgccgaagcaggttgaccgcactgaactg

SEQ ID NO: 388920 - DNA, 75 bp, synthetic construct
  source 1..75: mol_type = other DNA
cagagcaaaaagcgcgtgtaaacggtattaatgatctgtttgccatgtttggcgggcgttatcagacgctgcagg

SEQ ID NO: 388921 - DNA, 75 bp, synthetic construct
  source 1..75: mol_type = other DNA
cctcccggacgccagtgcaggcagcagcacccgtggtggatgaaaacagcatccgtgcgcaggtcctggcagagc

SEQ ID NO: 388922 - DNA, 75 bp, synthetic construct
  source 1..75: mol_type = other DNA
tttgctggcttgattttgaaccccaaaaaggaaaagaaattggcaaatatcgtccggcattaatcctgtcccatg

SEQ ID NO: 388923 - DNA, 75 bp, synthetic construct
  source 1..75: mol_type = other DNA
ccactaactgacattctgacgcgacatgctgagagtgacagcgtcgcggttatcgacggcgagcggcagttgagt

SEQ ID NO: 388924 - DNA, 75 bp, synthetic construct
  source 1..75: mol_type = other DNA
tggcggaagggctggtgaactacacccgtcttgatgatagcgcggagaaaattatccatacccagggttacccaa

SEQ ID NO: 388925 - DNA, 75 bp, synthetic construct
  source 1..75: mol_type = other DNA
ggaaaaaggctactggcaggatttgccgctgaccgacattttgacccgccacgccgcgagtgacagcatcgcggt

SEQ ID NO: 388926 - DNA, 75 bp, synthetic construct
  source 1..75: mol_type = other DNA
tggcgtgcaagacgttctcgaacgcttggtgcgcgacattccgccgccggaaggcgatccggaaggcccattgca

SEQ ID NO: 388927 - DNA, 75 bp, synthetic construct
  source 1..75: mol_type = other DNA
tgaatcctgtcgatggtctgctaatggcggaaaaaatccgtaaaggcgttgaactgcaaccattcacctggcaac

SEQ ID NO: 388928 - DNA, 75 bp, synthetic construct
  source 1..75: mol_type = other DNA
gaatttgctgttgcagtgccgtcggtgaatcctgtcgatggtctgctaatggcggaaaaaatccgtaaaggcgtt

SEQ ID NO: 388929 - DNA, 75 bp, synthetic construct
  source 1..75: mol_type = other DNA
aaaaaatgccggaatccatccgaaatatgattactccgccacgcaacagtgcaacgcgtgagcctgaaaacaaaa

SEQ ID NO: 388930 - DNA, 75 bp, synthetic construct
  source 1..75: mol_type = other DNA
gtgaagtgcgccagcccggtggtgatctgcaatgagcaacaccgctttatcgtggcggaacagctgcgtcaactc

SEQ ID NO: 388931 - DNA, 75 bp, synthetic construct
  source 1..75: mol_type = other DNA
tgtgtctgcgttatcagggagtcttgctggatgccagcgaagaggtggttcatgttgcggtagtcgatgcacctt

SEQ ID NO: 388932 - DNA, 75 bp, synthetic construct
  source 1..75: mol_type = other DNA
tcggcttgatgaaagcagtgcgccgttttaacccggaagtgggggtgcgcctggtctccttcgccgttcactgga

SEQ ID NO: 388933 - DNA, 75 bp, synthetic construct
  source 1..75: mol_type = other DNA
tgtgggctcttggcacaggtgcaaatgcaggaattggttacatggtagatagttcagttgatcctgaaaatgcaa

SEQ ID NO: 388934 - DNA, 75 bp, synthetic construct
  source 1..75: mol_type = other DNA
atgagcaagttttttaccctcaaggccggtgacgttgtgttgacaggcacgcctgaaagcggcggcaaaacttgc

SEQ ID NO: 388935 - DNA, 75 bp, synthetic construct
  source 1..75: mol_type = other DNA
aattataaatccgaaaacagttatgtgtatgccgaatcgggcctggtcaccaccgtcggggtgaaagatttggtg

SEQ ID NO: 388936 - DNA, 75 bp, synthetic construct
  source 1..75: mol_type = other DNA
tattgagacgttgtcggcctacctgacaccgacctgtcaggaactgctgcataaggatgcgaagcagcgtaagga

SEQ ID NO: 388937 - DNA, 75 bp, synthetic construct
  source 1..75: mol_type = other DNA
ttgacgatcaatattacctcaccgtgaccacacagaacggtcagagttaccgcgtgaatgatgtccttctgcctg

SEQ ID NO: 388938 - DNA, 75 bp, synthetic construct
  source 1..75: mol_type = other DNA
tcccggacgccagtgcaggcagcagcacccgtggtggatgaaaacagcatccgtgcgcaggtactggcagagcaa

SEQ ID NO: 388939 - DNA, 75 bp, synthetic construct
  source 1..75: mol_type = other DNA
gttacggtgtttccgctgagcgtgtgcgtcagcttgaaaagaatgcgatgaaaaaacttcgcgccgctattgaag

SEQ ID NO: 388940 - DNA, 75 bp, synthetic construct
  source 1..75: mol_type = other DNA
gttacggtgtttccgctgaacgtgtgcgccaactggaaaagaacgcgatgaaaaaattgcgtgctgctatagaag

SEQ ID NO: 388941 - DNA, 75 bp, synthetic construct
  source 1..75: mol_type = other DNA
gctggactgttatgccggtgtgccccagcgtctggaggcggcaccgcctgcacctaaaccggagaagtcaggagt

SEQ ID NO: 388942 - DNA, 75 bp, synthetic construct
  source 1..75: mol_type = other DNA
actgaaaagagcgaaaacacctcccgatccactaacaaaagatgagtttgccagactgattgatgcgtgccacca

SEQ ID NO: 388943 - DNA, 75 bp, synthetic construct
  source 1..75: mol_type = other DNA
caagccagttgctggccttctgtgaaggtatgctgtcacgctttgtccgcagcgagtttaaataccgcccgacgg

SEQ ID NO: 388944 - DNA, 75 bp, synthetic construct
  source 1..75: mol_type = other DNA
tcactggccatgcgctaatgttcgaacaggatcgtctgcaaggacgcatcaaccaactgttcgagcgtattgaag

SEQ ID NO: 388945 - DNA, 75 bp, synthetic construct
  source 1..75: mol_type = other DNA
ctgattctgaaagatgagaaggacaccactgcgcgtctgcgtctgattgtgttgctacttctcggttttggcgag

SEQ ID NO: 388946 - DNA, 75 bp, synthetic construct
  source 1..75: mol_type = other DNA
gatcgcggtgtgatgacggcgtttatgcaggcgctgggatttacggcacaacagggcggctgggagaagcgttaa

SEQ ID NO: 388947 - DNA, 75 bp, synthetic construct
  source 1..75: mol_type = other DNA
ccgagggggcactggattccctgcgcgtgcgggaagtcacccgacgtcgcggtgtggggcaatatctgctggaag

SEQ ID NO: 388948 - DNA, 75 bp, synthetic construct
  source 1..75: mol_type = other DNA
tggatgccatgaccggctatcagtcgttgcaggctcagtgtcttgccgatcctgaatgttcgctggagcaggccc

SEQ ID NO: 388949 - DNA, 75 bp, synthetic construct
  source 1..75: mol_type = other DNA
atcactggttgatcgtggtatcactgtgagcggttttattaatcgctcgcaggttgttaatgcggcttttacaca

SEQ ID NO: 388950 - DNA, 75 bp, synthetic construct
  source 1..75: mol_type = other DNA
caacattacgggtgagcagagtacggtaaatatgaataatgctctgtggtactctgacggaaactcaacgatcgg

SEQ ID NO: 388951 - DNA, 75 bp, synthetic construct
  source 1..75: mol_type = other DNA
agatggaactggtttacggctctgtgtcaggaaaatcctttcactgggaggacaggggaatggcactgagcatga

SEQ ID NO: 388952 - DNA, 75 bp, synthetic construct
  source 1..75: mol_type = other DNA
ctgattctgaaagatgaaaaggacactactgcgcgcctgcgcctgattgtgttgctgcttctcggtttcggcgaa

SEQ ID NO: 388953 - DNA, 75 bp, synthetic construct
  source 1..75: mol_type = other DNA
atggcagaaaaacaaactgcgaaaaggaaccgtcgcgaagaaatacttcagtctctggcgttgatgttggaatcc

SEQ ID NO: 388954 - DNA, 75 bp, synthetic construct
  source 1..75: mol_type = other DNA
cggcaaaactggccgcctctgtcggcgtttccgaagcggcactgtatcgccacttccccagtaagacccgcatgt

SEQ ID NO: 388955 - DNA, 75 bp, synthetic construct
  source 1..75: mol_type = other DNA
gatcgcggtgtgatgacagcgtttatgcaggcactgggatttacggcacaacagggcggctgggagaagcgttaa

SEQ ID NO: 388956 - DNA, 75 bp, synthetic construct
  source 1..75: mol_type = other DNA
ggcgtgacaacgaaagtgcgtattgacgccggtgtcgcgccagttgatcaccgcggtctggtgaaatgtacggcg

SEQ ID NO: 388957 - DNA, 75 bp, synthetic construct
  source 1..75: mol_type = other DNA
acccgaaactctcagacggaaaggcgctgttccatgccgatcacaagaacctgagctcgggtgcaatttctgtgg

SEQ ID NO: 388958 - DNA, 75 bp, synthetic construct
  source 1..75: mol_type = other DNA
catgatcaccccgccgcgcaacactacccagcgtgacccggttattacccagcctcaggcaccgcaggcaaaaac

SEQ ID NO: 388959 - DNA, 75 bp, synthetic construct
  source 1..75: mol_type = other DNA
cagctttgttttcaatcctcagatattagatcgcacaggtaactcaggagttcattatgccgtaacatccatcaa

SEQ ID NO: 388960 - DNA, 75 bp, synthetic construct
  source 1..75: mol_type = other DNA
ttaaggggatctcgccattaaaggaatcaagaagcattccggatcctctttcgcgggaggaatttatccgtctta

SEQ ID NO: 388961 - DNA, 75 bp, synthetic construct
  source 1..75: mol_type = other DNA
ataatcaccagattcaatcgcaggtggtgcactaccttgatcaaacgattaaaggatttgttatcgatcatattg

SEQ ID NO: 388962 - DNA, 75 bp, synthetic construct
  source 1..75: mol_type = other DNA
aaagtggtgaaaggcatggacgttgccgataagatttcccaggtgccgactcatgacgttggtccgtaccagaat

SEQ ID NO: 388963 - DNA, 75 bp, synthetic construct
  source 1..75: mol_type = other DNA
gagcggggaaatccttacgcgatgatgagcctttttgaaatggcccaggcatcactaactgatcgtggtatcagt

SEQ ID NO: 388964 - DNA, 75 bp, synthetic construct
  source 1..75: mol_type = other DNA
cgtgcgggaagtcacccgacgtcgcggcgtggggcaatatctgctggaagaggtgttaagtgataatgccagcgt

SEQ ID NO: 388965 - DNA, 75 bp, synthetic construct
  source 1..75: mol_type = other DNA
acagcacctctgactttggcaacattctgcttgatgttgcgaacaaagcgctgattcagggctgggacgaggcgc

SEQ ID NO: 388966 - DNA, 75 bp, synthetic construct
  source 1..75: mol_type = other DNA
atgttcaaatcgaccctggcggcgatggctgctgttttcgctctttctgctctttctgctctttctcccgcagca

SEQ ID NO: 388967 - DNA, 75 bp, synthetic construct
  source 1..75: mol_type = other DNA
tcactgagcagatgcagcagaaaaaaccgaatccaccgatcaaaaatgaagccgataacggcttgcgtaacactc

SEQ ID NO: 388968 - DNA, 75 bp, synthetic construct
  source 1..75: mol_type = other DNA
gatctggccgtggtattcaacgtcgttaacacggaacaacaagagtttgtcggcgtgtcctggttgccgcctgaa

SEQ ID NO: 388969 - DNA, 75 bp, synthetic construct
  source 1..75: mol_type = other DNA
gatattcctgagcttgttgtcggatatatgattaaggatcgacttggacagccgattttcgggaccaatacgtac

SEQ ID NO: 388970 - DNA, 75 bp, synthetic construct
  source 1..75: mol_type = other DNA
ttgccgcgatgatcgaaacgggtgttgggatcccgtcgatgtgcctgtccgcacatcgtcgctttccttttggta

SEQ ID NO: 388971 - DNA, 75 bp, synthetic construct
  source 1..75: mol_type = other DNA
cgctttattgatgagtagtccgtcgcgttcagatactaaccatttaatggttgagtcattactacagcaaaaagg

SEQ ID NO: 388972 - DNA, 75 bp, synthetic construct
  source 1..75: mol_type = other DNA
atgaatgaaaactcagtaatcttaataagtttatttggtttttttggatcgagtgttgtagctggttttatggat

SEQ ID NO: 388973 - DNA, 75 bp, synthetic construct
  source 1..75: mol_type = other DNA
gtatctgaaggtgagtcagtaggtatccttggaatgaatggggcaggtaaaagtacgttgttaaagattataacg

SEQ ID NO: 388974 - DNA, 75 bp, synthetic construct
  source 1..75: mol_type = other DNA
tatatgattcaaaggctctgttaataaatttacctccacgaaaagcgacgggaggggcaagaacagctaatcgat

SEQ ID NO: 388975 - DNA, 75 bp, synthetic construct
  source 1..75: mol_type = other DNA
ttctgccaaagagctggagtcagaagtctgacgagaagagccgcacggatatggtgatcctattacaggtcaaaa

SEQ ID NO: 388976 - DNA, 75 bp, synthetic construct
  source 1..75: mol_type = other DNA
aagcataaaactcacgaaataatattgagtaatgcaaatgttagtgttccctctgtctttccaaaaaggccaatc

SEQ ID NO: 388977 - DNA, 75 bp, synthetic construct
  source 1..75: mol_type = other DNA
ttcggtgtagcaaataagatcagcacagggttgggagacgctggtccgataatcgacaattacgctaacgtactg

SEQ ID NO: 388978 - DNA, 75 bp, synthetic construct
  source 1..75: mol_type = other DNA
ctacttcatggaaggaattgagcaggtcacgttatcaaggaacactattaatgagcagcccttcacgttcagata

SEQ ID NO: 388979 - DNA, 75 bp, synthetic construct
  source 1..75: mol_type = other DNA
ctgttaaatgacccccatctctcttttacctatttcccccggtctgcggtatcccccacctacgttgcaattctc

SEQ ID NO: 388980 - DNA, 75 bp, synthetic construct
  source 1..75: mol_type = other DNA
gttacgaggatggtccgggggagcattcacaaagctggctgagtgccgatgagatcctgaatgcaccagaccagg

SEQ ID NO: 388981 - DNA, 75 bp, synthetic construct
  source 1..75: mol_type = other DNA
gcatggcgctttgcagacgggtgccctttcaacatcgtttacgtcatcgcagggtttgctgctgatgatcccgac

SEQ ID NO: 388982 - DNA, 75 bp, synthetic construct
  source 1..75: mol_type = other DNA
cactcctgacccggaatcgcctgtgcgaagtccggctgaaggacggatacagggaggttacggcaagcatggctt

SEQ ID NO: 388983 - DNA, 75 bp, synthetic construct
  source 1..75: mol_type = other DNA
ggacgggcaaataggatataccgttcatgagcctgtgttgaaggactttgcccgtatggctgaaggtcttaaaag

SEQ ID NO: 388984 - DNA, 75 bp, synthetic construct
  source 1..75: mol_type = other DNA
ctgaagagccgcgtgccatttattcatttctttgatggtttccgcacgtcccacgaaatcaataaaattgtcccg

SEQ ID NO: 388985 - DNA, 75 bp, synthetic construct
  source 1..75: mol_type = other DNA
ctggatcaatttgccgataaaatccccgctgatttactggctgcgctcaaatccgatgccacgccagaagttcgt

SEQ ID NO: 388986 - DNA, 75 bp, synthetic construct
  source 1..75: mol_type = other DNA
tcacaccgctgtttgaatattctggtgcttgttccggttgtggcgaaacgccatatatcaaattgcttactcagc

SEQ ID NO: 388987 - DNA, 75 bp, synthetic construct
  source 1..75: mol_type = other DNA
ggagctggctatcagctctgtagtgctcgctgtaatcatcggtttaattggcgctggcggtaagctctcacaaaa

SEQ ID NO: 388988 - DNA, 75 bp, synthetic construct
  source 1..75: mol_type = other DNA
gcggcgacggcgttcggttttactcgtgggcaagtgtttcggcggatcatgtttccggcgatgatgcgttacgcc

SEQ ID NO: 388989 - DNA, 75 bp, synthetic construct
  source 1..75: mol_type = other DNA
ttttacagggtgcgctcgtcacgctggagctggctatcagctctgtagtgctcgctgtaatcatcggtttaattg

SEQ ID NO: 388990 - DNA, 75 bp, synthetic construct
  source 1..75: mol_type = other DNA
atgaacaaaaaattcactaaaacaattctttctgctgcagtggcgggattgtttctggcgggtaacgcttttgcg

SEQ ID NO: 388991 - DNA, 75 bp, synthetic construct
  source 1..75: mol_type = other DNA
gcaaaagtacctgggaaccgttctatttcgccatcgtctgtggcgtgatttatctggttttcaccaccgtttcca

SEQ ID NO: 388992 - DNA, 75 bp, synthetic construct
  source 1..75: mol_type = other DNA
gatggtcgctggtattatcactctcggttttatctacggtgcttattttaccgaaacgttccgtggcgcgtttat

SEQ ID NO: 388993 - DNA, 75 bp, synthetic construct
  source 1..75: mol_type = other DNA
tcctgttcatgacatgacaccgccatattatagtgatcagcaatataatgtgtggttcaatttttcatctataga

SEQ ID NO: 388994 - DNA, 75 bp, synthetic construct
  source 1..75: mol_type = other DNA
cgttgttgatatcagtacgtatgaatataccttgctggataatggcaaccatagctggagtctcgcagagaatcg

SEQ ID NO: 388995 - DNA, 75 bp, synthetic construct
  source 1..75: mol_type = other DNA
ctgcctgccgacagcgatatgaccgagcaaaccgccaaagcgctgcagcaggtggcatgggataccgtccaggaa

SEQ ID NO: 388996 - DNA, 75 bp, synthetic construct
  source 1..75: mol_type = other DNA
ctgcccgtcgacagtgatatgaccgagcaaaccgccagggcattgcaacaagtggcatgggataccgtcacggca

SEQ ID NO: 388997 - DNA, 75 bp, synthetic construct
  source 1..75: mol_type = other DNA
ataacggccaggccgagttgattttacgtaatggcttaactgttccggtcagccgccgctatctgaaaagtttaa

SEQ ID NO: 388998 - DNA, 75 bp, synthetic construct
  source 1..75: mol_type = other DNA
agagatgtagcatttgtcagcagtcggatgagcggtgtctacgttaccagccacgaagggaaagaaggttttacc

SEQ ID NO: 388999 - DNA, 75 bp, synthetic construct
  source 1..75: mol_type = other DNA
caaacgccgtagaagggatcggcgcggtgcataaactgcgcccggatgtgctgtttctcgatatccagatgccgc

SEQ ID NO: 389000 - DNA, 75 bp, synthetic construct
  source 1..75: mol_type = other DNA
tcgcgttcggcacatacattttgtcggcattggtggtgccggtatgggcggtattgctgaagttctggccaatga

SEQ ID NO: 389001 - DNA, 75 bp, synthetic construct
  source 1..75: mol_type = other DNA
ggcatcggtggtgccggtatgggcggtattgccgaagttctggtcaatgaaggttatcagatcagtggttccgat

SEQ ID NO: 389002 - DNA, 75 bp, synthetic construct
  source 1..75: mol_type = other DNA
gtccacgaaaaaccctggcaaggaattggggtgggcgcggccgttgggctggtattaggactgttgctggcacgc

SEQ ID NO: 389003 - DNA, 75 bp, synthetic construct
  source 1..75: mol_type = other DNA
tgcaggctggccggataaaaatctggtaatgctgtttcagccgcaccgttttacccgtacgcgcgacctgtatga

SEQ ID NO: 389004 - DNA, 75 bp, synthetic construct
  source 1..75: mol_type = other DNA
cgcaggctggccggataaaaacctggtaatgctgtttcagccgcaccgttttacccgtacgcgcgacctgtatga

SEQ ID NO: 389005 - DNA, 75 bp, synthetic construct
  source 1..75: mol_type = other DNA
tgtatccggctggcgaagcgccaattccgggagcggacagccgttcgctgtgtcgcacaattcgtggccgtggga

SEQ ID NO: 389006 - DNA, 75 bp, synthetic construct
  source 1..75: mol_type = other DNA
ttacgttgattgctggtgggattattgtcggatgcactgatgctgtgtcgacaaattattacgaccgggcatcat

SEQ ID NO: 389007 - DNA, 75 bp, synthetic construct
  source 1..75: mol_type = other DNA
acaaagccggctcccgtgtagtttatttcatgacctgggccagcaaggataaacccgaacaaacggagaaactgg

SEQ ID NO: 389008 - DNA, 75 bp, synthetic construct
  source 1..75: mol_type = other DNA
acatttttcggggtacttcccgcagagcctgcagaagcatctgcccgtgtcatggaacggatgcagtcgcctgaa

SEQ ID NO: 389009 - DNA, 75 bp, synthetic construct
  source 1..75: mol_type = other DNA
atttacatgcggatctctggtatcagggtatcaataatgcattggctgttttacaagcacagatattaaaacaac

SEQ ID NO: 389010 - DNA, 75 bp, synthetic construct
  source 1..75: mol_type = other DNA
aatgatttaaaagatcaaatatctgaaaataatcctttggaaatatacctttttgatagtggacagttgaaaata

SEQ ID NO: 389011 - DNA, 75 bp, synthetic construct
  source 1..75: mol_type = other DNA
gccaaggccatttctggacatgggcattgaggattcccgggataaaacgaccgagcgtttaaagctggccgctca

SEQ ID NO: 389012 - DNA, 75 bp, synthetic construct
  source 1..75: mol_type = other DNA
gtttgaaacaacgcggatacctgcatagtgtccacgggcaaggaacatttacattaccggctcgcagtcgggaaa

SEQ ID NO: 389013 - DNA, 75 bp, synthetic construct
  source 1..75: mol_type = other DNA
tgagtgcagcggcggtattaaccatgctggcgggttgtacggcttatgatcgtaccaaagaccagtttgtacagc

SEQ ID NO: 389014 - DNA, 75 bp, synthetic construct
  source 1..75: mol_type = other DNA
acgagcaactgacttacagcgaagtgctaggaaaaagagctgaaagtcatggacctggcggccttcacgctggct

SEQ ID NO: 389015 - DNA, 75 bp, synthetic construct
  source 1..75: mol_type = other DNA
tttcaatatgaacaaaccgggtgcgctgcgccgtgtggtaatgggtgaaaaagaagggactttaatcacggaata

SEQ ID NO: 389016 - DNA, 75 bp, synthetic construct
  source 1..75: mol_type = other DNA
gagcatttcgccgattgcaggattctcgccagatacggcttatgattcggtgacgctggcgacggcccgcgatcc

SEQ ID NO: 389017 - DNA, 75 bp, synthetic construct
  source 1..75: mol_type = other DNA
acgaatacgctattaaagcctttgaagaacatgcttttgattatctgctgaagccaattgatgaagcgcgactgg

SEQ ID NO: 389018 - DNA, 75 bp, synthetic construct
  source 1..75: mol_type = other DNA
ttgtcgccttagatgataccggacatgttatcaactctggctatcagacctgtgccgaatacgacaccgatccac

SEQ ID NO: 389019 - DNA, 75 bp, synthetic construct
  source 1..75: mol_type = other DNA
acgagcaatacgatgcgtttctcgctgccctggacgcccccatcactgctgagcgtcaggccaaaattaacgcgt

SEQ ID NO: 389020 - DNA, 75 bp, synthetic construct
  source 1..75: mol_type = other DNA
tggaccacgttggcgcagcggcggaactggcgcaacattacggcgtgccggtttttggcccggaaaaagaagatg

SEQ ID NO: 389021 - DNA, 75 bp, synthetic construct
  source 1..75: mol_type = other DNA
gtctcgctttgggcttcgcttggctggtgggttgctgcgttgttattggtgttattctaccccggttctgcggca

SEQ ID NO: 389022 - DNA, 75 bp, synthetic construct
  source 1..75: mol_type = other DNA
aatgaccgggctgaaaatcgccgcaggtgtggcgacagtgttgatggcatttgttgcaataattgcgttgattaa

SEQ ID NO: 389023 - DNA, 75 bp, synthetic construct
  source 1..75: mol_type = other DNA
aactggcgattaatgagtttgttgcttatctcaatttctcgccctatctgcaaacgagcggcacgctggatgtca

SEQ ID NO: 389024 - DNA, 75 bp, synthetic construct
  source 1..75: mol_type = other DNA
tttctccccatacctgcaaacgggcggcacgctggaagtgaaaaccattgcgattatctcctttgcgctttgtgg

SEQ ID NO: 389025 - DNA, 75 bp, synthetic construct
  source 1..75: mol_type = other DNA
atgtttcgaaaaataaaaattcgcaaaatgacgctcaaccgggcgctggacaaatacctgaagacagtatccatc

SEQ ID NO: 389026 - DNA, 75 bp, synthetic construct
  source 1..75: mol_type = other DNA
tcgatgccaggcgtaaacagaccagcaaaatttccccttattttgttccctaccctgcaactgtcgggtacagaa

SEQ ID NO: 389027 - DNA, 75 bp, synthetic construct
  source 1..75: mol_type = other DNA
aaatgactctcaaccgggcgctggacaaatacctgaaaaccgtttccgtccataaaaaagggcatctgcaggagg

SEQ ID NO: 389028 - DNA, 75 bp, synthetic construct
  source 1..75: mol_type = other DNA
tttctccaggtaaaacctggcaaggctttattggcggactcgcgaccgcagcggtaatctcatggggttatggca

SEQ ID NO: 389029 - DNA, 75 bp, synthetic construct
  source 1..75: mol_type = other DNA
ctcatggggttatggcatgtgggcgaatctcgacgtcgctcccgtcaccttactcatttgctctattgtcgcagc

SEQ ID NO: 389030 - DNA, 75 bp, synthetic construct
  source 1..75: mol_type = other DNA
gccttatttttggcgtgctaaccattgttcccttcttctggggcatgctggcgttacgggcctggcactatgacg

SEQ ID NO: 389031 - DNA, 75 bp, synthetic construct
  source 1..75: mol_type = other DNA
tgcggttgcgccacaccgtgcgccggaaatcgcccagcttggtttacgcgcgctggcggcggcgacactttctaa

SEQ ID NO: 389032 - DNA, 75 bp, synthetic construct
  source 1..75: mol_type = other DNA
actgcgagcgcagaatctgaatgtgcatctgattggtcgggcaacgaaaaccaaaatcgcgctggatcaagatta

SEQ ID NO: 389033 - DNA, 75 bp, synthetic construct
  source 1..75: mol_type = other DNA
cgatcataaaaccatgatgctacaagtggaaaactataataactgcctacactccagaagtgtaattgtcgccaa

SEQ ID NO: 389034 - DNA, 75 bp, synthetic construct
  source 1..75: mol_type = other DNA
gtaaggatttgtttcatgaaaatttcagaagggtgctattaaagaatgatcaactggcccaagctctttttaatc

SEQ ID NO: 389035 - DNA, 75 bp, synthetic construct
  source 1..75: mol_type = other DNA
tctgggataataaaccgtgtgctattgatatagtactgaaatctgaaagctcatgtaatgtttattatgacgttc

SEQ ID NO: 389036 - DNA, 75 bp, synthetic construct
  source 1..75: mol_type = other DNA
attggtgttctacccataatatattaaaaaacaccgaggatatgactttgtcaattaaaaatataaagcgcatta

SEQ ID NO: 389037 - DNA, 75 bp, synthetic construct
  source 1..75: mol_type = other DNA
aacatcgccgctaaccatattgataacgtacaaattattcgtatggcggcagaagaatttactcaggcgatgaat

SEQ ID NO: 389038 - DNA, 75 bp, synthetic construct
  source 1..75: mol_type = other DNA
tgagcacctgtgctagcctcagcaatatgtcaggttgttcagtggaagtagtgaatgtcaacaccacaaaagagc

SEQ ID NO: 389039 - DNA, 75 bp, synthetic construct
  source 1..75: mol_type = other DNA
cgacaggcgggtatgcgaacgctttttgaaaacggctgcctggccgtggagcaaggcttaaccacctttgaagag

SEQ ID NO: 389040 - DNA, 75 bp, synthetic construct
  source 1..75: mol_type = other DNA
gttgtgtacattgctaccacggtttttatggtcgcacggccttatttgaagttctgcccataacaccggtcatac

SEQ ID NO: 389041 - DNA, 75 bp, synthetic construct
  source 1..75: mol_type = other DNA
atccggaaaaatgtaataaggcaactttgtttcgcgccctggaagagaatgcagccattgtttcgacatgtaatt

SEQ ID NO: 389042 - DNA, 75 bp, synthetic construct
  source 1..75: mol_type = other DNA
gcgcgaaggaattgttgtctatgactctgagggaataccagtctgggcatgtgccaatgtagatgccagagcggc

SEQ ID NO: 389043 - DNA, 75 bp, synthetic construct
  source 1..75: mol_type = other DNA
tttgccgggggaggctcgaagggcaaactctggagccagattctggcggacgtgtcagggctgacggtcaacgtt

SEQ ID NO: 389044 - DNA, 75 bp, synthetic construct
  source 1..75: mol_type = other DNA
cgctatatggatgaaatcactaccattgatatcgccggttaccgggatcagcgtttagctcaaattaacccacga

SEQ ID NO: 389045 - DNA, 75 bp, synthetic construct
  source 1..75: mol_type = other DNA
gcaacaaaccatgaacatatcctggatagtgctatttggaggcgttttgacgatgctatcgagtttccactaccc

SEQ ID NO: 389046 - DNA, 75 bp, synthetic construct
  source 1..75: mol_type = other DNA
gttcaactacgttgcctccggcaccggtagacaaagaaagggggctgccactgttggatctacggcagccgcagc

SEQ ID NO: 389047 - DNA, 75 bp, synthetic construct
  source 1..75: mol_type = other DNA
cgattattccagaagatgttaaagcagaaattaaggcttcaatggaaaaattgcatgccttaaatatgctatcgg

SEQ ID NO: 389048 - DNA, 75 bp, synthetic construct
  source 1..75: mol_type = other DNA
cgtctgtcgctgtatgccgatgagcgcattttaagtgcggcaattgccacgcgcaccgagcggcgcagtggtctg

SEQ ID NO: 389049 - DNA, 75 bp, synthetic construct
  source 1..75: mol_type = other DNA
cgcctgccagagcacgaaactacgtgggcgatgacggtacataaatcgcagggatcggagttcgaccatgcggcg

SEQ ID NO: 389050 - DNA, 75 bp, synthetic construct
  source 1..75: mol_type = other DNA
gcagtgagaaacggcaaaagaatgtcctcattgctgttcgtttttcaccagaagaggctgagattgttagagaaa

SEQ ID NO: 389051 - DNA, 75 bp, synthetic construct
  source 1..75: mol_type = other DNA
ctgctcacgggcatgtctggctggatggcgagcacattcaacattacgccagtaaagaggtcgcacgccggattg

SEQ ID NO: 389052 - DNA, 75 bp, synthetic construct
  source 1..75: mol_type = other DNA
attgacgatccggtagccggaactccgcttgtggtgccgctcggacgaacggcaccttcaaccgcgaagatttaa

SEQ ID NO: 389053 - DNA, 75 bp, synthetic construct
  source 1..75: mol_type = other DNA
cccatctggcggatcaaagcgtggataccctctccggtgggcaacgccagcgagcgtggatcgcgatggtgctgg

SEQ ID NO: 389054 - DNA, 75 bp, synthetic construct
  source 1..75: mol_type = other DNA
acgtctttatcttcccctgccggtccccgttctgcttcctcttcttctgctttccccgacacgctgcccgccggt

SEQ ID NO: 389055 - DNA, 75 bp, synthetic construct
  source 1..75: mol_type = other DNA
ggatgttgccggtcttctcgcataccttggtttgggagaagcggcgaaaagggatgtgggcacaggagataatca

SEQ ID NO: 389056 - DNA, 75 bp, synthetic construct
  source 1..75: mol_type = other DNA
cgtctgtcgctgtatgtcgatgagcgcattttaagtgcggcaattgccacgcgcaccgagcggcgcagcggtctg

SEQ ID NO: 389057 - DNA, 75 bp, synthetic construct
  source 1..75: mol_type = other DNA
cacagtggcgcgatttttcaacgaagtgaatcatgccattgaggtggatgaaacgttgctaaagcaaacgctgga

SEQ ID NO: 389058 - DNA, 75 bp, synthetic construct
  source 1..75: mol_type = other DNA
tggagtttatcatgtctgttgatatcggtacttcaggacccatacgtatttttacgcctgaatgctgtcgtgaac

SEQ ID NO: 389059 - DNA, 75 bp, synthetic construct
  source 1..75: mol_type = other DNA
accggattggcacagagacattgcatttctgattcagtattcctaccttcctgggatttatcgtggaaggcagat

SEQ ID NO: 389060 - DNA, 75 bp, synthetic construct
  source 1..75: mol_type = other DNA
aactcgatgccaggcgtaaacagaccagcaaaatttccccttattttgttccctaccctgcaactgtcgggtgca

SEQ ID NO: 389061 - DNA, 75 bp, synthetic construct
  source 1..75: mol_type = other DNA
caaaatttccccttattttgttccctaccctgcaactgtcaggtgcagaaacgggctgtttgtcgtgacactgca

SEQ ID NO: 389062 - DNA, 75 bp, synthetic construct
  source 1..75: mol_type = other DNA
gaaagcccgtagttacctgcaaatgctgccaatacagcttaacggtaatattttttcttatacatcttcgggatt

SEQ ID NO: 389063 - DNA, 75 bp, synthetic construct
  source 1..75: mol_type = other DNA
actattatgattatcacactgtccccgtgattgactggttctttaaacaagcaaccgaggcgttgcatcacgaac

SEQ ID NO: 389064 - DNA, 75 bp, synthetic construct
  source 1..75: mol_type = other DNA
atgagagatctgttacaacgcccggatttattcagtatcaataccgcaacactgggctataaaacgccgctcccc

SEQ ID NO: 389065 - DNA, 75 bp, synthetic construct
  source 1..75: mol_type = other DNA
gccgcatttcgtcgcagcgccctggcagaagtgggttactggagtgacgatatgatcaccgaagatattgatatt

SEQ ID NO: 389066 - DNA, 75 bp, synthetic construct
  source 1..75: mol_type = other DNA
ttgcccgtaatgacagcgcgcttgggttgtttaatggcgatatcggtatcgctctggatcgcgggcaggggacgc

SEQ ID NO: 389067 - DNA, 75 bp, synthetic construct
  source 1..75: mol_type = other DNA
taccacgcgatgtcccactctcccggaaagctcgcaactacctgcaaattctgccacaacagataaacggcaatg

SEQ ID NO: 389068 - DNA, 75 bp, synthetic construct
  source 1..75: mol_type = other DNA
cgcgtggattgtgctggtgctcggctatttccaggtcgtatggcctctgaatcgtcagccggtgccattgccgaa

SEQ ID NO: 389069 - DNA, 75 bp, synthetic construct
  source 1..75: mol_type = other DNA
tttatccggcagggcaaaaacaagtgcaacttgccgtgacaaataatgatgaaaatagcacctatttaattcaat

SEQ ID NO: 389070 - DNA, 75 bp, synthetic construct
  source 1..75: mol_type = other DNA
ggcgtggaagatcgcggcgtgatggcgacgtttatgcaggcactggggtttacggcacaaaagggcggctgggag

SEQ ID NO: 389071 - DNA, 75 bp, synthetic construct
  source 1..75: mol_type = other DNA
ggtgtggggcaatatctgctggaagaggttttgcgtaacaatcctggcgtttcatgctggtggatggcggatgca

SEQ ID NO: 389072 - DNA, 75 bp, synthetic construct
  source 1..75: mol_type = other DNA
gcgttttaacgagcgcctgctcgctgccgtgcgggtaaccttaagcggcaccgagggggcactggattccctgcg

SEQ ID NO: 389073 - DNA, 75 bp, synthetic construct
  source 1..75: mol_type = other DNA
taatgcctgcttataatgcgtctgcaacaatagaacaagctgtaaactctgtaattgatcaagactttaaggatt

SEQ ID NO: 389074 - DNA, 75 bp, synthetic construct
  source 1..75: mol_type = other DNA
tctcgtggcactgaaccatccttaagtgtcgcccttcagattgcgtctatcgaaggggttagtgttgagtggctg

SEQ ID NO: 389075 - DNA, 75 bp, synthetic construct
  source 1..75: mol_type = other DNA
atgaactatcgtattattccggtcaccgcattctcccagaactgttcattgatctggtgtgagcaaactcacctg

SEQ ID NO: 389076 - DNA, 75 bp, synthetic construct
  source 1..75: mol_type = other DNA
gcccgcgtattccggcggtgaaaagccagcttcgtcaactggatagcgaggcgtgtcgggaactggcgcgtcagg

SEQ ID NO: 389077 - DNA, 75 bp, synthetic construct
  source 1..75: mol_type = other DNA
aagtcgttacctgccgctactgcttgggctgggccttgatgaattaagcatgagtagcccacgcattccggcggt

SEQ ID NO: 389078 - DNA, 75 bp, synthetic construct
  source 1..75: mol_type = other DNA
tctggcccgcgcttcggcgatcccggtactgagcggcctgccgctggatgcgattgcccgttatgccgggcaacc

SEQ ID NO: 389079 - DNA, 75 bp, synthetic construct
  source 1..75: mol_type = other DNA
ttcatgctggtggatggcggatgcaggcgtggaagatcgcggtgtgatgacggcgtttatgcaggcgctggggtt

SEQ ID NO: 389080 - DNA, 75 bp, synthetic construct
  source 1..75: mol_type = other DNA
caacaggactgattattgctctctatcttactttattaccggctattctttttgacgtacagctggattcagata

SEQ ID NO: 389081 - DNA, 75 bp, synthetic construct
  source 1..75: mol_type = other DNA
atgttaacgattcaatttctctgtcctttgcctaacggtcttcatgcccgtccggcgtgggaacttaaagagcag

SEQ ID NO: 389082 - DNA, 75 bp, synthetic construct
  source 1..75: mol_type = other DNA
tggttggatataatatcagtgaccaatagagcttattgtatacaagagtgtttagctaaatatcgtgtaaatgaa

SEQ ID NO: 389083 - DNA, 75 bp, synthetic construct
  source 1..75: mol_type = other DNA
ctaaatttacaggtggcatcactgcacataacagccaaatagccataggtgatcaagctgtagttacacttaatg

SEQ ID NO: 389084 - DNA, 75 bp, synthetic construct
  source 1..75: mol_type = other DNA
aatcagcagacctcatttgatcagccagactggaaaaccggggtgtttaaatttgatacattacacctgaacaat

SEQ ID NO: 389085 - DNA, 75 bp, synthetic construct
  source 1..75: mol_type = other DNA
tattgcgtctaactcagtgtttcttgtacatgtaaacaatgaccaggctgaccagttgaatgttaccggcaaact

SEQ ID NO: 389086 - DNA, 75 bp, synthetic construct
  source 1..75: mol_type = other DNA
ttcgaaagccgcaatagactttatggcgtcaggttataagtccttccttacagaagtcaataacctgaacaagcg

SEQ ID NO: 389087 - DNA, 75 bp, synthetic construct
  source 1..75: mol_type = other DNA
gctctcattcctggtatgccggtgctgaagttggttatcgttaccacctgacgaaagagtcttgggtggagccac

SEQ ID NO: 389088 - DNA, 75 bp, synthetic construct
  source 1..75: mol_type = other DNA
cagctctgttggtattgccagcggtcgtccgacagttgtgctttctgactcacagcaagttaatccggataatat

SEQ ID NO: 389089 - DNA, 75 bp, synthetic construct
  source 1..75: mol_type = other DNA
ctgcataaaattggtgcaggtacgctgaatgttaatgtttctcaaggtaataatctgaaaactggcaatggcatt

SEQ ID NO: 389090 - DNA, 75 bp, synthetic construct
  source 1..75: mol_type = other DNA
cataccaacaacagtcaggctgaccagctgaatgtcacgaataaactgtcgggcagtaataataccgtcctggtc

SEQ ID NO: 389091 - DNA, 75 bp, synthetic construct
  source 1..75: mol_type = other DNA
tggtacgtcagtaatgagtaacgctttaatgcgaaaggctaagcaggaagggatgccgatagaattactgtcatt

SEQ ID NO: 389092 - DNA, 75 bp, synthetic construct
  source 1..75: mol_type = other DNA
tccttcctgacagaggtcaataacctgaacaagcgtatgggtgacctgcgggatactcagggggatgccggcgtc

SEQ ID NO: 389093 - DNA, 75 bp, synthetic construct
  source 1..75: mol_type = other DNA
aaggggttcagcacactgacagtggataaactggatacaaacaacagtgttctggctttacggacaaacctgaac

SEQ ID NO: 389094 - DNA, 75 bp, synthetic construct
  source 1..75: mol_type = other DNA
aaacggtgatatcacatcagaaaaagcagcaaccattcagtttggttctgaaaaaaatatcagcgcagccccgtc

SEQ ID NO: 389095 - DNA, 75 bp, synthetic construct
  source 1..75: mol_type = other DNA
gaagatgtctggcagcgggaagagattgtcaccactggcgttggttttggcgtggcgatcccgcacaccaaatct

SEQ ID NO: 389096 - DNA, 75 bp, synthetic construct
  source 1..75: mol_type = other DNA
ctatcgcagagttattagtagtatcgccaatgatgagcaaaatgaaaggttctttcaaaccgcagcgtttctcga

SEQ ID NO: 389097 - DNA, 75 bp, synthetic construct
  source 1..75: mol_type = other DNA
cagcgtcgtgcatatgttgatggctatcgtgatgtactgccagagcctcatacattgtcagacgttgttcgtgag

SEQ ID NO: 389098 - DNA, 75 bp, synthetic construct
  source 1..75: mol_type = other DNA
gaccgactgaacaatcagtggtacattaaccaaagccggacgctaagcccgacggagagagaaatattgcgcttt

SEQ ID NO: 389099 - DNA, 75 bp, synthetic construct
  source 1..75: mol_type = other DNA
attactgtaagacgagcgggaaaggctatgttccgtaccaaattcatatcagagggaccggttcatacgcaaatc

SEQ ID NO: 389100 - DNA, 75 bp, synthetic construct
  source 1..75: mol_type = other DNA
ggcggcggtggcggcaggaagcacggttgcgcccgtcagtccggcatattacaccgtaggttttcgggtttatga

SEQ ID NO: 389101 - DNA, 75 bp, synthetic construct
  source 1..75: mol_type = other DNA
caaaccgatatcatccgactgtcccggacagatcaggaaatttttgctcaggcattactgtcaccaacagaacct

SEQ ID NO: 389102 - DNA, 75 bp, synthetic construct
  source 1..75: mol_type = other DNA
ccggcatggctacagtaccggaacacctccggggaaacccatcagactgtatggccatcaccatgcaggcgatgc

SEQ ID NO: 389103 - DNA, 75 bp, synthetic construct
  source 1..75: mol_type = other DNA
gttatccattgaaattaaggatatgggagaagagcgtgatgatctggcttcccaactgacccgccttgaacaatc

SEQ ID NO: 389104 - DNA, 75 bp, synthetic construct
  source 1..75: mol_type = other DNA
tagaactatccacctacacggagattgaactctatttagttagtaatgctggaaaacgttggcgtcttcatcgtg

SEQ ID NO: 389105 - DNA, 75 bp, synthetic construct
  source 1..75: mol_type = other DNA
gaaacagatacccatcacccagtttctccttctctctatttgcaggataaatcctcagactttgccggcatgatt

SEQ ID NO: 389106 - DNA, 75 bp, synthetic construct
  source 1..75: mol_type = other DNA
gtggacacctaacctgaatttctcaatggttgatttccacgagcgcaaacgcctcattcaagaagaaattgatcg

SEQ ID NO: 389107 - DNA, 75 bp, synthetic construct
  source 1..75: mol_type = other DNA
actcatggatgctctccaggccatcgatccagagttacttaaacaagctcttggcggcgaaaaattccagaagtg

SEQ ID NO: 389108 - DNA, 75 bp, synthetic construct
  source 1..75: mol_type = other DNA
gttatcaacagtatcgtctccagcccactggataaaacggtggtaatgctggtgacggacagtgacgtaactaac

SEQ ID NO: 389109 - DNA, 75 bp, synthetic construct
  source 1..75: mol_type = other DNA
gggctggggcttgatgagctgagtatgagtagtccacgcattccggcagtgaaaagccagcttcgccaactcgac

SEQ ID NO: 389110 - DNA, 75 bp, synthetic construct
  source 1..75: mol_type = other DNA
aaaggccgatgctaaaagctcgctggcgttgattggaactggcaccttatttaatgacagttgcagcctgaacat

SEQ ID NO: 389111 - DNA, 75 bp, synthetic construct
  source 1..75: mol_type = other DNA
ggtcgccgaagatttaactccaagccagtttttgagtctcaatttaaaaaatctcgcaggcatgattctggagaa

SEQ ID NO: 389112 - DNA, 75 bp, synthetic construct
  source 1..75: mol_type = other DNA
agtatgagtagcccgcgtattccggcggtgaaaagccagcttcgtcaactggatagcgaggcgtgtcgggaactg

SEQ ID NO: 389113 - DNA, 75 bp, synthetic construct
  source 1..75: mol_type = other DNA
cgcaaactggtgaataaaaactttcgccagtcgctgtttgccgcgcaagatgcgcaaagcatcctgacgttactg

SEQ ID NO: 389114 - DNA, 75 bp, synthetic construct
  source 1..75: mol_type = other DNA
cagcttcgtcaactggatagcgaggcgtgtcgggaactggcgcgtcaggcgtgcgagtgccgcagcgcgcaggaa

SEQ ID NO: 389115 - DNA, 75 bp, synthetic construct
  source 1..75: mol_type = other DNA
ggcatcaccgtttgaaaatacggcaccagcgcgcccgaccaccagcacggcaacggctgcaaccagcaaaccagt

SEQ ID NO: 389116 - DNA, 75 bp, synthetic construct
  source 1..75: mol_type = other DNA
ttgtaattactggatttgcccctatatttccagacacctgttatcacttaacccattactggcttgctgccgtag

SEQ ID NO: 389117 - DNA, 75 bp, synthetic construct
  source 1..75: mol_type = other DNA
cccccccccccccgacgtccgcgtcctgtctgacaggggccatatctgtaaatactgaagctgtattatctccca

SEQ ID NO: 389118 - DNA, 75 bp, synthetic construct
  source 1..75: mol_type = other DNA
gatgctgggtgcggtgcatattgacctcggactggatgacggcgcactggatgcctcattcaccaccggcggtgt

SEQ ID NO: 389119 - DNA, 75 bp, synthetic construct
  source 1..75: mol_type = other DNA
aaaccgaagcctatcgcggtggtgggatgctgggtgcggtgcatattgacctcggactggatgacggcgcactgg

SEQ ID NO: 389120 - DNA, 75 bp, synthetic construct
  source 1..75: mol_type = other DNA
gcccgacatcaagtacggcaacggctgcaaccagcaagccggttaccagtgtggcttcaggaccacgcgcattaa

SEQ ID NO: 389121 - DNA, 75 bp, synthetic construct
  source 1..75: mol_type = other DNA
tacgtttgccaggaacctgcttactaaaggacgtcaactttacggtcactaaaggtgacattgtcacgttaatgg

SEQ ID NO: 389122 - DNA, 75 bp, synthetic construct
  source 1..75: mol_type = other DNA
tacgtttgcctgaaacctgcttactggaaaacgttaatttcacagtcaataaaggtgacattgtcacgttaatgg

SEQ ID NO: 389123 - DNA, 75 bp, synthetic construct
  source 1..75: mol_type = other DNA
cgtcgggcaaaatttactgctggcgctaccggcgacacttaaagggaatgcccgacgtaatgccgtgaatgatgc

SEQ ID NO: 389124 - DNA, 75 bp, synthetic construct
  source 1..75: mol_type = other DNA
atgattttcaatattcagcgctactcgacccatgatggccccggtatccgcacggtcgtatttcttaaaggctgt

SEQ ID NO: 389125 - DNA, 75 bp, synthetic construct
  source 1..75: mol_type = other DNA
caactatcaacagttcattcagacgctggaaaaagccattactcagcatcgccagcagcttcatcagtggacgca

SEQ ID NO: 389126 - DNA, 75 bp, synthetic construct
  source 1..75: mol_type = other DNA
cgtcagattggcattctttttcaggatgcactgttatttgaccagttcagcgtcgggcaaaatttactgctggcg

SEQ ID NO: 389127 - DNA, 75 bp, synthetic construct
  source 1..75: mol_type = other DNA
atgtctggaaatataggggcaaatccagaagcattaaaacttactaatcaaagcaaaaatctaccctatctggcg

SEQ ID NO: 389128 - DNA, 75 bp, synthetic construct
  source 1..75: mol_type = other DNA
atgcgctacttaaatacaaagaatatcattgcagcaggagtattactctcctgtatgagcagcattgcctggggt

SEQ ID NO: 389129 - DNA, 75 bp, synthetic construct
  source 1..75: mol_type = other DNA
gttggagtcattggctcgggtgagttccaggtatcacgacatatcaacgtcgctacagttcaaactcttgcaagt

SEQ ID NO: 389130 - DNA, 75 bp, synthetic construct
  source 1..75: mol_type = other DNA
agccattcagccgtcttgatgtggctctgcgcgataattttcgccagtgggtgttcagcgaagttcgcgccctgg

SEQ ID NO: 389131 - DNA, 75 bp, synthetic construct
  source 1..75: mol_type = other DNA
cgtcagattggcattcttttccaggatgcgctgttatttgaccagttcagcgtcgggcaaaatttattgctggcg

SEQ ID NO: 389132 - DNA, 75 bp, synthetic construct
  source 1..75: mol_type = other DNA
tgcgtttgtctgaaacccctttgctggcaaacgtcaactttacggtagataacggtgacattgtcacgttaatgg

SEQ ID NO: 389133 - DNA, 75 bp, synthetic construct
  source 1..75: mol_type = other DNA
cggcggcagggaaaaaaatcatcatccgcgtaccgctgattcagggctttaatgccgatgaaaccgcagtgaaag

SEQ ID NO: 389134 - DNA, 75 bp, synthetic construct
  source 1..75: mol_type = other DNA
tatgggaaataccagcagaacgcatgaaaatgcgtcggcctcaccttgtacctttatcatctcaagtgattaccc

SEQ ID NO: 389135 - DNA, 75 bp, synthetic construct
  source 1..75: mol_type = other DNA
gcgaatggcattgatcctgtagaggaacgcaaagcttcaagactcgctcaaaagctatcaacagaaaattctttc

SEQ ID NO: 389136 - DNA, 75 bp, synthetic construct
  source 1..75: mol_type = other DNA
gaggctattgctcgcgaatggcaccagtcaaaagccgatcggtggtcattacgctatcgtgatgaaatcattgat

SEQ ID NO: 389137 - DNA, 75 bp, synthetic construct
  source 1..75: mol_type = other DNA
cttctccggcgatatcgctaaagctatcgctgctggcgcaagcgcggtgatggtaggctccatgctggcaggtac

SEQ ID NO: 389138 - DNA, 75 bp, synthetic construct
  source 1..75: mol_type = other DNA
ttgtacgtatcagcggtgcgggcatccaggaaagccacgttcacgacgtgaccattactaaagagtccccgaact

SEQ ID NO: 389139 - DNA, 75 bp, synthetic construct
  source 1..75: mol_type = other DNA
tgacgaaaactattcgtctgaatatccctatgctctccgcagcaatggataccgtaacggaagcgcgcctggcta

SEQ ID NO: 389140 - DNA, 75 bp, synthetic construct
  source 1..75: mol_type = other DNA
cagccggggagcttcacaccactcatcagagttgaaactgccaccggtgaactggccagaacgcagcgccgcagc

SEQ ID NO: 389141 - DNA, 75 bp, synthetic construct
  source 1..75: mol_type = other DNA
cgctctgccttatttagaaatgtggatggttctggaaacgttgcactaggacgtgaggcttctcttggtttgtct

SEQ ID NO: 389142 - DNA, 75 bp, synthetic construct
  source 1..75: mol_type = other DNA
ggtgaagtgaaaagcgttgaggagatcatggcgaccgttctgcgcgataaaccgttttacgatcgcagcggcggc

SEQ ID NO: 389143 - DNA, 75 bp, synthetic construct
  source 1..75: mol_type = other DNA
aaagtacatttccccttccttactgccaatgaacttcctcacttccttaacgatctggcgggttataccggcagt

SEQ ID NO: 389144 - DNA, 75 bp, synthetic construct
  source 1..75: mol_type = other DNA
ataatcactaaaaatgcaaccaagattgtgatgcttaccggagtaagaacacaagagctgcgttttgccacatgg

SEQ ID NO: 389145 - DNA, 75 bp, synthetic construct
  source 1..75: mol_type = other DNA
ctgaatacaatccagcgcctgatttggctatcgctctggccgttcctaagcaagaacaccatccttttttatctg

SEQ ID NO: 389146 - DNA, 75 bp, synthetic construct
  source 1..75: mol_type = other DNA
gggcatcaaatgtgttcatatccgcaaagacaaagccccggcgcttggtaaaccaaatccggcggttaacccatt

SEQ ID NO: 389147 - DNA, 75 bp, synthetic construct
  source 1..75: mol_type = other DNA
aaacctgaggctaaaaaaagccctcctcagcagattgatgcatttcgtaaggaatatggagaaattttagaagag

SEQ ID NO: 389148 - DNA, 75 bp, synthetic construct
  source 1..75: mol_type = other DNA
gcggtttactttctaggggaattggcgcgtttaggaatgttaccgacggtatccaaagccaggaagaatatgagg

SEQ ID NO: 389149 - DNA, 75 bp, synthetic construct
  source 1..75: mol_type = other DNA
ttgatagagcaaaaacttgagcaagataaaaaagattggattgtaattaactttgactcctggctctatcagggc

SEQ ID NO: 389150 - DNA, 75 bp, synthetic construct
  source 1..75: mol_type = other DNA
caaaaccgagcagttctgcccgaatgccaaaattattcatgtcgatatcgaccgtgcagagctgggcaaaatcaa

SEQ ID NO: 389151 - DNA, 75 bp, synthetic construct
  source 1..75: mol_type = other DNA
ggactacggcgggctggagatgtttaaagtagtatgtaattccgtccagtccctctgccaaagtactcctgcgaa

SEQ ID NO: 389152 - DNA, 75 bp, synthetic construct
  source 1..75: mol_type = other DNA
tatggtggcaccatttgcttctgcgactcaacacttaaacaacctgccctctacgttccagttaggctttgtggc

SEQ ID NO: 389153 - DNA, 75 bp, synthetic construct
  source 1..75: mol_type = other DNA
aagcagggaaagtctttaaaagatttataagtggtataaacgataatccgcattggatgaatgctcttataaaag

SEQ ID NO: 389154 - DNA, 75 bp, synthetic construct
  source 1..75: mol_type = other DNA
gcgtgctggcatcgaatttaacggcatggcagaagaaagcgtaattaccaaactgcaatctattggtttcgttat

SEQ ID NO: 389155 - DNA, 75 bp, synthetic construct
  source 1..75: mol_type = other DNA
atggcagaagaaagcgtgatctcaaaactgcaatctattggtttcgtgatcgctggttattccgaagctgcaatc

SEQ ID NO: 389156 - DNA, 75 bp, synthetic construct
  source 1..75: mol_type = other DNA
tctacaggaattacagttggggatgaaacgaccagcgtggatgactgcagcattaaaagatgaacaatggaataa

SEQ ID NO: 389157 - DNA, 75 bp, synthetic construct
  source 1..75: mol_type = other DNA
cacagcgccatcaaatagattatctggataagctaatccaggttcctattcgggtgcctaaggctggggtccgtg

SEQ ID NO: 389158 - DNA, 75 bp, synthetic construct
  source 1..75: mol_type = other DNA
agtgaaatagaaagcacgaaaccaaagaatttgcctgattctgtaccagaatcttggacgaaagatgatgcaacc

SEQ ID NO: 389159 - DNA, 75 bp, synthetic construct
  source 1..75: mol_type = other DNA
cgcattgatgccgaagaaaaagtgtacccgatggtgccgccaggtgcggcgaatactgaaatggtgggggaataa

SEQ ID NO: 389160 - DNA, 75 bp, synthetic construct
  source 1..75: mol_type = other DNA
gtctgctctcgaaaactggaatcgcccgcgctctggcctggtatctccctgattcctatctctgcgttctgctcg

SEQ ID NO: 389161 - DNA, 75 bp, synthetic construct
  source 1..75: mol_type = other DNA
ccgcggctggagtccgctgcgcctgattgcagtgacagtggttctcggcatcgtcggtaaattctgccatttcct

SEQ ID NO: 389162 - DNA, 75 bp, synthetic construct
  source 1..75: mol_type = other DNA
ctcggtctgcgttttggccttgcgcattacgcttatcgcatgggcgtcgcggcgatcccgctgattaaagcgaat

SEQ ID NO: 389163 - DNA, 75 bp, synthetic construct
  source 1..75: mol_type = other DNA
ggcaatgccaatggcccgatgggtgcatggttggtacatcacaacgtattgccccacgatggcaacgtgttgcgt

SEQ ID NO: 389164 - DNA, 75 bp, synthetic construct
  source 1..75: mol_type = other DNA
ggaaaacatcgcgtgactatcgaaaagcacaacgatgattatcgtatttcgctggaacaaggtacgccgggcttt

SEQ ID NO: 389165 - DNA, 75 bp, synthetic construct
  source 1..75: mol_type = other DNA
ggggaggatgaaaaggctgatgtaattttgcaggcgctgtttttcacacactcgccgctttttgttgactttgcc

SEQ ID NO: 389166 - DNA, 75 bp, synthetic construct
  source 1..75: mol_type = other DNA
tctttcgccggggcggtgggagggcagtttaacctgaacgaaaccgttgttattgatgtgacatacgaatattca

SEQ ID NO: 389167 - DNA, 75 bp, synthetic construct
  source 1..75: mol_type = other DNA
cacctgactctgacctgccgggacaatcaactggtcgtgggttacagcgcaccagataaagctcatgcggaatct

SEQ ID NO: 389168 - DNA, 75 bp, synthetic construct
  source 1..75: mol_type = other DNA
tcttgagtgccacgctgttcagcactgcttcgcacgccatgggccgggaacaacaatggggtagctggtttggca

SEQ ID NO: 389169 - DNA, 75 bp, synthetic construct
  source 1..75: mol_type = other DNA
cggatcgcaaagtgttgtgtttctccggcgacggcagcctgatgatgaatattcaggagatggcgaccgctagcg

SEQ ID NO: 389170 - DNA, 75 bp, synthetic construct
  source 1..75: mol_type = other DNA
gaaatcatcaatcgccctggcccggcgctgatccatgtgcgcattgatgccgaagaaaaagtgtacccgatggtg

SEQ ID NO: 389171 - DNA, 75 bp, synthetic construct
  source 1..75: mol_type = other DNA
gcggatttgcagcgtgaattcccgtgtccaatcccgaaagcgtgcgatccattaagccattacggcctgatcaac

SEQ ID NO: 389172 - DNA, 75 bp, synthetic construct
  source 1..75: mol_type = other DNA
gcgggctggtggcaagccagattgcgttaacccatcccgagcgtgttcaggcgctggtcaccgtggcgtcgtcgc

SEQ ID NO: 389173 - DNA, 75 bp, synthetic construct
  source 1..75: mol_type = other DNA
atctatatgataacatatggatgttcaacgctgattatcctcccattactctggctatatctaagaaccagggcg

SEQ ID NO: 389174 - DNA, 75 bp, synthetic construct
  source 1..75: mol_type = other DNA
ctccggcatctcagcaaggacgctggccaacaccatgcacaccatggctgcacgtggatatgagtacaaagaacg

SEQ ID NO: 389175 - DNA, 75 bp, synthetic construct
  source 1..75: mol_type = other DNA
gggcgcagccagggatttggtgcgatgtcacttgctgatatggctgaagtcgtgctgcgacaagcgccggacaaa

SEQ ID NO: 389176 - DNA, 75 bp, synthetic construct
  source 1..75: mol_type = other DNA
cttaatggcgggctggaaatcctgaaaacggtcgatctccgtcagccgctgcaaaacgtgtccatgccgtttttg

SEQ ID NO: 389177 - DNA, 75 bp, synthetic construct
  source 1..75: mol_type = other DNA
actgaaacggcgcgccaggatgcgcgggcgttgaagaaaaccgttctggcgttaccgatgccggaggttgacgtg

SEQ ID NO: 389178 - DNA, 75 bp, synthetic construct
  source 1..75: mol_type = other DNA
actgactcttgctctgaataaagtgaatgaccgtctgaaaacacttgtgagcgatatcatcgcctctggagccga

SEQ ID NO: 389179 - DNA, 75 bp, synthetic construct
  source 1..75: mol_type = other DNA
tctgatgaacaacgaagcgctggggctggtacatcagcaacagagtctgttctacaagcagggcgtttttgccgc

SEQ ID NO: 389180 - DNA, 75 bp, synthetic construct
  source 1..75: mol_type = other DNA
gcgtatccgctcaatcgtcctcgtcagtggctgacctccggtgggctgggaaccatgggctttggcctgccagcg

SEQ ID NO: 389181 - DNA, 75 bp, synthetic construct
  source 1..75: mol_type = other DNA
tacaaggaacgtttcccacagatgattcggtatcgggttaaagaatgggaaaaagttgccggtgtgcctgttgcg

SEQ ID NO: 389182 - DNA, 75 bp, synthetic construct
  source 1..75: mol_type = other DNA
aacagtgttaaaacagccgcttggcgcagaaattgaacgtgcggcgctctccgtcaaacaggaacttgccagcac

SEQ ID NO: 389183 - DNA, 75 bp, synthetic construct
  source 1..75: mol_type = other DNA
accctctgcctcacccagaaaggcgtcggaagaactgaaggtaaaagtaccggtcgaacgctgacgaccgctcct

SEQ ID NO: 389184 - DNA, 75 bp, synthetic construct
  source 1..75: mol_type = other DNA
gggcgttgaagaaaaccgttctggcgttaccgatgccggaggttgacgtgctcaatggtgggctggaaatcctca

SEQ ID NO: 389185 - DNA, 75 bp, synthetic construct
  source 1..75: mol_type = other DNA
gatcgcgatgtaagaacgatggttgctctgggactggtgatggatttcgacgcaagaacgactattccattcgaa

SEQ ID NO: 389186 - DNA, 75 bp, synthetic construct
  source 1..75: mol_type = other DNA
ctgaacaaatacattactgaatacctgactacaaagggcgtgtttgaagatgaaggaagaaatcagagcgcaact

SEQ ID NO: 389187 - DNA, 75 bp, synthetic construct
  source 1..75: mol_type = other DNA
tgatgcccttcgctacgaccgccagactatttttggccttgtccgtgagcgtccgatcgacattcacaaagaccc

SEQ ID NO: 389188 - DNA, 75 bp, synthetic construct
  source 1..75: mol_type = other DNA
cctggaaaccatgggaaaaaatcctgatgctgcagttatctcaataggtgcaatatttttcgatccgcaaaccgg

SEQ ID NO: 389189 - DNA, 75 bp, synthetic construct
  source 1..75: mol_type = other DNA
caggactgtgcttataaatttcttgtctgcgaggataaacccggcatggcccgccctgctctcgattcctgggat

SEQ ID NO: 389190 - DNA, 75 bp, synthetic construct
  source 1..75: mol_type = other DNA
ggtgaacgccataacgctctgaacgatgcacgttaccaggcgaaatacgtttcagccatctggcaaaaactgctc

SEQ ID NO: 389191 - DNA, 75 bp, synthetic construct
  source 1..75: mol_type = other DNA
gccggggataaaaccggacgtgctggcgggtttccagcagcaactcagtgatgattttcagcgtacagtggagcg

SEQ ID NO: 389192 - DNA, 75 bp, synthetic construct
  source 1..75: mol_type = other DNA
attagcctatcccgagcgtgttcaggcgctggtcaccgtggcgtcgtcaccttgttttagtgcccgcgatgggtg

SEQ ID NO: 389193 - DNA, 75 bp, synthetic construct
  source 1..75: mol_type = other DNA
gccggggatcaaaccggacgtgctggcaggtttccagcagcaactcagtgacgattttcagcgcacggtagaacg

SEQ ID NO: 389194 - DNA, 75 bp, synthetic construct
  source 1..75: mol_type = other DNA
atgcggcttattgattattttccagagccatcaatctcagttatacattcagcaaaagattggcaggaagctatc

SEQ ID NO: 389195 - DNA, 75 bp, synthetic construct
  source 1..75: mol_type = other DNA
agtgcgcgccgcataagccattactgctgttatacgtactggcgggttatcggcaaggtcatgggcgtctgttta

SEQ ID NO: 389196 - DNA, 75 bp, synthetic construct
  source 1..75: mol_type = other DNA
gtggatatgagtacaaggaacgtttcccgcagatgatccggtatcgggttaaagagtgggaaaaagttgccggtg

SEQ ID NO: 389197 - DNA, 75 bp, synthetic construct
  source 1..75: mol_type = other DNA
gcaagcgcacgtggcgattcaggcggatgttgatgatgtgttgtcgcaattaatcccacaggtggaagtccaacc

SEQ ID NO: 389198 - DNA, 75 bp, synthetic construct
  source 1..75: mol_type = other DNA
ggcaatgccaatggcccgatgggtgcatggttggtacatcacaacgtattgtatagcgcggcgattttttttgat

SEQ ID NO: 389199 - DNA, 75 bp, synthetic construct
  source 1..75: mol_type = other DNA
gacggtgacgattcgggataaccagccggagaaagtaaccatttccggcacagcggtgattttatttcatgccga

SEQ ID NO: 389200 - DNA, 75 bp, synthetic construct
  source 1..75: mol_type = other DNA
gccagcaacaggtgccggaaatgtatcttgacgttctggcgagtcgtttagggatgcacgatgcttccgacgaag

SEQ ID NO: 389201 - DNA, 75 bp, synthetic construct
  source 1..75: mol_type = other DNA
catggttggtacatcacaatgtattgcccacgatggcaacgtgttgcgtgttaaaggccatcaggggcgcgcatt

SEQ ID NO: 389202 - DNA, 75 bp, synthetic construct
  source 1..75: mol_type = other DNA
caaaaacgaaaccgatggtcgcatgttctcgcctgcgattggtattgtggaagatccggtgactggcaatgccaa

SEQ ID NO: 389203 - DNA, 75 bp, synthetic construct
  source 1..75: mol_type = other DNA
tgaccgctatcagcaaacagattggctgcaatggtttcttcccgttccagatccgcccaggcaaaaacgaaaccg

SEQ ID NO: 389204 - DNA, 75 bp, synthetic construct
  source 1..75: mol_type = other DNA
aggaaaagcggcttacggctggcagcgtgacggcggtcatgccgaatatctgctggcggaagaaaaagatctgat

SEQ ID NO: 389205 - DNA, 75 bp, synthetic construct
  source 1..75: mol_type = other DNA
tccggtaatgccgcaggtcgtttgctggcattgcaatccactgccgactggggacgcgtggtctacatcggagaa

SEQ ID NO: 389206 - DNA, 75 bp, synthetic construct
  source 1..75: mol_type = other DNA
tctcctgccggacgcgttgagctacgaagatggtgcgtttatcagttgcggcgttggcacggcgtatgaagggat

SEQ ID NO: 389207 - DNA, 75 bp, synthetic construct
  source 1..75: mol_type = other DNA
tgggccacccaggcgatgttgtggcaacagaaagcgtgtgcggaagaaaatccacaagtcagcggtcgttactgg

SEQ ID NO: 389208 - DNA, 75 bp, synthetic construct
  source 1..75: mol_type = other DNA
gtggcgtgattatgagttttcagatggatttaatgaggaactggaaaagaatctaaaggagttatcggtaggtta

SEQ ID NO: 389209 - DNA, 75 bp, synthetic construct
  source 1..75: mol_type = other DNA
cggtgcggatgttgcgcttgattgttccggtaatgctgcggggcgcttgctggcattgcaatctaccgccgactg

SEQ ID NO: 389210 - DNA, 75 bp, synthetic construct
  source 1..75: mol_type = other DNA
cggctttatccacaaaaatatgtccattgaacgccaggcggaagaagttcgccgtgtgaaaaaacacgaatctgg

SEQ ID NO: 389211 - DNA, 75 bp, synthetic construct
  source 1..75: mol_type = other DNA
aaataaaataaaatcatctctagttatatttagagatgtgctaaagttagcagaggataaggttagagaaagttt

SEQ ID NO: 389212 - DNA, 75 bp, synthetic construct
  source 1..75: mol_type = other DNA
cagacgaacagaagagcatcactgataaagcaatagaagctttggaggaagttgcttcaaaatcaacacttaata

SEQ ID NO: 389213 - DNA, 75 bp, synthetic construct
  source 1..75: mol_type = other DNA
ggcgttggtaaaactcattattggaatagtttttatactaagcattctgaaggattagattttaatgcatattcg

SEQ ID NO: 389214 - DNA, 75 bp, synthetic construct
  source 1..75: mol_type = other DNA
atgcagattgccgccggattcggcctcgaaacgtgtgatttgaataacgaagccgatccgcagaccgcattgcag

SEQ ID NO: 389215 - DNA, 75 bp, synthetic construct
  source 1..75: mol_type = other DNA
tcagggaatggcgcgcaccgacggtaaaccggcggtctgtatggcctgtagcggaccgggtgcgactaacctggt

SEQ ID NO: 389216 - DNA, 75 bp, synthetic construct
  source 1..75: mol_type = other DNA
gatgatatcgttgttgatgaagacaataagattgtcactacgccagcatatatgttggcacagaatatcgctgaa

SEQ ID NO: 389217 - DNA, 75 bp, synthetic construct
  source 1..75: mol_type = other DNA
gggaggggctttcccgattcagcgtcccgctgaaatcggcggcctacctcctttcgccatgcaagcagtctatcg

SEQ ID NO: 389218 - DNA, 75 bp, synthetic construct
  source 1..75: mol_type = other DNA
tcgtgactggcgtaggtgttccgcagatcaccgccgttgctgatgcagtagaagccctggaaggcaccggtattc

SEQ ID NO: 389219 - DNA, 75 bp, synthetic construct
  source 1..75: mol_type = other DNA
ggcaacgtggcaactgctgcaggtgcccgcgcgctggcagaagccggttgcagtgccgttaaagtgggtatcggc

SEQ ID NO: 389220 - DNA, 75 bp, synthetic construct
  source 1..75: mol_type = other DNA
gtagagatcttcggaaatgaagaattaggtttcagaattgaaaaaaaattgaaagatagaaatccagatgactat

SEQ ID NO: 389221 - DNA, 75 bp, synthetic construct
  source 1..75: mol_type = other DNA
gggaggggctttcccgtttcagcgtcccgctgaaatcgtcggcctacctccttttgccctgaatgcagtctatcg

SEQ ID NO: 389222 - DNA, 75 bp, synthetic construct
  source 1..75: mol_type = other DNA
atttaaggccccttcctcgggaggggctttcccgtttcagcatccggctgaaatctgcggcttacctccttttgc

SEQ ID NO: 389223 - DNA, 75 bp, synthetic construct
  source 1..75: mol_type = other DNA
tccagcgaattattccgtcaacatcttagccagaccatgcgcgaattaaatgccattacccccgcgcccggtttt

SEQ ID NO: 389224 - DNA, 75 bp, synthetic construct
  source 1..75: mol_type = other DNA
gcggcaccaaccgcgaaccggagtttcgtcttgaagaaaccgggccatgttcagcaattttgcatgccgacaatg

SEQ ID NO: 389225 - DNA, 75 bp, synthetic construct
  source 1..75: mol_type = other DNA
gcggtggacaaaaccctgcattatctgcgggaggccgggatcgaggtggcgatctttgacggcgtcgagccgaac

SEQ ID NO: 389226 - DNA, 75 bp, synthetic construct
  source 1..75: mol_type = other DNA
aaccaagtgcccatggtttgatttcttacagtcataaatgtagagagctattaattcttgcttgtactgaggttg

SEQ ID NO: 389227 - DNA, 75 bp, synthetic construct
  source 1..75: mol_type = other DNA
gtaatttggggcaattacatatcgttattaacccgaactttttcttctccagcaaattatttcgtcaacatctta

SEQ ID NO: 389228 - DNA, 75 bp, synthetic construct
  source 1..75: mol_type = other DNA
tatgtctatcccggatacctgggcggtcgataaaaacggtgcaccaacaaccgatccgttcgcggtacatgctct

SEQ ID NO: 389229 - DNA, 75 bp, synthetic construct
  source 1..75: mol_type = other DNA
catgaacctctagcttatggccttcactttgctggcgctcagatcattaccgctcccggtagcccgctcatgctg

SEQ ID NO: 389230 - DNA, 75 bp, synthetic construct
  source 1..75: mol_type = other DNA
ctgccggaggagtatggcccagccttcccagcaatcgtcgattgttataccagtccacccacgttagtgtggcca

SEQ ID NO: 389231 - DNA, 75 bp, synthetic construct
  source 1..75: mol_type = other DNA
gtttatatctccgccgtcgcgttgattggcgcgctctcttacatcctgctggtgggcgatgtgaagcgcgttggc

SEQ ID NO: 389232 - DNA, 75 bp, synthetic construct
  source 1..75: mol_type = other DNA
cgatccagaagcaaaacgcgaatacgaaaaagcggcgaaagatttctgtatcgacaaacttggcgcgttcaataa

SEQ ID NO: 389233 - DNA, 75 bp, synthetic construct
  source 1..75: mol_type = other DNA
aatgtagtttaggccatccagtgaaatatgccgctaatccggtgcagataattgatgaggtggaaaacatgaatc

SEQ ID NO: 389234 - DNA, 75 bp, synthetic construct
  source 1..75: mol_type = other DNA
caaaaggtttcccggcagacgatccgcaagcaaaacgcgaatacgaaaaagctgcgaaagacttctgtatcgaca

SEQ ID NO: 389235 - DNA, 75 bp, synthetic construct
  source 1..75: mol_type = other DNA
atggtcgcggttctgtgcgtatgcgcgcggtgtggaagaaagaagatggggcggtggttatcagcgcattgccgc

SEQ ID NO: 389236 - DNA, 75 bp, synthetic construct
  source 1..75: mol_type = other DNA
tgttgactggtactgttcagactatctttaaagggaattttactgatatgttgtcggggtatcgtgtattttcca

SEQ ID NO: 389237 - DNA, 75 bp, synthetic construct
  source 1..75: mol_type = other DNA
aagtatctgatgttgcatatggtagctctgtttcaagcagggcaacggtgttgcagcagaaaaccggtagccctg

SEQ ID NO: 389238 - DNA, 75 bp, synthetic construct
  source 1..75: mol_type = other DNA
ccattatgaggaagagacttctgtgcgtcctgactggatggctctgatatatccagttatatctcttgacaggag

SEQ ID NO: 389239 - DNA, 75 bp, synthetic construct
  source 1..75: mol_type = other DNA
tacagggatcgcttcgataaagccttcacgatttttgtttgtaatcttaaaggcggtggttccaagacagtctct

SEQ ID NO: 389240 - DNA, 75 bp, synthetic construct
  source 1..75: mol_type = other DNA
ttgaggcagcacagcaagctggggtagcgacagctactgatttcgccatatttcagaatcatggttaccaagggc

SEQ ID NO: 389241 - DNA, 75 bp, synthetic construct
  source 1..75: mol_type = other DNA
tcagtaataaactgattaatattgttgtttttgttgcaattgtagaatatgcctatttattcctccacttctatt

SEQ ID NO: 389242 - DNA, 75 bp, synthetic construct
  source 1..75: mol_type = other DNA
gatggtcaggggaactggggcgcaccggacgatccgaaatcgttcgcggcgatgcgttacaccgaatcccggttg

SEQ ID NO: 389243 - DNA, 75 bp, synthetic construct
  source 1..75: mol_type = other DNA
aatgaagagaacccgcaccagctgcagcagctcatccgcctgccgggtcagcagtatgatgaggagtccggcctg

SEQ ID NO: 389244 - DNA, 75 bp, synthetic construct
  source 1..75: mol_type = other DNA
tcagcgaagggcaccgggtgacggtgcattacgggtatgatgagaaaggccgcctgaccggtgagcgtcagacgg

SEQ ID NO: 389245 - DNA, 75 bp, synthetic construct
  source 1..75: mol_type = other DNA
aaactggaaagcacagtccgttatctgggcattgaagtcgatgatgcgttagagatttctgaatcgattgaagtc

SEQ ID NO: 389246 - DNA, 75 bp, synthetic construct
  source 1..75: mol_type = other DNA
tctctgccaaactggaaaagccctgacagtgttcgtacttttgccgacaagataatgccatggagtatttatcag

SEQ ID NO: 389247 - DNA, 75 bp, synthetic construct
  source 1..75: mol_type = other DNA
gcggtttcgtgtcagggaacgcagtcgccataaatccgcgctggtcattcagaagtacagccgccagcaggcgag

SEQ ID NO: 389248 - DNA, 75 bp, synthetic construct
  source 1..75: mol_type = other DNA
ttgaccacggagggttatttatgtcagtttttttttcgagtttgtttagggattacagttcttcttactgcattg

SEQ ID NO: 389249 - DNA, 75 bp, synthetic construct
  source 1..75: mol_type = other DNA
aaagcattcgagaaaccgcagaagaaaaacatgcctagtatccgcccggatcaacttccacaattaatgcagact

SEQ ID NO: 389250 - DNA, 75 bp, synthetic construct
  source 1..75: mol_type = other DNA
gaagctgctgaggctcgatgggatgagatcgatttcaatgctagcgaatggaaaattcctgcagctcgaatgaag

SEQ ID NO: 389251 - DNA, 75 bp, synthetic construct
  source 1..75: mol_type = other DNA
aaaacatgccaagcatccggccggatcaacttccgcagctaatgcacaccatgcgtacggcaagtatcagcatgt

SEQ ID NO: 389252 - DNA, 75 bp, synthetic construct
  source 1..75: mol_type = other DNA
agcaacgatgttacgcagcagggcagtcgccctaaaacaaagttagccatattatggagcctcatgcttttatat

SEQ ID NO: 389253 - DNA, 75 bp, synthetic construct
  source 1..75: mol_type = other DNA
gtaacaaaacaacgaaccatgattggtttaggatcttttcctgctctttctctagctgaagccagaaacatccga

SEQ ID NO: 389254 - DNA, 75 bp, synthetic construct
  source 1..75: mol_type = other DNA
ctggcagttccgctactatcgacctctgacaaagcagcgaaccaagcagagctttggagcctaccctgccgtctc

SEQ ID NO: 389255 - DNA, 75 bp, synthetic construct
  source 1..75: mol_type = other DNA
agaactgccggaactaatgcgttctttagctatgtcaaacttatccgttcccactcgctgtcttatagaatggca

SEQ ID NO: 389256 - DNA, 75 bp, synthetic construct
  source 1..75: mol_type = other DNA
ttctggtgctcggtgggtagagatcgatctcaatgccaaactctggacgattcccgccgaacgaatgaaggctaa

SEQ ID NO: 389257 - DNA, 75 bp, synthetic construct
  source 1..75: mol_type = other DNA
gccgctaactggttccagattaaaagcagaagtgtcacagaggattatgcaaaggatatttggcgttctttggat

SEQ ID NO: 389258 - DNA, 75 bp, synthetic construct
  source 1..75: mol_type = other DNA
ggccgagaatttatctttcctagtcgaatcaaaccaacccagccgatgaatagccaaacagtgaatgcagcactc

SEQ ID NO: 389259 - DNA, 75 bp, synthetic construct
  source 1..75: mol_type = other DNA
agatcgatttcgaagctaaactatggataataccagccaatagaatgaaggcaaagcgggaacatattgttccat

SEQ ID NO: 389260 - DNA, 75 bp, synthetic construct
  source 1..75: mol_type = other DNA
caacgtattaatgaaattatgatttatgctgttaatactggtctgatagatgctaaccctgcttcaggcattggt

SEQ ID NO: 389261 - DNA, 75 bp, synthetic construct
  source 1..75: mol_type = other DNA
tttgggtaacagggtagcacctgaaggtaacactccgggtaacaacgaaggtaacagcattgctctgtacgatta

SEQ ID NO: 389262 - DNA, 75 bp, synthetic construct
  source 1..75: mol_type = other DNA
gaaaatggaaggcgctgaacatccacacaaggagaatgctggcagcgctcaggatcacgccagcgatagtgaaac

SEQ ID NO: 389263 - DNA, 75 bp, synthetic construct
  source 1..75: mol_type = other DNA
caccagcagaatgtgggatcacctgatgattgaccttgaaacgatgggcaaaaatcctgatgcaccaatagcctc

SEQ ID NO: 389264 - DNA, 75 bp, synthetic construct
  source 1..75: mol_type = other DNA
gttgaagcgttgatgaaaatgcctgaaattaacgctatgtatccggaacgcaaactgttcgctatcggatgggtt

SEQ ID NO: 389265 - DNA, 75 bp, synthetic construct
  source 1..75: mol_type = other DNA
cccttttctcattacgcctccagtttacaaacttgaagaaaaccgtcaaacattactccatattgtgtttactgg

SEQ ID NO: 389266 - DNA, 75 bp, synthetic construct
  source 1..75: mol_type = other DNA
ctggtctggataaggcgctggctgccggggctactgaaatcacgaaagaagaatattttgcccgcaaaaacggta

SEQ ID NO: 389267 - DNA, 75 bp, synthetic construct
  source 1..75: mol_type = other DNA
gtggtaactgccctgattgtggcgcagtgatgggtgacgcaacctaccaggagacattcaacgaagaaagccagg

SEQ ID NO: 389268 - DNA, 75 bp, synthetic construct
  source 1..75: mol_type = other DNA
catccaccagcaggttgtggcaccatctgatgattgaccttgaaacaatgggaaaaaatcctgatgccccgatta

SEQ ID NO: 389269 - DNA, 75 bp, synthetic construct
  source 1..75: mol_type = other DNA
cagggattcacggcggcattgcaggaactgatttacgaggcgctgaatgaacttgcatttgacaggcgcgaaacc

SEQ ID NO: 389270 - DNA, 75 bp, synthetic construct
  source 1..75: mol_type = other DNA
agcacgggtcgaacagttcattgccagccacggagctatgatgacgctcgatgaagccagaaccatgaaagagaa

SEQ ID NO: 389271 - DNA, 75 bp, synthetic construct
  source 1..75: mol_type = other DNA
tcatctcaataggtgcaatatttttcgatccgcaaaccggagatatgggaccggaatttagtaagactatcgatc

SEQ ID NO: 389272 - DNA, 75 bp, synthetic construct
  source 1..75: mol_type = other DNA
cgctatgaccgtcagactattttcggccttgttcgtgagcgcccgatcgacatttacaaagatcccgttgcactg

SEQ ID NO: 389273 - DNA, 75 bp, synthetic construct
  source 1..75: mol_type = other DNA
tgaacgtccgatcgacattcacaaagaccctgtggcactgaacaaatacattactgaatacctgactacaaaggg

SEQ ID NO: 389274 - DNA, 75 bp, synthetic construct
  source 1..75: mol_type = other DNA
ggtaaggtggcggatatcgtcagcaatccttatggcgtgagctggcaaaacctggtggatagccagcggattatg

SEQ ID NO: 389275 - DNA, 75 bp, synthetic construct
  source 1..75: mol_type = other DNA
aatttttccgtgcttcgccgccacaaaacggcagctcttttttatcttcccttcgctttcagggtgactctttat

SEQ ID NO: 389276 - DNA, 75 bp, synthetic construct
  source 1..75: mol_type = other DNA
caggtacaggttggcagggttattacttttggcggcctgttgcaggacagccagcgcattcttgatgccgcagaa

SEQ ID NO: 389277 - DNA, 75 bp, synthetic construct
  source 1..75: mol_type = other DNA
gacggtgaagccatgtactcattaccggttaacggcttctggagagatgcagactggctttactgtagagatgaa

SEQ ID NO: 389278 - DNA, 75 bp, synthetic construct
  source 1..75: mol_type = other DNA
ttggggctaatcaatgcattgggttatgcgccgggtgatatgcagccatcggattgcgcagtctggggcgtagca

SEQ ID NO: 389279 - DNA, 75 bp, synthetic construct
  source 1..75: mol_type = other DNA
atccttatggcgtgagctggcaaaatctggtggatagccagcggattatggatatcaccctcgacgaatttaaca

SEQ ID NO: 389280 - DNA, 75 bp, synthetic construct
  source 1..75: mol_type = other DNA
agccattcagccgtcttgatgtggccctgcgcgataattttcgccattgggtgttcagcgaaattcgcgccatgg

SEQ ID NO: 389281 - DNA, 75 bp, synthetic construct
  source 1..75: mol_type = other DNA
gccgccgactgaactatcgtctggagaaagtcctcaagcgcctgcatatcctggaaggtttgctggtggcgtttc

SEQ ID NO: 389282 - DNA, 75 bp, synthetic construct
  source 1..75: mol_type = other DNA
ccgcgttctaatcgtgtggatatggatcaggtgatgaatcatctgtttgccacgaccgatctggaaaagagctat

SEQ ID NO: 389283 - DNA, 75 bp, synthetic construct
  source 1..75: mol_type = other DNA
acaaaatattgttccaggactataccagagcgtatttcagttgaaaaaattaacgaggttaaaatttatccagaa

SEQ ID NO: 389284 - DNA, 75 bp, synthetic construct
  source 1..75: mol_type = other DNA
agaaatttattctgatgatgagttaaaccgtttgctggaagctgttaatcagaattgcccagccagaattgtgtt

SEQ ID NO: 389285 - DNA, 75 bp, synthetic construct
  source 1..75: mol_type = other DNA
tggcatccgacattaacaatattaaagaagtttattctgatgatgagttaaaccgtttgctggaagctgttaatc

SEQ ID NO: 389286 - DNA, 75 bp, synthetic construct
  source 1..75: mol_type = other DNA
ggccgtctgattcaggaaactgcccctgacggcgatatcacccgctaccgttatgataatccacacagtgactta

SEQ ID NO: 389287 - DNA, 75 bp, synthetic construct
  source 1..75: mol_type = other DNA
tcaggctcagcagcaggccaccgcagcaggtaactatcaaggggtagtatccattatattgactcaggcgccgta

SEQ ID NO: 389288 - DNA, 75 bp, synthetic construct
  source 1..75: mol_type = other DNA
ccatggacatcatcaccatcacgaacatggcgagtatcaggatgcccatgcacgagcccatgccaatgacattaa

SEQ ID NO: 389289 - DNA, 75 bp, synthetic construct
  source 1..75: mol_type = other DNA
acaacgcaggtcgtgatcccccctaacagccgcgactggcataccaacatgctggttgtcaccagtaagcgcctg

SEQ ID NO: 389290 - DNA, 75 bp, synthetic construct
  source 1..75: mol_type = other DNA
gcgtgctggtatcgaatttaacggcatggcagaagaaagcgtgatctcaaaactgcaatctattggtttcgtgat

SEQ ID NO: 389291 - DNA, 75 bp, synthetic construct
  source 1..75: mol_type = other DNA
atgatatcgcacagcttaagtttctctgtgaaaccctgtatcatgactgccttgcaaaccttgaagaaagcaatc

SEQ ID NO: 389292 - DNA, 75 bp, synthetic construct
  source 1..75: mol_type = other DNA
ccatgcagatgcaactggcggactaacagctggtcaatatcagggactcgtatcaattatcctgactcagtcaac

SEQ ID NO: 389293 - DNA, 75 bp, synthetic construct
  source 1..75: mol_type = other DNA
ctgattgagcatattgcgaccttcgcacttaattacaaaattaagtataatgaagacaataagctcattgagcag

SEQ ID NO: 389294 - DNA, 75 bp, synthetic construct
  source 1..75: mol_type = other DNA
agctacaggcatgtaagcgcaaaaagcgtgagctggaggaagaagaaaaaaggctgatacgtgaatatcagcctg

SEQ ID NO: 389295 - DNA, 75 bp, synthetic construct
  source 1..75: mol_type = other DNA
caggcatgtaagcgcaaaaagcgtgagctggaggaagaagaaaaaacgctgatacgtgaatatcagcctgagttt

SEQ ID NO: 389296 - DNA, 75 bp, synthetic construct
  source 1..75: mol_type = other DNA
tgccgttgtgggtctggaaaatagcgggtttggcaaggtacacgccgccgatggttccaccgtatcccggcaggt

SEQ ID NO: 389297 - DNA, 75 bp, synthetic construct
  source 1..75: mol_type = other DNA
gccacgccggatgcaaaccgggtcaacgttcgcccggtcgcgctcacacagggagcgcccggagaagatggcaac

SEQ ID NO: 389298 - DNA, 75 bp, synthetic construct
  source 1..75: mol_type = other DNA
atgaataaaaatattgccgcgacgggcaagggtgacgcacgtcatatgaaaaaattctgtgatattcgtgatctg

SEQ ID NO: 389299 - DNA, 75 bp, synthetic construct
  source 1..75: mol_type = other DNA
gaaacccaggcggaagcgatcctcgaactgaaactgcgtcatcttgccaaactggaagagatgaagattcgcggt

SEQ ID NO: 389300 - DNA, 75 bp, synthetic construct
  source 1..75: mol_type = other DNA
ggcacagcttaccggttggcaggctatcgacggatttaaagaaggtgaacccgcggaagcggaaattggtgttgc

SEQ ID NO: 389301 - DNA, 75 bp, synthetic construct
  source 1..75: mol_type = other DNA
cccggcctgcgattgttgacaaactggcacagcttactggctggcaggctattgacggatttaaagaaggtgaac

SEQ ID NO: 389302 - DNA, 75 bp, synthetic construct
  source 1..75: mol_type = other DNA
gaaactgctgatggcttccgatgcgggttacggtttcgtctgcacctttagcgatctggtggcgcgtaaccgtgc

SEQ ID NO: 389303 - DNA, 75 bp, synthetic construct
  source 1..75: mol_type = other DNA
gaaaattgcgttgctggaaagtatccgcaatttctttctgcttgttgtctggctacccctgaatttttcgccatt

SEQ ID NO: 389304 - DNA, 75 bp, synthetic construct
  source 1..75: mol_type = other DNA
ctcaaggctaatcacgaatctactgtcgtcaatacggatatcggtccgataactgttgagcgcggtcagatgata

SEQ ID NO: 389305 - DNA, 75 bp, synthetic construct
  source 1..75: mol_type = other DNA
ctggtgagccgctttttaaccggcgcgccgactgtactgatcgcctggtttgtctccggttttatctatcaatag

SEQ ID NO: 389306 - DNA, 75 bp, synthetic construct
  source 1..75: mol_type = other DNA
ggcttaacgctttctggcggtgagccctttatgcagccggaaatggcgatggcgctactgcaagccagccacgag

SEQ ID NO: 389307 - DNA, 75 bp, synthetic construct
  source 1..75: mol_type = other DNA
ccgcgtgccgctgattcagggctttaatgccgacgaaacctctgtaaaagccattaccgattttgccgccgacga

SEQ ID NO: 389308 - DNA, 75 bp, synthetic construct
  source 1..75: mol_type = other DNA
atgctgtggccgaaatggaagccggtgggtacatttttaaaaagaaaccttctggcaatacgatgaaatacgcga

SEQ ID NO: 389309 - DNA, 75 bp, synthetic construct
  source 1..75: mol_type = other DNA
cgcggtttggaagaaagaagatggcgcggtggttatcagcgcattgccgcatcaggtttcaggtgcgcgcgtact

SEQ ID NO: 389310 - DNA, 75 bp, synthetic construct
  source 1..75: mol_type = other DNA
ttgcaggagccgaaaatgctgcctgcccgtctgccaaacattttgcttaacggcaccaccggtattgccgtcggc

SEQ ID NO: 389311 - DNA, 75 bp, synthetic construct
  source 1..75: mol_type = other DNA
cgctacatgaatttacggaaaacgcctacttaaactactccatgtacgtgatcatggaccgtgcgttgccgttta

SEQ ID NO: 389312 - DNA, 75 bp, synthetic construct
  source 1..75: mol_type = other DNA
ttctggcgcaaagccggagtgataacccgccagcttgacgggcatgggttcacgatgcaggactggagaaattat

SEQ ID NO: 389313 - DNA, 75 bp, synthetic construct
  source 1..75: mol_type = other DNA
ccgcgcccgctgaatattttcgttaacgtggcgctgatttttaccgtgctgatgcatggtatgcaactggcgcta

SEQ ID NO: 389314 - DNA, 75 bp, synthetic construct
  source 1..75: mol_type = other DNA
atggaactggccagacatctagaatttactgtcagcaccggcgttaaagtttacttctgcgatcctcagagtcct

SEQ ID NO: 389315 - DNA, 75 bp, synthetic construct
  source 1..75: mol_type = other DNA
tcggcccgattagtgcacagcttggttttgcattgggatattattgccattggtgcagaaaaaatagaaaccaga

SEQ ID NO: 389316 - DNA, 75 bp, synthetic construct
  source 1..75: mol_type = other DNA
atggcgacggacattccgccacataacctgcgtgaagtcgcacaggcggcaatcgcgttaatcgaccagccgaaa

SEQ ID NO: 389317 - DNA, 75 bp, synthetic construct
  source 1..75: mol_type = other DNA
agtggtgtttgttgattctaccggacgcagctatgccatcgacccaattacgctgccgtcggcgcgtggtcaggg

SEQ ID NO: 389318 - DNA, 75 bp, synthetic construct
  source 1..75: mol_type = other DNA
acacaatccaaagttggccccggtgacaatatgaaagtggaatctattataactggggatggcaagctaatcact

SEQ ID NO: 389319 - DNA, 75 bp, synthetic construct
  source 1..75: mol_type = other DNA
cgttccttatgaagattctctgaaacaactggcgcgcgaacgctataaagcctaccgcgtggctggtttcaacct

SEQ ID NO: 389320 - DNA, 75 bp, synthetic construct
  source 1..75: mol_type = other DNA
ttcgtttaccagaagtcttgaaacgaactggtttcggcaaggcctggatttatcgtctgatcagtgaaggtcggt

SEQ ID NO: 389321 - DNA, 75 bp, synthetic construct
  source 1..75: mol_type = other DNA
ttattcgttgggagccagaaactcagcgcgttatctatcttcgcaaagactacccgcatgagtgctttagtcctt

SEQ ID NO: 389322 - DNA, 75 bp, synthetic construct
  source 1..75: mol_type = other DNA
gtctatttctggttaattctctcgaatttcattctttatatttctccagagaaatcagcgttgctggaaaatatc

SEQ ID NO: 389323 - DNA, 75 bp, synthetic construct
  source 1..75: mol_type = other DNA
gaagacttacataaactcagttatgtaacaactgcactacgtgctctgcgcaaggtaactctttcggatccgcag

SEQ ID NO: 389324 - DNA, 75 bp, synthetic construct
  source 1..75: mol_type = other DNA
gcagcggtaagcgcgtactcatcgcctgtgaagatgaaaagcaggcttaccggctggatgaagccctgtgggcgc

SEQ ID NO: 389325 - DNA, 75 bp, synthetic construct
  source 1..75: mol_type = other DNA
tatcaggcttatcagcctgttacggcacccgtcggtcgtacctacattgaccagagcagcccaacctatcaaatc

SEQ ID NO: 389326 - DNA, 75 bp, synthetic construct
  source 1..75: mol_type = other DNA
ggagctgaagaaagcgaagcaggaagccgccgcgctggcgatccagtttagaaataccgaacagccgacgcgcgc

SEQ ID NO: 389327 - DNA, 75 bp, synthetic construct
  source 1..75: mol_type = other DNA
atgagtaacgacgttaaattgcaggtattactcaaggctgttgaccaggcgacccgcccgtttaaaaccatccag

SEQ ID NO: 389328 - DNA, 75 bp, synthetic construct
  source 1..75: mol_type = other DNA
gcgtcagctcggcgataactcagcggcctcagcagatgatgccgccgccgcgcagattatcgtagccaaatctgg

SEQ ID NO: 389329 - DNA, 75 bp, synthetic construct
  source 1..75: mol_type = other DNA
gtgattgagggcatcatgagcgcctttgcaccggtcggggaaatgttcgctccactggcgcccatttttgacgga

SEQ ID NO: 389330 - DNA, 75 bp, synthetic construct
  source 1..75: mol_type = other DNA
gtactgccattgtgtccgcactcggtgcgattacctggccgattgtggccgtgggtgctgcgattgtggccggtg

SEQ ID NO: 389331 - DNA, 75 bp, synthetic construct
  source 1..75: mol_type = other DNA
cgatattttccatcctgaaagaaatgcagcgcagttttgagaaaaataatctcgggacgggtcagcgcgcggaat

SEQ ID NO: 389332 - DNA, 75 bp, synthetic construct
  source 1..75: mol_type = other DNA
gccagtggtttaaagacctgcttgcgccggtgaaagccacgcaggacacgctcaacagttgcaaaaatgtcggcg

SEQ ID NO: 389333 - DNA, 75 bp, synthetic construct
  source 1..75: mol_type = other DNA
aaaacaccgagcgaccaactcgtgcgcaagcgcaagtgcttgaatcggcaaagcgtgcagctgatggtctgcagg

SEQ ID NO: 389334 - DNA, 75 bp, synthetic construct
  source 1..75: mol_type = other DNA
ctcccgccggtcgtacctatattgaccagagcagccctacctatcaaataaacctgccgggtggcggcgcgccgg

SEQ ID NO: 389335 - DNA, 75 bp, synthetic construct
  source 1..75: mol_type = other DNA
gcaggcgcaggcactcgaagcggcaaagcgcgccgcctctgagctgcaaacgaaatacaacagcctgagaacgtc

SEQ ID NO: 389336 - DNA, 75 bp, synthetic construct
  source 1..75: mol_type = other DNA
aaaatcgacggctttcgtaaggcaagtgcgcaactggccgtaaccagtcaggcgcttgaaaaggcgaagcgcgaa

SEQ ID NO: 389337 - DNA, 75 bp, synthetic construct
  source 1..75: mol_type = other DNA
atcttgcacatgatgagcagggactgaaaaaccgtatcagtgaaaccaccgcacagcttaaccgtcagcgtgacg

SEQ ID NO: 389338 - DNA, 75 bp, synthetic construct
  source 1..75: mol_type = other DNA
cgtgctgtaaatgaccagacggcaactgctggttatgtaaaaaccaataccgcatataccgttacttatcagtaa

SEQ ID NO: 389339 - DNA, 75 bp, synthetic construct
  source 1..75: mol_type = other DNA
ggaacgatggccggagttaagctgctgatgcccggttatgagtttgcgcagaaaaactcagaattacaggctgtg

SEQ ID NO: 389340 - DNA, 75 bp, synthetic construct
  source 1..75: mol_type = other DNA
gcacagcttaaccgtcagcgtgacgcgctggcgcgtgtcagtgcgcaacaggcaaaacttaacgcagtaaaacag

SEQ ID NO: 389341 - DNA, 75 bp, synthetic construct
  source 1..75: mol_type = other DNA
ggcggtacatcgaaccaccgcctatgactggcgcactatctgacctgaaaaaatgggtagtcgatgccggagagc

SEQ ID NO: 389342 - DNA, 75 bp, synthetic construct
  source 1..75: mol_type = other DNA
gcaaagggactctgaacaacgatatgtctattaacacgccttctgacggcgtaaatattgccctgcacaatattg

SEQ ID NO: 389343 - DNA, 75 bp, synthetic construct
  source 1..75: mol_type = other DNA
gacggtggccaattaaatatcagtggtctggtagttgataacacctgtgaaacccgtgttgatggtggcaacaaa

SEQ ID NO: 389344 - DNA, 75 bp, synthetic construct
  source 1..75: mol_type = other DNA
gagtggggaaacctgctgaatgaggaaaacccgcatcacctgcaccagccgtaccgtctgccagggcagcaacac

SEQ ID NO: 389345 - DNA, 75 bp, synthetic construct
  source 1..75: mol_type = other DNA
cattgcgtcagctaactcagacagcaacacggtatgtgctaaagcttgatgactggatcaaagacaacaaggagt

SEQ ID NO: 389346 - DNA, 75 bp, synthetic construct
  source 1..75: mol_type = other DNA
ggattctgacggtaaaaccgaggaattggttaaggtcatgcaggataacttaggtggcgacttcaaagagtttca

SEQ ID NO: 389347 - DNA, 75 bp, synthetic construct
  source 1..75: mol_type = other DNA
aaatggctgcactacgcaagcaggcgcgccagctcggcgacaacaccgccgcctcggcggatgatgctgccggtg

SEQ ID NO: 389348 - DNA, 75 bp, synthetic construct
  source 1..75: mol_type = other DNA
cacaaagtatgtgttaaaactcgacggctggatacagaaaaacaaatcactggcgtcaaccattggtctcattgc

SEQ ID NO: 389349 - DNA, 75 bp, synthetic construct
  source 1..75: mol_type = other DNA
gcgatgcgctgacctatgccgcacctgtggcaaaaaatgccggtgtcagcattgaagaaaccgccgcaatggtcg

SEQ ID NO: 389350 - DNA, 75 bp, synthetic construct
  source 1..75: mol_type = other DNA
agccagttccgctgcaagtgtgttaatggccgcagcggccagtggaaaactggatgaactgaccaagataattaa

SEQ ID NO: 389351 - DNA, 75 bp, synthetic construct
  source 1..75: mol_type = other DNA
tttccggttttgacgccagccgctatcttggcaaatggtacgaagtcgctcgcctggaaaaccgctttgaacgcg

SEQ ID NO: 389352 - DNA, 75 bp, synthetic construct
  source 1..75: mol_type = other DNA
ggctctcgaaaaccttggatttacagacccggatgacggggattccctggtagcagttaaacaggacctggagaa

SEQ ID NO: 389353 - DNA, 75 bp, synthetic construct
  source 1..75: mol_type = other DNA
attagagatgttagcaataacaatatatcgtcattcagaattgatggttcatatagagttgttggtggaagtgtt

SEQ ID NO: 389354 - DNA, 75 bp, synthetic construct
  source 1..75: mol_type = other DNA
ggcatatgaaaattatcaggccgggcaggattcagtattaacgggcattgccgtttttgttaaaaaatggcactc

SEQ ID NO: 389355 - DNA, 75 bp, synthetic construct
  source 1..75: mol_type = other DNA
atgaaatacaacctgacattaaacaaacgaacattcgaaattacagaaagcggctacacactggcaaaacagctt

SEQ ID NO: 389356 - DNA, 75 bp, synthetic construct
  source 1..75: mol_type = other DNA
cgggattatttcaccctcagagagcggctgatgacgatgcacaagcaactggaaggggcgcaggaatatatccgc

SEQ ID NO: 389357 - DNA, 75 bp, synthetic construct
  source 1..75: mol_type = other DNA
aaatgaagaccaaagagattatgacgatattcagattttatttaatagatttgaaggtttcttttactctacggc

SEQ ID NO: 389358 - DNA, 75 bp, synthetic construct
  source 1..75: mol_type = other DNA
attgtccgcctggattcttctgatataactgttagaaacaataaaggaaacaaaggattacttacaataagtaac

SEQ ID NO: 389359 - DNA, 75 bp, synthetic construct
  source 1..75: mol_type = other DNA
tgacgtattaattccatcgctgggcaatagcgtttatctggtcacgatcatcggaacactgtttgcactggtcgg

SEQ ID NO: 389360 - DNA, 75 bp, synthetic construct
  source 1..75: mol_type = other DNA
agaaatatgctggcagcttttcaaatgcgacttcaaaaactgaccgaattttactcagaatacgtcgacccaata

SEQ ID NO: 389361 - DNA, 75 bp, synthetic construct
  source 1..75: mol_type = other DNA
actctgccgggtggcgttgcaccggggcatcagcttgaccgacaactacgtgacacgcttgaacagattgagcgt

SEQ ID NO: 389362 - DNA, 75 bp, synthetic construct
  source 1..75: mol_type = other DNA
cgttttactggcagcggcagcaagcggaaaactggataagctgaccgccacgctgaaagcctcggacggtaaaac

SEQ ID NO: 389363 - DNA, 75 bp, synthetic construct
  source 1..75: mol_type = other DNA
atgaaaaccatctccgtggagtccctctccataatttcatttagtaatatacctgtggtgactacagagcttctt

SEQ ID NO: 389364 - DNA, 75 bp, synthetic construct
  source 1..75: mol_type = other DNA
gtgcgttacacgatgcaaaaatcataggttcgatggcaggaaccggtagccgagctgttttaagtcgactgcagg

SEQ ID NO: 389365 - DNA, 75 bp, synthetic construct
  source 1..75: mol_type = other DNA
tgtcatatcgatggcgataaataaaacacaggcatcatttgagggattaaacgactcacttacatatgttggtcc

SEQ ID NO: 389366 - DNA, 75 bp, synthetic construct
  source 1..75: mol_type = other DNA
cgcgattaccttgccgattgtggctgtgggggcggcgattgtggccggggcgttacttatccgtaaatattggga

SEQ ID NO: 389367 - DNA, 75 bp, synthetic construct
  source 1..75: mol_type = other DNA
gcttaaccacgacgcaggccgctggctcctgttggggcagcgcaaaatcccggtggcgctggagcgtaaggggga

SEQ ID NO: 389368 - DNA, 75 bp, synthetic construct
  source 1..75: mol_type = other DNA
atgaccttcggttctgttttctttggtaacagcaaaggaacactgaacaacgacatgtctattaacacccccgtc

SEQ ID NO: 389369 - DNA, 75 bp, synthetic construct
  source 1..75: mol_type = other DNA
ctggtgtaggtcgttcatcagtcaacgcatggaaaaaaagaggaacaatcagtaaagattccgcagccaaaattg

SEQ ID NO: 389370 - DNA, 75 bp, synthetic construct
  source 1..75: mol_type = other DNA
cgtggccggtaattactggcattaacgccatcatttcggcggctggtgcgcttggtgcggtctttacgacaatca

SEQ ID NO: 389371 - DNA, 75 bp, synthetic construct
  source 1..75: mol_type = other DNA
tatcaacaaagaatccagctcacttgaccagacagcggcgaaagccaatgcagcgacgcagaacggttacagccc

SEQ ID NO: 389372 - DNA, 75 bp, synthetic construct
  source 1..75: mol_type = other DNA
tgttcaccgccagcgtgcgggcgcaaccgcttcagatgcagaccagccagaatgcggactccgctctcaggccac

SEQ ID NO: 389373 - DNA, 75 bp, synthetic construct
  source 1..75: mol_type = other DNA
actggctgccttatttcgaattacgctggttagatcgtaatgtcgaaccgtaccaccgcgagcaaaaccagattc

SEQ ID NO: 389374 - DNA, 75 bp, synthetic construct
  source 1..75: mol_type = other DNA
gcaccgattactacaatccaaattccgagcacacaatattatggaatgatccagaggttgatataaaatggccaa

SEQ ID NO: 389375 - DNA, 75 bp, synthetic construct
  source 1..75: mol_type = other DNA
accaacgttcaaaaaatggtttggaataaccctttccgcagaaaataaacgacaattatggatacccgaaggatt

SEQ ID NO: 389376 - DNA, 75 bp, synthetic construct
  source 1..75: mol_type = other DNA
ccgatcaggcagaaattatgctacgtgtaggttataacttcgatatgggcgcgggtatcatgttaaccaatacct

SEQ ID NO: 389377 - DNA, 75 bp, synthetic construct
  source 1..75: mol_type = other DNA
tattatcttctctgacctctgcctcggtatttgctggcgcatacgtcgaaaacagggaggcatataatctcgcct

SEQ ID NO: 389378 - DNA, 75 bp, synthetic construct
  source 1..75: mol_type = other DNA
tagttcaacagatttgagcggggaactggataataatgacacctatgaaattggcacctactggaattttaaaat

SEQ ID NO: 389379 - DNA, 75 bp, synthetic construct
  source 1..75: mol_type = other DNA
tgacgatcatcttaacagtctaaatctgcctatcaacgagccccccgcactgttaaaccgagtcagcgcgcaaac

SEQ ID NO: 389380 - DNA, 75 bp, synthetic construct
  source 1..75: mol_type = other DNA
tcaacccgccgcgatctttttccgccgcatattgccgatcagctggcgttattgcaggacaaagtcgctccgttt

SEQ ID NO: 389381 - DNA, 75 bp, synthetic construct
  source 1..75: mol_type = other DNA
gccgaaatttcgtttggacatgtgctgttaaatctgtttaatacggcgcgtcgcttcaatatggaagtacagccg

SEQ ID NO: 389382 - DNA, 75 bp, synthetic construct
  source 1..75: mol_type = other DNA
tcaaaatcatgtaaaggggtattgcgtggtttgcattttcaactcgcaccccatgcgcaggggaaacttgttcgc

SEQ ID NO: 389383 - DNA, 75 bp, synthetic construct
  source 1..75: mol_type = other DNA
cgctgagcgattgcgcgctctcgctgtcggagaaagatctgcaggcacatactcttgccactgcagaagtatata

SEQ ID NO: 389384 - DNA, 75 bp, synthetic construct
  source 1..75: mol_type = other DNA
tgatagaggtattatttgggatgataaattcattaatgttgaatggcctccatatgaaaattatattctttcggc

SEQ ID NO: 389385 - DNA, 75 bp, synthetic construct
  source 1..75: mol_type = other DNA
atgaacgtaattaaaacagaaattccagatgtattaattttcgagccgaaagtttttggtgatgaacgtggtttc

SEQ ID NO: 389386 - DNA, 75 bp, synthetic construct
  source 1..75: mol_type = other DNA
cagatgtattaatatttgaaccaaaagtatttggggatgagcgtggtttctttatggaaagctttaatcagaaag

SEQ ID NO: 389387 - DNA, 75 bp, synthetic construct
  source 1..75: mol_type = other DNA
caactaactattatgctcctggtcatcagcaagcaattatttacaatgatcctattctaaacatcgattggcctt

SEQ ID NO: 389388 - DNA, 75 bp, synthetic construct
  source 1..75: mol_type = other DNA
accaaagagccaggtgcgcaagcggaacccctgtacctggatgtgatgaccgcactggcagaagcctttaataat

SEQ ID NO: 389389 - DNA, 75 bp, synthetic construct
  source 1..75: mol_type = other DNA
ctcgacatattattagatgaaaatagctggcaggtggaacaaaaatcatgggtggcattgtgccgtttttgcggc

SEQ ID NO: 389390 - DNA, 75 bp, synthetic construct
  source 1..75: mol_type = other DNA
tctaagtcttctaaaggtgttttaagagggttacattatcaattagcccctgcagctcaagcgaagttagttcgt

SEQ ID NO: 389391 - DNA, 75 bp, synthetic construct
  source 1..75: mol_type = other DNA
cagacgtactgatttttgaaccgaaagtatttggtgatgaacgtggattcttttttgaaagttttaaccaaaata

SEQ ID NO: 389392 - DNA, 75 bp, synthetic construct
  source 1..75: mol_type = other DNA
tgatagaggaataaaatgggatgatccaagcatcaatatttcatggccagtcgattcacaagtgctgctatcagc

SEQ ID NO: 389393 - DNA, 75 bp, synthetic construct
  source 1..75: mol_type = other DNA
aatcaaaattaattgaagattataaattcgctgacgagattagcgatgataaaatcaatatagttttaagtgaaa

SEQ ID NO: 389394 - DNA, 75 bp, synthetic construct
  source 1..75: mol_type = other DNA
gacagttgtggataccagaggggtttgctcatggatttttggtgctgagtgaaacggctgaatttgtttataaaa

SEQ ID NO: 389395 - DNA, 75 bp, synthetic construct
  source 1..75: mol_type = other DNA
cttctggccgttatatcgcttcgatcctcgtcgtgccgatgaaggcaaactgccgctggcgctggattcacgccc

SEQ ID NO: 389396 - DNA, 75 bp, synthetic construct
  source 1..75: mol_type = other DNA
ggccattaagccgctatcttaaagactttaagcacagccagacccattgcgcgcattgccgtaaattactcgacc

SEQ ID NO: 389397 - DNA, 75 bp, synthetic construct
  source 1..75: mol_type = other DNA
aaagagaaaatatagttttatcgaaaaaggatataaatcaacctaatttatcatatagcttctctctcaaacagt

SEQ ID NO: 389398 - DNA, 75 bp, synthetic construct
  source 1..75: mol_type = other DNA
ctggatgccgaatcggcacaaagacaaaccgttaggtgaacggcttcggctggcgctgcaagaactgggtccggt

SEQ ID NO: 389399 - DNA, 75 bp, synthetic construct
  source 1..75: mol_type = other DNA
caaaataacgccattcttaccacattcaacgaagtaaacatgcagagcgtgatggatttacgcgcccgctggaaa

SEQ ID NO: 389400 - DNA, 75 bp, synthetic construct
  source 1..75: mol_type = other DNA
taacgtctaatcaactggaattattgcagattttttcagccttccctgaggatgagcaacgccagataatcagcg

SEQ ID NO: 389401 - DNA, 75 bp, synthetic construct
  source 1..75: mol_type = other DNA
taaaccattaagtcaagtatttgcttgtttagtgattactaaagataattaccacatgcaaaaaaaagaaattcg

SEQ ID NO: 389402 - DNA, 75 bp, synthetic construct
  source 1..75: mol_type = other DNA
ttatgaaagaggtgaataaccgcacaaagacaatcgtcatgtcagaacgcttcccggaaaagcaaaagaaggtgt

SEQ ID NO: 389403 - DNA, 75 bp, synthetic construct
  source 1..75: mol_type = other DNA
aggagttacgcaataaattgcggcacaggccacagagtgtcgtgatatcggcagggcgacctgccgaatgcgctg

SEQ ID NO: 389404 - DNA, 75 bp, synthetic construct
  source 1..75: mol_type = other DNA
ggtgatgcctgctgcacggctggaggcgcagcgtagtggtgtcgaattgtctgatgttgccgggagtgggagaaa

SEQ ID NO: 389405 - DNA, 75 bp, synthetic construct
  source 1..75: mol_type = other DNA
ggcggtacatcgagccgccgccaatgactggcacacttgcttacctgaaacagtgggtaatagataccggagagc

SEQ ID NO: 389406 - DNA, 75 bp, synthetic construct
  source 1..75: mol_type = other DNA
ggtatgccaacgccagcgcgaagaatacgaagcctgcaagcgggctgcgtctgacaatggagactttgaatcatg

SEQ ID NO: 389407 - DNA, 75 bp, synthetic construct
  source 1..75: mol_type = other DNA
ggtatcagtgacgaacgcgttaatgcgatggctgacgagctttactcactggttaaagagcgccagcgggaagag

SEQ ID NO: 389408 - DNA, 75 bp, synthetic construct
  source 1..75: mol_type = other DNA
ttttttttgcgagtttagtgtttaataaaccattaagtcaagtatttgcttgtttagtgattactaaagataatt

SEQ ID NO: 389409 - DNA, 75 bp, synthetic construct
  source 1..75: mol_type = other DNA
atgatgcagaaactaacaagctatcgctatttattgagttcgagcgccggattgtggttgttccttattctcggc

SEQ ID NO: 389410 - DNA, 75 bp, synthetic construct
  source 1..75: mol_type = other DNA
cgtgatttattcctttcaagtgaaggaaacccgttcaatccagaaactgaaatgaaatggcatcacccactataa

SEQ ID NO: 389411 - DNA, 75 bp, synthetic construct
  source 1..75: mol_type = other DNA
ccgccgggcggtaaatgtgatgccggtccggggaccgattttgctgcggtagatgagggctatgtctccatcacg

SEQ ID NO: 389412 - DNA, 75 bp, synthetic construct
  source 1..75: mol_type = other DNA
cagtcgtgatctggaacagtacagccgtaaaaatctttctactgccgactctatgctgctggctatcaatgattt

SEQ ID NO: 389413 - DNA, 75 bp, synthetic construct
  source 1..75: mol_type = other DNA
aacagacgggttgcctgttggagataaggctaacacaccaaatacaccggagttgattcatgaaaatcaagcatg

SEQ ID NO: 389414 - DNA, 75 bp, synthetic construct
  source 1..75: mol_type = other DNA
agccctgaaatcagcgaacgttttactggcagcggcagcaagcggaaaactggataagctgaccgccacgctgaa

SEQ ID NO: 389415 - DNA, 75 bp, synthetic construct
  source 1..75: mol_type = other DNA
gaaacttatttatcgtctcgcccgctgggtgccgcgcttactgccggatggacgtcgtctgcgcccaactgaagt

SEQ ID NO: 389416 - DNA, 75 bp, synthetic construct
  source 1..75: mol_type = other DNA
gacattacgcccctggcatcggcttccgttgcgcaggtacatactgcgcggctgaaatcgaatggcaaagaggtg

SEQ ID NO: 389417 - DNA, 75 bp, synthetic construct
  source 1..75: mol_type = other DNA
caccgttttgaacgtggactggaaaaagtcaccgcaacatacagtctgcgtgatgacggcggcctgaatgtcatt

SEQ ID NO: 389418 - DNA, 75 bp, synthetic construct
  source 1..75: mol_type = other DNA
cacaaagtatgtgttaaaactcgacggctggatacagaaaaacaaatcactggcgtcaaccatcggcctcattgc

SEQ ID NO: 389419 - DNA, 75 bp, synthetic construct
  source 1..75: mol_type = other DNA
agtgccgttgtcacccgattacaggctccgactggaaaagcatgggatgcactcaaagagcttggcgttaaaacc

SEQ ID NO: 389420 - DNA, 75 bp, synthetic construct
  source 1..75: mol_type = other DNA
cactggcgcgtgtcagtgcacaacaggcaaaacttaacgcagtcaaacagcgttatcaggccggaaaagaactgg

SEQ ID NO: 389421 - DNA, 75 bp, synthetic construct
  source 1..75: mol_type = other DNA
ctcggtgtggcaaaagactccgccgaaatggctgcactacgcaagcaggcgcgccagctcggcgacaataccgcc

SEQ ID NO: 389422 - DNA, 75 bp, synthetic construct
  source 1..75: mol_type = other DNA
gccactgaagccggtgtttgactggctgggcgaaaagttacaggccgcgtggcagtggtttaaaaacctgattgc

SEQ ID NO: 389423 - DNA, 75 bp, synthetic construct
  source 1..75: mol_type = other DNA
cgtgccgtgttaagccgcctgcaggcaccgacgggaaaagcatgggatgcactcaaagagcttggcgtgaaaacc

SEQ ID NO: 389424 - DNA, 75 bp, synthetic construct
  source 1..75: mol_type = other DNA
acgggattatttcgttctcagagagcgcatcgaaaccgtaactaaccaattgaatggtctgcaagagtatgtgag

SEQ ID NO: 389425 - DNA, 75 bp, synthetic construct
  source 1..75: mol_type = other DNA
ccagttaacgtcagccaccgggccagacgggctggaaatgcgccgcaaatatgatgagtacggacgtctgattca

SEQ ID NO: 389426 - DNA, 75 bp, synthetic construct
  source 1..75: mol_type = other DNA
cattcaggctattaaagattccaccattagcaatggcccttattatattctcgcaccaggcgtggcaatgcctca

SEQ ID NO: 389427 - DNA, 75 bp, synthetic construct
  source 1..75: mol_type = other DNA
ttgcagcaatcgcctgcatcattgtctcgcttggatgggctgttaatcactaccgtgacaacgccattgactaca

SEQ ID NO: 389428 - DNA, 75 bp, synthetic construct
  source 1..75: mol_type = other DNA
ctgcctttcatgggctgttaatcattaccgtgataacgccatgacctacaaagagcagcgcgataaagccacatc

SEQ ID NO: 389429 - DNA, 75 bp, synthetic construct
  source 1..75: mol_type = other DNA
agcatgggcgatggagaaagcccaagacttacagcagatgctgaactcaattattaccgtctcagaagtggaatc

SEQ ID NO: 389430 - DNA, 75 bp, synthetic construct
  source 1..75: mol_type = other DNA
tgctaacgcgactatcgaaagtctccgtgctgatgtttctgctggtcgtaagcgcctgcaagtcgccgccacctg

SEQ ID NO: 389431 - DNA, 75 bp, synthetic construct
  source 1..75: mol_type = other DNA
ctgcctgtcatgggctgttaatcattaccgtgataacgccatcgcctacaaagagcagcgcgacaaagccgcatc

SEQ ID NO: 389432 - DNA, 75 bp, synthetic construct
  source 1..75: mol_type = other DNA
acgacgagttactggatagaatctgtcaagtatatggttttactcaaaaaatccagctagcccggcatttcaata

SEQ ID NO: 389433 - DNA, 75 bp, synthetic construct
  source 1..75: mol_type = other DNA
tgcgcgaccggaatgtggggcgcttaaaaccgggatgtctttaacgttacttaaacaaggcgtttattttccggg

SEQ ID NO: 389434 - DNA, 75 bp, synthetic construct
  source 1..75: mol_type = other DNA
ttattaccgtctccgatgtggaatcgacaagataaccgcgcaggttaactacatgcaggattacatcaggacgca

SEQ ID NO: 389435 - DNA, 75 bp, synthetic construct
  source 1..75: mol_type = other DNA
ttattaccgtctccgaagtggaatcgacaagataaccgcgcaggttaactacgtgcaggaatacatcaggacgca

SEQ ID NO: 389436 - DNA, 75 bp, synthetic construct
  source 1..75: mol_type = other DNA
ttattaccgtctccgaagtggaatcgacaagataaccgcgcaggttaactacttgcaggattacatcaggacgca

SEQ ID NO: 389437 - DNA, 75 bp, synthetic construct
  source 1..75: mol_type = other DNA
ttattaccgtctccgaggtggaatcgacaagataaccgcgcaggttaactacatgcaggaatacatcaggacgca

SEQ ID NO: 389438 - DNA, 75 bp, synthetic construct
  source 1..75: mol_type = other DNA
ttattaccgtctccgacgtggaatcgacaagataaccgcgcaggttaactacctgcaggactacatcaggacgca

SEQ ID NO: 389439 - DNA, 75 bp, synthetic construct
  source 1..75: mol_type = other DNA
ttattaccgtctccgatgtggaatcgacaagataaccgcgcaggttaactacttgcaggaatacatcaggacgca

SEQ ID NO: 389440 - DNA, 75 bp, synthetic construct
  source 1..75: mol_type = other DNA
cgaagtggaatcgacaggataaccgcgcaggttaactacctgcaggagtacatcaggacgcagtgcttaaaataa

SEQ ID NO: 389441 - DNA, 75 bp, synthetic construct
  source 1..75: mol_type = other DNA
tcgcgccaggcgtggcaatgcctcatgcgcgaccagaatgtggggcgcttaaaaccgggatgtcattgacgttac

SEQ ID NO: 389442 - DNA, 75 bp, synthetic construct
  source 1..75: mol_type = other DNA
ttattaccgtctccgaagtggaatcgacaagataaccgcgcaggttaactacatgcaggagtacatcaggacgca

SEQ ID NO: 389443 - DNA, 75 bp, synthetic construct
  source 1..75: mol_type = other DNA
gctaacacgactctcgaaagtctccgtactgatgtctctgctggtcgtaagcgcttgcaaatcgccgccacctgt

SEQ ID NO: 389444 - DNA, 75 bp, synthetic construct
  source 1..75: mol_type = other DNA
atgaagttgagctataagctagttatcgctgctttcttcgttactattattggttctttcatctggtcagcgaat

SEQ ID NO: 389445 - DNA, 75 bp, synthetic construct
  source 1..75: mol_type = other DNA
tatttgaactccgttgagagtgacaaattgaaaatacatcgtaccaatattgggcagttagcttttaatttaaac

SEQ ID NO: 389446 - DNA, 75 bp, synthetic construct
  source 1..75: mol_type = other DNA
ctggcgaaagtgggagatatggggcttatccaaaagcacagcatgaatttgcgcacctgcaaaatcacgctgtgg

SEQ ID NO: 389447 - DNA, 75 bp, synthetic construct
  source 1..75: mol_type = other DNA
ccatgcctgtgccggggctggaactggcttcctggattgaagcgcgtctgggacgcaagccgttgtggtgtggcg

SEQ ID NO: 389448 - DNA, 75 bp, synthetic construct
  source 1..75: mol_type = other DNA
ggcgaagtttctgaacagaccattcattcagcccgcgagcagggattgcatttttatgctgcaggtcaccatgcc

SEQ ID NO: 389449 - DNA, 75 bp, synthetic construct
  source 1..75: mol_type = other DNA
ggccggattatccatcttcatgcatggcacgtacccgacttccacgggacgttacaggcacatgaacatcaggcg

SEQ ID NO: 389450 - DNA, 75 bp, synthetic construct
  source 1..75: mol_type = other DNA
ggaagacgattagaacgttcagggctgagcccgctggtgatccgccgttgcatgcatcacaagtctctggattca

SEQ ID NO: 389451 - DNA, 75 bp, synthetic construct
  source 1..75: mol_type = other DNA
actggagagctctaactgaacatggctttaatgacattgacccgcagggttatttcacaggccggaatccaaagc

SEQ ID NO: 389452 - DNA, 75 bp, synthetic construct
  source 1..75: mol_type = other DNA
ggaaagttgacggtcatcttctggatttgccgcgtcgcaatttagccgagttgcccgccagcgccgcgcattctc

SEQ ID NO: 389453 - DNA, 75 bp, synthetic construct
  source 1..75: mol_type = other DNA
aacaaaacgagccagaaacgaaacaggagccggaaaaagcctgcaccgcctgcggtcagaccggcggcggtagct

SEQ ID NO: 389454 - DNA, 75 bp, synthetic construct
  source 1..75: mol_type = other DNA
cgcaaggaaaccgggaaatacatatctgtcgttgatatcgcccgttccagagtaaaccaacagaacactgaaaac

SEQ ID NO: 389455 - DNA, 75 bp, synthetic construct
  source 1..75: mol_type = other DNA
cacgttttggcgtggacgcgtttattactggtgaagtttcagaacaaactattcattcggcccgtgagcagggac

SEQ ID NO: 389456 - DNA, 75 bp, synthetic construct
  source 1..75: mol_type = other DNA
aactgggctgggccatccaaaacagatcctcgatctgctaacagcaccggtctatgaaccgtggatcgatctgcg

SEQ ID NO: 389457 - DNA, 75 bp, synthetic construct
  source 1..75: mol_type = other DNA
ctggatattcgacgctgatacggtgttcgacaccatcggcattctggaatgggcacgacttgcaccagtagagcg

SEQ ID NO: 389458 - DNA, 75 bp, synthetic construct
  source 1..75: mol_type = other DNA
tgccagccatcagcgagaagtttcggggcggattatccatcttcatgcctggacacgttcccgacttccacggga

SEQ ID NO: 389459 - DNA, 75 bp, synthetic construct
  source 1..75: mol_type = other DNA
tcattgccctgctggtggcctgtggtgcgcttagtctggggctgaatcattaccgcgataacgccatcacttaca

SEQ ID NO: 389460 - DNA, 75 bp, synthetic construct
  source 1..75: mol_type = other DNA
tatttcaccctcagagagcgaatcaccacagtgacgaagcaggtcggctatctgcaggactacataaaaggacag

SEQ ID NO: 389461 - DNA, 75 bp, synthetic construct
  source 1..75: mol_type = other DNA
tgacggaaaatcaggtgagttatttctttgccaaactcagcgatgcctgccacagccgtttttcatcgcaccgct

SEQ ID NO: 389462 - DNA, 75 bp, synthetic construct
  source 1..75: mol_type = other DNA
gctgcacgtcaacgcaagatgtcccgcgaacggaacggccagcgccaccggcctggatgatgcaaccggcccccg

SEQ ID NO: 389463 - DNA, 75 bp, synthetic construct
  source 1..75: mol_type = other DNA
tatttcaccctcagagagcgaatcgaaaccagcgggaaaatgattgctgggttgcaggattacataaagcagcag

SEQ ID NO: 389464 - DNA, 75 bp, synthetic construct
  source 1..75: mol_type = other DNA
gtgatgttgctgcactcgatgcaaaatacacaaaggagttagccgatgcgagagctgaaaatgaaactctgcgcg

SEQ ID NO: 389465 - DNA, 75 bp, synthetic construct
  source 1..75: mol_type = other DNA
tgcgtatttgtactctgatcgcgaaaatattggtgccagtgcgaagtcatcctgggattacacgaaacaaaatat

SEQ ID NO: 389466 - DNA, 75 bp, synthetic construct
  source 1..75: mol_type = other DNA
agaggttatcggcggcctggttgtcgccatgcggatacttaactctactttctggatgtcacctatagggctgat

SEQ ID NO: 389467 - DNA, 75 bp, synthetic construct
  source 1..75: mol_type = other DNA
gcatcgaagcaactgtgggtgagtatgttgccagccatcagcgagaagtttcgggccggattatccatcttcatg

SEQ ID NO: 389468 - DNA, 75 bp, synthetic construct
  source 1..75: mol_type = other DNA
cttgctcgtcagttaatgctgtacgccggacggggaataaacagtgtggagaaaattatctctacctgggcacct

SEQ ID NO: 389469 - DNA, 75 bp, synthetic construct
  source 1..75: mol_type = other DNA
ctcaatattgacctcaaatcatggtccctgaagtgggatttcagcaacttcatcgaccagatgggcgaattcagc

SEQ ID NO: 389470 - DNA, 75 bp, synthetic construct
  source 1..75: mol_type = other DNA
ggacgctgcgcgatcttctctggaaagcctctcccggtttattcgtaacaatcccggagcagaaggctttctgaa

SEQ ID NO: 389471 - DNA, 75 bp, synthetic construct
  source 1..75: mol_type = other DNA
gatcatgcaggttgcgctgaaccaggctaaaggtgcgcgtctgcatatcctgggcgtaatggaacaggcgatcaa

SEQ ID NO: 389472 - DNA, 75 bp, synthetic construct
  source 1..75: mol_type = other DNA
tgatgctcggactggcagcaaccatttcgcataccgcagtggtctggttgattgcctttggcgggatggtgatca

SEQ ID NO: 389473 - DNA, 75 bp, synthetic construct
  source 1..75: mol_type = other DNA
cccatgccaatgacattaaacgacgctttgatggtagagaggtcaccaactggcaaattttgctatttggcttaa

SEQ ID NO: 389474 - DNA, 75 bp, synthetic construct
  source 1..75: mol_type = other DNA
gctattcgtcgtatcgaagagatcactgcagaaatcgaagtgggccgcgtctacaatggtaaagtgacccgtatc

SEQ ID NO: 389475 - DNA, 75 bp, synthetic construct
  source 1..75: mol_type = other DNA
tccagtacggccaacacaccgtaactctggaaacaggcatgatggcgcgtcaagccactgccgctgttatggtta

SEQ ID NO: 389476 - DNA, 75 bp, synthetic construct
  source 1..75: mol_type = other DNA
gttctggaagttgatcgccagggccgtatccgtctgagcattaaagaagcgactgagcagtctcaacctgctgca

SEQ ID NO: 389477 - DNA, 75 bp, synthetic construct
  source 1..75: mol_type = other DNA
cgggattatttcatcctcagagaacgattgatgacaatgcagaagcaggtggaaggggcacaggactatatccgc

SEQ ID NO: 389478 - DNA, 75 bp, synthetic construct
  source 1..75: mol_type = other DNA
gctggcaacagaccattaccgtgataacgccatcacctacaaagcgcagcgcgataaaaaagccagagagctgga

SEQ ID NO: 389479 - DNA, 75 bp, synthetic construct
  source 1..75: mol_type = other DNA
ttagccgatgcgagagctgaaaatgaaactctgcgtgctgatgttgccgctggtcgtaagcgcctgcgcatcaac

SEQ ID NO: 389480 - DNA, 75 bp, synthetic construct
  source 1..75: mol_type = other DNA
acgaccacgaccacgaccacgaccacgaccacgaacatcatcaccatcatgaacatggcgacaacgaagagtatc

SEQ ID NO: 389481 - DNA, 75 bp, synthetic construct
  source 1..75: mol_type = other DNA
cgaacatcatcaccatcatgaacatggcgacaacgaagagtatcaggatgcccatgcacgagcccatgccaatga

SEQ ID NO: 389482 - DNA, 75 bp, synthetic construct
  source 1..75: mol_type = other DNA
agtcagcggagccgtggcttcagttgatttccgcggtgatcattcttggcaccgcattctggatgttctggcgta

SEQ ID NO: 389483 - DNA, 75 bp, synthetic construct
  source 1..75: mol_type = other DNA
ccgcgtactggcaggcgaaccgcgtatcgacggtcgtgaaaaagatatgattcgtggtctggatgtgcgtactgg

SEQ ID NO: 389484 - DNA, 75 bp, synthetic construct
  source 1..75: mol_type = other DNA
gccaccggcacctccggcgtgggcaatgatgccagcgtcgaactctctccagttgctggacgaaacgttctcggt

SEQ ID NO: 389485 - DNA, 75 bp, synthetic construct
  source 1..75: mol_type = other DNA
aaagctgaaaatgatgctcttcgtgatgatattgccgctggtcgtcgtcggttgcgcatcagagcagtctgtcag

SEQ ID NO: 389486 - DNA, 75 bp, synthetic construct
  source 1..75: mol_type = other DNA
cgggattatttcaccctcagagatcggctgatgacgatgcagatgcaactggaaggggcacaggagtatatccgc

SEQ ID NO: 389487 - DNA, 75 bp, synthetic construct
  source 1..75: mol_type = other DNA
ttgaacgggattatttcactctcagagagcggttgatgatgatgcagaagcagctggaaggggcgcaggaatata

SEQ ID NO: 389488 - DNA, 75 bp, synthetic construct
  source 1..75: mol_type = other DNA
ctgatgttgccgctggtcgtaagcgcctgcaggtcaacgccacctgcgtgtcctccacagacaaaaccaccggcc

SEQ ID NO: 389489 - DNA, 75 bp, synthetic construct
  source 1..75: mol_type = other DNA
gtgataaaaaagccagagagctggagctggcaaacgcaaccattactgatatgcaggtgcgccagcgcgatgttg

SEQ ID NO: 389490 - DNA, 75 bp, synthetic construct
  source 1..75: mol_type = other DNA
ctacgctgctggtcgtatcccaggtagcttcttccgtcgtgaaggccgcccaagcgaaggcgaaaccttgattgc

SEQ ID NO: 389491 - DNA, 75 bp, synthetic construct
  source 1..75: mol_type = other DNA
ccaacggttcctcttctatggcttccgtgtgcggcgcgtctctggcgctgatggacgcaggtgtgccaatcaaag

SEQ ID NO: 389492 - DNA, 75 bp, synthetic construct
  source 1..75: mol_type = other DNA
taccgtgataacgcaatcgcctacaaagagcagcgcgataaaaaagtcagtgagctgaagcaggcgaccgccacc

SEQ ID NO: 389493 - DNA, 75 bp, synthetic construct
  source 1..75: mol_type = other DNA
agttggatattatgattggtgaaggcccggcagcgcgttcaattaaaatcgatctccccccgttcaccctgattg

SEQ ID NO: 389494 - DNA, 75 bp, synthetic construct
  source 1..75: mol_type = other DNA
ggccacggctggctgagagaaatcagccacctgagcgaaggccaccgtgttgccgtccactatggctatgacgat

SEQ ID NO: 389495 - DNA, 75 bp, synthetic construct
  source 1..75: mol_type = other DNA
cagcctgtcatgggcagtcaattattaccgtgataacgccatctcctacaaagaccagcgcgataaagtgaagga

SEQ ID NO: 389496 - DNA, 75 bp, synthetic construct
  source 1..75: mol_type = other DNA
tgaagctgggcgggacgccgctggtcgagtatacgcgggacaggctgcaccgtgacacggtgcgcagcttcggca

SEQ ID NO: 389497 - DNA, 75 bp, synthetic construct
  source 1..75: mol_type = other DNA
gattatttcaccctcagggaacgaattgcaaccagcgaaaaaatgattcagggattgcaggagtacatcaggaaa

SEQ ID NO: 389498 - DNA, 75 bp, synthetic construct
  source 1..75: mol_type = other DNA
ccggcgtgactgatgcagccagccccggacttactgacgccgctcagcgggattatttcaccctcagggaacgaa

SEQ ID NO: 389499 - DNA, 75 bp, synthetic construct
  source 1..75: mol_type = other DNA
aaagctgaaaatgatgctctgcgtgctgatgttgccgctggtcgtcgccggttgcgtgtcagggcagtctgcccc

SEQ ID NO: 389500 - DNA, 75 bp, synthetic construct
  source 1..75: mol_type = other DNA
cgctgaacgggattatttcaccctcagagagcggttgatgacgatgcagaagcagctggaaggggcacaggaata

SEQ ID NO: 389501 - DNA, 75 bp, synthetic construct
  source 1..75: mol_type = other DNA
gtggtgattattgtcctggcgggtggctgtggtgcgctgtggctggcaacagaccattaccgcgataacgccatc

SEQ ID NO: 389502 - DNA, 75 bp, synthetic construct
  source 1..75: mol_type = other DNA
acaatgaagaagtgctggataggatttgcgaggcttacggattttctcagaaaattcaattagctagacacttcg

SEQ ID NO: 389503 - DNA, 75 bp, synthetic construct
  source 1..75: mol_type = other DNA
accatctctgatatgcagaagcgtcaacgtgacgtagcagaacttgacgccagatacacaaaggagcttgctgat

SEQ ID NO: 389504 - DNA, 75 bp, synthetic construct
  source 1..75: mol_type = other DNA
cctgcggatcaacgccacctgctccggtaccgtgcgtgaagccaccggcacctccagcgtggataatgcaaccgg

SEQ ID NO: 389505 - DNA, 75 bp, synthetic construct
  source 1..75: mol_type = other DNA
tctcagagagcggttgatgctgatgcagaagcagctggaagtggcgcaggaatatatccgcactcagtgcctgaa

SEQ ID NO: 389506 - DNA, 75 bp, synthetic construct
  source 1..75: mol_type = other DNA
gattatttcatcctcagagaacggctgatggcaatgcagaagcaactggaaggagcacaggaatatatccgtacc

SEQ ID NO: 389507 - DNA, 75 bp, synthetic construct
  source 1..75: mol_type = other DNA
ggaattatccgatgcgagagctgaaaatgaaactctgcgcgctgatgttgccgctggtcgtaagcgcctgcggat

SEQ ID NO: 389508 - DNA, 75 bp, synthetic construct
  source 1..75: mol_type = other DNA
tgctaacgcgactatcgaaagtctccgtgatgatgtttctgctgggcgtaagcggctgcaagtcgccgcctcctg

SEQ ID NO: 389509 - DNA, 75 bp, synthetic construct
  source 1..75: mol_type = other DNA
cgggattatttcaccctcagagaacggctgatgacaatgcaaaagcaactggaaggggcgcaggagtatatccgc

SEQ ID NO: 389510 - DNA, 75 bp, synthetic construct
  source 1..75: mol_type = other DNA
gataatgcaaccggcccccaactggcagacaccgttacacgggattatttcaccctcagagagcggctgatgacg

SEQ ID NO: 389511 - DNA, 75 bp, synthetic construct
  source 1..75: mol_type = other DNA
ctcagagagcggttgatgatgatgcagaagcagctggaaggggcacaggaatatatccgcactcagtgcctgaaa

SEQ ID NO: 389512 - DNA, 75 bp, synthetic construct
  source 1..75: mol_type = other DNA
catcatcgctgatatgcagaagcgtcaacgtgatgttgctgcgctcgatgcaaagtactcgagagaattagccaa

SEQ ID NO: 389513 - DNA, 75 bp, synthetic construct
  source 1..75: mol_type = other DNA
aagcgcaacgcgataaaaaagccagtgagctgaagctggcgaacgtgacaattactgatatgcaggtacgccagc

SEQ ID NO: 389514 - DNA, 75 bp, synthetic construct
  source 1..75: mol_type = other DNA
attactgatatgcagcagcgccagcgtgatgttgctgcacttgatgccagatacacgaaggaattagccgatgcg

SEQ ID NO: 389515 - DNA, 75 bp, synthetic construct
  source 1..75: mol_type = other DNA
agtgaaacagtctcttgggcaggcgattaaagtatccggggacagcaatatcaccaccacagcaatcactgccaa

SEQ ID NO: 389516 - DNA, 75 bp, synthetic construct
  source 1..75: mol_type = other DNA
cgtttaatggtgaagagaaccaacactggcagttgcacgcgcacttttacccgcctttgctgcgctccgccaccg

SEQ ID NO: 389517 - DNA, 75 bp, synthetic construct
  source 1..75: mol_type = other DNA
ggcaggagcaaaccgcagaactggggaaaacgtacccatgggtgcaggtctttgaaaacaaaggcgcggcgatgg

SEQ ID NO: 389518 - DNA, 75 bp, synthetic construct
  source 1..75: mol_type = other DNA
caacgatccgctgatgcgttgccagagcgcgcgcggtaccagccgggtgatctgcttttcaccggatcacagtaa

SEQ ID NO: 389519 - DNA, 75 bp, synthetic construct
  source 1..75: mol_type = other DNA
aaaagcgccttgaagtcgtgaatcactactttactactgatgatggttacaggatcatctcggcacgttttggtg

SEQ ID NO: 389520 - DNA, 75 bp, synthetic construct
  source 1..75: mol_type = other DNA
ccaatgtaaataagcatcaattgcacagaagcaatatacctgcgaccctctccggaaattccggtatcactggct

SEQ ID NO: 389521 - DNA, 75 bp, synthetic construct
  source 1..75: mol_type = other DNA
acggtcagcgcaccgaaagcaatagcggtgcttcgaaggtggacctggcaaccctaaaagctatcgaagataaca

SEQ ID NO: 389522 - DNA, 75 bp, synthetic construct
  source 1..75: mol_type = other DNA
caaacctaaaggtgttagtgctgatccagagttgcgtattaaggtcgtgaaagctgtgatcgagcagcacatgtc

SEQ ID NO: 389523 - DNA, 75 bp, synthetic construct
  source 1..75: mol_type = other DNA
atgtcaaagccaaaatacccttttgaaaagcgccttgaagtcgtgaatcactacttcactactgatgatggttac

SEQ ID NO: 389524 - DNA, 75 bp, synthetic construct
  source 1..75: mol_type = other DNA
ttgtacaaagtgttctttttccgggaattattcgccggattattctggataaggaacttgaagagggagactggt

SEQ ID NO: 389525 - DNA, 75 bp, synthetic construct
  source 1..75: mol_type = other DNA
gattgcttcctctgcgcaggtaatgtgcgggtgacaggcgataaaaaccccgattacaccgggacttacgttttc

SEQ ID NO: 389526 - DNA, 75 bp, synthetic construct
  source 1..75: mol_type = other DNA
ccgcctctgctgcgctccgccaccgtacgtaaatttatggttggttatgaaatgctggcagagacccagcgagac

SEQ ID NO: 389527 - DNA, 75 bp, synthetic construct
  source 1..75: mol_type = other DNA
ccacctctgttgcgctctgccactgtacgtaaatttatggtcggttatgaaatgttggcagagacccagcgtgac

SEQ ID NO: 389528 - DNA, 75 bp, synthetic construct
  source 1..75: mol_type = other DNA
ttggcgtgaaatgtgccatttccgaccaccggtctgccgcgccggatgtttatcatctggccaatatggcggcgg

SEQ ID NO: 389529 - DNA, 75 bp, synthetic construct
  source 1..75: mol_type = other DNA
aaaaatggttcagaaggcgtggcactggtcgcctcctggtggggccagtgtgccttccggcgcctccggtacaca

SEQ ID NO: 389530 - DNA, 75 bp, synthetic construct
  source 1..75: mol_type = other DNA
attgggtgtgttgttttctctgtcggtgtatgtggtttcgttcgttttgcggtggttcttctatggggtgttctc

SEQ ID NO: 389531 - DNA, 75 bp, synthetic construct
  source 1..75: mol_type = other DNA
atacggcgactatttctgttggtgaattgggtgtgttgttttctctgtcggtgtatgtggtttcgttcgttttgc

SEQ ID NO: 389532 - DNA, 75 bp, synthetic construct
  source 1..75: mol_type = other DNA
aggcgtggaactggtcgccgaaaggagcaggaggaacacagagtgtcggtgccctacgcttacctgaaatgccag

SEQ ID NO: 389533 - DNA, 75 bp, synthetic construct
  source 1..75: mol_type = other DNA
ttcttccctgggtactgcggtgggaatgcttacaggacctgtcggtctggttgtggcggcgctgctgggtgccgg

SEQ ID NO: 389534 - DNA, 75 bp, synthetic construct
  source 1..75: mol_type = other DNA
cgaagcagtgatgaggctctcgatctgatggtctctgccatgcaacgcatggggccggagatgcgtggtgaactt

SEQ ID NO: 389535 - DNA, 75 bp, synthetic construct
  source 1..75: mol_type = other DNA
aatcccgcgttggtggcttgctcggcggtaaacctggcgtcaccgtgttccacatgggcgacagcaaaaaggcgt

SEQ ID NO: 389536 - DNA, 75 bp, synthetic construct
  source 1..75: mol_type = other DNA
caccattacgggttccgtggaaaaagatgtggcgattattgatcgggtgattggtgtgaaatgtgccatttctga

SEQ ID NO: 389537 - DNA, 75 bp, synthetic construct
  source 1..75: mol_type = other DNA
ccgacggcaatggcagtcagccattctttgacgacgaagggaatttgacgcacatcggcgttgccggttttgaaa

SEQ ID NO: 389538 - DNA, 75 bp, synthetic construct
  source 1..75: mol_type = other DNA
ttttcacacaggaatgattctaaatgcgatccagaatctgtctatcataaactggctaagtttcttatttgttat

SEQ ID NO: 389539 - DNA, 75 bp, synthetic construct
  source 1..75: mol_type = other DNA
cgtgcgctgacgccctggctgaaattgcatcagcaaaaacaaaacaatgctgttctgtcactgctcgttgctggt

SEQ ID NO: 389540 - DNA, 75 bp, synthetic construct
  source 1..75: mol_type = other DNA
aaatattttgagatatattttgactgcaacaatgggtattttgaaattggcccatgccatatcgcaaacaaaggc

SEQ ID NO: 389541 - DNA, 75 bp, synthetic construct
  source 1..75: mol_type = other DNA
atgacgaaaaagagcttagctgaaagatttgacttgcttgaacaagagtacaactcggttatgtcgacaaagtat

SEQ ID NO: 389542 - DNA, 75 bp, synthetic construct
  source 1..75: mol_type = other DNA
tttttatcagtatccgttgaatccggtcataaatgtagatccgcaaggtttggttgatataaatttataccccga

SEQ ID NO: 389543 - DNA, 75 bp, synthetic construct
  source 1..75: mol_type = other DNA
tgacctggtacggctgggacggcgaccggctgaccacaatacagaacgacaggagccgcatccagacgatttatc

SEQ ID NO: 389544 - DNA, 75 bp, synthetic construct
  source 1..75: mol_type = other DNA
cctgctgaatgaagagaacccgcatcagctgcagcagcttatccgcctgccggggcagcagtatgatgaggagtc

SEQ ID NO: 389545 - DNA, 75 bp, synthetic construct
  source 1..75: mol_type = other DNA
gaaatgcgccgggaatatgatgaatccggccgtctgattcaggaaactgcacacaacggcgatatcacccgctac

SEQ ID NO: 389546 - DNA, 75 bp, synthetic construct
  source 1..75: mol_type = other DNA
cccggcagaaggccacttccggcgggacggaaccgtccgcttttcctgataccctgccggactacacggaatatg

SEQ ID NO: 389547 - DNA, 75 bp, synthetic construct
  source 1..75: mol_type = other DNA
acggcgatatcacccgctaccgttatgataatccacacagtgacttaccctgcgcaacggaagatgccaccggca

SEQ ID NO: 389548 - DNA, 75 bp, synthetic construct
  source 1..75: mol_type = other DNA
gaagacgcagaagctctgcgctttgataattttgacgatgccgttgagtgctgcgcagacctgaatattcccttc

SEQ ID NO: 389549 - DNA, 75 bp, synthetic construct
  source 1..75: mol_type = other DNA
atgatttggcagcagcgtatctcccaggcgaccggttcaaccgaaattgaccgtttgagcgatgttgatactacg

SEQ ID NO: 389550 - DNA, 75 bp, synthetic construct
  source 1..75: mol_type = other DNA
gatggctggttatctaaagagccggcattactttccggcggcgtgaccgtcgcaggtggtcatgtctatattggc

SEQ ID NO: 389551 - DNA, 75 bp, synthetic construct
  source 1..75: mol_type = other DNA
atgacgaagggtatcctgaaatagcccgctgcacggagcgggagtttgcgaccattcttgccggtatcagcgccg

SEQ ID NO: 389552 - DNA, 75 bp, synthetic construct
  source 1..75: mol_type = other DNA
ttcccttctttgtggatgccggaaacaaaaagctggtcttctggtttgtacgtgttgatgacgaagggtatcctg

SEQ ID NO: 389553 - DNA, 75 bp, synthetic construct
  source 1..75: mol_type = other DNA
tttgacgaagaagacgctgaagttctgcgctttgataattttgacgatgccgttgagtgctgcgctgacctgggt

SEQ ID NO: 389554 - DNA, 75 bp, synthetic construct
  source 1..75: mol_type = other DNA
gatgacgaagggtatcctgaaataacccgctgcacggagcgggagtttgcgaccattcttgccggtatcagcgcc

SEQ ID NO: 389555 - DNA, 75 bp, synthetic construct
  source 1..75: mol_type = other DNA
agacggatgccgcaggccggacaacagaatacagcccggatgtggtgacgggcctcaccacgccggatggcaggg

SEQ ID NO: 389556 - DNA, 75 bp, synthetic construct
  source 1..75: mol_type = other DNA
ctgaccacgatacagaacgacaggagccgcatccagacgatttatcagccggggagcttcacgccactcatcagg

SEQ ID NO: 389557 - DNA, 75 bp, synthetic construct
  source 1..75: mol_type = other DNA
ggcaggcgctgccggaagagctccgcttaagtccgcatcgttatctggcgacgaacagtccgcaggggccgtggt

SEQ ID NO: 389558 - DNA, 75 bp, synthetic construct
  source 1..75: mol_type = other DNA
atataacatctaatgccaaggtgtatgttgagggtacgtggaatcggatcactaacaagaaaggtgatacatctc

SEQ ID NO: 389559 - DNA, 75 bp, synthetic construct
  source 1..75: mol_type = other DNA
atggtcgatcaggactggatggattccagtaaccccggaacctggacggatgaaagtagacaccctgatacacaa

SEQ ID NO: 389560 - DNA, 75 bp, synthetic construct
  source 1..75: mol_type = other DNA
gatatcagaacatcatcaatcgttaatcgtccgtggaatatcttaagatcggaagaggcggtgtggaaagggaga

SEQ ID NO: 389561 - DNA, 75 bp, synthetic construct
  source 1..75: mol_type = other DNA
gcgcaacggacgatgccaccggcagccggaaaaccatgacatggagccgttacggtcagttgctgaccgtcactg

SEQ ID NO: 389562 - DNA, 75 bp, synthetic construct
  source 1..75: mol_type = other DNA
gcccggcagcaggccatttccggcgggacggaaccgtccgcttttcctgataccctgccgggttacaccgaatat

SEQ ID NO: 389563 - DNA, 75 bp, synthetic construct
  source 1..75: mol_type = other DNA
gcgggcagaagaggcccggcagcaggcctcttccggcgggacggaaccgtccgcttttcctgataccctgccgga

SEQ ID NO: 389564 - DNA, 75 bp, synthetic construct
  source 1..75: mol_type = other DNA
ggcaggcgctgccggaagagcttcgcctaagtccgcatcgttatctggcgacgaacagtccgcaggggccgtggt

SEQ ID NO: 389565 - DNA, 75 bp, synthetic construct
  source 1..75: mol_type = other DNA
ggcaggcgctgccggaagatctccgcataagtccgcatcgttatctggcgacgaacagtccgcaggggccgtggt

SEQ ID NO: 389566 - DNA, 75 bp, synthetic construct
  source 1..75: mol_type = other DNA
ggcaggcgctgccggaagatctacgcctaagtccgcatcgttatctggcgacgaacagtccgcaggggccgtggt

SEQ ID NO: 389567 - DNA, 75 bp, synthetic construct
  source 1..75: mol_type = other DNA
aaaaatctctacttgtccggtcgacgtcaggggagcagcagtaatgttactgtattagaaaaaagatggtggggt

SEQ ID NO: 389568 - DNA, 75 bp, synthetic construct
  source 1..75: mol_type = other DNA
acacgcgtcagagaagagaatgtccgtgaaattcataacaacgacattatgattattacagaggaaccaggatgc

SEQ ID NO: 389569 - DNA, 75 bp, synthetic construct
  source 1..75: mol_type = other DNA
tcaccttacggcgaatgcagactcatttgagataattcgctggatacctcattcactgctggtttttcgcgacaa

SEQ ID NO: 389570 - DNA, 75 bp, synthetic construct
  source 1..75: mol_type = other DNA
gcgccatatccgtgcagcccgtgccaaaacaccgggcgtgtcacgcgtactttgcattgaatgtgaagcgccaat

SEQ ID NO: 389571 - DNA, 75 bp, synthetic construct
  source 1..75: mol_type = other DNA
ggtgtgcaactttgcattacctgtcaggaaatcgcagagctgaaaggcaaacattacaacggaggtgctgtatga

SEQ ID NO: 389572 - DNA, 75 bp, synthetic construct
  source 1..75: mol_type = other DNA
aacagcgtgagcaggaagaccgcgagcgccacatcaacaacgcgcgcagccgtatcgctgcgccttctcgtttcc

SEQ ID NO: 389573 - DNA, 75 bp, synthetic construct
  source 1..75: mol_type = other DNA
agcagcgcgttgaagaaggacgccagcgctatatccgtgctgcccgtgccaaaacaccgggcgtgtctcgtgtgc

SEQ ID NO: 389574 - DNA, 75 bp, synthetic construct
  source 1..75: mol_type = other DNA
gcgccatattcgtgctgcccgtgccaaaacaccgagcgtgtctcgtgtgctttgcattgagtgtgaagcgccaat

SEQ ID NO: 389575 - DNA, 75 bp, synthetic construct
  source 1..75: mol_type = other DNA
gttcatcctgtgttcgaaaacttttgcaatgaaccaccaacaaaagaaatagattgttacattcgcagccgtgtg

SEQ ID NO: 389576 - DNA, 75 bp, synthetic construct
  source 1..75: mol_type = other DNA
tctgacgcctgctgtacaggccatagggttcgactattacaatgatcacggtgttatgtcttacggtaaaggtta

SEQ ID NO: 389577 - DNA, 75 bp, synthetic construct
  source 1..75: mol_type = other DNA
ccgggtgtgcagctttgcattacctgtcaggaaatcgcagagctgaaaggtaaacattacaacggaggtgctgta

SEQ ID NO: 389578 - DNA, 75 bp, synthetic construct
  source 1..75: mol_type = other DNA
aaaacaccgggcgtgtctcgcgtgctttgcattgaatgtgaagcgccaattccgccagcacgacgccgcgccatt

SEQ ID NO: 389579 - DNA, 75 bp, synthetic construct
  source 1..75: mol_type = other DNA
gcaccattgagctttatttcaaatatggtaaaaagctggttcccatcgtacgcgaactggggtcccctttgaaaa

SEQ ID NO: 389580 - DNA, 75 bp, synthetic construct
  source 1..75: mol_type = other DNA
ttcacaccatcgggtatagcgcagccgggattatttgatgaaatccagccccgtaaaaacagtgaaaagttaatg

SEQ ID NO: 389581 - DNA, 75 bp, synthetic construct
  source 1..75: mol_type = other DNA
tgtacggacatccccctttgcagtaaaagaaccctgttacagcaatgccgctgtggaaaagcttccattgcccac

SEQ ID NO: 389582 - DNA, 75 bp, synthetic construct
  source 1..75: mol_type = other DNA
aatgaaccgtactacggaaacgtggccactgagaagttgatcacacctacccgtgacacccgagatatcatcgcg

SEQ ID NO: 389583 - DNA, 75 bp, synthetic construct
  source 1..75: mol_type = other DNA
taactttactcgcacttagcgccactgccgtctcacatgctgaagaaaagcgctatgtttctgacgaactgaaca

SEQ ID NO: 389584 - DNA, 75 bp, synthetic construct
  source 1..75: mol_type = other DNA
tacaaactgacgccaacaccaattatgcccaggtgaaagacagctctggtcgtactgcctggatcccgttgaaac

SEQ ID NO: 389585 - DNA, 75 bp, synthetic construct
  source 1..75: mol_type = other DNA
tgggcttccaaagagtggccacagtttggtggcgtgctggcgttaacgccaggcaatatccgccgtacggaaaaa

SEQ ID NO: 389586 - DNA, 75 bp, synthetic construct
  source 1..75: mol_type = other DNA
gctgaaaagctgcgtggggaacggcagttctgcaggcatattgccgtgtttgtgaaaacatcgcctttcgccgta

SEQ ID NO: 389587 - DNA, 75 bp, synthetic construct
  source 1..75: mol_type = other DNA
ttcaccccaacaggggtttcgcagctgaatctgttcgatgatactcagccccgaagcaacagtaatcagctgatg

SEQ ID NO: 389588 - DNA, 75 bp, synthetic construct
  source 1..75: mol_type = other DNA
tccgccgaaacaacagattgtctgcagccggtcctttggggagcgtatcacgacctatgaagctatgcggcaggc

SEQ ID NO: 389589 - DNA, 75 bp, synthetic construct
  source 1..75: mol_type = other DNA
acgcaagctaaatgtgctgggcataaaaaccgcgctcgatctggctctgacgaacccggccttcatccgcaaaaa

SEQ ID NO: 389590 - DNA, 75 bp, synthetic construct
  source 1..75: mol_type = other DNA
tttccgcccggatttgaaaggaaagccggttgtggtgctcagcaataacgatggctgcgtaatcgcgagaagtgc

SEQ ID NO: 389591 - DNA, 75 bp, synthetic construct
  source 1..75: mol_type = other DNA
gccgccaaaacagcagattgtctgcagccggtcctttggggagcgtgtcacgacgtatgaagccatgcgccaggc

SEQ ID NO: 389592 - DNA, 75 bp, synthetic construct
  source 1..75: mol_type = other DNA
tgcggagcgtgataatccctgggcggatatgctgctggtcaggctggaggaggcgttatcgcaggcatcggagca

SEQ ID NO: 389593 - DNA, 75 bp, synthetic construct
  source 1..75: mol_type = other DNA
gacgatggttctttttcttatcgtggcaacatttggcttagtgatgcaacccgcgaagaaatccccgccttcatc

SEQ ID NO: 389594 - DNA, 75 bp, synthetic construct
  source 1..75: mol_type = other DNA
gggggacggattcttaaagatgagtctttcgagaacgcattcaaaagagttactttagaagaattgggtgttcaa

SEQ ID NO: 389595 - DNA, 75 bp, synthetic construct
  source 1..75: mol_type = other DNA
cgttactgtcgaacatcctgctggatgaactggataaagaactggagcgtcgtggacacagcttctgccgctacg

SEQ ID NO: 389596 - DNA, 75 bp, synthetic construct
  source 1..75: mol_type = other DNA
atctcagaggacaacggtttgccattcagtggaaacgactcgtaagaacgcttcgtcggtgggacaacttctgga

SEQ ID NO: 389597 - DNA, 75 bp, synthetic construct
  source 1..75: mol_type = other DNA
tttacgtattcatggagcaatggcatcacggcaaactgccctatgaatatcaggatggcatccttgatgcaccag

SEQ ID NO: 389598 - DNA, 75 bp, synthetic construct
  source 1..75: mol_type = other DNA
tctatgtgtttatgcagcagtggcatctcggcaaactgccgtatgaataccaggacggtattcttgatgcgccag

SEQ ID NO: 389599 - DNA, 75 bp, synthetic construct
  source 1..75: mol_type = other DNA
ccaaaccagatacacaacaaccacctgtggacaagaacaataataaaattggtccgtttgatagcagtaaaacac

SEQ ID NO: 389600 - DNA, 75 bp, synthetic construct
  source 1..75: mol_type = other DNA
cggagattggttcgctggctatggtcgtaaaaaacgcctctattgcgatgatgcgtaatgaaaggtatagcggaa

SEQ ID NO: 389601 - DNA, 75 bp, synthetic construct
  source 1..75: mol_type = other DNA
ccagagccgtggaagggaacctacgacaatattgggtcgttggcgatggtagtccgtagtgcttcaatcgcaatg

SEQ ID NO: 389602 - DNA, 75 bp, synthetic construct
  source 1..75: mol_type = other DNA
caaattggagaagggatttaggccatcagagcaatgcctggagttaatagcctcagctcttatgattaagtccga

SEQ ID NO: 389603 - DNA, 75 bp, synthetic construct
  source 1..75: mol_type = other DNA
gtgatgaacttttgcgccccgaagaaccaagtatgctgtccgaagcgattgacatgctggatgatgcaacttggt

SEQ ID NO: 389604 - DNA, 75 bp, synthetic construct
  source 1..75: mol_type = other DNA
gtgtaagcagcgtaagattagctttgatgtgtatgaactaccaatatgagaaaaaaaattttaggcttgtttctg

SEQ ID NO: 389605 - DNA, 75 bp, synthetic construct
  source 1..75: mol_type = other DNA
atgaataagttaccggaaaattcagaccagacgaaaaacgtcaaaaaatcaccatccataacccgcatagccacc

SEQ ID NO: 389606 - DNA, 75 bp, synthetic construct
  source 1..75: mol_type = other DNA
atgttaagtattattttgacagggcatggcggatttgccagtggcatggaaaaagcaatgaagcaaatcctcggc

SEQ ID NO: 389607 - DNA, 75 bp, synthetic construct
  source 1..75: mol_type = other DNA
ttcagatgatggatctgattatttctttacagaaggcagttaattcggctctgacgtttccaactgagctaacca

SEQ ID NO: 389608 - DNA, 75 bp, synthetic construct
  source 1..75: mol_type = other DNA
cttatagaggcgtgtgatcaatcggaaggtgcacagattgaagctgatgacttgagcaacctgatcatcgttatt

SEQ ID NO: 389609 - DNA, 75 bp, synthetic construct
  source 1..75: mol_type = other DNA
gcggtacgcaggatttacgggattattcaaaattataaatcagtcagtgttacacgtgctgatattttgtccggt

SEQ ID NO: 389610 - DNA, 75 bp, synthetic construct
  source 1..75: mol_type = other DNA
cagcctctcatcgtgtgggatcttttacatcaactctgaatatagagctacattcccgctatgccattatgctat

SEQ ID NO: 389611 - DNA, 75 bp, synthetic construct
  source 1..75: mol_type = other DNA
gcttactgccgagttcgcgttgaatcatgagctgtgcaaaattacggaagatctgatcttcacagagccctatta

SEQ ID NO: 389612 - DNA, 75 bp, synthetic construct
  source 1..75: mol_type = other DNA
atattaataagtttaattgtgagattagtgagttgaaacttagagctgatagttcattaaagggtaaggaaagat

SEQ ID NO: 389613 - DNA, 75 bp, synthetic construct
  source 1..75: mol_type = other DNA
tattataacataatttattttatatcaggtgttttgttaacaattttcataagttattcatgcaggccagaaaca

SEQ ID NO: 389614 - DNA, 75 bp, synthetic construct
  source 1..75: mol_type = other DNA
attgcttattcggaacaacatgcttctgccacccctgatgcagaaaagattaaacctgttagcagatttttgtcc

SEQ ID NO: 389615 - DNA, 75 bp, synthetic construct
  source 1..75: mol_type = other DNA
aacgacaccacagaaatcatgcaagaagcggtagcagatttgcaaccactcatagcagaactaatcgataaggtt

SEQ ID NO: 389616 - DNA, 75 bp, synthetic construct
  source 1..75: mol_type = other DNA
ctgatcgtctgaactatattgaaatcggtacctggtattacttcaataagaatatgaacgtatataccgcttatc

SEQ ID NO: 389617 - DNA, 75 bp, synthetic construct
  source 1..75: mol_type = other DNA
tagcttatgatatgaaaaaaaatttccttgagtatgatactcctgtgaatgtaagaatgtcaaatttatataata

SEQ ID NO: 389618 - DNA, 75 bp, synthetic construct
  source 1..75: mol_type = other DNA
agaatgacgtgatttctaagctctatcttcaccttgtccagcattgggacgtgcaggaattccttgagttattcg

SEQ ID NO: 389619 - DNA, 75 bp, synthetic construct
  source 1..75: mol_type = other DNA
actttatggatatgagcgaattttgtgtggacacatacaaccgcagccagaagtactacttcacatgcgatagcg

SEQ ID NO: 389620 - DNA, 75 bp, synthetic construct
  source 1..75: mol_type = other DNA
aaatcaagaaattaactcaaaaagagtttgatcagttttatgagttagaaggttggtcttccactctgatcaatt

SEQ ID NO: 389621 - DNA, 75 bp, synthetic construct
  source 1..75: mol_type = other DNA
taccactgcgaccatcgcggcctgccgctggcgcttgtcagcacggaaggggcaacagaatggtgcgcagaatac

SEQ ID NO: 389622 - DNA, 75 bp, synthetic construct
  source 1..75: mol_type = other DNA
ttaacaacttgatgaacagagcagatatggcttcgtttatctatctggacaatatggcgaaaagtcttaaacgcg

SEQ ID NO: 389623 - DNA, 75 bp, synthetic construct
  source 1..75: mol_type = other DNA
ggatgacctgaagagcctgcaaaggatccgcaaacgcagcttctggtggtataaggatgtcatcgcgcaaaacgg

SEQ ID NO: 389624 - DNA, 75 bp, synthetic construct
  source 1..75: mol_type = other DNA
ggggggatttttcgattccggtcacaccacacaccttcctgcacagctatatcatgcacatgctctatcaccgcc

SEQ ID NO: 389625 - DNA, 75 bp, synthetic construct
  source 1..75: mol_type = other DNA
acgctggcagtgcctttcacaggtgacgggcgggatgctgcagagatcctgcgtacactgcctcccctgaagtga

SEQ ID NO: 389626 - DNA, 75 bp, synthetic construct
  source 1..75: mol_type = other DNA
attggtgaagcccggatgctgacgccggaatcatttgacctggatggagtaagaccgtttgtgcggatcctgtcc

SEQ ID NO: 389627 - DNA, 75 bp, synthetic construct
  source 1..75: mol_type = other DNA
aagaatttgaggcgggaatcaaacagccgttcagcaatacccatttgattaatgggattcagccgaacctgctga

SEQ ID NO: 389628 - DNA, 75 bp, synthetic construct
  source 1..75: mol_type = other DNA
aaaagcgcgttgtcacgccgggccagaatgaaaagtactatcttgccggtgcactgcacagtggtacgggaaaag

SEQ ID NO: 389629 - DNA, 75 bp, synthetic construct
  source 1..75: mol_type = other DNA
atggccacctcaacaggtgtcacgccggcttacctcctggcgccggaagtgagtgcccttcttttctatatgccg

SEQ ID NO: 389630 - DNA, 75 bp, synthetic construct
  source 1..75: mol_type = other DNA
ggcatcggcgttttactataaccaccacagccagttaacgtcagccaccgggactgacgggctggaaatacgccg

SEQ ID NO: 389631 - DNA, 75 bp, synthetic construct
  source 1..75: mol_type = other DNA
tgaatacggcaggctgacggagaagacggaccgcatcccggcgggtgtgatacggacggacgacgagcggaccca

SEQ ID NO: 389632 - DNA, 75 bp, synthetic construct
  source 1..75: mol_type = other DNA
aggctggaaaccaactatgggatgtacccgtgcacagaatgaagatgtagatgagttgtgtaagaaagtgacaag

SEQ ID NO: 389633 - DNA, 75 bp, synthetic construct
  source 1..75: mol_type = other DNA
ctggaggagtgactatttattatgatcctgaaacaggtgattcaatgacttttgatagtagcaatagaattgatc

SEQ ID NO: 389634 - DNA, 75 bp, synthetic construct
  source 1..75: mol_type = other DNA
atttcaacgtcccgtttgttgtcgtacgcgccatctccgacgtggccgatcaacagtctcatcttagcttcgatg

SEQ ID NO: 389635 - DNA, 75 bp, synthetic construct
  source 1..75: mol_type = other DNA
cgcgcatcacgcgtcgcgcaaatcatgcacatcaatatgctgcatgagcgcagccacgcactatcaaacatttat

SEQ ID NO: 389636 - DNA, 75 bp, synthetic construct
  source 1..75: mol_type = other DNA
tggcgccgggcgtatcggctatgccgccgaactcaacgtggcctctgcgcttgtgctgaacaagttccagaacaa

SEQ ID NO: 389637 - DNA, 75 bp, synthetic construct
  source 1..75: mol_type = other DNA
gacgggctggatgtcgctgtcacggaaaccggaagtgacctggtacggctgggacggcgaccggctgaccacgat

SEQ ID NO: 389638 - DNA, 75 bp, synthetic construct
  source 1..75: mol_type = other DNA
tcgcccgtgacgcgcactatctttaccggtatgaccgtcacggcaggctgacggagaaaaccgacctcatcccgg

SEQ ID NO: 389639 - DNA, 75 bp, synthetic construct
  source 1..75: mol_type = other DNA
cggatggcagggcatcggcgttttactataaccaccacagccagttaacgtcagccaccgggactgacgggctgg

SEQ ID NO: 389640 - DNA, 75 bp, synthetic construct
  source 1..75: mol_type = other DNA
aatatgatgaatggggtaaccagctgaatgaagagaacccgcaccagctgcagcagctcatccgcctgccggggc

SEQ ID NO: 389641 - DNA, 75 bp, synthetic construct
  source 1..75: mol_type = other DNA
ggggcaaccagcttaatgaggagaacccgcatcatgtgtatcagccgtaccgtctgccagggcagcagcatgatg

SEQ ID NO: 389642 - DNA, 75 bp, synthetic construct
  source 1..75: mol_type = other DNA
gaccacggctggctgacagacatcagccacctgagcgaaggccaccgtgtcgctgtccactacggctacgacgat

SEQ ID NO: 389643 - DNA, 75 bp, synthetic construct
  source 1..75: mol_type = other DNA
aagaccgtttgtgcggatcctgtccgaaaaagtgcgtgcgcgacgcggacgcccgccaaaagatgaagtgcgctt

SEQ ID NO: 389644 - DNA, 75 bp, synthetic construct
  source 1..75: mol_type = other DNA
gctaccccgtaaaacgactaaaccgcgcacgcgcaaaactgctaccaaaccggcagcgaagcgcggacgcccacc

SEQ ID NO: 389645 - DNA, 75 bp, synthetic construct
  source 1..75: mol_type = other DNA
agtttgcgttatccaaccaggctaacgtctttaacgccgaaggcaaaatcacccttgatacaccagagatgatgc

SEQ ID NO: 389646 - DNA, 75 bp, synthetic construct
  source 1..75: mol_type = other DNA
tctttctcccagtttgcgttatccaatcaggctaacgtctttaacgccgaaggcaaaatcacccttgatacacca

SEQ ID NO: 389647 - DNA, 75 bp, synthetic construct
  source 1..75: mol_type = other DNA
tcgatgatcatggggccgttaggtggtctggtcataaaatatgtcgataaagcactggaaaaacgcatacctgct

SEQ ID NO: 389648 - DNA, 75 bp, synthetic construct
  source 1..75: mol_type = other DNA
ttaggactgttgctggcattcactctgtttggtaaagggatgagtaagcgctctgcacctggtgcgatgattatt

SEQ ID NO: 389649 - DNA, 75 bp, synthetic construct
  source 1..75: mol_type = other DNA
gcgcacgcgcaaacctgccaccaaaccggcggcaaagcgcgggcgtccaccaaaggcggtaaaaaccgccggtta

SEQ ID NO: 389650 - DNA, 75 bp, synthetic construct
  source 1..75: mol_type = other DNA
gatagttgctctcacccgtcagttacaaattactctgcgcggtagtgatgtgattggtcgtttgggggggatgaa

SEQ ID NO: 389651 - DNA, 75 bp, synthetic construct
  source 1..75: mol_type = other DNA
ttcactccaggtcgcgacgtggcgagctatctctctgaccagagcctgctcagcggtgcggatcgcagctacgcg

SEQ ID NO: 389652 - DNA, 75 bp, synthetic construct
  source 1..75: mol_type = other DNA
cgatgccgccgcgattaacgccttacgccagcaaattcaggcgttgaaagtgacgggcaggcaaaaaatcaatct

SEQ ID NO: 389653 - DNA, 75 bp, synthetic construct
  source 1..75: mol_type = other DNA
accgagaaaaactctgcggtctacggcatgttgacctcgctgaccattaccgccgggcaaaagaccgaagagacg

SEQ ID NO: 389654 - DNA, 75 bp, synthetic construct
  source 1..75: mol_type = other DNA
cggttgccacagtcatcagcaacgttggtgaaggcgcgttttacgatggcgtactgcgtattgtgcgtaccgaag

SEQ ID NO: 389655 - DNA, 75 bp, synthetic construct
  source 1..75: mol_type = other DNA
tggctgaaatcggcagatatggcgctctataaagcaaagaaagccggacgtaaccgcaccgaagtggcggcctga

SEQ ID NO: 389656 - DNA, 75 bp, synthetic construct
  source 1..75: mol_type = other DNA
ccgttgggaatgcagcaggcatcggttaacggtaaatctatcttctttatggtggcgtccaatcctgggccgggt

SEQ ID NO: 389657 - DNA, 75 bp, synthetic construct
  source 1..75: mol_type = other DNA
caggtgcttgctgttccgccagcgtagacaagccagcgttgcgcgttctgtggtcatacagcgaaagataatcgc

SEQ ID NO: 389658 - DNA, 75 bp, synthetic construct
  source 1..75: mol_type = other DNA
caggtgcttgctgttccgccagcgtacacaagccagcgttgcgcgtcctgtggtcatacagcgaaagagaatcgc

SEQ ID NO: 389659 - DNA, 75 bp, synthetic construct
  source 1..75: mol_type = other DNA
caggtgcttgctgttccgccagcgtatacaagccagcgttgcgcgtgctgtggtcatacagcgaaagataatcgc

SEQ ID NO: 389660 - DNA, 75 bp, synthetic construct
  source 1..75: mol_type = other DNA
aacaaatgctaaaatttcgcgccagccgccacgaagattttccttatcaggagatccttctgactcgtctttgca

SEQ ID NO: 389661 - DNA, 75 bp, synthetic construct
  source 1..75: mol_type = other DNA
atgaggccggtaataaatacatccctgtattgtgacttcttccagaagcgggctgcttttccccgattcaaaaag

SEQ ID NO: 389662 - DNA, 75 bp, synthetic construct
  source 1..75: mol_type = other DNA
gggactaccttcataaagtcacaacgaccgtcagcaaaaaccacgcaatgatagtcattgaggatttgaaggtca

SEQ ID NO: 389663 - DNA, 75 bp, synthetic construct
  source 1..75: mol_type = other DNA
ccggtgcgctggctcacctgcaacgtgcgacacagctcgactggccggacttattgaatcgctgtcaccgtcagg

SEQ ID NO: 389664 - DNA, 75 bp, synthetic construct
  source 1..75: mol_type = other DNA
tgtttggtaaagggatgagtaaacgttctgcgcctggggcgatgattattcacttcctcggtgggatccacgaac

SEQ ID NO: 389665 - DNA, 75 bp, synthetic construct
  source 1..75: mol_type = other DNA
tctaacccaggtccgggcctggggctgctgctggcgtttaccttgtttggtaaagggatgagtaaacgttctgcg

SEQ ID NO: 389666 - DNA, 75 bp, synthetic construct
  source 1..75: mol_type = other DNA
caggtgcttgctgttccgccagcgtaaacaagccagcgttgcgcgtactgtggtcatacagcgaaagacaatcgc

SEQ ID NO: 389667 - DNA, 75 bp, synthetic construct
  source 1..75: mol_type = other DNA
actatcccgcagcactggccttgcggcagatggcgctcgttcaggacgaactaccgaaatacctgctggcgccgg

SEQ ID NO: 389668 - DNA, 75 bp, synthetic construct
  source 1..75: mol_type = other DNA
ttcaccgaggaggtggcctgcgccatgcgcgcccacgctgccggtgagtctgtggatacccgcctgctgacggaa

SEQ ID NO: 389669 - DNA, 75 bp, synthetic construct
  source 1..75: mol_type = other DNA
tgatgcctgctaatgaacctcaatttgaccttactgcaacatcagtacctgacgaacagcgtctcgatttctggc

SEQ ID NO: 389670 - DNA, 75 bp, synthetic construct
  source 1..75: mol_type = other DNA
accgctgtttatccatgtgatcctgcctggtgccctgccctcaattatggtcggtgtgcgttttgctttgggcct

SEQ ID NO: 389671 - DNA, 75 bp, synthetic construct
  source 1..75: mol_type = other DNA
tacgccctgctcggcaaacttgctgacgtcagcgcgcagctgttagaacgtctctggttgcgctggaacccggct

SEQ ID NO: 389672 - DNA, 75 bp, synthetic construct
  source 1..75: mol_type = other DNA
ctatcccacaatggataacccttgagccccaaatatttggctggatggatcgtctgtgcgctgattacagcggcg

SEQ ID NO: 389673 - DNA, 75 bp, synthetic construct
  source 1..75: mol_type = other DNA
ttcgcctggatggatcgcttctgtgatgagtacagcggtggtctctggtccttttacacgctcagcaatggcggt

SEQ ID NO: 389674 - DNA, 75 bp, synthetic construct
  source 1..75: mol_type = other DNA
ttcgcctggatggagcgcttttgtgatgagtacagcggtggtatctggtccttttacacgctcagtaatggcggc

SEQ ID NO: 389675 - DNA, 75 bp, synthetic construct
  source 1..75: mol_type = other DNA
tgaccacgatacagaacgacaggagccgcatccagacgatttatcagccgggggagcttcacgccactcatcaga

SEQ ID NO: 389676 - DNA, 75 bp, synthetic construct
  source 1..75: mol_type = other DNA
cggctgtgtgccgattaccagggtggtatctggcgcttttcgacactcagcaacggcggtgctttcatggctcct

SEQ ID NO: 389677 - DNA, 75 bp, synthetic construct
  source 1..75: mol_type = other DNA
ggtatagcagtctgtctgatggcttacagccaccacgcctgccgcaccgagtgtgacggtatgactggacactat

SEQ ID NO: 389678 - DNA, 75 bp, synthetic construct
  source 1..75: mol_type = other DNA
ggcagccggaaaatcatgacgtggagccgttacggtcagttgctgacgttcaccgactgctccggctaccagact

SEQ ID NO: 389679 - DNA, 75 bp, synthetic construct
  source 1..75: mol_type = other DNA
atgccaatccgtgatcgaatagagcggaatacgcagcctgcgccgctgccgtcgtaccgggtactgaccgggctg

SEQ ID NO: 389680 - DNA, 75 bp, synthetic construct
  source 1..75: mol_type = other DNA
acaggagccgcatccagacgatttatcagccggggagcttcacaccactcatcagagttgaaactgccaccggtg

SEQ ID NO: 389681 - DNA, 75 bp, synthetic construct
  source 1..75: mol_type = other DNA
ccatcccacaatggataacccttgaacctcgcattttcgcctggatggatcggctgtgtgctgattacagcggcg

SEQ ID NO: 389682 - DNA, 75 bp, synthetic construct
  source 1..75: mol_type = other DNA
gtcatacagcgaaagaaaaccgcctgacacaaagtaaattcgtgtgtcaggcatgtggatatacagcgaacgccg

SEQ ID NO: 389683 - DNA, 75 bp, synthetic construct
  source 1..75: mol_type = other DNA
tggtcatacagcgaaagaaaaccgcctgacacaaagtaaattcgtgtgtcgggcttgtggatatacagagaacgc

SEQ ID NO: 389684 - DNA, 75 bp, synthetic construct
  source 1..75: mol_type = other DNA
tacggtcagccagccggggcgcaatgtccgggcaaaatcaggtttaaaccgttcgatactggatcagggctggta

SEQ ID NO: 389685 - DNA, 75 bp, synthetic construct
  source 1..75: mol_type = other DNA
tctttgtggatgccggaaacaaaaaactggtcttctggtttgtacgtgttgatgacgaagggtatccggaaattg

SEQ ID NO: 389686 - DNA, 75 bp, synthetic construct
  source 1..75: mol_type = other DNA
aagaccttgagcgggcttacaaaaacttcttccagaagcgggctgcttttccccgattcaaaaagcggggacaga

SEQ ID NO: 389687 - DNA, 75 bp, synthetic construct
  source 1..75: mol_type = other DNA
ttagcggcggggcacgccgtacttgcctgtggagggacgatgcagtcagaccgcccgttgaagcaggaaccagac

SEQ ID NO: 389688 - DNA, 75 bp, synthetic construct
  source 1..75: mol_type = other DNA
gtgaaacttcatccggatgatttttttgacgaagaagacgctgaagttctgcgctttgataattttgacgatgcc

SEQ ID NO: 389689 - DNA, 75 bp, synthetic construct
  source 1..75: mol_type = other DNA
ttgcatctgctaacgagtccgaatttgaactgaccgtaacgcaggtacctgacgaacagcgtctcgatttctggc

SEQ ID NO: 389690 - DNA, 75 bp, synthetic construct
  source 1..75: mol_type = other DNA
gaaatggacactgtttaacagcatgaacggtaacggcgcagagatgagcgctgaggctgccggaatagccgtctg

SEQ ID NO: 389691 - DNA, 75 bp, synthetic construct
  source 1..75: mol_type = other DNA
gcacggttcactggccggacggagtcgccccgccttctgatgctcccccgttttgccgatatttttcagcaggga

SEQ ID NO: 389692 - DNA, 75 bp, synthetic construct
  source 1..75: mol_type = other DNA
gaccattctttccggtatcagcgccggcggtatgtactgcccggagtgtggcacggttcactggccggacggagt

SEQ ID NO: 389693 - DNA, 75 bp, synthetic construct
  source 1..75: mol_type = other DNA
caaaaagctggtcttctggtttgttcgtgtcgatgacgaagggtatccggaaatagcccgctgcacggagcggga

SEQ ID NO: 389694 - DNA, 75 bp, synthetic construct
  source 1..75: mol_type = other DNA
tcgcaccgagtgtgacgcgatgactgagcactattatcgcttacgagacttcgcgttgaaccatccagagtgcag

SEQ ID NO: 389695 - DNA, 75 bp, synthetic construct
  source 1..75: mol_type = other DNA
atgtcggtcagtcgttcgctactcgccgtgatgcaacggttaagtcgttactttccatgctggcacttatcccac

SEQ ID NO: 389696 - DNA, 75 bp, synthetic construct
  source 1..75: mol_type = other DNA
tgtgataacgcatttgatgatgctgtaacgggcggattcggttgtttccgcatgtgtgccgattacgaagatgaa

SEQ ID NO: 389697 - DNA, 75 bp, synthetic construct
  source 1..75: mol_type = other DNA
aggctgaattgcagaaagcgcagaacgaacaggcagccattcaggttaaagcattccaggcacagacggatgctc

SEQ ID NO: 389698 - DNA, 75 bp, synthetic construct
  source 1..75: mol_type = other DNA
aagaacttcccgctacgcttactccaggacaacaggtgatggtttcctgggcgcgcgatgtgatggtgccgctgg

SEQ ID NO: 389699 - DNA, 75 bp, synthetic construct
  source 1..75: mol_type = other DNA
ttccccgcgcgatctctatatgcgcccgcgcacgccgtttgttgcgggattcgtcgggacatccaacgtttttga

SEQ ID NO: 389700 - DNA, 75 bp, synthetic construct
  source 1..75: mol_type = other DNA
tgccgttcatgatcctgcccgttcaggcggcgcttgagcgtttgccgccgtcattgttgcaggcgtcggctgatc

SEQ ID NO: 389701 - DNA, 75 bp, synthetic construct
  source 1..75: mol_type = other DNA
actggcatcgcaaggtgctgtgcaactttgataatgcctggtcagcaacgcaggatatgcgtgagcagattattg

SEQ ID NO: 389702 - DNA, 75 bp, synthetic construct
  source 1..75: mol_type = other DNA
cagccacgcactatcaaacatttattccgcctctgttttcagctatctggcggatgatctgcacgagcttcaaca

SEQ ID NO: 389703 - DNA, 75 bp, synthetic construct
  source 1..75: mol_type = other DNA
aaccggtcgcccctgccgaaggtattgcccgcgccgttcaggcgggtattccgctggcacgcgtcactctcagct

SEQ ID NO: 389704 - DNA, 75 bp, synthetic construct
  source 1..75: mol_type = other DNA
aagaatacaaccgcaatcagttgcttctgtctggagttatcaagccgagaacgccagaagaacagcagatggttg

SEQ ID NO: 389705 - DNA, 75 bp, synthetic construct
  source 1..75: mol_type = other DNA
ccgtgacgcaacggttaagtcgttactttccatgctggcacttatcccaccaggaacgccgaagcacgaccttgt

SEQ ID NO: 389706 - DNA, 75 bp, synthetic construct
  source 1..75: mol_type = other DNA
ttcctgtagttgatgttgacatgattcctggtcctctcgccactcattgggcggagcgcaacaaaaagcgcccgg

SEQ ID NO: 389707 - DNA, 75 bp, synthetic construct
  source 1..75: mol_type = other DNA
ccgcgcacgccgtttgttgccggattcgtcgggacatccaacgtttttgatccgctaatggccgagaatctttgc

SEQ ID NO: 389708 - DNA, 75 bp, synthetic construct
  source 1..75: mol_type = other DNA
ataaacagcaggtgtacttcaccaggcagaattatccgcatgaatgcatgcagcctgtctggaagtttcaaaatt

SEQ ID NO: 389709 - DNA, 75 bp, synthetic construct
  source 1..75: mol_type = other DNA
cccgcctgaacgtgcctgaacgcctgtggcacctggcaccatcgaccttctccggcggcgaacagcagcgcgtca

SEQ ID NO: 389710 - DNA, 75 bp, synthetic construct
  source 1..75: mol_type = other DNA
tgcccgacgaagggcaaatccagatcaaacacggtgatgaatgggtcgacctggtcaccgcgccagcgcgcaaag

SEQ ID NO: 389711 - DNA, 75 bp, synthetic construct
  source 1..75: mol_type = other DNA
cgagtgtgatgcgatgactgagcactattatcgcttacgcgacttcgcgctacaccatccagagtgcagcgccat

SEQ ID NO: 389712 - DNA, 75 bp, synthetic construct
  source 1..75: mol_type = other DNA
gaaactatttctgccaattccggcattggttatctggcgatgaatgcgcgggagtttttgcaaacggatgtggtg

SEQ ID NO: 389713 - DNA, 75 bp, synthetic construct
  source 1..75: mol_type = other DNA
gatcagctcctggcgggcgttgattggcttttcaattggcggatcgctgggcttgattctgggactgattagcgg

SEQ ID NO: 389714 - DNA, 75 bp, synthetic construct
  source 1..75: mol_type = other DNA
cggcaggctgacggagaaaaccgacctcatcccggaagggggtatccgtacggatgatgagcgcacccaccggta

SEQ ID NO: 389715 - DNA, 75 bp, synthetic construct
  source 1..75: mol_type = other DNA
atggcaaaccgcaagcaacagcgcgcccgcgctgagcgtcttcacatccgaagcgaaatcaaccgcagacttttc

SEQ ID NO: 389716 - DNA, 75 bp, synthetic construct
  source 1..75: mol_type = other DNA
ctgatggtcaaaggtgtggagaaaaaacagcgttacatcatggcgcaagaggcgctggaaaaagtggcgctgggt

SEQ ID NO: 389717 - DNA, 75 bp, synthetic construct
  source 1..75: mol_type = other DNA
ctccggcagcggcaaatcaaccctgctgcgctcgctgtacgccaactatctgcccgatgaagggcaaatccagat

SEQ ID NO: 389718 - DNA, 75 bp, synthetic construct
  source 1..75: mol_type = other DNA
ctggtcaccgcgccagcgcgcaaagtggtggagatccgcaaaaccactgtcggctgggtaagccagtttctgcgc

SEQ ID NO: 389719 - DNA, 75 bp, synthetic construct
  source 1..75: mol_type = other DNA
cagatcctctggggttagaagtttttcctagaccattccccttgccaattccatggcccaaaagccctgcacagc

SEQ ID NO: 389720 - DNA, 75 bp, synthetic construct
  source 1..75: mol_type = other DNA
ttgatgtatcacctgttagtgttgttgcaggatcaggggctggatttaacaacggtgattgagaacctgcgtaaa

SEQ ID NO: 389721 - DNA, 75 bp, synthetic construct
  source 1..75: mol_type = other DNA
acacagccaaactgtatgccagcggcaccaagcgcattgcgcagaaagtgggcgaagaaggcgtggaaaccgcac

SEQ ID NO: 389722 - DNA, 75 bp, synthetic construct
  source 1..75: mol_type = other DNA
agctggactgggaaaaaactgacggattactgcccgtggttgtccagcatgccgtttccggcgaagtgctgatgc

SEQ ID NO: 389723 - DNA, 75 bp, synthetic construct
  source 1..75: mol_type = other DNA
gctgattaacgttggcacgctgacgcagccacgcgcacaggcgatgcgtgccgccgttgaacaggcaaaacgctc

SEQ ID NO: 389724 - DNA, 75 bp, synthetic construct
  source 1..75: mol_type = other DNA
tatgttaccgatggtagccgtattgttggcattcgcggtggcagtccgctaatgaccaaagtggtcggaactggt

SEQ ID NO: 389725 - DNA, 75 bp, synthetic construct
  source 1..75: mol_type = other DNA
ttggcattcacggtggcgatccgttaatgaccaaagtggtaggaactggctgtgcattatcggcggttgtcgctg

SEQ ID NO: 389726 - DNA, 75 bp, synthetic construct
  source 1..75: mol_type = other DNA
tagcagcaacggtacatgaccgctttgaactcaccaacgaggcgtctgacttgatgtatcacctgctggtgctgt

SEQ ID NO: 389727 - DNA, 75 bp, synthetic construct
  source 1..75: mol_type = other DNA
ccggaaagctcctacaccgcgcgcctgtatgccagcggcaccaagcgtatcgcgcagaaagtgggtgaagaaggc

SEQ ID NO: 389728 - DNA, 75 bp, synthetic construct
  source 1..75: mol_type = other DNA
acactttattagtgctggcgaatcccatcggcccgacctgccacaaaggcaccagcagctgcttcggcgacaccg

SEQ ID NO: 389729 - DNA, 75 bp, synthetic construct
  source 1..75: mol_type = other DNA
ttgatgtatcacctgctggtattgttgcaggatcaggatctggatttaacgacggtaattgagaacctgcgtaaa

SEQ ID NO: 389730 - DNA, 75 bp, synthetic construct
  source 1..75: mol_type = other DNA
ctgttggtgttgttgcaggatcaggatctggatttaacaacggtgattgagaacctgcgtaaacggcatcagtga

SEQ ID NO: 389731 - DNA, 75 bp, synthetic construct
  source 1..75: mol_type = other DNA
aaaaaaccgacggactgatgcccgccattatccaacacgcggtatccggtgaagtgctgatgctgggctatatga

SEQ ID NO: 389732 - DNA, 75 bp, synthetic construct
  source 1..75: mol_type = other DNA
aatgaccaaagtggtaggaactggctgtgcattatcggcagttgtcgctgcctgttgtgcattaccaggcgatat

SEQ ID NO: 389733 - DNA, 75 bp, synthetic construct
  source 1..75: mol_type = other DNA
ttcatattcagcagcttgagcaggagttctcggtacagttatttgagaaaattggtcgacgaatgtgccttaccc

SEQ ID NO: 389734 - DNA, 75 bp, synthetic construct
  source 1..75: mol_type = other DNA
cgctactgaatgatgaggctgatgtcggcgtcttttaccgcgtagggaatgatgatgctctgaaccgacgagagt

SEQ ID NO: 389735 - DNA, 75 bp, synthetic construct
  source 1..75: mol_type = other DNA
cttaccgcattcagtcagcgcagtcgggtggcatacagtgggcaacagatgctggaggaatatgtctcgttctat

SEQ ID NO: 389736 - DNA, 75 bp, synthetic construct
  source 1..75: mol_type = other DNA
gtgtcggacagagatcttaaagaaaacattcaggttattgataatgccactgagcgcatcagattaatgaatggg

SEQ ID NO: 389737 - DNA, 75 bp, synthetic construct
  source 1..75: mol_type = other DNA
atgaatattttgcaatttaatgtgcgactggcggaaggcggggcagcaggtgtggcgttagatctccaccagcgt

SEQ ID NO: 389738 - DNA, 75 bp, synthetic construct
  source 1..75: mol_type = other DNA
aagagtcggatccggacggggaactacgcgttgtttcaggcgaaacgttgctctcttaccgaatgccgcaggtgt

SEQ ID NO: 389739 - DNA, 75 bp, synthetic construct
  source 1..75: mol_type = other DNA
atggctatcaaagaaagtcagatcaacagcacatctaacattaatacatctaacagcaaggttaaatctgataac

SEQ ID NO: 389740 - DNA, 75 bp, synthetic construct
  source 1..75: mol_type = other DNA
acaaacgccctggacgcttgatccggttgcggttggtgcgctcgattatcgccgccgtttttgtctggaacttct

SEQ ID NO: 389741 - DNA, 75 bp, synthetic construct
  source 1..75: mol_type = other DNA
cgattaaccatgcttgaagaactgatgcagtgggagggagtcattctgactactgatttgcggacatcatgtgtg

SEQ ID NO: 389742 - DNA, 75 bp, synthetic construct
  source 1..75: mol_type = other DNA
ataggaaccaaactaatgaagtatcggaaatgaaacgagcatttatatctttcatggattttttgcaatcaattt

SEQ ID NO: 389743 - DNA, 75 bp, synthetic construct
  source 1..75: mol_type = other DNA
atttattatcatcggtgatggccccgagttccaaaaaatattagagataagtaataagacaaggaatattaaagt

SEQ ID NO: 389744 - DNA, 75 bp, synthetic construct
  source 1..75: mol_type = other DNA
cggagttctcaggagaaccccgctgacccggcggcgtgtttgccgttgttccgtgtcagtggtggcgcattatag

SEQ ID NO: 389745 - DNA, 75 bp, synthetic construct
  source 1..75: mol_type = other DNA
atgctaattaatcagcaacaaagagatgaattagaattagccttgtcttgtaccgatcatgaatatcgtttgcca

SEQ ID NO: 389746 - DNA, 75 bp, synthetic construct
  source 1..75: mol_type = other DNA
gctttcaagaaaggctatggtgatacaagggaactattcgttgaactcgctaacgtgaagtacagccactattac

SEQ ID NO: 389747 - DNA, 75 bp, synthetic construct
  source 1..75: mol_type = other DNA
gttactgcgagatattaaccgttatctgcaaggggaagcgccggttatcaaagcgccgccgcccgatgatgaaac

SEQ ID NO: 389748 - DNA, 75 bp, synthetic construct
  source 1..75: mol_type = other DNA
cgccgatagccaggaagaagcggaatatcaggaaacttttgataaagttaataagatattacgccaactggagaa

SEQ ID NO: 389749 - DNA, 75 bp, synthetic construct
  source 1..75: mol_type = other DNA
atggaaattatcgacgaactggaaccgcagcgacgtaatgcctggtgcggcagcattggctatttgagcttttgc

SEQ ID NO: 389750 - DNA, 75 bp, synthetic construct
  source 1..75: mol_type = other DNA
gggtacatattattcacggctgaggaagtacgggattaaggcagagttctttatgtcggttgacgactcacccat

SEQ ID NO: 389751 - DNA, 75 bp, synthetic construct
  source 1..75: mol_type = other DNA
gcggcatgttgaaaggttttatcgacctggtgttccgtcatgaagggcgttattacctgctcgactataaatcca

SEQ ID NO: 389752 - DNA, 75 bp, synthetic construct
  source 1..75: mol_type = other DNA
attccgccattgcgcaaacgtcgtgaagatctcaagcaaatgattgacgatattattgataagtatcaggagcgc

SEQ ID NO: 389753 - DNA, 75 bp, synthetic construct
  source 1..75: mol_type = other DNA
agcctacctgtcagtaatattgatttctctttgtttgttgcttattaatttgtattatttgtccttgttgaagga

SEQ ID NO: 389754 - DNA, 75 bp, synthetic construct
  source 1..75: mol_type = other DNA
aagccgcgcagtggttgctgttagctgagcgacagatggatgaagcagcagtctttaccatccacggtttttgcc

SEQ ID NO: 389755 - DNA, 75 bp, synthetic construct
  source 1..75: mol_type = other DNA
acaggtggagatggagttttatctgccgattagtgaaccgcttatcgccagtcagcttgatacgttaatccgcca

SEQ ID NO: 389756 - DNA, 75 bp, synthetic construct
  source 1..75: mol_type = other DNA
attacttcaggaagcgggaacgcagcttgaaagtgaacatgcgctggtacgctggttatcacagcatatcctcga

SEQ ID NO: 389757 - DNA, 75 bp, synthetic construct
  source 1..75: mol_type = other DNA
atgaagacgttatctcccgctgtgattactttaccctggcgtcaggacgccgctgaatactattttgcccgctta

SEQ ID NO: 389758 - DNA, 75 bp, synthetic construct
  source 1..75: mol_type = other DNA
atgcatccggagagatgcatcagcaccagattttaccaggcggtgctggacgatgcgtccgtgtcagatattcag

SEQ ID NO: 389759 - DNA, 75 bp, synthetic construct
  source 1..75: mol_type = other DNA
ggaagtcaatatggtggtggctggccgggcgatgccggttctggaatcagatgtgtatgaaaccaaatcttcgtc

SEQ ID NO: 389760 - DNA, 75 bp, synthetic construct
  source 1..75: mol_type = other DNA
aaagtcgcaaccgaaagtgatgttcgtctggcgataaaaaatggcatgagcaccgtggaagtatttgaaaagttc

SEQ ID NO: 389761 - DNA, 75 bp, synthetic construct
  source 1..75: mol_type = other DNA
aattacaggcgttgctatggctatcgcttttttagtatatgttatttgtcggtgagggtaaaaacgttcgccggg

SEQ ID NO: 389762 - DNA, 75 bp, synthetic construct
  source 1..75: mol_type = other DNA
tcgttttggtaacatataaccgtgttgcattgctagatagagctattcaagcattatatgcgcaaacatacccag

SEQ ID NO: 389763 - DNA, 75 bp, synthetic construct
  source 1..75: mol_type = other DNA
tatgctctctatatgataaggacacgttagtgcaacttgttgaaactggtggagttcatcctctgagtcgagaac

SEQ ID NO: 389764 - DNA, 75 bp, synthetic construct
  source 1..75: mol_type = other DNA
ttatttttttgttatatgccatgtcaggaaatgtttttgctgatatcagaaaaaacacaggaactattgaccccg

SEQ ID NO: 389765 - DNA, 75 bp, synthetic construct
  source 1..75: mol_type = other DNA
ttgattttgaagctcagcgtaaacggcttgatttaattgaaattcgtcaggcttatcagttagttgagaaaaaac

SEQ ID NO: 389766 - DNA, 75 bp, synthetic construct
  source 1..75: mol_type = other DNA
aggacttgagatgcttcacgatgactacatcggagagattaacgccaacggcatgccagaaatgccagttatgca

SEQ ID NO: 389767 - DNA, 75 bp, synthetic construct
  source 1..75: mol_type = other DNA
ttgatattaatttccccacatttagttatggtacttatgctcaggatcaggggccgcgaggaaaagtcattgatt

SEQ ID NO: 389768 - DNA, 75 bp, synthetic construct
  source 1..75: mol_type = other DNA
catacaaccgatatgactattgggatgagcgcatagaaatcatgtgctggtgggcgacctacttatgtgatggcg

SEQ ID NO: 389769 - DNA, 75 bp, synthetic construct
  source 1..75: mol_type = other DNA
ggcgacatctacctcggcaaaatcaagaagtgggatgatgaagccatcgccaaactgaatccggatctgaaactg

SEQ ID NO: 389770 - DNA, 75 bp, synthetic construct
  source 1..75: mol_type = other DNA
ggtgcgccagctgaagcgtcagggggcttgcctgagccggaacaaccggcagaaacggcggctgacccatttatg

SEQ ID NO: 389771 - DNA, 75 bp, synthetic construct
  source 1..75: mol_type = other DNA
ctgcagaagcagtgaaggatgcgctgcgctctgaagaagtgagcagcgtcctgaaacaaaaaattcgtgcaacct

SEQ ID NO: 389772 - DNA, 75 bp, synthetic construct
  source 1..75: mol_type = other DNA
tattcctccaacaatactggaattactggcatagccggtgaacatgatcagttaaattatggtatatatgttaat

SEQ ID NO: 389773 - DNA, 75 bp, synthetic construct
  source 1..75: mol_type = other DNA
acaatgtgccgtgccaaattgatctacaggacgtacaggccatttaccaaacactgtttccgcaacatccattta

SEQ ID NO: 389774 - DNA, 75 bp, synthetic construct
  source 1..75: mol_type = other DNA
tcgttcctttttggtgccctactcttccgtgcccaacatgctgcaacctggtgtttcaaatttcgattttatcgc

SEQ ID NO: 389775 - DNA, 75 bp, synthetic construct
  source 1..75: mol_type = other DNA
ctttgaaactgacaagcgcaagttgatgagcgcgctcaatcagatggatgcgctggattcagttctcgcgtcgat

SEQ ID NO: 389776 - DNA, 75 bp, synthetic construct
  source 1..75: mol_type = other DNA
ctgaccaagtccaccctttacctgcctgatactgcaaaagaagagttagagaagaagaaaaacatggggtattga

SEQ ID NO: 389777 - DNA, 75 bp, synthetic construct
  source 1..75: mol_type = other DNA
atggcgaagcgaacgccagtgttgaactgacgccgaatatggcagggcccgcccttcgacgcgctggagaaatac

SEQ ID NO: 389778 - DNA, 75 bp, synthetic construct
  source 1..75: mol_type = other DNA
tgttttatcgactgagtattttgcgtctgcaattgccgccgctacgcgagcgggtggcggatattctgccgctgg

SEQ ID NO: 389779 - DNA, 75 bp, synthetic construct
  source 1..75: mol_type = other DNA
cgtctgctggcgggcagtattgccgggttactgacggatgttacgatcacatcgaattaccgtggtgacgtcaca

SEQ ID NO: 389780 - DNA, 75 bp, synthetic construct
  source 1..75: mol_type = other DNA
ctgtatcccaatgggttatgccatccctaaacgttgcagataatcatcagcttttttctttctcggttcaggatg

SEQ ID NO: 389781 - DNA, 75 bp, synthetic construct
  source 1..75: mol_type = other DNA
gcagcagattcgcgccttactggaaaagcactgcccgcaagtgagcgttatcgataatgtgcccgcagagcccac

SEQ ID NO: 389782 - DNA, 75 bp, synthetic construct
  source 1..75: mol_type = other DNA
aagattctgacgtttatttataaacaggatatttcatcgctgtttggcctgttttcacggctgcgcggcggaggg

SEQ ID NO: 389783 - DNA, 72 bp, synthetic construct
  source 1..72: mol_type = other DNA
ttcggtgaacgcactctggccacactggagcgtcttctgagcctgctgtcggcctttgaggtcgtggtatag

SEQ ID NO: 389784 - DNA, 75 bp, synthetic construct
  source 1..75: mol_type = other DNA
ccggaaggtatcgcgggtgacgggagtgcttcagatggcggtgaacccacacctgacagcgacatgatgatgtaa

SEQ ID NO: 389785 - DNA, 75 bp, synthetic construct
  source 1..75: mol_type = other DNA
atgatcctgcacgcgcaggcaaaacacggcaaaccaggtttaccctggttggtgtttttgcacggtttttctggc

SEQ ID NO: 389786 - DNA, 75 bp, synthetic construct
  source 1..75: mol_type = other DNA
aaaaaaggtattcgagggtggagtcgtcgttcggataaccgcagagcattttctgcggttattgatgtcgcggta

SEQ ID NO: 389787 - DNA, 75 bp, synthetic construct
  source 1..75: mol_type = other DNA
atggctaaagtcgatcaaactaaagctaacatgttattgagcgctacaaaaacgatgtctcttggtgccaataaa

SEQ ID NO: 389788 - DNA, 75 bp, synthetic construct
  source 1..75: mol_type = other DNA
tcaacgagaaaatcccatgtcagaattacatccctggtcactgcagaggcagtgaaggaagtcctgcgctctgaa

SEQ ID NO: 389789 - DNA, 75 bp, synthetic construct
  source 1..75: mol_type = other DNA
ccggaaggtatcgcgggtgaggggagtgcttcagatagcggtgaccccacacctgacagcgacatgatgatgtaa

SEQ ID NO: 389790 - DNA, 75 bp, synthetic construct
  source 1..75: mol_type = other DNA
gagcgcactgaaacagaaacttcgccagaatcttgagtcgcgtcttgatgcagaagtggatgccattctggatga

SEQ ID NO: 389791 - DNA, 75 bp, synthetic construct
  source 1..75: mol_type = other DNA
gtgtccgttaaactcaggctacctcatacatccctggtcactgcagaggcagtgaaggaagtcctgcgctctgaa

SEQ ID NO: 389792 - DNA, 75 bp, synthetic construct
  source 1..75: mol_type = other DNA
tcgctctgaagaagtcagaagcgcactgaaacagaaacttcgccagaatctggaggaacgcctcgatgctgaagt

SEQ ID NO: 389793 - DNA, 75 bp, synthetic construct
  source 1..75: mol_type = other DNA
agatgtaagctatagagagcttgaaattcgcaatggcggatgcattacaggagttgtaaataagattactgacga

SEQ ID NO: 389794 - DNA, 75 bp, synthetic construct
  source 1..75: mol_type = other DNA
tgttttatcggctgagtattttgcgtctgcaattgccaccactgcgcgagcgggtggcggatattctgccgctgg

SEQ ID NO: 389795 - DNA, 75 bp, synthetic construct
  source 1..75: mol_type = other DNA
atgaaatttaccgtagaacgtgagcatttattaaaaccgctacaacaggtgagcgggccgttaggtggtcgtcct

SEQ ID NO: 389796 - DNA, 75 bp, synthetic construct
  source 1..75: mol_type = other DNA
cacgttggcgactttatcttcacctccaaactggtggatggtcgcttcccggattaccgccgcgttttgccgaag

SEQ ID NO: 389797 - DNA, 75 bp, synthetic construct
  source 1..75: mol_type = other DNA
gattggcagcaacaacattcgcgcccacgttggcgactttatcttcacctccaaactggtggatggtcgcttccc

SEQ ID NO: 389798 - DNA, 75 bp, synthetic construct
  source 1..75: mol_type = other DNA
gccgtccggttgtttatgaagttggcgtagatgaggctctgtatatgttctacgcacagaaaactaccagcaata

SEQ ID NO: 389799 - DNA, 75 bp, synthetic construct
  source 1..75: mol_type = other DNA
agatcgcatccgcaagatgaacggctatacctatacccttaaggaaaacggtatgccctatgcaggtgtcattgc

SEQ ID NO: 389800 - DNA, 75 bp, synthetic construct
  source 1..75: mol_type = other DNA
gcttattaaatttgattacaccgacacattacagatcaaatatgctaatcatgggtcaaccatgacattaaacac

SEQ ID NO: 389801 - DNA, 75 bp, synthetic construct
  source 1..75: mol_type = other DNA
atgttaaccctgtatacatcttcaagctgggctttcagtattgatgatgtcgcaaagcaagctcaatccttagcc

SEQ ID NO: 389802 - DNA, 75 bp, synthetic construct
  source 1..75: mol_type = other DNA
atcaggatctctgccctgatggtgctgttctggaagctaagagcggtgaaaccattctcgacgctgcgctgcgta

SEQ ID NO: 389803 - DNA, 75 bp, synthetic construct
  source 1..75: mol_type = other DNA
gagcggtccgttaggtggtcgtcctacgctaccgattctcggtaatctgctgttacaggttgctgacggtacgtt

SEQ ID NO: 389804 - DNA, 75 bp, synthetic construct
  source 1..75: mol_type = other DNA
aatgacgaggatcgtcacacataacgggaaaaaaggtatcttttgggactttagtgatctttacggaggaacttt

SEQ ID NO: 389805 - DNA, 75 bp, synthetic construct
  source 1..75: mol_type = other DNA
cgcaaagcaagctcaatccttagccgggaaaggctatgaggcacctaaaagtaacttgccctccgttttccgcga

SEQ ID NO: 389806 - DNA, 75 bp, synthetic construct
  source 1..75: mol_type = other DNA
acaggaagctctggaagcaatcccagaagttgtaggttccgcaatgaaatatcaggacggtgcgagcggatcgga

SEQ ID NO: 389807 - DNA, 75 bp, synthetic construct
  source 1..75: mol_type = other DNA
gtcggcgggcatcagcctgttccggtagatgtacgggtcattagcgccactcactgcaatctggaagaagatatg

SEQ ID NO: 389808 - DNA, 75 bp, synthetic construct
  source 1..75: mol_type = other DNA
gggcgattgccgaatcgctgctggaagcggagctgtttggctatgaggaaggggcgtttaccggctcgcgacgcg

SEQ ID NO: 389809 - DNA, 75 bp, synthetic construct
  source 1..75: mol_type = other DNA
atggcacatccaccacggctgaatgacgacaaaccggttatctggacggtatcggtgacgcgcctgttcgagctg

SEQ ID NO: 389810 - DNA, 75 bp, synthetic construct
  source 1..75: mol_type = other DNA
gctggaagaaaaagaggtcacccgcgtcggcgggcatcagcctgttccggtggatgtgcgggtcattagcgccac

SEQ ID NO: 389811 - DNA, 75 bp, synthetic construct
  source 1..75: mol_type = other DNA
ccagcttggctttgaaaaagcggtggcctacatccgcaaaaaactggcaagtgaacgctgcgacgccatcatcgc

SEQ ID NO: 389812 - DNA, 75 bp, synthetic construct
  source 1..75: mol_type = other DNA
ctgcgcaatatgatggagcgactggcgctatttttaagtgtggaaccgacgccggatttaacgccgcagtttttg

SEQ ID NO: 389813 - DNA, 75 bp, synthetic construct
  source 1..75: mol_type = other DNA
acactatgtgccgcctgtaacgaaacgccagtgctggaaggcctgacaccacgtatccaacgtctgcgtaaccac

SEQ ID NO: 389814 - DNA, 75 bp, synthetic construct
  source 1..75: mol_type = other DNA
cgcaaaatctggccaccagcgccgaaaaactggctgcaactgagacaaatgcgtatcgcaaagctgagttatctg

SEQ ID NO: 389815 - DNA, 75 bp, synthetic construct
  source 1..75: mol_type = other DNA
gttgaacatgccgggatcctgagtgggctggatggtgatatcgcgggcattcccgccgcagtaaaacccgctcgc

SEQ ID NO: 389816 - DNA, 75 bp, synthetic construct
  source 1..75: mol_type = other DNA
agaagccggaatgaccggaatttttatctattccgccgccaccgtgcgccaggcgttcagcgatgcgctggatat

SEQ ID NO: 389817 - DNA, 75 bp, synthetic construct
  source 1..75: mol_type = other DNA
gtcggcgggcatcagcctgtttctgtcgatgtgcgagtgattagtgctacacactgtaatctggaaaaggatatg

SEQ ID NO: 389818 - DNA, 75 bp, synthetic construct
  source 1..75: mol_type = other DNA
attaaaggactcactgtatttattaaaaaatacagaggagattcaacgcgccgtgattcttaaaatggaaatgat

SEQ ID NO: 389819 - DNA, 75 bp, synthetic construct
  source 1..75: mol_type = other DNA
atgcaaaaacattcgctggtgttgtggcccttccacggtgtgttcggttccggaccgacgctggatgaagccttt

SEQ ID NO: 389820 - DNA, 75 bp, synthetic construct
  source 1..75: mol_type = other DNA
ttgatcctgcggctaacttaggcgtcgtaaaagtcgacagcgacggcgcgggctaccatattctctgggggctaa

SEQ ID NO: 389821 - DNA, 75 bp, synthetic construct
  source 1..75: mol_type = other DNA
aggcagcaccgagtgtctggtagtgttcccggatggcgttggcattttgccgtggatggtgcccggcacggacga

SEQ ID NO: 389822 - DNA, 75 bp, synthetic construct
  source 1..75: mol_type = other DNA
ggctgaacgtcagccttagccagttggacggtgagataatgaaagatggctcatttactcccactggcatcaagc

SEQ ID NO: 389823 - DNA, 75 bp, synthetic construct
  source 1..75: mol_type = other DNA
tgctgcgattgcggatacaacgactctaaagacgcatttggtgaaccgccccgggtttcctggagagtgttttat

SEQ ID NO: 389824 - DNA, 75 bp, synthetic construct
  source 1..75: mol_type = other DNA
gaaatattgcaaaagaaaaaacaaggcgtggatggtctggagattatgtgtgcagtgattgcggatacaacaact

SEQ ID NO: 389825 - DNA, 75 bp, synthetic construct
  source 1..75: mol_type = other DNA
gtgcgcaaaacttatggctttgcgaaatacctgcacgattcactgccaaacgccacctatgttggctttaccggc

SEQ ID NO: 389826 - DNA, 75 bp, synthetic construct
  source 1..75: mol_type = other DNA
agccacaagcgcaattatcctgcctcaaccgcgcggcggaatttgttctgcgtacccagaaagttgaacgtcgtt

SEQ ID NO: 389827 - DNA, 75 bp, synthetic construct
  source 1..75: mol_type = other DNA
cgcactgtgccagatatttgatgccgaagatgtcccattgcaacaggcggcggaacttctgccctcctatattaa

SEQ ID NO: 389828 - DNA, 75 bp, synthetic construct
  source 1..75: mol_type = other DNA
ttcgatgggcggcatgaaacagaccatcggccgtgaggagttgatagccctcggcaaacgtttcggcgttacgcc

SEQ ID NO: 389829 - DNA, 75 bp, synthetic construct
  source 1..75: mol_type = other DNA
gagcaggatacgaccgggcttgtaataacacctctgataaagctgcgtcttatgcaactggttggctactggtac

SEQ ID NO: 389830 - DNA, 75 bp, synthetic construct
  source 1..75: mol_type = other DNA
tatgcaactggttggctactggtacgagaacagggaaatgcaggatgcagtgcctgattttttctataccggact

SEQ ID NO: 389831 - DNA, 75 bp, synthetic construct
  source 1..75: mol_type = other DNA
aagctgggcgttgcaaatatgcatgtgacgctggccgatgagcgccactatgcttgtgccacggtaattattgaa

SEQ ID NO: 389832 - DNA, 75 bp, synthetic construct
  source 1..75: mol_type = other DNA
atggtgattacgccattatggtaagaactaaggatgaaaatggcatcgatcgggtccagccgttttataacaaac

SEQ ID NO: 389833 - DNA, 75 bp, synthetic construct
  source 1..75: mol_type = other DNA
agcgcccggcagcactcaatttcattgtatggccaggcgcaggggtggtcacaggagcaaatagaccaggcggtt

SEQ ID NO: 389834 - DNA, 75 bp, synthetic construct
  source 1..75: mol_type = other DNA
tgcctctgctcagttttttgcaactgattatacaggaaaaattaataaactaactccattcctgcataaaaatat

SEQ ID NO: 389835 - DNA, 75 bp, synthetic construct
  source 1..75: mol_type = other DNA
agcggacgtggcggcattaagcaacgccccaatgaagagatcgttattctggtcagcagcctgcggcacgtggca

SEQ ID NO: 389836 - DNA, 75 bp, synthetic construct
  source 1..75: mol_type = other DNA
tgggccgtcaggctggattgcagcgcaatggaaggctgaaaaagaaaaaatcatgtatggcgatgacttacataa

SEQ ID NO: 389837 - DNA, 75 bp, synthetic construct
  source 1..75: mol_type = other DNA
gaagcgcagagtaagacatacaaccagacagatgcactaagggcgcagctctcatctgttcagagtacaagagaa

SEQ ID NO: 389838 - DNA, 75 bp, synthetic construct
  source 1..75: mol_type = other DNA
atggcaatattaggtttaggtacggatattgtagagatcgctcgcatagaagcggtgatcgcccgatccggtgag

SEQ ID NO: 389839 - DNA, 75 bp, synthetic construct
  source 1..75: mol_type = other DNA
ggcgttgtaaatatgcatgtaacgctggcagatgaacgccactatgcttgcgccacggtaattatcgaaagttaa

SEQ ID NO: 389840 - DNA, 75 bp, synthetic construct
  source 1..75: mol_type = other DNA
gatccgcaatggcctggcatttaatcagtttgaagtgttcaacgatgaactcggcaagccacggctgcggttgtg

SEQ ID NO: 389841 - DNA, 75 bp, synthetic construct
  source 1..75: mol_type = other DNA
ccgctctattttattgtaaaaagaatatggatatttttgtttcggataaaatttctgatatcaaatttttgaatc

SEQ ID NO: 389842 - DNA, 75 bp, synthetic construct
  source 1..75: mol_type = other DNA
aagctcggcgttataaatatgcatgtaacgcttgccgatgagcgccactatgcttgtgccacggtaattattgaa

SEQ ID NO: 389843 - DNA, 75 bp, synthetic construct
  source 1..75: mol_type = other DNA
gcgaagcgttttgctgtgaaagaagcggcggcaaaagcgtttggcaccgggatccgcaatggtctggcgtttaat

SEQ ID NO: 389844 - DNA, 75 bp, synthetic construct
  source 1..75: mol_type = other DNA
aaatggaccattcaggagtgtaaagagcttattcaatactatcaaaaaaaattagatgatttaaggagaggtaag

SEQ ID NO: 389845 - DNA, 75 bp, synthetic construct
  source 1..75: mol_type = other DNA
ttctgtccgcaatttaccggtaacccccaaataccccctcatttcacccactaatcgtccgattaaaaaccctgc

SEQ ID NO: 389846 - DNA, 75 bp, synthetic construct
  source 1..75: mol_type = other DNA
gcttccccgccaacggcggggttttttctgtccgcaatttaccggtaacccccaaataccccctcatttcaccca

SEQ ID NO: 389847 - DNA, 75 bp, synthetic construct
  source 1..75: mol_type = other DNA
tcaatgactttaataaaaaaccatatggtcgctatccttctgatggtccaggtaatggtgaaaaatttcgtaaac

SEQ ID NO: 389848 - DNA, 75 bp, synthetic construct
  source 1..75: mol_type = other DNA
ctacgacgaagcgcgttttcagaaagaaggattccgcgttgtaccaccagcggcagtacgtcaaggtgcgtttat

SEQ ID NO: 389849 - DNA, 75 bp, synthetic construct
  source 1..75: mol_type = other DNA
gttatcgttaagaaagttgacgcgaaaactcgcggtaaagtcggcattaacgaactgctgcgtaccatcgactaa

SEQ ID NO: 389850 - DNA, 75 bp, synthetic construct
  source 1..75: mol_type = other DNA
aggaacttggccgcaacgccacggaaactgaggttgcggaacgtttagggatcgatattgccgattatcgccaaa

SEQ ID NO: 389851 - DNA, 75 bp, synthetic construct
  source 1..75: mol_type = other DNA
ataaatattgctatcgcgataacagctacaaacaagcgggatctatcgacggcagtcagatgttccacggcccgg

SEQ ID NO: 389852 - DNA, 75 bp, synthetic construct
  source 1..75: mol_type = other DNA
tattggttctgtaggtgtcgggttgcaatggggatctaattccgatttgcgaaatgatattggtgctgtaggtag

SEQ ID NO: 389853 - DNA, 75 bp, synthetic construct
  source 1..75: mol_type = other DNA
tgccgtctctcacgcggaagaaaaacgctatgtttctgacgaactgaatacctgggttcgcagtggtccgggaga

SEQ ID NO: 389854 - DNA, 75 bp, synthetic construct
  source 1..75: mol_type = other DNA
cggaaatatgcatacgaaacgaatgatggcaaatgggtgataataatgcatcaactggttgatgaattaccagaa

SEQ ID NO: 389855 - DNA, 75 bp, synthetic construct
  source 1..75: mol_type = other DNA
aagtggcgttggagtggcattattgtgccagtatgcacaaccattttcacggcggcggttgctgtatttgttgct

SEQ ID NO: 389856 - DNA, 75 bp, synthetic construct
  source 1..75: mol_type = other DNA
aaggcgaattgagcggctcgaaggtgatttatcgctaacaagaaacgaccttgcgacgcttgctgaacgcactac

SEQ ID NO: 389857 - DNA, 75 bp, synthetic construct
  source 1..75: mol_type = other DNA
gtgaatataaaatcagcacattttttgccagggacgaataaacgccttggtgacaaatacctgttacttgaatgc

SEQ ID NO: 389858 - DNA, 75 bp, synthetic construct
  source 1..75: mol_type = other DNA
ctataggacggttgccgctgccggacaccttcgctttaacgaagataattgccataaacaatgtagacactgcaa

SEQ ID NO: 389859 - DNA, 75 bp, synthetic construct
  source 1..75: mol_type = other DNA
cggcaacttctgacggtctaacccttggtaactggtttaaagaattagccagggcagaactaaagcggcgcggca

SEQ ID NO: 389860 - DNA, 75 bp, synthetic construct
  source 1..75: mol_type = other DNA
gtttttctatggtcattttctcgctcatggcaacttacagcattgcgcatgggagaagagagggctatggggttt

SEQ ID NO: 389861 - DNA, 75 bp, synthetic construct
  source 1..75: mol_type = other DNA
cgagcgtgacgcaggacagccgtgtatatcttgcgggacttattattacgaacaatgcggcgctgatgctggaca

SEQ ID NO: 389862 - DNA, 75 bp, synthetic construct
  source 1..75: mol_type = other DNA
aaatgggcgatcgaagaatgcaaggagatcataaaagtctatcaggctaaattggacgccttaaggagaaaggca

SEQ ID NO: 389863 - DNA, 75 bp, synthetic construct
  source 1..75: mol_type = other DNA
caaacgtggtgcagcgatgaatgtctggaagaactgaagtttgaccagctatgccgcgaccgtgaaaaggctatg

SEQ ID NO: 389864 - DNA, 75 bp, synthetic construct
  source 1..75: mol_type = other DNA
gcagttcgctttaactctctgactccggaacagcagcgcgatgttatcgctcgtacctttactgaaagcctgtaa

SEQ ID NO: 389865 - DNA, 75 bp, synthetic construct
  source 1..75: mol_type = other DNA
aacgttctgcgtcgcgaaactctggaagatgctgttaagcatccggaaaaatatccgcagttgactatccgtgta

SEQ ID NO: 389866 - DNA, 75 bp, synthetic construct
  source 1..75: mol_type = other DNA
tctatagcttaggtgttttgctataccagctgctgacaggaaagctgccccatgatacgccagcacaagttcagc

SEQ ID NO: 389867 - DNA, 75 bp, synthetic construct
  source 1..75: mol_type = other DNA
cacctgatgcgatagagtatcagtaccaccaacttgtccgtaaacgaattatattgatttcaataataacactgg

SEQ ID NO: 389868 - DNA, 75 bp, synthetic construct
  source 1..75: mol_type = other DNA
ggtgtcattattccaataggcatcgtcacctcgcttgtgggtgttccattatttattagtattattctgcgctat

SEQ ID NO: 389869 - DNA, 75 bp, synthetic construct
  source 1..75: mol_type = other DNA
aaagcgggtttataccggcaaacgcttttctttttgcgctcctgtccgccctgctgctcgatagtctgacccgct

SEQ ID NO: 389870 - DNA, 75 bp, synthetic construct
  source 1..75: mol_type = other DNA
ctggtgattggtgaaaatttcgaaccgattctcgttgaaagccgccggatgggttgtgtcagctttgcccagctt

SEQ ID NO: 389871 - DNA, 75 bp, synthetic construct
  source 1..75: mol_type = other DNA
agggtatcggttcttccggcggcgtaaaacagattatcgccaacaccgttgatttcggtgcttctgacgcgccgc

SEQ ID NO: 389872 - DNA, 75 bp, synthetic construct
  source 1..75: mol_type = other DNA
aggtttgttccagttcccgaccgtgattggcggcgtggtactggcggttaacattccagggttgaagtctggcga

SEQ ID NO: 389873 - DNA, 75 bp, synthetic construct
  source 1..75: mol_type = other DNA
aagaggcgatggcgcgcggtttaaactgtctgtcgctatttgccgaacgtctgcaaggtttttctcccgccagtg

SEQ ID NO: 389874 - DNA, 75 bp, synthetic construct
  source 1..75: mol_type = other DNA
cttgggccggataatatgttgagtgaagaggcgatggcgcgcggtttaaactgtctgtcgctatttgccgaacgt

SEQ ID NO: 389875 - DNA, 75 bp, synthetic construct
  source 1..75: mol_type = other DNA
gcgattttatgcggtgtgtttgatgccttagccatccgtgaactgcgactttctgacggggcgcttcgtgaaggc

SEQ ID NO: 389876 - DNA, 75 bp, synthetic construct
  source 1..75: mol_type = other DNA
ccagcgcctttgtcccgccggtgcccgggcgtgagttcatgctgacgttaaatagtcagcaagagtatcgcgcct

SEQ ID NO: 389877 - DNA, 75 bp, synthetic construct
  source 1..75: mol_type = other DNA
ggcgcggtgagtgaacccgtcgtggtggaaatggcaattggcgccctgaaagcggctcgtgctgattatgccgtt

SEQ ID NO: 389878 - DNA, 75 bp, synthetic construct
  source 1..75: mol_type = other DNA
atgactgaaagtgaactgatgcagttaagcgaacaggttgggctggcgctgaaagcccgtggcgcaaccgtaaca

SEQ ID NO: 389879 - DNA, 75 bp, synthetic construct
  source 1..75: mol_type = other DNA
gttgacggagatgggcgttcatctgctgttgaaatctcagttgcaggggctggaaaaaacggattctggcattct

SEQ ID NO: 389880 - DNA, 75 bp, synthetic construct
  source 1..75: mol_type = other DNA
gggaatggtggcgcgcggcgttgacgatgcagaccagcttcgcgcctttgtggtcagtgaggatcggatgaaaga

SEQ ID NO: 389881 - DNA, 75 bp, synthetic construct
  source 1..75: mol_type = other DNA
ccgccgacagcatggatgagtacaacaaaccggacctcagccatgttatcagccaggggcaacgtgccgacgacc

SEQ ID NO: 389882 - DNA, 75 bp, synthetic construct
  source 1..75: mol_type = other DNA
cggaaaaaggccgcaagctggttattgatattggcggcggctccacggaactggtcattggcgaaaattttgaac

SEQ ID NO: 389883 - DNA, 75 bp, synthetic construct
  source 1..75: mol_type = other DNA
atgaaaacctggatatttatctgtatgtccatagcaatgttgctatggtttttaagtacgctaaaacgtaaaccc

SEQ ID NO: 389884 - DNA, 75 bp, synthetic construct
  source 1..75: mol_type = other DNA
agaagacctgatcccgatgcgtccggaccacggtcatcagatgctggacgacctgaagaagaaaaccaacccagg

SEQ ID NO: 389885 - DNA, 75 bp, synthetic construct
  source 1..75: mol_type = other DNA
accgaagaagaaattgctcaggctgcagaacgcttcgctaccatgagcgacgaagacaaagcacgtctgacccgt

SEQ ID NO: 389886 - DNA, 75 bp, synthetic construct
  source 1..75: mol_type = other DNA
ccccaccacctgcgatggtcgcggcctccatcctggagcaccgtggtgatacagcagcccttaccctactacaag

SEQ ID NO: 389887 - DNA, 75 bp, synthetic construct
  source 1..75: mol_type = other DNA
cagttctgctctctgttggtgctgagaagctctcacaacgtgaatgggactggatgaaaatgctcaaacccatgg

SEQ ID NO: 389888 - DNA, 75 bp, synthetic construct
  source 1..75: mol_type = other DNA
cgagcgaatcagcgagtatgaattcgtagaaaatcaggactttttgattatttcccaaaatcgggaaaaaatcgg

SEQ ID NO: 389889 - DNA, 75 bp, synthetic construct
  source 1..75: mol_type = other DNA
gcgccgctggtgcgctatggctggacgccgcgcggcgaactggcggtggtgtatgaccgtagtggcaaacaggtg

SEQ ID NO: 389890 - DNA, 75 bp, synthetic construct
  source 1..75: mol_type = other DNA
ggtaatggtattgatggtaatggtattgaacaggccacacactggatgccgctaccagaaccgccgcaggaggtg

SEQ ID NO: 389891 - DNA, 75 bp, synthetic construct
  source 1..75: mol_type = other DNA
ctggttgagccgctaatatgctccgcacgctataccggaagcacctttcggcgtgggcagataacggttgcgcct

SEQ ID NO: 389892 - DNA, 75 bp, synthetic construct
  source 1..75: mol_type = other DNA
actggacccgtactgacctcgaatacgtgctgccagacggctccaaagctctgcgcttcgaccagatcgaattcg

SEQ ID NO: 389893 - DNA, 75 bp, synthetic construct
  source 1..75: mol_type = other DNA
gcccaaacgatccggtttctttagctgatgtccgtcaggcgggcgcaactggcgtggttaccgctttgcaccata

SEQ ID NO: 389894 - DNA, 75 bp, synthetic construct
  source 1..75: mol_type = other DNA
gttaccgttacgacagcgacgggcgggtgacagaacagctaaacccggcaggcttaagctacacgtatcagtatg

SEQ ID NO: 389895 - DNA, 75 bp, synthetic construct
  source 1..75: mol_type = other DNA
atggcggcagtgaagagaagcctgtaggcaccgtctggtttgcgtttgcttctgccagcggcgaaggcattaccc

SEQ ID NO: 389896 - DNA, 75 bp, synthetic construct
  source 1..75: mol_type = other DNA
tcacgaccactgcagcaccgcctgttgacctcacggcaccgcagggttcacagaaaacagcggacacaccacgta

SEQ ID NO: 389897 - DNA, 75 bp, synthetic construct
  source 1..75: mol_type = other DNA
agttccggcaacagaacgctgccataccggcactgaacaaacgcctccccgtctggtccgttaatgaccagtggc

SEQ ID NO: 389898 - DNA, 75 bp, synthetic construct
  source 1..75: mol_type = other DNA
gccgtcagcgcttcccggcctcagaccaccaccgggacatccggaacaccagagagcagaacgaccacgccagcc

SEQ ID NO: 389899 - DNA, 75 bp, synthetic construct
  source 1..75: mol_type = other DNA
ttcctcgacgccttaccgctgacggctaacgggaaaattgactaccaggcgctgaagcgtcgtcatacccctgaa

SEQ ID NO: 389900 - DNA, 75 bp, synthetic construct
  source 1..75: mol_type = other DNA
aggtcgcggggttacaacgcttcctcgtacaatgtcctgacaggcaggtgcgccgcgatccccgtcaacttcagg

SEQ ID NO: 389901 - DNA, 75 bp, synthetic construct
  source 1..75: mol_type = other DNA
tgcctccccgacccgcccttcagaccacaccgatgtctgcactgattatgaccggtaaacccggtccgtcatccg

SEQ ID NO: 389902 - DNA, 75 bp, synthetic construct
  source 1..75: mol_type = other DNA
gtaaacaggaagaattaccgggactcgatcctgaacagttccaccccatcagtgatgctgtcgcccagtatcagg

SEQ ID NO: 389903 - DNA, 75 bp, synthetic construct
  source 1..75: mol_type = other DNA
accaacaggcaaaactcaacgttcgcgacgctacagatacaacaagttacatagctgcgcaaatgtgccacattc

SEQ ID NO: 389904 - DNA, 75 bp, synthetic construct
  source 1..75: mol_type = other DNA
gaagaggtcaggttacaattagaacaatggttgtttcagcgtaatctaacaatgtccgttcacacacgggctgga

SEQ ID NO: 389905 - DNA, 75 bp, synthetic construct
  source 1..75: mol_type = other DNA
tgtggctggcagaacagaaagatgtcctgagtaccatcctgaaaacaggcaaattaccgtctccgcaggtggtcg

SEQ ID NO: 389906 - DNA, 75 bp, synthetic construct
  source 1..75: mol_type = other DNA
tgaggcgtcagacctgatgtatcacctgctggtgctgctgcaggaccaggggctttcattacaagatattattgc

SEQ ID NO: 389907 - DNA, 75 bp, synthetic construct
  source 1..75: mol_type = other DNA
catcgtgcagcacgccgtatccggcgaagtgctgatgctgggctacatgaacaaggacgcgctggagaaaaccga

SEQ ID NO: 389908 - DNA, 75 bp, synthetic construct
  source 1..75: mol_type = other DNA
ggttgccaccctctggcagcaactcttatcaactggcaatgtcaccagagaaaccgacttcttccagcaaggcgg

SEQ ID NO: 389909 - DNA, 75 bp, synthetic construct
  source 1..75: mol_type = other DNA
cacaccaatggtacgtctggaaaatttcatcaatgatgcctgtgaggggattaaaaatacaattttacccgcggc

SEQ ID NO: 389910 - DNA, 75 bp, synthetic construct
  source 1..75: mol_type = other DNA
atgatgcctgtgaggggattaaaaaatacaattttacccgcggctgcctggttggaaatatgatgcaggagagtc

SEQ ID NO: 389911 - DNA, 75 bp, synthetic construct
  source 1..75: mol_type = other DNA
caaccccgcccggtcgcgccgcaggaacagtcgtttctggatgcgcaggccgcacagttgcgtaaggccatgcag

SEQ ID NO: 389912 - DNA, 75 bp, synthetic construct
  source 1..75: mol_type = other DNA
tgggaaacggtgcccccggcaaccgatctcacgacagacgttgtctacagcggcgtaaacgcaacatttccccat

SEQ ID NO: 389913 - DNA, 75 bp, synthetic construct
  source 1..75: mol_type = other DNA
aaaagaaccaaccgcccggcgcagggttactggtttgtgccgggagggcgcgtgcagaaagacgaaacgctggaa

SEQ ID NO: 389914 - DNA, 75 bp, synthetic construct
  source 1..75: mol_type = other DNA
gcttgtctctctcgactttattgtcgagaacagtcgcggcgagtttctgcttggcaaaagaaccaaccgcccggc

SEQ ID NO: 389915 - DNA, 75 bp, synthetic construct
  source 1..75: mol_type = other DNA
gtcggcgggcatcagcctgttccggtggatgtgcgggtcattagcgccactcactgcaatctggaagaagatatg

SEQ ID NO: 389916 - DNA, 75 bp, synthetic construct
  source 1..75: mol_type = other DNA
gtggtcggcgcggggctgattaccgatctggcagaagaagccggaatgaccggaatttttatctattccgccgcc

SEQ ID NO: 389917 - DNA, 75 bp, synthetic construct
  source 1..75: mol_type = other DNA
catccgtttgttgccgtcaactgcggggcgattgccgaatcgctgctggaagcggagctgtttggctatgaggaa

SEQ ID NO: 389918 - DNA, 75 bp, synthetic construct
  source 1..75: mol_type = other DNA
tggagtggctgggaaggtgcggtaatgcgttccaaactatattgttctactgagccagtgtacgacttctggagc

SEQ ID NO: 389919 - DNA, 75 bp, synthetic construct
  source 1..75: mol_type = other DNA
gatgagattggcgaaatgccgctacctttgcagactcgcctgttacgggtgctggaagaaaaagaggtcacccgc

SEQ ID NO: 389920 - DNA, 75 bp, synthetic construct
  source 1..75: mol_type = other DNA
tgtatgcccgctccagtgcggcggtgttgattgaaggggaaacggggacgggcaaagagctggcggcccaggcga

SEQ ID NO: 389921 - DNA, 75 bp, synthetic construct
  source 1..75: mol_type = other DNA
cccaacgacacagcgattgccggacatgctatagctgcaggggccattctggtgaccaataatacgcgagagttt

SEQ ID NO: 389922 - DNA, 75 bp, synthetic construct
  source 1..75: mol_type = other DNA
ggggcgcaaatgtttctctggcaaccagtcgttgttttatcacatggctgacagaccaacacgactttacccaaa

SEQ ID NO: 389923 - DNA, 75 bp, synthetic construct
  source 1..75: mol_type = other DNA
gtcaaaacgcatattatttcacacgaatgttttctaagaggcgcaattattacagcctgggcagatcagttccgc

SEQ ID NO: 389924 - DNA, 75 bp, synthetic construct
  source 1..75: mol_type = other DNA
cgagcagccggcagcggtgctgaagcgcctggagcaggtggtgctgcgcggtgatcgcatcgtggtctcggccgt

SEQ ID NO: 389925 - DNA, 75 bp, synthetic construct
  source 1..75: mol_type = other DNA
gccgatcggcccgaacgacacggcgattgccgggcacgccatcgccgccggggcgatactggtgacgaataatac

SEQ ID NO: 389926 - DNA, 75 bp, synthetic construct
  source 1..75: mol_type = other DNA
tttggtaaccctgctttagggctgacatcagaagtcatcgagtcttatatcgataatttcgcggtaggtggcgca

SEQ ID NO: 389927 - DNA, 75 bp, synthetic construct
  source 1..75: mol_type = other DNA
tcctcagcaaggcgctgatccttcatgacagcctgaagcagtgtcgtattgtggtggtgactgatcgtgtcgatc

SEQ ID NO: 389928 - DNA, 75 bp, synthetic construct
  source 1..75: mol_type = other DNA
gcgtatgaaactggccctgccgaatgccgcctttgtggcatttaccggtacgccattgctgaaagaagataagac

SEQ ID NO: 389929 - DNA, 75 bp, synthetic construct
  source 1..75: mol_type = other DNA
gccgtgaaggcgaccctcggcccgaagggccgcaacgtcgtgctgcagaagagctacggcgcgccgaccatcacc

SEQ ID NO: 389930 - DNA, 75 bp, synthetic construct
  source 1..75: mol_type = other DNA
aggaccagaaccacggcatcgcgatcgccctgcgcgcgatggaagccccgctgcgcgagatcgtcaccaacgccg

SEQ ID NO: 389931 - DNA, 75 bp, synthetic construct
  source 1..75: mol_type = other DNA
gcgtcccaccgcctatgcgttggctgcactgttcatgctgttgctgtccaacttgtttccttttgtgaatatgaa

SEQ ID NO: 389932 - DNA, 75 bp, synthetic construct
  source 1..75: mol_type = other DNA
cagaagaagaacagtttgctgcctataaagcagtggctgaagcgtgtggttcgcaggctgttatcgttcgtacca

SEQ ID NO: 389933 - DNA, 75 bp, synthetic construct
  source 1..75: mol_type = other DNA
tggtctgtatcgtaccgaattcttgttcatggaccgcgacgcgctgccaacagaagaagaacagtttgctgccta

SEQ ID NO: 389934 - DNA, 75 bp, synthetic construct
  source 1..75: mol_type = other DNA
aaccgcacagttgaacctgaagaaggtactgggtttcatcaccgacgcgggtggccgtacttcccacacctcaat

SEQ ID NO: 389935 - DNA, 75 bp, synthetic construct
  source 1..75: mol_type = other DNA
acactgcgcaaagagattgaaatctacaaacaggaactgcgcgacgaaggtaaagcgtttgacgagtcaattgaa

SEQ ID NO: 389936 - DNA, 75 bp, synthetic construct
  source 1..75: mol_type = other DNA
gatcatctctgttgaagaagtgcgtgcactgcgcaaagagatcgaaatctacaagcaggaactgcgcgacgaagg

SEQ ID NO: 389937 - DNA, 75 bp, synthetic construct
  source 1..75: mol_type = other DNA
caggctcttgctcaaccgacaacggacgagttgatgacgctggttaacaagttcattgaagaaaaacaatctgct

SEQ ID NO: 389938 - DNA, 75 bp, synthetic construct
  source 1..75: mol_type = other DNA
agcacatcctgtgctcgcagtgtgacatgctggtggagttaccgcgccttgagcatggtcagaaagcggcatgtc

SEQ ID NO: 389939 - DNA, 75 bp, synthetic construct
  source 1..75: mol_type = other DNA
gacaatgttttctgcaatgacatttgatccgcgtttatcgtgggatcgtcaaccagatccagagcatgaggagtc

SEQ ID NO: 389940 - DNA, 75 bp, synthetic construct
  source 1..75: mol_type = other DNA
cgctaaaacctggcgtcacggggatacgtcaggggctgcgttcgtgctcctgttgtacggcaatccttcctgctg

SEQ ID NO: 389941 - DNA, 75 bp, synthetic construct
  source 1..75: mol_type = other DNA
gcaatactcagctttccgttatggctccggtaggtgccgcactgctggggctgcgcgttggcgattccattcact

SEQ ID NO: 389942 - DNA, 75 bp, synthetic construct
  source 1..75: mol_type = other DNA
ccaatcttgaaatgcttgctcaatcattatctgtcaaaagtcatactggcggtattgatcaggattacaatgctt

SEQ ID NO: 389943 - DNA, 75 bp, synthetic construct
  source 1..75: mol_type = other DNA
acggtgtcatgtgcggagatactgaaagattaatcaaattctacaaatcctttgggtttgaaattcacggtaata

SEQ ID NO: 389944 - DNA, 75 bp, synthetic construct
  source 1..75: mol_type = other DNA
tgctgtctattaacgggcatgacggacgctatggcacttgtcatacgccgatgaaattctgggcagcatggcgtg

SEQ ID NO: 389945 - DNA, 75 bp, synthetic construct
  source 1..75: mol_type = other DNA
tggcaaaaaatatctgggatcgcccctggagcacagaacgcaggaatgactggttgcagtggatatcgctggcgt

SEQ ID NO: 389946 - DNA, 75 bp, synthetic construct
  source 1..75: mol_type = other DNA
gtatcaacaacagcagcctgagccggaacgtgacgtttgttgccgatgtcaggacggcgaagatcgctgatctgg

SEQ ID NO: 389947 - DNA, 75 bp, synthetic construct
  source 1..75: mol_type = other DNA
gtcaggtcctgtaacaggaagtggtaatactgtattcgcaaatacggcagcatcagggtctggcggtgtgggtat

SEQ ID NO: 389948 - DNA, 75 bp, synthetic construct
  source 1..75: mol_type = other DNA
tgcaatatgataaatccatatctgtattggacctttcccaactggtatcatgtcagaatgaggactcgacaggcc

SEQ ID NO: 389949 - DNA, 75 bp, synthetic construct
  source 1..75: mol_type = other DNA
gttccggccggacaaccgaggtctctgggacaggtaggcagctctcctgtgagtctggggctgaaggcctcttat

SEQ ID NO: 389950 - DNA, 75 bp, synthetic construct
  source 1..75: mol_type = other DNA
taaccgatgatcgtggcacagagagtcttgccagctatctccgttcgcttactgacagtcagttgttggccatca

SEQ ID NO: 389951 - DNA, 75 bp, synthetic construct
  source 1..75: mol_type = other DNA
aattcatgcccgtgaagtcagcttcgctgggcaaaaagacaaacatgctgttacggaacagtggttatgcgctcg

SEQ ID NO: 389952 - DNA, 75 bp, synthetic construct
  source 1..75: mol_type = other DNA
ggacggtgagggttgtgtgccgggagtggagcgtcacggataacgcccggtacagtgatttcagctgtacgattg

SEQ ID NO: 389953 - DNA, 75 bp, synthetic construct
  source 1..75: mol_type = other DNA
tttcgtgtcacagatgaatattcccgtgctgcgctggacagttttttatcccgtcatgccgggatacgtgctttt

SEQ ID NO: 389954 - DNA, 75 bp, synthetic construct
  source 1..75: mol_type = other DNA
atgcggaatctgttctttttcttttctacagccctcaggggctgtattttattcacacttataatggcatattcc

SEQ ID NO: 389955 - DNA, 75 bp, synthetic construct
  source 1..75: mol_type = other DNA
atttgcgtgaaaggtgtaccgaactactttggtgcgcaacgttttggtattggcggcagtaacttgcagggggcg

SEQ ID NO: 389956 - DNA, 75 bp, synthetic construct
  source 1..75: mol_type = other DNA
caacgtcgatgtcactatcatcgctcaggcaccgaagatgttgccgcacattccacaaatgcgcgtgtttattgc

SEQ ID NO: 389957 - DNA, 75 bp, synthetic construct
  source 1..75: mol_type = other DNA
gttacagtcggaattgctgaaaatactcagttaacctgtccgacctgcaggaaatcctgttctgttcacgatcac

SEQ ID NO: 389958 - DNA, 75 bp, synthetic construct
  source 1..75: mol_type = other DNA
gcagcgaatccacaggcgaaatatttttgcgatccggtaatgggtcatccggaaaaaggctgtatcgttgcaccg

SEQ ID NO: 389959 - DNA, 75 bp, synthetic construct
  source 1..75: mol_type = other DNA
taaccgaaattgtgcaaggcattgccgccattgataaattacacacctgtgatgccgtattaagtggctatctgg

SEQ ID NO: 389960 - DNA, 75 bp, synthetic construct
  source 1..75: mol_type = other DNA
taacagtgcggcagagtttccgatgcgccgcctgggcgcgaacgtctggccgctgaacaccgttcaattttctaa

SEQ ID NO: 389961 - DNA, 75 bp, synthetic construct
  source 1..75: mol_type = other DNA
ctcggctggacgtttttatctccgaaacagattatggattaccggggctataaacaggatgaggtggtgctgcgt

SEQ ID NO: 389962 - DNA, 75 bp, synthetic construct
  source 1..75: mol_type = other DNA
atgaaccagacgtacacgccaaaattccaggaagaatacagcgccaaaattccggcactgacgttactgaccagc

SEQ ID NO: 389963 - DNA, 75 bp, synthetic construct
  source 1..75: mol_type = other DNA
gcaaactgccggaagtgacgaaatggtggaaggataatgtcggcacgcaggatgagtctgtgtatacccgtaatg

SEQ ID NO: 389964 - DNA, 75 bp, synthetic construct
  source 1..75: mol_type = other DNA
ctactccagctccggcttaccgcccacatccgtatgttcgtcatcttgccagcgtaggcgaagggatggttatcg

SEQ ID NO: 389965 - DNA, 75 bp, synthetic construct
  source 1..75: mol_type = other DNA
tatctgggatcgcccctggagcacagaacgcaggaatgactggttgcagtggatatcgctggcgtctgaatgtga

SEQ ID NO: 389966 - DNA, 75 bp, synthetic construct
  source 1..75: mol_type = other DNA
ggataaaggccaggggataccgaaaccgggaacgctttaaactgggagttatgttccactatgggaaactgaata

SEQ ID NO: 389967 - DNA, 75 bp, synthetic construct
  source 1..75: mol_type = other DNA
ggtgcagatgggggaatcggtagtacatataatataatggggtggcgttatcttgaaatatttgaagcagtcaaa

SEQ ID NO: 389968 - DNA, 75 bp, synthetic construct
  source 1..75: mol_type = other DNA
tggtagtttataatataccggctcttagcggagtgcgtttttctttagatcagataaatgagcttgtcacaatac

SEQ ID NO: 389969 - DNA, 75 bp, synthetic construct
  source 1..75: mol_type = other DNA
ccggtaaaggaaaagaatctggatgtattatcaaaacttgcagagcgactgctcgaagaacatgacagaaacaaa

SEQ ID NO: 389970 - DNA, 75 bp, synthetic construct
  source 1..75: mol_type = other DNA
gtacaaaattcgcctgcatttgctgcacaaggctggtttctttcacgcccggcaccgatagaaacgctgaattcg

SEQ ID NO: 389971 - DNA, 75 bp, synthetic construct
  source 1..75: mol_type = other DNA
ctattttactgaaatcaccgtcagccatcggatggaggttgtgaaagagcagattgatttgctggcgcaaaaagc

SEQ ID NO: 389972 - DNA, 75 bp, synthetic construct
  source 1..75: mol_type = other DNA
tgggaagtttgatttcgttagtacaatcgctggctcgcgagtacaacctaccgttagtcctgcatctcgatcatc

SEQ ID NO: 389973 - DNA, 75 bp, synthetic construct
  source 1..75: mol_type = other DNA
atttgtaaagtgaatgtcgcgacagaattgaaaattgcgtttgccgatgcgttaaaaggatatttctacaacaat

SEQ ID NO: 389974 - DNA, 75 bp, synthetic construct
  source 1..75: mol_type = other DNA
taaagtacgcgcaggaattcgctcagtcatgattgatggttctcatctgccgtttgaagaaaatatagcgcgggt

SEQ ID NO: 389975 - DNA, 75 bp, synthetic construct
  source 1..75: mol_type = other DNA
ctgttgaagataccggtttacttggtaccgattatgtaagctgtgctgtctatcactacccgttctcctgcaaag

SEQ ID NO: 389976 - DNA, 75 bp, synthetic construct
  source 1..75: mol_type = other DNA
atggtctttattatacagaagctccagttatattattgtttttttgtgggtttttattgtcaatggataaagata

SEQ ID NO: 389977 - DNA, 75 bp, synthetic construct
  source 1..75: mol_type = other DNA
aaaaaaacaccattatggcttgccagtttaataaaaaaagaaacattatttcttcataaggttttgagtggtgaa

SEQ ID NO: 389978 - DNA, 75 bp, synthetic construct
  source 1..75: mol_type = other DNA
cttcgcaacgcctgccgccggatcgctattttactgaaatcaccgtcagccatcggatggaggttgtgaaagagc

SEQ ID NO: 389979 - DNA, 75 bp, synthetic construct
  source 1..75: mol_type = other DNA
aatgcggctatcaccgcattaggtaaaatctgtgcagatcgcctgattgatggcttctttgatgtcaaaccgaca

SEQ ID NO: 389980 - DNA, 75 bp, synthetic construct
  source 1..75: mol_type = other DNA
cgttcactggcggtaccaacggcgatcagtcgaaaatctccaccgaagcctacctgcgtgcggttaaggtgctga

SEQ ID NO: 389981 - DNA, 75 bp, synthetic construct
  source 1..75: mol_type = other DNA
tggcagcaactgagtggtgtagagaaagccgttgaaattctttacaacgcctttcgcgaaggaacgcgcattatt

SEQ ID NO: 389982 - DNA, 75 bp, synthetic construct
  source 1..75: mol_type = other DNA
cggttatcgcctttgcgccagcgggcgacggtacgttaaaaggttctggtcgctcgattcaggggctacatatgc

SEQ ID NO: 389983 - DNA, 75 bp, synthetic construct
  source 1..75: mol_type = other DNA
gacggtcatttccgtctgctgcaacagcggctggtgggcgaacgtcatttgaaagtcatggtcgaaccggtcggc

SEQ ID NO: 389984 - DNA, 75 bp, synthetic construct
  source 1..75: mol_type = other DNA
gctggaagtggcaaaccgcgatgcacaaaaactcgctgccagcgatttaggttttgcgctggggccgcgtctcaa

SEQ ID NO: 389985 - DNA, 75 bp, synthetic construct
  source 1..75: mol_type = other DNA
gagctggttaccgagtggcttgatccttctttattgcaaggcgaagttgtgtcagacggcccgttaagtgcagcg

SEQ ID NO: 389986 - DNA, 75 bp, synthetic construct
  source 1..75: mol_type = other DNA
gattgtcgctggaagaggataaattcgaactctttcagcaacgctttggcgaactggttaccgagtggttagatc

SEQ ID NO: 389987 - DNA, 75 bp, synthetic construct
  source 1..75: mol_type = other DNA
aaccctaataattgggatctgcaaattacaaaagatgaacgggaaagcgttcaggaatatatcatcaacgttctt

SEQ ID NO: 389988 - DNA, 75 bp, synthetic construct
  source 1..75: mol_type = other DNA
aagtttagattctataatggaggagtttaagactctctcaaaaaataaaggaattgagttttatagtttagggtt

SEQ ID NO: 389989 - DNA, 75 bp, synthetic construct
  source 1..75: mol_type = other DNA
gccgctctggcaatgcttattacaggatgtgctcaacagacgtttactgttggaaacaaaccgacagcagtaaca

SEQ ID NO: 389990 - DNA, 75 bp, synthetic construct
  source 1..75: mol_type = other DNA
attacccgcagcggaagcgatcattaaccctaacttgcgcgactgtaatttcccgtcgaaatcactggcaggcgt

SEQ ID NO: 389991 - DNA, 75 bp, synthetic construct
  source 1..75: mol_type = other DNA
ggcggtccgctgctggatggtattgcttttaatgtcgataccgccctctggccggataacggcgtgcgcgaagtg

SEQ ID NO: 389992 - DNA, 75 bp, synthetic construct
  source 1..75: mol_type = other DNA
aaagctgctattggtcgtctgaaaggtgacgagctggaacaatataatttatggctggattatctggacgcactg

SEQ ID NO: 389993 - DNA, 75 bp, synthetic construct
  source 1..75: mol_type = other DNA
tgctcaacagacgtttactgttggaaacaaaccgacagcagtaacaccaaaggaaaccatcactcatcatttctt

SEQ ID NO: 389994 - DNA, 75 bp, synthetic construct
  source 1..75: mol_type = other DNA
accgaaataccgatcgtctgctctttctactgacgttactgcctgtgctgattctggctgtcgtttcaggcgtca

SEQ ID NO: 389995 - DNA, 75 bp, synthetic construct
  source 1..75: mol_type = other DNA
gggactgtggtaacgcaattactcataatacagtttgttgcccgtattgtggcgctgtcgaccccttcggttatt

SEQ ID NO: 389996 - DNA, 75 bp, synthetic construct
  source 1..75: mol_type = other DNA
acgacctggatgccgaacgcatcgatattctgctggagcaacccgcctacgccggtttgccagtcgctgacgcgt

SEQ ID NO: 389997 - DNA, 75 bp, synthetic construct
  source 1..75: mol_type = other DNA
ccgctgtataccggacagcctgcccgccgtggaatggctgacctacggcagcggttacctggcaggcatgaaact

SEQ ID NO: 389998 - DNA, 75 bp, synthetic construct
  source 1..75: mol_type = other DNA
gaggaatagatgttaatatcaatgggtttggattaattaagacagatgctacatcaaaaatcattttcagagata

SEQ ID NO: 389999 - DNA, 75 bp, synthetic construct
  source 1..75: mol_type = other DNA
ccaatatcgccagtgccgtggagtatggtcggcaacttattgaacaaccagcaaaaagcgtcattatcctcgtga

SEQ ID NO: 390000 - DNA, 75 bp, synthetic construct
  source 1..75: mol_type = other DNA
accatgtggatggctgtgttcgccgatatgggtgccagcttgcttgttgtcggcaacggcttgaggttgttgcgc

SEQ ID NO: 390001 - DNA, 75 bp, synthetic construct
  source 1..75: mol_type = other DNA
gattaaagataagcacatgacggctgacgcagctgctcatgaagttattgaaggtcaggcttctgccctggaaga

SEQ ID NO: 390002 - DNA, 75 bp, synthetic construct
  source 1..75: mol_type = other DNA
ctgaagaagaacagtttgctgcctataaagcagtggctgaagcctgtggctcgcaggcggttattgttcgtacca

SEQ ID NO: 390003 - DNA, 75 bp, synthetic construct
  source 1..75: mol_type = other DNA
gtcagcacgttaacaccaccgattcggcaattcgtattactcacttgccgaccgggattgttgttgaatgtcagg

SEQ ID NO: 390004 - DNA, 75 bp, synthetic construct
  source 1..75: mol_type = other DNA
acgaacgttcacaacataaaaacaaagctaaagcactttctgtacttggtgctcgcatccacgcagcagaaatgg

SEQ ID NO: 390005 - DNA, 75 bp, synthetic construct
  source 1..75: mol_type = other DNA
atgtacagacatatacctctgatacgtcttgttgccagcgagttgtcaccaaagaaaccacctgagccagaactg

SEQ ID NO: 390006 - DNA, 75 bp, synthetic construct
  source 1..75: mol_type = other DNA
gcgtacctgaaaggcgattttatcaactgctggcagcagtgttgagtgattacatgaaaaaacatccacaaatgt

SEQ ID NO: 390007 - DNA, 75 bp, synthetic construct
  source 1..75: mol_type = other DNA
cggtggatgttcaggcgctggattgcgatttttacgtgttttccgggcataaactgtatggccccaccgggattg

SEQ ID NO: 390008 - DNA, 75 bp, synthetic construct
  source 1..75: mol_type = other DNA
ttattgcttttaatctcggtaaacaccacgcctatgatgttggcagttttctcgataactacggcattgctgtgc

SEQ ID NO: 390009 - DNA, 75 bp, synthetic construct
  source 1..75: mol_type = other DNA
gttggcagttttctcgataattacggcattgctgtgcgtaccggacatcactgcgcaatgccattaatggcctat

SEQ ID NO: 390010 - DNA, 75 bp, synthetic construct
  source 1..75: mol_type = other DNA
cgttcggcggaagagctggtgttcgtccgcggcacgacggaagggatcaatctggtcgccaatagctggggcaac

SEQ ID NO: 390011 - DNA, 75 bp, synthetic construct
  source 1..75: mol_type = other DNA
gttgatggcgttttataacgttccggctatgtgtcgggcgtcgttggctatgtataacacccatgaagaagtgga

SEQ ID NO: 390012 - DNA, 75 bp, synthetic construct
  source 1..75: mol_type = other DNA
tgccagtgacctgattaatcttgatgccgatcgtctgcaatgcctgctgagcggtcatcctaaattcgtttttaa

SEQ ID NO: 390013 - DNA, 75 bp, synthetic construct
  source 1..75: mol_type = other DNA
ataactctcgccatgaaagagggggttccacagcgtgttctgctgaaagacttccagggcgatatgcggctggtg

SEQ ID NO: 390014 - DNA, 75 bp, synthetic construct
  source 1..75: mol_type = other DNA
cggggcgggctggatatcaagctgccgctgaccatctacaacacctcatgctaccgggggatccctggcagatac

SEQ ID NO: 390015 - DNA, 75 bp, synthetic construct
  source 1..75: mol_type = other DNA
ctacgcggcggtgcatcgcggtattcataccttaagcgcccaggcgaccgagaaaatggagaacgtgcgcaagcg

SEQ ID NO: 390016 - DNA, 75 bp, synthetic construct
  source 1..75: mol_type = other DNA
gactaaagcaccgtggcggtttgaagccggtacacccaataccggaggtatcattggtcttggcgcggcactcga

SEQ ID NO: 390017 - DNA, 75 bp, synthetic construct
  source 1..75: mol_type = other DNA
gcaactggagacgctgcctacgctgtttgatgagaaaactcgcctgctggcaattactcatgtctccaacgtgct

SEQ ID NO: 390018 - DNA, 75 bp, synthetic construct
  source 1..75: mol_type = other DNA
tttgaaatgttagatcttgggcttgccacgctggcgcactatcgagagacgccctccggcacggtgcgtatcaat

SEQ ID NO: 390019 - DNA, 75 bp, synthetic construct
  source 1..75: mol_type = other DNA
ggcgctgctggtctgtctgatcccaaccactattggcggcctgttgtcagcgatcggcgtcgccgggatgagccg

SEQ ID NO: 390020 - DNA, 75 bp, synthetic construct
  source 1..75: mol_type = other DNA
aaaaaaactgcctttgcccgcaagctgcgtgagccgaaatatggcgctgcggcggacaaagttcctgccgatcaa

SEQ ID NO: 390021 - DNA, 75 bp, synthetic construct
  source 1..75: mol_type = other DNA
atggcgaaaagggagaactacaacgagctgtacctgtttatgcaggtggtgcaagaaggcagttttaccgcagcg

SEQ ID NO: 390022 - DNA, 75 bp, synthetic construct
  source 1..75: mol_type = other DNA
ctgtatcgcctatcagtttgccgacggcagcgtataccagtgggaactcaatcaggatgataaaaaaatcactca

SEQ ID NO: 390023 - DNA, 75 bp, synthetic construct
  source 1..75: mol_type = other DNA
taaacagcgatatcctgatatccggcttgaactgataaatgagagccggttcgtcgatatcatcgaggaaagatt

SEQ ID NO: 390024 - DNA, 75 bp, synthetic construct
  source 1..75: mol_type = other DNA
tacaccatcgggtacggtccgaattaatgcgagccagcacgccattgataaagtgctgctgccgaagctggcggt

SEQ ID NO: 390025 - DNA, 75 bp, synthetic construct
  source 1..75: mol_type = other DNA
ctgcgctgggcgcaaaccaatactccggtgcgcgatcgtaataaacggagtttttggttgtcggcagcccgcagt

SEQ ID NO: 390026 - DNA, 75 bp, synthetic construct
  source 1..75: mol_type = other DNA
aatggctgcaatacccgttttgtggcggacgcactggcgaaattcctgaaaatccatgctcgtgaagtcagtttt

SEQ ID NO: 390027 - DNA, 75 bp, synthetic construct
  source 1..75: mol_type = other DNA
tattgcgttgaaagatatcgtcaaaggcggcattaaagaacgcttcgcccaactgcgcaaaatgggtattaaaac

SEQ ID NO: 390028 - DNA, 75 bp, synthetic construct
  source 1..75: mol_type = other DNA
caatgtttttcaaaaaaggattgttcagcaacattgaccaacgacattatttcagaaatgaattatttagcgaac

SEQ ID NO: 390029 - DNA, 75 bp, synthetic construct
  source 1..75: mol_type = other DNA
ggttcatatatctattatccgcaccgcaatgtgtcacccgctctacgagcggttatcgatacattgagaatttaa

SEQ ID NO: 390030 - DNA, 75 bp, synthetic construct
  source 1..75: mol_type = other DNA
gcagtcgctccatgccacctttgtaccgtttactgcgcaaagccggatgagcgggatcaacatcgacaaccgcat

SEQ ID NO: 390031 - DNA, 75 bp, synthetic construct
  source 1..75: mol_type = other DNA
agtaatagccataggaaaaaagaaatagctatcatggacataaccgatttcgattcattgaatgatggagctgtg

SEQ ID NO: 390032 - DNA, 75 bp, synthetic construct
  source 1..75: mol_type = other DNA
ggaacaactgttttcccgtctgcgtaaaaatggtctggtttccagcgtacgtggaccaggcggtggttatctgtt

SEQ ID NO: 390033 - DNA, 75 bp, synthetic construct
  source 1..75: mol_type = other DNA
atgagactgacatctaaagggcgctatgccgtgaccgcaatgctggacgttgcgctcaactccgaagcaggcccg

SEQ ID NO: 390034 - DNA, 75 bp, synthetic construct
  source 1..75: mol_type = other DNA
tgatggcaggcaacggtgcaacggttgccccgacggtgattacagagccggacggtacggtggagatccctgtca

SEQ ID NO: 390035 - DNA, 75 bp, synthetic construct
  source 1..75: mol_type = other DNA
taatcgtctcatcccggaaagtttcagtggtgaaatcatctggatgcatcccgaaaaccggccttatctgcgcgc

SEQ ID NO: 390036 - DNA, 75 bp, synthetic construct
  source 1..75: mol_type = other DNA
tagctatcatggacataactgatttcgattcattgaatgatggagctgtgctcgttactaagcatggttactgca

SEQ ID NO: 390037 - DNA, 75 bp, synthetic construct
  source 1..75: mol_type = other DNA
agtaacattatctctgctaataagaagtgaagttactattaccgggaaacccaagaatggtaaagggaatgatgt

SEQ ID NO: 390038 - DNA, 75 bp, synthetic construct
  source 1..75: mol_type = other DNA
gtcgctggcagtggagctgcgcgacatggcggtggcggcatcgctgacgcaagaacgggggcgagtggctgcggt

SEQ ID NO: 390039 - DNA, 75 bp, synthetic construct
  source 1..75: mol_type = other DNA
ctgaaactgaaagacggcctgccgttcggcaccggtgacgagactgaaatgcagtatgacgtgacgctgcgtgaa

SEQ ID NO: 390040 - DNA, 75 bp, synthetic construct
  source 1..75: mol_type = other DNA
ttgaggggccattgtctccgcgtcagataggacagctcagcgagcgcgatctctcccgactgatggcggcagtaa

SEQ ID NO: 390041 - DNA, 75 bp, synthetic construct
  source 1..75: mol_type = other DNA
actgcgcggcattgcgctgctgcgccgtcagattgccgctgtcggccagattgaggggccattgtctccgcgtca

SEQ ID NO: 390042 - DNA, 75 bp, synthetic construct
  source 1..75: mol_type = other DNA
ctctcccgtctgatggcagcggtcagcctgctggataccgcgcttgccggaaagctggcggctgaccgggggcga

SEQ ID NO: 390043 - DNA, 75 bp, synthetic construct
  source 1..75: mol_type = other DNA
ttgtcgatattattactgagcgcttcgatgccggtatacgtctgggctcggaagtggatagcggtatggttgcgg

SEQ ID NO: 390044 - DNA, 75 bp, synthetic construct
  source 1..75: mol_type = other DNA
gtacactcatcgcatctgccgttttattttcctttaattcaactgcagcaacttcatattttgaagcccgcaatg

SEQ ID NO: 390045 - DNA, 75 bp, synthetic construct
  source 1..75: mol_type = other DNA
ctggcggcaagggcgcaaaccaggcgatggcagccagcaaatgtcccgtccaggtacacttcgtcggcaaagttg

SEQ ID NO: 390046 - DNA, 75 bp, synthetic construct
  source 1..75: mol_type = other DNA
gcttagttggggccgttgcgcccgattttgatcttttctggtgctatctggttgataacgggcaacgacatcatc

SEQ ID NO: 390047 - DNA, 75 bp, synthetic construct
  source 1..75: mol_type = other DNA
tatggtgactttagaattcattatcaataaagaggttactattacaggaacgccgaaaagcaataaagggaataa

SEQ ID NO: 390048 - DNA, 75 bp, synthetic construct
  source 1..75: mol_type = other DNA
aaaccgcatttcaattaaagatgttaactctttaacctctctttcaaaatcagaaaataatcacaattatcaaac

SEQ ID NO: 390049 - DNA, 75 bp, synthetic construct
  source 1..75: mol_type = other DNA
acttcaggacttccgtcacacgcatgctgacgcacaggtgggcgcttccgctgtggcagcgcttcccggtgacac

SEQ ID NO: 390050 - DNA, 75 bp, synthetic construct
  source 1..75: mol_type = other DNA
taaaggcatgaaaggcgcaatccaaaaagcagaagaaattgtcgccagcaatccagagaaatacctgctgctgca

SEQ ID NO: 390051 - DNA, 75 bp, synthetic construct
  source 1..75: mol_type = other DNA
atgatgatgaaaaagcatattacccgtacacttgtcgcgtctgccgttttattttcctttaattcagcggccgcc

SEQ ID NO: 390052 - DNA, 75 bp, synthetic construct
  source 1..75: mol_type = other DNA
tgcgccggaaaagagtgacgcccgcgagtgtgcagctccgggcgtcgtggcgttttgtgtccgtggagaaactaa

SEQ ID NO: 390053 - DNA, 75 bp, synthetic construct
  source 1..75: mol_type = other DNA
actgcaggacttccggaacacccatgccagcgcacaggccggggtatctgctgtggcggcccttcccggtgatac

SEQ ID NO: 390054 - DNA, 75 bp, synthetic construct
  source 1..75: mol_type = other DNA
tttcatattacagcggtacatcatccgtggtggctcaattttttattacactggtcgtttttactggaactggca

SEQ ID NO: 390055 - DNA, 75 bp, synthetic construct
  source 1..75: mol_type = other DNA
ttcccattatggtgtggcacctctggcaaacccggctttactgacaaagcacaacagcaatgatgatttcagcct

SEQ ID NO: 390056 - DNA, 75 bp, synthetic construct
  source 1..75: mol_type = other DNA
ctggcaaacccggcgctgctgacaaaagccggtcctgacgatgatttcagccttctgcttccatccgtcggtgcg

SEQ ID NO: 390057 - DNA, 75 bp, synthetic construct
  source 1..75: mol_type = other DNA
tttggcgacctgacgctgcagttcactacctatgccgttcgtctggccagaggatatatgtttccgcccggtgcc

SEQ ID NO: 390058 - DNA, 75 bp, synthetic construct
  source 1..75: mol_type = other DNA
tcaagactcaagactcaagactcaagactcaagactcaagactcgttttccgttgatgataatgggtcaggtaat

SEQ ID NO: 390059 - DNA, 75 bp, synthetic construct
  source 1..75: mol_type = other DNA
ctgtttagtgtggaagatcagatccgtgctacagcacatgtggaatgccgtaaagatgccgaggtgatcgacgaa

SEQ ID NO: 390060 - DNA, 75 bp, synthetic construct
  source 1..75: mol_type = other DNA
ttaacatttatttatataacttttagtgagttactactgccatatataatgcattatatatttgttgtaagtcat

SEQ ID NO: 390061 - DNA, 75 bp, synthetic construct
  source 1..75: mol_type = other DNA
tttacttagtaaataaaaagatttttgagagcatatcgtatctggctatcatacaaatggtagcgatgattttaa

SEQ ID NO: 390062 - DNA, 75 bp, synthetic construct
  source 1..75: mol_type = other DNA
ccggtacaaagactcctgatggcagcacagaacgttcctgcagccagagactcgcggtgggccggtgttaacggt

SEQ ID NO: 390063 - DNA, 75 bp, synthetic construct
  source 1..75: mol_type = other DNA
gtgcacctggatattgccggtctggccggtacggacaatacatacggggcagtggcacaactgagcgtcacattc

SEQ ID NO: 390064 - DNA, 75 bp, synthetic construct
  source 1..75: mol_type = other DNA
cacacccaaataccagcgcgtggatctgttcaactacaacgtctccgtgcgtgactacgacaacagcgatttcag

SEQ ID NO: 390065 - DNA, 75 bp, synthetic construct
  source 1..75: mol_type = other DNA
ataactttattactgatggcgttgttcagcttaatgaggaaaacgtacaagtcaggaatgcggatcctatccagg

SEQ ID NO: 390066 - DNA, 75 bp, synthetic construct
  source 1..75: mol_type = other DNA
tttgatgattacctgaaagccgtggcctgggcgcagctttttgccagccttaaccgcgatgcgatgatggaaaac

SEQ ID NO: 390067 - DNA, 75 bp, synthetic construct
  source 1..75: mol_type = other DNA
tgatctggcgtactttatggaaggtacggaatactttgatgattacctgaaagccgtggcctgggcgcagctttt

SEQ ID NO: 390068 - DNA, 75 bp, synthetic construct
  source 1..75: mol_type = other DNA
gtaccgcgttaacggcggcagacctgcctgaaaacctggcggagctgcgtcaggcgattgaaacggccgtgccgc

SEQ ID NO: 390069 - DNA, 75 bp, synthetic construct
  source 1..75: mol_type = other DNA
gatcatctgacccaggcggttatcgactggaaagcgagttgcgaacgccgttttgtgttcaggccgaatgaagcg

SEQ ID NO: 390070 - DNA, 75 bp, synthetic construct
  source 1..75: mol_type = other DNA
acagttaccattaccgggacatttccaacttactggcaggctgcttcctgttggggtactaaggagtaaatacat

SEQ ID NO: 390071 - DNA, 75 bp, synthetic construct
  source 1..75: mol_type = other DNA
gacaactttttgaatgccctgcgtcaggtctgggatgaacagcaaaccgaattttcagccactgcgggtcagacc

SEQ ID NO: 390072 - DNA, 75 bp, synthetic construct
  source 1..75: mol_type = other DNA
cgacaggtgaattgaccactcttggccgtgaactgggcaaaggtggtgaaggcgcggtttatgatatcgaggagt

SEQ ID NO: 390073 - DNA, 75 bp, synthetic construct
  source 1..75: mol_type = other DNA
caatgcatgtttaccccggtcatttgactgactgcccgtggtgtgcgctggataatcaaggcgttatctatttta

SEQ ID NO: 390074 - DNA, 75 bp, synthetic construct
  source 1..75: mol_type = other DNA
agtttctggtaaagaaccgattcatatgatctatagcccggcacatcgtcgccaacgttaccctcattgtgcgtg

SEQ ID NO: 390075 - DNA, 75 bp, synthetic construct
  source 1..75: mol_type = other DNA
aacgccttgtcgcgcaatggctggaaagagttcgcagaggattacggtattgacccggataccttgccatctttc

SEQ ID NO: 390076 - DNA, 75 bp, synthetic construct
  source 1..75: mol_type = other DNA
ggtaatgtggtcacactcaacgacattcgcggtcgctatgagtgctatacagacgttggaccatccttccagagt

SEQ ID NO: 390077 - DNA, 75 bp, synthetic construct
  source 1..75: mol_type = other DNA
atatcagggggcgctatgagtgctacaccgatgtcggaccgtcattccagtcgatgaaacagcagaaccgcgcag

SEQ ID NO: 390078 - DNA, 75 bp, synthetic construct
  source 1..75: mol_type = other DNA
ccgttaacgttggcgttcgtgagcagatagagtccggcgttggtgcatggcgtctggtcacacagtacgaagaca

SEQ ID NO: 390079 - DNA, 75 bp, synthetic construct
  source 1..75: mol_type = other DNA
ttccgtgggtatcgaatgatgtcgtctacgtcgctgagtattacgaggtcgaagagaagaaagagaaagtcttca

SEQ ID NO: 390080 - DNA, 75 bp, synthetic construct
  source 1..75: mol_type = other DNA
gttcctgtgtatggcgaatggtcatttgctggtgacaaggagtgctacgaaggtgtagtaaggctgacgaaagac

SEQ ID NO: 390081 - DNA, 75 bp, synthetic construct
  source 1..75: mol_type = other DNA
atgttttcacataactgttgcgttgaccaattgaatctacagcgacgtggtttaaaaccgccgccacgatctatt

SEQ ID NO: 390082 - DNA, 75 bp, synthetic construct
  source 1..75: mol_type = other DNA
tatggattttacctattctcctgattgtatacctgtatttctgtatagttgacaatgagtttctcagaatcggtt

SEQ ID NO: 390083 - DNA, 75 bp, synthetic construct
  source 1..75: mol_type = other DNA
aacagtacgctcagcagcaatgcagagctgcgccagtttgccatgagcatcagcggttcggtgattttcggcagt

SEQ ID NO: 390084 - DNA, 75 bp, synthetic construct
  source 1..75: mol_type = other DNA
gataagatcaacaagctgccgttgaatccgatgattgagcaggcgaccagtacgctgtctgaaagccagcgcacg

SEQ ID NO: 390085 - DNA, 75 bp, synthetic construct
  source 1..75: mol_type = other DNA
ctgtcggtggttttggtcacatgggaccaaatgacccctacaatgatggtcatagcggctctggaagttcgggag

SEQ ID NO: 390086 - DNA, 75 bp, synthetic construct
  source 1..75: mol_type = other DNA
attgcctggtgatcccgcgtatcccgttagcccctggtctggcaccggctgttgccgcaggcctgctggacatta

SEQ ID NO: 390087 - DNA, 75 bp, synthetic construct
  source 1..75: mol_type = other DNA
cgcgaacgtgtgcgttggcctatcgtcgaagcgatgggtacggcctacgcgctctacaccgtcactggcgatcgc

SEQ ID NO: 390088 - DNA, 75 bp, synthetic construct
  source 1..75: mol_type = other DNA
gtattcgcctgggaacagtaagtaaagtgcctttctttgcgccgaatatgcgtcagacatttaacgatgattatc

SEQ ID NO: 390089 - DNA, 75 bp, synthetic construct
  source 1..75: mol_type = other DNA
gtgaaagggtttggcgaccatctgacccaggcagttatcgactggaaagcaagttgcgaacgccgttttgtgttc

SEQ ID NO: 390090 - DNA, 75 bp, synthetic construct
  source 1..75: mol_type = other DNA
cacaccgccacccgccttaaaacaggacaaactcgcctttatggccgcgacagccgacacgcaattgcttaatta

SEQ ID NO: 390091 - DNA, 75 bp, synthetic construct
  source 1..75: mol_type = other DNA
ggcagcctgttgcgccgaaaaccgcattcgttttgtatgacgaccagaagagcattcaggattcgctatacaccg

SEQ ID NO: 390092 - DNA, 75 bp, synthetic construct
  source 1..75: mol_type = other DNA
agactaccattaaaagccgtagtgttgacgtcggcgtggtcgagagcgcaacgctagccgatgatttgacgcacg

SEQ ID NO: 390093 - DNA, 75 bp, synthetic construct
  source 1..75: mol_type = other DNA
atcaggtgttgcgagaactgcaaccggtgctgaaaacgctcaatgagaagagtaacgcgctggtatttgaagcga

SEQ ID NO: 390094 - DNA, 75 bp, synthetic construct
  source 1..75: mol_type = other DNA
ttcaggagttactcaccaaggttccgcaaggtactccagagttccagatgctgatgctgcaatacttcacgctgc

SEQ ID NO: 390095 - DNA, 75 bp, synthetic construct
  source 1..75: mol_type = other DNA
gatgtttgtaccggtggcaacccgcgtgaagcaacgcttgaggatattgtagagctttaccataccgcctggtaa

SEQ ID NO: 390096 - DNA, 75 bp, synthetic construct
  source 1..75: mol_type = other DNA
tcagacggcaggaatcagtgtggtcaccgccagcatcaacagcagcagtcagagccgggatgtgacgtttatcgc

SEQ ID NO: 390097 - DNA, 75 bp, synthetic construct
  source 1..75: mol_type = other DNA
gataaagacggaattgccagcgttaaccttgccagtgaccaggcggtaaacagtcttatcaaggccgagatcaat

SEQ ID NO: 390098 - DNA, 75 bp, synthetic construct
  source 1..75: mol_type = other DNA
cctggcgctgggatgaacgtcgatccggcgagtcttgatgcgaaagcggtagccgtttacgccgcgcaggcgaaa

SEQ ID NO: 390099 - DNA, 75 bp, synthetic construct
  source 1..75: mol_type = other DNA
ctcagacgccttgcccgacaggagcctgactttattgatgtacacgcttacctggcatacgcatttctggagcag

SEQ ID NO: 390100 - DNA, 75 bp, synthetic construct
  source 1..75: mol_type = other DNA
ggtgtttgcgctcaaccgtgatgtaggtatcccgccgcatttgcgtgacgttggtgtacgtaaagaagacattcc

SEQ ID NO: 390101 - DNA, 75 bp, synthetic construct
  source 1..75: mol_type = other DNA
ttaaaaagaacactgtatgataaaaatgatgggaacataaatgctgataaatggtatgaattccataaaaaataa

SEQ ID NO: 390102 - DNA, 75 bp, synthetic construct
  source 1..75: mol_type = other DNA
cttgtatcaaaacatggctactgcaagcactcatatgcgtttaagccgtgtgataattatccaattaagaactct

SEQ ID NO: 390103 - DNA, 75 bp, synthetic construct
  source 1..75: mol_type = other DNA
tctcttttggtatgatagagagaagaaaatcaaatattctaatgcgctttgcttgttaactgaaggacagttaaa

SEQ ID NO: 390104 - DNA, 75 bp, synthetic construct
  source 1..75: mol_type = other DNA
ttacaggatcgtatagaaagctatcatgaactactcgccgcgttgaaagtaaaagacaaagagcgatgcagacat

SEQ ID NO: 390105 - DNA, 75 bp, synthetic construct
  source 1..75: mol_type = other DNA
atgcgaaagcattttaaaacaacaggagcagttgcgggaaaacatcgatgagagactttctgaagaaatcataca

SEQ ID NO: 390106 - DNA, 75 bp, synthetic construct
  source 1..75: mol_type = other DNA
gaaatcattaaatgcgccgaaatgctgattcaggaagatgatttcgaaatatgcgaaagtattttaagacagcag

SEQ ID NO: 390107 - DNA, 75 bp, synthetic construct
  source 1..75: mol_type = other DNA
tttactttcaggtcctgacagcgatagccattggtattctccttggccatttctaccctgaaataggcgagcaaa

SEQ ID NO: 390108 - DNA, 75 bp, synthetic construct
  source 1..75: mol_type = other DNA
gcatctatgactttctccatgttcgacgaactggtcgatgcggtgaaagatcttggtgctgactgcatcatgatg

SEQ ID NO: 390109 - DNA, 75 bp, synthetic construct
  source 1..75: mol_type = other DNA
acgttgacgtcgacaaattcctggctaccactatggctgataccaacaaccagctggctatccaggttcgtcaga

SEQ ID NO: 390110 - DNA, 75 bp, synthetic construct
  source 1..75: mol_type = other DNA
tgtccgaagagaacggtgtgaccggtctgtatggcggtgaaaacgctggtatcgttgttgagaacatcggtactg

SEQ ID NO: 390111 - DNA, 75 bp, synthetic construct
  source 1..75: mol_type = other DNA
attgatgggtatgtatcgtactgatatgcgccataacacggcaaagattgccgttaacgttggcgttcgtgagca

SEQ ID NO: 390112 - DNA, 75 bp, synthetic construct
  source 1..75: mol_type = other DNA
aggatttgtgttgggactgattgtttcattgtcattagtgttttcacgaatatttctacgtagaggtattgaaag

SEQ ID NO: 390113 - DNA, 75 bp, synthetic construct
  source 1..75: mol_type = other DNA
taaaacagatcgatacttgtggttttgattatatttcaagaggttctgtacctccaaatccggctgaattattaa

SEQ ID NO: 390114 - DNA, 75 bp, synthetic construct
  source 1..75: mol_type = other DNA
ctcagacgccttgcccgacaggcgccggattttatcgacgtccatgctcatctggcatacgtatttctggaacag

SEQ ID NO: 390115 - DNA, 75 bp, synthetic construct
  source 1..75: mol_type = other DNA
tcctcttgctgtatggcataactattctgccgggccggatactgccgaagattattatgcaacatactcaccatt

SEQ ID NO: 390116 - DNA, 75 bp, synthetic construct
  source 1..75: mol_type = other DNA
tcagtaccatcgcgctgattattggtcttatcatcgttaacgtcgtgcagcctggcgccggaatgaacgtcgatc

SEQ ID NO: 390117 - DNA, 75 bp, synthetic construct
  source 1..75: mol_type = other DNA
cggcccgtccgaaattatgatggaaaacttcggtcgaccgatgttgtgccacaacggtgtacctttcatcgtgaa

SEQ ID NO: 390118 - DNA, 75 bp, synthetic construct
  source 1..75: mol_type = other DNA
ggcatacctttacaaccgcgaagctaccctgagcgaagctaccttcattgatgtgaacgacaccatcactgaagg

SEQ ID NO: 390119 - DNA, 75 bp, synthetic construct
  source 1..75: mol_type = other DNA
ttcctctgtgctgcatgaacgggcagaaatcattaaatgcgccgaaatgctgatgcaggaagatgatttcgaaat

SEQ ID NO: 390120 - DNA, 75 bp, synthetic construct
  source 1..75: mol_type = other DNA
gtgcgcagcgagctggaccaggcggaagaaaaactcaacgtttatcgccagcagcgcgattcggttgaccttaac

SEQ ID NO: 390121 - DNA, 75 bp, synthetic construct
  source 1..75: mol_type = other DNA
gtggtggcaaataccgttattaacagtggcgggactcagaaggtcaacagtggcggcagtgttacggataccacc

SEQ ID NO: 390122 - DNA, 75 bp, synthetic construct
  source 1..75: mol_type = other DNA
gtgggcagaagcgagttaccagaatggcgagaatacagaatcgccggtaacaggtagcgttggtttccggattaa

SEQ ID NO: 390123 - DNA, 75 bp, synthetic construct
  source 1..75: mol_type = other DNA
ccggtggaggtagtgccacgaatacaaccgttaacggtggtggagagatggtagtccatggcatagctactgaca

SEQ ID NO: 390124 - DNA, 75 bp, synthetic construct
  source 1..75: mol_type = other DNA
aacgtttgtcagttcaactctggcagcggtgatcgcccagtccgatcaaaaagtgttatttattgatgccgactt

SEQ ID NO: 390125 - DNA, 75 bp, synthetic construct
  source 1..75: mol_type = other DNA
gaagccccggaacaactggaagagcacggcatcagcgtttatgccactatcccaatgtccgagtggctggataaa

SEQ ID NO: 390126 - DNA, 75 bp, synthetic construct
  source 1..75: mol_type = other DNA
ggcggtgtcgttggcgctcgggagcctgtcgggtagcgggacgttccggatgaacacggatatcgcatcacatac

SEQ ID NO: 390127 - DNA, 75 bp, synthetic construct
  source 1..75: mol_type = other DNA
acactacaattaattccggtggggggcagtatctctacgccggaaatgccacgaaaactactgttaacaacggcg

SEQ ID NO: 390128 - DNA, 75 bp, synthetic construct
  source 1..75: mol_type = other DNA
ggtggccgcgagaatatcaattcaggcggcagtgccacgagcactacccttaacagtggtggtatccaggctgtc

SEQ ID NO: 390129 - DNA, 75 bp, synthetic construct
  source 1..75: mol_type = other DNA
cagcagtactgtcggaagtaccggcggtggtctgtatgcaacctggtttaacaatgatggttactatgtggatgg

SEQ ID NO: 390130 - DNA, 75 bp, synthetic construct
  source 1..75: mol_type = other DNA
tccggggacagataatccaggaacagataatccaggaacagataatccggtacctccggtacgccatacaacaaa

SEQ ID NO: 390131 - DNA, 75 bp, synthetic construct
  source 1..75: mol_type = other DNA
cgtcggtgatgtggtgacaaatgaaggaaacctgtatttcctcaacaacagtgcggcgacctttgtgggtaccct

SEQ ID NO: 390132 - DNA, 75 bp, synthetic construct
  source 1..75: mol_type = other DNA
aaccgttaacggtggtggagagatggtagtccatggcatagctactgacactatcattaacagcggtggtcttca

SEQ ID NO: 390133 - DNA, 75 bp, synthetic construct
  source 1..75: mol_type = other DNA
ggggttcaccggtgtgtgcgcgtctgttaacggcctggtattctcgtaccgagcgcggcggttggtgggcattat

SEQ ID NO: 390134 - DNA, 75 bp, synthetic construct
  source 1..75: mol_type = other DNA
gttgtctcaggatggcgggattacccttcagagtggcgctgcaatgacgatggatacccttcaggcgaacgctaa

SEQ ID NO: 390135 - DNA, 75 bp, synthetic construct
  source 1..75: mol_type = other DNA
acattctgtttggcttctcgacgtcgctatgggcgtttgccatgctatgggggctgaacgcctttttccagggct

SEQ ID NO: 390136 - DNA, 75 bp, synthetic construct
  source 1..75: mol_type = other DNA
ccggtacgccatacaacaaaatcggctgatgctgtgctggatatggcaacggcaccggtctatgtgttcaacagt

SEQ ID NO: 390137 - DNA, 75 bp, synthetic construct
  source 1..75: mol_type = other DNA
gcagtggcggtatgctggatgtccagagcggcggtgtacttcgcggtaccaccaccctgacagataaagggacgc

SEQ ID NO: 390138 - DNA, 75 bp, synthetic construct
  source 1..75: mol_type = other DNA
tatttctacaaacacttctgccaccctgagtggcaccaacactaatggcagctttagcattgccggtggcagtgc

SEQ ID NO: 390139 - DNA, 75 bp, synthetic construct
  source 1..75: mol_type = other DNA
caacggcaccggtctatgtgtttaacagtgagcttcagagtctgcgttttcgtcacggcgatgtcatgcagaata

SEQ ID NO: 390140 - DNA, 75 bp, synthetic construct
  source 1..75: mol_type = other DNA
tgcagtactgaatatggcctcctcgcctatatatgtattcaataatgagcttcagagtctgcgcttccgacatgg

SEQ ID NO: 390141 - DNA, 75 bp, synthetic construct
  source 1..75: mol_type = other DNA
tgtctcaggtacaacagggaaatacggtgccgggataagcactcaactgacgccgaacacgggggtgtgggcaga

SEQ ID NO: 390142 - DNA, 75 bp, synthetic construct
  source 1..75: mol_type = other DNA
cggagaatggcggcatgacgcactggaggtagcccagcaacaggaaggggcggggttgacacgtaaagagatcct

SEQ ID NO: 390143 - DNA, 75 bp, synthetic construct
  source 1..75: mol_type = other DNA
gagcgcggcggttggtgggcattatggaacacggcgcataacgtcggcggcgcactcattcccattgtgatggca

SEQ ID NO: 390144 - DNA, 75 bp, synthetic construct
  source 1..75: mol_type = other DNA
gttaacggcctggtattctcgtaccgagcgcggcggttggtgggcattatggaacacggcgcataacgttggcgg

SEQ ID NO: 390145 - DNA, 75 bp, synthetic construct
  source 1..75: mol_type = other DNA
aagcgggcagaaccttcagtctgaatgagaatgcatgggcgcagccatacgtgcggacgacggcattccgggcag

SEQ ID NO: 390146 - DNA, 75 bp, synthetic construct
  source 1..75: mol_type = other DNA
tgcaggcggctgaagtcgttgagcaggcattagaacaggcagaacagccgaaggaagaagaaaaaacagcgaaga

SEQ ID NO: 390147 - DNA, 75 bp, synthetic construct
  source 1..75: mol_type = other DNA
tgagcatacaaccgttttcttttgcccgacccgcgagatgttttatgaattttgcgaaaaggcaggaattccgat

SEQ ID NO: 390148 - DNA, 75 bp, synthetic construct
  source 1..75: mol_type = other DNA
tcatgccggacttacggtgcaacgggcaatggaaatattcagagagaatggacttgatccatttaaatacggagc

SEQ ID NO: 390149 - DNA, 75 bp, synthetic construct
  source 1..75: mol_type = other DNA
tgacacctatgacttcaggaacgatatctccgggacgaccgggaaatacgggctgggtgtcaatgctcaactgac

SEQ ID NO: 390150 - DNA, 75 bp, synthetic construct
  source 1..75: mol_type = other DNA
tgcctcaatttaagatcccactctttgagcatacaaccgttttcttttgcccgacccgcgagatgttctatgaat

SEQ ID NO: 390151 - DNA, 75 bp, synthetic construct
  source 1..75: mol_type = other DNA
cttacatggtgggccgcatctttgatgcattcttcccgatcctggctgaatctaacgaagcacagttggcagcta

SEQ ID NO: 390152 - DNA, 75 bp, synthetic construct
  source 1..75: mol_type = other DNA
aaagatggtgttagtttcacttttggttttggcccaagttggggttggagtgcaactgaaattaaaggcgttgac

SEQ ID NO: 390153 - DNA, 75 bp, synthetic construct
  source 1..75: mol_type = other DNA
cgattaccggaatgctgtatcctggcgtgaagcagtcagacctcagtgaagagcagaagcagacgataagtacgc

SEQ ID NO: 390154 - DNA, 75 bp, synthetic construct
  source 1..75: mol_type = other DNA
agaaaaagacccggcagtaaacgccattgctcacgccattctgggcggcgcagtggcggcaatgcagggtaataa

SEQ ID NO: 390155 - DNA, 75 bp, synthetic construct
  source 1..75: mol_type = other DNA
ttatattgatatccatgctgctgattgtccatctgcggctggtgagttgatacttgcctctacagatggaggtgt

SEQ ID NO: 390156 - DNA, 75 bp, synthetic construct
  source 1..75: mol_type = other DNA
atatatttacacaatttggggtggcgttcctgcaagatgcgtaaggacagtccagatttatgatatgggtggtac

SEQ ID NO: 390157 - DNA, 75 bp, synthetic construct
  source 1..75: mol_type = other DNA
gcggatgactctgcgaatagagattcaacacaggcttttcttgacgccgcatctagcgcaggaaatagtggtttg

SEQ ID NO: 390158 - DNA, 75 bp, synthetic construct
  source 1..75: mol_type = other DNA
atggatgcacttcaggctaaggctaatgtgacgacacagtcaggcaccaccctgacgctggataacgggaccatc

SEQ ID NO: 390159 - DNA, 75 bp, synthetic construct
  source 1..75: mol_type = other DNA
tgacccttaccatcgaccactgcctgctggtttccggcaccacagatttatctaccatcaacacggtctacagtc

SEQ ID NO: 390160 - DNA, 75 bp, synthetic construct
  source 1..75: mol_type = other DNA
cacgtaaagccattaacgtatctgaccaggttcctgcaaaaaccactctgttaatggcgacggggcaacaagctg

SEQ ID NO: 390161 - DNA, 75 bp, synthetic construct
  source 1..75: mol_type = other DNA
acaccggtgcaggtgatatggcggttaaaggtgcgtctgtctggcatctcgacggcgactccactgtcggggcat

SEQ ID NO: 390162 - DNA, 75 bp, synthetic construct
  source 1..75: mol_type = other DNA
ccggtatatgggcagaggctggctatcagaaagggaataagatggagtcaccagtgacaggaactgtcggtttcc

SEQ ID NO: 390163 - DNA, 75 bp, synthetic construct
  source 1..75: mol_type = other DNA
tccactggaacagacatagttcagaacgatggaggggctattatcacagatacggatgaaaccgtaagcggcttc

SEQ ID NO: 390164 - DNA, 75 bp, synthetic construct
  source 1..75: mol_type = other DNA
cactattaatgccgggttccaggctctctacgatagcagtatagccagcggcaccgtcattaataatggcttcca

SEQ ID NO: 390165 - DNA, 75 bp, synthetic construct
  source 1..75: mol_type = other DNA
caacagcggcggtagtgccacgagtaccgtcattaatagtggtgggagccaactagtatccagtggcggtagtgc

SEQ ID NO: 390166 - DNA, 75 bp, synthetic construct
  source 1..75: mol_type = other DNA
tgcaggcggctgaagtagtggagaagacacttgatcagttagaacaggcagaacacccgaaggaagaagaaaaac

SEQ ID NO: 390167 - DNA, 75 bp, synthetic construct
  source 1..75: mol_type = other DNA
ctgcgaccttcgcaggtactttgacgggtaccggcaccctgacacaggaaggcgggagcacccgcttcagtggtc

SEQ ID NO: 390168 - DNA, 75 bp, synthetic construct
  source 1..75: mol_type = other DNA
tgcaatgacgatggttacccttcaggcgaacgctaatgtgacgacacagccaggcaccaccctgacgctggataa

SEQ ID NO: 390169 - DNA, 75 bp, synthetic construct
  source 1..75: mol_type = other DNA
aacacctggattcagccttatctccgtagtacggcattccgggcagaatcaaaggatatcagtctggataatggt

SEQ ID NO: 390170 - DNA, 75 bp, synthetic construct
  source 1..75: mol_type = other DNA
acacaaccattaacagcaatggcttactgcatgtatccagcggcggtagtgtcactggcaccatcgttaataacg

SEQ ID NO: 390171 - DNA, 75 bp, synthetic construct
  source 1..75: mol_type = other DNA
ttgaagcaactcgtggctatatcgaaaaacatggtaagcccatgatcctctacagcgacaaagccagtgtcttcc

SEQ ID NO: 390172 - DNA, 75 bp, synthetic construct
  source 1..75: mol_type = other DNA
ggcaaagaaaccatccgacgtctcatgataaaagccggactctggatcccacgcagacagcgcgcacctaaaatt

SEQ ID NO: 390173 - DNA, 75 bp, synthetic construct
  source 1..75: mol_type = other DNA
gcattaacaaatctcagcgttcactgaacgaagatgacatgcttgaagccatgttaaagcttcagggcagctcgg

SEQ ID NO: 390174 - DNA, 75 bp, synthetic construct
  source 1..75: mol_type = other DNA
atgcggaatttacttggcgagagccccggcgtgtatcaaaaagtctgactgtacaatacgataaagtcctctatc

SEQ ID NO: 390175 - DNA, 75 bp, synthetic construct
  source 1..75: mol_type = other DNA
cgctggcattagacgatgaccttgatgcagaatttacctggcgagagcctcgccgggtatcaaaaaatctgactg

SEQ ID NO: 390176 - DNA, 75 bp, synthetic construct
  source 1..75: mol_type = other DNA
agggccatgcgctccctcaatatcacaccgctgtgcgcagaaaccagtcaggtaaaaggccgtgtggaacgtgct

SEQ ID NO: 390177 - DNA, 75 bp, synthetic construct
  source 1..75: mol_type = other DNA
gcgtgctgtggtcatacagcgaaagaaaatcgcctgtcacaaagtcaattcagatgccaggtatgtggatataca

SEQ ID NO: 390178 - DNA, 75 bp, synthetic construct
  source 1..75: mol_type = other DNA
catacagcgaaagaaaaccgcctgtcacaaagtaaattcgtgtgtcgggcttgtggatatacagcgaacgccgat

SEQ ID NO: 390179 - DNA, 75 bp, synthetic construct
  source 1..75: mol_type = other DNA
tggtatgaaatgcaccgccagcttgagtacaagcagctctggcgtggcggtcaggtgcttgctgttccgccagcg

SEQ ID NO: 390180 - DNA, 75 bp, synthetic construct
  source 1..75: mol_type = other DNA
tgcggaatttacctggcgcgagccccggcgggtttcaaaaaaccttacagtacagtacgataaagtgctttatct

SEQ ID NO: 390181 - DNA, 75 bp, synthetic construct
  source 1..75: mol_type = other DNA
agtacgatagaagcggcaaatgcatttgccgaagaatacatgaccgattacaaccggcgatttgccaaagcccca

SEQ ID NO: 390182 - DNA, 75 bp, synthetic construct
  source 1..75: mol_type = other DNA
tgactttccgtaaagagctggaaaaaattctgcgtgacccggcactgagccaggcgctgcgtgatgaattgcgtg

SEQ ID NO: 390183 - DNA, 75 bp, synthetic construct
  source 1..75: mol_type = other DNA
ctagcatcaacaaatctcagcgctcactgaacgaagatgacctacttgaagccatgataaagcttcagggaagct

SEQ ID NO: 390184 - DNA, 75 bp, synthetic construct
  source 1..75: mol_type = other DNA
gcctggcgtcggcggtggcattattcggtgaaccgaaaagcgtgcaggcaaccgccagtttgctggcaagcggcg

SEQ ID NO: 390185 - DNA, 75 bp, synthetic construct
  source 1..75: mol_type = other DNA
cgaactggatcactcgccagttcgtcgaggccgcccatgagagcggtaaatacaagttaaccgccgtctattccc

SEQ ID NO: 390186 - DNA, 75 bp, synthetic construct
  source 1..75: mol_type = other DNA
gctttgtgccgcgtggcagccagatgcaggatctcacccagccgcagcatattaataccatgctctacgaagcag

SEQ ID NO: 390187 - DNA, 75 bp, synthetic construct
  source 1..75: mol_type = other DNA
cgctgcgattaacgccttacgccagcaaattcaggcgttgaaagtgacgggcaggcaaaaaatcaatcttgatcc

SEQ ID NO: 390188 - DNA, 75 bp, synthetic construct
  source 1..75: mol_type = other DNA
tgatcctgatatcgtccgcgttgccgaacgcggtaacccgccgttgcagggcaactacacgctgtgggtcggaac

SEQ ID NO: 390189 - DNA, 75 bp, synthetic construct
  source 1..75: mol_type = other DNA
gccgaaagtcggcaaactgcgtaaagtctttttcaactattgccagtattcctcgcggtatcaacgttacctgga

SEQ ID NO: 390190 - DNA, 75 bp, synthetic construct
  source 1..75: mol_type = other DNA
tctgttcatcttccgcggacgccggggtgaccagataaaagtgctgtgggctgacagtgacggactgtgcctctt

SEQ ID NO: 390191 - DNA, 75 bp, synthetic construct
  source 1..75: mol_type = other DNA
tcaaaagttcagaacgtcctgaaggatgacccgttctccgggcatctgttcatcttccgcggacgccggggtgac

SEQ ID NO: 390192 - DNA, 75 bp, synthetic construct
  source 1..75: mol_type = other DNA
aaatgacaacgttgaagtcagccgctggggtaccccgcgtgagtttgacttcgaagttcgtgaccacgtgacgct

SEQ ID NO: 390193 - DNA, 75 bp, synthetic construct
  source 1..75: mol_type = other DNA
gtttgaggcatttaaaaccgcctgcctgccgaactttcatttgctgcgccaggcgctgccgaaagtcggcaaatt

SEQ ID NO: 390194 - DNA, 75 bp, synthetic construct
  source 1..75: mol_type = other DNA
ggcaagcgagattcagggcgaagcgggatcgctggtgattgaaaaactgtctgaatgccagaaagtctgctttgt

SEQ ID NO: 390195 - DNA, 75 bp, synthetic construct
  source 1..75: mol_type = other DNA
gaagagtggggcgtcctggaattcagcagcctgactgagctgaaaaaatatcgcaaaagccacccggaaaagatg

SEQ ID NO: 390196 - DNA, 75 bp, synthetic construct
  source 1..75: mol_type = other DNA
caacagtcactgaaagaccttgagcgggcttacaaaaacttcttccagaagcgggctgcttttccccgattcaaa

SEQ ID NO: 390197 - DNA, 75 bp, synthetic construct
  source 1..75: mol_type = other DNA
ttgatatctacccgtacattgccggggcggtcttcctgattggtagctggctgcgctatgactacgggcagtaca

SEQ ID NO: 390198 - DNA, 75 bp, synthetic construct
  source 1..75: mol_type = other DNA
gctggatcgtaaagggatgaatctggcgtctaacctgttccatatcgggattttggggattttcgtcggtcactt

SEQ ID NO: 390199 - DNA, 75 bp, synthetic construct
  source 1..75: mol_type = other DNA
gaaaaacgccactgaaacgcaatggcttaaagattcgccctcacagccattgcaacagtcactgaaagaccttga

SEQ ID NO: 390200 - DNA, 75 bp, synthetic construct
  source 1..75: mol_type = other DNA
taaactcgccacgctgtcagatggcacagtctttgagcctgtaaacagtttgcagaaaaaccagaagaagctggc

SEQ ID NO: 390201 - DNA, 75 bp, synthetic construct
  source 1..75: mol_type = other DNA
tcgcgtttggtacacatctggagcgtaccggtagagtatttgacgcgtaagtatcagttggtgcgtgctcgccac

SEQ ID NO: 390202 - DNA, 75 bp, synthetic construct
  source 1..75: mol_type = other DNA
tgaaacgccgtctgttcagcccgcgcgtgcgtgcaaccactaccggagcagacatcttgatcctgtcactgttag

SEQ ID NO: 390203 - DNA, 75 bp, synthetic construct
  source 1..75: mol_type = other DNA
tccgaaatatacaaaacaataatccttatcaggggtggtctgaaggtatcagtgttgttcctgcctcaatcatta

SEQ ID NO: 390204 - DNA, 75 bp, synthetic construct
  source 1..75: mol_type = other DNA
cattgtttcctttgataaagaactggatatagacagaatatctgctacagtccgaaatatacaaaacaataatcc

SEQ ID NO: 390205 - DNA, 75 bp, synthetic construct
  source 1..75: mol_type = other DNA
ccattgaaatcactcattgccaaaaagatcatggaaagtggcctcactgatttagagttcaaaagaacaatatgt

SEQ ID NO: 390206 - DNA, 75 bp, synthetic construct
  source 1..75: mol_type = other DNA
ggatatacagcgaacgccgatgtaaatggcgctcgtaacattttagcggcggggcacgccgttcttgcctgtgga

SEQ ID NO: 390207 - DNA, 75 bp, synthetic construct
  source 1..75: mol_type = other DNA
aaagattttgatgaatggataaaagggattgatggggtattcatttataaaaggtttgttgatgatattataatt

SEQ ID NO: 390208 - DNA, 75 bp, synthetic construct
  source 1..75: mol_type = other DNA
gccaagtttgattatctggggtataaaattacggtcatcgatacgcacattcccccgaattcagatggatcatca

SEQ ID NO: 390209 - DNA, 75 bp, synthetic construct
  source 1..75: mol_type = other DNA
acgtctcacggttgtacggtgacgtgcgcgcagtagatggcgtcagtattgcgataaaagatggtgagttcttct

SEQ ID NO: 390210 - DNA, 75 bp, synthetic construct
  source 1..75: mol_type = other DNA
atttgaaggtcagtaacatgtcaaagtcagcagcgggtacggtcagccagccggggcgcaatgtccgggcaaaat

SEQ ID NO: 390211 - DNA, 75 bp, synthetic construct
  source 1..75: mol_type = other DNA
ttaagccgcaaggtcaaattcagcaacaactggcagaagcagaaacgcaaaatacagcgactgcattcctgtatc

SEQ ID NO: 390212 - DNA, 75 bp, synthetic construct
  source 1..75: mol_type = other DNA
aaacgcaaaatacagcgactgcattcctgtatcgcaaatatccgcagggactaccttcacaaagtcacaacggcc

SEQ ID NO: 390213 - DNA, 75 bp, synthetic construct
  source 1..75: mol_type = other DNA
cgggtacggtcagccagccggggcgcaatgtccgggcaaaatcaggtttaaaccgtacgatactggatcagggct

SEQ ID NO: 390214 - DNA, 75 bp, synthetic construct
  source 1..75: mol_type = other DNA
cagatgccaggtatgtggatatacagcgaacgccgatgtaaatggagctcgtaacattttagcggcggggcacgc

SEQ ID NO: 390215 - DNA, 75 bp, synthetic construct
  source 1..75: mol_type = other DNA
cacaacgaccgtcagcaaaaaccacgcaatgatagtcattgaggatttgaaggtcagcaacatgtcaaagtcagc

SEQ ID NO: 390216 - DNA, 75 bp, synthetic construct
  source 1..75: mol_type = other DNA
tcattgaggatttgaaggtcagcaacatgtcaaagtcagcagcgggcacggtcagccagccggggcgcaatgtcc

SEQ ID NO: 390217 - DNA, 75 bp, synthetic construct
  source 1..75: mol_type = other DNA
gattcttgacaacgtcgcctacgggctgatggtcaaaggcgtggataaaaaacagcggcatgcgatggcgcaaga

SEQ ID NO: 390218 - DNA, 75 bp, synthetic construct
  source 1..75: mol_type = other DNA
cgccagcaatctgccaccgtgggagcgggacgtgaatactgtcttccaggactacgcgctatttccgcatatgtc

SEQ ID NO: 390219 - DNA, 75 bp, synthetic construct
  source 1..75: mol_type = other DNA
gagacttcagcgacagttaagccgcaaggtcagattcagcaacaactggcagaagcagaaacgcaaaatacagcg

SEQ ID NO: 390220 - DNA, 75 bp, synthetic construct
  source 1..75: mol_type = other DNA
aaggtacggcagagcggcccggacgaaacatcagagccaaatcaggcttaaaccgttcgatactggatcagggct

SEQ ID NO: 390221 - DNA, 75 bp, synthetic construct
  source 1..75: mol_type = other DNA
attttagcggcggggcacgccgttcttgcctgtggagagatggtgcagtcaggccgcccgttgaagcaggaaccc

SEQ ID NO: 390222 - DNA, 75 bp, synthetic construct
  source 1..75: mol_type = other DNA
gtacgcgatcaagaatccctaacagaagaatcattagccgatatcataaaaactataaagctacaacaattcttc

SEQ ID NO: 390223 - DNA, 75 bp, synthetic construct
  source 1..75: mol_type = other DNA
caatccgtcgcgcaaccaccgccagtggcaaccgcccgacctacgaagccagccgcagcgaagaagccagccatg

SEQ ID NO: 390224 - DNA, 75 bp, synthetic construct
  source 1..75: mol_type = other DNA
cagaacggcgacagtgccggatgcgtggtggtggcaccgccagccgtgccaggcggtaagttccgcattcttgag

SEQ ID NO: 390225 - DNA, 75 bp, synthetic construct
  source 1..75: mol_type = other DNA
acccggcaaaaggtacgcaaaacggcgacagcgccgggtgcgtggtggtggcaccgccagccgtgccgggcggta

SEQ ID NO: 390226 - DNA, 75 bp, synthetic construct
  source 1..75: mol_type = other DNA
aatggcggcaatgaagccgacttaaaccctaacgttgccaaccgcaacaaaggcccacgtcgtcagccggaaaag

SEQ ID NO: 390227 - DNA, 75 bp, synthetic construct
  source 1..75: mol_type = other DNA
ccatccgcaaactcaccgaaaaatacaacgtcgaatacatcggtattgatgccaccggcctcggtgtcggcgtgt

SEQ ID NO: 390228 - DNA, 75 bp, synthetic construct
  source 1..75: mol_type = other DNA
agaagctggaagaaatcttccattcctccatgttcaactaccagcgtcactggtgggaagccggaaaaactaacc

SEQ ID NO: 390229 - DNA, 75 bp, synthetic construct
  source 1..75: mol_type = other DNA
gttctggtccggtgcgctgtttaaccgtgggcgcaacaaagccgataaagtggacatcgacctgtcccacaacaa

SEQ ID NO: 390230 - DNA, 75 bp, synthetic construct
  source 1..75: mol_type = other DNA
cctttctgccagtaaggcacaggcccacgtatttaaacagtacatcatcgactttgccaaagaagtggaggtgga

SEQ ID NO: 390231 - DNA, 75 bp, synthetic construct
  source 1..75: mol_type = other DNA
gtgaagccctgattgacgctctgcttaccggacgtaaccagatttttctttccgccagcaaggcacaggcccacg

SEQ ID NO: 390232 - DNA, 75 bp, synthetic construct
  source 1..75: mol_type = other DNA
cgaacgtcaaaaacgccttggttctcaaggcatacgacattatcagccaccgccgcctggagttcgacgcagggc

SEQ ID NO: 390233 - DNA, 75 bp, synthetic construct
  source 1..75: mol_type = other DNA
atcggggccgcgcaaaagctgacaaggtagatattgacctgacccacgccaatctggcgcgcggcgtgctttgcc

SEQ ID NO: 390234 - DNA, 75 bp, synthetic construct
  source 1..75: mol_type = other DNA
ccgtggaagatgcggtgcgcggtggctgtaacctgttcgaccttgaccagttgcgcatggaatacagcccggacg

SEQ ID NO: 390235 - DNA, 75 bp, synthetic construct
  source 1..75: mol_type = other DNA
aagaccttgcatccttcgcgaaggaagatagccagcctcaatacaccatcgcaaccggaataatcccagaattcg

SEQ ID NO: 390236 - DNA, 75 bp, synthetic construct
  source 1..75: mol_type = other DNA
taaaatccttgctaatcattcaacttatgaaattcttgccgttgagccaaatattgaaatattgccagatgcgct

SEQ ID NO: 390237 - DNA, 75 bp, synthetic construct
  source 1..75: mol_type = other DNA
cggcttttagtagttgaacctaatattgatgatttgccatcagctttaaaaggacgtaataacgttaaattggtt

SEQ ID NO: 390238 - DNA, 75 bp, synthetic construct
  source 1..75: mol_type = other DNA
gctgaaaggcgatccgatggtgcttcctaacggggccacgctttactttctcggcaccaatgcccgcacggccca

SEQ ID NO: 390239 - DNA, 75 bp, synthetic construct
  source 1..75: mol_type = other DNA
cagatttggcctgggcaacgatgcacgcactgtttaacgaaccgctgcagggcgaatccgccaataccagcaata

SEQ ID NO: 390240 - DNA, 75 bp, synthetic construct
  source 1..75: mol_type = other DNA
tactcagaacggcgacagtgccggatgcgtggtggtggcaccgccagccgtatcgggcggtaaattccgcattct

SEQ ID NO: 390241 - DNA, 75 bp, synthetic construct
  source 1..75: mol_type = other DNA
ctcgtcgttatcttggtgtgccatgttggcaagaccttttgaagcattttgctgaggcgattggggaaaatcata

SEQ ID NO: 390242 - DNA, 75 bp, synthetic construct
  source 1..75: mol_type = other DNA
tcttgcgcgcggcctgctctgccctgacggacagtaccgccagatcgtcaccgtggaggatgcggtgcgcggcgg

SEQ ID NO: 390243 - DNA, 75 bp, synthetic construct
  source 1..75: mol_type = other DNA
tgagcgtcaccagtggcgcggaatggacttccgcgcccaggcggacgccatcaaaaaactgaccgaacagtacaa

SEQ ID NO: 390244 - DNA, 75 bp, synthetic construct
  source 1..75: mol_type = other DNA
ggctgatttaaaatatattgaatcagcttcacgtgcattagcgccactacttgaaaagggaaatctggttgtttt

SEQ ID NO: 390245 - DNA, 75 bp, synthetic construct
  source 1..75: mol_type = other DNA
ggcaatgcaatcgcgcggttagttggtgctacagtatacgatgggactcaagcatcgggacgtgatgccttagtt

SEQ ID NO: 390246 - DNA, 75 bp, synthetic construct
  source 1..75: mol_type = other DNA
aagagggcgccaatacaacagagtttgttgtgggatatggtgctatttcgatggtgaaaaaatcagaatcgatgg

SEQ ID NO: 390247 - DNA, 75 bp, synthetic construct
  source 1..75: mol_type = other DNA
tggacatcgacctgtcccacagcaatctagcccccggccttctgtgcgcagacgggcagtaccgccagatagtca

SEQ ID NO: 390248 - DNA, 75 bp, synthetic construct
  source 1..75: mol_type = other DNA
ctcagccactggccgattagcgcctggcaaccgcaacttcccgcaggatggacacttcgcgacaacggtgacaaa

SEQ ID NO: 390249 - DNA, 75 bp, synthetic construct
  source 1..75: mol_type = other DNA
ctcagccactggccgattagcgcctggcaaccgcaacttcccactagctggacgcttcgcgacaacggcaacaaa

SEQ ID NO: 390250 - DNA, 75 bp, synthetic construct
  source 1..75: mol_type = other DNA
gatgaagcctggcatatcagccgtccgctggtcgatttcggtacgcgccagccggtaggcgttggtgatgtgacg

SEQ ID NO: 390251 - DNA, 75 bp, synthetic construct
  source 1..75: mol_type = other DNA
tctcttcctaacattgctcgagctgaagttttgctccaacaaggaaaatttaaaaccagtcagggatgttttgaa

SEQ ID NO: 390252 - DNA, 75 bp, synthetic construct
  source 1..75: mol_type = other DNA
ttgataacacccgtggtgctgcgaataaatggctgacgggaggcgcgcccaatcgctaccgctttaaggtgaaag

SEQ ID NO: 390253 - DNA, 75 bp, synthetic construct
  source 1..75: mol_type = other DNA
aagtcaggtactggctgacgtaatgctcagccactggccgattagcgcctggcaaccgcaacttcccactggctg

SEQ ID NO: 390254 - DNA, 75 bp, synthetic construct
  source 1..75: mol_type = other DNA
tacgaaattatggtgaccaccaaagcaatgcaggaatatgagctgcaggtggttgccgcgcaagatcgtatagcc

SEQ ID NO: 390255 - DNA, 75 bp, synthetic construct
  source 1..75: mol_type = other DNA
gtggctggattatctggacgcactggaactggtcgatacttccagtgcgccagatattgaatggcctacgcctcc

SEQ ID NO: 390256 - DNA, 75 bp, synthetic construct
  source 1..75: mol_type = other DNA
agtgtaaatcgatggtcaggatgtgtgcaccgctgggcagtcgcctgccgctacacgcttccggggccggtaagg

SEQ ID NO: 390257 - DNA, 75 bp, synthetic construct
  source 1..75: mol_type = other DNA
cctcggtattgtccgtcaggtaaaagcggcgaatccacaagcgaaatatttttgcgatcccgtaatggggcaccc

SEQ ID NO: 390258 - DNA, 75 bp, synthetic construct
  source 1..75: mol_type = other DNA
ggttgcgtgatgccgcccagtcatttaaccgagattgtgcagggcattgccgccatcgataaattacacacctgt

SEQ ID NO: 390259 - DNA, 75 bp, synthetic construct
  source 1..75: mol_type = other DNA
gcgcgaactcattgcgcaagggccacaaattgtgttggttaaacacctggcgcgagctggcggtgatgctgccaa

SEQ ID NO: 390260 - DNA, 75 bp, synthetic construct
  source 1..75: mol_type = other DNA
cacgtgctgagttgttattaaaatctgagcaaatagaaacaagccaggggtattttgaaatcgcccgccccacgc

SEQ ID NO: 390261 - DNA, 75 bp, synthetic construct
  source 1..75: mol_type = other DNA
ttgattaataactatattggcgatccaaaactcgacactttatttaatcaattaaccgctgaacataaacactga

SEQ ID NO: 390262 - DNA, 75 bp, synthetic construct
  source 1..75: mol_type = other DNA
ttctgcgcccggggcgatgattattcacttcctcggtgggatccacgaactgtatttcccgtatgtgctgatgaa

SEQ ID NO: 390263 - DNA, 75 bp, synthetic construct
  source 1..75: mol_type = other DNA
catggttaaaacatgaagagggatggtgctatgaaaataacattactggttaccttgcttttcggtctggttttt

SEQ ID NO: 390264 - DNA, 75 bp, synthetic construct
  source 1..75: mol_type = other DNA
tcaaaaaactgaccgaacagtacaacgtgacatacatcggcatcgactcgacaggtgttggtcacggggtttacg

SEQ ID NO: 390265 - DNA, 75 bp, synthetic construct
  source 1..75: mol_type = other DNA
accctaacgtcgccaaccgtaacaaaggcccgcgccgtcagccggaaaagaacgttttcaccgatgaacagattg

SEQ ID NO: 390266 - DNA, 75 bp, synthetic construct
  source 1..75: mol_type = other DNA
aaaacgacaccgtgaaagtgtattgcaatgccggacgccagtcagggcaggcaaaagagatccttagcgagatgg

SEQ ID NO: 390267 - DNA, 75 bp, synthetic construct
  source 1..75: mol_type = other DNA
cgatgagatcagacgtattgcgccgctcttagacgccctgtccgatcagatgcaccgtgtttcaatcgacagctt

SEQ ID NO: 390268 - DNA, 75 bp, synthetic construct
  source 1..75: mol_type = other DNA
gaagttgctgaactgctgccgcagatagccgaaccagcagcgccagaatcaagggttgttggtattttccggcct

SEQ ID NO: 390269 - DNA, 75 bp, synthetic construct
  source 1..75: mol_type = other DNA
agttgctcggtttggcaggtttaccaaagcaagccactaacattacacgtaaggcacaaagagaaggctgggagt

SEQ ID NO: 390270 - DNA, 75 bp, synthetic construct
  source 1..75: mol_type = other DNA
atgaaaataacattactggttaccttgctttttggtctggtttttttaaccactgtcggcgctgccgagagaact

SEQ ID NO: 390271 - DNA, 75 bp, synthetic construct
  source 1..75: mol_type = other DNA
agtgattgcctgaagaacagcaagtctgcgcctggtgaaaaaagtttgacgccacagcagcaaaagatgcgctaa

SEQ ID NO: 390272 - DNA, 75 bp, synthetic construct
  source 1..75: mol_type = other DNA
agatgcgctggcgattaccggtaagggaaaaatcatccgtaattttccgatgattcctgggatcgattttgccgg

SEQ ID NO: 390273 - DNA, 75 bp, synthetic construct
  source 1..75: mol_type = other DNA
atgaatcaaatttatgacagttttccgtttccttcccctgagggttttactgcaggtatgacaatggcgggattt

SEQ ID NO: 390274 - DNA, 75 bp, synthetic construct
  source 1..75: mol_type = other DNA
atgaccgtatttgaatatctccaggctcaccccaacgccaccagcgctgaaatagctaagggtttaaacaaaaag

SEQ ID NO: 390275 - DNA, 75 bp, synthetic construct
  source 1..75: mol_type = other DNA
attccaacataccgtgttaacgatatgccatttgggtgcagtaacagcctaaccatgatgtttaaccagttgttg

SEQ ID NO: 390276 - DNA, 75 bp, synthetic construct
  source 1..75: mol_type = other DNA
gcgctccagtcgcgtctggcggaaaaccggttcgcgcaaaaagcaggagtgattgactactcatcccccactttg

SEQ ID NO: 390277 - DNA, 75 bp, synthetic construct
  source 1..75: mol_type = other DNA
agcctgtttgtccgtcaggccggatacgcgggtctgctggtgaatctggatgagatggtcaatctgtataagctc

SEQ ID NO: 390278 - DNA, 75 bp, synthetic construct
  source 1..75: mol_type = other DNA
gcagtaatggaaaactatcagcaggctgatggtcgtattgaagtaccagaagttctgcgtccgtatatgaatgga

SEQ ID NO: 390279 - DNA, 75 bp, synthetic construct
  source 1..75: mol_type = other DNA
tgagttctcgatttcggaatgcaggctataaaaagccgaaatatatgctaaaagctcatggtatcactctgttct

SEQ ID NO: 390280 - DNA, 75 bp, synthetic construct
  source 1..75: mol_type = other DNA
gaggagatggggataactggtcttttgttatgccatcaaatgatgtaaaaaatgaggtcattgctactagcgaaa

SEQ ID NO: 390281 - DNA, 75 bp, synthetic construct
  source 1..75: mol_type = other DNA
tttatccttagggatgttttcaatacgaagtcttttgtattacaaagaatagcatctttagggattaatagctac

SEQ ID NO: 390282 - DNA, 75 bp, synthetic construct
  source 1..75: mol_type = other DNA
cgcaatcgcacaaatcgacatcatgcagaatcgtgctgttcaggcaaatcttgcataccagagcagcctggatgc

SEQ ID NO: 390283 - DNA, 75 bp, synthetic construct
  source 1..75: mol_type = other DNA
atgagcgcattttcttttaacaccacttatcagccaactggtgatcagcaaaaagacgcggtcgcacaaatcgac

SEQ ID NO: 390284 - DNA, 75 bp, synthetic construct
  source 1..75: mol_type = other DNA
ctccatcaggtcaataatgagctgcatgacttactggatagcctggagaatcatactcctcttgtcagaaaaaac

SEQ ID NO: 390285 - DNA, 75 bp, synthetic construct
  source 1..75: mol_type = other DNA
aacgttctttctgagtgttgtgcgctctattgcgctagagaagaagctggtgtcagtcagtgctgacctttctcc

SEQ ID NO: 390286 - DNA, 75 bp, synthetic construct
  source 1..75: mol_type = other DNA
taattaccacattgacgccgtttaccgctctgccgtcgccagtgtggcggggttgagtactgaccgcatattttt

SEQ ID NO: 390287 - DNA, 75 bp, synthetic construct
  source 1..75: mol_type = other DNA
ttgattagggcgatcgtgacacgccccgtgctgtggttgcgcgatgtgctggccgacgttgtgttaactaacctg

SEQ ID NO: 390288 - DNA, 75 bp, synthetic construct
  source 1..75: mol_type = other DNA
ggtaaacctgcaacgcaaggccgccacgcacgcagccggcgtgattcgtttcaccaaaaacgacattgatcgcgc

SEQ ID NO: 390289 - DNA, 75 bp, synthetic construct
  source 1..75: mol_type = other DNA
agacagtggggcttatcagtgacatagacagtcaggtggcggatattgcgcgtacacagggagaactgaatgcgt

SEQ ID NO: 390290 - DNA, 75 bp, synthetic construct
  source 1..75: mol_type = other DNA
tgtcagcgcgggtaataccggtgcgctgatggggctggcaaaattattactcaagccccttgaggggattgagcg

SEQ ID NO: 390291 - DNA, 75 bp, synthetic construct
  source 1..75: mol_type = other DNA
gccgctcgcctggaatctgtatacccagctggttttgagctgctggacggtggcaaaagcggaactctgcggtag

SEQ ID NO: 390292 - DNA, 75 bp, synthetic construct
  source 1..75: mol_type = other DNA
ttttgctgagcgccagcgatgtacgtatagacgaatttatcaacgatcctctgttacagcatttgccttcttccc

SEQ ID NO: 390293 - DNA, 75 bp, synthetic construct
  source 1..75: mol_type = other DNA
aagaactacgtcaactggctgaaattcagaaacagattttgctgcgacaggccagagaggaaacgcagtgctggc

SEQ ID NO: 390294 - DNA, 75 bp, synthetic construct
  source 1..75: mol_type = other DNA
atgtcagtaaaattaacacacattgtgaatgtcgtgtgtccggtaaagcgtttttacgacaataatgcccagggc

SEQ ID NO: 390295 - DNA, 75 bp, synthetic construct
  source 1..75: mol_type = other DNA
tggattggaaattcaaaacccactacggaattaaaaaattaccgtcttcgccttaagtacgccggtggcttcacc

SEQ ID NO: 390296 - DNA, 75 bp, synthetic construct
  source 1..75: mol_type = other DNA
cgagtttttccggatgatgacgctgtccttcctggccctgcgtcttaacgtctcccccgaaacggtagattcaaa

SEQ ID NO: 390297 - DNA, 75 bp, synthetic construct
  source 1..75: mol_type = other DNA
gggagaagagaggatttatgctactcaggcacctgtaagcgtcattgcggatgtaatcacagcctgggaattgga

SEQ ID NO: 390298 - DNA, 75 bp, synthetic construct
  source 1..75: mol_type = other DNA
catttcgacgtcagcgagggggatatccgctttcatgatattcctctgacgaagttacaactcgatagctggcgt

SEQ ID NO: 390299 - DNA, 75 bp, synthetic construct
  source 1..75: mol_type = other DNA
atggcgctggagccgcagatgagtaagctgatgtcgcgcctgggatgggcatggcgactggtcatgaccgggtta

SEQ ID NO: 390300 - DNA, 75 bp, synthetic construct
  source 1..75: mol_type = other DNA
tattcccctgaaggaagtgaaagagcgcattgccaccgccgttccggataaaaacgacaccgtgaaagtgtattg

SEQ ID NO: 390301 - DNA, 75 bp, synthetic construct
  source 1..75: mol_type = other DNA
agttgaccttaatagcgctgctgccgatgccggtgatggcgatcatgatcaaacgtaatggcgacgctttacatg

SEQ ID NO: 390302 - DNA, 75 bp, synthetic construct
  source 1..75: mol_type = other DNA
ccggtcagatgctgggtatttgcgggccgactggttccggcaaaagtaccctgttgtcgctcattcagcgtcatt

SEQ ID NO: 390303 - DNA, 75 bp, synthetic construct
  source 1..75: mol_type = other DNA
cgtcttatcaactggctgttgaactgcgtgaagattattaccgtcagctaagccggcagcaccctgagttttacc

SEQ ID NO: 390304 - DNA, 75 bp, synthetic construct
  source 1..75: mol_type = other DNA
cgtccgggagtttgtttacaaccccaacgttaaaaacgccctggtactcaaggcctacgacattatcagtcaccg

SEQ ID NO: 390305 - DNA, 75 bp, synthetic construct
  source 1..75: mol_type = other DNA
aggcccgcgccgtcagccggaaaagaacgttttcaccgatgaacagattgagaagctggaagaaattttccattc

SEQ ID NO: 390306 - DNA, 75 bp, synthetic construct
  source 1..75: mol_type = other DNA
gacgggcagtaccgccagatagtcactgtggaagatgcggtgcgcggcggctgcaacttgttcgacctcgaccag

SEQ ID NO: 390307 - DNA, 75 bp, synthetic construct
  source 1..75: mol_type = other DNA
gttcgtgttccagagcagtatcagcaagagcacgttcagggagccatcaatattcccctgaaggaagtgaaagag

SEQ ID NO: 390308 - DNA, 75 bp, synthetic construct
  source 1..75: mol_type = other DNA
cagaacggcgacagcgccggatgcgtggtggtggcaccgccagccgtgccaggcggtaagtttcgcattcttgag

SEQ ID NO: 390309 - DNA, 75 bp, synthetic construct
  source 1..75: mol_type = other DNA
ttcctgctgtccgggagtttgtctataaccccaatgttaaaaacgccctggtactcaaggcctacgacattatca

SEQ ID NO: 390310 - DNA, 75 bp, synthetic construct
  source 1..75: mol_type = other DNA
gtgcatgacgatattcttcgtctgccgcaaggttacgacacagaagtgggcgaacgtggcgtgatgctttccggt

SEQ ID NO: 390311 - DNA, 75 bp, synthetic construct
  source 1..75: mol_type = other DNA
gagagagcggacgcgctcaggaaaactcgaaactgcgcatgacattggatataaacccaatgttactaaccctgc

SEQ ID NO: 390312 - DNA, 75 bp, synthetic construct
  source 1..75: mol_type = other DNA
ttcgatcgcaccaccgataaaaacttgttgattgatcatttctacacttacctgcaacccaaaaccgtattcacg

SEQ ID NO: 390313 - DNA, 75 bp, synthetic construct
  source 1..75: mol_type = other DNA
gcctctggcggcgaatttatttgcgtcctctctcgtaaagatattgccgatctcaacttcagggactgggccaca

SEQ ID NO: 390314 - DNA, 75 bp, synthetic construct
  source 1..75: mol_type = other DNA
atggtccgaatggtgtgaagttcaaccagcacggaccaattcgaaactctggggaaatccaggtccagtgcgtgg

SEQ ID NO: 390315 - DNA, 75 bp, synthetic construct
  source 1..75: mol_type = other DNA
gctttcaccggctcaggccgaagaacagcgttacatcagtatccgtaataccgacatggtctgggtgccgggcaa

SEQ ID NO: 390316 - DNA, 75 bp, synthetic construct
  source 1..75: mol_type = other DNA
ctgcatttggcgacagcgatgctactcgctctcaggaagcttcgctggagaacgaatgcgtggaaaacgttagct

SEQ ID NO: 390317 - DNA, 75 bp, synthetic construct
  source 1..75: mol_type = other DNA
catcactggctaatgtcgaagatatcaggcaagaaacctatcttcagaacagcaataccgtactggtatttatga

SEQ ID NO: 390318 - DNA, 75 bp, synthetic construct
  source 1..75: mol_type = other DNA
cagcagcactaaacctcttcacaattagcaatccacacgaacctttatccaatactatcaatgaaattgcaacag

SEQ ID NO: 390319 - DNA, 75 bp, synthetic construct
  source 1..75: mol_type = other DNA
tatcccgcaggagataagcgactatatagtcctctttataatggagaaataaacgtacatggcctttcatatgca

SEQ ID NO: 390320 - DNA, 75 bp, synthetic construct
  source 1..75: mol_type = other DNA
cagcagcactagacctcttcacgattagcaatccacacgaaccgctatccaatactatcaatgaaattgcaacaa

SEQ ID NO: 390321 - DNA, 75 bp, synthetic construct
  source 1..75: mol_type = other DNA
agccataaccggctgaatgccacaatgccatttagccagcagcttcacgatgcatttgactcacctgatcgcgat

SEQ ID NO: 390322 - DNA, 75 bp, synthetic construct
  source 1..75: mol_type = other DNA
ccgatagttgaactcaattacgtgaacagtggagccgagcgtacaattattctggcgtttgagatggatctggta

SEQ ID NO: 390323 - DNA, 75 bp, synthetic construct
  source 1..75: mol_type = other DNA
ttttcggcaacttactcagccgctcttgtacgctggtggtagagagcggaaatctggccgaagtccattttccga

SEQ ID NO: 390324 - DNA, 75 bp, synthetic construct
  source 1..75: mol_type = other DNA
cgtcggaattgggatggaaacgacggacggtgtacgggtggcgattaacaacccctccggggcgaaattcacgct

SEQ ID NO: 390325 - DNA, 75 bp, synthetic construct
  source 1..75: mol_type = other DNA
tgtcaattttaatgcctggttacagaccgtaaatggacgaaatgttacatcgggtgatttcaccgccacaatgac

SEQ ID NO: 390326 - DNA, 75 bp, synthetic construct
  source 1..75: mol_type = other DNA
atgaaaacagcacacatttattcacccggttatgcgctgttagcaggcctgctgctgaccgccagcacgggggca

SEQ ID NO: 390327 - DNA, 75 bp, synthetic construct
  source 1..75: mol_type = other DNA
caggcgaaaagcggccgtgatgtgacgatcggtgaatttaccgcctctttaactgcgacatttgagtatatttaa

SEQ ID NO: 390328 - DNA, 75 bp, synthetic construct
  source 1..75: mol_type = other DNA
atgaataaatcaatgattcagtccgatggttacgtcctgttagcggggctgatattggcagtgagtagcacgtca

SEQ ID NO: 390329 - DNA, 75 bp, synthetic construct
  source 1..75: mol_type = other DNA
cagggtgccggtggtctttaagttgaaagattgcaaaggcccggcggattaccaggtcaaagtcaccctgaccgg

SEQ ID NO: 390330 - DNA, 75 bp, synthetic construct
  source 1..75: mol_type = other DNA
taacctcaattttaatgcctggttacaggcgaaaagcggtcgtgacgtaacttcaggtgacttcaccgccagcct

SEQ ID NO: 390331 - DNA, 75 bp, synthetic construct
  source 1..75: mol_type = other DNA
atgaacaaactgaagaaatatcaatgtatcagggtgcaaacccttctgttgggcggtgtgctggtgctggcgagt

SEQ ID NO: 390332 - DNA, 75 bp, synthetic construct
  source 1..75: mol_type = other DNA
tgggacacgcgctactggcgggggtgttgttcgccgccagtgggtcgttattcgcggtgaatgacaacctgcatt

SEQ ID NO: 390333 - DNA, 75 bp, synthetic construct
  source 1..75: mol_type = other DNA
atttaatggtcgcggggcagtctgcccgggtgccggtggtctttaaattgaaagattgcaaaggcccggcgaatt

SEQ ID NO: 390334 - DNA, 75 bp, synthetic construct
  source 1..75: mol_type = other DNA
tcctgacaggcctgctgcttgccgccagcggaaccacgttggcggcggacaatctgcatttttacggcaatttat

SEQ ID NO: 390335 - DNA, 75 bp, synthetic construct
  source 1..75: mol_type = other DNA
agtcacgctgagcggcaccgaagacagcggtcagccgggttttctggcagtcgatgacacctccaccgcgcaggg

SEQ ID NO: 390336 - DNA, 75 bp, synthetic construct
  source 1..75: mol_type = other DNA
tttttgatggcgagaaaattgcagaactggcagaagatgaatctggcaatattttgcgcaccgctgtacgccgtt

SEQ ID NO: 390337 - DNA, 75 bp, synthetic construct
  source 1..75: mol_type = other DNA
ttgaaaaattacgtgacctggataggcagcgcgaagcccaattgcagaaatatcggtcattgctagaagatgcta

SEQ ID NO: 390338 - DNA, 75 bp, synthetic construct
  source 1..75: mol_type = other DNA
gcgcgtcggcatccggtcagtggcagtgaaggacgaacaaccacaaaccgttctactttactggctttggtcgtc

SEQ ID NO: 390339 - DNA, 75 bp, synthetic construct
  source 1..75: mol_type = other DNA
taagccgaagggcgatttgttgtttgatatttctgaacgtgaagccggcatgctccagcaatcaatagagcagga

SEQ ID NO: 390340 - DNA, 75 bp, synthetic construct
  source 1..75: mol_type = other DNA
tgcaattgctattcttgaggctttagcaaaaacctcaggccgtgatttaccggtgattatcgatacgccattagg

SEQ ID NO: 390341 - DNA, 75 bp, synthetic construct
  source 1..75: mol_type = other DNA
gcccgtaaagaagatttacaacttagtgcgcacattaacccagagacgtttgacgtagagctgattgatgaacaa

SEQ ID NO: 390342 - DNA, 75 bp, synthetic construct
  source 1..75: mol_type = other DNA
cgtcaccattatgtcagcatagtgacaatgaaccagaaacgaaacgggaatgttccgtcgttattccagacgact

SEQ ID NO: 390343 - DNA, 75 bp, synthetic construct
  source 1..75: mol_type = other DNA
gaagagcgatcaataatctgttatccaacgccctgcgttataccccagagggacaggcaatcaccgtctcaataa

SEQ ID NO: 390344 - DNA, 75 bp, synthetic construct
  source 1..75: mol_type = other DNA
gacttttgcgcttaccaacggcaacaatgatattaatttccgggcctggatccaggcgaaaagcggtcgtgatgt

SEQ ID NO: 390345 - DNA, 75 bp, synthetic construct
  source 1..75: mol_type = other DNA
cggcggcgcaaggtgtcggaattggtatggaaaaaacgatggaacaccggtgccgattaacaataccagcggcgc

SEQ ID NO: 390346 - DNA, 75 bp, synthetic construct
  source 1..75: mol_type = other DNA
gaatgttccgtcgttattccagatgactggaaactaacgtcgcagcagcaagcctttatagagatgtttgctgaa

SEQ ID NO: 390347 - DNA, 75 bp, synthetic construct
  source 1..75: mol_type = other DNA
atgaacaaactgaagaaaaatcaacgtatcagggtgcatacccttctgttaggaggcgtgctggtgctggcaagt

SEQ ID NO: 390348 - DNA, 75 bp, synthetic construct
  source 1..75: mol_type = other DNA
ggatcgccaccatggccgcagggcattatcagttgcttgacgatggcgcgatgctgaccgacggcgcagtgctgt

SEQ ID NO: 390349 - DNA, 75 bp, synthetic construct
  source 1..75: mol_type = other DNA
ggaacgttcgaaacctttgttgaagcgggtcgtcagcactacaacaattcgctgagtggaaaatggatcctgacc

SEQ ID NO: 390350 - DNA, 75 bp, synthetic construct
  source 1..75: mol_type = other DNA
acgcggtgattcatccgtgcctgggcgttgttatgcgccagcatgaaaaagggtgggtgaaaattttcgatcagg

SEQ ID NO: 390351 - DNA, 75 bp, synthetic construct
  source 1..75: mol_type = other DNA
cctgtcgatattcagtccacctgtcttgccgcccatgccctgccgcccgagtacaaagaccgggcggaggactat

SEQ ID NO: 390352 - DNA, 75 bp, synthetic construct
  source 1..75: mol_type = other DNA
tggtatttactgcgtgaaaaacagcacccgcccgtgaattttttccgccagtatcaggtgccgatggccctggcg

SEQ ID NO: 390353 - DNA, 75 bp, synthetic construct
  source 1..75: mol_type = other DNA
gagtatcaggagcgggcagatgcctggattgactatatttgcgaacgactactgccggaactgcatcaggaaggg

SEQ ID NO: 390354 - DNA, 75 bp, synthetic construct
  source 1..75: mol_type = other DNA
cttgcctggccgtagtatcacgtaagcacatggacggatggacgccggtattcaacagcggtcagctgatgttcg

SEQ ID NO: 390355 - DNA, 75 bp, synthetic construct
  source 1..75: mol_type = other DNA
tcttactccgcttttatccactccttcacaaaacacagtcagtgcccgttcctttaaagttgagttccgccacgg

SEQ ID NO: 390356 - DNA, 75 bp, synthetic construct
  source 1..75: mol_type = other DNA
actcagaccagtgtcagtgccggctcctgcaaggtggagttccgtcacggtaacatgacgctggaaaatccatcg

SEQ ID NO: 390357 - DNA, 75 bp, synthetic construct
  source 1..75: mol_type = other DNA
gctggtcatgcttcatctggtggcgcgggtggtcgccaattcgctgggaaattttttgcctacatcccttaccag

SEQ ID NO: 390358 - DNA, 75 bp, synthetic construct
  source 1..75: mol_type = other DNA
ctcccgtttgcctgctgatggcaaaatcgacaccgtgaaattcgagcagttaaaaccggtgtttgaaaccatgct

SEQ ID NO: 390359 - DNA, 75 bp, synthetic construct
  source 1..75: mol_type = other DNA
tccctgaccgaagatgacaccgatgcgattattcatccctgtcttgcggtggtatcgcggcgtcatatggacgga

SEQ ID NO: 390360 - DNA, 75 bp, synthetic construct
  source 1..75: mol_type = other DNA
agggtaagttgctgacacccggtctggtggattgtcatacacatctggtgtatggcggccagagggcgaacgagt

SEQ ID NO: 390361 - DNA, 75 bp, synthetic construct
  source 1..75: mol_type = other DNA
aaagtggtgatgagcggcggcgcaatcgtgatgccaatcttccatgaaattatccctatcaatatgaataccctg

SEQ ID NO: 390362 - DNA, 75 bp, synthetic construct
  source 1..75: mol_type = other DNA
ctggcagaagcggaagcacagcgtgcgctgaacgatgctattaacgtactttctgacgaacaaaccagcctaaaa

SEQ ID NO: 390363 - DNA, 75 bp, synthetic construct
  source 1..75: mol_type = other DNA
aatgaaatcggcgtttcaggcggttcgctggcggcattgacttcaccattgactccatcgatacccatcgcagat

SEQ ID NO: 390364 - DNA, 75 bp, synthetic construct
  source 1..75: mol_type = other DNA
catttcccaagtatcagcagcagagatttaatgtcacgggaacaatctgatcgtgtgccggtcgtttttcaattg

SEQ ID NO: 390365 - DNA, 75 bp, synthetic construct
  source 1..75: mol_type = other DNA
tgcaaacacgggtaatgtgggggcggaaacctggcggaacaagcattatcagccgctctctcttaccgcacacag

SEQ ID NO: 390366 - DNA, 75 bp, synthetic construct
  source 1..75: mol_type = other DNA
tatgcgtgtcgatgtggtggtcgctttctttgtgcgagttaaaccgtcggtagaaggtatagccacggccgccca

SEQ ID NO: 390367 - DNA, 75 bp, synthetic construct
  source 1..75: mol_type = other DNA
gttaacgctgcaccaggtgctgcgacaggcggcgtaaaggttgccgatgttatagaaagtcaggccccggacaaa

SEQ ID NO: 390368 - DNA, 75 bp, synthetic construct
  source 1..75: mol_type = other DNA
aaccctgcagaacattttcaaatgagtttaaacttcaaatggttaaactggcttcacaaccaggagcctctgttg

SEQ ID NO: 390369 - DNA, 75 bp, synthetic construct
  source 1..75: mol_type = other DNA
ttttaattacctgaaagaaaaaatattttttattacaataaaatcatttgcaataaccaaatcatatccgcaatt

SEQ ID NO: 390370 - DNA, 75 bp, synthetic construct
  source 1..75: mol_type = other DNA
tgcaaacacggggaatgtgggggcggaaacctggcagaacaagcgttatcagccgcactctcttaccgcacacag

SEQ ID NO: 390371 - DNA, 75 bp, synthetic construct
  source 1..75: mol_type = other DNA
atggatgatattgttaattctgtgccctcctggatgtttaccgcaattattgccgtatgcattctgtttattatt

SEQ ID NO: 390372 - DNA, 75 bp, synthetic construct
  source 1..75: mol_type = other DNA
gtgaacgccgctccaggggctgcgacaggcggcgttaaagtggctgacgtgattgaaagtcaggcaccagacaaa

SEQ ID NO: 390373 - DNA, 75 bp, synthetic construct
  source 1..75: mol_type = other DNA
cgcattgctgagctaaaggctgaacgcaatgaagaggtaggtatagacgctgcctatgtattgcgacggctgact

SEQ ID NO: 390374 - DNA, 75 bp, synthetic construct
  source 1..75: mol_type = other DNA
ctcgcgtcatcgtgaattccacgccgatgcgggttcagcgaaactggttggccgtgaaaaaatgattgccgcgct

SEQ ID NO: 390375 - DNA, 75 bp, synthetic construct
  source 1..75: mol_type = other DNA
ccggtgcgcgccgtgatgcctctctggttgctgtcagcaccggtttgttgcaaaacatgagcccggatgaagccg

SEQ ID NO: 390376 - DNA, 75 bp, synthetic construct
  source 1..75: mol_type = other DNA
atgagaaatgacggtcaacaatcagggaagcctgctgccaaccatcccaaatacttcaagattgacgttcttgat

SEQ ID NO: 390377 - DNA, 75 bp, synthetic construct
  source 1..75: mol_type = other DNA
tttctcgattaacagtattgatatcgctatggaagtgatgacccgcgcgtttacctttagtgacagtagtgcctc

SEQ ID NO: 390378 - DNA, 75 bp, synthetic construct
  source 1..75: mol_type = other DNA
cggcgagctgttgattcgccagtatgaatttattcagtcttttttaggcagcgaagcggattttttatatcagga

SEQ ID NO: 390379 - DNA, 75 bp, synthetic construct
  source 1..75: mol_type = other DNA
taacgaacctggccgtaatggtcgttttcgggctggtactgagcctgacagggatacagtcaagcagcgttcagg

SEQ ID NO: 390380 - DNA, 75 bp, synthetic construct
  source 1..75: mol_type = other DNA
tagcgccgcactcctgaagaaaatcaaatggcctgataaggttaaaaacctcgaacttcttggtaagcatgtttc

SEQ ID NO: 390381 - DNA, 75 bp, synthetic construct
  source 1..75: mol_type = other DNA
ctgaaattactggcgctaacggtgggccggtacgttatgctgatatgtcagaagagttacttgaagagaaactga

SEQ ID NO: 390382 - DNA, 75 bp, synthetic construct
  source 1..75: mol_type = other DNA
ggaactggtgtttggtattctggcgagcattatcaccatgtggttctcgcgtcatcgtgaattccatgctgatgc

SEQ ID NO: 390383 - DNA, 75 bp, synthetic construct
  source 1..75: mol_type = other DNA
aggcggtaattgctcatgaaatcagccatattgctaacggtgacatggtcaccatgacgttgattcagggcgtgg

SEQ ID NO: 390384 - DNA, 75 bp, synthetic construct
  source 1..75: mol_type = other DNA
ctcgcgtcatcgtgaattccatgctgatgccggttcggcaaaactggttggtcgcgagaaaatgattgccgcgct

SEQ ID NO: 390385 - DNA, 75 bp, synthetic construct
  source 1..75: mol_type = other DNA
cattaacgtacgcggtgacagcatgtcaggaacgatcgaaccaggtgatcttctgttcgttgatatcactgttaa

SEQ ID NO: 390386 - DNA, 75 bp, synthetic construct
  source 1..75: mol_type = other DNA
caggcactgtttgtgcaggcggaaaattgtagcgcgtgtgatgcccgtctggctactctgctggccggcaaacag

SEQ ID NO: 390387 - DNA, 75 bp, synthetic construct
  source 1..75: mol_type = other DNA
aagtgggtacagcaggaatttgccagggcagaaaaagagctggcgtttcagcgggaagtagatgctgcctggaag

SEQ ID NO: 390388 - DNA, 75 bp, synthetic construct
  source 1..75: mol_type = other DNA
tactgggcgggtgtctgatgtcagcaccgctgacagccgcacagtctgtttccgggacaacccgaccggttcaga

SEQ ID NO: 390389 - DNA, 75 bp, synthetic construct
  source 1..75: mol_type = other DNA
ctcagactctggcaaaacgaagggcgtatatcacggcgtcttccggtgacaaccacttctgacgcaggcgttgaa

SEQ ID NO: 390390 - DNA, 75 bp, synthetic construct
  source 1..75: mol_type = other DNA
gagtgggggctgacagcggaagagtggcagcgttatgaaacactgaaaaaaggacggcgcggcgtgctgtctccg

SEQ ID NO: 390391 - DNA, 75 bp, synthetic construct
  source 1..75: mol_type = other DNA
ccgtaagtttgctgaaaagtgggtgaaggaagagtttgcccgtacccggaaagagcttgatttccagcgagaggt

SEQ ID NO: 390392 - DNA, 75 bp, synthetic construct
  source 1..75: mol_type = other DNA
gtgagtatccggttacaacaggtgaaggcgttgttgcagggcattcgtgacgatgacgcgctgtacgattccctg

SEQ ID NO: 390393 - DNA, 75 bp, synthetic construct
  source 1..75: mol_type = other DNA
tgaatcatgatgccggtcgctggctgcgttttggtgaaggcagaatgccggttgtactgcagcagggagcggacg

SEQ ID NO: 390394 - DNA, 75 bp, synthetic construct
  source 1..75: mol_type = other DNA
gtggcagacatcgaaacgagtatcagaggtgtctatgagtcactcatccgccccgaaagggctactggagctgtc

SEQ ID NO: 390395 - DNA, 75 bp, synthetic construct
  source 1..75: mol_type = other DNA
tgatgcggcatggcagcgtctttatcccggaaagctgccggtcagtatgggcaataccggtgttctgaccgggga

SEQ ID NO: 390396 - DNA, 75 bp, synthetic construct
  source 1..75: mol_type = other DNA
atgagactgaaatccctgttactggtgatgctgatacctgcactggcgcaggctgcagaccagaacacaaccgtg

SEQ ID NO: 390397 - DNA, 75 bp, synthetic construct
  source 1..75: mol_type = other DNA
aaggaagagtatgcccgtacagagaaggagctggcttttcagcgggaggttgatgcggcatggcagcgtctttat

SEQ ID NO: 390398 - DNA, 75 bp, synthetic construct
  source 1..75: mol_type = other DNA
atgaagtgactggcgctgatggaggaccagtcagaacagaaattaccaacttaacgccggagcaggctgcagagg

SEQ ID NO: 390399 - DNA, 75 bp, synthetic construct
  source 1..75: mol_type = other DNA
aatgaaattggcgtttcaggcggctcgctggcggcattgacttcacccttaacctcaacaactcccgtcgcagaa

SEQ ID NO: 390400 - DNA, 75 bp, synthetic construct
  source 1..75: mol_type = other DNA
cctcctggatgtttactgcaattattgccgtatgcgttctgttgattattggaattattttcgccaggctctatc

SEQ ID NO: 390401 - DNA, 75 bp, synthetic construct
  source 1..75: mol_type = other DNA
gatgtagaagttgcggtgcgtgaaaaaaatcgcgatgcgctatcgcgcaagctggagattgaacagcaagaagcg

SEQ ID NO: 390402 - DNA, 75 bp, synthetic construct
  source 1..75: mol_type = other DNA
acgctgggcatctgcgccgtgggttttctggtggtagccaacaactgcatcgccacctactccgaaattcagggc

SEQ ID NO: 390403 - DNA, 75 bp, synthetic construct
  source 1..75: mol_type = other DNA
tgctgtggttcccgaccctgcctgcatatgccgatctgccagagatggaagatccctcacgcggtcagggcgacg

SEQ ID NO: 390404 - DNA, 75 bp, synthetic construct
  source 1..75: mol_type = other DNA
gcgcaatggcaggcgtcggcgcggttctgctggtgatcaccatctggttgctcaaccaggcgtcggacatcctgt

SEQ ID NO: 390405 - DNA, 75 bp, synthetic construct
  source 1..75: mol_type = other DNA
gttgaattattacctgttgagataacgcctgatgagcagaaagagcctatggcggctcttactccgcttttatcc

SEQ ID NO: 390406 - DNA, 75 bp, synthetic construct
  source 1..75: mol_type = other DNA
ctcaggctctggcagaaagaagggcgtgtttcgcggtgtcttccaataacgacctcttctgacactggcgttgaa

SEQ ID NO: 390407 - DNA, 75 bp, synthetic construct
  source 1..75: mol_type = other DNA
tgccattgctattcttgaggcgctggcaaaaacttctggtcgtgatttgccggtgattattgatacgccattagg

SEQ ID NO: 390408 - DNA, 75 bp, synthetic construct
  source 1..75: mol_type = other DNA
agacgcgaattctggctgaacgacagattcaggaaacagaaatcgaccgcgaacaggccgtccgctcaagaaaag

SEQ ID NO: 390409 - DNA, 75 bp, synthetic construct
  source 1..75: mol_type = other DNA
caagaagcccgaaacattccccctcatcgtcaaagccgttttctggcgtccagaggtttactcgcagaactgatg

SEQ ID NO: 390410 - DNA, 75 bp, synthetic construct
  source 1..75: mol_type = other DNA
aatgaatcgctatggatcagtaaacaaaacgatcctaacgaagcgcgggcgcagctcatcacgctgcgccgaagc

SEQ ID NO: 390411 - DNA, 75 bp, synthetic construct
  source 1..75: mol_type = other DNA
ccgacaaaatgaccagcgccgatatgctgcgtatgggtgaagcgctgaatgcgaaagtggttatcccgttccacc

SEQ ID NO: 390412 - DNA, 75 bp, synthetic construct
  source 1..75: mol_type = other DNA
gaaaccggggaaatcctgtatccgggcgatgagcggtatgacgcactttgtgagcagttcagccgggcgtttgat

SEQ ID NO: 390413 - DNA, 75 bp, synthetic construct
  source 1..75: mol_type = other DNA
tggcgaacagaacgaagcagaatttcaggctgagcaggcagaatcgtccggcagctctgtaccagcgacagcggt

SEQ ID NO: 390414 - DNA, 75 bp, synthetic construct
  source 1..75: mol_type = other DNA
tcctccggtacggcttatatcagcgcccacgaaaaagcattcaccacttacgccaacagcgaatggaagaaagtg

SEQ ID NO: 390415 - DNA, 75 bp, synthetic construct
  source 1..75: mol_type = other DNA
tgcagctggttgcaccgctggtcatttttgtacccgtatttgcctttctcggcgtcaatggcgtaccgcaggccg

SEQ ID NO: 390416 - DNA, 75 bp, synthetic construct
  source 1..75: mol_type = other DNA
agtgtttttaatcttctacatcgtttgtgtgctgctgacctggctggtttatggtcggcggaagttcagccaaaa

SEQ ID NO: 390417 - DNA, 75 bp, synthetic construct
  source 1..75: mol_type = other DNA
gcaatgcgacaggatgaacgcaatctggtgagtcatcggtcacaccaggatgagcgcgaaccgctggatgatatg

SEQ ID NO: 390418 - DNA, 75 bp, synthetic construct
  source 1..75: mol_type = other DNA
cgatgtagttaaagtgaaagatatagaaattcatgcacttgacgcatttgaccgtactgcattgatcaccctgcc

SEQ ID NO: 390419 - DNA, 75 bp, synthetic construct
  source 1..75: mol_type = other DNA
gtggttatcccgttccaccacgatatctggtcaaacttccaggccgatccgcaagagatccgcgtgctgtgggag

SEQ ID NO: 390420 - DNA, 75 bp, synthetic construct
  source 1..75: mol_type = other DNA
gtccttgatccgtttgccattcgccagatcgacgctgtgctggcgactcacgatcacaacgatcatatcgacgtg

SEQ ID NO: 390421 - DNA, 75 bp, synthetic construct
  source 1..75: mol_type = other DNA
ggcggtgcgtcgaaggtttatcagtacaccaccaatccggatatttcttctggcgatggcattgctatggcgtga

SEQ ID NO: 390422 - DNA, 75 bp, synthetic construct
  source 1..75: mol_type = other DNA
acgcgacgggttgttggcgcgtgggtatggaaccgaaataaagaaacggtggaaacctgccacgcaaaagcagtg

SEQ ID NO: 390423 - DNA, 75 bp, synthetic construct
  source 1..75: mol_type = other DNA
ggcggtattgccgccgtgtttgatgaaactgacagcattgactcgcatgtggaagacacattgattgccggggct

SEQ ID NO: 390424 - DNA, 75 bp, synthetic construct
  source 1..75: mol_type = other DNA
agactatcacttatttaagtgatactggttgtctggagattcagggggccagtctagtccgggaaaaaccactgt

SEQ ID NO: 390425 - DNA, 75 bp, synthetic construct
  source 1..75: mol_type = other DNA
gatgcactggattatctggcggccctgccactgaaagagcgcccggcattgatgggagcggcggcaaaacgtggt

SEQ ID NO: 390426 - DNA, 75 bp, synthetic construct
  source 1..75: mol_type = other DNA
cgtattgagaaagaggcggggcgctgctgcggaatgcatttcgagctgtatcaggcccgtgtgcttggcgatgcg

SEQ ID NO: 390427 - DNA, 75 bp, synthetic construct
  source 1..75: mol_type = other DNA
agccgtcaacctgaatgaaggcacgctgacgctgaacaacagtaccgtcaccacggatgtcatcgctcagcgcgg

SEQ ID NO: 390428 - DNA, 75 bp, synthetic construct
  source 1..75: mol_type = other DNA
tgggtgaatacatccggtaatacctatgatgtttatgttgaaataggtaattacgccacaggtgttaatattcag

SEQ ID NO: 390429 - DNA, 75 bp, synthetic construct
  source 1..75: mol_type = other DNA
gtccccctgtatgcctccatgctgacacaggcaatggactatgaccggattctggcaggctcccgcagccatcag

SEQ ID NO: 390430 - DNA, 75 bp, synthetic construct
  source 1..75: mol_type = other DNA
ccgtatccatgggaaatggcggcgtactgctggccgattccggagccgctgtcagtggtacccggagcgacggaa

SEQ ID NO: 390431 - DNA, 75 bp, synthetic construct
  source 1..75: mol_type = other DNA
atgaaagcgtcatcggacaataacgacttccgcgcccggggctggggctggctgggctcactggaaaccggtctg

SEQ ID NO: 390432 - DNA, 75 bp, synthetic construct
  source 1..75: mol_type = other DNA
gccggtttccgtctgggcagccacaacgatatgagctttggtgaaggcacctcatcccgtgacaccctgcgcgac

SEQ ID NO: 390433 - DNA, 75 bp, synthetic construct
  source 1..75: mol_type = other DNA
gtataggcgtttgtatcttgctcaatcgcttatggaaggggtaaatttaagcacttacgaagatgaaattcgttg

SEQ ID NO: 390434 - DNA, 75 bp, synthetic construct
  source 1..75: mol_type = other DNA
gttcacaaatgtcggaaacagtaacctcggggtggcaaccaccggacagggtatccgggttgtggatgcacagaa

SEQ ID NO: 390435 - DNA, 75 bp, synthetic construct
  source 1..75: mol_type = other DNA
catctcggtcacgataacaacggcggtattgcccgtggggccacgccggaaagcagcggcagctatggcttcgtc

SEQ ID NO: 390436 - DNA, 75 bp, synthetic construct
  source 1..75: mol_type = other DNA
tcaccctgggcgttcaggctggttatgaccacagcgtcagcggcagcagcgctgaaggctataacggtcaggcca

SEQ ID NO: 390437 - DNA, 75 bp, synthetic construct
  source 1..75: mol_type = other DNA
acgacttccgcgcccggggctggggctggctgggttcactggaaaccggtctgcccttcagtatcactgacaacc

SEQ ID NO: 390438 - DNA, 75 bp, synthetic construct
  source 1..75: mol_type = other DNA
gtcaccacagatgtcatcgctcagcgcggtacagccctgaagctgaccggcagcacagtgctgaacggtgccatt

SEQ ID NO: 390439 - DNA, 75 bp, synthetic construct
  source 1..75: mol_type = other DNA
gtgcgtgaactgccggtgaactggtgggtacagccttctgttatccgcaccttcagctcccggggagacatgagc

SEQ ID NO: 390440 - DNA, 75 bp, synthetic construct
  source 1..75: mol_type = other DNA
agctactgattaagccaggatgtgattcgaccgaagaggaaggcgatgcctggtatctacgtccgggagacgtgg

SEQ ID NO: 390441 - DNA, 75 bp, synthetic construct
  source 1..75: mol_type = other DNA
agctataatgaacgcgttgctgagatatcctcccgtttcctcggaacgccttaccaggcgcatacactgattgga

SEQ ID NO: 390442 - DNA, 75 bp, synthetic construct
  source 1..75: mol_type = other DNA
tttcattttatagctgcgtgggattcgctgagcctcagcaggcacgaagcgactattctattgaagaaagtcagg

SEQ ID NO: 390443 - DNA, 75 bp, synthetic construct
  source 1..75: mol_type = other DNA
ccacgcttaccctttccgggaaaacggtgaataacgataccctgaccatccgtgaaggtgatgcactcctgcagg

SEQ ID NO: 390444 - DNA, 75 bp, synthetic construct
  source 1..75: mol_type = other DNA
ggcggagaagcgtctgatgtcacccagaacacgggcggtgcactggttaccagtacagctgcaaccgtcaccggc

SEQ ID NO: 390445 - DNA, 75 bp, synthetic construct
  source 1..75: mol_type = other DNA
gccacacgtcagaaacttccgtcagccggacctccggcactgtaaccctttacctgccggtatccacgtttgtgg

SEQ ID NO: 390446 - DNA, 75 bp, synthetic construct
  source 1..75: mol_type = other DNA
acatgtgcgtgccggtttccgtctgggcagccaccacgatatgacctttggtaaaggcacctcatcccgtgacac

SEQ ID NO: 390447 - DNA, 75 bp, synthetic construct
  source 1..75: mol_type = other DNA
ggtggcagtgccacggatacggttatcagtgccggtggaggacagaatctgcgcgggcaggcttacggtactgtc

SEQ ID NO: 390448 - DNA, 75 bp, synthetic construct
  source 1..75: mol_type = other DNA
atcgatcagaatgctctggagatcattttcgccgccggtatacaacaacgggccgcgaccaatatgttaatcaaa

SEQ ID NO: 390449 - DNA, 75 bp, synthetic construct
  source 1..75: mol_type = other DNA
cgtgaacggcggaacactgacaaatcatgacaaccagattgtcttcggtacggccaacggaatgaccatcagtac

SEQ ID NO: 390450 - DNA, 75 bp, synthetic construct
  source 1..75: mol_type = other DNA
cggttatgtgaagttcgggcatggcagtgcacaacatgtgcgtgccggcttccgtctgggcagccacaacgatat

SEQ ID NO: 390451 - DNA, 75 bp, synthetic construct
  source 1..75: mol_type = other DNA
gctgataatgtcgtactggaaaatggcggacgcctggatgtgctgaccggacacacagccactaatacccgtgtg

SEQ ID NO: 390452 - DNA, 75 bp, synthetic construct
  source 1..75: mol_type = other DNA
ttccgtctgggcagccacaacgatatgacctttggcgaaggcacctcatcccgtgacactctgcgcgacagtaca

SEQ ID NO: 390453 - DNA, 75 bp, synthetic construct
  source 1..75: mol_type = other DNA
actgacaacctgatgctggagccacggctgcagtacacctggcaggggctttcgctggatgacggtaaggacaac

SEQ ID NO: 390454 - DNA, 75 bp, synthetic construct
  source 1..75: mol_type = other DNA
agaccggtgtaaatggtgaaaacaacagcgtccgtctcagcattcagggcggccatctcggtcacgataacaacg

SEQ ID NO: 390455 - DNA, 75 bp, synthetic construct
  source 1..75: mol_type = other DNA
agaaaatggtgataccgggcagtttgttcgcggaaatgccgtacgtaccaccatcaataaaaatggtcgtcagat

SEQ ID NO: 390456 - DNA, 75 bp, synthetic construct
  source 1..75: mol_type = other DNA
aaatatcaccctgggcgttcaggccggttatgcccacagtgtcagcggcaacagcgccgaaggctataacggtca

SEQ ID NO: 390457 - DNA, 75 bp, synthetic construct
  source 1..75: mol_type = other DNA
aaatatcaccctgggcgttcaggccggttatgtctacagcgtcagcggcagcagcgctgaaggttataacggcca

SEQ ID NO: 390458 - DNA, 75 bp, synthetic construct
  source 1..75: mol_type = other DNA
gcggtacagccctgaagctgaccggcagcactgtgctgaacggggatgcggacgatttcctggactctcaggaga

SEQ ID NO: 390459 - DNA, 75 bp, synthetic construct
  source 1..75: mol_type = other DNA
taaagtgaatgtgacaattaacaccaccagcgtcgatactaatcacgccgaacgcgataaacatcttcgcagtgc

SEQ ID NO: 390460 - DNA, 75 bp, synthetic construct
  source 1..75: mol_type = other DNA
gtggtggcctccgaactggcccgctcacggggaaaacgcgccggtgtggcggttgcgctgtctcttgctgctgtc

SEQ ID NO: 390461 - DNA, 75 bp, synthetic construct
  source 1..75: mol_type = other DNA
cctcacagaatggcacgtcactggacctgcaggccggactggaagcccgtgtccgggaaaatatcaccctgggcg

SEQ ID NO: 390462 - DNA, 75 bp, synthetic construct
  source 1..75: mol_type = other DNA
cactggacctgcaggccggactggaagcccgtgtccgggaaaatatcaccctgggcgttcagggcggttatgccc

SEQ ID NO: 390463 - DNA, 75 bp, synthetic construct
  source 1..75: mol_type = other DNA
gaacccgtcacagcatgaaagcgtcatcggacaataacgacttccgcgcccggggctggggctggctgggctcac

SEQ ID NO: 390464 - DNA, 75 bp, synthetic construct
  source 1..75: mol_type = other DNA
caacaggaaccatcatcaacaccggcgcagaaggcggcccggattctgacaactcgtacacggtcagaaggtcca

SEQ ID NO: 390465 - DNA, 75 bp, synthetic construct
  source 1..75: mol_type = other DNA
tgcagaagtccccctgtatgcctccatgctgacacaggcaatggactatgaccggattgtggcaggctcccgcag

SEQ ID NO: 390466 - DNA, 75 bp, synthetic construct
  source 1..75: mol_type = other DNA
ggaaatccgtcagggcttgcagaaaaaaccgcaggagagcggaatccaggccatcgcggaagccgtgcgcaaacg

SEQ ID NO: 390467 - DNA, 75 bp, synthetic construct
  source 1..75: mol_type = other DNA
ggcgttcaggccggttatgccaacagtgtcagcggcaacagcgctgaaggctataacggtcaggccacgctgaat

SEQ ID NO: 390468 - DNA, 75 bp, synthetic construct
  source 1..75: mol_type = other DNA
ggttatgtccacagcgtcagcggcagcagcgctgaaggctataacggtcaggccacgctgaatgtgaccttctga

SEQ ID NO: 390469 - DNA, 75 bp, synthetic construct
  source 1..75: mol_type = other DNA
ttcaggccggttatgcccacagcgtcagcggcagcagcgctgaaggctataacggtcaggccacgctgaatgtga

SEQ ID NO: 390470 - DNA, 75 bp, synthetic construct
  source 1..75: mol_type = other DNA
tggtttatgccggcggcgaccagactgtacatggctacgcactggataccacactgaacggcggtaaccagtatg

SEQ ID NO: 390471 - DNA, 75 bp, synthetic construct
  source 1..75: mol_type = other DNA
agttcagtattgatggcatatccggtcaggccagcggcctgctgctggaaaatggcggcagctttacggttaatg

SEQ ID NO: 390472 - DNA, 75 bp, synthetic construct
  source 1..75: mol_type = other DNA
tggaaaaatttgaaagccagagaattcataaaacggttgatgaactggcggcaacgattgataaagaattgaatc

SEQ ID NO: 390473 - DNA, 75 bp, synthetic construct
  source 1..75: mol_type = other DNA
accgttccatgtggttgcctggccggaacaggatcaagagcgtaacgcctttgccatcaaaattcccgcgctgct

SEQ ID NO: 390474 - DNA, 75 bp, synthetic construct
  source 1..75: mol_type = other DNA
gcagaccagctataagtggcgggaactgaagcagcgtcatgtgctggggtggggcaatggttatacgtgggtgaa

SEQ ID NO: 390475 - DNA, 75 bp, synthetic construct
  source 1..75: mol_type = other DNA
gtgagcctctggaaaatccctcggttccggtaaccggagaggccgctgagacggataatatttttgcccgggatg

SEQ ID NO: 390476 - DNA, 75 bp, synthetic construct
  source 1..75: mol_type = other DNA
gactattggtgttaatgatggccttggggcaaaagtgtatggatggtgcggtaacagcaaaaaaaaggcgctaaa

SEQ ID NO: 390477 - DNA, 75 bp, synthetic construct
  source 1..75: mol_type = other DNA
aggacttaatcagatattcaaatttcacaaccctaaagcccagaatgaatgtggctgtggcgaaagctttggggt

SEQ ID NO: 390478 - DNA, 75 bp, synthetic construct
  source 1..75: mol_type = other DNA
ctgctgatgcaggagatttcgcaaggcaaccgcgagccgcatgtactgcaagcatttcatgagctggaaaacgat

SEQ ID NO: 390479 - DNA, 75 bp, synthetic construct
  source 1..75: mol_type = other DNA
cttcagcgatttgttttatgtcaccgcaagccgggatctgggatttggcgggcgtcataaaagtacccacagtta

SEQ ID NO: 390480 - DNA, 75 bp, synthetic construct
  source 1..75: mol_type = other DNA
gtgactggcactattatgcgttcgctattggcctgattttcattcttaacggtgtggtggggttgctgggatttg

SEQ ID NO: 390481 - DNA, 75 bp, synthetic construct
  source 1..75: mol_type = other DNA
atggaatccgtgattcttaccgttgacggcaaattgtgggaaggctggacggaaatgtccgtcagccgttccctg

SEQ ID NO: 390482 - DNA, 75 bp, synthetic construct
  source 1..75: mol_type = other DNA
cagcaaacgcttgattttcttaagtccggcattgccacgcgtaaccctgagagatcccctcataatttccccaaa

SEQ ID NO: 390483 - DNA, 75 bp, synthetic construct
  source 1..75: mol_type = other DNA
tcagaaatacacagaaagcttcttcagcggtaatgcccgtccggcggggatagtatccgttaaaagcggactcaa

SEQ ID NO: 390484 - DNA, 75 bp, synthetic construct
  source 1..75: mol_type = other DNA
gccgatcacgagtgaatcggctgaaaccgataacgtgtttgcccgagacgtatttgtcagcccgcaaacggcgat

SEQ ID NO: 390485 - DNA, 75 bp, synthetic construct
  source 1..75: mol_type = other DNA
tgtggagcaggcgtatatccgtgaggttgtgaggttgaatcctggcaaagtctgtatgctcgatcacgatggggt

SEQ ID NO: 390486 - DNA, 75 bp, synthetic construct
  source 1..75: mol_type = other DNA
tgatattacggcgcgagctgaccaggaaggctggaaccctgggttcacggaaaaaatggttggatgggcaaaaaa

SEQ ID NO: 390487 - DNA, 75 bp, synthetic construct
  source 1..75: mol_type = other DNA
atgcaaattaaggtcatatatagccttatcgataacatggttaattttaaagataagaatatgcctgctgtaata

SEQ ID NO: 390488 - DNA, 75 bp, synthetic construct
  source 1..75: mol_type = other DNA
gatgcccgcgagaactttgttcagggtgtgcagaacaccgttgcggaagacttatccaaaaacggtctggagctt

SEQ ID NO: 390489 - DNA, 75 bp, synthetic construct
  source 1..75: mol_type = other DNA
gtgcttctgttgcccgtatcgcccgagaacacgataccaatgataaccttctgtttaaatggctcagactctggc

SEQ ID NO: 390490 - DNA, 75 bp, synthetic construct
  source 1..75: mol_type = other DNA
gggatgggcaaaaaaaatggagtctggtgaacgtattgtgattaaaaacccagaatacttttcgtcgtacatgca

SEQ ID NO: 390491 - DNA, 75 bp, synthetic construct
  source 1..75: mol_type = other DNA
gcgcgagctgaccaggaaggctggaacccggggttcacggaaaaaatggttggatgggcaaaaaaatggagtctg

SEQ ID NO: 390492 - DNA, 75 bp, synthetic construct
  source 1..75: mol_type = other DNA
ctgttcaaatggctcaggctctggcagaatgaagggcgtatatcgcggcgtcttccggtaacaacctcttctgac

SEQ ID NO: 390493 - DNA, 75 bp, synthetic construct
  source 1..75: mol_type = other DNA
gagcctctgttgcccgtattgcccgggaacacgatatcaatgataacctgctgttcaaatggctcaggctctggc

SEQ ID NO: 390494 - DNA, 75 bp, synthetic construct
  source 1..75: mol_type = other DNA
ggtgttgattactgcgtagacacttctatctatgcggggatgatggaacatacagggctgtcccggaagcagtgc

SEQ ID NO: 390495 - DNA, 75 bp, synthetic construct
  source 1..75: mol_type = other DNA
agtggcggtgcaattgttatgcccatttttcacgaaacaattcccgtcaacatgaacaccctgaagctggaagtc

SEQ ID NO: 390496 - DNA, 75 bp, synthetic construct
  source 1..75: mol_type = other DNA
atgattaaactgaccttacaaccaagtgcttctgttgcccgtatcgcccgagaacacgataccaatgataacctt

SEQ ID NO: 390497 - DNA, 75 bp, synthetic construct
  source 1..75: mol_type = other DNA
ccgcggtaaaacagcaacaaccgacataagtggcggaaatctcgctgaacaggcagtaaccgccgctctggctta

SEQ ID NO: 390498 - DNA, 75 bp, synthetic construct
  source 1..75: mol_type = other DNA
tatttgcgtctgtcgttctggaacagggtgaaacggggtttgaactgctagaccgtctggcaaaacagcgaggtg

SEQ ID NO: 390499 - DNA, 75 bp, synthetic construct
  source 1..75: mol_type = other DNA
gggaaaagatgcagaaaccaactataagctgggtacgcagcttccttatctcttcatcatcaaccggttagcgca

SEQ ID NO: 390500 - DNA, 75 bp, synthetic construct
  source 1..75: mol_type = other DNA
ggaaaatgaaatccttaaagaagccgttgaatatgggcgtgcaaaaaagtggatagcgcacgcgcccttattgcc

SEQ ID NO: 390501 - DNA, 75 bp, synthetic construct
  source 1..75: mol_type = other DNA
cacagcaaagtaagccaacgcaagcagagcaatccatggctgattatgaaagcagtataatgcttgaagtacctt

SEQ ID NO: 390502 - DNA, 75 bp, synthetic construct
  source 1..75: mol_type = other DNA
agtaataaatgaatcaggagtaaaatatgatgtaattcactttggcgcttgccgagtaaatagagaggagagata

SEQ ID NO: 390503 - DNA, 75 bp, synthetic construct
  source 1..75: mol_type = other DNA
atgacctaagctttctggcgaaagcgcgcaatatacctcaatcaaaattagaagaagaaatgaaatcacaagcta

SEQ ID NO: 390504 - DNA, 75 bp, synthetic construct
  source 1..75: mol_type = other DNA
tttgacgcccgtcatcactcaggaggtgggcgaggcaatgaccatcatcggtctggtttccgccggtctgggtgt

SEQ ID NO: 390505 - DNA, 75 bp, synthetic construct
  source 1..75: mol_type = other DNA
atgagcactcttacacgctctcaggtcgccgcgaatatacgcgatagcctactaagtggcaggaagcttacccca

SEQ ID NO: 390506 - DNA, 75 bp, synthetic construct
  source 1..75: mol_type = other DNA
cacgcgcataattttcggctgtcacgctgtccggctgcgtggcctgttcgtcagtctgctggctgattccaccag

SEQ ID NO: 390507 - DNA, 75 bp, synthetic construct
  source 1..75: mol_type = other DNA
tggtatctacgtccgggagacgtggttcatcagcctgagttacgtcagccggggaatcattatctggtctataac

SEQ ID NO: 390508 - DNA, 75 bp, synthetic construct
  source 1..75: mol_type = other DNA
gcgtctgttacaggacgtggcgcgtgaggcgttaggcgatcaaattccgctggcggttatctctggcccaacgtt

SEQ ID NO: 390509 - DNA, 75 bp, synthetic construct
  source 1..75: mol_type = other DNA
ccgatcaaacctttgctgatgacctccagcaactgttgcactgtggcaaaagtttccgtgtttacagcaacccgg

SEQ ID NO: 390510 - DNA, 75 bp, synthetic construct
  source 1..75: mol_type = other DNA
tcgccgcgaatatacgcgatagcctactaagtggcaggaagcttaccccaaaggagtttgacgacatattaagga

SEQ ID NO: 390511 - DNA, 75 bp, synthetic construct
  source 1..75: mol_type = other DNA
ttgagccaaacaggaaaagcaacacaacttgtcattatgtcgcatggtggatggaaagagatctcccatccacaa

SEQ ID NO: 390512 - DNA, 75 bp, synthetic construct
  source 1..75: mol_type = other DNA
gccgccttatattgcctttgtctgtccggtaaaaaaggcggctcttcttgagcagcggctgcggcaggatgcgga

SEQ ID NO: 390513 - DNA, 75 bp, synthetic construct
  source 1..75: mol_type = other DNA
gccgccttatattgcctttgtctgtccggtaaaaatggctgcccttcttgaacggcgactgcggcaggatgctga

SEQ ID NO: 390514 - DNA, 75 bp, synthetic construct
  source 1..75: mol_type = other DNA
aagctggccgcccgctttgattatgtgtttgttgatacaccaggcatgaaatctccggcgttcgttaaagctctg

SEQ ID NO: 390515 - DNA, 75 bp, synthetic construct
  source 1..75: mol_type = other DNA
gggcaaccctgcacggtcaggctgggcgcggataccgtgctgacggggtatatcgatgattttatccccagctat

SEQ ID NO: 390516 - DNA, 75 bp, synthetic construct
  source 1..75: mol_type = other DNA
atcgaaaaagttcatttaatttgtcttggtaggaatgaaggtatagcaaaagcacaaaatattgggattcgatat

SEQ ID NO: 390517 - DNA, 75 bp, synthetic construct
  source 1..75: mol_type = other DNA
gcggcgctggcaacttacaccgtatttatggatttatcgcttggcgtgactggaccactggctgggctggtgatg

SEQ ID NO: 390518 - DNA, 75 bp, synthetic construct
  source 1..75: mol_type = other DNA
gatgccttgaaattctgggttcctgctgatgagatttcaattctttcagctggggagtattcaggaaaactttat

SEQ ID NO: 390519 - DNA, 75 bp, synthetic construct
  source 1..75: mol_type = other DNA
tatctgtctttataatactggccgtgattatatcgatgccatactggagaggaaagataagaaaacactttgact

SEQ ID NO: 390520 - DNA, 75 bp, synthetic construct
  source 1..75: mol_type = other DNA
atgacaaacctgacactggatgtaaatattatcgatttcccatcaatccctgtggcgatgttgccgcaccgctgt

SEQ ID NO: 390521 - DNA, 75 bp, synthetic construct
  source 1..75: mol_type = other DNA
ctgcctttgtcacgcaacacgccgctctgcttgacctaccggattgcattgccgacgcctttaacaaaggcttaa

SEQ ID NO: 390522 - DNA, 75 bp, synthetic construct
  source 1..75: mol_type = other DNA
tgattcttttgaatggtgctcctaatataggagaagctttatatatatctggattttcctttccttcaaagaata

SEQ ID NO: 390523 - DNA, 75 bp, synthetic construct
  source 1..75: mol_type = other DNA
attgtttttatggggtttgtttttatgtggattgtatccggaatgtttgctcttcagcaacaaattagtcaggct

SEQ ID NO: 390524 - DNA, 75 bp, synthetic construct
  source 1..75: mol_type = other DNA
ggcagcgattacatgcaaaaggcgttttctcagaacggggataacatgattaaacgcctgggggacgggttttac

SEQ ID NO: 390525 - DNA, 75 bp, synthetic construct
  source 1..75: mol_type = other DNA
taactggcacctctaaaggtaaaggtttcgcaggtaccgttaagcgctggaacttccgtccccaggacgctactc

SEQ ID NO: 390526 - DNA, 75 bp, synthetic construct
  source 1..75: mol_type = other DNA
aaaagaagagaaaggcagcaaaaacgataaaatacaccagtttttatcagaggttggagttaaggctcttagaac

SEQ ID NO: 390527 - DNA, 75 bp, synthetic construct
  source 1..75: mol_type = other DNA
ggcaaaccgtgacgtgaatctggtatcagcagaaaacacgtcaaagctggaaggaaagaacacatccagtggtgg

SEQ ID NO: 390528 - DNA, 75 bp, synthetic construct
  source 1..75: mol_type = other DNA
acctctcagtacactccgcccactgtaattcagaccatcacgctgaagccgggagaactcaccagccacggacag

SEQ ID NO: 390529 - DNA, 75 bp, synthetic construct
  source 1..75: mol_type = other DNA
aaggtatggcgactaatgcagcaattggtatcagcgtaaactcagctgctcagcttgctggaaaagatcctttca

SEQ ID NO: 390530 - DNA, 75 bp, synthetic construct
  source 1..75: mol_type = other DNA
ctgaccgacatgaaccagacgatggcgagatcaattatccgtggctgtttcgcctgttcgataaggtgggatatc

SEQ ID NO: 390531 - DNA, 75 bp, synthetic construct
  source 1..75: mol_type = other DNA
acggttgcttccttaaccgcgtcattcgtagccagattgagatgccgatagatgacaacgtcgtgcttaacaaag

SEQ ID NO: 390532 - DNA, 75 bp, synthetic construct
  source 1..75: mol_type = other DNA
tttcgcaggtaccgttaagcgctggaacttccgtacccaggacgctactcacggtaactccttgtctcaccgcgt

SEQ ID NO: 390533 - DNA, 75 bp, synthetic construct
  source 1..75: mol_type = other DNA
taagcttcttggggtcgcagcgatgagtgagacaagagaagaatacgaaaaaggaatagaaaaggtttttggaag

SEQ ID NO: 390534 - DNA, 75 bp, synthetic construct
  source 1..75: mol_type = other DNA
tattggcctgacggccggtatgttagctggctctatgacgtcgacaccggttctggtcggtgctggcgatacact

SEQ ID NO: 390535 - DNA, 75 bp, synthetic construct
  source 1..75: mol_type = other DNA
caagtccatgtgatggcaggcgtcgtgcccgctggcgaagatgctgaacggtaccgggcagtatttatcgataat

SEQ ID NO: 390536 - DNA, 75 bp, synthetic construct
  source 1..75: mol_type = other DNA
ctggcaacggttgctgccggcctggccggtggtctggtgggagactcgggggcttcagcggtagccggcgcacag

SEQ ID NO: 390537 - DNA, 75 bp, synthetic construct
  source 1..75: mol_type = other DNA
ggcagccaggtgtcatgggagtggcctctgtacgagaaaatcgcacaggcatttaagcaggctgccgcagagctg

SEQ ID NO: 390538 - DNA, 75 bp, synthetic construct
  source 1..75: mol_type = other DNA
cgcgcgctcaccctgccgcaccatcgcacgcttcggcgttgatgtctggcgtaatggtcaaaatcggtattttcg

SEQ ID NO: 390539 - DNA, 75 bp, synthetic construct
  source 1..75: mol_type = other DNA
tctgcgcacgaaagagcgccagaaacaactggtcgcggaagggaaaagccagaccatgaacagccgtcacctgac

SEQ ID NO: 390540 - DNA, 75 bp, synthetic construct
  source 1..75: mol_type = other DNA
atgagtcaaacatcaaccttgaaaggccagtgcattgctgaattcctcggaaccgggttgctgatttttttcggt

SEQ ID NO: 390541 - DNA, 75 bp, synthetic construct
  source 1..75: mol_type = other DNA
tatcgcaaactgattggacgccatttgccgtgcgatacctgtgttgtggaagagaaagagaccacgacaccttca

SEQ ID NO: 390542 - DNA, 75 bp, synthetic construct
  source 1..75: mol_type = other DNA
ttctctacttaccctaatcctcatatcaattttgtgcaggctttcgcagttgagatggtgattaccgctattctg

SEQ ID NO: 390543 - DNA, 75 bp, synthetic construct
  source 1..75: mol_type = other DNA
gccgcaggggctgccaccggcgaggtggtgggaatgatagccacacagatgtacggtaagccggtgagtgaactg

SEQ ID NO: 390544 - DNA, 75 bp, synthetic construct
  source 1..75: mol_type = other DNA
ctgccgggaagcgtggataaccgggaagggctgcttgcggcaaatggcgcggtgcgcctggatgcactgagcctt

SEQ ID NO: 390545 - DNA, 75 bp, synthetic construct
  source 1..75: mol_type = other DNA
ctttggtccatattttccgggattaataaatacaaacaataacgattattcgataaatggtggttttggcgttgg

SEQ ID NO: 390546 - DNA, 75 bp, synthetic construct
  source 1..75: mol_type = other DNA
cgtcaaaccacaactggttgctgtcgttcgccgcgcccttgaactgacggaggttgatttcggtattacggaagg

SEQ ID NO: 390547 - DNA, 75 bp, synthetic construct
  source 1..75: mol_type = other DNA
aagtactgttggtgatattggtggtggctttgtttctgagttaataaactacggtattaaaaattatcctactcc

SEQ ID NO: 390548 - DNA, 75 bp, synthetic construct
  source 1..75: mol_type = other DNA
tgataatcgcagggggaaagtgcaggcggcgcagtcaggcagtctgcaggtgaagacaaccggtgccgtggataa

SEQ ID NO: 390549 - DNA, 75 bp, synthetic construct
  source 1..75: mol_type = other DNA
gaacgtgtccgtgttgttttcgggacgaaaggcgggcgtccaagggaaacaacagtttttaaccgtgaaaaagtg

SEQ ID NO: 390550 - DNA, 75 bp, synthetic construct
  source 1..75: mol_type = other DNA
ttcggtctgaaagcgaacgaaacttataatgcgcacaaaattgccgaacgtctgcgtgaccacaaactgatgacc

SEQ ID NO: 390551 - DNA, 75 bp, synthetic construct
  source 1..75: mol_type = other DNA
tatccaccggcgtctacggttaaaccttatgtggcggtttcagcattaagtgcgggggtgatcactcgcaatact

SEQ ID NO: 390552 - DNA, 75 bp, synthetic construct
  source 1..75: mol_type = other DNA
caggttactgggagctggcaaaagatggcatgttcggggttgccaaccgccctaatggcacggcgcataaatact

SEQ ID NO: 390553 - DNA, 75 bp, synthetic construct
  source 1..75: mol_type = other DNA
cgggaacatctgataacgttacggcagctactgacatcgttgataatgcgggagcatccgcaacaggtgttattt

SEQ ID NO: 390554 - DNA, 75 bp, synthetic construct
  source 1..75: mol_type = other DNA
cattatctggtttattggatcttggtagtggtacaaaagatatatctaatatgcctaaggaatatctttctgttt

SEQ ID NO: 390555 - DNA, 75 bp, synthetic construct
  source 1..75: mol_type = other DNA
aacaatatattgaaacactgctggcgggtagtcgcgcggcagtggtggtcaccgatccgcgcacaggcggcgtgc

SEQ ID NO: 390556 - DNA, 75 bp, synthetic construct
  source 1..75: mol_type = other DNA
cagggagatacagccacaattgcaccagacactgttaaagataacagtgaagtcacagcagttgctaaagatccg

SEQ ID NO: 390557 - DNA, 75 bp, synthetic construct
  source 1..75: mol_type = other DNA
ccggaggacatcacgcagctccggaaagagtacgacgacctgcagcgacacagtgcctttaacccgttaaccgta

SEQ ID NO: 390558 - DNA, 75 bp, synthetic construct
  source 1..75: mol_type = other DNA
gcccatgatgcaggttctgcccaattatcccggtgtcatcaacttcaccgatcagaacggtgccccctggccggt

SEQ ID NO: 390559 - DNA, 75 bp, synthetic construct
  source 1..75: mol_type = other DNA
accacattatgctgggtgataacaacaccgatctgcctgcggaaaatcctgcggttgccgcagcggaggaccatt

SEQ ID NO: 390560 - DNA, 75 bp, synthetic construct
  source 1..75: mol_type = other DNA
atcggctatgtgtcgaaaatcaacgataaagacgtcgaacgcctgaataatgacggcaaactggccaattatgcg

SEQ ID NO: 390561 - DNA, 75 bp, synthetic construct
  source 1..75: mol_type = other DNA
tccggcaacatgcctacccgcgaatggaaacaaaaacgctttaaaaaaccgtggtatcagggtgacaccattccg

SEQ ID NO: 390562 - DNA, 75 bp, synthetic construct
  source 1..75: mol_type = other DNA
gataccttaacggccggatggatttatggtggcagtactgtctctatgggggacggcaatgatactgttaccatc

SEQ ID NO: 390563 - DNA, 75 bp, synthetic construct
  source 1..75: mol_type = other DNA
ctttacccgtctggttactcagcgattaatatggggggtttatccggcaaatgaaccgcgtcgtttacttaacgc

SEQ ID NO: 390564 - DNA, 75 bp, synthetic construct
  source 1..75: mol_type = other DNA
gcaatttaccgttcgctttgatgaaaaccttaacccggttatctttgatcagcaaaacgttcgccagaaaagcgt

SEQ ID NO: 390565 - DNA, 75 bp, synthetic construct
  source 1..75: mol_type = other DNA
aatcagcaccagcgatgccaacctcaacaggtagctgggcgtctgtatatcttgagccaatggtaggttcgggtg

SEQ ID NO: 390566 - DNA, 75 bp, synthetic construct
  source 1..75: mol_type = other DNA
taaatatcttaaaagaaaagctaaagttaacttgcggagccatatttatattttttttatccacgacttttgttt

SEQ ID NO: 390567 - DNA, 75 bp, synthetic construct
  source 1..75: mol_type = other DNA
cattatatgtaatgtcgtttgagattttgttttttgctattagtgggcgacgattatctaaagtaacaatggtgc

SEQ ID NO: 390568 - DNA, 75 bp, synthetic construct
  source 1..75: mol_type = other DNA
gttaacttgcggagccatatttatattttttttatccacgacttttgttttctttggctgttatgctacttatga

SEQ ID NO: 390569 - DNA, 75 bp, synthetic construct
  source 1..75: mol_type = other DNA
tacgggaggctacgacagttcgaccgtgcaggatgtgatgctgaggtcggtggaaaagcgcttcggcgacaggtt

SEQ ID NO: 390570 - DNA, 75 bp, synthetic construct
  source 1..75: mol_type = other DNA
atggatgttcccgcaactattgaagataaggatgattccactggactggtttatacggtttctctgaatcatgtc

SEQ ID NO: 390571 - DNA, 75 bp, synthetic construct
  source 1..75: mol_type = other DNA
gataactggtattttgaattaaacacgttacttgaagacggaacatctttatataatgacggtaattatcatgga

SEQ ID NO: 390572 - DNA, 75 bp, synthetic construct
  source 1..75: mol_type = other DNA
aacaagccgctgagatccgcgaaattaaggctgcccagggcaatacgccggtaaatggacaggcaacggcggaat

SEQ ID NO: 390573 - DNA, 75 bp, synthetic construct
  source 1..75: mol_type = other DNA
ttgaggccaccagcgagcatgaagcacgtaaggtgttggcacctcactacatcctgtcactgtccgccgttctgc

SEQ ID NO: 390574 - DNA, 75 bp, synthetic construct
  source 1..75: mol_type = other DNA
ggtggcgcaatatattcaattaataataatgtctacttaaataacacggtttttaataataatcaggcatataca

SEQ ID NO: 390575 - DNA, 75 bp, synthetic construct
  source 1..75: mol_type = other DNA
aagcgatgaagggaattacctgcatcgatctcagtcgcgtgtcccgcgttgatacaggtgggttggcgttgctgc

SEQ ID NO: 390576 - DNA, 75 bp, synthetic construct
  source 1..75: mol_type = other DNA
atgagtgagtcactgagctgggtgcagacgggtgacactctggcattagctggagagttggatcaagacgtactg

SEQ ID NO: 390577 - DNA, 75 bp, synthetic construct
  source 1..75: mol_type = other DNA
gcattttctcttgcagaaaatgaaagtttgattggaaaacccttcagcgtatggtttgaagggcgtttggaggaa

SEQ ID NO: 390578 - DNA, 75 bp, synthetic construct
  source 1..75: mol_type = other DNA
acgaaatcagcagtgaattaatcgatattcttgcggctcggaatacgatatccgaaatgcaatattttcgttata

SEQ ID NO: 390579 - DNA, 75 bp, synthetic construct
  source 1..75: mol_type = other DNA
cctggcagagtggtacggcagaaaacgatggtctggaaattagcggcagcggcggcacggtgattggtagtcagg

SEQ ID NO: 390580 - DNA, 75 bp, synthetic construct
  source 1..75: mol_type = other DNA
ggaatcgcttcatgatatcggcgcagtaacgaaacagactatgcgagaattcgatgaactctgcctgcaaccagc

SEQ ID NO: 390581 - DNA, 75 bp, synthetic construct
  source 1..75: mol_type = other DNA
ttagatttgctgagtcgccaacccgctcaacggtatattgatgtgacgtcgttcaccgaacttatgagtgtggtc

SEQ ID NO: 390582 - DNA, 75 bp, synthetic construct
  source 1..75: mol_type = other DNA
agggatcgtccggcgcggtttatccctacggcgtgaccgatacgctgagcgagcagaaaaccctgaaatcctggc

SEQ ID NO: 390583 - DNA, 75 bp, synthetic construct
  source 1..75: mol_type = other DNA
aagcggtgaaggggattacctgcatcgatcttagccgtgtgtcccgcgtggatacgggtggactggcactgctgc

SEQ ID NO: 390584 - DNA, 75 bp, synthetic construct
  source 1..75: mol_type = other DNA
tcaggcatgggctgtagcgatggctctgggtgtagaaaataaagtgactgttccgctgtttgaaggcgtacagaa

SEQ ID NO: 390585 - DNA, 75 bp, synthetic construct
  source 1..75: mol_type = other DNA
tgtcgagcacgatcagaatatggcgtttattcaggctctgcgccactttgctacttttgcttatgggctgcacct

SEQ ID NO: 390586 - DNA, 75 bp, synthetic construct
  source 1..75: mol_type = other DNA
atccagtgaagctgttgcctgatgatgaattcccagaatcaaggatgcagacaagaaaaaaaggtgttattagcg

SEQ ID NO: 390587 - DNA, 75 bp, synthetic construct
  source 1..75: mol_type = other DNA
ttgatgttatggtggatgaaaagggaatgacaattgatggagcacctctggaacgggcaatcagaaatgatgcca

SEQ ID NO: 390588 - DNA, 75 bp, synthetic construct
  source 1..75: mol_type = other DNA
aataagctgacattgtcaggcggtaatggtgccggacaaaatggtgttgttatcagtggtgtggcaagtggattg

SEQ ID NO: 390589 - DNA, 75 bp, synthetic construct
  source 1..75: mol_type = other DNA
gtgacattgatgttactgtagacaaagatgtagttactattgatggaacggcattgaaaaactctatcacacaaa

SEQ ID NO: 390590 - DNA, 75 bp, synthetic construct
  source 1..75: mol_type = other DNA
gctttatctgttgctattggttctattagtaaggctgccgggatgggggcgaacgcgttaggggctacagcagaa

SEQ ID NO: 390591 - DNA, 75 bp, synthetic construct
  source 1..75: mol_type = other DNA
taatgacctgagtgtggggagtaataatactcctggcagcatcaaagttaatggggctgatggtgaggagagtgt

SEQ ID NO: 390592 - DNA, 75 bp, synthetic construct
  source 1..75: mol_type = other DNA
ttgttgatactccgtcattcagtagtgttcaactgaatggaaaaggaaataacgggagtgtaacgttgtcatctg

SEQ ID NO: 390593 - DNA, 75 bp, synthetic construct
  source 1..75: mol_type = other DNA
ggaaagtctgcgtcagcaaccattgctgttaatgcaggcaaaggtggattaacagatgctgccggtaccacgaag

SEQ ID NO: 390594 - DNA, 75 bp, synthetic construct
  source 1..75: mol_type = other DNA
tcaccggtaaaggggatattgatgttactgttgatggaaatgggctgagtattgatggcacaaagcttgctgaaa

SEQ ID NO: 390595 - DNA, 75 bp, synthetic construct
  source 1..75: mol_type = other DNA
gtatatctattgcgctagcaatagcccctgttgctatgacctttgctgagagaaatacgtctcatattgaggttg

SEQ ID NO: 390596 - DNA, 75 bp, synthetic construct
  source 1..75: mol_type = other DNA
gtgtttctattgcgctagcaatagctccggttgctatgacctttgcagaaaagaatacgtctcatattgaggttg

SEQ ID NO: 390597 - DNA, 75 bp, synthetic construct
  source 1..75: mol_type = other DNA
caccgaggaggggtttaagactggagagtcaattgctattggagccaaagctcatgcaaataaagaacagtcgat

SEQ ID NO: 390598 - DNA, 75 bp, synthetic construct
  source 1..75: mol_type = other DNA
ttctgtcggcggaacccggatggataaaaacgggctgaccatcaaggatggcccgtcagtgactgtgaacggtat

SEQ ID NO: 390599 - DNA, 75 bp, synthetic construct
  source 1..75: mol_type = other DNA
ctcgctgacgtcggtctggcatgcggtccgtggctggcacaagacccggcagccttctccggcacgaacgccggt

SEQ ID NO: 390600 - DNA, 75 bp, synthetic construct
  source 1..75: mol_type = other DNA
gagggaatgacgctgcattttgtcaccgaccgtaagccgctatcacgcgaggagattttgaggatggttgagagg

SEQ ID NO: 390601 - DNA, 75 bp, synthetic construct
  source 1..75: mol_type = other DNA
gctattaaaaacggtaatgcaaaactggatgcagcgcagtcagcaaacgctcgaacaatggtttgaacccggaac

SEQ ID NO: 390602 - DNA, 75 bp, synthetic construct
  source 1..75: mol_type = other DNA
gatgccattgcccgggcggaagaggtggtgttacgtctgtccgggatgagcggggctgttcatgcggatactgac

SEQ ID NO: 390603 - DNA, 75 bp, synthetic construct
  source 1..75: mol_type = other DNA
tcggttcgtccgatattcgtcagctcaaaaccagccacctgttaaccccgattaaaaaagttgatgccagtggta

SEQ ID NO: 390604 - DNA, 75 bp, synthetic construct
  source 1..75: mol_type = other DNA
ggtgcggctttcttcgtgccggagactggcgaggttggtccgggtttctatcaagttatttcgcttgatcatgaa

SEQ ID NO: 390605 - DNA, 75 bp, synthetic construct
  source 1..75: mol_type = other DNA
ttgaagaagaagaaacgattaatacccaacatctaacgcttaatgtattgaacatgattcctaatatggggggcg

SEQ ID NO: 390606 - DNA, 75 bp, synthetic construct
  source 1..75: mol_type = other DNA
cagctaccgcaggtcaacggtttccgcacattgcgcgggctgggtgtgagcggtgaagctgaaggtcatgcggta

SEQ ID NO: 390607 - DNA, 75 bp, synthetic construct
  source 1..75: mol_type = other DNA
atgctggaagcgcgcgcacgtcagcgttcttctaaggcgctggagaaattactcgatttaaccccaccgacggcg

SEQ ID NO: 390608 - DNA, 75 bp, synthetic construct
  source 1..75: mol_type = other DNA
caactggttgcagaaggcaagagccagaccatgaacagccgccacctgaccggtgatgcggtggatgttgttgcc

SEQ ID NO: 390609 - DNA, 75 bp, synthetic construct
  source 1..75: mol_type = other DNA
gaaagagctgaaacgggttaccgacgaacgggacatattaaaaaaagccgctcttgatatcagactccctgaaca

SEQ ID NO: 390610 - DNA, 75 bp, synthetic construct
  source 1..75: mol_type = other DNA
gaagaagtcgttcgtcttgaaggaagtgaaactgaagagatcaaaccgctgcctagaggtacactacttgaaaaa

SEQ ID NO: 390611 - DNA, 75 bp, synthetic construct
  source 1..75: mol_type = other DNA
ggctggcaacgccaatgtcgattatttccggcgtcgggcgtgcggctgaatttggcgtgctggtacgggacgccg

SEQ ID NO: 390612 - DNA, 75 bp, synthetic construct
  source 1..75: mol_type = other DNA
atcaaagctgtcgatacggcgggtaaacatgatgtcgcgcagcgactgatgcagcgcgtaaccgcaattatgcgt

SEQ ID NO: 390613 - DNA, 75 bp, synthetic construct
  source 1..75: mol_type = other DNA
aacgctctcatccgaaggtaataagctgacattgtcaggcggtaatggtgccggacaaaatggtgttgttatcag

SEQ ID NO: 390614 - DNA, 75 bp, synthetic construct
  source 1..75: mol_type = other DNA
aggcccaataaaaacccaggtggctggagataaactggagatttcagcagagacagcttcgttgcctgtaaatgg

SEQ ID NO: 390615 - DNA, 75 bp, synthetic construct
  source 1..75: mol_type = other DNA
tcacgattggtggagacgggcagaatatcaatacaactgtccagaacgggagcctgacagtcaaactggcggata

SEQ ID NO: 390616 - DNA, 75 bp, synthetic construct
  source 1..75: mol_type = other DNA
accgcgaggaaatgcagatgctgcaggggctctcgctcgaagagcttcactacctttccggcagtgaggtgtcga

SEQ ID NO: 390617 - DNA, 75 bp, synthetic construct
  source 1..75: mol_type = other DNA
cggtagcccacgggacccgttcaattgccattggaaataacgctgttgctggcactgaaatagaaaagctccagg

SEQ ID NO: 390618 - DNA, 75 bp, synthetic construct
  source 1..75: mol_type = other DNA
aaaggaatgacgattgacggaacaacgctgaaaaatgaaataaaaaatgatgccatcaaaattaaaggtggagat

SEQ ID NO: 390619 - DNA, 75 bp, synthetic construct
  source 1..75: mol_type = other DNA
atacccgggtttcagccatcagtaaggatgacaagggaaattacagctatgagattgatgtgacggggattccgg

SEQ ID NO: 390620 - DNA, 75 bp, synthetic construct
  source 1..75: mol_type = other DNA
taaattaaaagagtgtaaaacagcggatttctatacattattagctgaaaacaaaaaactcaagattaaggctgc

SEQ ID NO: 390621 - DNA, 75 bp, synthetic construct
  source 1..75: mol_type = other DNA
aaaggcgcattcacttttgagacaataggacgtcaatgggttgaaagccaccagatgtggaacgaagaccaccga

SEQ ID NO: 390622 - DNA, 75 bp, synthetic construct
  source 1..75: mol_type = other DNA
tgaaagacgccaagggccaagaagtgaaacaatcccttggacaggcgattaaaatatccggagatagcaatatta

SEQ ID NO: 390623 - DNA, 75 bp, synthetic construct
  source 1..75: mol_type = other DNA
ggtgaagaagttgagtttaatgatgcaggaccaataaaaacaagaattaataataacaaacttgagataactgcc

SEQ ID NO: 390624 - DNA, 75 bp, synthetic construct
  source 1..75: mol_type = other DNA
ggatgacaagggaaattacagctatgagattgatgtgacggggattccggtggagtacaccgacagccaggggaa

SEQ ID NO: 390625 - DNA, 75 bp, synthetic construct
  source 1..75: mol_type = other DNA
tccaaaaacttacgtgaattatgtgaagtgtatgctgtacctactacagatatgcttaaaactgtctacacggtg

SEQ ID NO: 390626 - DNA, 75 bp, synthetic construct
  source 1..75: mol_type = other DNA
tcttcctgatccagacctccctgaaatcgaacggcggtaaaggtaagctggacccgacgctgtggatgtggaccg

SEQ ID NO: 390627 - DNA, 75 bp, synthetic construct
  source 1..75: mol_type = other DNA
gacaccgatcgtgcccgcgcagaactgaactggcgtatcacgctggtattcaccgtgtttatgatggcacttatg

SEQ ID NO: 390628 - DNA, 75 bp, synthetic construct
  source 1..75: mol_type = other DNA
cgggaaaaaatatgaatatattccagcgcttaatgccacgccggaacatatcgaaatgatggctaatcttgttgc

SEQ ID NO: 390629 - DNA, 75 bp, synthetic construct
  source 1..75: mol_type = other DNA
gaatatattccggcgcttaatgccacgccggaacatattgaaatgatggctaatcttgttgccgcgtatcgctaa

SEQ ID NO: 390630 - DNA, 75 bp, synthetic construct
  source 1..75: mol_type = other DNA
atgatgtcattgctagaaactttcctgacagcttctcagggggcaacaatcctgttccttgccatgctgatctac

SEQ ID NO: 390631 - DNA, 75 bp, synthetic construct
  source 1..75: mol_type = other DNA
tatagtttgggaaactccagcctattacttagaagagttatttccagaggcaaaatgtatctatcaaatgcctgg

SEQ ID NO: 390632 - DNA, 75 bp, synthetic construct
  source 1..75: mol_type = other DNA
atggcgcgttcgacgttttcgacgttgtgcgactgccgggtaataaagtcaggctatcaaataagtctgttgatt

SEQ ID NO: 390633 - DNA, 75 bp, synthetic construct
  source 1..75: mol_type = other DNA
attttttccccggtgacgtggttgtcacttgcgcccttgatactggcgtatcgttagaatggttatcaaccggaa

SEQ ID NO: 390634 - DNA, 75 bp, synthetic construct
  source 1..75: mol_type = other DNA
gtgtgggatgtcggcgctgctattcagatctaatcgtacgctttcacttgagcagctagtcgattccttgccaga

SEQ ID NO: 390635 - DNA, 75 bp, synthetic construct
  source 1..75: mol_type = other DNA
aactgttgctgatcttgtttttaatgagaaggcattcgacacaatagacttttccagagatggattaagagagaa

SEQ ID NO: 390636 - DNA, 75 bp, synthetic construct
  source 1..75: mol_type = other DNA
aggagtttgacctgattccttgtgtttctcaatatttagttcgtgaagtagatggtgtaatttctatatcatctt

SEQ ID NO: 390637 - DNA, 75 bp, synthetic construct
  source 1..75: mol_type = other DNA
ggaaatgccggtggcgctgggcatgagctatggttcgccatcgctggaaagtgccgttgacgaactgctggcaga

SEQ ID NO: 390638 - DNA, 75 bp, synthetic construct
  source 1..75: mol_type = other DNA
gacgaagatacgcgcgatatgctcgagggggtaatggacatcgcagaccaacgcgttcgcgacatcatgatccct

SEQ ID NO: 390639 - DNA, 75 bp, synthetic construct
  source 1..75: mol_type = other DNA
aaagtatttttgattttctatatcgcctgcgtagtgattacctgggcggtatatggtcggcattctaaaaaataa

SEQ ID NO: 390640 - DNA, 75 bp, synthetic construct
  source 1..75: mol_type = other DNA
gtgctgatggcgattttcagtggcctgctgttcctcaccttaccgactgacgggcaaggcggaaacttcatggca

SEQ ID NO: 390641 - DNA, 75 bp, synthetic construct
  source 1..75: mol_type = other DNA
cctttgctccgatcgtaaccggttgggtagtggataccacacactcgtttaatctggcgttggttatcgcggcct

SEQ ID NO: 390642 - DNA, 75 bp, synthetic construct
  source 1..75: mol_type = other DNA
tacactaatcagatgcctaaagaaggagaaactctggaagcacctgccttcaaaatcggatgtggtgggaaaggt

SEQ ID NO: 390643 - DNA, 75 bp, synthetic construct
  source 1..75: mol_type = other DNA
gcaggagccgaatggctggaagaccgtcaccacacagttctacatccaggaattcagtgagtatattgcgccact

SEQ ID NO: 390644 - DNA, 75 bp, synthetic construct
  source 1..75: mol_type = other DNA
atctggaaattgcaacggaggaagaaatctcgttgctggaagcatggaaaaagtatcgggtattgctgaaccgtg

SEQ ID NO: 390645 - DNA, 75 bp, synthetic construct
  source 1..75: mol_type = other DNA
tgtctggatggaaggtggctcgccgctgatggtttacagccgtcagcaacagcaggcgctggcacaacgcttacc

SEQ ID NO: 390646 - DNA, 75 bp, synthetic construct
  source 1..75: mol_type = other DNA
ttatcacggtattccccagcgttatgccgatgaaggcgatgattacccgcaacgttgtcgcacaacgactcgcga

SEQ ID NO: 390647 - DNA, 75 bp, synthetic construct
  source 1..75: mol_type = other DNA
agttcccggatgtacagatcctgcactacgccttctttgggccgtttattggcgcactggcgcgttctgcggggg

SEQ ID NO: 390648 - DNA, 75 bp, synthetic construct
  source 1..75: mol_type = other DNA
tcatcatttctctgctgtgcggctttgctggcgcgaacttcgcctccagtatggcaaacattagcttcttctttc

SEQ ID NO: 390649 - DNA, 75 bp, synthetic construct
  source 1..75: mol_type = other DNA
cggtgaaaacagtggtgagcttgacagtatgctggaacgggcggcagataatcaggagcgtgagttcagcgccca

SEQ ID NO: 390650 - DNA, 75 bp, synthetic construct
  source 1..75: mol_type = other DNA
catatacgggggggggttttatcgcagcagagttaaagattatgccaattaatcagaatggattgggcggaactg

SEQ ID NO: 390651 - DNA, 75 bp, synthetic construct
  source 1..75: mol_type = other DNA
gacctcttctgacgcaggcgatgaattattacctgtagagataacgcctgatgagccgaaagaaccgatggcgac

SEQ ID NO: 390652 - DNA, 75 bp, synthetic construct
  source 1..75: mol_type = other DNA
taacatgacgctggaaaatccatcgccagagctgctcacggtgttgatccgcgaactgaccgggaggggaagatg

SEQ ID NO: 390653 - DNA, 75 bp, synthetic construct
  source 1..75: mol_type = other DNA
gttactttgtcgctgttgcagaagagctgcatttcgggcgtgccgctgcccgcctgaatatttcgcaaccacctc

SEQ ID NO: 390654 - DNA, 75 bp, synthetic construct
  source 1..75: mol_type = other DNA
ttcaggtctaccatttttcgatcaacagtattgatatagccatggaagtgatgactcgggcatttacctttagcg

SEQ ID NO: 390655 - DNA, 75 bp, synthetic construct
  source 1..75: mol_type = other DNA
actggcgttgaattattacctgtggagataacgccggatgagccgaaagaaccggtgactactcttactccgtct

SEQ ID NO: 390656 - DNA, 75 bp, synthetic construct
  source 1..75: mol_type = other DNA
gtatatcccggcgtcttccggtaacaacctcgacactggcgttgaattattacctgtggagtgttgtggtcaact

SEQ ID NO: 390657 - DNA, 75 bp, synthetic construct
  source 1..75: mol_type = other DNA
cacagattgcacgtgaaaatggcgtcaatgataatgttattttcaaatggctcaggctcaggctctggcagaacg

SEQ ID NO: 390658 - DNA, 75 bp, synthetic construct
  source 1..75: mol_type = other DNA
ttattacctgtagaaataacgccggatgagcagaaagaacctgtggcggccattgcgccgtctttatccacttcc

SEQ ID NO: 390659 - DNA, 75 bp, synthetic construct
  source 1..75: mol_type = other DNA
tcttactccatccttatccactcagactactgtcagtgccagctcctgcaaagtggagttccgtcacggtaacat

SEQ ID NO: 390660 - DNA, 75 bp, synthetic construct
  source 1..75: mol_type = other DNA
gggagagttacgcattggctttacctcatcagcgccatttattcgcgcagtatctgataccttatcgctgtttcg

SEQ ID NO: 390661 - DNA, 75 bp, synthetic construct
  source 1..75: mol_type = other DNA
gcacgaaccaatcgcagcgtaatgctgacggcagcagggaagcagttccttgctgatagtcggcaaatcctgtct

SEQ ID NO: 390662 - DNA, 75 bp, synthetic construct
  source 1..75: mol_type = other DNA
atggtggatgacgcagccgctcgcgctgagcgtctgcatcagggagaagcgggagagttacgcattggctttacc

SEQ ID NO: 390663 - DNA, 75 bp, synthetic construct
  source 1..75: mol_type = other DNA
ttattacctgtcgagataacgcctgatgagccgaaagaaccgatggctgctcttactccgtccttatccacttcc

SEQ ID NO: 390664 - DNA, 75 bp, synthetic construct
  source 1..75: mol_type = other DNA
ttgtgaagataaagaatttaatcttgttgatgttatcaatgaagatggaaataaaataatgtttgtcgttagcaa

SEQ ID NO: 390665 - DNA, 75 bp, synthetic construct
  source 1..75: mol_type = other DNA
ggagattagaagaactaaaattagaaatatgcagttcaatagatgagttaattaataaatatggtattgaatatg

SEQ ID NO: 390666 - DNA, 75 bp, synthetic construct
  source 1..75: mol_type = other DNA
cattcagaatcttactgaaaatgtgccatttgcaggaaccggcggtcaatcctgtatgcaggatttgtatcacag

SEQ ID NO: 390667 - DNA, 75 bp, synthetic construct
  source 1..75: mol_type = other DNA
tgtaacaaatgatggattagcacttaataaagcttatctaactaagcttcctgttttcatagaccagcctatata

SEQ ID NO: 390668 - DNA, 75 bp, synthetic construct
  source 1..75: mol_type = other DNA
ggtaaggggtacgtaacaccacgtatgtttggagcgtggatggatgctccatatattgactggagtactattcag

SEQ ID NO: 390669 - DNA, 75 bp, synthetic construct
  source 1..75: mol_type = other DNA
gttgatgttatcaatgaagatggaaataaaataatgtttgtcgttagcaacgatagaaaaaatacaaaagaccaa

SEQ ID NO: 390670 - DNA, 75 bp, synthetic construct
  source 1..75: mol_type = other DNA
tgtcgctggaactgggcggccgcgtgatgggactgtgccaaccaatgatggctacctatcgtccacataataatc

SEQ ID NO: 390671 - DNA, 75 bp, synthetic construct
  source 1..75: mol_type = other DNA
acgcgcacaaatgcaaaatcgcggcgtaatggttgtcggcgtccattttatgtcgctggaactgggcggccgcgt

SEQ ID NO: 390672 - DNA, 75 bp, synthetic construct
  source 1..75: mol_type = other DNA
cccagattgctcgagaaaatggcgtcaatgataatgttattttcaaatggctcagactttggcaaaacgaagggc

SEQ ID NO: 390673 - DNA, 75 bp, synthetic construct
  source 1..75: mol_type = other DNA
ggctggctggagtagtaatgctttaacaggcggacgtgcattcccctacttcattatacctctcgtcgcaccgat

SEQ ID NO: 390674 - DNA, 75 bp, synthetic construct
  source 1..75: mol_type = other DNA
acaacctcttctgacactggcgttgaattattacctgtagaaataacgccggatgagcagaaagaacctgtggcg

SEQ ID NO: 390675 - DNA, 75 bp, synthetic construct
  source 1..75: mol_type = other DNA
ataatcagctgatggaatgggtgcagacccgtggtcgcatgcgctctaacaaagcgatgatcggcagaaataatc

SEQ ID NO: 390676 - DNA, 75 bp, synthetic construct
  source 1..75: mol_type = other DNA
aagcaggcaggactggataaacttgccaaaggagagttacctgaaggtgtcaatataagtaaagtgatagttgat

SEQ ID NO: 390677 - DNA, 75 bp, synthetic construct
  source 1..75: mol_type = other DNA
ttgatttaagccagccaggtaatgaaaacaaaaactgggactggaaaagcagtgccagttcaggcattgcgggta

SEQ ID NO: 390678 - DNA, 75 bp, synthetic construct
  source 1..75: mol_type = other DNA
tatcaaacagactaccccggacggtgcgggacgtgtggccgcccatgccgtggtaaatgctgcactggcggtggc

SEQ ID NO: 390679 - DNA, 75 bp, synthetic construct
  source 1..75: mol_type = other DNA
aaaaataccagcgttaagcgtgtgtgggtgagcaacccaagctggccgaaccataagagcgtctttaactctgca

SEQ ID NO: 390680 - DNA, 75 bp, synthetic construct
  source 1..75: mol_type = other DNA
acaatggcagacactggcacaactttccgttgagaaaggctggttaccgctgtttgacttcgcttaccagggttt

SEQ ID NO: 390681 - DNA, 75 bp, synthetic construct
  source 1..75: mol_type = other DNA
gaaggactgcgcgctttcgcggctatgcataaagagctgattgttgccagttcctactctaaaaactttggcctg

SEQ ID NO: 390682 - DNA, 75 bp, synthetic construct
  source 1..75: mol_type = other DNA
cagttacgggggctgtctcaggagaagttactggcaaccaagtaaaagataaactggacaaggtagggaataaaa

SEQ ID NO: 390683 - DNA, 75 bp, synthetic construct
  source 1..75: mol_type = other DNA
caatgcgggaagctcagcgtgtgcaggtgcaaggctgaaagttttcgcttcgaaagaggggtatgaagatggccc

SEQ ID NO: 390684 - DNA, 75 bp, synthetic construct
  source 1..75: mol_type = other DNA
gcaaaacagacgcttaaaaacagtaaaaatccggcagagcgagaagccgcgcagaagaaatataacgctctgcgt

SEQ ID NO: 390685 - DNA, 75 bp, synthetic construct
  source 1..75: mol_type = other DNA
gcctgacggcccggacggatattaacagtaccggcgggctgctgcaggctacggacagcctgctggcgatggccg

SEQ ID NO: 390686 - DNA, 75 bp, synthetic construct
  source 1..75: mol_type = other DNA
tatgagcttggcggtggtgctgtctctgagtttaccaatggaattatcaaggatttcaataatcctcaagctcct

SEQ ID NO: 390687 - DNA, 75 bp, synthetic construct
  source 1..75: mol_type = other DNA
acaactccactgatggtctgctgaacctgaacacgccggatgataccggacataacaacgaccggttcacaaaat

SEQ ID NO: 390688 - DNA, 75 bp, synthetic construct
  source 1..75: mol_type = other DNA
ggaagtacgtgaatacgcttattacgacgcggaaaaacatactctggacttcgacgccctgattaacagtctgaa

SEQ ID NO: 390689 - DNA, 75 bp, synthetic construct
  source 1..75: mol_type = other DNA
tggccatgaagatctgcaagccaatgcgcaaaccgttcttgaggtactgcgcagtggttccgcttacgacagagt

SEQ ID NO: 390690 - DNA, 75 bp, synthetic construct
  source 1..75: mol_type = other DNA
ttgatttcattttctgattttacagtctcaaacataggacaagcagtaaaagatgatatatcgcagcatttactt

SEQ ID NO: 390691 - DNA, 75 bp, synthetic construct
  source 1..75: mol_type = other DNA
ctcgtcgcaatgtccacctaacgcaggatgcgcttgctaaacgtattggtctaactaaagccacgatttcacaat

SEQ ID NO: 390692 - DNA, 75 bp, synthetic construct
  source 1..75: mol_type = other DNA
tatctggtgaaattttaggcggatacggtagtgataatattacggtaactaaaaatctgaccggtaatatttctg

SEQ ID NO: 390693 - DNA, 75 bp, synthetic construct
  source 1..75: mol_type = other DNA
gatggtaatgccatttcattacgtaatctggacggtgattttacactgaaatattcactatcatcttctgtcgcc

SEQ ID NO: 390694 - DNA, 75 bp, synthetic construct
  source 1..75: mol_type = other DNA
atgaacgccgataaatcgcgccaggcgctggatgagttaggtgtatgtttcctctttgcgccgaagtatcacacc

SEQ ID NO: 390695 - DNA, 75 bp, synthetic construct
  source 1..75: mol_type = other DNA
catcaaccgcaaaaaagcgaacgtcatgcgcccggtggagtaccagaacggcgaagcattcactatccgtaacgt

SEQ ID NO: 390696 - DNA, 75 bp, synthetic construct
  source 1..75: mol_type = other DNA
cgtcaggcgataaaccggatatcggcgaactgtacgacgatacgaaaactcaggagctggtcagccggatacgtt

SEQ ID NO: 390697 - DNA, 75 bp, synthetic construct
  source 1..75: mol_type = other DNA
atcgactgttacaagagttgtctccgtatgtgcacaatgcaaggacacactctcctgaacaggtgacacagctgg

SEQ ID NO: 390698 - DNA, 75 bp, synthetic construct
  source 1..75: mol_type = other DNA
catggactgagaacggcgaacgccgcaacgccatcagcccgaacagcttcaagtcggaatggtctgcgccgttcg

SEQ ID NO: 390699 - DNA, 75 bp, synthetic construct
  source 1..75: mol_type = other DNA
caaacgcacagccggacatggccaacatcaaccgcaaaaaagcgaacgttatgcgcccggtggaataccagaacg

SEQ ID NO: 390700 - DNA, 75 bp, synthetic construct
  source 1..75: mol_type = other DNA
ttgcctttaagccaggctgattttggcctgtggtttaaccataaaggtcgacattattttagcggcattgccgaa

SEQ ID NO: 390701 - DNA, 75 bp, synthetic construct
  source 1..75: mol_type = other DNA
ggatggatgcctcgcgcacggattataccgatatcattgcccggtctgtgaagattaatgcgggtgtctgggcgc

SEQ ID NO: 390702 - DNA, 75 bp, synthetic construct
  source 1..75: mol_type = other DNA
tgctgtctctgagtttaccaatggaattatcaaggatttcaataatcctcaatcttctgaaaaaaaggaaaataa

SEQ ID NO: 390703 - DNA, 75 bp, synthetic construct
  source 1..75: mol_type = other DNA
atagctggtgagaaagcgaagcgggacccggcagcactgaatcaggcccgcgcagagcttgaggcagcaggaaaa

SEQ ID NO: 390704 - DNA, 75 bp, synthetic construct
  source 1..75: mol_type = other DNA
acggcacagcgcgacgccggacagaaccattttgaacgtaccagtatcgacagtgtggccggcgtgtatgtgcag

SEQ ID NO: 390705 - DNA, 75 bp, synthetic construct
  source 1..75: mol_type = other DNA
atatccggcgtcacggtggtgttccgggccggtgagcaggagcagacaccgccggagggatttgaatcctccggc

SEQ ID NO: 390706 - DNA, 75 bp, synthetic construct
  source 1..75: mol_type = other DNA
aatctctgcttgggcaaagccgttcttctacctcctcgtctgcggatcagggattgggcaaacttttagtgcctg

SEQ ID NO: 390707 - DNA, 75 bp, synthetic construct
  source 1..75: mol_type = other DNA
cagaacgtgctgaactggcagcttacttgcgtgtatatgcttcagaaatggaaaaggagtacggtacagcggtgg

SEQ ID NO: 390708 - DNA, 75 bp, synthetic construct
  source 1..75: mol_type = other DNA
ctgactgcaggcgtggttaacaatacatccggtcagattgtagcgagtggtcagattgtggcgaacggtctgcct

SEQ ID NO: 390709 - DNA, 75 bp, synthetic construct
  source 1..75: mol_type = other DNA
aggacctgaaagtgaccaccggacgtaacaatgtggatattacgcacgggcagactgagaaaaaagccgctgatg

SEQ ID NO: 390710 - DNA, 75 bp, synthetic construct
  source 1..75: mol_type = other DNA
ggttaaaccgcgtccacagctgcaatttagcgagtggctggcgctgtttaagcatcggacaacctgggggatgat

SEQ ID NO: 390711 - DNA, 75 bp, synthetic construct
  source 1..75: mol_type = other DNA
ggcagactggtggcacagcagtcactgaccctttcctcgacggatatcatcaacgatgccagtggcctgatacag

SEQ ID NO: 390712 - DNA, 75 bp, synthetic construct
  source 1..75: mol_type = other DNA
aaatgtggctgctcatgctgtggtgaatgctgcactggcggtggcacagggtaataacgcccttgccggtgccgc

SEQ ID NO: 390713 - DNA, 75 bp, synthetic construct
  source 1..75: mol_type = other DNA
ccgggcagcatacgcagctgaacggcgcagtgattgcgtccacggcaacggcagataaaaacaggctggataccg

SEQ ID NO: 390714 - DNA, 75 bp, synthetic construct
  source 1..75: mol_type = other DNA
tgatggcttcatgcaggggagaagcaggcgcaatgagcgccagcctgtgcagcgtatgagcgagcgtgaacggga

SEQ ID NO: 390715 - DNA, 75 bp, synthetic construct
  source 1..75: mol_type = other DNA
agctcgctggatgaataccataaagtgaccggcagcagcgggatgttatcgaaaaccaccactaccacgcatgat

SEQ ID NO: 390716 - DNA, 75 bp, synthetic construct
  source 1..75: mol_type = other DNA
agtcaggttgtggcaggtggcctgctggatatgcaggccggtgatgtggaaaacgtcagtgtcagcggagagcgc

SEQ ID NO: 390717 - DNA, 75 bp, synthetic construct
  source 1..75: mol_type = other DNA
tggggcagggctggaaagggacaatagcctggaatgcggcaggtggagcattaaccaacgctataaacggagatg

SEQ ID NO: 390718 - DNA, 75 bp, synthetic construct
  source 1..75: mol_type = other DNA
cagatacagagcgatggtgcattcacccaaacgggctctgtggcatcacggcgtgatacccgtattcaggctgcg

SEQ ID NO: 390719 - DNA, 75 bp, synthetic construct
  source 1..75: mol_type = other DNA
gatggcgttagtttcacttttggtgttggccctagttgggggtggagtgcaactgaaattaaaggtgtagacgtt

SEQ ID NO: 390720 - DNA, 75 bp, synthetic construct
  source 1..75: mol_type = other DNA
ttgccggggcagcagtttgaagtcagcgcacctcagggcagtatccatgttgccgggccggatacccgtctgccg

SEQ ID NO: 390721 - DNA, 75 bp, synthetic construct
  source 1..75: mol_type = other DNA
gctggaaaatcagcaggggacggtggtcagcaacggtaacagcaggctggatgtcacacggtttgataatcaggg

SEQ ID NO: 390722 - DNA, 75 bp, synthetic construct
  source 1..75: mol_type = other DNA
gcgctacggacaaggagaaagctgagcttggtggtgcaggtgctggaacaccggggggatggggaccggataatg

SEQ ID NO: 390723 - DNA, 75 bp, synthetic construct
  source 1..75: mol_type = other DNA
atggatatcaggatggtgtaatgattgccggggcatggtatctggggcctgctgcgtcagcaggtaaagttcttg

SEQ ID NO: 390724 - DNA, 75 bp, synthetic construct
  source 1..75: mol_type = other DNA
cagattgagaaaaaagccgcagatatatcttcaaagcctcaggtggcgctggatgtgtccagccttggtggaatg

SEQ ID NO: 390725 - DNA, 75 bp, synthetic construct
  source 1..75: mol_type = other DNA
ttgcgacgggtgcggttttattaacgcgaaccgggccacgctgaccacggggcagccacagatgaaaaacggcag

SEQ ID NO: 390726 - DNA, 75 bp, synthetic construct
  source 1..75: mol_type = other DNA
gcaggcattgtggcagaccataacgcaccgggacatcagcagcccactattatgcagacggccaacggcattccg

SEQ ID NO: 390727 - DNA, 75 bp, synthetic construct
  source 1..75: mol_type = other DNA
cgatgccgacagtaacctgcagagtctgtgctggccgtgtcataaggcgaagacggcccgtgaacggctgaagta

SEQ ID NO: 390728 - DNA, 75 bp, synthetic construct
  source 1..75: mol_type = other DNA
aacaatacaagccggggcaatctcgtcatcagcgcggttatggttcgaagtgggatgttatccgcgcgcgtgtgc

SEQ ID NO: 390729 - DNA, 75 bp, synthetic construct
  source 1..75: mol_type = other DNA
tggcaaagtgttccttacacaggcgcagctggcgatgctgctggaaggtatcgactggcgacagcctaagcggct

SEQ ID NO: 390730 - DNA, 75 bp, synthetic construct
  source 1..75: mol_type = other DNA
tcctgcagcacttgccggcaaacctcagcaaccggagtccctgcagtggcgcgcagccggggggggaatgactgt

SEQ ID NO: 390731 - DNA, 75 bp, synthetic construct
  source 1..75: mol_type = other DNA
acaccagcgcggttatggttcgaaatgggatgttatccgggggcgtgtactaaagcgtgacaaaggcctgtgtca

SEQ ID NO: 390732 - DNA, 75 bp, synthetic construct
  source 1..75: mol_type = other DNA
ggatttggcctattgtaatattttttattcgcccaccaaaggaagtatgtttttttgtatttcttgtgataatct

SEQ ID NO: 390733 - DNA, 75 bp, synthetic construct
  source 1..75: mol_type = other DNA
gtgcgcgggaacgatgactgtcgaaagtatcggcagtctgattggtcgtagcgaggcagcggtcagagcgaaagc

SEQ ID NO: 390734 - DNA, 75 bp, synthetic construct
  source 1..75: mol_type = other DNA
gttctggagcacggacatgatgcagccgatcgctaacctgccggtgacgatctttaagtttgcgatgagcccgtt

SEQ ID NO: 390735 - DNA, 75 bp, synthetic construct
  source 1..75: mol_type = other DNA
aataaaaaatttatttatgtagcgccttgttttagaaaatggatttcagaatatgtgcctaaaaataaagtattg

SEQ ID NO: 390736 - DNA, 75 bp, synthetic construct
  source 1..75: mol_type = other DNA
atttatttgaagcaattggtgagaccaatcccaagctatacgttaccctgtataaaggtaataaagttattctta

SEQ ID NO: 390737 - DNA, 75 bp, synthetic construct
  source 1..75: mol_type = other DNA
ttgttgcccggcaacatggtgtggcagccagccagttatttctctggcgtaagcaataccaggagggaagtctta

SEQ ID NO: 390738 - DNA, 75 bp, synthetic construct
  source 1..75: mol_type = other DNA
ttacgcggggaatggggagaagcggcggaaataaactgggtctcacggcgtaataattttaacgcactggatgag

SEQ ID NO: 390739 - DNA, 75 bp, synthetic construct
  source 1..75: mol_type = other DNA
tgaagcgtgacaaaggcctgtgccagttgtgcctgcgtgccggtgtggtgcgtgaggcgaaaaccgttgaccaca

SEQ ID NO: 390740 - DNA, 75 bp, synthetic construct
  source 1..75: mol_type = other DNA
taacgcgttcggcattactgaaagcgccagtggtcgcgtttgaccatcttgacgatatgcaccaggcctttttgc

SEQ ID NO: 390741 - DNA, 75 bp, synthetic construct
  source 1..75: mol_type = other DNA
aaaattgcctgcgtgatgccgggtgtgagcgccccggcgcgatagcgatcgacactgacggtcatgtttttattg

SEQ ID NO: 390742 - DNA, 75 bp, synthetic construct
  source 1..75: mol_type = other DNA
ctgaaggtggaaacgagtatgatggtgcaaaatgctgggttgcgatgattgacagggagaatgaaaagaatggtt

SEQ ID NO: 390743 - DNA, 75 bp, synthetic construct
  source 1..75: mol_type = other DNA
cgcaatagttctcgccctcgcctcaccagagcttgatgtcaaagcaattacgtcttccgccggaaaccagacacc

SEQ ID NO: 390744 - DNA, 75 bp, synthetic construct
  source 1..75: mol_type = other DNA
ccgggctatttcaacggcggatgctctactggcaccgttttgcccctgaaagccgcatgatgcgtaaagtaaccg

SEQ ID NO: 390745 - DNA, 75 bp, synthetic construct
  source 1..75: mol_type = other DNA
gacgatatgcaccaggcctttttgcagcaaaacttcgatctgcctccaggcagcgtaccctgccatatcgttaat

SEQ ID NO: 390746 - DNA, 75 bp, synthetic construct
  source 1..75: mol_type = other DNA
tgatgccgactgtaatctgcagagtctgtgctggccgtgtcataaggcgaagacggcccgtgaacggattaagta

SEQ ID NO: 390747 - DNA, 75 bp, synthetic construct
  source 1..75: mol_type = other DNA
gccgcgttcgcggctgccgccataccacgactgacccatcaggctactgcgaaagccacaaaagcgaaggctgga

SEQ ID NO: 390748 - DNA, 75 bp, synthetic construct
  source 1..75: mol_type = other DNA
agcaatacaagccaggccagtcccgacaccagcgcggttatggttcgaaatgggatgttatccgtgaacgtgtgc

SEQ ID NO: 390749 - DNA, 75 bp, synthetic construct
  source 1..75: mol_type = other DNA
gtcccggaaatggacgatgccgttgaaggactggcgaatggcaatgagccgctttattatcgagttcggtgaccg

SEQ ID NO: 390750 - DNA, 75 bp, synthetic construct
  source 1..75: mol_type = other DNA
taatcagcgagtcagcttgggaagaaatgacctgcttattcgcaccttccctaacagtcagcacatcaagcacat

SEQ ID NO: 390751 - DNA, 75 bp, synthetic construct
  source 1..75: mol_type = other DNA
tgatgccgactgtaatctgcagagtctgtgttggccgtgtcataaggcgaagacggtccgtgaacggttaaagtg

SEQ ID NO: 390752 - DNA, 75 bp, synthetic construct
  source 1..75: mol_type = other DNA
taactgtggttggtggaggacagagtggtgcagacctgttccttaatgcattacgcggggaatggggagaagcgg

SEQ ID NO: 390753 - DNA, 75 bp, synthetic construct
  source 1..75: mol_type = other DNA
cttaacgaagaagctctgctggcgtttgaatatggttattcaacgtctgcgccgcagcaactggttatctgggaa

SEQ ID NO: 390754 - DNA, 75 bp, synthetic construct
  source 1..75: mol_type = other DNA
caactctacccgttcccggtcgcagaactgaatgatgttctggcgagttggccgaactgctgcgaatggatttgg

SEQ ID NO: 390755 - DNA, 75 bp, synthetic construct
  source 1..75: mol_type = other DNA
tccggcgcgacatcatcatcgatatttgctgtttccgtaagcacgggcacaacgaaagcgatgagccgcgcctga

SEQ ID NO: 390756 - DNA, 75 bp, synthetic construct
  source 1..75: mol_type = other DNA
gtgatagctgaactggctttcatgtcatattttatctttcttctgacaatgcttcctggagtcatttatctgaaa

SEQ ID NO: 390757 - DNA, 75 bp, synthetic construct
  source 1..75: mol_type = other DNA
aactccaggaagaagcagcatattgcataccaatttctgcaatatctgtaaaacgatgggatatgcctcttcagg

SEQ ID NO: 390758 - DNA, 75 bp, synthetic construct
  source 1..75: mol_type = other DNA
ttgttattggttgtcagagtggtttacgtggacatattgcatatcgtattctccaggcttatggattcaaagttt

SEQ ID NO: 390759 - DNA, 75 bp, synthetic construct
  source 1..75: mol_type = other DNA
gttctctggggatatttcagtcgtctggatcgacttgatattttctttgatgtgatgaatattaaaagcatcttg

SEQ ID NO: 390760 - DNA, 75 bp, synthetic construct
  source 1..75: mol_type = other DNA
gtattggtttgttgtacaactattctatcattgattatgatcatttttattttttttataacatctttttttata

SEQ ID NO: 390761 - DNA, 75 bp, synthetic construct
  source 1..75: mol_type = other DNA
ggcagaagtgattcgcttcattaacgacattctgctctccgcgccgtcgattgtggttggtctgtttgtctacac

SEQ ID NO: 390762 - DNA, 75 bp, synthetic construct
  source 1..75: mol_type = other DNA
ggtgtggaggaaatggtcattggcatggcgcaccggggaagacttaatgttctggtgaatctgttgaataaagac

SEQ ID NO: 390763 - DNA, 75 bp, synthetic construct
  source 1..75: mol_type = other DNA
agaaccggaaaaccagggggcgtggcggcagattcgccatgagctggcggcactgaaaatcaaccatccttactg

SEQ ID NO: 390764 - DNA, 75 bp, synthetic construct
  source 1..75: mol_type = other DNA
tatcttgaatatgacttatcgtttaaaaataatagaatgaaactgttgagacgtgttcagatctatcttgtcatt

SEQ ID NO: 390765 - DNA, 75 bp, synthetic construct
  source 1..75: mol_type = other DNA
ttactacccgggggcaacaatgatcagtctgaaactactgttcagccccgataccggtagaattctaggggctca

SEQ ID NO: 390766 - DNA, 75 bp, synthetic construct
  source 1..75: mol_type = other DNA
ggtgatacagggactgcaatagttgtctcagctgcgaatggcagcctggtttcatttgatggtacagcaggttcc

SEQ ID NO: 390767 - DNA, 75 bp, synthetic construct
  source 1..75: mol_type = other DNA
taagctagtttcttttggtactgaaggttctgctcaaagtttacaggaaggtgaaaatacgctgcattattcttc

SEQ ID NO: 390768 - DNA, 75 bp, synthetic construct
  source 1..75: mol_type = other DNA
ctgggctatttcaacgacggatgctctactggcaccgctttgctcctgaaagccgcatgatgcgtaaagtcactg

SEQ ID NO: 390769 - DNA, 75 bp, synthetic construct
  source 1..75: mol_type = other DNA
ctgccgagttgtcttgtcgataaactcggtgcgctcgactatctgttcgtcagctcaaaaaaccgtttgccgaaa

SEQ ID NO: 390770 - DNA, 75 bp, synthetic construct
  source 1..75: mol_type = other DNA
acgcagttcgtctgttaatgacgctgtgggattcaacaagtaagggacaaaccccactggcgtcggttcttaatg

SEQ ID NO: 390771 - DNA, 75 bp, synthetic construct
  source 1..75: mol_type = other DNA
taaaaaagctactggtggcaccctgaaagaaggcgattttaccgctgttgctaacttcaatctggcctacgagta

SEQ ID NO: 390772 - DNA, 75 bp, synthetic construct
  source 1..75: mol_type = other DNA
tcagacgttacctcaaataccctgaaccgccagccagaaaaaaacgccacaaaatggttaagctgaaaccgttta

SEQ ID NO: 390773 - DNA, 75 bp, synthetic construct
  source 1..75: mol_type = other DNA
cgatctcgaacatcttgagctgacttatgctccaccttttaacagtgcaagggacgtcgttaaccaggctggtat

SEQ ID NO: 390774 - DNA, 75 bp, synthetic construct
  source 1..75: mol_type = other DNA
gtgaccctgctggagatgggggaacaggttatggctccggttgatcctgaaatggcatctgccctgcatcaggaa

SEQ ID NO: 390775 - DNA, 75 bp, synthetic construct
  source 1..75: mol_type = other DNA
ctgagaatgtctggaacggcgaggtcatcctggcggaaatcaaagcgatgggttataccggtggccgttccatgt

SEQ ID NO: 390776 - DNA, 75 bp, synthetic construct
  source 1..75: mol_type = other DNA
cagattggttgctctgaacggacggtcagacgctacctaaaatcccctgacccgccagcaaaaaagccccgccac

SEQ ID NO: 390777 - DNA, 75 bp, synthetic construct
  source 1..75: mol_type = other DNA
ctgacgtttcgattaagttattttgcgaaacaacgcactaaagattacaacagggaggaacgatcttttggatgc

SEQ ID NO: 390778 - DNA, 75 bp, synthetic construct
  source 1..75: mol_type = other DNA
gataccgccaggacactgaaaattggtattaacaccgttatccggactttaaaaaactcgcgccaaagcgaataa

SEQ ID NO: 390779 - DNA, 75 bp, synthetic construct
  source 1..75: mol_type = other DNA
cgttcctgcctctgaacttgctgctgccatgaagcagattaaagaactccagcgcctgctgaacaaaacgccgga

SEQ ID NO: 390780 - DNA, 75 bp, synthetic construct
  source 1..75: mol_type = other DNA
aacgcctgcatacctggattgagaaccatgttgccaccagtgttgaccccgtcaccggaaagcgttttgtttcgg

SEQ ID NO: 390781 - DNA, 75 bp, synthetic construct
  source 1..75: mol_type = other DNA
ccgccatggtcagaaccctaaaggccgtgaccggtttcgctgtcgtgactgccatcgcgtgtttctgctcaccta

SEQ ID NO: 390782 - DNA, 75 bp, synthetic construct
  source 1..75: mol_type = other DNA
ctgttacgagccccgtaaaccgggagttaaagaccaaatcgctgaaatgactttcaacggtgccggggttcgcga

SEQ ID NO: 390783 - DNA, 75 bp, synthetic construct
  source 1..75: mol_type = other DNA
gacttcgctgccgtgacagacttcgctgccgtgacagacttcgctgccgtgacagacttcgctgccgtgactgcc

SEQ ID NO: 390784 - DNA, 75 bp, synthetic construct
  source 1..75: mol_type = other DNA
gaccaaacggctggagcgtgggcgcttcgcctggccgtcagcccgtgatggcaaagtgttccttacacaggcgca

SEQ ID NO: 390785 - DNA, 75 bp, synthetic construct
  source 1..75: mol_type = other DNA
gaaaggttcaccttactccggctcagttatccatgcttcttgaaggtatcaactggaagcacccgaaacgaacag

SEQ ID NO: 390786 - DNA, 75 bp, synthetic construct
  source 1..75: mol_type = other DNA
ccaccggtgacgggctgtgcctcctgaccaaacggctggagcgtgggcgcttcgcctggccgtcagcccgtgatg

SEQ ID NO: 390787 - DNA, 75 bp, synthetic construct
  source 1..75: mol_type = other DNA
acgggggaaatcgtctacgatgacgatggaaaaccggatgctgaacatcagccaacggcaatcaatagcctgatt

SEQ ID NO: 390788 - DNA, 75 bp, synthetic construct
  source 1..75: mol_type = other DNA
cacgccctttgccaatatttttattcacgagagcaatgaaacgcgtgatgaaggcccggatttgttcccttccgc

SEQ ID NO: 390789 - DNA, 75 bp, synthetic construct
  source 1..75: mol_type = other DNA
tgaatttcgcaatgaagccctgaaacttgcagaacgcatcggtgttgctgccgctgcacgcgagctcaacctgta

SEQ ID NO: 390790 - DNA, 75 bp, synthetic construct
  source 1..75: mol_type = other DNA
acggtcagatattatatcagttctgctgatttaaccgcagagaagttcgccacagcaatccgaaaccactggcac

SEQ ID NO: 390791 - DNA, 75 bp, synthetic construct
  source 1..75: mol_type = other DNA
cttatttcagcagtctttggattgattttggggcgttggattgttgcgtttattagttggaaactttgttcgcgc

SEQ ID NO: 390792 - DNA, 75 bp, synthetic construct
  source 1..75: mol_type = other DNA
gttctggacaccctgaacgagctggcagcggcgctgggcaatgacccgaactttgcgacgacaatcacaaacgcg

SEQ ID NO: 390793 - DNA, 75 bp, synthetic construct
  source 1..75: mol_type = other DNA
aaagtgataggtcggtatttttcaaggatgctgacaacgccacatgagtggccattggaggagattaagggtgta

SEQ ID NO: 390794 - DNA, 75 bp, synthetic construct
  source 1..75: mol_type = other DNA
gccaggtcatttgtctacggaagtaccctgcctggcacatatctcgctttatcaggaggcccggatgtcacgttt

SEQ ID NO: 390795 - DNA, 75 bp, synthetic construct
  source 1..75: mol_type = other DNA
gtggcgcaggcgcagcagagcgcggaagcggcagcgaaaagcgaacgacaggccgggcaacatgtcgctgatgcg

SEQ ID NO: 390796 - DNA, 75 bp, synthetic construct
  source 1..75: mol_type = other DNA
cctcgatgaaggcgatttaaaaccggatgtagtgaaacgctttgaggaaatggtggcgcaggcgcagcagagcgc

SEQ ID NO: 390797 - DNA, 75 bp, synthetic construct
  source 1..75: mol_type = other DNA
acctgccgggaacgaagacgcagatgaccatccggtcaaaaacctataaaggaagcggatttaacgagctgcggt

SEQ ID NO: 390798 - DNA, 75 bp, synthetic construct
  source 1..75: mol_type = other DNA
tcgcaggcgtgggcggggccgggatttggtaacctggcgataccgcgcatcggccaggaagtgattgtagacttc

SEQ ID NO: 390799 - DNA, 75 bp, synthetic construct
  source 1..75: mol_type = other DNA
agaaaataagcggcgcgctgggtatcagcgtacagggcgatattgttttacagagcgacagcaaaatcagtctgc

SEQ ID NO: 390800 - DNA, 75 bp, synthetic construct
  source 1..75: mol_type = other DNA
gataaagacactcctgagaaggtttatacctggcgagctcagtctcttgtagcgaagaagacatttcagagccac

SEQ ID NO: 390801 - DNA, 75 bp, synthetic construct
  source 1..75: mol_type = other DNA
gtcagcatcgggcatgatgaattcctggtggtggcaaatgaccggaaagtgacggttgaaggtaaacaggaccat

SEQ ID NO: 390802 - DNA, 75 bp, synthetic construct
  source 1..75: mol_type = other DNA
gacgtaccatgaggacaaccgttcgccggggagtctgccggggacgaagacgcagatgacgatacggtcgaagac

SEQ ID NO: 390803 - DNA, 75 bp, synthetic construct
  source 1..75: mol_type = other DNA
tttgtgactgcccgctttatcctgcctcatttgcgcccgtttttgcggcgctaaaaccgtttatcgcccgtgcgg

SEQ ID NO: 390804 - DNA, 75 bp, synthetic construct
  source 1..75: mol_type = other DNA
gtgacatttattcaaacgccacccgcaggggcgattctggcggcgaaagagttaccctcgaccggcggcgatacg

SEQ ID NO: 390805 - DNA, 75 bp, synthetic construct
  source 1..75: mol_type = other DNA
gaattgtcgatgtcagcgagggtaatgactccaacttattgatagtgttttatgttcagataatgcccgatgact

SEQ ID NO: 390806 - DNA, 75 bp, synthetic construct
  source 1..75: mol_type = other DNA
cgccgcagcagcaacgcgcgctggcccagcgttttggcgaactgcatattcaccctgtttaccctcatgccgaag

SEQ ID NO: 390807 - DNA, 75 bp, synthetic construct
  source 1..75: mol_type = other DNA
tatgcatcgggcgtcgatccttggggataaaccgttttatcgggcgggtgatacgagtgcggacggttccctcac

SEQ ID NO: 390808 - DNA, 75 bp, synthetic construct
  source 1..75: mol_type = other DNA
gtgactcagcactatgccaatgcggattacctgccacagcggcggattatgcatcgggcgacgattcttggggat

SEQ ID NO: 390809 - DNA, 75 bp, synthetic construct
  source 1..75: mol_type = other DNA
aatttcgggtgtcgacctgacgcgcccgttaagtgataaccagtttgaacagctttaccatgcggtactgcgcca

SEQ ID NO: 390810 - DNA, 75 bp, synthetic construct
  source 1..75: mol_type = other DNA
gccggacaacgacaactggcacaccgacgtgacctttatcgagacgccgcccgccggggcgattctggcggcgaa

SEQ ID NO: 390811 - DNA, 75 bp, synthetic construct
  source 1..75: mol_type = other DNA
agcagattaaagaactccagcgcctgctcggcaaaaaaacgatggaaaatgaactccttaaagaagccgttgaat

SEQ ID NO: 390812 - DNA, 75 bp, synthetic construct
  source 1..75: mol_type = other DNA
actgctgtcgccgccggagaacaggttgttcctgcctctgaacttgctgccgccatgaagcagattaaagaactc

SEQ ID NO: 390813 - DNA, 75 bp, synthetic construct
  source 1..75: mol_type = other DNA
ccgttaagtgataatcagtttgaacagctttaccatgcggtgttgcgccatcaggtggtgtttctgcgtgaacaa

SEQ ID NO: 390814 - DNA, 75 bp, synthetic construct
  source 1..75: mol_type = other DNA
tcaggtggtgtttctgcgcgatcaagctattacgccgcagcagcaacgcgcgctggcccagcgttttggcgaact

SEQ ID NO: 390815 - DNA, 75 bp, synthetic construct
  source 1..75: mol_type = other DNA
gagcgaggcgctgctgggattcctgttcgcgcatatcaccaggccggagtttcaggtccgctggcgctggcagga

SEQ ID NO: 390816 - DNA, 75 bp, synthetic construct
  source 1..75: mol_type = other DNA
ggccaacagcaaactgctggcggatttcattgtgcggatgaatcgtgtcgatgaacttacccactggacggtggc

SEQ ID NO: 390817 - DNA, 75 bp, synthetic construct
  source 1..75: mol_type = other DNA
atgataatgacggtaacaagcatgttagataatgttttaagaattgccacacgccaaagcccacttgcactctgg

SEQ ID NO: 390818 - DNA, 75 bp, synthetic construct
  source 1..75: mol_type = other DNA
aaagtacagacggcgctgaaagacgatcccatgtccggccatgttttcattttccggggccgcagcggcagtcag

SEQ ID NO: 390819 - DNA, 75 bp, synthetic construct
  source 1..75: mol_type = other DNA
ctgcgaaagtacaaacggcgctgaaagacgatcccatgtccggccatgttttcattttccggggccgcagcggca

SEQ ID NO: 390820 - DNA, 75 bp, synthetic construct
  source 1..75: mol_type = other DNA
ccggaacaagggtttcgcaataaagccaaaatggtggtgagtggtagcgttgaaaaaccactgctcggaatgcta

SEQ ID NO: 390821 - DNA, 75 bp, synthetic construct
  source 1..75: mol_type = other DNA
ttatcttccgtggccgacggggtgacaccgtcaaaattctttgggctgatgctgatggtctgtgcctgttcacca

SEQ ID NO: 390822 - DNA, 75 bp, synthetic construct
  source 1..75: mol_type = other DNA
atgtccggccatgttttcattttccggggccgcagcggcagtcaggttaaactgctgtggtccaccggtgacgga

SEQ ID NO: 390823 - DNA, 75 bp, synthetic construct
  source 1..75: mol_type = other DNA
agtgttcctcacaccggcacagctggcgatgctgctggaaggtatcgactggcggcagcctaaaagactgcttac

SEQ ID NO: 390824 - DNA, 75 bp, synthetic construct
  source 1..75: mol_type = other DNA
gcaaagtgttcctgaccccggcacagctggcgatgctgatggaaggtatcgactggcgacaacctaaacggctgc

SEQ ID NO: 390825 - DNA, 75 bp, synthetic construct
  source 1..75: mol_type = other DNA
tatttggtcgggccgccgcggaagggcggaccggtgaactgcctttgatcaggcgggtgagcgatcattgcagcg

SEQ ID NO: 390826 - DNA, 75 bp, synthetic construct
  source 1..75: mol_type = other DNA
ggaacgcggccgcttcgcctggccctcggcccgtgatggcaaagtgttcctgacgccagcgcagctggcaatgct

SEQ ID NO: 390827 - DNA, 75 bp, synthetic construct
  source 1..75: mol_type = other DNA
tgacgccagcgcagctggcaatgctgttggaaggtatcgactggcggcagcctaagcggttgctgacctccctga

SEQ ID NO: 390828 - DNA, 75 bp, synthetic construct
  source 1..75: mol_type = other DNA
atgatcccgttaccttccggaaccaaaatttggctggttgccggtatcaccgatatgagaaatggcttcaacggc

SEQ ID NO: 390829 - DNA, 75 bp, synthetic construct
  source 1..75: mol_type = other DNA
acatggataaccgctccatctccgacctacagcaaaccaaagtcgttaaagtcgcgccaggttttgaagatcgcc

SEQ ID NO: 390830 - DNA, 75 bp, synthetic construct
  source 1..75: mol_type = other DNA
caatgcgctggatgatgcccgtcaccaggcaaaatacgttacagctacgatacaaaaactgatcccgagtcaggc

SEQ ID NO: 390831 - DNA, 75 bp, synthetic construct
  source 1..75: mol_type = other DNA
gccagatctgcaattttagttgatcaggtaaaactggttgacgctcttattcaatttcgggaattcatcaatgag

SEQ ID NO: 390832 - DNA, 75 bp, synthetic construct
  source 1..75: mol_type = other DNA
cctctgaccgctgtggttaatttagacagtcacgtcatttcagacgtcaaagttaccgtccacggtaagggcgaa

SEQ ID NO: 390833 - DNA, 75 bp, synthetic construct
  source 1..75: mol_type = other DNA
ccgctgacggcagtcgtgaatttagatagtcacgtgatttctgacgttaaagtaacggttcacggtaagggcgaa

SEQ ID NO: 390834 - DNA, 75 bp, synthetic construct
  source 1..75: mol_type = other DNA
gtcgtgataagcaagtgaaatggatccttgcaccctctaaaggttgggaaaaaccgctggccagcaagctgctga

SEQ ID NO: 390835 - DNA, 75 bp, synthetic construct
  source 1..75: mol_type = other DNA
gcttgctgcatcacgtggtgaatttgttgcagggattagcgacccgaatgatccgaaatgggtgaaggggattga

SEQ ID NO: 390836 - DNA, 75 bp, synthetic construct
  source 1..75: mol_type = other DNA
caaggtcagaaaacgccttgggattaaaggtggtttttactggactacagcaaaaaaattatctgttgccatctc

SEQ ID NO: 390837 - DNA, 75 bp, synthetic construct
  source 1..75: mol_type = other DNA
ttatgcaggcagccaatatcagccagcctgacgccgataagttgcttgcggcctctcgcggtgaatttgttgcag

SEQ ID NO: 390838 - DNA, 75 bp, synthetic construct
  source 1..75: mol_type = other DNA
gtcaccgctgacgaagtaaacaaaactatgcaggcagccagtatcagccagcctgatgccgataagttgcttgct

SEQ ID NO: 390839 - DNA, 75 bp, synthetic construct
  source 1..75: mol_type = other DNA
cagcaaatcccttaattaaggtgaacggtcatcgtgaaatcacatccaccagcaggttgtggcaccatctgatga

SEQ ID NO: 390840 - DNA, 75 bp, synthetic construct
  source 1..75: mol_type = other DNA
ctgcggtcagagcggtggcggcaactgccctgattgtggcgcggtgatgggcgacgcaacataccaggaaacatt

SEQ ID NO: 390841 - DNA, 75 bp, synthetic construct
  source 1..75: mol_type = other DNA
aaaggcgttgacatcagctataaagtgggcaacgagtcactgaaaacttacgatggtgtaccgatttttggtctt

SEQ ID NO: 390842 - DNA, 75 bp, synthetic construct
  source 1..75: mol_type = other DNA
tgcgtaaaatttcccgactggaaatggtgctggcaattgtcggtaccatgaaagcagggaaatcaaccaccatta

SEQ ID NO: 390843 - DNA, 75 bp, synthetic construct
  source 1..75: mol_type = other DNA
gctggacgtcgattttcctttttctgcttacgccgccattgagcatattcccgtgattgaagtggagtttgtcca

SEQ ID NO: 390844 - DNA, 75 bp, synthetic construct
  source 1..75: mol_type = other DNA
cgctgaatgcgcagttagccgccttgtttcaggatgattcggagccgttaagcgagattcgtacccgctgtgaga

SEQ ID NO: 390845 - DNA, 75 bp, synthetic construct
  source 1..75: mol_type = other DNA
gtgctcttaccgttgtgatgaagtgcagctctttgaagcaaccagaagataagcatctggcttcacaacataaac

SEQ ID NO: 390846 - DNA, 75 bp, synthetic construct
  source 1..75: mol_type = other DNA
gttaccagcgccagagcaacaacgctgggtggaagattttgcccatgccgcgctcggcaggcgctggcgtcatgc

SEQ ID NO: 390847 - DNA, 75 bp, synthetic construct
  source 1..75: mol_type = other DNA
attcggagccgttaagcgagattcgtacccgctgtgagaggcactgttgcaaagttagcgatgaggcagcctttt

SEQ ID NO: 390848 - DNA, 75 bp, synthetic construct
  source 1..75: mol_type = other DNA
ggaaagtgcatctgacacctgcccagctgtccatgcttctggaggggatcgcgtggcaacatccaaaacggacgg

SEQ ID NO: 390849 - DNA, 75 bp, synthetic construct
  source 1..75: mol_type = other DNA
gggaactggcaccctccgttatttctaaaacgcagggttatgatcctgattcccgtctgaacagagccacgcttg

SEQ ID NO: 390850 - DNA, 75 bp, synthetic construct
  source 1..75: mol_type = other DNA
aagattgatgagaagaaaggtactgttcagcaagtttgggaatacggtaaagaacgcggttacgatttctatagc

SEQ ID NO: 390851 - DNA, 75 bp, synthetic construct
  source 1..75: mol_type = other DNA
ttactggaaaaaatgccgctctctgtgcccggagaagatgcaccaccactggctttaccctggagtcagcctaat

SEQ ID NO: 390852 - DNA, 75 bp, synthetic construct
  source 1..75: mol_type = other DNA
ggattatacgcaactgaaatcgatctccgatgaagaggtccgtgaggcgattttggcggtggggcaatcggtgcc

SEQ ID NO: 390853 - DNA, 75 bp, synthetic construct
  source 1..75: mol_type = other DNA
gtatctggctggttgccggtatcaccgatatgcgaaatggctttaacgacctggcatcaaaagttcagaacgtcc

SEQ ID NO: 390854 - DNA, 75 bp, synthetic construct
  source 1..75: mol_type = other DNA
ggcaacggctgaaacaatggaaccggatacaactgaacatcgccaggacacgcaatcgctggatgctcaggcaca

SEQ ID NO: 390855 - DNA, 75 bp, synthetic construct
  source 1..75: mol_type = other DNA
gcgcgatgcgtttaccggattgtatttctgtgcgtctataaataaacacgactcagagagtgtggcaaataaaat

SEQ ID NO: 390856 - DNA, 75 bp, synthetic construct
  source 1..75: mol_type = other DNA
tttaaaaaacaagaaagaaaaatcgccatatgcggggaacatgtttgtttatgacaatctcattagaattcgtgg

SEQ ID NO: 390857 - DNA, 75 bp, synthetic construct
  source 1..75: mol_type = other DNA
caatacaggaaatggccgctgatgtgattcgctcgcaactggcgcggaacccaatgatattagtagataaactgt

SEQ ID NO: 390858 - DNA, 75 bp, synthetic construct
  source 1..75: mol_type = other DNA
gggatagcggtctggcggggcagttgagtaagttcacgttaatggcgctgattacttcggtgaccttgcccgttg

SEQ ID NO: 390859 - DNA, 75 bp, synthetic construct
  source 1..75: mol_type = other DNA
cacttcgccgtatgtcctgggcagagctgagcactacggcccgggatgcagaatcaaaacatgattacgaaagcg

SEQ ID NO: 390860 - DNA, 75 bp, synthetic construct
  source 1..75: mol_type = other DNA
cgcagatcgaaggcgagctccagcgtgaagctgctcgactggtgcgccggtttacaaaaacgaaagttactttag

SEQ ID NO: 390861 - DNA, 75 bp, synthetic construct
  source 1..75: mol_type = other DNA
ttacaacatgcatccttcacataccagacgtgttaacgaaattatcgcagaaaatgatccctgtttctccgtctt

SEQ ID NO: 390862 - DNA, 75 bp, synthetic construct
  source 1..75: mol_type = other DNA
aacaacgccgggagctggtggcgttgcgcagtaacaataacggtataacgcttgcagcgatgctggaggccacct

SEQ ID NO: 390863 - DNA, 75 bp, synthetic construct
  source 1..75: mol_type = other DNA
actgtgtaaaacgctggttagttacaacatccttaacttctggctggtggggtactcgcttggcggacgggtggc

SEQ ID NO: 390864 - DNA, 75 bp, synthetic construct
  source 1..75: mol_type = other DNA
atggagcaggcatcgcccctcaccccaatggggagagggagaaaacgagcgcaatattcaatattgagcacaatc

SEQ ID NO: 390865 - DNA, 75 bp, synthetic construct
  source 1..75: mol_type = other DNA
tcctctgctccaatgccgcagcgtgtaacaaaagaaggaaaacaggatgatgaagaaaaaccgcagccatctggc

SEQ ID NO: 390866 - DNA, 75 bp, synthetic construct
  source 1..75: mol_type = other DNA
aaaatgatccctgtttctccgtcttccttaaggcttttctgaacatgccaggcgggatggattattcccgcgcca

SEQ ID NO: 390867 - DNA, 75 bp, synthetic construct
  source 1..75: mol_type = other DNA
ccgtttgggtggttatgaaggggcgttgctggggctggcgttgattcccgcgctggtggtgattcctgccgtcat

SEQ ID NO: 390868 - DNA, 75 bp, synthetic construct
  source 1..75: mol_type = other DNA
ttaacgactccggtttctggatcgtcaccaaatatctgggtttatcggtggcagatggtctgaaaacctggacag

SEQ ID NO: 390869 - DNA, 75 bp, synthetic construct
  source 1..75: mol_type = other DNA
ttgcgttagctggcgtaatcatgctgttgctgctggtcatcaaggcaaaggtacaaccattcgttgctctgctcc

SEQ ID NO: 390870 - DNA, 75 bp, synthetic construct
  source 1..75: mol_type = other DNA
catgtgctgcacagctactggttgaatcttaagagcgtggtgcgcttttgcgaaaaagtgaaaaaccacaaaccg

SEQ ID NO: 390871 - DNA, 75 bp, synthetic construct
  source 1..75: mol_type = other DNA
aaacaatccgaaccagtagcgcaacaggaagaggaaaaagtctgcaccgcctgcggtcagagcggtggcggcaac

SEQ ID NO: 390872 - DNA, 75 bp, synthetic construct
  source 1..75: mol_type = other DNA
acgtttcgcggggcgaactgcgcgcattacataacgcacaggatgaaaaacttcccgccgttaccgcgctggcca

SEQ ID NO: 390873 - DNA, 75 bp, synthetic construct
  source 1..75: mol_type = other DNA
tttgcgcacctcatacgaacgtctggacatcccctgcccgtggcgctaccacaacgatcgcgatgtacgcacaat

SEQ ID NO: 390874 - DNA, 75 bp, synthetic construct
  source 1..75: mol_type = other DNA
ggctggcggagggcggggcggcaggcgtggcgttagatctccaccagcgcgcactgcaacaggggctggcgtcac

SEQ ID NO: 390875 - DNA, 75 bp, synthetic construct
  source 1..75: mol_type = other DNA
gggaacttgcacccgccgttatttctaaaacgcagggttatgatcctgattcccgtctgagcagagccacgcttg

SEQ ID NO: 390876 - DNA, 75 bp, synthetic construct
  source 1..75: mol_type = other DNA
caaatggggatcgcctggggcaacctgttactggcgctgatgaaaggctttcgcgatgccgcaggtaatgcgtta

SEQ ID NO: 390877 - DNA, 75 bp, synthetic construct
  source 1..75: mol_type = other DNA
cggtgcgcgaaacccagggcaagccgaaaatcgcggtggtggcgcatgacctgcgttacgacggcaaaactaacc

SEQ ID NO: 390878 - DNA, 75 bp, synthetic construct
  source 1..75: mol_type = other DNA
tgcaactggtccagttaagcaaaccggaaatcgcgcaggcgatatttggtaccacgctggctgagttcagccaac

SEQ ID NO: 390879 - DNA, 75 bp, synthetic construct
  source 1..75: mol_type = other DNA
cgcgatctgtttggcaatttcaatgagttatatcgcaccattactcgcacaccgggcccggtggtcctgcatttt

SEQ ID NO: 390880 - DNA, 75 bp, synthetic construct
  source 1..75: mol_type = other DNA
ggttggtgtttggctacgcgatgaaaaacagcggtctttggctggcagcgcgcggtgctaagtccgctcagcgag

SEQ ID NO: 390881 - DNA, 75 bp, synthetic construct
  source 1..75: mol_type = other DNA
aatcaaagcgtcagtcggcggggaaactgctgggataacagccccatggaacgcttcttccgcagtctgaaaaca

SEQ ID NO: 390882 - DNA, 75 bp, synthetic construct
  source 1..75: mol_type = other DNA
ccattacaacggtgggttgacgccggaagaatcagagaacagataccgtttttactataaaaccgtggccaatat

SEQ ID NO: 390883 - DNA, 75 bp, synthetic construct
  source 1..75: mol_type = other DNA
atggctatggttgaaatgcaaaccactgcggcgctggcggaatcacgccgcaaaatgcaggcgcgccgccgcctc

SEQ ID NO: 390884 - DNA, 75 bp, synthetic construct
  source 1..75: mol_type = other DNA
taacagaatatgcaatttgcgcgttgtagatgataaacagaactcaaggaacagaaaaaagcctattaataatcg

SEQ ID NO: 390885 - DNA, 75 bp, synthetic construct
  source 1..75: mol_type = other DNA
ttgcacctacaactgatgatatatggattagtaaaatcatagaactttctgggggatttgtaaaatgcttacctg

SEQ ID NO: 390886 - DNA, 75 bp, synthetic construct
  source 1..75: mol_type = other DNA
aaacgacggtaatggcacggcctttacgctggaagaaggtacatcagaggcggtgatggatgcagaccgtagcgt

SEQ ID NO: 390887 - DNA, 75 bp, synthetic construct
  source 1..75: mol_type = other DNA
tgatatgtcgataacaccgactgtttcactgaacggtgcccgggtggacggaaatcgtctgcagggccgggagcg

SEQ ID NO: 390888 - DNA, 75 bp, synthetic construct
  source 1..75: mol_type = other DNA
ggcgcgggttccctgacgttccgtgataattacacagtaacaacctctaacggaagtacctggactggggctggt

SEQ ID NO: 390889 - DNA, 75 bp, synthetic construct
  source 1..75: mol_type = other DNA
tattttcccatgaactggaaacattgtgtcgggaagcgggcgtccagctcctcatatcctgtactgatgaaaatc

SEQ ID NO: 390890 - DNA, 75 bp, synthetic construct
  source 1..75: mol_type = other DNA
ttaaagacattgctgaactggcgggagtgtcgaaagcaaccgccagtctggttctcaatggtcgtggcaaagagt

SEQ ID NO: 390891 - DNA, 75 bp, synthetic construct
  source 1..75: mol_type = other DNA
tgaaggagctgcaggcattactccgcagattgactatcagggagctgtggatattgatggtttcgaagatggtgt

SEQ ID NO: 390892 - DNA, 75 bp, synthetic construct
  source 1..75: mol_type = other DNA
gaaacgcttcaggccgatgtggtgatttacggtattggtatcagcgccaacgagcaactggctcgcgaggccaac

SEQ ID NO: 390893 - DNA, 75 bp, synthetic construct
  source 1..75: mol_type = other DNA
ttaagatagttatatggcttttattctttcctttaataggagctttgctatcaatttgcggtgtttttattgggt

SEQ ID NO: 390894 - DNA, 75 bp, synthetic construct
  source 1..75: mol_type = other DNA
atgagcgaaaaatacatcgtcacctgggacatgttgcagatccatgcacgtaaactggcaagccgcctgatgcct

SEQ ID NO: 390895 - DNA, 75 bp, synthetic construct
  source 1..75: mol_type = other DNA
gttattgatatcccacaagatacctggattgagcaaccgtgggatatgggcgtggtattcgttccgcctatctct

SEQ ID NO: 390896 - DNA, 75 bp, synthetic construct
  source 1..75: mol_type = other DNA
gggattgcccagacacttgtaaagcactagtatattttgcgcaattactggatgaaatgctatttgactatacac

SEQ ID NO: 390897 - DNA, 75 bp, synthetic construct
  source 1..75: mol_type = other DNA
agtggctgaaagacttaaccccatgaaaaaatgcaaggacttaaagcatgaaaaggccaagaaacgtcttgaatc

SEQ ID NO: 390898 - DNA, 75 bp, synthetic construct
  source 1..75: mol_type = other DNA
tcagcaagagagaatgctgaaaacctacttaaattagcatcatcctttttaaatatttatcatcataaagataaa

SEQ ID NO: 390899 - DNA, 75 bp, synthetic construct
  source 1..75: mol_type = other DNA
atggcgctggatctcgtttatccccggccttcagtggaaggcgacgcactccctttttttgccgaacccgttgcg

SEQ ID NO: 390900 - DNA, 75 bp, synthetic construct
  source 1..75: mol_type = other DNA
atgacaacaagcaaaggcaaatgggacgggctgcgcgacgcctcgtttcgtggcgtccccttctttctggtggat

SEQ ID NO: 390901 - DNA, 75 bp, synthetic construct
  source 1..75: mol_type = other DNA
ctttgaagtgtttgaggcaggcgagcgcctgttcccgtctgcggcggataacacgcagcaggaagtgctgacggg

SEQ ID NO: 390902 - DNA, 75 bp, synthetic construct
  source 1..75: mol_type = other DNA
gccgcgacgtacttcttgcgcgtgtccggcgattccatgcgtgatgcgcgcattcatgatggcgatgtactggtt

SEQ ID NO: 390903 - DNA, 75 bp, synthetic construct
  source 1..75: mol_type = other DNA
ccgaccaaatgaatatcaaagccaagaccgtttcatcgcataaaggtaatattaaacgtaagatcaaaacgcata

SEQ ID NO: 390904 - DNA, 75 bp, synthetic construct
  source 1..75: mol_type = other DNA
gccggctttcccagcccggcagcaggctatgaggccaatgaacttaacctgcatgattactgtgtgcggcacccg

SEQ ID NO: 390905 - DNA, 75 bp, synthetic construct
  source 1..75: mol_type = other DNA
aaactggtagctgaccgtttcaatactgcagggtatctgttccacggacaactgaaaggcaatctgaatgtggat

SEQ ID NO: 390906 - DNA, 75 bp, synthetic construct
  source 1..75: mol_type = other DNA
tcgaatatcagttatttcgtgattttgctgaaaataaaggtgtattccgtccaggggccacagacattgccattt

SEQ ID NO: 390907 - DNA, 75 bp, synthetic construct
  source 1..75: mol_type = other DNA
tcggatatcagttatttcgtgattttgctgaaaataaaggtgcgttccgaccgggggccacagacattgcaattt

SEQ ID NO: 390908 - DNA, 75 bp, synthetic construct
  source 1..75: mol_type = other DNA
aatattgacggaaaaaacactaatgggtccgatttcttcgacggtagcatctatttaccatatacaaaattaacg

SEQ ID NO: 390909 - DNA, 75 bp, synthetic construct
  source 1..75: mol_type = other DNA
gaaaatgggcgtctgacactgcaggggcatccggttatccatgcatacaatactcagtctgtggctgacaaactg

SEQ ID NO: 390910 - DNA, 75 bp, synthetic construct
  source 1..75: mol_type = other DNA
caggtattaatgaaggcggtctgaaggtcggggacggaaaggttgtactgaaccagcaggcggataataaaggac

SEQ ID NO: 390911 - DNA, 75 bp, synthetic construct
  source 1..75: mol_type = other DNA
ggtcggggacggaaaggttgtactgaaccagcaggcggacaataaaggacaggtgcaggcgttcagcagtgtcaa

SEQ ID NO: 390912 - DNA, 75 bp, synthetic construct
  source 1..75: mol_type = other DNA
gaagaacttgacgccatcaccggagggatgaacgcggaagacctggtgataatcgccgctcgtcctggtatgggg

SEQ ID NO: 390913 - DNA, 75 bp, synthetic construct
  source 1..75: mol_type = other DNA
gtctggctgatgtccagcacgaatgccctggcgctgtccatgcgtaaaaatgcgctggggcagaaggaatatccg

SEQ ID NO: 390914 - DNA, 75 bp, synthetic construct
  source 1..75: mol_type = other DNA
ccagtacgtgggtgaccagctggtgctggtgaatgccccggatatttatctggcggatgacggcggcgtggcagt

SEQ ID NO: 390915 - DNA, 75 bp, synthetic construct
  source 1..75: mol_type = other DNA
ggctgcggcctcgctacgccagcaagggttcaccggtgagctgcatctgttttccgatgagcaacatcttcctta

SEQ ID NO: 390916 - DNA, 75 bp, synthetic construct
  source 1..75: mol_type = other DNA
tactgctcttgaggagtataagaaacaataccctcatttggctaagcgtgttgaaaaaatttcaggctatgttga

SEQ ID NO: 390917 - DNA, 75 bp, synthetic construct
  source 1..75: mol_type = other DNA
cacggactgacaacgatgccaaaaacatctgaactggtttctgctgaacccgattttgaggcgctgaataatggg

SEQ ID NO: 390918 - DNA, 75 bp, synthetic construct
  source 1..75: mol_type = other DNA
ggccaaacagctgctgctttcatttgttccggggacgtttataggcgcatgcgcgacgtttgccgggcagggtga

SEQ ID NO: 390919 - DNA, 75 bp, synthetic construct
  source 1..75: mol_type = other DNA
cgggcttccattacgttggattatgccctgcgtgccgaaaaagtgatactgaacaactggtcagactcccggaga

SEQ ID NO: 390920 - DNA, 75 bp, synthetic construct
  source 1..75: mol_type = other DNA
acagtgccgtggccaggggctttattgccgtctctgagtttgccaggaaatgcacctgccgggttaccgggaaaa

SEQ ID NO: 390921 - DNA, 75 bp, synthetic construct
  source 1..75: mol_type = other DNA
tgaatgcaacctttaatggtgatatcagcggtcataccggctcgcatgtggaactgtcgcgcaaaagttactgga

SEQ ID NO: 390922 - DNA, 75 bp, synthetic construct
  source 1..75: mol_type = other DNA
tgccacgctgaacaccatggttgaggcaacagattcgacgatcacactgggcgacagccgggtttttatcgacaa

SEQ ID NO: 390923 - DNA, 75 bp, synthetic construct
  source 1..75: mol_type = other DNA
gttggtagtgctgtgactggtctggatgcattgattcaaaaaggatataagactgttaatatacctgtaaatgat

SEQ ID NO: 390924 - DNA, 75 bp, synthetic construct
  source 1..75: mol_type = other DNA
ctccaaagcgaccgccagcttggtactgaatggtcgtggcaaggagctgcgcgtggcgcaggaaacgcgtgagcg

SEQ ID NO: 390925 - DNA, 75 bp, synthetic construct
  source 1..75: mol_type = other DNA
aaactggtagctgaccgtttcaatgctgcagggtatctgttccacggacagctgaaaggcaatctgaatgtggat

SEQ ID NO: 390926 - DNA, 75 bp, synthetic construct
  source 1..75: mol_type = other DNA
ataattacacagtaacaacctctaacggaagtacctggactggggctggtattattgtggataaaggagtgtccg

SEQ ID NO: 390927 - DNA, 75 bp, synthetic construct
  source 1..75: mol_type = other DNA
tgacatgcacggacagctgggaaatgacctgaatgccggtaagaatctggaatttctggggcggaatgggcagat

SEQ ID NO: 390928 - DNA, 75 bp, synthetic construct
  source 1..75: mol_type = other DNA
gagcttctcggacataccataaaaaatgttaatgattttgatgacacaatggtcagtcgaccaacggcaggggac

SEQ ID NO: 390929 - DNA, 75 bp, synthetic construct
  source 1..75: mol_type = other DNA
gcgacagccgggtttttatcgacaaaaacgatggtaacggcacggcgtttacgctggaagaaggcacatcagaag

SEQ ID NO: 390930 - DNA, 75 bp, synthetic construct
  source 1..75: mol_type = other DNA
atgacctcttttggacagagtggcgatagtggttctccattatttggctggaatgcagttagtgggcagtgggaa

SEQ ID NO: 390931 - DNA, 75 bp, synthetic construct
  source 1..75: mol_type = other DNA
aaaatggtttatgaagcgcattccaccgattaccagactcagacggcctatcgggaattagttcgcgatcatttt

SEQ ID NO: 390932 - DNA, 75 bp, synthetic construct
  source 1..75: mol_type = other DNA
gcaatattgaaagtcggtcccgcattaacctttgctttacgtgaggcgatatttgcgctggcacaaattgagcag

SEQ ID NO: 390933 - DNA, 75 bp, synthetic construct
  source 1..75: mol_type = other DNA
atgaaaacgttaattgcccggcataaagccggtgaacatatcggcatatgttctgtctgttcggcgcatccgttg

SEQ ID NO: 390934 - DNA, 75 bp, synthetic construct
  source 1..75: mol_type = other DNA
agcgacggaaaggcattccgtatcggaggcggtcaggcggatgccctgatgctggaaaaaggcagttcattcacg

SEQ ID NO: 390935 - DNA, 75 bp, synthetic construct
  source 1..75: mol_type = other DNA
cggtgccgctgtcagtggtacccggagcgacggaaaggcattcagtatcggaggcggtcaggcggatgccctgat

SEQ ID NO: 390936 - DNA, 75 bp, synthetic construct
  source 1..75: mol_type = other DNA
ggaaggcgtggacatcccactgggcatgattagtcagtatcttcccaaacaatttgaacgcattcagtccgggga

SEQ ID NO: 390937 - DNA, 75 bp, synthetic construct
  source 1..75: mol_type = other DNA
catcgaggtatccccgaatatcggcgcactggtttccgcttccatctctgtcgcagtcctgcttcgcatcctcgc

SEQ ID NO: 390938 - DNA, 75 bp, synthetic construct
  source 1..75: mol_type = other DNA
tgctgaaggaacggcaaataccactgtggtttatgccggcggcgaccagactgtacatggtcacgcactggatac

SEQ ID NO: 390939 - DNA, 75 bp, synthetic construct
  source 1..75: mol_type = other DNA
ggtatacttaattgttacttatgagagtaatgttgatataaatatttatttaagcagttcgatatatgctgcatc

SEQ ID NO: 390940 - DNA, 75 bp, synthetic construct
  source 1..75: mol_type = other DNA
tttcagtaaaattcatcttgatgcgtcaatgtcctgcgcgggtgatcctgtaccgttagcgccagaaacggtagc

SEQ ID NO: 390941 - DNA, 75 bp, synthetic construct
  source 1..75: mol_type = other DNA
ggaactcatcgcacccgaaaatcgtagccgttgtctggcggtgattgaagatgtgatgcttgacgaaccacaata

SEQ ID NO: 390942 - DNA, 75 bp, synthetic construct
  source 1..75: mol_type = other DNA
caggcgctggcgcaatggatagaaaacacccgaatggtttatgaagcacattctaccgattaccagacccggacg

SEQ ID NO: 390943 - DNA, 75 bp, synthetic construct
  source 1..75: mol_type = other DNA
ttcgtccgtctggagggtgacctgctcagaacagaggttgccggtatgtcactgacgacaggagtgtatggtgct

SEQ ID NO: 390944 - DNA, 75 bp, synthetic construct
  source 1..75: mol_type = other DNA
caattgaaaaacccctctcctctctgccttactcactttcccgtcacatcctggaacatctgcgcaaactcacca

SEQ ID NO: 390945 - DNA, 75 bp, synthetic construct
  source 1..75: mol_type = other DNA
aaccgtgacagcgatgaagactggtacctgcgcagtgaacatgcttatcgttctgaagtcccccagtatgcctcc

SEQ ID NO: 390946 - DNA, 75 bp, synthetic construct
  source 1..75: mol_type = other DNA
aaccgtgacagcgatgaagactggtacctgcgcagtgaacatgcatatcgttctgaagtccccctgtatgcctcc

SEQ ID NO: 390947 - DNA, 75 bp, synthetic construct
  source 1..75: mol_type = other DNA
atatcaccctgggcgttcaggccggttatgcccacagcgtcagcggcagcagcgctgaaggttataacggccaag

SEQ ID NO: 390948 - DNA, 75 bp, synthetic construct
  source 1..75: mol_type = other DNA
tgaataacagaagtttgcgggtgaaatttctattacagataagaaataccgtatcgcaaattattaccttgctgc

SEQ ID NO: 390949 - DNA, 75 bp, synthetic construct
  source 1..75: mol_type = other DNA
cccgtgacactctgcgcgacagtgcaaaacaccgtgtgagtgaactgccggtgaactggtgggtacagccttctg

SEQ ID NO: 390950 - DNA, 75 bp, synthetic construct
  source 1..75: mol_type = other DNA
gtgcatgctggtgctcgcacaattcgcctttgcagaatactcccgttcagcggaaaccagcgtgacgtgtcacag

SEQ ID NO: 390951 - DNA, 75 bp, synthetic construct
  source 1..75: mol_type = other DNA
gcaaacgcgacttggggtgaaaacctacctgaatagccatcaccagcgtgacgatggtaaacagcgtgagttcca

SEQ ID NO: 390952 - DNA, 75 bp, synthetic construct
  source 1..75: mol_type = other DNA
aaccgtgacagcgatgaagactggtacctgcgcagtgaaaatgcctatcgttctgaagtccccctgtatgcctcc

SEQ ID NO: 390953 - DNA, 75 bp, synthetic construct
  source 1..75: mol_type = other DNA
aaccgtgacagcgatgaagactggtacctgcgcagtgaaaatgcttatcgttctgaagtccccccgtatgcctcc

SEQ ID NO: 390954 - DNA, 75 bp, synthetic construct
  source 1..75: mol_type = other DNA
ttcagctcccggggggacatgagcatggggacagctgcagccggcagtaacatgacgttctcaccgtcacagaat

SEQ ID NO: 390955 - DNA, 75 bp, synthetic construct
  source 1..75: mol_type = other DNA
tcattccgatgaaaaggcccgccaacgatggaaaggaaaaagggtttccccgaccggagaaacccttttctaaag

SEQ ID NO: 390956 - DNA, 75 bp, synthetic construct
  source 1..75: mol_type = other DNA
ccagacggtacatggccacgcactggataccacgctgaatggcggtaaccagtatgtgcacaacggcggtacaac

SEQ ID NO: 390957 - DNA, 75 bp, synthetic construct
  source 1..75: mol_type = other DNA
tcgcgatcgtgtgtttcctgtacttttcggcccgccatgtaccggaaatatccccggatgccgtggccgaacgca

SEQ ID NO: 390958 - DNA, 75 bp, synthetic construct
  source 1..75: mol_type = other DNA
agccttgatggcagtaatgcctctgaccagctggtgattaatggtggtcaggcaaccggcaaaacctggcttgcg

SEQ ID NO: 390959 - DNA, 75 bp, synthetic construct
  source 1..75: mol_type = other DNA
caggaaggtgacagcaccagggacaccacggtgaatggcggacaactgactgcacatggcggaaccctggcgggc

SEQ ID NO: 390960 - DNA, 75 bp, synthetic construct
  source 1..75: mol_type = other DNA
aaccgcctgggagcattctctgttgtggagggtaaggctgataatgtcgtactggaaaatggcggacgtctggat

SEQ ID NO: 390961 - DNA, 75 bp, synthetic construct
  source 1..75: mol_type = other DNA
cacgctgacgctgaacaacagtaccgtcaccacggatgtcactgctcagcgcggtacagccctgaagctgaccgg

SEQ ID NO: 390962 - DNA, 75 bp, synthetic construct
  source 1..75: mol_type = other DNA
agggtggagcactggtcaccagtactgcggcaacggttcttggcagcaaccgtctgggcaatttcacggtggaaa

SEQ ID NO: 390963 - DNA, 75 bp, synthetic construct
  source 1..75: mol_type = other DNA
tctctcctcgtcacaggatgaagcccgttacgaagtgcggcttgaaccccgtatggcgctgctgacccgcagccg

SEQ ID NO: 390964 - DNA, 75 bp, synthetic construct
  source 1..75: mol_type = other DNA
ccaccgggggcgataacaccacctacggcgaagcctatcactacgccgacaacttcctgcaaaaaggcgataaag

SEQ ID NO: 390965 - DNA, 75 bp, synthetic construct
  source 1..75: mol_type = other DNA
acgttgttgatttctcctgtaccgtaaacacagcggatattgataagacggtagatttaggcagatggcctacga

SEQ ID NO: 390966 - DNA, 75 bp, synthetic construct
  source 1..75: mol_type = other DNA
atggcgaattaccgtcttatatcactggcgctgacagttacgacaacgctccgatggaaagcttctggggaacgc

SEQ ID NO: 390967 - DNA, 75 bp, synthetic construct
  source 1..75: mol_type = other DNA
gttctcggtacggccaacggaatgaccatcagtaccggtctggagtatgggccggataacgaggccaataccggc

SEQ ID NO: 390968 - DNA, 75 bp, synthetic construct
  source 1..75: mol_type = other DNA
ctgggagcattctctgttgtggagggtaaggctgataatgtcgtactggaaaatggcggacgtctggatgtgctg

SEQ ID NO: 390969 - DNA, 75 bp, synthetic construct
  source 1..75: mol_type = other DNA
gggtacagccttctgttatccgcaccttcagctcccggggagatatgcgtgtggggacttccactgcaggcagcg

SEQ ID NO: 390970 - DNA, 75 bp, synthetic construct
  source 1..75: mol_type = other DNA
acttccgcgcccggggctggggctggctgggctcactggaaaccggtctgcccttcagtatcactgacaacctga

SEQ ID NO: 390971 - DNA, 75 bp, synthetic construct
  source 1..75: mol_type = other DNA
atgaaacgacatctgaatacctgctacaggctggtatggaatcacattacgggcgctttcgtggttgcctccgga

SEQ ID NO: 390972 - DNA, 75 bp, synthetic construct
  source 1..75: mol_type = other DNA
ggtccgggatgatgccggcagcttgggcggatatatgaacctgacacacacctcctccggcctgtgggctgacat

SEQ ID NO: 390973 - DNA, 75 bp, synthetic construct
  source 1..75: mol_type = other DNA
tgcacaacggcggtacggcgtctggcactgttgtaaacagtgacggctggcagattgtcaaaaacgggggtgtgg

SEQ ID NO: 390974 - DNA, 75 bp, synthetic construct
  source 1..75: mol_type = other DNA
cgataacgccacggttcagtcggtggtggatgacctcagccatgccggacagattcatttcacctccacccgcac

SEQ ID NO: 390975 - DNA, 75 bp, synthetic construct
  source 1..75: mol_type = other DNA
atggatcaagctctactggatgatggttatcgctgctataccggcgaaaagatagatgtctggttcaacaccgcg

SEQ ID NO: 390976 - DNA, 75 bp, synthetic construct
  source 1..75: mol_type = other DNA
cacgtcactggacctgcaggccggactggaagcccgtgtccgggaaaatatcaccctgggggttcaggccggtta

SEQ ID NO: 390977 - DNA, 75 bp, synthetic construct
  source 1..75: mol_type = other DNA
tacagccttccgttatccgcaccttcagctcccggggtgatatgcgtgtggggacctccaccgcaagcagcggga

SEQ ID NO: 390978 - DNA, 75 bp, synthetic construct
  source 1..75: mol_type = other DNA
gttaatgccggaggactggccagcaacaccactgtcggacatcgtggaacactgacgctggccgccgggggaagt

SEQ ID NO: 390979 - DNA, 75 bp, synthetic construct
  source 1..75: mol_type = other DNA
ttgtgggtgtcagtcgccggctgacggtaaaggacgattttaattacctgggcttcagcgagtccaggatggaca

SEQ ID NO: 390980 - DNA, 75 bp, synthetic construct
  source 1..75: mol_type = other DNA
ctgacacaggcaatggactatgaccgaattctggcaggctcccgcagccatcagaccggtgtaaacggtgaaaat

SEQ ID NO: 390981 - DNA, 75 bp, synthetic construct
  source 1..75: mol_type = other DNA
aaacacagtgtgagtgaactgccggtgaactggtgggtacagccttctgttatccgcaccttcagctcccgggga

SEQ ID NO: 390982 - DNA, 75 bp, synthetic construct
  source 1..75: mol_type = other DNA
aaggtgccagcatggtactgaatggcgatgtggtcagtaccggcgatattgttaacgcaggggagattcgctttg

SEQ ID NO: 390983 - DNA, 75 bp, synthetic construct
  source 1..75: mol_type = other DNA
actgacgctggctgccgggggaagtctgagtggcagaacacagctcagtaaaggtgccagcatggtactgaatgg

SEQ ID NO: 390984 - DNA, 75 bp, synthetic construct
  source 1..75: mol_type = other DNA
ggaagggggaccagatgcagaaaatggtgataccgggcagtttgttcgcggaaatgccgtacgtaccaccatcaa

SEQ ID NO: 390985 - DNA, 75 bp, synthetic construct
  source 1..75: mol_type = other DNA
gcgttcaggccggttatgcccacagcgtcagcggcagcagcgctgaaggttataacggtcaggccacgctgaatg

SEQ ID NO: 390986 - DNA, 75 bp, synthetic construct
  source 1..75: mol_type = other DNA
tcaggccggttatgcccacagcgtcagcggcagcagcgctgaaggttataacggtcaggccacactgaatgtgac

SEQ ID NO: 390987 - DNA, 75 bp, synthetic construct
  source 1..75: mol_type = other DNA
taccctttccgggaagacggtgaacaacgataccctgaccatccgtgaaggcgatgcgctcctgcagggaggctc

SEQ ID NO: 390988 - DNA, 75 bp, synthetic construct
  source 1..75: mol_type = other DNA
tgctgctgtcacatcagtcccggcactggctgctgacacggttgtacaggcgggagaaaccgtgaacggcggaac

SEQ ID NO: 390989 - DNA, 75 bp, synthetic construct
  source 1..75: mol_type = other DNA
tggcacagggaacccgccacagcatgaaagcgtcatcggacaataacgacttccgcgcccggggctggggctggc

SEQ ID NO: 390990 - DNA, 75 bp, synthetic construct
  source 1..75: mol_type = other DNA
tggacctgcaggccggactggaagcccgtgtccgggaaaatatcaccctgggcgttcaggccggttatgcccaca

SEQ ID NO: 390991 - DNA, 75 bp, synthetic construct
  source 1..75: mol_type = other DNA
ccacgaatgtcactctcgcctccggtgccacctggaatatccccgataacgccacggtgcagtcggtggtggatg

SEQ ID NO: 390992 - DNA, 75 bp, synthetic construct
  source 1..75: mol_type = other DNA
agggaagttcgtaccggcaaccctgaaagtgaaaaacctgaacggacagaatggcaccatcagcctgcgtgtacg

SEQ ID NO: 390993 - DNA, 75 bp, synthetic construct
  source 1..75: mol_type = other DNA
tcagaacggcgagctgagggttcatgccggcggtgaagcgtctgatgtcacccagaacacgggaggtgcactggt

SEQ ID NO: 390994 - DNA, 75 bp, synthetic construct
  source 1..75: mol_type = other DNA
tgggcgttcaggccggttatgcccacagcgtcagcggcagcagcgctgaaggttataacggtcaggccacgctga

SEQ ID NO: 390995 - DNA, 75 bp, synthetic construct
  source 1..75: mol_type = other DNA
gcgtgacagtgcaaaacacagtgtgcgtgaactgccggtgaactggtgggtacagccttccgttatccgcacctt

SEQ ID NO: 390996 - DNA, 75 bp, synthetic construct
  source 1..75: mol_type = other DNA
atggcttcgtccgtctggagggtgacctgctcagaacagaggttgccggtatgtctctgacgacaggggtgtatg

SEQ ID NO: 390997 - DNA, 75 bp, synthetic construct
  source 1..75: mol_type = other DNA
ccggtgtggcggttgcgctgtctcttgctactgtcacgtcagtcccggccctggctgctgacagtattgtacagg

SEQ ID NO: 390998 - DNA, 75 bp, synthetic construct
  source 1..75: mol_type = other DNA
acgctgaatggggggtattgcccgtggagccacgccggaaagcagcggcagctatggcttcgtccgtctggaggg

SEQ ID NO: 390999 - DNA, 75 bp, synthetic construct
  source 1..75: mol_type = other DNA
ctggatgacggccaggataacgccggttatgtgaagttcgggcatggcagtgcacaacatgtgcgtgccggtttc

SEQ ID NO: 391000 - DNA, 75 bp, synthetic construct
  source 1..75: mol_type = other DNA
tctggaatccggcggtcgtctggatgtactggagagccattcagcacagaataccctggtggatgacggcggtat

SEQ ID NO: 391001 - DNA, 75 bp, synthetic construct
  source 1..75: mol_type = other DNA
gacagtgccaaacacagtgtgggtgaactgccggtgaactggtgggtacagccttctgttatccgcaccttcagc

SEQ ID NO: 391002 - DNA, 75 bp, synthetic construct
  source 1..75: mol_type = other DNA
aggataacgccggttatgtgaagttcgggcatggcagtgcacaacatgtgcgtgccggtttccgtctgggcagcc

SEQ ID NO: 391003 - DNA, 75 bp, synthetic construct
  source 1..75: mol_type = other DNA
tcagaccggtgtaaacggtgaaaataacagcatccgtctcagcattcagggcggtcatctcggtcacgataacaa

SEQ ID NO: 391004 - DNA, 75 bp, synthetic construct
  source 1..75: mol_type = other DNA
gatgacgttctctccctcacagaatggcacatcactggacctgcaggccggactggaagcccgtgtccgggaaaa

SEQ ID NO: 391005 - DNA, 75 bp, synthetic construct
  source 1..75: mol_type = other DNA
cgggttgtggatgcacagaatggcgccaccacagaagaaggtgcgtttgccctgagtcgcccgcttcaggccggc

SEQ ID NO: 391006 - DNA, 75 bp, synthetic construct
  source 1..75: mol_type = other DNA
cagaccagctggtgattaatggtggtcaggcaaccggcaaaacctggcttgcgttcacaaatgtcggaaacagta

SEQ ID NO: 391007 - DNA, 75 bp, synthetic construct
  source 1..75: mol_type = other DNA
cgcagaaggcggcccggattctgacaactcgtacacgggtcagaaggtccagggaacagcagaatccaccaccat

SEQ ID NO: 391008 - DNA, 75 bp, synthetic construct
  source 1..75: mol_type = other DNA
ataccacggtaaatggcggactgttcaccgccaggggcggcacactggcgggcaccaccacgctgaataacggcg

SEQ ID NO: 391009 - DNA, 75 bp, synthetic construct
  source 1..75: mol_type = other DNA
aaccgtctgggcaatttcacggtggaaaacggtaaggctgacggtgttgttctggaatccggcggtcgtctggat

SEQ ID NO: 391010 - DNA, 75 bp, synthetic construct
  source 1..75: mol_type = other DNA
acggccaggataacgccggttatgtgaagttcgggcatggcagtgcacaacatgtacgtgccggtttccgtctgg

SEQ ID NO: 391011 - DNA, 75 bp, synthetic construct
  source 1..75: mol_type = other DNA
gggcaatgggtacaggatggcggcacagccagtaataccgccatcagcagcggcggtctccagtttgtaggtgcc

SEQ ID NO: 391012 - DNA, 75 bp, synthetic construct
  source 1..75: mol_type = other DNA
cggatttcaccatcgttaaccagaaaggcaaactgcaggtgaacgccggtggtacagccacgaatgtcaccctga

SEQ ID NO: 391013 - DNA, 75 bp, synthetic construct
  source 1..75: mol_type = other DNA
atgaggcgagtccaggggcatagcgtggactcgccagcagaatataaaattttcctcaacatcatcctcacgcca

SEQ ID NO: 391014 - DNA, 75 bp, synthetic construct
  source 1..75: mol_type = other DNA
tgggtacagccttccgttatccgcaccttcagctcccggggtgatatgcgtgtggggacctccactgcaggcagc

SEQ ID NO: 391015 - DNA, 75 bp, synthetic construct
  source 1..75: mol_type = other DNA
ccggtgcctttaactactccctcaaccgggacagtgatgagagctggtatctgcgcagtgaaaatgcttatcgtg

SEQ ID NO: 391016 - DNA, 75 bp, synthetic construct
  source 1..75: mol_type = other DNA
cacatggggacataacacaggcgatgatattttacgtaaagtctcgcaggcattttatgacaatgtacgtagcag

SEQ ID NO: 391017 - DNA, 75 bp, synthetic construct
  source 1..75: mol_type = other DNA
cgtcattaatgataagggctggcaggtcgtcaaacccggcgcagtggcaacagacaccgttgtgaataccggcgc

SEQ ID NO: 391018 - DNA, 75 bp, synthetic construct
  source 1..75: mol_type = other DNA
taacggcggagggaaaggccagtgcagagaaactgttcgcgatggcagaacatttactggcgcatgaccagccga

SEQ ID NO: 391019 - DNA, 75 bp, synthetic construct
  source 1..75: mol_type = other DNA
ctcagaaggcggcccggattctgacaactcgtacacgggtcaaccgggaaaacatcactattcgtctggatggtc

SEQ ID NO: 391020 - DNA, 75 bp, synthetic construct
  source 1..75: mol_type = other DNA
cctgcaggccggactggaagcccgtgtccgggaaaatatcaccctgggcgttcaggccggttatgcccacagcgt

SEQ ID NO: 391021 - DNA, 75 bp, synthetic construct
  source 1..75: mol_type = other DNA
ggtcgtcagattgtggctgctgaaggaacggcaaataccactgtggtttatgccggcggcgaccagactgtacat

SEQ ID NO: 391022 - DNA, 75 bp, synthetic construct
  source 1..75: mol_type = other DNA
gccggttatgcccacagcgtcagcggcagcagcgctgaaggctataacggtcaggctacgctgaatatgactttc

SEQ ID NO: 391023 - DNA, 75 bp, synthetic construct
  source 1..75: mol_type = other DNA
gccggataacgaggccaataccggcggccaatggatacaaaatggcggtaccgccaacaacactactgtcaccgg

SEQ ID NO: 391024 - DNA, 75 bp, synthetic construct
  source 1..75: mol_type = other DNA
tcagaacagaggttgccggtatgtcactgacgacaggagtgtatggtgctgcaggccattcttccgttgatgtta

SEQ ID NO: 391025 - DNA, 75 bp, synthetic construct
  source 1..75: mol_type = other DNA
tcaggcaggttatgtccacagcgtcagcggcagcagcgctgaaggctataacggtcaggccacgctgaatgtgac

SEQ ID NO: 391026 - DNA, 75 bp, synthetic construct
  source 1..75: mol_type = other DNA
gccggtgatacggccacggataccacggtaaatggcggactgttcaccgccaggggcggcacactggcgggcacc

SEQ ID NO: 391027 - DNA, 75 bp, synthetic construct
  source 1..75: mol_type = other DNA
gccggttatgcccacagcgtcagcggcagcagcgctgaaggctataacggtcaggccacgctgaatgtgaccttc

SEQ ID NO: 391028 - DNA, 75 bp, synthetic construct
  source 1..75: mol_type = other DNA
ttgctggcagatctccgcgcacaacagatcccggtagggctggcttctgtctccctcaatgcgccgacgatttta

SEQ ID NO: 391029 - DNA, 75 bp, synthetic construct
  source 1..75: mol_type = other DNA
gagtctctgcggcgcattctgcaacacgggggcaaagagggcgactttaactcgcaggagagggcgcaactggcg

SEQ ID NO: 391030 - DNA, 75 bp, synthetic construct
  source 1..75: mol_type = other DNA
tcaggagcggctggaaacctccgagggacgccgcgagttttggcgagcaacagtttcctgctggttaggcactac

SEQ ID NO: 391031 - DNA, 75 bp, synthetic construct
  source 1..75: mol_type = other DNA
ctctgttctctgcaaccatgccggaagcgattcgtcgcattccccgccactttatgaaagagccgcaggaagtgc

SEQ ID NO: 391032 - DNA, 75 bp, synthetic construct
  source 1..75: mol_type = other DNA
ctgccgaacgcagaactgctgggcaaacgtcgtctggaaaaattcgccgctaaagtacagcagcagctggaaagc

SEQ ID NO: 391033 - DNA, 75 bp, synthetic construct
  source 1..75: mol_type = other DNA
gacaattaaacacttaataaaaaacggtatcgtcgagcgcgtgtatacatgttttggacgccgccgccgtctgct

SEQ ID NO: 391034 - DNA, 75 bp, synthetic construct
  source 1..75: mol_type = other DNA
aaataagcggggcggtaggccgttattcaaagaaattcgcgccaggtaaggtgtttactgtatatcaggtgataa

SEQ ID NO: 391035 - DNA, 75 bp, synthetic construct
  source 1..75: mol_type = other DNA
gttactgatcctgtatgcctttccggcatttatgctgctggattctcgtgagccgtggattgttatcccgacgat

SEQ ID NO: 391036 - DNA, 75 bp, synthetic construct
  source 1..75: mol_type = other DNA
ggtcgtaacttcagcggtgaacgccgtgaaggtggtcgtggtgatggtcgtcgttttagcggcgaacgtcgtgaa

SEQ ID NO: 391037 - DNA, 75 bp, synthetic construct
  source 1..75: mol_type = other DNA
taacggctacaacagcgccgcgctgaacggtgacatgaaccaggcgctgcgtgagcagacactggaacgcctgaa

SEQ ID NO: 391038 - DNA, 75 bp, synthetic construct
  source 1..75: mol_type = other DNA
gcagccggaagcgcacaacagactgcacaggatgtgacagcaaccgaaacggcccgtgatgacgcagagcgtttt

SEQ ID NO: 391039 - DNA, 75 bp, synthetic construct
  source 1..75: mol_type = other DNA
cagattctggtgttggcaccgacccgcgaactggcggtacaggttgctgaggcaatgacggatttctctaaacac

SEQ ID NO: 391040 - DNA, 75 bp, synthetic construct
  source 1..75: mol_type = other DNA
gcaattacgcgccctgcgtcaggggccgcagattgttgtcggtactccgggccgtctgctggaccacctgaaacg

SEQ ID NO: 391041 - DNA, 75 bp, synthetic construct
  source 1..75: mol_type = other DNA
gaattccgtgaccgtgatgaccgtggtccgcgcgatcgtaacgaccgtggtccgcgtggcgaccgtgaagatcgt

SEQ ID NO: 391042 - DNA, 75 bp, synthetic construct
  source 1..75: mol_type = other DNA
ttatcaatatccttgaactggatggcatcgacacaatgcaccagttacgccagaaaacaggattatcagcggaat

SEQ ID NO: 391043 - DNA, 75 bp, synthetic construct
  source 1..75: mol_type = other DNA
acattccggacaagtgctcattcagccgagtatattacctggcgcatgagcaatggcttttacgccccactcgct

SEQ ID NO: 391044 - DNA, 75 bp, synthetic construct
  source 1..75: mol_type = other DNA
atcccttatcatggattggtatctcaaccaagcagtatcttggttttatcagttcactgatgaatataagtttta

SEQ ID NO: 391045 - DNA, 75 bp, synthetic construct
  source 1..75: mol_type = other DNA
tgctttcagagacattaaaatgggtggtggttaccagcgcctccggtaatgaagaacatcaggagatgcaggtgg

SEQ ID NO: 391046 - DNA, 75 bp, synthetic construct
  source 1..75: mol_type = other DNA
agtgaatgcagcaaagggacaacgggggttcgggttgcatttaacggtattgaggatgcagaaaataatactctg

SEQ ID NO: 391047 - DNA, 75 bp, synthetic construct
  source 1..75: mol_type = other DNA
ctgctgccgaaatacctgagcatcgacggcgtggtcgacttgaaccacctctacggctgtggcgtagcgattaat

SEQ ID NO: 391048 - DNA, 75 bp, synthetic construct
  source 1..75: mol_type = other DNA
agaaatccctttcctatccattcgatgcgataagaaaaaacaaaagagagttttttatttggatcgtttttacag

SEQ ID NO: 391049 - DNA, 75 bp, synthetic construct
  source 1..75: mol_type = other DNA
tgaactggatgacgcagaaattcggtaactggacgctgatgaatcagtggaacagcgcacttaaatcatggtctg

SEQ ID NO: 391050 - DNA, 75 bp, synthetic construct
  source 1..75: mol_type = other DNA
cgggcgagttgctaggaatattaacttcctccgtttgcttggtggaatgaccgtctccgctgcaactgatctgat

SEQ ID NO: 391051 - DNA, 75 bp, synthetic construct
  source 1..75: mol_type = other DNA
aaagcgtatgagagatattagcgctgaaacgggtatcccatggaattacctgtcgcgcacgctgcgtttaatggt

SEQ ID NO: 391052 - DNA, 75 bp, synthetic construct
  source 1..75: mol_type = other DNA
cctctggcgcagggtattacgcctaatatctttgagctggaaatcctgaccggtaaagattgccgcgatctcgac

SEQ ID NO: 391053 - DNA, 75 bp, synthetic construct
  source 1..75: mol_type = other DNA
cttgttgaaaggtaaggaattaactgacgcggtacatagcgcgggattacgcgtgctggaggtgatgcgctacac

SEQ ID NO: 391054 - DNA, 75 bp, synthetic construct
  source 1..75: mol_type = other DNA
gtttacggcagcgtgggcaacagcattgccgtgcctgctatcaaacagaacggtctgaatgtttttgccgtgccg

SEQ ID NO: 391055 - DNA, 75 bp, synthetic construct
  source 1..75: mol_type = other DNA
cggcatcattgatgtgatgtggtcaccctttgataacgacgagtcagacacagtgcgtaaattcaaaacgctgct

SEQ ID NO: 391056 - DNA, 75 bp, synthetic construct
  source 1..75: mol_type = other DNA
acagctcggaaggccgtgttgcgctgcctggtgcatttggttacggaatgacggacgccggagcgcgttcaatta

SEQ ID NO: 391057 - DNA, 75 bp, synthetic construct
  source 1..75: mol_type = other DNA
gttgttcagtggtgttgttgaaattatctggccaacacccaatgactacccgaccgatgataaggcctataaggt

SEQ ID NO: 391058 - DNA, 75 bp, synthetic construct
  source 1..75: mol_type = other DNA
ggttggcaccaagaaatttaacggcaccattgatgtgatgtggtcgccctttgataacgatgagtcggacacaat

SEQ ID NO: 391059 - DNA, 75 bp, synthetic construct
  source 1..75: mol_type = other DNA
ccctggcgtttgagggactgtctgatttcgttgaatggctgaagaaagtcacgccggggcggtatgcggtcagta

SEQ ID NO: 391060 - DNA, 75 bp, synthetic construct
  source 1..75: mol_type = other DNA
ctgacatttaccggacaggctgattttgctgaatggctgaaagaggccaccccggggcgttatgcggtcagtatt

SEQ ID NO: 391061 - DNA, 75 bp, synthetic construct
  source 1..75: mol_type = other DNA
ccggatgatgcagcaggtaatgaaatagccaatgcggagtttgtccgcaaactgcttgccgcgctggttggctca

SEQ ID NO: 391062 - DNA, 75 bp, synthetic construct
  source 1..75: mol_type = other DNA
cccaccacaccaactccaccggatgaggctgctggtctggaaacagcgaatgcggcatttgtccgcaaactgctc

SEQ ID NO: 391063 - DNA, 75 bp, synthetic construct
  source 1..75: mol_type = other DNA
tggaaaagacggacggattcttatgaccgttcgtggcgataatatctccgccccggtcacatggacgaatctgac

SEQ ID NO: 391064 - DNA, 75 bp, synthetic construct
  source 1..75: mol_type = other DNA
ccctgcctggcacatatctcgctttatcaggaggcccggatgtcacgttttataatcgggggctggtttctttgt

SEQ ID NO: 391065 - DNA, 75 bp, synthetic construct
  source 1..75: mol_type = other DNA
tgatagatggcgcaggcatccccatgtccggatgccacataattctgaaatcccgggtaaacacctcagaagtgg

SEQ ID NO: 391066 - DNA, 75 bp, synthetic construct
  source 1..75: mol_type = other DNA
tccgttgacgctgcagagcgcgcccgtcagcataaagaagttgcatcttcggcagcaaccagtgcagaaaatgcg

SEQ ID NO: 391067 - DNA, 75 bp, synthetic construct
  source 1..75: mol_type = other DNA
ggggcgttacaaagctctttccggctccaggagtttgtatggtgatgaaggccgcatttgcctgttcgtgcgcac

SEQ ID NO: 391068 - DNA, 75 bp, synthetic construct
  source 1..75: mol_type = other DNA
attcctggcatgttcggattcgggaaaatattttcacctgatgatgtggtccggtttaattcagaagctgattta

SEQ ID NO: 391069 - DNA, 75 bp, synthetic construct
  source 1..75: mol_type = other DNA
tatgttgcaccgacagatgagccggatacgctgaatgcttttctggatgcaccaaaggagggtgatttacgccct

SEQ ID NO: 391070 - DNA, 75 bp, synthetic construct
  source 1..75: mol_type = other DNA
gcagcggcgctgggccatgatccgaactttgcgacaacggtcactaaagcactggcaggtaaacagccgcttaat

SEQ ID NO: 391071 - DNA, 75 bp, synthetic construct
  source 1..75: mol_type = other DNA
gggcaccacgaaatttaacggtatcattgatgtgatgtggtcaccctctgataacgatggttcagactcagcgcg

SEQ ID NO: 391072 - DNA, 75 bp, synthetic construct
  source 1..75: mol_type = other DNA
tccatgcagcaacaaggctcgctcattactggcacgaaacacgcctgaatccatgcgcgcggagcttgaactgaa

SEQ ID NO: 391073 - DNA, 75 bp, synthetic construct
  source 1..75: mol_type = other DNA
gcgttatgcggtcagtcttgcggattcttccatgctgctggtaggcaccaagaaatttaacggcatcattgatgt

SEQ ID NO: 391074 - DNA, 75 bp, synthetic construct
  source 1..75: mol_type = other DNA
cttccccggtcgttacacggcgctttcggggacccgcattagtcacgatacaacgcgtggctatatcggtctttt

SEQ ID NO: 391075 - DNA, 75 bp, synthetic construct
  source 1..75: mol_type = other DNA
ccggacgctatgccgtttatgcagatacaaatgcggtaatacagggcgtgctgttcaagggtaccgttgaaatta

SEQ ID NO: 391076 - DNA, 75 bp, synthetic construct
  source 1..75: mol_type = other DNA
tgattgatggcgcaggcatccccatgtccggatgccatattattcttaaatcccgggtaaacacctcagaagtgg

SEQ ID NO: 391077 - DNA, 75 bp, synthetic construct
  source 1..75: mol_type = other DNA
acaatattcatcgcctgacttaccgctggagtggaaataactggaatgcaacagtaagccccgtcatttacgacg

SEQ ID NO: 391078 - DNA, 75 bp, synthetic construct
  source 1..75: mol_type = other DNA
atcagcgcactgacgcaacgggcagataatcttctgtacttcaatacggacgggaatgcctcactgtctccgctg

SEQ ID NO: 391079 - DNA, 75 bp, synthetic construct
  source 1..75: mol_type = other DNA
agcgccactggacagcccggccttcaccggcaccccaaccaccccaaccccaccggatgatgccgccggtctgga

SEQ ID NO: 391080 - DNA, 75 bp, synthetic construct
  source 1..75: mol_type = other DNA
cattggatgataatacaggtaataactaagatattaaaccctgacactgataatttgtgtgagatgttaatgtat

SEQ ID NO: 391081 - DNA, 75 bp, synthetic construct
  source 1..75: mol_type = other DNA
aggtcgatgaatctgttacggcaggcatgaatacttttttcgctgagttcgcttcatgtttgacggaattacaga

SEQ ID NO: 391082 - DNA, 75 bp, synthetic construct
  source 1..75: mol_type = other DNA
aaatataccgttttgggtatttgaagaggggtatttacgcccggattttgtaactctggagccaggtggtgttaa

SEQ ID NO: 391083 - DNA, 75 bp, synthetic construct
  source 1..75: mol_type = other DNA
aaattatgcttaaaaatctgtaactcctgcaaccaaaatgattctagtacacatgaatataaaatagatcatcaa

SEQ ID NO: 391084 - DNA, 75 bp, synthetic construct
  source 1..75: mol_type = other DNA
gacaaatagcaggccacagcaagtatatatatatttttccgctgttgatgccctcggtggaagagtcaatcttgc

SEQ ID NO: 391085 - DNA, 75 bp, synthetic construct
  source 1..75: mol_type = other DNA
tttgcctggcggtagtagcaaaaccgtgcgttttgtggcaatggaacctgagcaaaaagaaaaaaactatcgggt

SEQ ID NO: 391086 - DNA, 75 bp, synthetic construct
  source 1..75: mol_type = other DNA
aaacgccaactgcgttttatataaaagttcatgacacagataatgtggcaattattgttaatgataatggcctga

SEQ ID NO: 391087 - DNA, 75 bp, synthetic construct
  source 1..75: mol_type = other DNA
ggatgtgaatcgtaccgcgctgacaagcaccggccaaggattcagtggtggcggggccatggactccagtaattt

SEQ ID NO: 391088 - DNA, 75 bp, synthetic construct
  source 1..75: mol_type = other DNA
ggagagtgttgccagaggacttgacgttatcggagctaaacctgtaaacgacatgctctcaggtatgggtatcct

SEQ ID NO: 391089 - DNA, 75 bp, synthetic construct
  source 1..75: mol_type = other DNA
tctccgaactgagtcactataacgttcgctgggggatgaacgatctccagaatatccatgaaggtttcaacatgc

SEQ ID NO: 391090 - DNA, 75 bp, synthetic construct
  source 1..75: mol_type = other DNA
gaaataattgcgaaacaaaatgcgaatagcattgaggagaagaatattgaaaaaaaacaagaaagaaacaaatcc

SEQ ID NO: 391091 - DNA, 75 bp, synthetic construct
  source 1..75: mol_type = other DNA
agtctcttgcatacaactgcctgaaggctacccaaaactcaagcgcaaatattgccggtaaagaaactattttta

SEQ ID NO: 391092 - DNA, 75 bp, synthetic construct
  source 1..75: mol_type = other DNA
acttggtggtgaagaaaaacttggaaaaggaggaggaggaggtctcgctcagaaagcaatggatagcctaggaat

SEQ ID NO: 391093 - DNA, 75 bp, synthetic construct
  source 1..75: mol_type = other DNA
tccgctacaagcaggaattgtatacggagccagaaggactcagatgtcttcagaccattaccctgttggcgtttc

SEQ ID NO: 391094 - DNA, 75 bp, synthetic construct
  source 1..75: mol_type = other DNA
attggacgcaaatatgggtaatgactccaacttattgatagtgttttatgttcagataatgcccgatgactttgt

SEQ ID NO: 391095 - DNA, 75 bp, synthetic construct
  source 1..75: mol_type = other DNA
aacggtattgaggatgcagaaaataatactttgttgaaactggatgaaggaagcaatacggcctccggtttgggt

SEQ ID NO: 391096 - DNA, 75 bp, synthetic construct
  source 1..75: mol_type = other DNA
tagttattggggcgtacagtgccttcattgagcttggttttgctcaaacctcaaccacagaaattgcccgccggg

SEQ ID NO: 391097 - DNA, 75 bp, synthetic construct
  source 1..75: mol_type = other DNA
cccgtatggcgctgcttacccgcagccgccagaacgccatttaccagaatctgacggtaccgcaaatcgtcgaaa

SEQ ID NO: 391098 - DNA, 75 bp, synthetic construct
  source 1..75: mol_type = other DNA
cgctgctggcccgcagtcgccagaacgccatttaccagaaccagacggtgccgcaaatcgtcgaaaaaatcctgc

SEQ ID NO: 391099 - DNA, 75 bp, synthetic construct
  source 1..75: mol_type = other DNA
cggcattgccagcgctaccgggcaaccggttctccaggacttgctatcggcgtttccggcgaccctggaactggc

SEQ ID NO: 391100 - DNA, 75 bp, synthetic construct
  source 1..75: mol_type = other DNA
aaatgaaatcgttgcattgccttgtggttggtggttaagtgagagagaacggaactatattgtagataccttaaa

SEQ ID NO: 391101 - DNA, 75 bp, synthetic construct
  source 1..75: mol_type = other DNA
cgctgctgatgtctaaatttaatgctgctaggggaggcgtcaaattttatgattttgtgcgaatgggggcggcgg

SEQ ID NO: 391102 - DNA, 75 bp, synthetic construct
  source 1..75: mol_type = other DNA
tatttcacttttataataaatttaaaaaatataatcattacgataccaatgttaatgatgaggtaaagtgccatc

SEQ ID NO: 391103 - DNA, 75 bp, synthetic construct
  source 1..75: mol_type = other DNA
gtagagaaaaacccacaactggctgaaaaatggtatcaaaaagcgatagatgcagctaatacacaacataaccag

SEQ ID NO: 391104 - DNA, 75 bp, synthetic construct
  source 1..75: mol_type = other DNA
ctgtgaactacagaatagatgctcctcttattttccggggaaactttgaatctgcattaaaagatacgctgatgc

SEQ ID NO: 391105 - DNA, 75 bp, synthetic construct
  source 1..75: mol_type = other DNA
tagatgcaaagatggggaaataaatccagaatatgatataacagttactagtaataactttagcatgaataatgt

SEQ ID NO: 391106 - DNA, 75 bp, synthetic construct
  source 1..75: mol_type = other DNA
ccggttattctcgatatcaacgccgatgcgggtaaagcctacgctgataccgtagaacgtctgttgggagaagaa

SEQ ID NO: 391107 - DNA, 75 bp, synthetic construct
  source 1..75: mol_type = other DNA
agggaaaaagaggcatataacgccagtttggccgaactgaaatctattatggtgcagtgggcagaagataagcgt

SEQ ID NO: 391108 - DNA, 75 bp, synthetic construct
  source 1..75: mol_type = other DNA
tcgaaagtagcagcgccagcaccgcgaaagcgagcaaggacagcaggtagtggctatgcactgatcgatgatctc

SEQ ID NO: 391109 - DNA, 75 bp, synthetic construct
  source 1..75: mol_type = other DNA
tgttggtaaggtggttgacgtcgttcatagtgataatgtcacttgcatgattaacggtgctgacctaattgccgc

SEQ ID NO: 391110 - DNA, 75 bp, synthetic construct
  source 1..75: mol_type = other DNA
gaagtgggcgcgagacatcacgtacttacgtacgtgatgaaggctggctgtatctgggagtggtcaatgtcgcca

SEQ ID NO: 391111 - DNA, 75 bp, synthetic construct
  source 1..75: mol_type = other DNA
attttcaggagaagcctttacttgaagagaaatttctctttcagggcgatatcagatggcgaatgtttgatgatc

SEQ ID NO: 391112 - DNA, 75 bp, synthetic construct
  source 1..75: mol_type = other DNA
ttgattaatcttttgatagatgcaataaaaaatcggttggaacatgaggttttccatgatttattagtgcagggg

SEQ ID NO: 391113 - DNA, 75 bp, synthetic construct
  source 1..75: mol_type = other DNA
aaaccagaaaacagcgatgtcaccattggccgtggtaaaaaagcggcgctgtatgcgaccccgctgttcctgtgt

SEQ ID NO: 391114 - DNA, 75 bp, synthetic construct
  source 1..75: mol_type = other DNA
ttcggcaacctttacccttgaatttcaatattcacaggtgttttttcccatcctgtggtttccttggcgttttct

SEQ ID NO: 391115 - DNA, 75 bp, synthetic construct
  source 1..75: mol_type = other DNA
actggacggaaatatgcgtccggtgaaattgaatgaccttcatgccgggatgcagtggatcccattggtaccaga

SEQ ID NO: 391116 - DNA, 75 bp, synthetic construct
  source 1..75: mol_type = other DNA
acggttatccgtcattgaaacaggttgttggtaaggtggttgacgtcgttcatagtgataatgtcacttgcatga

SEQ ID NO: 391117 - DNA, 75 bp, synthetic construct
  source 1..75: mol_type = other DNA
acggttatccgtcattgaaacaggttgttggtaaggtcgttaatgtcgttcatagcgatgatgtcacttgcatga

SEQ ID NO: 391118 - DNA, 75 bp, synthetic construct
  source 1..75: mol_type = other DNA
gctaccgatcacatctggcaccatggttacagcctgtctgcgaccaccagcctgtatgtcgtactgggtgtactg

SEQ ID NO: 391119 - DNA, 75 bp, synthetic construct
  source 1..75: mol_type = other DNA
atgttcaaatccaagaatattaaaatcacagattttactcttaaatcaaaacagcctttcttcaaggcgcaatct

SEQ ID NO: 391120 - DNA, 75 bp, synthetic construct
  source 1..75: mol_type = other DNA
gttcctgacccgtatcggttttaactcaaaagcggttatcaccggcgacgtcacgcagatcgacctgccgcgtaa

SEQ ID NO: 391121 - DNA, 75 bp, synthetic construct
  source 1..75: mol_type = other DNA
ccacgtttgataaggataaaatcccgacatggtcggtaaaagctgataaagccaagctgactaatgaccggatgc

SEQ ID NO: 391122 - DNA, 75 bp, synthetic construct
  source 1..75: mol_type = other DNA
cttcgcagaatcacgacggataacgcgcagatcaatctggtgacgcaggatgttacctctgaagacctcgtcacg

SEQ ID NO: 391123 - DNA, 75 bp, synthetic construct
  source 1..75: mol_type = other DNA
ggggtggccaaagttcttgatgacctgaaagcgatggactttgagtttatcgtttgtgactcaccggcgggtatt

SEQ ID NO: 391124 - DNA, 75 bp, synthetic construct
  source 1..75: mol_type = other DNA
ctgcgcagcctgtatgtcgatactgccccaatgcgcggtcagatccaggatatcgaaccggagcagatccacctt

SEQ ID NO: 391125 - DNA, 75 bp, synthetic construct
  source 1..75: mol_type = other DNA
cgatgtcgaagagatcagctttaacttcttccacagcgaagacgtggttcgtcacccggtggtggcgcgtatcgt

SEQ ID NO: 391126 - DNA, 75 bp, synthetic construct
  source 1..75: mol_type = other DNA
tggaactccgctatctcggtgtataccgactgtatggatttgacgcctcagggttgtgcgcgggccgctgaacgg

SEQ ID NO: 391127 - DNA, 75 bp, synthetic construct
  source 1..75: mol_type = other DNA
ctgactgggtatctccacccggtgatacaattatagatctaatggatgaacatgggctttctggtgaagaactga

SEQ ID NO: 391128 - DNA, 75 bp, synthetic construct
  source 1..75: mol_type = other DNA
tcctttcagtgtgccactgtcttacttttcaaaatatacaggtgatgtacgccagatggttacggctgctgctgg

SEQ ID NO: 391129 - DNA, 75 bp, synthetic construct
  source 1..75: mol_type = other DNA
tgaatattattccgatcaggccgtttcgtggtttacgcagccggtacttaccacgtttgataaggataaaatccc

SEQ ID NO: 391130 - DNA, 75 bp, synthetic construct
  source 1..75: mol_type = other DNA
gcgaagaaagcggcgaagcgcccaccgatcgtcaactatccgggggaagggttccgggaaatgacaaaggccgag

SEQ ID NO: 391131 - DNA, 75 bp, synthetic construct
  source 1..75: mol_type = other DNA
tccagcggcggcgatgaagataaccaactggtgatgccgctaagcacggtacagcacctgctggggctccccgga

SEQ ID NO: 391132 - DNA, 75 bp, synthetic construct
  source 1..75: mol_type = other DNA
gctgaagctgcgatggtgttgctgctgtttttgattggtgaacgactggaaggctgggccgccagccgcgcgcgt

SEQ ID NO: 391133 - DNA, 75 bp, synthetic construct
  source 1..75: mol_type = other DNA
cgttaacgcataaccacctgcgcggtctggtacaaatgattgagctggcacgcgcgactcacgctaatatccgcc

SEQ ID NO: 391134 - DNA, 75 bp, synthetic construct
  source 1..75: mol_type = other DNA
atgtcgactcctgacaatcacggcaagaaagcccctcaatttgctgcgttcaaaccgctaactgcggtacagaac

SEQ ID NO: 391135 - DNA, 75 bp, synthetic construct
  source 1..75: mol_type = other DNA
agaaagcccctcaatttgctgcgttcaaaccgctaaccacggtacagaacgccaacgactgttgctgcgacggcg

SEQ ID NO: 391136 - DNA, 75 bp, synthetic construct
  source 1..75: mol_type = other DNA
cattgacgcataaccacctgcgcggcctggtgcaaatgattgaactggcgcgtgccactcacaccaacatccgcc

SEQ ID NO: 391137 - DNA, 75 bp, synthetic construct
  source 1..75: mol_type = other DNA
tcccgccgccgaatcacagcgggcgctggtcgggtctggcattgaagcgcaggttaacggtgagcgcgtgttgat

SEQ ID NO: 391138 - DNA, 75 bp, synthetic construct
  source 1..75: mol_type = other DNA
cgcgcgggcatgatatcgctcgcctgtgtgaaaaacttgagcttcaggcgaaaaatctcaacaagacgattcagg

SEQ ID NO: 391139 - DNA, 75 bp, synthetic construct
  source 1..75: mol_type = other DNA
gacctgatgaccgccatgatggtgctgtttttggtggtgatggtggcgtcacttagctctgttacgcagcggatc

SEQ ID NO: 391140 - DNA, 75 bp, synthetic construct
  source 1..75: mol_type = other DNA
aattgcctcgcttttgaagactccactgccggtctgctttctgccacccaggcagggtgcgtggtggttgaagtc

SEQ ID NO: 391141 - DNA, 75 bp, synthetic construct
  source 1..75: mol_type = other DNA
tgatgcgcgatatccttgaggctggcgtacttcagaaagcggttgaaaatggacacatcgaggataacgcaaggc

SEQ ID NO: 391142 - DNA, 75 bp, synthetic construct
  source 1..75: mol_type = other DNA
aacctggctatgcagatcgttgatattgtgatggacgcgtcgatccgcgattatgtttctttaaacgctgaagaa

SEQ ID NO: 391143 - DNA, 75 bp, synthetic construct
  source 1..75: mol_type = other DNA
gggcacaacgaggaagacgtaatggcgatcatgccgttgttttatggcgaaatggttggtattaacatgcgtgca

SEQ ID NO: 391144 - DNA, 75 bp, synthetic construct
  source 1..75: mol_type = other DNA
cgcgccactcacgccaatatccgccagaacatcactattgcgctggggctgaaaggcgttttcctcgtcaccacg

SEQ ID NO: 391145 - DNA, 75 bp, synthetic construct
  source 1..75: mol_type = other DNA
tcgctgccgcccgctggtccgctttcacaggatgtggtgtcccgctccgctgacatgacactgtatgttgtgttt

SEQ ID NO: 391146 - DNA, 75 bp, synthetic construct
  source 1..75: mol_type = other DNA
tcgttgttttatctaagtttaggacaagacggagaacaaaatgactcatataataatatgttaaggataattaat

SEQ ID NO: 391147 - DNA, 75 bp, synthetic construct
  source 1..75: mol_type = other DNA
tattcgggtgaacatcgctttgatgttgaagcgtacatcgctgatgataaaaatgtattacggaaagaagatatt

SEQ ID NO: 391148 - DNA, 75 bp, synthetic construct
  source 1..75: mol_type = other DNA
tgcccttaccgggatcaaaacccgtgcggatgcgcacgacaccctgaaaacgcaggttgccagcctgtcggcaga

SEQ ID NO: 391149 - DNA, 75 bp, synthetic construct
  source 1..75: mol_type = other DNA
cgggatcaaaacccgtgcggatgcgcacgacaccctgaaaacgcaggttgccagcctgtcggcagagctggaaac

SEQ ID NO: 391150 - DNA, 75 bp, synthetic construct
  source 1..75: mol_type = other DNA
gcacaaaaactttcagatgatgacgaactgctggcaaaagccaccgacgtttacagcgttcgtcgggaagaatta

SEQ ID NO: 391151 - DNA, 75 bp, synthetic construct
  source 1..75: mol_type = other DNA
gattaaaggtggcgcggcgctggaacagctaggtcgtgttacccaggtggcatttgataaaaccggcacgctgac

SEQ ID NO: 391152 - DNA, 75 bp, synthetic construct
  source 1..75: mol_type = other DNA
gaatcggcggtgcaaaaagcgggctattccctgcgcgatgaacaggccgccgaagagccaaaagaatcacgcctg

SEQ ID NO: 391153 - DNA, 75 bp, synthetic construct
  source 1..75: mol_type = other DNA
cctggcgcagatgattgaactggcacgcgccactcacgccaacatccgccagaacatcaccattgcattggggct

SEQ ID NO: 391154 - DNA, 75 bp, synthetic construct
  source 1..75: mol_type = other DNA
cagctaggtcgcgttacccaggtggcgtttgataaaaccggaacgctgaccgtcgggaaaccgcgcgttaccgcg

SEQ ID NO: 391155 - DNA, 75 bp, synthetic construct
  source 1..75: mol_type = other DNA
gggactggagcaatttaatcatccgttcggtcaactggcatttatcgccaccacgttggttgggctgtacccgat

SEQ ID NO: 391156 - DNA, 75 bp, synthetic construct
  source 1..75: mol_type = other DNA
cccgtgtgcgttagttatctccacgcctgcggcgattacctccgggctggcggcggcagcgcgtcgtggggcgtt

SEQ ID NO: 391157 - DNA, 75 bp, synthetic construct
  source 1..75: mol_type = other DNA
tgccgacaccacagattattgaaacgccggattttgaagtcatcctagcggaagtgaaagaagacatcattacgt

SEQ ID NO: 391158 - DNA, 75 bp, synthetic construct
  source 1..75: mol_type = other DNA
gcacagagggcggggtgcgtgatgagcggcaggagcgtgacgcgctgggccgcctgttgcgcagtgagacgcagc

SEQ ID NO: 391159 - DNA, 75 bp, synthetic construct
  source 1..75: mol_type = other DNA
gtgttcagctatgaccgcagcggctggctgaccagccgcacgggtcagatgtacgaccatgaccattattattac

SEQ ID NO: 391160 - DNA, 75 bp, synthetic construct
  source 1..75: mol_type = other DNA
ccggtatcggctggtaaatggtagcggacgctgggcaacagatcccagaaccaatgaagctattgtcgtgagggt

SEQ ID NO: 391161 - DNA, 75 bp, synthetic construct
  source 1..75: mol_type = other DNA
caccatctgttactgcaccgtacaatgacaccggcgggggaaagactttcgcatattgaactggtgaaaggcggg

SEQ ID NO: 391162 - DNA, 75 bp, synthetic construct
  source 1..75: mol_type = other DNA
cacggtgcgttttgcgtatgaccgcagcggctggctgacgggagagcacagcgtgcacggcagcataaaatatca

SEQ ID NO: 391163 - DNA, 75 bp, synthetic construct
  source 1..75: mol_type = other DNA
tgctcctggtggtgtagatgaagttgaaaaagctcttagtaaattaggtcaggagatgagacgtggcaaattttt

SEQ ID NO: 391164 - DNA, 75 bp, synthetic construct
  source 1..75: mol_type = other DNA
atgccagtcgtaccaacagtatccggacgtcaggttgagagccgtggagttcagtcagcaggcttgcagacgttt

SEQ ID NO: 391165 - DNA, 75 bp, synthetic construct
  source 1..75: mol_type = other DNA
ttgcagaacaaaccgtgtgcggcaatttgccataaacaatatggaaggttctaccgggagacaaagaatacctgc

SEQ ID NO: 391166 - DNA, 75 bp, synthetic construct
  source 1..75: mol_type = other DNA
ccttgcgccgaaaatggaaaaatggccatagttgattttttagaggataattcagtggggcaaggctccactgaa

SEQ ID NO: 391167 - DNA, 75 bp, synthetic construct
  source 1..75: mol_type = other DNA
agctacctgcgccagcaatacggcaggtggcatctgtaattgctccgaacagtgcagcaacagcctattctgcgc

SEQ ID NO: 391168 - DNA, 75 bp, synthetic construct
  source 1..75: mol_type = other DNA
ctgaacacggtattcgtgcattagggcggaacctgatgtcgtatcagcggcagggtattgataccgtcagcgaga

SEQ ID NO: 391169 - DNA, 75 bp, synthetic construct
  source 1..75: mol_type = other DNA
ccttgcgtgctgctcaggtcagtgaccttgctaagtcatatggcactccactgacgttcttttccaaagacgagg

SEQ ID NO: 391170 - DNA, 75 bp, synthetic construct
  source 1..75: mol_type = other DNA
gggctcgaaatttggcacaaaatgcgcggcaaaatttattggtggcgaaattgccgggatgggcatttccgaggc

SEQ ID NO: 391171 - DNA, 75 bp, synthetic construct
  source 1..75: mol_type = other DNA
ccactggccgacattgtgctcaacagtacgcaggcgtctttctgcaccgaatacagcgtcgtgaccggaggctcg

SEQ ID NO: 391172 - DNA, 75 bp, synthetic construct
  source 1..75: mol_type = other DNA
ggggacaaaattcggcaccaaatgcgcggcaaaatttattggcgggcaactggtcgggatgggcgtctctgatgc

SEQ ID NO: 391173 - DNA, 75 bp, synthetic construct
  source 1..75: mol_type = other DNA
gcgtgcacggcagcataaagtaccggcgtgacgcgctgggcaatcccaccgacattaccctgccggacgggcagc

SEQ ID NO: 391174 - DNA, 75 bp, synthetic construct
  source 1..75: mol_type = other DNA
ccgccgccaaagcgaaattaaacgcctatatcacagagcagcgccgtctcggtcgggatattcgcttgtcagctc

SEQ ID NO: 391175 - DNA, 75 bp, synthetic construct
  source 1..75: mol_type = other DNA
tgcctatgagtttcacgccctgagcgccgatggtcgtgtcgcggatgcctcagcgaacagcccggccccggcaga

SEQ ID NO: 391176 - DNA, 75 bp, synthetic construct
  source 1..75: mol_type = other DNA
ccactggccgacatcgtgctcaacaatacgcaggcgtctttctgtaccgaatacagcgtcgtgaccggaggctcg

SEQ ID NO: 391177 - DNA, 75 bp, synthetic construct
  source 1..75: mol_type = other DNA
tcgcctgcatgacgggcgctatgtgctgcattacaccgaccgcagctattacgtatttgatgaatttgatgacca

SEQ ID NO: 391178 - DNA, 75 bp, synthetic construct
  source 1..75: mol_type = other DNA
tgttcgcgcttttatgccagccacctggaaactgaaggattactgggcagaggatggcggctgaactgggagata

SEQ ID NO: 391179 - DNA, 75 bp, synthetic construct
  source 1..75: mol_type = other DNA
cactcgtcgtgcgctggatgacgaccatgtgtggaaagcgggttacaacgaacacggtcaggtaatacaggaaac

SEQ ID NO: 391180 - DNA, 75 bp, synthetic construct
  source 1..75: mol_type = other DNA
ctgacggcggtgacggacgcggaagggaaaacggtacgtatccgctataaccgtctggggctgccggagacggtc

SEQ ID NO: 391181 - DNA, 75 bp, synthetic construct
  source 1..75: mol_type = other DNA
gatgcgcacccagggggcgctgacgacgttcagcggctacaacgccgacaaccggttaagctggcagcgcagcct

SEQ ID NO: 391182 - DNA, 75 bp, synthetic construct
  source 1..75: mol_type = other DNA
tggtaaccggcaggcaggagcagaagtggcagtggtggtttgatgaagagacgtatgtgactgcgcaccggacgc

SEQ ID NO: 391183 - DNA, 75 bp, synthetic construct
  source 1..75: mol_type = other DNA
cactatcgaaaacacagagcgttacgctgagtttaaaagtggcaacttaagtgcgcgtgtcagcaaaggtgagtt

SEQ ID NO: 391184 - DNA, 75 bp, synthetic construct
  source 1..75: mol_type = other DNA
agttacaagagaaaggctatttactcaaacgcccggacggttcgctgtggcagtgggataaatggcagccaggtc

SEQ ID NO: 391185 - DNA, 75 bp, synthetic construct
  source 1..75: mol_type = other DNA
ggcatttttatagtcagagaaatactgataacagtataacatttgctgtaaatggtcaggtgtccccctctaatt

SEQ ID NO: 391186 - DNA, 75 bp, synthetic construct
  source 1..75: mol_type = other DNA
ttgctggcccatagcggtattccgcataaagtgcctgacgcggtactggagttactggtccgcaccttccgcgat

SEQ ID NO: 391187 - DNA, 75 bp, synthetic construct
  source 1..75: mol_type = other DNA
tcgcctgcgcaacttaccccaattaaccgttgcgaatctcaacggtcataccatcggcggtggtattgaacttgc

SEQ ID NO: 391188 - DNA, 75 bp, synthetic construct
  source 1..75: mol_type = other DNA
ggccagacggtagagacctggaaccgggacggcggcacaagtactgaacaggcgtataaaaatatcccgttttat

SEQ ID NO: 391189 - DNA, 75 bp, synthetic construct
  source 1..75: mol_type = other DNA
cgtcgccgctgcagcggcgggtgctgattgtgctggcaggtcttaagcacaacgacattacccgggtccgtaccc

SEQ ID NO: 391190 - DNA, 75 bp, synthetic construct
  source 1..75: mol_type = other DNA
ccgtggtcagtcctgaagcgtccctgcggatgctgccggcacctgcgcgcctgctgcacgtcctgcgcgacgcgg

SEQ ID NO: 391191 - DNA, 75 bp, synthetic construct
  source 1..75: mol_type = other DNA
ccggttacacggggcgggaggtgacggagcatctggccacggtgatggtgtggaacgacgccggaacaggagaga

SEQ ID NO: 391192 - DNA, 75 bp, synthetic construct
  source 1..75: mol_type = other DNA
gctggtcggagatagtaaaactttttcattatcaagttcaaacacatccactaagaacgtaacctttaatctatg

SEQ ID NO: 391193 - DNA, 75 bp, synthetic construct
  source 1..75: mol_type = other DNA
gattctttatccgaaacgatggttcaagcacatacttcatgttgaccaattcgggcgacagcctgggaacatgga

SEQ ID NO: 391194 - DNA, 75 bp, synthetic construct
  source 1..75: mol_type = other DNA
aatgcagcctgaacggcagccactctccgctgactttttttcgcaaatcgtggtttgctgatgtggatgtcccat

SEQ ID NO: 391195 - DNA, 75 bp, synthetic construct
  source 1..75: mol_type = other DNA
tataagcttttttttgtattgttttacatattttattcccacaactcaagatgttaataaaaatagtcttataat

SEQ ID NO: 391196 - DNA, 75 bp, synthetic construct
  source 1..75: mol_type = other DNA
aggtggagtttatcaccgagctattcccaagctctggcaccggtcaggttaacgctgttttcccgcttcccgcgt

SEQ ID NO: 391197 - DNA, 75 bp, synthetic construct
  source 1..75: mol_type = other DNA
attatcgttttcgatacccactggctggtcaacagtgcttatcacatcaactgtgcagaccattttgaaggcgtc

SEQ ID NO: 391198 - DNA, 75 bp, synthetic construct
  source 1..75: mol_type = other DNA
aaaattggttggccctcggtcaacattatgtcgtcgtcggattaccggtttgtcgccttaaccgattacgaccgt

SEQ ID NO: 391199 - DNA, 75 bp, synthetic construct
  source 1..75: mol_type = other DNA
cctgttgcagtagctggaatcgccagcgcggtcaatgaggacgaatggctgattacgccaggggctaacgaggaa

SEQ ID NO: 391200 - DNA, 75 bp, synthetic construct
  source 1..75: mol_type = other DNA
ccgttcatgcaaagtatcagcccaatgaagagcatatacaggaacagaattacaagcttgaacttgaactgagaa

SEQ ID NO: 391201 - DNA, 75 bp, synthetic construct
  source 1..75: mol_type = other DNA
tttgatattgtggtaagcgatcgttgcccggaagatgagtatgtgaagtacgcacagacgcagcatattaagttg

SEQ ID NO: 391202 - DNA, 75 bp, synthetic construct
  source 1..75: mol_type = other DNA
tccatgtcgaaaaatggaacattcttcccagcgtggatcagacaacccgcacgcttcaggtccgcctccaggttt

SEQ ID NO: 391203 - DNA, 75 bp, synthetic construct
  source 1..75: mol_type = other DNA
gagtatcagtttgttattgtgcaggcgcgttctgacgggtttgtcgaaaaagtctaccccatgacgattggcgat

SEQ ID NO: 391204 - DNA, 75 bp, synthetic construct
  source 1..75: mol_type = other DNA
attactgcgtttgacctgcgcaccggaatgaatatttcgaaagataaagtagtggctcagattcaggggatggac

SEQ ID NO: 391205 - DNA, 75 bp, synthetic construct
  source 1..75: mol_type = other DNA
aaatgtgtctggctccgggacgggcaaaccatcgacaggaaaggcctggttagcggtgatggccgtcgttcccgt

SEQ ID NO: 391206 - DNA, 75 bp, synthetic construct
  source 1..75: mol_type = other DNA
ctaacaaggatgagtttctcaagccaggcatgaatgcctatctcaaactgaatacccaaagccaggagatgctgc

SEQ ID NO: 391207 - DNA, 75 bp, synthetic construct
  source 1..75: mol_type = other DNA
acgcttcaggtccgcctccaggtttctaacaaggatgagtttctcaagccaggcatgaatgcctatctgaaactg

SEQ ID NO: 391208 - DNA, 75 bp, synthetic construct
  source 1..75: mol_type = other DNA
attactacaggaaaagatcgattagcattagttaatgagagtacgggagaacaagttggtaatggtggtttcttt

SEQ ID NO: 391209 - DNA, 75 bp, synthetic construct
  source 1..75: mol_type = other DNA
atgccatttatcgcacaagatagagtgcatttatcgcgcggcgcatcatgtatcaacaccgcgcaaggttcgccg

SEQ ID NO: 391210 - DNA, 75 bp, synthetic construct
  source 1..75: mol_type = other DNA
aggcgcgtcttgagccgtcggtggcggcagcgaaagcggggaaactgccggaggcgtttttctggacggatgcgg

SEQ ID NO: 391211 - DNA, 75 bp, synthetic construct
  source 1..75: mol_type = other DNA
caacatgaagaaggcactggaagcgctgaacagtgtggatgagattctggcgtataaggtgggtcaggagtcgta

SEQ ID NO: 391212 - DNA, 75 bp, synthetic construct
  source 1..75: mol_type = other DNA
gccgttataatcttattcaaagcgaaaaacgcggccagtggagcatgaagcaattcgatcaatcctacgccgagc

SEQ ID NO: 391213 - DNA, 75 bp, synthetic construct
  source 1..75: mol_type = other DNA
ggttttttctggacggatgcggagaataacgacgtcccgatgacggcagaggcgctgatggcactcagtgaggcg

SEQ ID NO: 391214 - DNA, 75 bp, synthetic construct
  source 1..75: mol_type = other DNA
cacgtttgagcacaatgggcgtaaatgggactacgggaagtcaacgcagacgcgtcttgagccgtcggtggcggc

SEQ ID NO: 391215 - DNA, 75 bp, synthetic construct
  source 1..75: mol_type = other DNA
cgagtccgaaggacgcattttcaaaagcgaacgcggatacatggaaggactcggacaacagattggcgtcgcggc

SEQ ID NO: 391216 - DNA, 75 bp, synthetic construct
  source 1..75: mol_type = other DNA
caatcagccggtgaaaattgactacaaccaccagaccctgattgagggacatccggcaccggctgccggttttgt

SEQ ID NO: 391217 - DNA, 75 bp, synthetic construct
  source 1..75: mol_type = other DNA
aatatgtgcccgttgagacgtataacgccctgcgtaccgaatatgccgcgctgtcggcacaacacggcagcacca

SEQ ID NO: 391218 - DNA, 75 bp, synthetic construct
  source 1..75: mol_type = other DNA
accggagaaacagcggctgcttgacgcaatatgggttgtacttgtgagtttttgtgatcgtggattgcacactgt

SEQ ID NO: 391219 - DNA, 75 bp, synthetic construct
  source 1..75: mol_type = other DNA
tccgccataagcgacagcttgtggcaggtctgaagaatactccacataacgccgtacactggagtcagttagcac

SEQ ID NO: 391220 - DNA, 75 bp, synthetic construct
  source 1..75: mol_type = other DNA
cgccctgcgtaccgaatatgtcgcgctgtcggcacagcatggcagcaccacgctggagcagctgctggacaaggc

SEQ ID NO: 391221 - DNA, 75 bp, synthetic construct
  source 1..75: mol_type = other DNA
tgaactaccacgtggtcgtttgacttatcggattttgcgagatctatcggttgcaataggtaaagaagttacccc

SEQ ID NO: 391222 - DNA, 75 bp, synthetic construct
  source 1..75: mol_type = other DNA
gattatcagcagtgtctgcgtgcaacgcaaaccggaaatgatcaggcggtgaaagccgattgtgataaagtttgg

SEQ ID NO: 391223 - DNA, 75 bp, synthetic construct
  source 1..75: mol_type = other DNA
acccggatatcaccgccgatgagctggcgttttccagttcgccggacgaaagcggcaacagcgacaacctgcagg

SEQ ID NO: 391224 - DNA, 75 bp, synthetic construct
  source 1..75: mol_type = other DNA
gaaccacctcgacgatgaccaccgacactggcggttcattaggcgcactgtttgattatcaaaacgatgtgctga

SEQ ID NO: 391225 - DNA, 75 bp, synthetic construct
  source 1..75: mol_type = other DNA
atatgtttaatggtgatcgtttaactttcatgaaaacttattacttgaagggcaaaaagaaaacagcgaataata

SEQ ID NO: 391226 - DNA, 75 bp, synthetic construct
  source 1..75: mol_type = other DNA
cgcaaaccggtaatgaccaggcggtgaaagccgattgcgataaggtctggcaggaaattcgcagtaataacgcta

SEQ ID NO: 391227 - DNA, 75 bp, synthetic construct
  source 1..75: mol_type = other DNA
cgcaaaccggtaatgatcaggcggtgaaagccgattgtgataaggtctggcaggaaattcgcagtaataacaaat

SEQ ID NO: 391228 - DNA, 75 bp, synthetic construct
  source 1..75: mol_type = other DNA
gccaacgccatgaccacgggctacacccgtcaggtggcggagatcagcaccatcggtgccagcggcggttcgccg

SEQ ID NO: 391229 - DNA, 75 bp, synthetic construct
  source 1..75: mol_type = other DNA
gacgtattactacaggaaaagatcgattagcattagttaatgaaaatactggagagcaagttggtaatggtggtt

SEQ ID NO: 391230 - DNA, 75 bp, synthetic construct
  source 1..75: mol_type = other DNA
ggctggttgaacgaggcagtagcttgcgccagttcgcgcttaacgcgggctatgaaccacgaacagtcacccagg

SEQ ID NO: 391231 - DNA, 75 bp, synthetic construct
  source 1..75: mol_type = other DNA
gctggaaaccaacgccgatggcacgccaacgatgacactgacctttgccggaacgacctcgaccatgaccaccga

SEQ ID NO: 391232 - DNA, 75 bp, synthetic construct
  source 1..75: mol_type = other DNA
gtacgacgcccgcgaccagatggtggaagaactcagcgggatgatggatgtgcaggtcaatatcgacgaccaggg

SEQ ID NO: 391233 - DNA, 75 bp, synthetic construct
  source 1..75: mol_type = other DNA
gcgaagccggggcgctgtcgttgcgtatcgacaacacgctggattacatcgactcgcaaagcacggaaatcatca

SEQ ID NO: 391234 - DNA, 75 bp, synthetic construct
  source 1..75: mol_type = other DNA
tgccatgttgttatctgccgcggataacatcttttttaatcaatcacttgaaattatctccgttatctttcattt

SEQ ID NO: 391235 - DNA, 75 bp, synthetic construct
  source 1..75: mol_type = other DNA
ccaaggaaacgtttttacctcttgttatcgagccattttccattaatgacattttcaaggcacaccttatgttcg

SEQ ID NO: 391236 - DNA, 75 bp, synthetic construct
  source 1..75: mol_type = other DNA
caatattgggaatctgagaaggtagggacgcgtgtgatgctgtactccgatcctcatatccggcaagataaatat

SEQ ID NO: 391237 - DNA, 75 bp, synthetic construct
  source 1..75: mol_type = other DNA
ggctttcaagcattcagccaaacaaagtccgtcctgaaatccgcgacaaggtaatccagtatcaggaagagtgtg

SEQ ID NO: 391238 - DNA, 75 bp, synthetic construct
  source 1..75: mol_type = other DNA
ttcccgttcctgtttatcaccatcgcctgtggcgcggtgtctggcttccatgcgctgatctacaccgaagatgct

SEQ ID NO: 391239 - DNA, 75 bp, synthetic construct
  source 1..75: mol_type = other DNA
ccttcctgaaaatcgggactatcgtcggtctggcggtaggcattctgattatgcgcccgacgctgaccatgcctg

SEQ ID NO: 391240 - DNA, 75 bp, synthetic construct
  source 1..75: mol_type = other DNA
atggaacttaaaaaattgatggaacatatttctgttatccccgattacagacaagcctggaaagtggaacataaa

SEQ ID NO: 391241 - DNA, 75 bp, synthetic construct
  source 1..75: mol_type = other DNA
ttatcggatattctactgttgactatttgtgccgttatttctggtgcggaaggttgggaagatatagaggatttg

SEQ ID NO: 391242 - DNA, 75 bp, synthetic construct
  source 1..75: mol_type = other DNA
ttgatggaacatatttctattatccccgattacagacaagcctggaaagtggaacataaattatcggatattcta

SEQ ID NO: 391243 - DNA, 75 bp, synthetic construct
  source 1..75: mol_type = other DNA
aaagtgtgggtgataactcctcagctatacaagttacaggtgatgcctactttggcaacaccactactgaggtca

SEQ ID NO: 391244 - DNA, 75 bp, synthetic construct
  source 1..75: mol_type = other DNA
acgaattcaaccgctgactgagcaacttaatctcgggttgacggcaggtaaagtgtggttcaacaccccaaccga

SEQ ID NO: 391245 - DNA, 75 bp, synthetic construct
  source 1..75: mol_type = other DNA
aaatattttgtacgagtctgatggcagaactggtctctatcgccggtgaatactggctgagtgataaaatcccag

SEQ ID NO: 391246 - DNA, 75 bp, synthetic construct
  source 1..75: mol_type = other DNA
aaagctaaaaaggcgttgccgagtaaaattaccactgaacagcaggaagccattaaacaactcgtcatgagtcgc

SEQ ID NO: 391247 - DNA, 75 bp, synthetic construct
  source 1..75: mol_type = other DNA
ggcactgggcctggtggatatccgggtgccggaccatctgatagtcggtggcaaccaggttttctcctttgccga

SEQ ID NO: 391248 - DNA, 75 bp, synthetic construct
  source 1..75: mol_type = other DNA
tggatatccgggtaccgaaccatctgatagttggtggcagtcaggttttctcttttgcggaacacggtctgcttt

SEQ ID NO: 391249 - DNA, 75 bp, synthetic construct
  source 1..75: mol_type = other DNA
ccagaactgattgagatatttgaagagaaattagccagacgcgcaacaacccgtctggatgactctctggttagc

SEQ ID NO: 391250 - DNA, 75 bp, synthetic construct
  source 1..75: mol_type = other DNA
atgaatactgcattatccccgctgtcatctcagcctgaactctttccactggcgattatggcccagcatggttgt

SEQ ID NO: 391251 - DNA, 75 bp, synthetic construct
  source 1..75: mol_type = other DNA
tatctgcgtcagcccggtatagcctttacctcaagcactgcagcccgtgactggctccggttacacctggccaga

SEQ ID NO: 391252 - DNA, 75 bp, synthetic construct
  source 1..75: mol_type = other DNA
ccccctatgcccaacgcaccattcgccgcgctatcaatctactggataaatatctgcgtcagcccggcatatcct

SEQ ID NO: 391253 - DNA, 75 bp, synthetic construct
  source 1..75: mol_type = other DNA
ccagatgaaatcctcgttgacgtgatacgcaacctgcctaccgctcaagggtattgcgattccaaaggtctttac

SEQ ID NO: 391254 - DNA, 75 bp, synthetic construct
  source 1..75: mol_type = other DNA
ctttaatattcacgatgaccaaaaaatggtgctggatttcctgttgcaggaaaaagtgctgttggtacagggaac

SEQ ID NO: 391255 - DNA, 75 bp, synthetic construct
  source 1..75: mol_type = other DNA
cggcagtttcgctctccggcggtaaagcagtgcactatctttgcgatgaatcctctgactggttcccggatctcg

SEQ ID NO: 391256 - DNA, 75 bp, synthetic construct
  source 1..75: mol_type = other DNA
atacaaacgtcagtactcaaatatcatgctgacgcacggtcgcgaacactttgaaacagctccgttcaccaccgg

SEQ ID NO: 391257 - DNA, 75 bp, synthetic construct
  source 1..75: mol_type = other DNA
ggtgcggccttcaccaccagcagttcggtacgcgactggcttcgtctgcaactgacgcaggagcaacgtgaggaa

SEQ ID NO: 391258 - DNA, 75 bp, synthetic construct
  source 1..75: mol_type = other DNA
cacttccgcattgtcacgctaccacgtgttgatgatatcgagctgtctttgagtaagttcgcgcgtttcctttct

SEQ ID NO: 391259 - DNA, 75 bp, synthetic construct
  source 1..75: mol_type = other DNA
tttgcgccgttatttctggtgcagaaggttgggaagatatagaggattttgggggaaacacatctcgattttttt

SEQ ID NO: 391260 - DNA, 75 bp, synthetic construct
  source 1..75: mol_type = other DNA
tattcagaaacccagaatatgacgacctttggtgatcaaggtgttgcggataaagctcagaatatcgaagccgtt

SEQ ID NO: 391261 - DNA, 75 bp, synthetic construct
  source 1..75: mol_type = other DNA
ctgctgtagcagttgcagtgatgtttgctgcgggggcgcaggcagcagaagtttataataaagatggtaataaac

SEQ ID NO: 391262 - DNA, 75 bp, synthetic construct
  source 1..75: mol_type = other DNA
atggtgtaacggggcttgataccggatttaccgatctcaataagaagacggcagggcttcagccgtccgatctca

SEQ ID NO: 391263 - DNA, 75 bp, synthetic construct
  source 1..75: mol_type = other DNA
ctatagcatcgcggttgatagagcttgagcatgaggttgagaagttaaaatgtatgcatggcaacagtgaaaaat

SEQ ID NO: 391264 - DNA, 75 bp, synthetic construct
  source 1..75: mol_type = other DNA
ctatagcatcacgattgatagatcttgaacacgatgttgagacgctaaagaccatgtatgctaaggatgaaaaat

SEQ ID NO: 391265 - DNA, 75 bp, synthetic construct
  source 1..75: mol_type = other DNA
gtttttggtacattagcagtatatatcatctctatcatcacaatgatagccgaagattttgcctgttcaggcaat

SEQ ID NO: 391266 - DNA, 75 bp, synthetic construct
  source 1..75: mol_type = other DNA
agtctgtgcaatgccctgtttgctggagaggtatcgccggtcagcgatgtggcggcctgtactcgtgagccactg

SEQ ID NO: 391267 - DNA, 75 bp, synthetic construct
  source 1..75: mol_type = other DNA
cttagtgctcctcttcgtaccgatgccgttaataaaaaagcccgtgacgattttggtgaaacggtaggctcggta

SEQ ID NO: 391268 - DNA, 75 bp, synthetic construct
  source 1..75: mol_type = other DNA
ggggaaaaccggcgcgggcaagagcagtctgtgcaatgcgctgtttgccggggacgtttcaccggtcagcgacgt

SEQ ID NO: 391269 - DNA, 75 bp, synthetic construct
  source 1..75: mol_type = other DNA
ggggaagaccacgtttgcgatgaatctcgtcgaaaatgccgcagtccgtaacgataagcccgtattggtttttag

SEQ ID NO: 391270 - DNA, 75 bp, synthetic construct
  source 1..75: mol_type = other DNA
ggtactgtggctgattaaggctgatgaccgggcgctggcggtggatgagcatttttatcatcaggtgattgggga

SEQ ID NO: 391271 - DNA, 75 bp, synthetic construct
  source 1..75: mol_type = other DNA
agcctttgcaatgccctttttgctggtgatgtatccccggtcagcgatgtcacagcctgcacccgtaatccgctg

SEQ ID NO: 391272 - DNA, 75 bp, synthetic construct
  source 1..75: mol_type = other DNA
tagctcggatctcttttgctgcgggatcgtcacattattgcaatgtatcggtatcggccgctttatggggatccg

SEQ ID NO: 391273 - DNA, 75 bp, synthetic construct
  source 1..75: mol_type = other DNA
cactgcagccaataccaccctcggcatctgtgatggctgggtggataactctgcaggtgcagccggtgatgcaag

SEQ ID NO: 391274 - DNA, 75 bp, synthetic construct
  source 1..75: mol_type = other DNA
ggtatcgcgattttgtaaactccccatcagtactgaatataattgcaactattattgcctacaacgaatgtgagg

SEQ ID NO: 391275 - DNA, 75 bp, synthetic construct
  source 1..75: mol_type = other DNA
gatgtaattaaacatagcgagcgaaatattctgacagcctctttgattataaaaaatgagggggactatgctatc

SEQ ID NO: 391276 - DNA, 75 bp, synthetic construct
  source 1..75: mol_type = other DNA
ttccagacatctgttatcacttaacccattacaagcccgctgccgcagatattcccgtggcgagcgataacccag

SEQ ID NO: 391277 - DNA, 75 bp, synthetic construct
  source 1..75: mol_type = other DNA
acaagcctggaaagtggaaaataaattatcggatattctactgttgactatttgcgccgttatttcgggtgcaga

SEQ ID NO: 391278 - DNA, 75 bp, synthetic construct
  source 1..75: mol_type = other DNA
acggcgaactgaacccggtgccggttgccgctgcgaccgaaatttttggcggtcatatggtggccgttaacgcat

SEQ ID NO: 391279 - DNA, 75 bp, synthetic construct
  source 1..75: mol_type = other DNA
ttaactaaggacatctctcttggtgaggtttctaagtcagctcttgcagccagtggtaaaggcccagctcagagt

SEQ ID NO: 391280 - DNA, 75 bp, synthetic construct
  source 1..75: mol_type = other DNA
ttgactaaaaatatcgatctgggtgaggtatctaaggctgcgctggatacttctggcaagtctcctgctcagtct

SEQ ID NO: 391281 - DNA, 75 bp, synthetic construct
  source 1..75: mol_type = other DNA
gtatttcttcgggaattatattaatcctgtttggcatggtgccaaaaatggcggtgctggtcgcctccattccgc

SEQ ID NO: 391282 - DNA, 75 bp, synthetic construct
  source 1..75: mol_type = other DNA
tcggttcaggaaagaatgcccggggctgacagtccacaggaactgatgaaaagggcaaaggagtatcaggataag

SEQ ID NO: 391283 - DNA, 75 bp, synthetic construct
  source 1..75: mol_type = other DNA
aaccaaccggtagatttactgtttgcgttgctggttccagctgaccaaaccaaaacgcacctgcatactctgtcg

SEQ ID NO: 391284 - DNA, 75 bp, synthetic construct
  source 1..75: mol_type = other DNA
cagagcataaggctattaagatcggtgctaaccaaacagctggtgtaacgcaggttgatggtaaggccgagtcag

SEQ ID NO: 391285 - DNA, 75 bp, synthetic construct
  source 1..75: mol_type = other DNA
tttgcaagataataaattaaattataatttaactcaaggatggaaaaaccaaggggtaggtagtgctgtaaacct

SEQ ID NO: 391286 - DNA, 75 bp, synthetic construct
  source 1..75: mol_type = other DNA
acgctgtgccgcccgttgcggctgtgatggaaagcgatgaagcgttacgcctgcgtgtgcctgcagcatttgaag

SEQ ID NO: 391287 - DNA, 75 bp, synthetic construct
  source 1..75: mol_type = other DNA
gcgcaggctgtgatggtggcttacgctatgggcagcgatcttgaccagctcgctgccaactacaacgtgaaacgc

SEQ ID NO: 391288 - DNA, 75 bp, synthetic construct
  source 1..75: mol_type = other DNA
ataaagatgaatactgggatggcggaagtggttataatttaaatgcatcacacgcaatgccattcaagtattttt

SEQ ID NO: 391289 - DNA, 75 bp, synthetic construct
  source 1..75: mol_type = other DNA
caggtggcatcaaagcagataattacacatcaggtcttattggtgttggtaaatattctgatttctggggggcgg

SEQ ID NO: 391290 - DNA, 75 bp, synthetic construct
  source 1..75: mol_type = other DNA
atcagcaagatgtacgccaatggtcatatggaatcaatggtgggattacattacatgaaaatggcataactcttt

SEQ ID NO: 391291 - DNA, 75 bp, synthetic construct
  source 1..75: mol_type = other DNA
ctgtcaccagtccgtcaccggcctgcgtcaccatctctgtgctgtcacgtgaaaataacggtgtcgcatccgaag

SEQ ID NO: 391292 - DNA, 75 bp, synthetic construct
  source 1..75: mol_type = other DNA
ctgccgcaaacgacctcgacaatatcggcgcaaattacaacgttgaacgtctcgttattacgcctgctgatgaaa

SEQ ID NO: 391293 - DNA, 75 bp, synthetic construct
  source 1..75: mol_type = other DNA
gacatcgtgctcaacaatacgcaggcgtctttctgtactgaataccgcgtcgtgaccggaggctcggatgagtga

SEQ ID NO: 391294 - DNA, 75 bp, synthetic construct
  source 1..75: mol_type = other DNA
gtggccgaccgcgtgaccgtgcagtctgccgccatcgttgaataccagataaacgccacgctgtatctttaccct

SEQ ID NO: 391295 - DNA, 75 bp, synthetic construct
  source 1..75: mol_type = other DNA
ccgcaggccgacattgtgctgagtaagtcgcaggcgtcgaactgcaccgagtaccagataactatcgggggatcg

SEQ ID NO: 391296 - DNA, 75 bp, synthetic construct
  source 1..75: mol_type = other DNA
tttacgcggcgctgcatgttgagggggtacagcgtgtcgagctggcatcaccgcaggccgacattgtgctgagta

SEQ ID NO: 391297 - DNA, 75 bp, synthetic construct
  source 1..75: mol_type = other DNA
cgactatcccgccgacaccggcagtgatggagtctgacaccgattatcgtctgcgtattcagcaggcgtttgagg

SEQ ID NO: 391298 - DNA, 75 bp, synthetic construct
  source 1..75: mol_type = other DNA
cttaagacattttctgaggagatacgctggtttaaatatgaggggaatgggataacattgttatccacaataatc

SEQ ID NO: 391299 - DNA, 75 bp, synthetic construct
  source 1..75: mol_type = other DNA
tatccgaaccaagaacctgctgattctgctgggactcgtcgtggttattgtcttcaccaccgttggcctgacatt

SEQ ID NO: 391300 - DNA, 75 bp, synthetic construct
  source 1..75: mol_type = other DNA
tcaccgcgacaattgcttactctcaggatcgcgaccagaacaataacaactcgaatcaggctccgaacatgagca

SEQ ID NO: 391301 - DNA, 75 bp, synthetic construct
  source 1..75: mol_type = other DNA
ttgaaagttttattaaaaaaatccttattactggtaaggatcgcactcctgtgtccggcgttcagttggggagct

SEQ ID NO: 391302 - DNA, 75 bp, synthetic construct
  source 1..75: mol_type = other DNA
tactgtaatccctgctcgaggagctttagtttccgccccgtttaaagtcaatgtcggtaataaggcaatcattac

SEQ ID NO: 391303 - DNA, 75 bp, synthetic construct
  source 1..75: mol_type = other DNA
aaatgtagttcatgtatttaaaaaggacgaacactttgaagagtacattcccagaaactatattctccaatcgac

SEQ ID NO: 391304 - DNA, 75 bp, synthetic construct
  source 1..75: mol_type = other DNA
tatcagtggacacatctcggctctgcgcaggaaggcagcctcaatccaggaaatgtacgactgccgggtacttgg

SEQ ID NO: 391305 - DNA, 75 bp, synthetic construct
  source 1..75: mol_type = other DNA
ccggcagatgattcgactatcccgccgacaccggcagtgatggaatctgacaccgattatcgtctgcgtattcag

SEQ ID NO: 391306 - DNA, 75 bp, synthetic construct
  source 1..75: mol_type = other DNA
cggtaatgaccttgatgtgattggtgccaattacaacaccacgcgcctgactatcaccccggcagatgattcgac

SEQ ID NO: 391307 - DNA, 75 bp, synthetic construct
  source 1..75: mol_type = other DNA
aagtgagcctgcctaaccagctggggcgttcaaccactgcaggcaatacaccgcaaacccgcgatgaaatgctgc

SEQ ID NO: 391308 - DNA, 75 bp, synthetic construct
  source 1..75: mol_type = other DNA
ctggaacaggacgaaggcgcgctggggcgctcgatggaacgctcgcaacagttcctgctgctttcggcgcttctg

SEQ ID NO: 391309 - DNA, 75 bp, synthetic construct
  source 1..75: mol_type = other DNA
gcaaaccagacagcagcagagaatgctgatagcacggtgtcgcacggtggaaaccgtaccacgtctgcaatggct

SEQ ID NO: 391310 - DNA, 75 bp, synthetic construct
  source 1..75: mol_type = other DNA
cgtcaccatctctgtgctgtcacgtgaaaataacggtgtcgcatccgaagacctgctggcggtggtgcgtaacgc

SEQ ID NO: 391311 - DNA, 75 bp, synthetic construct
  source 1..75: mol_type = other DNA
aggcggcgtatcactctatactggcccggtgatcaccagttaccgctatacccattatgactccagcgatgcagg

SEQ ID NO: 391312 - DNA, 75 bp, synthetic construct
  source 1..75: mol_type = other DNA
aggcggcgtatcactctatactggcccggtgatcaccagataccgctatacccaatatgactccagcgatgcagg

SEQ ID NO: 391313 - DNA, 75 bp, synthetic construct
  source 1..75: mol_type = other DNA
aggcggcctatcactctatactggcccggtgatcaccaggtaccgctatacccactatgactccagcgatgcagg

SEQ ID NO: 391314 - DNA, 75 bp, synthetic construct
  source 1..75: mol_type = other DNA
gaagtcctggcactggttgatgtgaacatactcgatcatctggttgtcggttcagatggcattgtgtcgtttgca

SEQ ID NO: 391315 - DNA, 75 bp, synthetic construct
  source 1..75: mol_type = other DNA
aggcggcgtatcactctatactggcccggtgatcaccaggtaccgctatacccagtatgactccagcgatgcagg

SEQ ID NO: 391316 - DNA, 75 bp, synthetic construct
  source 1..75: mol_type = other DNA
aggcggcgtatcactctatactggcccggtgatcaccagctaccgctatacccactatgactccagcgatgcagg

SEQ ID NO: 391317 - DNA, 75 bp, synthetic construct
  source 1..75: mol_type = other DNA
cagaaacacgctacggcagcatgaagagcatcagtttacaacgtattcaaccgctgactgagcaacttaatctcg

SEQ ID NO: 391318 - DNA, 75 bp, synthetic construct
  source 1..75: mol_type = other DNA
tatctgcgtcagccaggcatagcctttacctcaagtactgctgcccgtgactggcttcgattacagctggccaga

SEQ ID NO: 391319 - DNA, 75 bp, synthetic construct
  source 1..75: mol_type = other DNA
gcttcggctacagctggccggacaggagcgggaagtgtttatggtgctctatctcgataaccagcaccgtttact

SEQ ID NO: 391320 - DNA, 75 bp, synthetic construct
  source 1..75: mol_type = other DNA
aggcggcttatcactctatactggcccggtgatcaccaggtaccgctatacccattatgactccagcgatgcagg

SEQ ID NO: 391321 - DNA, 75 bp, synthetic construct
  source 1..75: mol_type = other DNA
aggcggcttatcactctatactggcccggtgatcaccagttaccgctatacccaatatgactccagcgatgcagg

SEQ ID NO: 391322 - DNA, 75 bp, synthetic construct
  source 1..75: mol_type = other DNA
aggcggcatatcactctatactggcccggtgatcaccaggtaccgctatacccaatatgactccagcgatgcagg

SEQ ID NO: 391323 - DNA, 75 bp, synthetic construct
  source 1..75: mol_type = other DNA
cactaaagaacagaatgtgatgcaaatcgccatgcaaagtcgcctgaaattattctggcgtccgaaagcaatcga

SEQ ID NO: 391324 - DNA, 75 bp, synthetic construct
  source 1..75: mol_type = other DNA
ctgccgccgtgaaaaaactggaagcgtacatcacggcacagcaccggctggggcgcgacatccgtctgtctgcca

SEQ ID NO: 391325 - DNA, 75 bp, synthetic construct
  source 1..75: mol_type = other DNA
tggtgccaattacaacaccacgcgtctgactatcaccccggcagatgattcgaccatcccgccgacaccggcagt

SEQ ID NO: 391326 - DNA, 75 bp, synthetic construct
  source 1..75: mol_type = other DNA
gtgcaaccagtccggcacctgcagaggtggtgctgactgtcctgagtcgcgaaggcgacggaactgcagaaaaag

SEQ ID NO: 391327 - DNA, 75 bp, synthetic construct
  source 1..75: mol_type = other DNA
gtacgcgatgcgcgggccatcagcccgtctccggccaacgtgacggtttccatactgtccactgagggcgacggc

SEQ ID NO: 391328 - DNA, 75 bp, synthetic construct
  source 1..75: mol_type = other DNA
tctgagccactggtgaagtatctggaggaaaacgcctatcgggaggttatctggcgtcagcgtgtaaacgatgcg

SEQ ID NO: 391329 - DNA, 75 bp, synthetic construct
  source 1..75: mol_type = other DNA
atccgcctcgctttatctctatcccggtccagaaagcgaacccattcgcgccgctgccgtgaaaaagctggaggg

SEQ ID NO: 391330 - DNA, 75 bp, synthetic construct
  source 1..75: mol_type = other DNA
gaaggtctgaagaacatcaagaaaggcggtaagatcaaactggttattccaccagaactggcttacggcaaagcg

SEQ ID NO: 391331 - DNA, 75 bp, synthetic construct
  source 1..75: mol_type = other DNA
gatgtgaaaccagcgccgaaggctgatacgaagccagaagcagatgctaaagcagcagattctgctaaaaaataa

SEQ ID NO: 391332 - DNA, 75 bp, synthetic construct
  source 1..75: mol_type = other DNA
atgaaatcaccattaatcacaacaggaatgatttgtttactggggatctgcaactttgcccaggcgactgtctcc

SEQ ID NO: 391333 - DNA, 75 bp, synthetic construct
  source 1..75: mol_type = other DNA
actaaatgctgaagaggtgcgcccggttggcgacagggtgacggtgcagagtgctgaaatcgtgccgtatcagat

SEQ ID NO: 391334 - DNA, 75 bp, synthetic construct
  source 1..75: mol_type = other DNA
ctgaccatcaccccggcggatgacaccaccattccgccgacacctgccgttatggaatccgataccgacctgcgt

SEQ ID NO: 391335 - DNA, 75 bp, synthetic construct
  source 1..75: mol_type = other DNA
agttttgtgctggcgaaaaaacttgagcaatgcacgtcaggtgcaattacgaaatctgacttaagaccggatatc

SEQ ID NO: 391336 - DNA, 75 bp, synthetic construct
  source 1..75: mol_type = other DNA
ggatatggcggcgcaggcgggtaaattgcttgattactcagcccacgcctgggagtcgtttaccgctattacgct

SEQ ID NO: 391337 - DNA, 75 bp, synthetic construct
  source 1..75: mol_type = other DNA
atctatgctctttaccgagtatccatttattgaacgttttgcacaggcaagtcacgcaggattccacggcgttga

SEQ ID NO: 391338 - DNA, 75 bp, synthetic construct
  source 1..75: mol_type = other DNA
gtggaggcctccggtgccagcctggagaaggcgcggcacgaccagttgcttaccgcgcttcgtgcgctgctgtta

SEQ ID NO: 391339 - DNA, 75 bp, synthetic construct
  source 1..75: mol_type = other DNA
cttctttaatcttgcccattttcgcccacattaatactttcgcgcatatttcttccggtgaggtttttctctttt

SEQ ID NO: 391340 - DNA, 75 bp, synthetic construct
  source 1..75: mol_type = other DNA
tgctgttgcctaacgcgtatcgcgttatcgtcccgccaatgacttccgagatgatgaacctggtgaaaaactccg

SEQ ID NO: 391341 - DNA, 75 bp, synthetic construct
  source 1..75: mol_type = other DNA
gaatgccgcgctggcaatgggtctgacgctaccgcaggcttaccgctatgtactgctgcctaatgcttatcgcgt

SEQ ID NO: 391342 - DNA, 75 bp, synthetic construct
  source 1..75: mol_type = other DNA
gtgttttctgctgcgttaatccgccgtgcactgattgttgcagcggtctgcctggctgtggcaacaggactgtga

SEQ ID NO: 391343 - DNA, 75 bp, synthetic construct
  source 1..75: mol_type = other DNA
atggcgcagctggcggcgcactattccccgcgtagatggcgttcgcaagcctgccacgcctttattgccgggcaa

SEQ ID NO: 391344 - DNA, 75 bp, synthetic construct
  source 1..75: mol_type = other DNA
tcgctttgctcctgttactgctgtggctggaatgggggccacagcgtcgccagttgtggctctggttgcccattc

SEQ ID NO: 391345 - DNA, 75 bp, synthetic construct
  source 1..75: mol_type = other DNA
ggtcttggtgggaatgttcttgctgaaggcactgctcctggggttgttggtccgtatggagcatatactgagccg

SEQ ID NO: 391346 - DNA, 75 bp, synthetic construct
  source 1..75: mol_type = other DNA
gaaatttgtcttcgccgaagggatcgcgtacggcccggaaatggcagcgaaagcacagtctgaggcgaaagcagc

SEQ ID NO: 391347 - DNA, 75 bp, synthetic construct
  source 1..75: mol_type = other DNA
ctacaagctggcactcatcacgctggcagcagtgctgggttactggcttgaccgttcgctcttccccaaagcccg

SEQ ID NO: 391348 - DNA, 75 bp, synthetic construct
  source 1..75: mol_type = other DNA
tttgcctgatggcccagccgattactggggtgcgtggtgatgtctatcatgaaattctgctgcgcatgaaaggag

SEQ ID NO: 391349 - DNA, 75 bp, synthetic construct
  source 1..75: mol_type = other DNA
ggggattgattacatgcagggttatcttattggtaaaccacagccattaattgagtcgttgaatgcaattgaccc

SEQ ID NO: 391350 - DNA, 75 bp, synthetic construct
  source 1..75: mol_type = other DNA
tattatcattatcattctctgttggggcggttacagggtttttactccccggcgtaacaacgtttcacatggtga

SEQ ID NO: 391351 - DNA, 75 bp, synthetic construct
  source 1..75: mol_type = other DNA
tttgcctgatggctcagccgattaccgggatgcgcggtgatgtttatcacgaaattttgttgcgcatgaaaggtg

SEQ ID NO: 391352 - DNA, 75 bp, synthetic construct
  source 1..75: mol_type = other DNA
atctcacgcgctcaatcaatattgcgccttctgccaacgcttacgttgcgcgggcgacaatttatcgccaacgtc

SEQ ID NO: 391353 - DNA, 75 bp, synthetic construct
  source 1..75: mol_type = other DNA
ggtcacattaggtgcgcagaacgatcaacaggtaacgtttaattatctgttagcgcaaggggaatatcgggtctc

SEQ ID NO: 391354 - DNA, 75 bp, synthetic construct
  source 1..75: mol_type = other DNA
gacggtattacagctactggcgggcgaggtggagctaaggggccagcatttaatgttctgccaaccggcggccct

SEQ ID NO: 391355 - DNA, 75 bp, synthetic construct
  source 1..75: mol_type = other DNA
ggtttttctcttttatctgcctttggcactgatgatcagcatgatgatgtttttcagctgggcggcattgccagg

SEQ ID NO: 391356 - DNA, 75 bp, synthetic construct
  source 1..75: mol_type = other DNA
tacgcatccctggcatggaaatgctggttaaaaactatggcatcatgctgcggattcaatacaagcaaaaacttt

SEQ ID NO: 391357 - DNA, 75 bp, synthetic construct
  source 1..75: mol_type = other DNA
gattatcagatagtggcgtcgatttgccacctggcgcgaatgaagaaaatgcgggtagtggcagagtacgttgaa

SEQ ID NO: 391358 - DNA, 75 bp, synthetic construct
  source 1..75: mol_type = other DNA
atcagcattcacagctatcagaattacattcccctttatcctggatataccacgcaactgaccataacttcctcc

SEQ ID NO: 391359 - DNA, 75 bp, synthetic construct
  source 1..75: mol_type = other DNA
tcagtcagttgctggctaaatatcagattgaagcgtggcaacttatttttgaagtcaccgaaagtaatgctctga

SEQ ID NO: 391360 - DNA, 75 bp, synthetic construct
  source 1..75: mol_type = other DNA
cgcgatgatgaatcggctacagcaggcgctggaacacaaccattttttcctgatggcccagccgattaccggtat

SEQ ID NO: 391361 - DNA, 75 bp, synthetic construct
  source 1..75: mol_type = other DNA
ttctatacccttagcgatcaaaccatgtatgacatgcttggctggctggcgcaggaagaaggtattcgtcttgaa

SEQ ID NO: 391362 - DNA, 75 bp, synthetic construct
  source 1..75: mol_type = other DNA
acataacgaaccttccctggaggcagaacgcgatgcgttgcgggaggaagtcgcccgactgaatcaggaaatacg

SEQ ID NO: 391363 - DNA, 75 bp, synthetic construct
  source 1..75: mol_type = other DNA
caactacgccctgaactgttcgaaggccgtacattgctggtgtggtgcggtgaaaatcgaacctccgcccaacag

SEQ ID NO: 391364 - DNA, 75 bp, synthetic construct
  source 1..75: mol_type = other DNA
atcatctggggcagttaaatcccccggcgcttagcggcagcgacattctgaaagtcgtttacggcgcaaccttcc

SEQ ID NO: 391365 - DNA, 75 bp, synthetic construct
  source 1..75: mol_type = other DNA
tctttattgatgatgagaattcccgcacgttgttccttgggtattccgtcgctggccagcgtcttaaagcgcaat

SEQ ID NO: 391366 - DNA, 75 bp, synthetic construct
  source 1..75: mol_type = other DNA
gcagcgcagtctgacccgaactgtttctttattgatgatgagaattcccgcacgttgttccttgggtattccgtc

SEQ ID NO: 391367 - DNA, 75 bp, synthetic construct
  source 1..75: mol_type = other DNA
aacagagtttgtcgcaggctgaatcaaagcatcaaagagcattatccatggcacaacaaaccaaacaaggtcatg

SEQ ID NO: 391368 - DNA, 75 bp, synthetic construct
  source 1..75: mol_type = other DNA
gatctgaatctgccagccccgagagtggtccgggtgcccgacaggatcgcggcaaaccgcggctatccagccatg

SEQ ID NO: 391369 - DNA, 75 bp, synthetic construct
  source 1..75: mol_type = other DNA
ggtttagcggcggtggactctggtatggcggggaaagccattccccaactacaacagagcggggggggggaaccc

SEQ ID NO: 391370 - DNA, 75 bp, synthetic construct
  source 1..75: mol_type = other DNA
cagaacagcaaaaacagctggccgaccctgctttccgcgctcgtgcgcaaggtttagcggcggtggactctggca

SEQ ID NO: 391371 - DNA, 75 bp, synthetic construct
  source 1..75: mol_type = other DNA
cagaaacgggcgatgtctacgacgcactggcggataaatatctggcgattggctgctcctgtgtttcgccgaacg

SEQ ID NO: 391372 - DNA, 75 bp, synthetic construct
  source 1..75: mol_type = other DNA
ggcgcggcagagaaagtcgtgcgcgcaattgaagagaacggcggctgggtagtcggttatgaaaactgcaccggg

SEQ ID NO: 391373 - DNA, 75 bp, synthetic construct
  source 1..75: mol_type = other DNA
actctgaaaggtatagatgcgcctgcaggaagccccaaaatcaaaacattttcgagagacgatgatgcatccctg

SEQ ID NO: 391374 - DNA, 75 bp, synthetic construct
  source 1..75: mol_type = other DNA
ggacaattgctactaaaaaaagacagccatttgccgatttccggctccataaaagcacgtggcgggatttatgaa

SEQ ID NO: 391375 - DNA, 75 bp, synthetic construct
  source 1..75: mol_type = other DNA
tggattctctatcaaaggggatgaaagaactggcttcaatcatgaatagcgccgaagggatttcgtttgccaatt

SEQ ID NO: 391376 - DNA, 75 bp, synthetic construct
  source 1..75: mol_type = other DNA
agcattaaaaactggtgagggtgttaattacgtatctaactctgccggtgttattactcacaaagagtcgaaggc

SEQ ID NO: 391377 - DNA, 75 bp, synthetic construct
  source 1..75: mol_type = other DNA
ttcgtgagcagatggacgaagttatcggacgtcagcaactgattagcaagccggtacgcgttcgtacatctggaa

SEQ ID NO: 391378 - DNA, 75 bp, synthetic construct
  source 1..75: mol_type = other DNA
catgttggggatgggaaccaccgcagctggtagttcacagagtggtaatttgctgaccggggttgcttccgccgt

SEQ ID NO: 391379 - DNA, 75 bp, synthetic construct
  source 1..75: mol_type = other DNA
taaggcgtctgatcctaaagtcgtggcgctttatacaaagaaaatcaatcaactgattgctgctggcaataccgc

SEQ ID NO: 391380 - DNA, 75 bp, synthetic construct
  source 1..75: mol_type = other DNA
ggcagaagcctattgttgaagctgcggccgaaatggaacgtatgcgggtgatgcttcgtgggttgaataaggaga

SEQ ID NO: 391381 - DNA, 75 bp, synthetic construct
  source 1..75: mol_type = other DNA
atgcagtggaaagtcatcaatggttggtactgcgttacagcttgcgggctgatgagctggaagttccgcacgctg

SEQ ID NO: 391382 - DNA, 75 bp, synthetic construct
  source 1..75: mol_type = other DNA
gcgatacagcagacagactgaactatcagaaaatggcgcaggtggtggatggtgttataaccttgttgtacaaca

SEQ ID NO: 391383 - DNA, 75 bp, synthetic construct
  source 1..75: mol_type = other DNA
cgtctgctggatggcttctatacccttagcgatcaaaccatgtatgacatgcttggctggctggcgcaggaagaa

SEQ ID NO: 391384 - DNA, 75 bp, synthetic construct
  source 1..75: mol_type = other DNA
catggcggagtttaagcctgttcatgtgatgcagctgccaaacagcgttaaagacgatgcctcgcgtgcgttatg

SEQ ID NO: 391385 - DNA, 75 bp, synthetic construct
  source 1..75: mol_type = other DNA
tcctccggcgcttagcggcagcgacattctgaaagtagtctacggcgcaaccttccggttcgataaagaggcgtt

SEQ ID NO: 391386 - DNA, 75 bp, synthetic construct
  source 1..75: mol_type = other DNA
gctgtatggtcgctccggtgactgggcgtatcgcgttggtttaccgggcaaaagcggtgtaggtggcggtattct

SEQ ID NO: 391387 - DNA, 75 bp, synthetic construct
  source 1..75: mol_type = other DNA
atgctctcaggtaaaaaagaagcaggcgtttccagagagcagaaagtaggtgatgctgccaacttactgatttag

SEQ ID NO: 391388 - DNA, 75 bp, synthetic construct
  source 1..75: mol_type = other DNA
aaaaggaaggtggcactcctactaactggacaagatattcaaaatctaaactaacgaaatcagaatgcgaaaaaa

SEQ ID NO: 391389 - DNA, 75 bp, synthetic construct
  source 1..75: mol_type = other DNA
tgaaagccatgcttagtccatcccaatctcttcaataccagaaagaaagcgtcgagcgggctttaacgtgcgcta

SEQ ID NO: 391390 - DNA, 75 bp, synthetic construct
  source 1..75: mol_type = other DNA
aaaatcacaatgcacccggaatttaaaaaatacactacgtggttgatgagtaacgaaacaaatgaggctgctggg

SEQ ID NO: 391391 - DNA, 75 bp, synthetic construct
  source 1..75: mol_type = other DNA
tgctctcagggaaaaaagaagctggagtttccagagagcagaaagtaaaacttataaattttaattgcgagaaac

SEQ ID NO: 391392 - DNA, 75 bp, synthetic construct
  source 1..75: mol_type = other DNA
ctggacaagatattcaaaatctaaattaacgaaatcagaatgcgaaaaaatgctctcagggaaaaaagaagcagg

SEQ ID NO: 391393 - DNA, 75 bp, synthetic construct
  source 1..75: mol_type = other DNA
aacgccagctatggcagaaaaaagagaacagtgaggcattcagggatttgctggtggaaaatcttcagcaccgtt

SEQ ID NO: 391394 - DNA, 75 bp, synthetic construct
  source 1..75: mol_type = other DNA
actacacggtatagagaagaaagtggttgcgatggatgctaaatttgaccaagttctcgacatactcaaacaaaa

SEQ ID NO: 391395 - DNA, 75 bp, synthetic construct
  source 1..75: mol_type = other DNA
caattagccacagaaaatagattgtcgaaattggaatccagcgacgcattgttaaaccagaagtttgagacgatg

SEQ ID NO: 391396 - DNA, 75 bp, synthetic construct
  source 1..75: mol_type = other DNA
tcccgcgaaagctcgcgtgatctacggttctcattttgaagtcggtgatgacggtagcgtagtgggttatgacaa

SEQ ID NO: 391397 - DNA, 75 bp, synthetic construct
  source 1..75: mol_type = other DNA
atggaagcagcaaatttaagcccttctggtgcagtattaccactggcagccacaatcaatggaaataatccagtg

SEQ ID NO: 391398 - DNA, 75 bp, synthetic construct
  source 1..75: mol_type = other DNA
taatacagtaaaaacaatcatgcctgattcttttgatgtcgataaaattactactcttgttcggttcaactatga

SEQ ID NO: 391399 - DNA, 75 bp, synthetic construct
  source 1..75: mol_type = other DNA
agcggcagtccacgagctgagtgactatttgattggtcaggacccgtcacgcatcaacgacttatggcaagtgat

SEQ ID NO: 391400 - DNA, 75 bp, synthetic construct
  source 1..75: mol_type = other DNA
aactgggtagcctgtttggacagctcgataagggtcagcaacaaatttcagcgactcagcaagcgaatcagcagt

SEQ ID NO: 391401 - DNA, 75 bp, synthetic construct
  source 1..75: mol_type = other DNA
catatggctgcctttgttgaagccattcagaattcagtgcaacagggacaaagcgccacaatggaaaaaatggca

SEQ ID NO: 391402 - DNA, 75 bp, synthetic construct
  source 1..75: mol_type = other DNA
caaaaagcgaaagcaattcggctacttggcaatgaaaaaccggcacaacaactcgaaaaattagacgcgttattc

SEQ ID NO: 391403 - DNA, 75 bp, synthetic construct
  source 1..75: mol_type = other DNA
cagcatttgcaattacgttctctatccttatcacctggctggagaaattctatctggcgaaatgctacaaaaatc

SEQ ID NO: 391404 - DNA, 75 bp, synthetic construct
  source 1..75: mol_type = other DNA
acctacccggtattctgactggcgtggggattatcggcaccttctacggcctgatgattggtctcaagcacttcg

SEQ ID NO: 391405 - DNA, 75 bp, synthetic construct
  source 1..75: mol_type = other DNA
catcagaattatttatggattaaaaaaatacacgcgatcaattaatagcattgaaaaaagtgcgccagaggttca

SEQ ID NO: 391406 - DNA, 75 bp, synthetic construct
  source 1..75: mol_type = other DNA
tcgcgctgctggcggtggtgatgacgcgcatgatggcgccgggtcatctgctgctgcagattctccagtgtctgg

SEQ ID NO: 391407 - DNA, 75 bp, synthetic construct
  source 1..75: mol_type = other DNA
atggacgacacattgttttatatgtgctgttgctggggttttattgccttatgtctgtttatcaggtggtttatt

SEQ ID NO: 391408 - DNA, 75 bp, synthetic construct
  source 1..75: mol_type = other DNA
caacgccattctatacctgttaattttccctgcgatgttcacctttaaatgccggaatgctgctcgcaaaataaa

SEQ ID NO: 391409 - DNA, 75 bp, synthetic construct
  source 1..75: mol_type = other DNA
aatcagttgaccgctgaggtgctcaatggcacgcaacaggcaggacgcacgctttccagtgccagcgcggagttg

SEQ ID NO: 391410 - DNA, 75 bp, synthetic construct
  source 1..75: mol_type = other DNA
aaacaccacgcgccatctggaagagatacaaacaggagccgataaaatgcgcgtggctgccgatcgctttgaagc

SEQ ID NO: 391411 - DNA, 75 bp, synthetic construct
  source 1..75: mol_type = other DNA
gctcagtcagcaacagcaatctgcgcagagtgcgttacaacaggaagcgcagcgaatcattggtcagcttgaaag

SEQ ID NO: 391412 - DNA, 75 bp, synthetic construct
  source 1..75: mol_type = other DNA
atgaagtgggcagtgatacaggcagaacaggagaatgacatgaacatactaaaaaaacttatgcagcgtctgtgt

SEQ ID NO: 391413 - DNA, 75 bp, synthetic construct
  source 1..75: mol_type = other DNA
taagactgttttgcgtagactggctggcaactatccggtaactccggatggttggataagctgtagtgagcgaat

SEQ ID NO: 391414 - DNA, 75 bp, synthetic construct
  source 1..75: mol_type = other DNA
ggcatcgctggaagcagagcctgttctgtatcagtcctgcactcgccccacctggaatagcggtgttccgtggac

SEQ ID NO: 391415 - DNA, 75 bp, synthetic construct
  source 1..75: mol_type = other DNA
gtgctgtttgcttattgttcgctctaaacagttccgctgttgctctggcctcttcaccttcaccgcttaatcctg

SEQ ID NO: 391416 - DNA, 75 bp, synthetic construct
  source 1..75: mol_type = other DNA
gtccattacagtaaaggtgttccaacggactggcgttgcccaaccagtatcatgttgatggcgtattcttcatat

SEQ ID NO: 391417 - DNA, 75 bp, synthetic construct
  source 1..75: mol_type = other DNA
taacttcgtactgcgcgccagagcgaataacagcggacgcaatccgaactggaccagctatgaaaaactgcgcac

SEQ ID NO: 391418 - DNA, 75 bp, synthetic construct
  source 1..75: mol_type = other DNA
tatgtgttattttgacaccataagtcagcatttcataattatggatacagaccaacagaaacagcattgtaaata

SEQ ID NO: 391419 - DNA, 75 bp, synthetic construct
  source 1..75: mol_type = other DNA
tgcgggcattgctgcaatgcaaggcgcgcacatcattcgtgttcatgacgtcaaagaacccgtagaagcgatgcg

SEQ ID NO: 391420 - DNA, 75 bp, synthetic construct
  source 1..75: mol_type = other DNA
agtctggcctgtgcggtcattgccgcaatgcaaggcgcgcacatcattcgtgttcatgacgtcaaagaaaccgta

SEQ ID NO: 391421 - DNA, 75 bp, synthetic construct
  source 1..75: mol_type = other DNA
ctgggagctgaaagaactggcaaaggatatctggagcagaccatggagcgaggaaagacgcaacgactggcatag

SEQ ID NO: 391422 - DNA, 75 bp, synthetic construct
  source 1..75: mol_type = other DNA
gggatgaattcagcattccaaaagaggtcgctcgccagctgattgatatgcatgtacgccgcggtgacgcgatct

SEQ ID NO: 391423 - DNA, 75 bp, synthetic construct
  source 1..75: mol_type = other DNA
ccgcacgcgatgtcggcgctcgtggtatccgcattctgcgcgcctccaactctacctacaaacccttgccacaag

SEQ ID NO: 391424 - DNA, 75 bp, synthetic construct
  source 1..75: mol_type = other DNA
tgcagttattgctgcgatgcagggcgcacacatcattcgtgttcatgacgtcaaagaaaccgtagaagcgatgcg

SEQ ID NO: 391425 - DNA, 75 bp, synthetic construct
  source 1..75: mol_type = other DNA
ttactgcccgcgctgtgccggataaaaacgtatcagatgattttatgcatgctgttctcagtaactgcaccacaa

SEQ ID NO: 391426 - DNA, 75 bp, synthetic construct
  source 1..75: mol_type = other DNA
atttcgccgtggccaacccgccgttttccaacaaaaactggaccagcggcattaacccgcaagaggatgaatttg

SEQ ID NO: 391427 - DNA, 75 bp, synthetic construct
  source 1..75: mol_type = other DNA
aacattatcccacgctggatgaaacagcgattaaaacgctggtagtgcaggataagtggctggcaacgttgcagg

SEQ ID NO: 391428 - DNA, 75 bp, synthetic construct
  source 1..75: mol_type = other DNA
ctggcgggtattccctgccctgcgcaacgtgctgtttgctgacgaccgttccggttactgtcgggcgcaggtgaa

SEQ ID NO: 391429 - DNA, 75 bp, synthetic construct
  source 1..75: mol_type = other DNA
cggcgggtgggcaaacgaaagcggaagtgccgctgacgatggaagcggtgataacgagagaaaacctgatgctgg

SEQ ID NO: 391430 - DNA, 75 bp, synthetic construct
  source 1..75: mol_type = other DNA
gaacaattagtaaataaatttgaaactgtgacatttttagattcgagaagacaactagaaagagtgcaaattatc

SEQ ID NO: 391431 - DNA, 75 bp, synthetic construct
  source 1..75: mol_type = other DNA
ctttctccagtgatggagaagcggatgattaatctgttaatcatcgttctcagggcagtagttgccgttgcaaac

SEQ ID NO: 391432 - DNA, 75 bp, synthetic construct
  source 1..75: mol_type = other DNA
atgaacatgcgtaatattattactgcacgctctgtgccggataaaaacgtatcagatgattttatgcatgctgtt

SEQ ID NO: 391433 - DNA, 75 bp, synthetic construct
  source 1..75: mol_type = other DNA
ggcggaaaatctgttccggtgaaagaactaatcgacagaattattcagaaatataaggaacccttcgatgaataa

SEQ ID NO: 391434 - DNA, 75 bp, synthetic construct
  source 1..75: mol_type = other DNA
atgaacatgcgtaatcttaatattattaaaagcagtcctcaatcactgccgcacaattttaatatagccgctgtc

SEQ ID NO: 391435 - DNA, 75 bp, synthetic construct
  source 1..75: mol_type = other DNA
gctttatcaaagatggcaacaagaaccgcctgcgtagccgagatattcaccgcattgtggacgtgttcaaccatc

SEQ ID NO: 391436 - DNA, 75 bp, synthetic construct
  source 1..75: mol_type = other DNA
atgcgatggaagcctgtgacatctacacccgtcagtgctccacgctcatcaataccgttgagctggcgacgcttg

SEQ ID NO: 391437 - DNA, 75 bp, synthetic construct
  source 1..75: mol_type = other DNA
ggcaacagtgttcgcggtcaaaaaatggtggcatcggtcgctaaacaactcggctataacgtgtttaagggctga

SEQ ID NO: 391438 - DNA, 75 bp, synthetic construct
  source 1..75: mol_type = other DNA
agagttgcttattgctctccttgtgatgctggtgttcctgtttgcgggtgagaaaattctggcatttctcagcct

SEQ ID NO: 391439 - DNA, 75 bp, synthetic construct
  source 1..75: mol_type = other DNA
ttttattgatcctgattatgaatccgctcggaaacctacctattttcatgtccgtactgaaacatactgaaccga

SEQ ID NO: 391440 - DNA, 75 bp, synthetic construct
  source 1..75: mol_type = other DNA
tcgggtcttgtctaatatttatattgataagttctcaaaacagattgaagggcttttcaatgacgctaatatagg

SEQ ID NO: 391441 - DNA, 75 bp, synthetic construct
  source 1..75: mol_type = other DNA
ctcaccttgttggcgctggcccgagggggaatcgaatccattgtagcgacgcagaaggcggcgctggcaaactga

SEQ ID NO: 391442 - DNA, 75 bp, synthetic construct
  source 1..75: mol_type = other DNA
tcgtaactatacaaaacatgcagaaggctcggtgctggtcgaatttggcgataccaaagtgttgtgtaccgcctc

SEQ ID NO: 391443 - DNA, 75 bp, synthetic construct
  source 1..75: mol_type = other DNA
agatggggcatctggtgattgctctgctgctggcctggggcggcacctttgtcatcctgctacagtcttcgctat

SEQ ID NO: 391444 - DNA, 75 bp, synthetic construct
  source 1..75: mol_type = other DNA
atgaagtagatataccaataccgagtcgttttaaattggatagtaataagtttaattttgagagcgaatttaaaa

SEQ ID NO: 391445 - DNA, 75 bp, synthetic construct
  source 1..75: mol_type = other DNA
tgagggaaatgattcatttttatcaaagtgaatatgccagactgtttcttcaacataataatataaccgctcttt

SEQ ID NO: 391446 - DNA, 75 bp, synthetic construct
  source 1..75: mol_type = other DNA
cgctggcagatgagcactaccagtcggcggcgatgggggtgggcgcgacctcgcacagtttggcgcgctggcgtt

SEQ ID NO: 391447 - DNA, 75 bp, synthetic construct
  source 1..75: mol_type = other DNA
acgctcaacatccgtttccggcgctctgattatgtcgggctggcagtgatcagtagcggtctgggcgtggtttcc

SEQ ID NO: 391448 - DNA, 75 bp, synthetic construct
  source 1..75: mol_type = other DNA
ttcttcttcgctggcaacttcttagtgccgtaatgatgtttctggccagcacgctcaacatccgttttcgtcggt

SEQ ID NO: 391449 - DNA, 75 bp, synthetic construct
  source 1..75: mol_type = other DNA
gcctgctggttcgcaatggggttgcttggcatcacaatggcggatatcaccgccatctggcacaacatcgagtcg

SEQ ID NO: 391450 - DNA, 75 bp, synthetic construct
  source 1..75: mol_type = other DNA
aatcgtcttaagtctctggaaaaatcagagcgaaagaaagttgaaacaagactcaagattatacttggtgcggaa

SEQ ID NO: 391451 - DNA, 75 bp, synthetic construct
  source 1..75: mol_type = other DNA
ggagcagcttaccgatttgccgaccattgccattaacgacgcgcaggccgcagcgtgggcggagtatcaggcgct

SEQ ID NO: 391452 - DNA, 75 bp, synthetic construct
  source 1..75: mol_type = other DNA
atgcatattacatacgatctcccggttgctattgatgacatcattgaagctaaacaacgactggctgggcgaatt

SEQ ID NO: 391453 - DNA, 75 bp, synthetic construct
  source 1..75: mol_type = other DNA
gtcgagcagtattacatcgataaagtaccgctcaaacgcggctgcgattatcaggatgtgctgaatatgctgctg

SEQ ID NO: 391454 - DNA, 75 bp, synthetic construct
  source 1..75: mol_type = other DNA
tacactttccgttagtcaaaacgctggagcaacttaccaatttgccgaccattgcgctgactaacagtatcgctt

SEQ ID NO: 391455 - DNA, 75 bp, synthetic construct
  source 1..75: mol_type = other DNA
tcgaaaatgaatcaggcgcgttatcccgcgtgatcggcctttttgcccagcgtggctataacattgaaagcctga

SEQ ID NO: 391456 - DNA, 75 bp, synthetic construct
  source 1..75: mol_type = other DNA
gggaaatcatgctggtgaaaattcaggccagcggttacgggcgtgacgaagtgaaacgtaatacggaaatattcc

SEQ ID NO: 391457 - DNA, 75 bp, synthetic construct
  source 1..75: mol_type = other DNA
actcaacgaaagaaaagcaaagccctctcttacagagggctttgctttttttgtacattggttacaggaaaatgc

SEQ ID NO: 391458 - DNA, 75 bp, synthetic construct
  source 1..75: mol_type = other DNA
gggatacccttacgaagccatttaaaccataaatttggattcgtttcggagcgatcagaaggtgttaagaaagga

SEQ ID NO: 391459 - DNA, 75 bp, synthetic construct
  source 1..75: mol_type = other DNA
aagttaagtgcgttacctgacgatacattggtatgttgtgctcatgaatatacgttatcaaatatgaagtttgct

SEQ ID NO: 391460 - DNA, 75 bp, synthetic construct
  source 1..75: mol_type = other DNA
cctgtgtgcgcgtgaattttcgcgtttgatgatccgcgacggcattcagggacgcattattcagatcaactcgaa

SEQ ID NO: 391461 - DNA, 75 bp, synthetic construct
  source 1..75: mol_type = other DNA
tacaggtgaatctggtgggttatttcctgtgtgcccgtgaattttcgcgtttgatgatccgcgacgggattcagg

SEQ ID NO: 391462 - DNA, 75 bp, synthetic construct
  source 1..75: mol_type = other DNA
ttggtgatgcggttgttgatttattgccggagtcatctggtaagttattgccttgtccgggaggggcgcctgcca

SEQ ID NO: 391463 - DNA, 75 bp, synthetic construct
  source 1..75: mol_type = other DNA
tacagcctcaatgcgcaaactcgccaccaggagcaggggggcgaggactcacatgatatcagcggcaacggtacc

SEQ ID NO: 391464 - DNA, 75 bp, synthetic construct
  source 1..75: mol_type = other DNA
caggggccgggcaccggctatcgcatctctgccgaacgctgggcggagatcaaaaatattccgggcgtggttcag

SEQ ID NO: 391465 - DNA, 75 bp, synthetic construct
  source 1..75: mol_type = other DNA
gtcagtcttggcacgcatatcaggaatataaaaagcataaagagcagttggaaaaattgtcgattgagttggaat

SEQ ID NO: 391466 - DNA, 75 bp, synthetic construct
  source 1..75: mol_type = other DNA
cacgctaacaccagaacagattactgatattactgatagtgtgcgcaaaggtcagtcttggcacgcatatcagga

SEQ ID NO: 391467 - DNA, 75 bp, synthetic construct
  source 1..75: mol_type = other DNA
tacattctgcgactgaaagatctggattttgaagtgccggtcagccgcagcaaagtgaaagaatttcgccagtta

SEQ ID NO: 391468 - DNA, 75 bp, synthetic construct
  source 1..75: mol_type = other DNA
gcgtcgttgccgtcgtgatggccttggtaaacgtatttacctgtttaagggcgacagcatccggcgcgcaaaact

SEQ ID NO: 391469 - DNA, 75 bp, synthetic construct
  source 1..75: mol_type = other DNA
gagctggacggcaagagccgcgccgagttcgacatgattgaccgttttattgccgactacgcgattaacgtggct

SEQ ID NO: 391470 - DNA, 75 bp, synthetic construct
  source 1..75: mol_type = other DNA
atgagtgaccaacccgttctgttcagcagagcggcggcttcctgccgcctgacattgaaccgtgaagataaatgt

SEQ ID NO: 391471 - DNA, 75 bp, synthetic construct
  source 1..75: mol_type = other DNA
aattgaaaacgacaccacattacgattagtcgaattaacggcaaccggcgataaattcttttgtgcgggcggcga

SEQ ID NO: 391472 - DNA, 75 bp, synthetic construct
  source 1..75: mol_type = other DNA
aacgtggccatattcgcggttctcgttttctcagttggggcgggagatccacaaaacctttgcgctggcggattc

SEQ ID NO: 391473 - DNA, 75 bp, synthetic construct
  source 1..75: mol_type = other DNA
atgaaattttccaaattttctgagttggtgaatcgtattttgtccaacaaccacagccatcgtcgcgatatggat

SEQ ID NO: 391474 - DNA, 75 bp, synthetic construct
  source 1..75: mol_type = other DNA
cacacatcaagcaactgattctggcgctggaaaataaacacgccgattactcccaccagttactggcagggttaa

SEQ ID NO: 391475 - DNA, 75 bp, synthetic construct
  source 1..75: mol_type = other DNA
ccatcggtggcggtattgaacttgctttgtgctgcgatattcgtatcgctcgcccccacgcgaaattctctaatc

SEQ ID NO: 391476 - DNA, 75 bp, synthetic construct
  source 1..75: mol_type = other DNA
ttatcagaacatggcctgtattgcccatgtgtagggagtgctacagatgatcttgtgattgcttcgcgaggcggt

SEQ ID NO: 391477 - DNA, 75 bp, synthetic construct
  source 1..75: mol_type = other DNA
gctgttgctggcgcggctgttgaatctcaacgatgtgcaatctggcgtgctgaatatcatttttccgcattgctg

SEQ ID NO: 391478 - DNA, 75 bp, synthetic construct
  source 1..75: mol_type = other DNA
ggaccggctacaggttaccgcctgcaaggggaacgctgggaagagatcaaaaatattcccggtgcacttgatccc

SEQ ID NO: 391479 - DNA, 75 bp, synthetic construct
  source 1..75: mol_type = other DNA
cgaacaggaaaccaccgttgccgttgctcgttatgcacctttcaatgctatcgccctgttggtaggttcgcaggt

SEQ ID NO: 391480 - DNA, 75 bp, synthetic construct
  source 1..75: mol_type = other DNA
gcaggtgcgttacaaagtgatgatggggcgtccggaagactggaaccacaagaccgaaggcggatttttttccgg

SEQ ID NO: 391481 - DNA, 75 bp, synthetic construct
  source 1..75: mol_type = other DNA
ggaaattatggaagatctctatgatgtcgataacgtaattgtaccaattggcggtggtggtttaattgccggtat

SEQ ID NO: 391482 - DNA, 75 bp, synthetic construct
  source 1..75: mol_type = other DNA
ggaaattatggaagatctctatgatgtcgataacgtgattgtgccaattggcggtggcggtttaattgctggtat

SEQ ID NO: 391483 - DNA, 75 bp, synthetic construct
  source 1..75: mol_type = other DNA
ccgccagcatgattttcactgtgggctccgcgcaagccacgttccaagcgagcgggacaacgggtattaccacac

SEQ ID NO: 391484 - DNA, 75 bp, synthetic construct
  source 1..75: mol_type = other DNA
aaaaaatcaggacggcatttcgtctttgctttggtattcttgataaaattgcggtagccatatgtgaactttata

SEQ ID NO: 391485 - DNA, 75 bp, synthetic construct
  source 1..75: mol_type = other DNA
atcggagttttcactcgcacgccatctttattttgattatctttatccacaaaatacggattacattaagtacga

SEQ ID NO: 391486 - DNA, 75 bp, synthetic construct
  source 1..75: mol_type = other DNA
tatctacacacctccgccattattgtcggtgacgggaaagtactctctgctgttaacgacgtcaacgattatgcc

SEQ ID NO: 391487 - DNA, 75 bp, synthetic construct
  source 1..75: mol_type = other DNA
ttgatgactacaacgtcatccagcgcgacttgaaagtggatggtggtctgaggccggttcgcgaagaagatgtga

SEQ ID NO: 391488 - DNA, 75 bp, synthetic construct
  source 1..75: mol_type = other DNA
tggcgaaacgccctgtgaaccaggatggtttcgttaaggagtggttcgaagaaggcttcatcgcaatggaaagtc

SEQ ID NO: 391489 - DNA, 75 bp, synthetic construct
  source 1..75: mol_type = other DNA
ctgctgaggcagtgaaagacgcgctgcgctcagaagatgtgcgtggagcactgaaacagaaagtccgccagacat

SEQ ID NO: 391490 - DNA, 75 bp, synthetic construct
  source 1..75: mol_type = other DNA
cgcgcaatatattcgtaaccgtcgtctcgatttttgtgcagatgcgattcgccatgccgcagatgatgaaaaact

SEQ ID NO: 391491 - DNA, 75 bp, synthetic construct
  source 1..75: mol_type = other DNA
gccatctacgatgaagataacggcgagcattcggtggaacttactcaacgttttgcccgcgccagcgcctttacc

SEQ ID NO: 391492 - DNA, 75 bp, synthetic construct
  source 1..75: mol_type = other DNA
tcgggcaaaagagatgctggaacagttcgtccagggacgggggcataaaattgccagttattatcgggagaacat

SEQ ID NO: 391493 - DNA, 75 bp, synthetic construct
  source 1..75: mol_type = other DNA
gttttgccagcagtgaactggctgactggtctcaggtcgatttgcatcgtctgagcctgtatctggcagcagaag

SEQ ID NO: 391494 - DNA, 75 bp, synthetic construct
  source 1..75: mol_type = other DNA
tggtgaactggagattacctccatcaaccagatgtacctcgaggcgggcaacctgaccgttgaactgctcgggcg

SEQ ID NO: 391495 - DNA, 75 bp, synthetic construct
  source 1..75: mol_type = other DNA
ccaccattgtgctggcaattggtatctgggcgtatcaaatccccttcgccggatcgctggcgctgttctatttca

SEQ ID NO: 391496 - DNA, 75 bp, synthetic construct
  source 1..75: mol_type = other DNA
tccaacagtgcgcaaatcgccgccaactacctgcaacagatcgtcaaaaactatcagcaggagctgctggaagga

SEQ ID NO: 391497 - DNA, 75 bp, synthetic construct
  source 1..75: mol_type = other DNA
agattcacattcagggttaatgagtccgctgcagctgacagatatcatacaaaatcgttcatctgagcataaatt

SEQ ID NO: 391498 - DNA, 75 bp, synthetic construct
  source 1..75: mol_type = other DNA
aggagatccgcccgaccatcgacacgcaaaaggcgttattgctggtgcgcttcccgcctgatttctcgcgcaaac

SEQ ID NO: 391499 - DNA, 75 bp, synthetic construct
  source 1..75: mol_type = other DNA
catgtgctgctgctgaaaagcccgcaggagatccgcccaaccatcgacacacaaaaggcgttactcctggtgcgt

SEQ ID NO: 391500 - DNA, 75 bp, synthetic construct
  source 1..75: mol_type = other DNA
ctgattttacccgtgctgattcaggtgatcctgttcccgttcgccgccacgctggaagtgaccaacgccaccatc

SEQ ID NO: 391501 - DNA, 75 bp, synthetic construct
  source 1..75: mol_type = other DNA
gacctgatgtccgcgatgtcgcataaggactggctgagtcgtcgccaacgccaaaaacagggaattgaacgagct

SEQ ID NO: 391502 - DNA, 75 bp, synthetic construct
  source 1..75: mol_type = other DNA
tggctgcgatgtcgcataaggactggctgagccgccgccagcggcaaaaacagggaattgagcgggcgcatacat

SEQ ID NO: 391503 - DNA, 75 bp, synthetic construct
  source 1..75: mol_type = other DNA
tacgttgggtaaataccggggaaaacaagccgatcaggaacggcatcagaaagtgttatgctacagacaagtaaa

SEQ ID NO: 391504 - DNA, 75 bp, synthetic construct
  source 1..75: mol_type = other DNA
caacgtagcaaaagtgcggcgcttgcccgattaatgaaacacgacgtttctgatgttatcgcggataccccctgg

SEQ ID NO: 391505 - DNA, 75 bp, synthetic construct
  source 1..75: mol_type = other DNA
agagatggctcgctggcgatgggataagccggttattgaagcaaatgttgggtactggcgcgagcaactgcagtt

SEQ ID NO: 391506 - DNA, 75 bp, synthetic construct
  source 1..75: mol_type = other DNA
ggctgcacccaaagttatcagttgcctttgcaagatggtgcgatccgaaattctccgtatggtgcgacctgcaca

SEQ ID NO: 391507 - DNA, 75 bp, synthetic construct
  source 1..75: mol_type = other DNA
gaactgggacgcttactgatggacagtcaccacagtgatattttgctggtcgagcagatagaccgcctgacccgt

SEQ ID NO: 391508 - DNA, 75 bp, synthetic construct
  source 1..75: mol_type = other DNA
agtgttatgctacagacaagtaaaaaaactcagcatcagagaaacagcagatgcaacgggctacagcactttgca

SEQ ID NO: 391509 - DNA, 75 bp, synthetic construct
  source 1..75: mol_type = other DNA
ataaagatccttcacaatcagatccgattacccgcgcagtgataactgcaataaataatatgcttatagacctga

SEQ ID NO: 391510 - DNA, 75 bp, synthetic construct
  source 1..75: mol_type = other DNA
ccatctaaagcgcgatttactgtatcagtaatatatcaaaatgctaatgctggctccccggaaaaccaatgtatt

SEQ ID NO: 391511 - DNA, 75 bp, synthetic construct
  source 1..75: mol_type = other DNA
acgctgccgttagcgacccgtgcggcaagtgttgttggtgtggaaggggttccggcgctggtggaaaaaggccag

SEQ ID NO: 391512 - DNA, 75 bp, synthetic construct
  source 1..75: mol_type = other DNA
gcgcgtgcgttggaatggctggatgtgcaacctgaagatcgcgtactggatctgttctgcggtatgggcaacttt

SEQ ID NO: 391513 - DNA, 75 bp, synthetic construct
  source 1..75: mol_type = other DNA
gaaggcctggatctgtatctcgccccgatagtgagatactcgaaaccgtctctggtgagatgccctggtatgact

SEQ ID NO: 391514 - DNA, 75 bp, synthetic construct
  source 1..75: mol_type = other DNA
ctctacgtaatgctgtaaattcagagttacatacagcatcatcagttgaacttatccggaatgctatgcgttcag

SEQ ID NO: 391515 - DNA, 75 bp, synthetic construct
  source 1..75: mol_type = other DNA
gagtagctatctcattttcaatatcaatgtttattcgatttttagctacctggtggttagcagcgaaggtatgtg

SEQ ID NO: 391516 - DNA, 75 bp, synthetic construct
  source 1..75: mol_type = other DNA
aatgtgtataagatttttagcaacatggtggctagcatttcggttgaatttgattcaatggaacattttcacaac

SEQ ID NO: 391517 - DNA, 75 bp, synthetic construct
  source 1..75: mol_type = other DNA
atcgacgtgcagatctcgcgtctgcgccgcatggtggaagaagatccggcacatccacgttacattcagaccgtc

SEQ ID NO: 391518 - DNA, 75 bp, synthetic construct
  source 1..75: mol_type = other DNA
gaatttttccgattcgagtatttttacttggtatcctggaagttgtaattatgtaggtattgatattgcttttcc

SEQ ID NO: 391519 - DNA, 75 bp, synthetic construct
  source 1..75: mol_type = other DNA
aatggaaacagttaaaactagaaaaggataaggttgaaaatttacaagcaacgctgagtgaaaaactacttacaa

SEQ ID NO: 391520 - DNA, 75 bp, synthetic construct
  source 1..75: mol_type = other DNA
tcagggagttctgctggtaattcctgttgaacagttaacttctcgtgaatatactgacattcaagtttcatctca

SEQ ID NO: 391521 - DNA, 75 bp, synthetic construct
  source 1..75: mol_type = other DNA
gaactgccaggcgcaccgtcacaggaagaggcggtaattgctttcggtaagttcaaacttaacctcggtacgcgc

SEQ ID NO: 391522 - DNA, 75 bp, synthetic construct
  source 1..75: mol_type = other DNA
gtgagttatacaaaatccatggtgatataaaggatccacactcaataatcataaataaagatgattacgaaaaat

SEQ ID NO: 391523 - DNA, 75 bp, synthetic construct
  source 1..75: mol_type = other DNA
cagctacagaacgctttaaaagacgaaaaaataacccttgatcataatggtaaatcagcatctcttttactcccc

SEQ ID NO: 391524 - DNA, 75 bp, synthetic construct
  source 1..75: mol_type = other DNA
ccgatgccgatcattatggtgacggcgaaaggggaagaagtggaccgtatcgttggcctggagattggcgctgac

SEQ ID NO: 391525 - DNA, 75 bp, synthetic construct
  source 1..75: mol_type = other DNA
ccgacgtcttcgtagccagagcaacccgatgccgatcattatggtgacggcgaaaggggaagaagtggaccgtat

SEQ ID NO: 391526 - DNA, 75 bp, synthetic construct
  source 1..75: mol_type = other DNA
cccgtgagctgttggcccgtatccgtgcggtactgcgtcgtcaggcgaacgagctgccaggcgcgccgtcacagg

SEQ ID NO: 391527 - DNA, 75 bp, synthetic construct
  source 1..75: mol_type = other DNA
tcggtctatcaggcaccaccattgagttctacgatttctttatttacggcacggcggcggcgagtggtgtggggc

SEQ ID NO: 391528 - DNA, 75 bp, synthetic construct
  source 1..75: mol_type = other DNA
aaaaagagaacattaacgattgattcatattttaagaaaggcctaagtatcataagtagaaaaggaagaggcgtg

SEQ ID NO: 391529 - DNA, 75 bp, synthetic construct
  source 1..75: mol_type = other DNA
aatattaatgcattcagaaacctcttaacagagttgattaaaagtgatccatctttttcatggtttgtttctgag

SEQ ID NO: 391530 - DNA, 75 bp, synthetic construct
  source 1..75: mol_type = other DNA
tatatggactcaggagggacagaataaacttcatcactggtatgagaatatcaaagaagcatatggacgtgatac

SEQ ID NO: 391531 - DNA, 75 bp, synthetic construct
  source 1..75: mol_type = other DNA
cttgatgatacattgagtgaccaggaaaaaaacgacatcctgttgtttccggataaattgaatgatctaaaacat

SEQ ID NO: 391532 - DNA, 75 bp, synthetic construct
  source 1..75: mol_type = other DNA
gacaaggtcctgttgataccagccctgaatttctgactgaacaaatattaaaatatgaagataaagtcagatcca

SEQ ID NO: 391533 - DNA, 75 bp, synthetic construct
  source 1..75: mol_type = other DNA
taaggatattaatctaccagtctttcacaatgatgagttaaatggtatttcccaacagttcagaacaattcgttg

SEQ ID NO: 391534 - DNA, 75 bp, synthetic construct
  source 1..75: mol_type = other DNA
ttttcgttttatctgtctgttatgtcattggcgtgttcagaaactggacagatactacaactgtattttactgga

SEQ ID NO: 391535 - DNA, 75 bp, synthetic construct
  source 1..75: mol_type = other DNA
ccgtctttcacagtaatgagttaaatggtgtttctcaacaattcagaacaattcgttggtggtttttccgatatt

SEQ ID NO: 391536 - DNA, 75 bp, synthetic construct
  source 1..75: mol_type = other DNA
aagttgtcattctgtcagcattgatatttcgttccctgacttttccaccacctataaattcacaggtgaaacagc

SEQ ID NO: 391537 - DNA, 75 bp, synthetic construct
  source 1..75: mol_type = other DNA
taaactgcttaccgcacatagctgggcgaaaagtggctggatttccagattgcctagcaatataacaatatgtcc

SEQ ID NO: 391538 - DNA, 75 bp, synthetic construct
  source 1..75: mol_type = other DNA
ccacacatagctgggagaaaagtgcctggatttccagactgcccggcaatataacaatatgtccagtagtacagg

SEQ ID NO: 391539 - DNA, 75 bp, synthetic construct
  source 1..75: mol_type = other DNA
taaagattcacattcaggtttaataagcccgctgcaactgactaattttatacaagatcgttcatctgaacataa

SEQ ID NO: 391540 - DNA, 75 bp, synthetic construct
  source 1..75: mol_type = other DNA
aaatcagataccggatatggcttcttttgccagtggtgatggatggatgaaattacccaacgggaaaatcctgca

SEQ ID NO: 391541 - DNA, 75 bp, synthetic construct
  source 1..75: mol_type = other DNA
gcagacgaggttaatgatctggctatactggcgctgaatttatcaaatatcgcgaacctgaagcgatacgagctt

SEQ ID NO: 391542 - DNA, 75 bp, synthetic construct
  source 1..75: mol_type = other DNA
aagaaatcatatcccgcattgaaatgtatgggcatggcgcagggtataccgccgaagaggtttatgacctggctg

SEQ ID NO: 391543 - DNA, 75 bp, synthetic construct
  source 1..75: mol_type = other DNA
aatttcacaaactgtttatgttgacgcggcattaaccggtaccctgaccggggaaaataaagccatattcagcct

SEQ ID NO: 391544 - DNA, 75 bp, synthetic construct
  source 1..75: mol_type = other DNA
tactgggtggaacaaacagtcgcgcaaaagccgaattaaacggagcattctttaacataacccgcccccgcaata

SEQ ID NO: 391545 - DNA, 75 bp, synthetic construct
  source 1..75: mol_type = other DNA
gcatcggacatattgatgggttaggattacatctttataaagatattgaatctaattgcagcaattttagattaa

SEQ ID NO: 391546 - DNA, 75 bp, synthetic construct
  source 1..75: mol_type = other DNA
gtggaatccatagtggatataaagcaggtttcagagcttagtcgaataaatggagatcttggccgacttggagga

SEQ ID NO: 391547 - DNA, 75 bp, synthetic construct
  source 1..75: mol_type = other DNA
tctattgtagatattgaacaggttgtagagcttagccgagtaaatgctgatcttggtcgacttggtgggttactt

SEQ ID NO: 391548 - DNA, 75 bp, synthetic construct
  source 1..75: mol_type = other DNA
ctgaataatctgcagggaacggcaacatctgccttaagcgatatcagtaaaacggtaggagggcttctgtcgtga

SEQ ID NO: 391549 - DNA, 75 bp, synthetic construct
  source 1..75: mol_type = other DNA
tatgtcctgtttgatgacgtggttaagttgtttgaatttgatacaaccactcaaaagttagaaatcccggcataa

SEQ ID NO: 391550 - DNA, 75 bp, synthetic construct
  source 1..75: mol_type = other DNA
taattgcagaccatgacaagccgcagccgtcaggctgcctactcgactcgctggaaaccgctatcggctttcaca

SEQ ID NO: 391551 - DNA, 75 bp, synthetic construct
  source 1..75: mol_type = other DNA
ccagcgaaatctattaattgccaagccagagcagctgcactttttgtctctttagtaagacgaaatatgttagat

SEQ ID NO: 391552 - DNA, 75 bp, synthetic construct
  source 1..75: mol_type = other DNA
aagaattatctcaaagattttgattatggaaatcaagacttctctggagataaagaaagaaacaacggattaaca

SEQ ID NO: 391553 - DNA, 75 bp, synthetic construct
  source 1..75: mol_type = other DNA
acttttttctctttcccagacaggcatgctgcatgagcgcagtgaagtgagcctttcctccgcaatggagctggc

SEQ ID NO: 391554 - DNA, 75 bp, synthetic construct
  source 1..75: mol_type = other DNA
acctgcgtgattccggggcgctggagcaggatgctgacctcattatgtttatttaccgtgacgaggtttataact

SEQ ID NO: 391555 - DNA, 75 bp, synthetic construct
  source 1..75: mol_type = other DNA
gtgctagagtttcgctatttatagtgtcataccttcccctattctttatcatgtgttttgtgcaattgtatactt

SEQ ID NO: 391556 - DNA, 75 bp, synthetic construct
  source 1..75: mol_type = other DNA
ggagaaaacaatgaagacaacgaagatcatgagacaccttcagcgttagataatcacatatctatcgaattagaa

SEQ ID NO: 391557 - DNA, 75 bp, synthetic construct
  source 1..75: mol_type = other DNA
atcagaaacaatattcgatgatacagaaaatgataaagaggtatcagattctggtgcttctgataacgcggcgtc

SEQ ID NO: 391558 - DNA, 75 bp, synthetic construct
  source 1..75: mol_type = other DNA
cagggaccgaccggtacgatacgggtgagcttcgatggtcgttacaccctgttttcaccgtttgaacgtggctgg

SEQ ID NO: 391559 - DNA, 75 bp, synthetic construct
  source 1..75: mol_type = other DNA
gctgaagccgatgatgcagggttgctgggacgattttcagtcgatatgaaggttgctcagtggcgatggctgtat

SEQ ID NO: 391560 - DNA, 75 bp, synthetic construct
  source 1..75: mol_type = other DNA
cgaagggtttgaattacttctggatgaaattattcacgatctgaatactcatggtatgccagaagccccagtgac

SEQ ID NO: 391561 - DNA, 75 bp, synthetic construct
  source 1..75: mol_type = other DNA
atggaagcgattgaaagcggctggtttacccctggcatcgagaaagaaatcatcctgtggcgctggcttgtggca

SEQ ID NO: 391562 - DNA, 75 bp, synthetic construct
  source 1..75: mol_type = other DNA
agaatcacctttcctttcttgccattagccgccagacggtcgcggaacgcccgtccccactcagtcttactggtg

SEQ ID NO: 391563 - DNA, 75 bp, synthetic construct
  source 1..75: mol_type = other DNA
gatgacaaggaagaacgagaagatgatgcatcagaagaggaagattctggggattccgatttgcctgattcgtta

SEQ ID NO: 391564 - DNA, 75 bp, synthetic construct
  source 1..75: mol_type = other DNA
aagtaacgccacatggcataaaaattggtaatacaaccattgattatattcaggccgtacagcggcttaatgatg

SEQ ID NO: 391565 - DNA, 75 bp, synthetic construct
  source 1..75: mol_type = other DNA
tgtttatgctgagcaccgttccgtatcaggaactgcagtatcaacgcaactggcgacatgcggcaaacagccggg

SEQ ID NO: 391566 - DNA, 75 bp, synthetic construct
  source 1..75: mol_type = other DNA
acggtgtgcagaccgaagtcacggtaccaaaaggcagtgctgccggtgataccctgacactgacagtcaccagac

SEQ ID NO: 391567 - DNA, 75 bp, synthetic construct
  source 1..75: mol_type = other DNA
atgccaataaaggcgataccgtggatgtcacctttgaagatgaaaaaggtggtaagcacaccgttacgctggaga

SEQ ID NO: 391568 - DNA, 75 bp, synthetic construct
  source 1..75: mol_type = other DNA
aactgaaagacggttactacctcgaaccgacgattctgtttggtcagaacaatatgcgcgtgttccaggaggaga

SEQ ID NO: 391569 - DNA, 75 bp, synthetic construct
  source 1..75: mol_type = other DNA
tcggtaaacaggcggaatcgctcatcggtaaagctggcagtatggcgactaaattcgtaggtatgacgggggcgg

SEQ ID NO: 391570 - DNA, 75 bp, synthetic construct
  source 1..75: mol_type = other DNA
aatccctgtccgatatattcggtgatctcagtgcgcaactgaataatctgcaggacacagcaacgtctgccttaa

SEQ ID NO: 391571 - DNA, 75 bp, synthetic construct
  source 1..75: mol_type = other DNA
gttcggaaattccgtcatcgtgccggtctttgatgcagtagcgaaattgctggagtcacggatcatcgaggctgt

SEQ ID NO: 391572 - DNA, 75 bp, synthetic construct
  source 1..75: mol_type = other DNA
taactatgctaaaaagcatgctgccaaaggtaatgggttcggttttggtctggttgatccgaataatgaaaacag

SEQ ID NO: 391573 - DNA, 75 bp, synthetic construct
  source 1..75: mol_type = other DNA
aaaaacgactggagccgggaaacgcttaaccgttggatcaatgataaatgctcccccaggtcactgatttcagcc

SEQ ID NO: 391574 - DNA, 75 bp, synthetic construct
  source 1..75: mol_type = other DNA
atgatgtttccgaagtagaagcctataatcatatagacaaaaatattccagatcatgatgtccttctggccggtt

SEQ ID NO: 391575 - DNA, 75 bp, synthetic construct
  source 1..75: mol_type = other DNA
gctgaaaccggcgcgactcactccactttcggtgctgttgctgatggaaatcgtgggtgatttactgccgccagg

SEQ ID NO: 391576 - DNA, 75 bp, synthetic construct
  source 1..75: mol_type = other DNA
cctgggataacggtaaacccattcgcgaaaccagtgctgccgacgtgccgctggcgattgatcattttcgctatt

SEQ ID NO: 391577 - DNA, 75 bp, synthetic construct
  source 1..75: mol_type = other DNA
aataatgactggagcagggaaacgataaaccggtggattaacggaaagtgtgggccaaaatcattgacctctgct

SEQ ID NO: 391578 - DNA, 75 bp, synthetic construct
  source 1..75: mol_type = other DNA
gatcaaactgtgcgaatcttacaaccgccagtatggacgcgattaccgctcagtcatgccgaccaacctgtacgg

SEQ ID NO: 391579 - DNA, 75 bp, synthetic construct
  source 1..75: mol_type = other DNA
ccgtttgttcatatttaaacacctggtcaaagcgggggaacaaggtttgccggtcggtgagttgcaaaagcagct

SEQ ID NO: 391580 - DNA, 75 bp, synthetic construct
  source 1..75: mol_type = other DNA
ccctgaaagagctgggtcatcctacgcgcctaagcgtatacagagagctggttaaagccgggcatgaagggctac

SEQ ID NO: 391581 - DNA, 75 bp, synthetic construct
  source 1..75: mol_type = other DNA
taccgatgaggcaactgaacaggctgttgttgattacgccgtcgctttcccggcacacagtcagcaccggacgca

SEQ ID NO: 391582 - DNA, 75 bp, synthetic construct
  source 1..75: mol_type = other DNA
tcagtacgcagctgaataatctgcaggacacggcaacatctgccttaagtgatatcagtaaaacggtgggagggc

SEQ ID NO: 391583 - DNA, 75 bp, synthetic construct
  source 1..75: mol_type = other DNA
caggggaaagcatggcccctgattgaaggcagtggcacgatttatggcatgtatgtgattgaggaactgaatcag

SEQ ID NO: 391584 - DNA, 75 bp, synthetic construct
  source 1..75: mol_type = other DNA
acgctttccggtgttcttatgccggagataacaggtggcaggctgtcggtgctggcactggagcagatggcagaa

SEQ ID NO: 391585 - DNA, 75 bp, synthetic construct
  source 1..75: mol_type = other DNA
agccttatgctattgccaaaatcgccgggatcaaactgtgcgaatcttacaatcgccagtacggacgcgattacc

SEQ ID NO: 391586 - DNA, 75 bp, synthetic construct
  source 1..75: mol_type = other DNA
ctggccatcgcgggatggtcggttccgccatcaggcggcagctcgaacagcgcggtgatgtggagctggtattac

SEQ ID NO: 391587 - DNA, 75 bp, synthetic construct
  source 1..75: mol_type = other DNA
ggcggctgccagtatccatgtgatggagctggatcgcggcgtctggctcgaaaacacgcagcctatgctgtcgca

SEQ ID NO: 391588 - DNA, 75 bp, synthetic construct
  source 1..75: mol_type = other DNA
tggcgacatgcggcaaacagccgggtaaaccgtcgtccgtccacgcagtttctgggaccggaaaacgatatgctg

SEQ ID NO: 391589 - DNA, 75 bp, synthetic construct
  source 1..75: mol_type = other DNA
ttgctgaccacgcaggcatatacaggacgcccctggcctctgattgatggtgtcgggcagatttacggcatgtat

SEQ ID NO: 391590 - DNA, 75 bp, synthetic construct
  source 1..75: mol_type = other DNA
acgttatctggcgtactgctgccggaaatcaccggcggcaggctgtcattgctggcgctggagttgatggcggag

SEQ ID NO: 391591 - DNA, 75 bp, synthetic construct
  source 1..75: mol_type = other DNA
aggcaaaacgcaaattgtcatgcgtgataatgtgcaggggtatcaacaagggttgaatgccgatatggtctggtt

SEQ ID NO: 391592 - DNA, 75 bp, synthetic construct
  source 1..75: mol_type = other DNA
gagaagctggttgcgccaaacgccaaaaataacgactttggtaatgaatggctgaagatgcattccgctggcagc

SEQ ID NO: 391593 - DNA, 75 bp, synthetic construct
  source 1..75: mol_type = other DNA
tgatttactcttatgtccgggctgtcacactgaataaatccggtgcgtttattctcaatgtgctgggatggcagc

SEQ ID NO: 391594 - DNA, 75 bp, synthetic construct
  source 1..75: mol_type = other DNA
acctcgcagaacaatgtcaacggtatcacctccacgctgaccggcagcgcggggcaggctgcacttggtaaggcg

SEQ ID NO: 391595 - DNA, 75 bp, synthetic construct
  source 1..75: mol_type = other DNA
ttccctgtcgttatcagggtgtggcctgacgcaaagagtggcagacggtacggtatctgccacgaaatccctgtt

SEQ ID NO: 391596 - DNA, 75 bp, synthetic construct
  source 1..75: mol_type = other DNA
attctcaatgtactgggctggcaaccggaaaatatcgccagccagttgaagaaaatcgacgaccatactgtccag

SEQ ID NO: 391597 - DNA, 75 bp, synthetic construct
  source 1..75: mol_type = other DNA
ataattgtgataacagcatgcagcatacctgcattattgtgttacagccagaaatcgctgaactggcaacgggta

SEQ ID NO: 391598 - DNA, 75 bp, synthetic construct
  source 1..75: mol_type = other DNA
tcacggatacatcagtgaatggtctttcacagaaagtcttaaataccctgctgtaacactaacaggttataatga

SEQ ID NO: 391599 - DNA, 75 bp, synthetic construct
  source 1..75: mol_type = other DNA
ttcccggtgttttactggcaagagtggtggggcctgactccgaggaatattatacagatgagtatgggcgtgtaa

SEQ ID NO: 391600 - DNA, 75 bp, synthetic construct
  source 1..75: mol_type = other DNA
tactataaagtcagaaagtaagatgactgatgttaaatccagtaagggaatttatgaagatattattcctgatgg

SEQ ID NO: 391601 - DNA, 75 bp, synthetic construct
  source 1..75: mol_type = other DNA
tgaatcatcttattataaactggaacacttgccttctgaatatatcatggagtcgaatcccggatacatcagtga

SEQ ID NO: 391602 - DNA, 75 bp, synthetic construct
  source 1..75: mol_type = other DNA
gggtatttactacttttttgttcatgacaaaaataaacatattatgaagttagcagatgcccctgcctctcattc

SEQ ID NO: 391603 - DNA, 75 bp, synthetic construct
  source 1..75: mol_type = other DNA
tgaaccgggaaggagtgtgaacggacaaccggctaaaccggcgtttccgacgtcttttctggaggataacgccat

SEQ ID NO: 391604 - DNA, 75 bp, synthetic construct
  source 1..75: mol_type = other DNA
ccactatcaaggatttgatggaaggtgcgcgcggcgtcgggactaactacggtgtggggctggatgaacagctgg

SEQ ID NO: 391605 - DNA, 75 bp, synthetic construct
  source 1..75: mol_type = other DNA
gacctacggtgccagcgcggtggagttcgtcaaatccacagagaacattaacgcttccattgccggccttaccgc

SEQ ID NO: 391606 - DNA, 75 bp, synthetic construct
  source 1..75: mol_type = other DNA
gtgattggttacgtgcagcttgcgctgtttggcgtggcggcagcgggcgcgatgacaaatattgtcatgggtgtc

SEQ ID NO: 391607 - DNA, 75 bp, synthetic construct
  source 1..75: mol_type = other DNA
ggtgccattaaaccgtgaaaccgccgacgcgctcagcacctgggctagtgagaaatcgggggcgcaggtatacag

SEQ ID NO: 391608 - DNA, 75 bp, synthetic construct
  source 1..75: mol_type = other DNA
ggtgataatgtgctgcattatactgcgattgttaagaagtcgtcagccaataatgcccaagtcactgagggtgct

SEQ ID NO: 391609 - DNA, 75 bp, synthetic construct
  source 1..75: mol_type = other DNA
tccagtctggtgaaggagctgcacgccgactttatccgcaggagtctgaggcgctggagtgcatcacgaaggtga

SEQ ID NO: 391610 - DNA, 75 bp, synthetic construct
  source 1..75: mol_type = other DNA
tcgccacatcaccccgcctccgccagttttgctgggcattctggttgatgatgttagttacgctcatttttctgt

SEQ ID NO: 391611 - DNA, 75 bp, synthetic construct
  source 1..75: mol_type = other DNA
tcgccacatcaccccgcctccgccagctttgctgggcagtctggttgctgatgttagttacgctcatttttctgt

SEQ ID NO: 391612 - DNA, 75 bp, synthetic construct
  source 1..75: mol_type = other DNA
catcaccagcagtgggctgcactgtatcgcctggtagacaccactcccttcagcgaggaaaaaacgctgcccttt

SEQ ID NO: 391613 - DNA, 75 bp, synthetic construct
  source 1..75: mol_type = other DNA
atggcgatcaagggcgcgttatcaccggcaattgaaatgtatgacgcgctgaatgatgccgccgcaaaagggatt

SEQ ID NO: 391614 - DNA, 75 bp, synthetic construct
  source 1..75: mol_type = other DNA
gataacagccgtaaaattggtgaagtgcatttccatacaaaagaggcgctttcaccgggtcagctaatggaatgg

SEQ ID NO: 391615 - DNA, 75 bp, synthetic construct
  source 1..75: mol_type = other DNA
agggtgacacgccggaagacaccctgcgcacgcttatcgggcgtctcaatcaggtacgtgaacgtcagcagacgc

SEQ ID NO: 391616 - DNA, 75 bp, synthetic construct
  source 1..75: mol_type = other DNA
tatatacttatgaaataaaatgtcttagtaaggataattatcattctctggataagttacacggtacgcggctga

SEQ ID NO: 391617 - DNA, 75 bp, synthetic construct
  source 1..75: mol_type = other DNA
gtgggtgaataaacatgccggtgtggcgcagttcaccagtaccggtttacctattaccacgatggttcagactcg

SEQ ID NO: 391618 - DNA, 75 bp, synthetic construct
  source 1..75: mol_type = other DNA
aatcagttagcctcgcattttgatatttcatggcattatatagaaggaaaaattgttatctctaatatggaagtc

SEQ ID NO: 391619 - DNA, 75 bp, synthetic construct
  source 1..75: mol_type = other DNA
aaataccaaggtgatatacctgaaatatgcgaaagcgaaagatttggtggaagtgctaacaggcgtcagcaatag

SEQ ID NO: 391620 - DNA, 75 bp, synthetic construct
  source 1..75: mol_type = other DNA
cgacacaggcgctgcagttgctgactgaaagagaactcaggcgtatccgccagcagcgtattgctgccagcggtg

SEQ ID NO: 391621 - DNA, 75 bp, synthetic construct
  source 1..75: mol_type = other DNA
aaaacgccccttgtgttggcgcttgccccgtgggggcgctgacgatgggcgagcaggtggtgcagaccaattctg

SEQ ID NO: 391622 - DNA, 75 bp, synthetic construct
  source 1..75: mol_type = other DNA
aacgggtggataaggtaggcaaccgcagcgttgtcacagtcccgcttacctacgcttccgcaacggacgtggcca

SEQ ID NO: 391623 - DNA, 75 bp, synthetic construct
  source 1..75: mol_type = other DNA
ctctttcatccgcgcttgatacggttctccagcaactggaaagtgtgctcggctccggtggtgttaccggtaccc

SEQ ID NO: 391624 - DNA, 75 bp, synthetic construct
  source 1..75: mol_type = other DNA
acaaaagacgcgcgaaatgcagcgctacaatttgcgacagattcaggtagtcaggttggttcaattagcgacgcc

SEQ ID NO: 391625 - DNA, 75 bp, synthetic construct
  source 1..75: mol_type = other DNA
gctatcgctgagagcaaagtcgcctatcgctttaatggtattggcgcactgcgcgctgagatgattgctgccgcc

SEQ ID NO: 391626 - DNA, 75 bp, synthetic construct
  source 1..75: mol_type = other DNA
gcacagtaaaactccgtgaaacagcgactgcgtggtctgcaggtgtaagggagaactacgataaaaaaacaggtt

SEQ ID NO: 391627 - DNA, 75 bp, synthetic construct
  source 1..75: mol_type = other DNA
cccgccttcgcagcggcaacatggatgatgaagactgggctcgcgtgtctgcggctaccggtcgcattattgagt

SEQ ID NO: 391628 - DNA, 75 bp, synthetic construct
  source 1..75: mol_type = other DNA
actccggggcgctggagcaggatgccgatctgataatgttcgtctacagggacgaagtgtatgacgccgatacgc

SEQ ID NO: 391629 - DNA, 75 bp, synthetic construct
  source 1..75: mol_type = other DNA
ggattatctggacgcactggaactgattgatacctccagtgctccagatattgaatggcctacgcctccggcagt

SEQ ID NO: 391630 - DNA, 75 bp, synthetic construct
  source 1..75: mol_type = other DNA
atgattatggctattgtgttcaatgtggtgaagatatcaaccccaaacgcttagacgttaatccttgtgttatta

SEQ ID NO: 391631 - DNA, 75 bp, synthetic construct
  source 1..75: mol_type = other DNA
aaaggagaaggtcatcaactggtttttgatgataaagaaaatgaggaaaaaaccatattgacttcttctggtgat

SEQ ID NO: 391632 - DNA, 75 bp, synthetic construct
  source 1..75: mol_type = other DNA
aggatatgattagcaatgtaaaacactcgatggtattaactgtttctgaagggcgaaaatctgaaataacaaaag

SEQ ID NO: 391633 - DNA, 75 bp, synthetic construct
  source 1..75: mol_type = other DNA
ctgaggatactggatattgtaattgtgaatttcgtgcttcggataataaaaattcgcttagttttaaaggagaat

SEQ ID NO: 391634 - DNA, 75 bp, synthetic construct
  source 1..75: mol_type = other DNA
acaccatctgatattgtaaccacaattttaaaagacagtttgtttaatccgccacacatcatattatataaagaa

SEQ ID NO: 391635 - DNA, 75 bp, synthetic construct
  source 1..75: mol_type = other DNA
acgattattataaattccagaacaaacattttattaggttgtatggttgtaatgtatccttatatccacttgaaa

SEQ ID NO: 391636 - DNA, 75 bp, synthetic construct
  source 1..75: mol_type = other DNA
gccattgcggccgggcagctggcagtggaaaagaaaatggacgaacttttgccgttggtacgcaccaacatttga

SEQ ID NO: 391637 - DNA, 75 bp, synthetic construct
  source 1..75: mol_type = other DNA
ccaccaatttaagtactgggcgtgaattatggtttactgaaggcgatctccatcttgctattcgcgcatcatgca

SEQ ID NO: 391638 - DNA, 75 bp, synthetic construct
  source 1..75: mol_type = other DNA
caacaagatctcctttcatttaatgtcagtgaagataatggcgagaacgacgatcctctcccgtggcatgcgcgt

SEQ ID NO: 391639 - DNA, 75 bp, synthetic construct
  source 1..75: mol_type = other DNA
aactcatggtggctgtcatgtggtgagtgtttcagtctgggtaaacaagaatacagaattacttcattacatttc

SEQ ID NO: 391640 - DNA, 75 bp, synthetic construct
  source 1..75: mol_type = other DNA
attataaatgccaagaacaacattttattagattacatggctgtgatttgcctttatatccacttgaaattaaag

SEQ ID NO: 391641 - DNA, 75 bp, synthetic construct
  source 1..75: mol_type = other DNA
gtacaggccgaatttaatctggtggaagattttgacgccactgatcggggtgaaggcggctttggtcactctggt

SEQ ID NO: 391642 - DNA, 75 bp, synthetic construct
  source 1..75: mol_type = other DNA
gagatcgatcccaataataaccccagctatggcgtactgtgcgggatgtctgtaatgggcttcagcctggtgctg

SEQ ID NO: 391643 - DNA, 75 bp, synthetic construct
  source 1..75: mol_type = other DNA
atgcgttcttttccggcatcagcctgtcgtgccggtcgtctggccggggctgcggggatgctgtttcttttcatc

SEQ ID NO: 391644 - DNA, 75 bp, synthetic construct
  source 1..75: mol_type = other DNA
ttcgcgtcgccgatgaccagagcaaccgctttacgctgccgcaggcggtgaagctggtgactaaaaatccagcgc

SEQ ID NO: 391645 - DNA, 75 bp, synthetic construct
  source 1..75: mol_type = other DNA
gaacctcgtagtgcggattggaaaaaagtacgaaatctttgtgagcaggttctccgatatcaaagtaaagatttt

SEQ ID NO: 391646 - DNA, 75 bp, synthetic construct
  source 1..75: mol_type = other DNA
gttctgtctgtgggccgtcaccgggtggggctgagtgacaacgacattaccgtttaccggtttgccccgcgggat

SEQ ID NO: 391647 - DNA, 75 bp, synthetic construct
  source 1..75: mol_type = other DNA
agaagttccggcagagaaaattttaggcatgccagaatggaaagattatcatccgaaacgttctggattgatatc

SEQ ID NO: 391648 - DNA, 75 bp, synthetic construct
  source 1..75: mol_type = other DNA
tcagagatgattggggaaataaaataaaagacttcttgggtgatacagttaacagtgtgaattataaattgcttg

SEQ ID NO: 391649 - DNA, 75 bp, synthetic construct
  source 1..75: mol_type = other DNA
acagggggccagaggcagcaaaaatgatcctgtagatttacagacagccgtaaaatttgtcgcacccggcggtaa

SEQ ID NO: 391650 - DNA, 75 bp, synthetic construct
  source 1..75: mol_type = other DNA
gaacggttaactgatgggttcatttaccatatccgcaagcaacaagaagctgccaacacctttgcacaacaagca

SEQ ID NO: 391651 - DNA, 75 bp, synthetic construct
  source 1..75: mol_type = other DNA
ccaccgctgcgggtgactctttcagcgccggttatctggcggtacgcctgaccgggggcagtgcagaagaagcag

SEQ ID NO: 391652 - DNA, 75 bp, synthetic construct
  source 1..75: mol_type = other DNA
cgacagcaccggcgaacggactttctactactggcgtaacgaagccgcggccaaattctggctggagagcgagca

SEQ ID NO: 391653 - DNA, 75 bp, synthetic construct
  source 1..75: mol_type = other DNA
cgaaacgtgggcatttgactgcaagtaccgttattcagtatcgcggcgcgattatcccgcgtgaggcaatgccag

SEQ ID NO: 391654 - DNA, 75 bp, synthetic construct
  source 1..75: mol_type = other DNA
tgctgccggttttgcgttgtcagtggagtactggatcctgctgcccgccatgattctgctgatgattgaatcggt

SEQ ID NO: 391655 - DNA, 75 bp, synthetic construct
  source 1..75: mol_type = other DNA
cgccgtcagcgcaattggctcatcactttctgatggatgaagaaatcctgcctgtatgtagcccggaatacgctc

SEQ ID NO: 391656 - DNA, 75 bp, synthetic construct
  source 1..75: mol_type = other DNA
cccggccctctatcgcccaatgctggttggtgcccgcattaggtgactttacacgccggtatccgtctatttcgc

SEQ ID NO: 391657 - DNA, 75 bp, synthetic construct
  source 1..75: mol_type = other DNA
ccccagtgcggtaagtcaccgtatcaatcagctggaagaagaattgggcattcagttgtttgttcgttcccatcg

SEQ ID NO: 391658 - DNA, 75 bp, synthetic construct
  source 1..75: mol_type = other DNA
cctgctgacggttctgtccacccgcctggatgttgaagtgaatggctttaacggtggtgttctgaacggtgttcc

SEQ ID NO: 391659 - DNA, 75 bp, synthetic construct
  source 1..75: mol_type = other DNA
atggtcttccccgacagatgatgatgagctgccggaagtcaccgcgccggagtggatagtcgacaaggtggcgca

SEQ ID NO: 391660 - DNA, 75 bp, synthetic construct
  source 1..75: mol_type = other DNA
cgccgtcagcgcaattggctcatcactttctgatggatgaagaaatcttgccagtttgcagcccggagtacgctc

SEQ ID NO: 391661 - DNA, 75 bp, synthetic construct
  source 1..75: mol_type = other DNA
tatggctgctgcatctatttatgtcatggagcttgataaagcactttggcaggagcaaacacaaccaatgctgtc

SEQ ID NO: 391662 - DNA, 75 bp, synthetic construct
  source 1..75: mol_type = other DNA
atgaaccttatgctatagcaaaaatcgctggtattaaactctgcgagtcttataatcggcaatataatcgcgatt

SEQ ID NO: 391663 - DNA, 75 bp, synthetic construct
  source 1..75: mol_type = other DNA
acatgctgcacatgtaaatgatgtctataagcttatgtttctaggttcatcttgtatttatccaaaatatgctaa

SEQ ID NO: 391664 - DNA, 75 bp, synthetic construct
  source 1..75: mol_type = other DNA
ctggccatcgtgggatggtcggttctgccatcaggcggcagctcgaacagcgcggtgatgtggaactggtattac

SEQ ID NO: 391665 - DNA, 75 bp, synthetic construct
  source 1..75: mol_type = other DNA
gcgaatttctgcacgtcgatgatatggcggcggcgagcattcatgtgatggagctggcgcacgaagtctggctgg

SEQ ID NO: 391666 - DNA, 75 bp, synthetic construct
  source 1..75: mol_type = other DNA
tttgatgccagcaaaccggatggtacgccgcgcaaactgctggatgtgacgcgcctgcatcagcttggctggtat

SEQ ID NO: 391667 - DNA, 75 bp, synthetic construct
  source 1..75: mol_type = other DNA
gggacttaccacttcgaattgagcgaaaaattgccagatctggaggagcttatgcgctcaatcgagggatattta

SEQ ID NO: 391668 - DNA, 75 bp, synthetic construct
  source 1..75: mol_type = other DNA
ccgtaccagatgaaggggtcgctgcccggctgaacgagccggcagctattaaccagcaactacgtaattttactg

SEQ ID NO: 391669 - DNA, 75 bp, synthetic construct
  source 1..75: mol_type = other DNA
atgccagccagcccggcacccactattccggtgaaacagtatgtgactcaggtcaataccgataacagcgtgacc

SEQ ID NO: 391670 - DNA, 75 bp, synthetic construct
  source 1..75: mol_type = other DNA
gaaagtattgatgttatccgttccatcttctttggtttgttgattacaccgtgggcggtttactttctttcggta

SEQ ID NO: 391671 - DNA, 75 bp, synthetic construct
  source 1..75: mol_type = other DNA
atgaatagtctgctgccaccgggttcaacttcactggagcgacgaatggcccaaacctgcagcgggatttctgat

SEQ ID NO: 391672 - DNA, 75 bp, synthetic construct
  source 1..75: mol_type = other DNA
caacgccactggagcgccgactggcgcagacctgtcgcgggatttctgaactgcaggtgccactgcgtgacttgt

SEQ ID NO: 391673 - DNA, 75 bp, synthetic construct
  source 1..75: mol_type = other DNA
atggtgaattactgtcttatatcattggcgctgacaatggcaacacatcagttattggatctggttcagctactg

SEQ ID NO: 391674 - DNA, 75 bp, synthetic construct
  source 1..75: mol_type = other DNA
cgccagcgatagttccatctgccgtaattcatcagttatcgatatataaaccggaagatattgtcgatccatcaa

SEQ ID NO: 391675 - DNA, 75 bp, synthetic construct
  source 1..75: mol_type = other DNA
tattaccgaaggcgcattcgaaggttttcaggccattttcaccgagcctgacggcgaggcacgctccatgctatt

SEQ ID NO: 391676 - DNA, 75 bp, synthetic construct
  source 1..75: mol_type = other DNA
tagatgtatcgagagactggagattaaaaaataatagcgatatggaattttattcctcgaagaaaaaaggtatta

SEQ ID NO: 391677 - DNA, 75 bp, synthetic construct
  source 1..75: mol_type = other DNA
ccagtttcctggctgacctggaaaacctctctgcgctacaggcgcagcaaaaaggcttgcgctttgttcttgagc

SEQ ID NO: 391678 - DNA, 75 bp, synthetic construct
  source 1..75: mol_type = other DNA
atggcggcaatcatggcggcggttgcaggaattatggtggcgctctcggttgatgaattaatgccgctagctaaa

SEQ ID NO: 391679 - DNA, 75 bp, synthetic construct
  source 1..75: mol_type = other DNA
ggcgatggcttcgctgctattgctgattaaaatttttgcatggtggtataccgggtcggtgagtattctcgccgc

SEQ ID NO: 391680 - DNA, 75 bp, synthetic construct
  source 1..75: mol_type = other DNA
gatttttagcgccggactggtggcgtttaataatgatttcgatatgcaactgaaggtctggctggcgtggtatct

SEQ ID NO: 391681 - DNA, 75 bp, synthetic construct
  source 1..75: mol_type = other DNA
tgccgaccgcctgctcggcaatcgtactgcggtaattgccggcgcgctgttaatgacccttggccatgtagtgct

SEQ ID NO: 391682 - DNA, 75 bp, synthetic construct
  source 1..75: mol_type = other DNA
gtggccaaaaattgaggcatttattacctggctaagagagcaggtatgtcagtcttgtcagtagcggagataccg

SEQ ID NO: 391683 - DNA, 75 bp, synthetic construct
  source 1..75: mol_type = other DNA
gtggccaaaaattgaggcatttattacctggctaagagagcaggtatgtcagtcttgtcagtacccgagataccg

SEQ ID NO: 391684 - DNA, 75 bp, synthetic construct
  source 1..75: mol_type = other DNA
ctcagttgcaaactgccgacaccagactcctttccaaaaaatcacgtgaattcctgctggatggtgaagggaata

SEQ ID NO: 391685 - DNA, 75 bp, synthetic construct
  source 1..75: mol_type = other DNA
ggtccggatatttgctggcgatcgtttgcctcattgccgcacaaatcattgcccgcatgatgatcaaattccccg

SEQ ID NO: 391686 - DNA, 75 bp, synthetic construct
  source 1..75: mol_type = other DNA
tttactctgctgctggagaatgactggtccggctatttgctggcgatcgtttgccttattgctgcacaaatcatt

SEQ ID NO: 391687 - DNA, 75 bp, synthetic construct
  source 1..75: mol_type = other DNA
gtggccaaaaattgaggcatttattacctggctaagagagcaggtatgtcagtcttgtcagtaacagagataccg

SEQ ID NO: 391688 - DNA, 75 bp, synthetic construct
  source 1..75: mol_type = other DNA
cgtcgctggataccctgaaccaggaaattcttgatataaaaaatcaggagttatcgggaacgttaactctgtatt

SEQ ID NO: 391689 - DNA, 75 bp, synthetic construct
  source 1..75: mol_type = other DNA
cttgcaacagctggtcgaggatgctaaagcgggtaagattcataacgtctatatcgcgatgcaaatgtgcgacgg

SEQ ID NO: 391690 - DNA, 75 bp, synthetic construct
  source 1..75: mol_type = other DNA
gtggccaaaaattgaggcatttattacctggctaagagagcaggtatgtcagtcttgtcagtatcggtgataccg

SEQ ID NO: 391691 - DNA, 75 bp, synthetic construct
  source 1..75: mol_type = other DNA
gtggccaaaaattgaggcatttattacctggctaagagagcaggtatgtcagtcttgtcagtaacggggataccg

SEQ ID NO: 391692 - DNA, 75 bp, synthetic construct
  source 1..75: mol_type = other DNA
gtggccaaaaattgaggcatttattacctggctaagagagcaggtatgtcagtcttgtcagtaaccgcgataccg

SEQ ID NO: 391693 - DNA, 75 bp, synthetic construct
  source 1..75: mol_type = other DNA
ccttgggtactttataaaatgcctgaggcagaggacaactttttcaaaaaatggttacaagtttcctgcaatatg

SEQ ID NO: 391694 - DNA, 75 bp, synthetic construct
  source 1..75: mol_type = other DNA
tggcgatgtttttcaaccgcgagttccgcctgcgcaaaaccgcgcgttcgctggtgatcctctcctacgtaacgc

SEQ ID NO: 391695 - DNA, 75 bp, synthetic construct
  source 1..75: mol_type = other DNA
gtggccgatggtgtcgaatatcgaaatcagtttttacgtctgccgctcaatcccaacatcgagtcaacctttgtt

SEQ ID NO: 391696 - DNA, 75 bp, synthetic construct
  source 1..75: mol_type = other DNA
tgtgttaccaacagtgagtattagcgttgagacaacatcaacagatgtcaatggtgatggttttactggtatagc

SEQ ID NO: 391697 - DNA, 75 bp, synthetic construct
  source 1..75: mol_type = other DNA
tttatatggttgggcggtctggcatttggtggggggcttgctgctatggctttggctgcaggtggtggtggcggc

SEQ ID NO: 391698 - DNA, 75 bp, synthetic construct
  source 1..75: mol_type = other DNA
tccacatcaaaagcacctaatgaccaggggtatacagtaggagtaacaactgaaccttatgatccaatgctcaca

SEQ ID NO: 391699 - DNA, 75 bp, synthetic construct
  source 1..75: mol_type = other DNA
gctgaatgctaaagcggcagatcgcgaactgatgaacgatattatcccgctgattagcaagcgttttaatgtccg

SEQ ID NO: 391700 - DNA, 75 bp, synthetic construct
  source 1..75: mol_type = other DNA
atgacggtcagatattatatcagttctgctgatttaaccgcaaaaaagttcgccacagcgatacgaaatcactgg

SEQ ID NO: 391701 - DNA, 75 bp, synthetic construct
  source 1..75: mol_type = other DNA
ggtctgaagaaattatgcgtggcagtctcctttcggtcaataatagcagaacaaaagaaagagcccgaaatgacg

SEQ ID NO: 391702 - DNA, 75 bp, synthetic construct
  source 1..75: mol_type = other DNA
gcatcgtcacgctgcccgcgattatgccggtcctggcgacggtggtgaccctgcgcaccatctggatgttctaca

SEQ ID NO: 391703 - DNA, 75 bp, synthetic construct
  source 1..75: mol_type = other DNA
cggcctgaaccatgaaatggatgtctggcggcctgctatgcagccttcgtacagaaattatttaaataaaataag

SEQ ID NO: 391704 - DNA, 75 bp, synthetic construct
  source 1..75: mol_type = other DNA
ttaactttgattaccaggaatatccgggtctgaaccatgaaatggatgtctggcgaccagcctatgcagcctttg

SEQ ID NO: 391705 - DNA, 75 bp, synthetic construct
  source 1..75: mol_type = other DNA
gtaaagtatccatggatattccgaaggatgcggtgattgacgggcagaacagcgtcagtgtcactctgactcagg

SEQ ID NO: 391706 - DNA, 75 bp, synthetic construct
  source 1..75: mol_type = other DNA
ttgccagcaacgttgcagagaccattcctcccattaccccgatacccactgcgttctgcgcgccactgccggcac

SEQ ID NO: 391707 - DNA, 75 bp, synthetic construct
  source 1..75: mol_type = other DNA
tgatagaccgtggctgggatatggccacaggtgaaacagacttcgcgaacgaagaaaatcaggcgcatcggcccc

SEQ ID NO: 391708 - DNA, 75 bp, synthetic construct
  source 1..75: mol_type = other DNA
tgtcggtgaaatcgattttagtaatccagcgaatcaagagaatcgaccaagaagactgacacctcatgaatgtgc

SEQ ID NO: 391709 - DNA, 75 bp, synthetic construct
  source 1..75: mol_type = other DNA
tgcagaactcttacgaaaactaggaaaaaatgaatggagcagagaaacacttaaccgttggataaatggtaagtg

SEQ ID NO: 391710 - DNA, 75 bp, synthetic construct
  source 1..75: mol_type = other DNA
gtcatttggcgaactgctggaacccgtggttgacagcaaatatatactgacgccgaaactctgggagtatctcta

SEQ ID NO: 391711 - DNA, 75 bp, synthetic construct
  source 1..75: mol_type = other DNA
acgttaaaaacctgaagagccatgacaagggtaaaacctttaaagtcatcatggataccctcgacgaactgggct

SEQ ID NO: 391712 - DNA, 75 bp, synthetic construct
  source 1..75: mol_type = other DNA
cggcagtgataatattacggtaactaaaaatctgaccggtaatatttctgtcggtgacaatgcggataccttaac

SEQ ID NO: 391713 - DNA, 75 bp, synthetic construct
  source 1..75: mol_type = other DNA
cgcagtggatacagtggcaccgtcagcaccagcattgaaagcggaggatgacggttcagtttctgttgatctgcc

SEQ ID NO: 391714 - DNA, 75 bp, synthetic construct
  source 1..75: mol_type = other DNA
tggtgatggttttactggtatagctagtgtcaatgggaccgtaatggatgttcccgcaactattgaagataagga

SEQ ID NO: 391715 - DNA, 75 bp, synthetic construct
  source 1..75: mol_type = other DNA
gtggatgtcacctttgaagatgaaaagggtgataaacacaccgtgacgctggagaacggagataacggctggaca

SEQ ID NO: 391716 - DNA, 75 bp, synthetic construct
  source 1..75: mol_type = other DNA
ccattccggcagataacgtgaaggataacagtgaagttaccggggttgccaaagatccgagtggtaatgaaagtg

SEQ ID NO: 391717 - DNA, 75 bp, synthetic construct
  source 1..75: mol_type = other DNA
tctgtatccggtgaaattctaggcggatacggtagtgataatattacggtaactaaaaatctgaccggtaatatt

SEQ ID NO: 391718 - DNA, 75 bp, synthetic construct
  source 1..75: mol_type = other DNA
cgcagagaagttcgccacagcaatccgaaaccactggcatgtggagaataagctgcactggcgtctggacgtggt

SEQ ID NO: 391719 - DNA, 75 bp, synthetic construct
  source 1..75: mol_type = other DNA
atgaaggtattcagctgtttctggccggaagtgccggacttctgcagaccactgcagaccactgaagatgtgcag

SEQ ID NO: 391720 - DNA, 75 bp, synthetic construct
  source 1..75: mol_type = other DNA
ggctgccgggcgtggcgttgtatcgccggagaatatcgcgttcacccgctggctgacacacctgcaggacggtgt

SEQ ID NO: 391721 - DNA, 75 bp, synthetic construct
  source 1..75: mol_type = other DNA
atgccaaactggtgctcgaatcgtatggatttttctggtgaaccggcacagatagctgagattaaacgactggcc

SEQ ID NO: 391722 - DNA, 75 bp, synthetic construct
  source 1..75: mol_type = other DNA
gccgctgcctgccgataccctgtttcagccgaaatatctcgataacgccgacgccgtgctggcgatgtaccacga

SEQ ID NO: 391723 - DNA, 75 bp, synthetic construct
  source 1..75: mol_type = other DNA
aatcgccagtacggacgcgattaccgctcagtcatgccgaccaacctgtatggcccgcatgacaacttccacccg

SEQ ID NO: 391724 - DNA, 75 bp, synthetic construct
  source 1..75: mol_type = other DNA
gattgctgagattaaacggctggccagcggtgcagtcacaccgttttatcgccgcgccacaaatgaaggtattca

SEQ ID NO: 391725 - DNA, 75 bp, synthetic construct
  source 1..75: mol_type = other DNA
tccccgacagatgatgatgagctgccggaagtcaccggacctgcgtggataatcgacaatgtggcgcattatggc

SEQ ID NO: 391726 - DNA, 75 bp, synthetic construct
  source 1..75: mol_type = other DNA
ttcgacacgccgtggtgtcagccggaaagcgacgttattgcagcattaagccgccgtttcagctgcactctggag

SEQ ID NO: 391727 - DNA, 75 bp, synthetic construct
  source 1..75: mol_type = other DNA
caacttcattcaggtggatttcgacacgccgtggtgtcagccggaaagcgacgttattgcagaattaagccgccg

SEQ ID NO: 391728 - DNA, 75 bp, synthetic construct
  source 1..75: mol_type = other DNA
ggctgccggacgtggcgttgtatcgccggagaatatcgcgttcacccgctggctgacacacctgcagaacggtgt

SEQ ID NO: 391729 - DNA, 75 bp, synthetic construct
  source 1..75: mol_type = other DNA
gatgctgcatgaactctggttacagagcggtactggacagcgtcgctgggaaggattaccggatgaggtcaggga

SEQ ID NO: 391730 - DNA, 75 bp, synthetic construct
  source 1..75: mol_type = other DNA
gctgtaaacggacaggtaattccgttaaattacggaaacttcgatgcccgctataaacatcgaactgagggggta

SEQ ID NO: 391731 - DNA, 75 bp, synthetic construct
  source 1..75: mol_type = other DNA
acgccgtgctggcgatgtaccacgatcagggtcttcccgtgctaaaataccagggcttcgggcgcggtgtgaaca

SEQ ID NO: 391732 - DNA, 75 bp, synthetic construct
  source 1..75: mol_type = other DNA
caccgctggccccgatttttgacagtatcggcaacgcgatcagcggcgtctgggagtggtttaccaaactgctgg

SEQ ID NO: 391733 - DNA, 75 bp, synthetic construct
  source 1..75: mol_type = other DNA
agagtctggataaaatcgcagacaacacgggaaaaatggcagcaaaagacgggcccggcgaaatcgtcttcaaga

SEQ ID NO: 391734 - DNA, 75 bp, synthetic construct
  source 1..75: mol_type = other DNA
aaacgccaaagcaaatagccttaaaaaagatcccgttgtctgggagtgggatccgcaacaaaagaaaatggttaa

SEQ ID NO: 391735 - DNA, 75 bp, synthetic construct
  source 1..75: mol_type = other DNA
ttcacgtttgaatggaaaggactgaagaaattatgcgtggcagtctcctttcggtcaataatagcagaacaaaag

SEQ ID NO: 391736 - DNA, 75 bp, synthetic construct
  source 1..75: mol_type = other DNA
caatccgaaaccactggcacgtggagaataagctgcactggcgtctggacgtggtaatgaatgaagacgactgca

SEQ ID NO: 391737 - DNA, 75 bp, synthetic construct
  source 1..75: mol_type = other DNA
ccggggaaggaggaatagcgcggctgactggcggagtaatgcgcctgggtggtgcgttccagtggcttgctggct

SEQ ID NO: 391738 - DNA, 75 bp, synthetic construct
  source 1..75: mol_type = other DNA
gtgatggaagccaccaaaaagcttgacgacgacaagcaactaaacgttcttactcagctttttggtgatgaatat

SEQ ID NO: 391739 - DNA, 75 bp, synthetic construct
  source 1..75: mol_type = other DNA
aggttgctttcagcgccctgaataatatgtcccgccctgtcagtgcggcgcgccagagcgccgccgcgctggcct

SEQ ID NO: 391740 - DNA, 75 bp, synthetic construct
  source 1..75: mol_type = other DNA
atgctgcatgaactctggctgcagagtggtactggccggcgtcgctgggaagaattaccggatgatgccagggaa

SEQ ID NO: 391741 - DNA, 75 bp, synthetic construct
  source 1..75: mol_type = other DNA
ctttgcggcagcagcagtggccgtcattaaattctgggaaccaatacaggcatttttcactggtttctttaacgg

SEQ ID NO: 391742 - DNA, 75 bp, synthetic construct
  source 1..75: mol_type = other DNA
ttttctatcgtttccgcagtattctcaccgctggtaccgatatttgacgccatcatctccgcgctcagtacggta

SEQ ID NO: 391743 - DNA, 75 bp, synthetic construct
  source 1..75: mol_type = other DNA
tgggcgaaaccatgcgcgggccaatgatggcgattatgaaatcagtcggcggcgttctgcaatcaatccggggct

SEQ ID NO: 391744 - DNA, 75 bp, synthetic construct
  source 1..75: mol_type = other DNA
tgcagccgcaggaacagcaaacggccagacttatcgtcaccagtctgcttagccactgccgcgacttactcggca

SEQ ID NO: 391745 - DNA, 75 bp, synthetic construct
  source 1..75: mol_type = other DNA
caaacggcaaggcttatcgtcgccagcctgcttagccactgccgcgatttgctcggcagccaaatccagaccgcc

SEQ ID NO: 391746 - DNA, 75 bp, synthetic construct
  source 1..75: mol_type = other DNA
tgatggcagcaagacctttcgatgattatgttatcgctgcctcccccgtttatatcgaggcgacggaggatgata

SEQ ID NO: 391747 - DNA, 75 bp, synthetic construct
  source 1..75: mol_type = other DNA
ctacatggcgtaagcaaaacgacgctcaatgacatcgccgacgccgctaacgtcacgcgtggcgctatctactgg

SEQ ID NO: 391748 - DNA, 75 bp, synthetic construct
  source 1..75: mol_type = other DNA
ggtcgataacgtattaagaatgttcatgccagatgaaaacataacgaaattaattcatcaaacgaatgaattaag

SEQ ID NO: 391749 - DNA, 75 bp, synthetic construct
  source 1..75: mol_type = other DNA
tatatcacaaatgtgaatttaatgatgagatgctggccgagggagtgatacgcgaaaagatgggctttaatccgc

SEQ ID NO: 391750 - DNA, 75 bp, synthetic construct
  source 1..75: mol_type = other DNA
atatgagttcgataatgacctgaccgtgtttgaatggatgagccagtggaaacaggaaggcgatgacgagcaggc

SEQ ID NO: 391751 - DNA, 75 bp, synthetic construct
  source 1..75: mol_type = other DNA
ctggcgacccgcattctggaaatcaccccggaacgcgtgatcgactttagcggtaattacgaagattacctgcgt

SEQ ID NO: 391752 - DNA, 75 bp, synthetic construct
  source 1..75: mol_type = other DNA
ctctacagtgggtaaaacccggaactggccgtgtggccatcctgttgcctgatggcttgttgggcaatcctggcg

SEQ ID NO: 391753 - DNA, 75 bp, synthetic construct
  source 1..75: mol_type = other DNA
cctcaaacaggcaaaaaagatcagctatcactatcgaaaaataaccaagtcattaaatcttgcgttcagaggaac

SEQ ID NO: 391754 - DNA, 75 bp, synthetic construct
  source 1..75: mol_type = other DNA
cggtgatcatggggcataaagagttgtgggaagtgaagcaggagcgcgaccgcatctatgctttgccggaaatga

SEQ ID NO: 391755 - DNA, 75 bp, synthetic construct
  source 1..75: mol_type = other DNA
ggaagtgggtgaaaagctggcagtactcggcaccaatggcgtcggtaaatcgaccctgctgaaaacgctggtagg

SEQ ID NO: 391756 - DNA, 75 bp, synthetic construct
  source 1..75: mol_type = other DNA
gcagttaaagctcacgttaacgaccagtttggcaacccggtgacgcatcaagccgcgacattcagtgcagcgcca

SEQ ID NO: 391757 - DNA, 75 bp, synthetic construct
  source 1..75: mol_type = other DNA
tttttacgctgtttgtggatggtgaaaacgaagtgggtaaggtgacctccgtcactccgcccaaactgacgcgca

SEQ ID NO: 391758 - DNA, 75 bp, synthetic construct
  source 1..75: mol_type = other DNA
tttttacgttgtttgtggatggtgaaaacgaagtgggtaaggtgacctccgtcactctgcccaaactgacgcgca

SEQ ID NO: 391759 - DNA, 75 bp, synthetic construct
  source 1..75: mol_type = other DNA
tttttacgttgtttgtggatggtgaaaacgaagtgggtaatgtgacctccgtcactcagcccaaactgacgcgca

SEQ ID NO: 391760 - DNA, 75 bp, synthetic construct
  source 1..75: mol_type = other DNA
tttttacggtgtttgtggatggtgaaaacgaagtgggtaacgtgacctccgtcactccgcccaaactgacgcgca

SEQ ID NO: 391761 - DNA, 75 bp, synthetic construct
  source 1..75: mol_type = other DNA
tttttacggtgtttgtggatggtgaaaacgaagtgggtaatgtgacctccgtcactctgcccaaactgacgcgca

SEQ ID NO: 391762 - DNA, 75 bp, synthetic construct
  source 1..75: mol_type = other DNA
tttttacggtgtttgtggatggtgaaaacgaagtgggtaaagtgacctccgtcactcagcccaaactgacgcgca

SEQ ID NO: 391763 - DNA, 75 bp, synthetic construct
  source 1..75: mol_type = other DNA
tgagttcagatgatcgtgaactgctggagttcgatttgctgaacttcatctaccgacaggacggggaaaatattg

SEQ ID NO: 391764 - DNA, 75 bp, synthetic construct
  source 1..75: mol_type = other DNA
ggagattgacctgctgaacttcatataccggaaggacggcaaggacattgtgccagaacgaatccgttccgcgct

SEQ ID NO: 391765 - DNA, 75 bp, synthetic construct
  source 1..75: mol_type = other DNA
cctctctggcagataaacctactgaagtcatctcgcgattactgaatgcaaaagcagatattaattctgcaacga

SEQ ID NO: 391766 - DNA, 75 bp, synthetic construct
  source 1..75: mol_type = other DNA
tttttacgatgtttgtggatggtgaaaacgaagtgggtaaggtgacctccgtcactcagcccaaactgacgcgca

SEQ ID NO: 391767 - DNA, 75 bp, synthetic construct
  source 1..75: mol_type = other DNA
tgtttaccgtctttgtggacggtgacaacaaactgggtaaggtgacctccttcaccccaccgaaactgacccgca

SEQ ID NO: 391768 - DNA, 75 bp, synthetic construct
  source 1..75: mol_type = other DNA
gcgatgaaatgcacctggtacaagctcagcgttgataacagcgatgttattgaaatcgacgtgctgaacttcatc

SEQ ID NO: 391769 - DNA, 75 bp, synthetic construct
  source 1..75: mol_type = other DNA
aagtcttgcaggatgctgccgaagagtgtggcttggataactttttcatcgatatcctgaccggcaacaaagaga

SEQ ID NO: 391770 - DNA, 75 bp, synthetic construct
  source 1..75: mol_type = other DNA
ctgatataaacgcaccaaccgctgccgctggatggttaaatagtggtaacggaacggcatttacgactgctcaat

SEQ ID NO: 391771 - DNA, 75 bp, synthetic construct
  source 1..75: mol_type = other DNA
atctggtgcttacaatgtaactagaacaggcgccagttatattcttgccaacttttataccggtgtaggtagttg

SEQ ID NO: 391772 - DNA, 75 bp, synthetic construct
  source 1..75: mol_type = other DNA
acaatgtcttttagtggtggtgccgggtggttcaaactggctactgttacaatgccacaagagagttccgtggtt

SEQ ID NO: 391773 - DNA, 75 bp, synthetic construct
  source 1..75: mol_type = other DNA
cagtgcgtagcgggttaaatgacgacgaacagtatggttgcgttgtcccaccgatccatctttccagcacatata

SEQ ID NO: 391774 - DNA, 75 bp, synthetic construct
  source 1..75: mol_type = other DNA
atgaactcgcataatattactaacgaatcattagcactggcattaatgctggtagtggtggcaatcttaattagc

SEQ ID NO: 391775 - DNA, 75 bp, synthetic construct
  source 1..75: mol_type = other DNA
attgatggtgttatttatctgctttaatgcggcgtggaatgcgcaaaaacgcagtaaatatattgctaaagcctt

SEQ ID NO: 391776 - DNA, 75 bp, synthetic construct
  source 1..75: mol_type = other DNA
caagccttacaactaaaggtgttgtgaaacttagcagtgctgtcgacagcaccagtgaatcgctggccgcaacgc

SEQ ID NO: 391777 - DNA, 75 bp, synthetic construct
  source 1..75: mol_type = other DNA
gcacgctgcaaagccttaagccgttgagtgtaacgggtgacatcacgtcaagtgcgtgggtttacgccaaccgtt

SEQ ID NO: 391778 - DNA, 75 bp, synthetic construct
  source 1..75: mol_type = other DNA
ctccccgcagcaagcaggcatctctgagctggttctgcgtgcaggaaatgggaaccccaaaggtattactggtgc

SEQ ID NO: 391779 - DNA, 75 bp, synthetic construct
  source 1..75: mol_type = other DNA
gttaggcgatgaggcaggatggcatttctatagccagcgaaatacagataactcggtaatattttctgttaacgg

SEQ ID NO: 391780 - DNA, 75 bp, synthetic construct
  source 1..75: mol_type = other DNA
tgttaatacgactggtaatcagaatacaacgggcaacgcggctactgctacgaagttgcagactgcgcgtactat

SEQ ID NO: 391781 - DNA, 75 bp, synthetic construct
  source 1..75: mol_type = other DNA
cgacggttctgcaaatatcaaccttccaggtgtaaatactacgggtaatcagaacaccactggtaatgctgcaac

SEQ ID NO: 391782 - DNA, 75 bp, synthetic construct
  source 1..75: mol_type = other DNA
attgggtggtggaagaaggttttgcgcagatcccttcctggcacgccgccgttgaacgggttattccggtagcga

SEQ ID NO: 391783 - DNA, 75 bp, synthetic construct
  source 1..75: mol_type = other DNA
gtgacaagcaccgaggtcggactgaaaacagtttcagcctctctggcagataaacctactgaagtcatctcgcga

SEQ ID NO: 391784 - DNA, 75 bp, synthetic construct
  source 1..75: mol_type = other DNA
tttattgcggatacgctcactgcacaggttaatcttaacgttaccgaggacaattttatcgctaataacgtcggg

SEQ ID NO: 391785 - DNA, 75 bp, synthetic construct
  source 1..75: mol_type = other DNA
gtggcggcattgattacacggagattggcgcgattcgctgggcttttgccatcgccccggatcacccattagcct

SEQ ID NO: 391786 - DNA, 75 bp, synthetic construct
  source 1..75: mol_type = other DNA
atgaccgtaagaatcatgatcatctctcggcctttacggggacttacagctctacactggctgtcagtcgctatg

SEQ ID NO: 391787 - DNA, 75 bp, synthetic construct
  source 1..75: mol_type = other DNA
ttccatcgtaatgacaacggtggcgataacgacgacaacggcttgtacttatcgttttcgttatctgacacgcca

SEQ ID NO: 391788 - DNA, 75 bp, synthetic construct
  source 1..75: mol_type = other DNA
gattcttaatgaatctgtaacattcagtgcagagccaccagagcacatgaccatcagccaaaatattgtctctac

SEQ ID NO: 391789 - DNA, 75 bp, synthetic construct
  source 1..75: mol_type = other DNA
cgtcgatgggcgatgttctccacacgctgcccgcgctcaccgatgcacagcaggcaatcccggggattacgtttg

SEQ ID NO: 391790 - DNA, 75 bp, synthetic construct
  source 1..75: mol_type = other DNA
ctcggcccccataaaagctgaacgcaaagcgtttcgtgaagcgctacaagcagagaactatgacgcagttatcga

SEQ ID NO: 391791 - DNA, 75 bp, synthetic construct
  source 1..75: mol_type = other DNA
atgcgggttttgatcgttaaaacatcgtcgatgggcgatgttctccacacgctgcccgcactcactgatgcccag

SEQ ID NO: 391792 - DNA, 75 bp, synthetic construct
  source 1..75: mol_type = other DNA
aaaagcagtttcctacctgccagattaccgtcaccaccgaagtgtataacggcgtctgggatgcgattattaata

SEQ ID NO: 391793 - DNA, 75 bp, synthetic construct
  source 1..75: mol_type = other DNA
tatagaagcgcgtattcgaatttgtattaatcagttgctttatacgcccagacacaccgcgcgcttattacaagt

SEQ ID NO: 391794 - DNA, 75 bp, synthetic construct
  source 1..75: mol_type = other DNA
ccaactgcgtctctaccctaatattatggtggaggacaccgcgcatacgattaataaaaaagtgggctggttgct

SEQ ID NO: 391795 - DNA, 75 bp, synthetic construct
  source 1..75: mol_type = other DNA
acaagcaaaaaaaatatatcccatttggcccatttctttgtggcggaatgtttgtttactcactcgtaccgggaa

SEQ ID NO: 391796 - DNA, 75 bp, synthetic construct
  source 1..75: mol_type = other DNA
ttgatcacctttacacaattgaagacaatcacaatctccaccccaatcctaaaaacgcaaaagttatttcagtaa

SEQ ID NO: 391797 - DNA, 75 bp, synthetic construct
  source 1..75: mol_type = other DNA
cctttgatgaatatattcagcatatacatgatgctggtaaagagatgattcaaacttattgttttaataaaggat

SEQ ID NO: 391798 - DNA, 75 bp, synthetic construct
  source 1..75: mol_type = other DNA
acaaatcaatgcgctgaaggcgacgctggacagccaaaaaataacggtatcggtgattcaggcaaatcagggaaa

SEQ ID NO: 391799 - DNA, 75 bp, synthetic construct
  source 1..75: mol_type = other DNA
gaaaaaattgcgcccacggtgagcattgatcatctcaaaggaggcgcgccagaaatctaccgcaagctggcagaa

SEQ ID NO: 391800 - DNA, 75 bp, synthetic construct
  source 1..75: mol_type = other DNA
gcgtagtttccctgccctcgaccgatattttcgacgcccaggatgaggaatatcgggagtcggtgttgccttcta

SEQ ID NO: 391801 - DNA, 75 bp, synthetic construct
  source 1..75: mol_type = other DNA
aacgtatcaaggccgcagcagcactctgggtgccggggactcgtgaagaggtcattgagggaatcagactgctcg

SEQ ID NO: 391802 - DNA, 75 bp, synthetic construct
  source 1..75: mol_type = other DNA
aacgtatcaaggccgcagcggcactctgggtaccagggacacgcgaagaggtcattgagggaatcagactactcg

SEQ ID NO: 391803 - DNA, 75 bp, synthetic construct
  source 1..75: mol_type = other DNA
cacagaaataactcaggcagatacaaaactcaattttgaggtttgcttattattcagttggttaacatccctcaa

SEQ ID NO: 391804 - DNA, 75 bp, synthetic construct
  source 1..75: mol_type = other DNA
tggatataacgatattcaaacctatgatgagcaggttaacgcctcctggtctgaggtattgaatcaatatcaacg

SEQ ID NO: 391805 - DNA, 75 bp, synthetic construct
  source 1..75: mol_type = other DNA
gaatgaaaaggatgctgtgaaaaatattcccggtattaccataaaaagtgatattgaggatttttctattattcc

SEQ ID NO: 391806 - DNA, 75 bp, synthetic construct
  source 1..75: mol_type = other DNA
gtgacgcacaacgtgaactggtcaggactgaaacagaaatgaatgacaccattggcgacatcaccgcacgttatg

SEQ ID NO: 391807 - DNA, 75 bp, synthetic construct
  source 1..75: mol_type = other DNA
tgaaagaatatgtttctactttcggcgatatagtcatcgcaatagaagacccacctgaaatacctgtccagggtt

SEQ ID NO: 391808 - DNA, 75 bp, synthetic construct
  source 1..75: mol_type = other DNA
tgatcgcattatgtttgccggtgaccgtttttgccaccacgctacggctatccagcgatgttgatcttctggtgc

SEQ ID NO: 391809 - DNA, 75 bp, synthetic construct
  source 1..75: mol_type = other DNA
acaacggctgaagtattggtttaaactggctgacccacaaacgcgaaatactttcctgcaatgggcggaaaaaca

SEQ ID NO: 391810 - DNA, 75 bp, synthetic construct
  source 1..75: mol_type = other DNA
gaactggataatggaccacatcaattagtgtttcgcgttgagaaaacgatacatctttccaataatgaagaacgg

SEQ ID NO: 391811 - DNA, 75 bp, synthetic construct
  source 1..75: mol_type = other DNA
cgattacctcaaccgcaaaaacgattgattatgaaggagaggttgaacgctataacaaatctgcgaagcgcgcct

SEQ ID NO: 391812 - DNA, 75 bp, synthetic construct
  source 1..75: mol_type = other DNA
tgattgtattatgtttgccggtgaccgtttttgccaccacgctgcggctgtccagcgacgttgaccttctggtgc

SEQ ID NO: 391813 - DNA, 75 bp, synthetic construct
  source 1..75: mol_type = other DNA
tgattatgaagtcgaggtcgagcgttataacaaatccgcgaaacgcgcttctctaccgcaatttgccaccatgat

SEQ ID NO: 391814 - DNA, 75 bp, synthetic construct
  source 1..75: mol_type = other DNA
gtttgttgtccggtaaaaaactgactggtcgggattggatttgcccctatatttccagacatctgttatcactta

SEQ ID NO: 391815 - DNA, 75 bp, synthetic construct
  source 1..75: mol_type = other DNA
agaaatctatcgcaagctggcagaacttacaggaacgcagtcgcagctggcgatacttgaacgccgctatcaggc

SEQ ID NO: 391816 - DNA, 75 bp, synthetic construct
  source 1..75: mol_type = other DNA
ggattcctgctggtatgtatgggcgtgcagtttattattaacggcatcctggaaatcattaaaacgtatcattaa

SEQ ID NO: 391817 - DNA, 75 bp, synthetic construct
  source 1..75: mol_type = other DNA
atgaaaaaatctgaaggtttgcagtcgctgcagcaatcgctttctggcctgccgcagtgggcatcagagcgtatt

SEQ ID NO: 391818 - DNA, 75 bp, synthetic construct
  source 1..75: mol_type = other DNA
gaactgcttaaccgtttgttgtccggtaaaaaactgactggtcgggatgaacaggatatccggcgtctctggcag

SEQ ID NO: 391819 - DNA, 75 bp, synthetic construct
  source 1..75: mol_type = other DNA
caatgcaggagtctgccactcgtcggcatgaacaggatgccatccggaagtttgttggcgaggacaaatcagaat

SEQ ID NO: 391820 - DNA, 75 bp, synthetic construct
  source 1..75: mol_type = other DNA
aaatacaggtccatttcatggaggggttaataatgtctgaaagacttttaaaaaacatgtcaaaagattttaagt

SEQ ID NO: 391821 - DNA, 75 bp, synthetic construct
  source 1..75: mol_type = other DNA
gcaaagcctttcacggcgaagtcgtcgattttgcaacctttcgcgagcaatatcttgcagaactggcgcaacacg

SEQ ID NO: 391822 - DNA, 75 bp, synthetic construct
  source 1..75: mol_type = other DNA
agaggagtttggctgggccggtgatgcgatggtcggtatggctaaacttggccgcaacgtcatgggagctgctgc

SEQ ID NO: 391823 - DNA, 75 bp, synthetic construct
  source 1..75: mol_type = other DNA
gcttctgaactggtgtctgcatcggacaccttcacaacaatgagtcagctccaaaaccaaatgggctccatgact

SEQ ID NO: 391824 - DNA, 75 bp, synthetic construct
  source 1..75: mol_type = other DNA
ccagacgctaaaagcgggcgagcgtgtgggctacggcggtcgctatactgcgcgcgatgagcagcgaatcggcat

SEQ ID NO: 391825 - DNA, 75 bp, synthetic construct
  source 1..75: mol_type = other DNA
attgagcaggcggcggaggggctggagtgtcggcgttcgttgtccaattcggcggcgactctgtggccacccgga

SEQ ID NO: 391826 - DNA, 75 bp, synthetic construct
  source 1..75: mol_type = other DNA
cgtgccgtcgctcgttgtccaactcggcggcgacgttgtggcacccggaggcacattttgactgggtacgtccag

SEQ ID NO: 391827 - DNA, 75 bp, synthetic construct
  source 1..75: mol_type = other DNA
atgggggcggtaagtattgatctcggactggacgactccgcgcttgatgcgagatttgtcatggggggagcagtt

SEQ ID NO: 391828 - DNA, 75 bp, synthetic construct
  source 1..75: mol_type = other DNA
cgcagattaatggctggcgtggcgaaaccgacacgctggagaaaatggaaaaacgcgtcgagttcgaccttgagt

SEQ ID NO: 391829 - DNA, 75 bp, synthetic construct
  source 1..75: mol_type = other DNA
tttttacggtgtttgtggatggtgaaaacgaagtgggtaaggtgacctccgtcactcggcccaaactgacgcgca

SEQ ID NO: 391830 - DNA, 75 bp, synthetic construct
  source 1..75: mol_type = other DNA
cacaaaccgatagccaagcgttgactaatcaattggcacagggttttagtcgttccggtagcgagtcatttaaac

SEQ ID NO: 391831 - DNA, 75 bp, synthetic construct
  source 1..75: mol_type = other DNA
aagcaaggtccggttatgcaaagtcagccagcgtacaatcacaaccagttcagtggtgcgattgcaaacggcgca

SEQ ID NO: 391832 - DNA, 75 bp, synthetic construct
  source 1..75: mol_type = other DNA
gagatgtctagcctcagtgctggaggtctcaactccatgtacgcgctttcctcaactggagatgtgctgcaacac

SEQ ID NO: 391833 - DNA, 75 bp, synthetic construct
  source 1..75: mol_type = other DNA
tatccgcgccacgcgcctaccggtacccctgttttagtggacggcgtgcgcaccatgacggtggggacagtctcg

SEQ ID NO: 391834 - DNA, 75 bp, synthetic construct
  source 1..75: mol_type = other DNA
acgaatggaaaaaataatggctgctgccggtccgctggcagtgacttttcatcgcgccttcgatatgtgcgctaa

SEQ ID NO: 391835 - DNA, 75 bp, synthetic construct
  source 1..75: mol_type = other DNA
tattcgcgttatgtcgtagacggggcggcggttgctgaaatgaaaggaatcattgaacgccatcaggccaaatga

SEQ ID NO: 391836 - DNA, 75 bp, synthetic construct
  source 1..75: mol_type = other DNA
gacatcagcagagcactggcttttgccattaagtgggtggcggtcggtgttgctgtgtccccgatgctgtatggg

SEQ ID NO: 391837 - DNA, 75 bp, synthetic construct
  source 1..75: mol_type = other DNA
aaatagaattgccgttgcgcgaggaagatatattaaagccattgaacaatataatgtcactatccgcaaattccc

SEQ ID NO: 391838 - DNA, 75 bp, synthetic construct
  source 1..75: mol_type = other DNA
ggttattccaccagaactggcttacggcaaagcgggtgttccggggatcccaccgaattctaccctggtgtttga

SEQ ID NO: 391839 - DNA, 75 bp, synthetic construct
  source 1..75: mol_type = other DNA
tcaataatcttgctgaattgggcgttgccagggtgctgacttccgggcaaaaatctgacgcactgcaaggtttat

SEQ ID NO: 391840 - DNA, 75 bp, synthetic construct
  source 1..75: mol_type = other DNA
aatcattggcactggcattaatgctggtggtggtggcaatcttaattagccataaagaaaaactggcgctggaga

SEQ ID NO: 391841 - DNA, 75 bp, synthetic construct
  source 1..75: mol_type = other DNA
ctggcaaaactggtcattgttgaaatcgtgaagaggattaagcatgtcagacaagctcataacgctggcgaagat

SEQ ID NO: 391842 - DNA, 75 bp, synthetic construct
  source 1..75: mol_type = other DNA
agcggtggcttttgccattaagtgggtggcggtcggcatcgccgtgtctccgatgctgtatgggatggcaaagtt

SEQ ID NO: 391843 - DNA, 75 bp, synthetic construct
  source 1..75: mol_type = other DNA
gtcggggctgctggggtgacagtgactgatgacatcagcagagcgctggcttttgctattaagtgggtggctgtt

SEQ ID NO: 391844 - DNA, 75 bp, synthetic construct
  source 1..75: mol_type = other DNA
atcgccgggatgatagccggtaacgcgatggtggcagtcgggctgtgttataacaatctcggtcagcgctttatc

SEQ ID NO: 391845 - DNA, 75 bp, synthetic construct
  source 1..75: mol_type = other DNA
gtgctgaagtatattttcagcgtggatgatgccagcctgacattattgatggtgttatttatctgctttaatgcg

SEQ ID NO: 391846 - DNA, 75 bp, synthetic construct
  source 1..75: mol_type = other DNA
cgtctgaaaagcaacgagaaagtcacctggtgctgtgagctgaagctggatggccttgccgtcagtattctgtat

SEQ ID NO: 391847 - DNA, 75 bp, synthetic construct
  source 1..75: mol_type = other DNA
tttgtgaatcggcggaagaagtgctggcgttctatcacaaagtggaagaagaccgcccgacgctgggctttgata

SEQ ID NO: 391848 - DNA, 75 bp, synthetic construct
  source 1..75: mol_type = other DNA
ctcagcgtaaagagtcactgaaacactttgtttcccgccgcgcgatggacgttgacggtatgggtgacaaaatca

SEQ ID NO: 391849 - DNA, 75 bp, synthetic construct
  source 1..75: mol_type = other DNA
tgctttcaacaaacgtgtacaggacagacttaaaagtaatgaaaaagtcacctggtgctgtgagttgaagcttga

SEQ ID NO: 391850 - DNA, 75 bp, synthetic construct
  source 1..75: mol_type = other DNA
gagctgattacgccagactcaccgactcaacgtgtaggtgccgcaccgttggcagcgttcagccagattcgccat

SEQ ID NO: 391851 - DNA, 75 bp, synthetic construct
  source 1..75: mol_type = other DNA
tgtccatactccggcggatctgttcaaactcaccgcaggcaaactgaccggactggagcgcatggggccgaaatc

SEQ ID NO: 391852 - DNA, 75 bp, synthetic construct
  source 1..75: mol_type = other DNA
tgatttccgtaagcgtatccatcgcctggcgggggatatgggcattatcgagttgctggcgaacgggcagcagtt

SEQ ID NO: 391853 - DNA, 75 bp, synthetic construct
  source 1..75: mol_type = other DNA
acacaactgcttgattttgcagaagtgaagataccagaccatccaggttacgtacgccagacctgtgcgacgcca

SEQ ID NO: 391854 - DNA, 75 bp, synthetic construct
  source 1..75: mol_type = other DNA
gacgtcatcgctcagcggttaacgcaagtgctactgcaaaatgagcgcgatgttccgttatccgcacaggcgttc

SEQ ID NO: 391855 - DNA, 75 bp, synthetic construct
  source 1..75: mol_type = other DNA
ggcggctttcagccagatacgccatgaagtaccaatgctgtcactggataacgtttttgatgaagaaagctttct

SEQ ID NO: 391856 - DNA, 75 bp, synthetic construct
  source 1..75: mol_type = other DNA
ccgagcctgtataaccgcaaccgtctggctaccggaattaacgactggactgggcacgtcgtaactgagcatgat

SEQ ID NO: 391857 - DNA, 75 bp, synthetic construct
  source 1..75: mol_type = other DNA
cggagtggaggcactgagccctgatcctgcgttttttactgaaatctcttttgccgaaaaagacgatgatctcgc

SEQ ID NO: 391858 - DNA, 75 bp, synthetic construct
  source 1..75: mol_type = other DNA
ctgccgcaggcaggttttgaaaagatcaacgaagatgcgcgacgcacgggcggaaaagtatttgctaacccacgt

SEQ ID NO: 391859 - DNA, 75 bp, synthetic construct
  source 1..75: mol_type = other DNA
aaagcggctggataaatgtgtgtttggcgaagagaaaccggcctgtaagcagtgtccggtgcactgttatcagcc

SEQ ID NO: 391860 - DNA, 75 bp, synthetic construct
  source 1..75: mol_type = other DNA
atgtccggtaagcgtatctctcgtgaaaaactgacgattaaaagaatgatcgatctttatcaagcgcaatgcccg

SEQ ID NO: 391861 - DNA, 75 bp, synthetic construct
  source 1..75: mol_type = other DNA
ggcgcggggcactggtggagacacagcgaagctgggctgaaccgtatacttacagtcgactactttgatgcttta

SEQ ID NO: 391862 - DNA, 75 bp, synthetic construct
  source 1..75: mol_type = other DNA
ctcaacgctgtttatcgatatcggcaccaccccggaagcggtggcgcacgcgctgctcaatcacagcaatttgcg

SEQ ID NO: 391863 - DNA, 75 bp, synthetic construct
  source 1..75: mol_type = other DNA
ctgcggattgcaggcggactaatcgttgcgtttatcggttttcgtatgctctttccacagcaaaaggcaacggac

SEQ ID NO: 391864 - DNA, 75 bp, synthetic construct
  source 1..75: mol_type = other DNA
gtcaccgctgaacgctggcgtcgcgggtttgaacagtgcggcgagcttttgtcagaaaatatgatcaatggcaga

SEQ ID NO: 391865 - DNA, 75 bp, synthetic construct
  source 1..75: mol_type = other DNA
tttgtgcgtgacgtcgagtttcaggttgggcgtactggcgcgattacgcctgttgcgcgtctggaacctgtccat

SEQ ID NO: 391866 - DNA, 75 bp, synthetic construct
  source 1..75: mol_type = other DNA
tctggaacccgtccatgttgcaggcgtgctggtgagcaacgccacactacataacgccgatgaaattgagcgcct

SEQ ID NO: 391867 - DNA, 75 bp, synthetic construct
  source 1..75: mol_type = other DNA
ggctttgtcgcacgcgcgcctcgttgggcggtggcatttaaatttccggcgcaggaacagatgacctatgtgcgt

SEQ ID NO: 391868 - DNA, 75 bp, synthetic construct
  source 1..75: mol_type = other DNA
gtgtcggctggatcaagcagcgccgcgcactaacggtgatctgaacgcgttgctggatgaaacggaggccgcctg

SEQ ID NO: 391869 - DNA, 75 bp, synthetic construct
  source 1..75: mol_type = other DNA
ggatctaaactggcgaaggcgcaggaactgggcattgaagtcatcgacgaagcggaaatgctgcgtttgctgggt

SEQ ID NO: 391870 - DNA, 75 bp, synthetic construct
  source 1..75: mol_type = other DNA
ggttgaaaaagaatatgtccacactccggcagatctgttcaaactcaccgcaggcaaactgaccggactggagcg

SEQ ID NO: 391871 - DNA, 75 bp, synthetic construct
  source 1..75: mol_type = other DNA
ttgctggacatcctggccgatgaaaaagagaacggtccggaagataccacgcaagatgacgatatgaagcagagc

SEQ ID NO: 391872 - DNA, 75 bp, synthetic construct
  source 1..75: mol_type = other DNA
ctggtcgatttttccgcagatgtgcaatggctgaaaagccgcggtgttcaggtcgaacgttacaatctcgcgcag

SEQ ID NO: 391873 - DNA, 75 bp, synthetic construct
  source 1..75: mol_type = other DNA
cggcgatgtgttgcagtaccggcgtctgtggttctgatgttgatcaggtgctggtcgatttttccgcagatgtgc

SEQ ID NO: 391874 - DNA, 75 bp, synthetic construct
  source 1..75: mol_type = other DNA
ctgttactggatggcgaaacagtgatggccgggcgttatccgaaacgggctgaacttgcacggtggtttggaatt

SEQ ID NO: 391875 - DNA, 75 bp, synthetic construct
  source 1..75: mol_type = other DNA
catcagctttaccaacctgaaaggcacactgcacgacttcctgcgtaacttctttgaagaagatttgcagatccg

SEQ ID NO: 391876 - DNA, 75 bp, synthetic construct
  source 1..75: mol_type = other DNA
ttaccccgatatctcatgaatatccaagttgtgatgagtgctatgctagcctcttgatttacacaggtaatactc

SEQ ID NO: 391877 - DNA, 75 bp, synthetic construct
  source 1..75: mol_type = other DNA
cggcgatgtgctgcagcaccggcgtttgtggttcagatgtcgatcaggttctggtcgatttttctgctgatgtgc

SEQ ID NO: 391878 - DNA, 75 bp, synthetic construct
  source 1..75: mol_type = other DNA
cgcattatcaatggcgctggacgcccctcaacgtcgccagcattgaccatccgcttacctttagcttcagcgccg

SEQ ID NO: 391879 - DNA, 75 bp, synthetic construct
  source 1..75: mol_type = other DNA
cacagtcttacgatcttatcgtggcagcgaacgtgattcacgccacccgccatattggccgcacgctcgataatc

SEQ ID NO: 391880 - DNA, 75 bp, synthetic construct
  source 1..75: mol_type = other DNA
atgaaaacgctagcggtattcgacccggcaatgtgttgtagcaccggtgtctgcggtactgatgtcgatcaggct

SEQ ID NO: 391881 - DNA, 75 bp, synthetic construct
  source 1..75: mol_type = other DNA
tgagctggctcgctggtttggcattccactggataaagtgggattagcgccttcaggttgctgtggtggtaatac

SEQ ID NO: 391882 - DNA, 75 bp, synthetic construct
  source 1..75: mol_type = other DNA
tggcagggcgatacccaaaacgtgctgagctggctcgctggttcggtattacgctggagaaggtagggttagctc

SEQ ID NO: 391883 - DNA, 75 bp, synthetic construct
  source 1..75: mol_type = other DNA
ggtaagcagcaccacaaatacactttgtatggtggtatatcttcaccctcagaaaaaaataaaaaccgcagacgg

SEQ ID NO: 391884 - DNA, 75 bp, synthetic construct
  source 1..75: mol_type = other DNA
gatctcccgtctgatgggattcctgctggtatgtatgggcgtgcagtttattattaacggcatcctggaaatcat

SEQ ID NO: 391885 - DNA, 75 bp, synthetic construct
  source 1..75: mol_type = other DNA
tggcaatgccaagtaccgccggtccgggaaccattgcgatgattattagctcggcctccacagtgcgtcagagtt

SEQ ID NO: 391886 - DNA, 75 bp, synthetic construct
  source 1..75: mol_type = other DNA
tcgcgtttatcggttttcggatgctctttccgcaacagaaagcgattgattcaccggaagcgaaaagcaagtcgg

SEQ ID NO: 391887 - DNA, 75 bp, synthetic construct
  source 1..75: mol_type = other DNA
cgcattgttacctgaaacagagaaagcaaagatcgaaagttacattgaatttgtcatcaaccagaacgaaaaaag

SEQ ID NO: 391888 - DNA, 75 bp, synthetic construct
  source 1..75: mol_type = other DNA
cccgatgcacagatagttcaccgccagaacgttgatcgcaacggaatggtaaatgagaacaccgtcgcctactcc

SEQ ID NO: 391889 - DNA, 75 bp, synthetic construct
  source 1..75: mol_type = other DNA
ttcccctgtttactggtctacatggttccttttgggaatgattgcaggtatttcaatgtttcccccttcattcag

SEQ ID NO: 391890 - DNA, 75 bp, synthetic construct
  source 1..75: mol_type = other DNA
ttgagcaggataagaaactgttccgtaacgcgctggaagtggaaggtctgactaaagggtttgataacggtccac

SEQ ID NO: 391891 - DNA, 75 bp, synthetic construct
  source 1..75: mol_type = other DNA
tttgctgattgggtactgatggttgcgccgccgctgatctttttcctggtggcggttattttgtggggaagtcta

SEQ ID NO: 391892 - DNA, 75 bp, synthetic construct
  source 1..75: mol_type = other DNA
gctgttactgtggctgctgccgcgtttacgcagcatcagtgcgccggatatgaaggtcaatgatcgtgtcgcgac

SEQ ID NO: 391893 - DNA, 75 bp, synthetic construct
  source 1..75: mol_type = other DNA
gaaatgagcgagtacatcgcgttactgatccgtcaggatgatgcccgagttcgtggtcgcattaagtcaatcagt

SEQ ID NO: 391894 - DNA, 75 bp, synthetic construct
  source 1..75: mol_type = other DNA
aatgatcttgctgagtctgttgatttatctgcctttgctaagggacgcgaggcaccacctggtacatatcgggtc

SEQ ID NO: 391895 - DNA, 75 bp, synthetic construct
  source 1..75: mol_type = other DNA
tgctggcgattaccccgctgtgccgccgctggctgaccattttaccgctgggtggtgataccgcgcgggccgtgg

SEQ ID NO: 391896 - DNA, 75 bp, synthetic construct
  source 1..75: mol_type = other DNA
tgatgatggcgtggcgcgtaatctcgggctggccttatcgctcgcgcgtctggcggcgctgtcgctggcgatagt

SEQ ID NO: 391897 - DNA, 75 bp, synthetic construct
  source 1..75: mol_type = other DNA
gtaacccgctggcggaaccgaccacgcttggcgtcgcaacgggcgcgcaactggggattaccgtcaccacgctgt

SEQ ID NO: 391898 - DNA, 75 bp, synthetic construct
  source 1..75: mol_type = other DNA
cggagagaataaaaatggcagcattgtcgcggaaaacggtcaggtttatctgactggacttccacagtcagggaa

SEQ ID NO: 391899 - DNA, 75 bp, synthetic construct
  source 1..75: mol_type = other DNA
gattcagggggccagtctaggcagcatatcaatacgtcggctgaacgtgacattattcccttacgctcacgctta

SEQ ID NO: 391900 - DNA, 75 bp, synthetic construct
  source 1..75: mol_type = other DNA
gtaaccataaaagaggcagacggcagtattcagacattatatgttccttattcgtctgttccggttctccaacgt

SEQ ID NO: 391901 - DNA, 75 bp, synthetic construct
  source 1..75: mol_type = other DNA
tccacagtcagggaaattacaggtttcatggggcaaagataaaactcaaactgtattgtcgagtacaagcttcct

SEQ ID NO: 391902 - DNA, 75 bp, synthetic construct
  source 1..75: mol_type = other DNA
aacctgaattatagcgttcaggtcggtaacacccacggaggtaatacatcgtctggcaccagtggttacagttct

SEQ ID NO: 391903 - DNA, 75 bp, synthetic construct
  source 1..75: mol_type = other DNA
acagctattccaataatatatggcaaaacgatcgggatcatttactcgcttttacgcttaatgttcccttcagtc

SEQ ID NO: 391904 - DNA, 75 bp, synthetic construct
  source 1..75: mol_type = other DNA
gtgagtaaacgaattgcgctttttcctgcgttattgctggcgctgttagtgattgtcgctacggcactgacctgg

SEQ ID NO: 391905 - DNA, 75 bp, synthetic construct
  source 1..75: mol_type = other DNA
tatcaacattaatacattggtatctcgtggccgagttacggcgttaagcggctctactcaaggcactgctggcat

SEQ ID NO: 391906 - DNA, 75 bp, synthetic construct
  source 1..75: mol_type = other DNA
agcgaaatacagataactcggtaatattttctgttaacggtcagatacagcccaacaactgggggaattttgatt

SEQ ID NO: 391907 - DNA, 75 bp, synthetic construct
  source 1..75: mol_type = other DNA
ggtcaaaccacttataagtggggggcaactgatcctttatcagaaagtacgaatgcacagataattttggacttt

SEQ ID NO: 391908 - DNA, 75 bp, synthetic construct
  source 1..75: mol_type = other DNA
tatgcggatgctgatggtggcgtgccgtggaatgctgaatctggtgcttacaatgtaaatagaacaggcgacagt

SEQ ID NO: 391909 - DNA, 75 bp, synthetic construct
  source 1..75: mol_type = other DNA
tctggcggggcagggtggttcaaactggctacggttaccatgccacaagcgagttccatcgtttacatcgcattg

SEQ ID NO: 391910 - DNA, 75 bp, synthetic construct
  source 1..75: mol_type = other DNA
atattcgcaagattgaacgagcgctcgacaagctggatcggatcgaaggtgttctgtacgagattcaggtctgtg

SEQ ID NO: 391911 - DNA, 75 bp, synthetic construct
  source 1..75: mol_type = other DNA
ctcaagcattagttaatgaatactggattaatagattccaacctcaagagcatgtctactggctgcataaaatag

SEQ ID NO: 391912 - DNA, 75 bp, synthetic construct
  source 1..75: mol_type = other DNA
ctgcctgcgggaagcctcggtgcggcggtgactttgttgatcattatgatcgccgccgggcgcggtggattttct

SEQ ID NO: 391913 - DNA, 75 bp, synthetic construct
  source 1..75: mol_type = other DNA
ccatcatgaccagttgcaaagcatgttcctgtggagcaccggaacgctgacgcaaaccgactggggcggcgttga

SEQ ID NO: 391914 - DNA, 75 bp, synthetic construct
  source 1..75: mol_type = other DNA
cattgggattgtactgcaaatgcgtcagtttctatttatacatcgccaacatattcagcgagtaagccttccagc

SEQ ID NO: 391915 - DNA, 75 bp, synthetic construct
  source 1..75: mol_type = other DNA
ctgcatcagccacctcggcatctgcttcaaaagatgaggcgaccaagcaggcatcagctgcgaaggggagtgctt

SEQ ID NO: 391916 - DNA, 75 bp, synthetic construct
  source 1..75: mol_type = other DNA
atgtttattctgatgaaacagatgaaccaaggctaattgttagaaaaaaagagtatgatctttataaatattata

SEQ ID NO: 391917 - DNA, 75 bp, synthetic construct
  source 1..75: mol_type = other DNA
tgtaaaacagaacggatacgatgtttatcagactactgttccacccggcccttttactattgatgatatcaactc

SEQ ID NO: 391918 - DNA, 75 bp, synthetic construct
  source 1..75: mol_type = other DNA
ggcatgtccgcgattcacctggtaacgaccgtctttttgaaacctggcgatctgctggttgcgccacacgactgc

SEQ ID NO: 391919 - DNA, 75 bp, synthetic construct
  source 1..75: mol_type = other DNA
tcctggactgatggtccgaccaaaaatgaagtagaagcaatttctgataagtatgaagacggccactttaacggg

SEQ ID NO: 391920 - DNA, 75 bp, synthetic construct
  source 1..75: mol_type = other DNA
tctttgaggaagatttgcagattcgcttccgtccttcctacttcccgtttaccgaaccttctgcagaagttgacg

SEQ ID NO: 391921 - DNA, 75 bp, synthetic construct
  source 1..75: mol_type = other DNA
atgattctaaaaattgttgtattgaataactctggtaatgttggcaagtctactttgtgtagatctttattatct

SEQ ID NO: 391922 - DNA, 75 bp, synthetic construct
  source 1..75: mol_type = other DNA
acatggacggatggcccgacaaaagaagatgttggtaacatcactgctaaatatgagcatgggaattttaacggt

SEQ ID NO: 391923 - DNA, 75 bp, synthetic construct
  source 1..75: mol_type = other DNA
gcgcgtttgacagctatctgctgctacgcgggttgcgaacgctggtgccgcgtatggagctggcccagcgcaacg

SEQ ID NO: 391924 - DNA, 75 bp, synthetic construct
  source 1..75: mol_type = other DNA
tgcaggattaggtctggtattatttcaacacagtctgcatcacaatgtgccggaaggcgggtattacgcgaatta

SEQ ID NO: 391925 - DNA, 75 bp, synthetic construct
  source 1..75: mol_type = other DNA
actggcagagcaaaacctgatcctgcgccatcatggcggtgcggcgctgccttccagttcggttaacacgccgtg

SEQ ID NO: 391926 - DNA, 75 bp, synthetic construct
  source 1..75: mol_type = other DNA
cgccatcatggcggtgcggcgctgccttccagttcggttaacacgccgtggcacgatcgtaaagccacccagacc

SEQ ID NO: 391927 - DNA, 75 bp, synthetic construct
  source 1..75: mol_type = other DNA
cccggaagtttactctggtttcgccttcgggatggggatggagcgtctgactatgttgcgttacggcgtcaccga

SEQ ID NO: 391928 - DNA, 75 bp, synthetic construct
  source 1..75: mol_type = other DNA
gtattatcgaactggttaaacagcagggttatgtcagcaccgaggagttggtggagcatttttccgttagcccgc

SEQ ID NO: 391929 - DNA, 75 bp, synthetic construct
  source 1..75: mol_type = other DNA
cgctgcttaatcacagcaatttgcgtattgtcaccaacaatctcaatgttgctaacacgttgatggtaaaagaag

SEQ ID NO: 391930 - DNA, 75 bp, synthetic construct
  source 1..75: mol_type = other DNA
actccgcaaaataaacaacagcaagatacgctagttactataaaccatttatatgatttaaatgtgcctccagaa

SEQ ID NO: 391931 - DNA, 75 bp, synthetic construct
  source 1..75: mol_type = other DNA
atgaaaggtgaacagtgtgaacaatcaaatcaaaaaaaactttttttctccctgtgcgattttcagtacggggga

SEQ ID NO: 391932 - DNA, 75 bp, synthetic construct
  source 1..75: mol_type = other DNA
tccgaaaaatatgagtgaatcttattcattgagtaacgcatgtattaaagagtatcgtaaatttctgcgacgaga

SEQ ID NO: 391933 - DNA, 75 bp, synthetic construct
  source 1..75: mol_type = other DNA
ttttgcgaacatcagattaaaacgctgtgcctagaaataaacaaacttcttccggaagacatgagtgttaaatat

SEQ ID NO: 391934 - DNA, 75 bp, synthetic construct
  source 1..75: mol_type = other DNA
aagccgcgcagcgggcccgccaggctgaatctggtaaccgcaagcttgaattgcaactcgatgagcaggagcatg

SEQ ID NO: 391935 - DNA, 75 bp, synthetic construct
  source 1..75: mol_type = other DNA
atctgggtgttgctcttactacccaaactacgggtagtttccgtagtttcatggtcgagttgcaaatctgcaact

SEQ ID NO: 391936 - DNA, 75 bp, synthetic construct
  source 1..75: mol_type = other DNA
gagatcaaaattgatgatgttgccgccgctgccggaaccgtgggttatgagttgatgtgcgcgctggcgttacgg

SEQ ID NO: 391937 - DNA, 75 bp, synthetic construct
  source 1..75: mol_type = other DNA
attaacctaataaaagcgcaccttgacgagggctttcagcaggcaaagtctgagggattaaaagtagagatttca

SEQ ID NO: 391938 - DNA, 75 bp, synthetic construct
  source 1..75: mol_type = other DNA
gctggcggagcaaaacctgatcctgcgccatcatggcggtgcggcgctgccttccagttcggttaacacgccgtg

SEQ ID NO: 391939 - DNA, 75 bp, synthetic construct
  source 1..75: mol_type = other DNA
accccaatgttatagatttcttcggtacaaccctgtttcacctttgtcatttcacaaccatagatctccataatt

SEQ ID NO: 391940 - DNA, 75 bp, synthetic construct
  source 1..75: mol_type = other DNA
agatatcggatacccaccgtaactcagcggataacgttgacggtgtgtattaccgaccgctgcaaaaactgatta

SEQ ID NO: 391941 - DNA, 75 bp, synthetic construct
  source 1..75: mol_type = other DNA
aaacttgatcaggttattaccgaaacggtacccttggttttgattatgaatagtgtacaggctaaaaaatacact

SEQ ID NO: 391942 - DNA, 75 bp, synthetic construct
  source 1..75: mol_type = other DNA
ctggggatttacgagcaccacgcggcaccggtaattgcagccctgctggcgcacagggatattcgcaggctgaca

SEQ ID NO: 391943 - DNA, 75 bp, synthetic construct
  source 1..75: mol_type = other DNA
cgcttatgcccagggcgagggtatgaagcactacgttgagaaagtgcagcaaccggaattcgccgccgcgaaaga

SEQ ID NO: 391944 - DNA, 75 bp, synthetic construct
  source 1..75: mol_type = other DNA
gaaaaacataacgttgagctggtggcaattggtaacggtacggcttcccgcgaaaccgagcgtttctatctcgac

SEQ ID NO: 391945 - DNA, 75 bp, synthetic construct
  source 1..75: mol_type = other DNA
ggaacggtttgccgaagatgccgcgctgctggcgaaagtgcgtgattatctgtggaagaacgcgcatttggtttc

SEQ ID NO: 391946 - DNA, 75 bp, synthetic construct
  source 1..75: mol_type = other DNA
gatgatgaacgctacaggctggccgtgtttgttgccgtgcagcgcgcacgaaccttcggtgaactggagcgtatc

SEQ ID NO: 391947 - DNA, 75 bp, synthetic construct
  source 1..75: mol_type = other DNA
gtgtcaatcaagggccaggcttatctttaccaacgaaaggacggaatctggatgtttcagatttttgttcctaaa

SEQ ID NO: 391948 - DNA, 75 bp, synthetic construct
  source 1..75: mol_type = other DNA
cctttcgcacttactcgcaaggggcaagtattcaggaattagctgaatatgtagagttggtaagacatgaattaa

SEQ ID NO: 391949 - DNA, 75 bp, synthetic construct
  source 1..75: mol_type = other DNA
tgtttcctcaagctaataagataaagagaatcgacggtaaaaaggggccgttttatagtcaagcattctcacgtt

SEQ ID NO: 391950 - DNA, 75 bp, synthetic construct
  source 1..75: mol_type = other DNA
ctattcagaaactggtcgcggcgcgtctggcagctgacgtgacgggcgttccaaccctgctggttgctcgtaccg

SEQ ID NO: 391951 - DNA, 75 bp, synthetic construct
  source 1..75: mol_type = other DNA
agtcactttatccggcaaattcagtgccagcggtagtggagcggatcaataacaccttccgtcgagctgatcaga

SEQ ID NO: 391952 - DNA, 75 bp, synthetic construct
  source 1..75: mol_type = other DNA
ctgcaaaactggctaacctgcttagggacgctgtatgacttcgctcggcgtaaatatgacaatatcgcccctgat

SEQ ID NO: 391953 - DNA, 75 bp, synthetic construct
  source 1..75: mol_type = other DNA
cgccgttggcgtcgatctcaacactgcttctgttccgctgttaactcgcgtggcgggcctgacgcgcatgatggc

SEQ ID NO: 391954 - DNA, 75 bp, synthetic construct
  source 1..75: mol_type = other DNA
tttaatcaatttgatcgagatgatagcgatccgctaataaatgatgctttgatttatataagagatgaatttatt

SEQ ID NO: 391955 - DNA, 75 bp, synthetic construct
  source 1..75: mol_type = other DNA
tcaatgaatgaggccgtgatgaagatagagcaagaagtgctcaccacctggcctgccgatgccattgcccgggcg

SEQ ID NO: 391956 - DNA, 75 bp, synthetic construct
  source 1..75: mol_type = other DNA
gcgataacccgctggacgcgtctaccgttcacccggaagcctatccggtggtcgaacgcattctggcggcaacgc

SEQ ID NO: 391957 - DNA, 75 bp, synthetic construct
  source 1..75: mol_type = other DNA
ttttccccttcttgtgtttttatgtttggcagtaatcttaggaatttatttttactttaaattcaaaaagaaagg

SEQ ID NO: 391958 - DNA, 75 bp, synthetic construct
  source 1..75: mol_type = other DNA
ccatccacagaaaacggcgtcaccgtcaatgaatgaggccgtgatgaagatagagcaggaagtgctcaccacctg

SEQ ID NO: 391959 - DNA, 75 bp, synthetic construct
  source 1..75: mol_type = other DNA
tttaatgatgccgacccgctaataaatgatgcgttgatttatataagagatgagtttattgatgagcggaaatta

SEQ ID NO: 391960 - DNA, 75 bp, synthetic construct
  source 1..75: mol_type = other DNA
ggaacgcttcgcggaagatgccgctctgctggcgaaagtgcgtgattatctatggaaaaacgcgcatctcgtctc

SEQ ID NO: 391961 - DNA, 75 bp, synthetic construct
  source 1..75: mol_type = other DNA
ggtgaaaccaacgcccgtcgcggcagcggtaacgatcgcccgcaaaacaaccgcccggcagccaaaccgcgcggt

SEQ ID NO: 391962 - DNA, 75 bp, synthetic construct
  source 1..75: mol_type = other DNA
ccgcccggcagccaaaccacgcggtcgtgaagcgcagcctgccggtaatagcgcgatgatggatgcgctggcggc

SEQ ID NO: 391963 - DNA, 75 bp, synthetic construct
  source 1..75: mol_type = other DNA
tgcacaatatattgatgccgataaaggcgtggcagataccaaagccgcgctggacggcgcgcgctatatcctgat

SEQ ID NO: 391964 - DNA, 75 bp, synthetic construct
  source 1..75: mol_type = other DNA
atgcggtagtggaagattgtgtaaacgccgttggcgtcgatctcaacacggcatccgttccgctgttaactcgcg

SEQ ID NO: 391965 - DNA, 75 bp, synthetic construct
  source 1..75: mol_type = other DNA
cgcagtatctatcgcccgccgtttgcaggatccactggcagagctggtaaaaatcgatccgaaatctatcggcgt

SEQ ID NO: 391966 - DNA, 75 bp, synthetic construct
  source 1..75: mol_type = other DNA
tcgaagcacggcgcaccattgaaagttatcaaccgtttgaagccaatcaactggatacccttatcagagaagcgg

SEQ ID NO: 391967 - DNA, 75 bp, synthetic construct
  source 1..75: mol_type = other DNA
cgacggaaaggaacagccacacgcgcatatcatgttttgcgagcggattaatgatggtattgaacgcgatccgca

SEQ ID NO: 391968 - DNA, 75 bp, synthetic construct
  source 1..75: mol_type = other DNA
cttcaacaagaatgcactggacgtagaacaacgaaaagaagctgctatagctgccgaactttgccttagtgaaga

SEQ ID NO: 391969 - DNA, 75 bp, synthetic construct
  source 1..75: mol_type = other DNA
gtgtttatctttgcggctttattaaatgcatccaaaagacaaggaataataaaattactttctgtctcagcgatt

SEQ ID NO: 391970 - DNA, 75 bp, synthetic construct
  source 1..75: mol_type = other DNA
aaaaagcgagtacacctcagacaccacaagaacgaaaagcggcccttgttgcgctgcgttcccgctgggcagatg

SEQ ID NO: 391971 - DNA, 75 bp, synthetic construct
  source 1..75: mol_type = other DNA
atggaatcagcaaacacacatcgaaaaagagagcctttttgaacgagtacagcagcggtcacaagatgatgagct

SEQ ID NO: 391972 - DNA, 75 bp, synthetic construct
  source 1..75: mol_type = other DNA
atggcgagctatcattgcactgtaaaaacaggtgcgaaaggaagcgccttaaatcactctgattacatatccaga

SEQ ID NO: 391973 - DNA, 75 bp, synthetic construct
  source 1..75: mol_type = other DNA
atgagcgaaatccgatttgtaactctggaatccgactttaacaatattaaagaaatttattctgatgatgagtta

SEQ ID NO: 391974 - DNA, 75 bp, synthetic construct
  source 1..75: mol_type = other DNA
gtattaacggtaacctgatccccacatcacaaatgtgtaatcagcagacaggattcagggctgttgaggtggaag

SEQ ID NO: 391975 - DNA, 75 bp, synthetic construct
  source 1..75: mol_type = other DNA
atgaatacaagagcgcttttccccctgcttttcacagtggcatccttctccgcctccgccggtaactgggctgtc

SEQ ID NO: 391976 - DNA, 75 bp, synthetic construct
  source 1..75: mol_type = other DNA
aatatcatcccttcgactatcgcattacttttgggatatactgacgcagtgaccagagaatttcttacttacttt

SEQ ID NO: 391977 - DNA, 75 bp, synthetic construct
  source 1..75: mol_type = other DNA
aagaacttttggctaataaaaaattaggcatagatattcttcgtcatggtatggatgaaaccacagccaaacttg

SEQ ID NO: 391978 - DNA, 75 bp, synthetic construct
  source 1..75: mol_type = other DNA
tgaagaccgtgcgtacgacaaagtgaccgtcacggttggtgctgacggtaatgccaccggcgccagcgttgaatt

SEQ ID NO: 391979 - DNA, 75 bp, synthetic construct
  source 1..75: mol_type = other DNA
ggggcacggtatttagacaaactggggcgtaatgttgtttccgcacaaagggagctacgagagttacaggaacaa

SEQ ID NO: 391980 - DNA, 75 bp, synthetic construct
  source 1..75: mol_type = other DNA
ttgcgactgttaccggaaaaggcggtgacagacgcgtggatcggcctgccgctgacgcgcatcacagcgctgcat

SEQ ID NO: 391981 - DNA, 75 bp, synthetic construct
  source 1..75: mol_type = other DNA
ctgcgcactggccggagaactctctacctacgtgcgtccgcaaacacgccgtccggaagaatataaagaatataa

SEQ ID NO: 391982 - DNA, 75 bp, synthetic construct
  source 1..75: mol_type = other DNA
ggaggcatggccatgcacactgccggagagtttccggggctggagatggctctgtggggagtgcgtgataaatga

SEQ ID NO: 391983 - DNA, 75 bp, synthetic construct
  source 1..75: mol_type = other DNA
acataagtgtacagggtgagcctgtcggtgataggagtcgttcaacgttttgtcagtatcacaaggggatgttca

SEQ ID NO: 391984 - DNA, 75 bp, synthetic construct
  source 1..75: mol_type = other DNA
tggttaacctccttgggcagtctctatgagttcgccaaaaggcgttacgaccagataccagacagcaacccattc

SEQ ID NO: 391985 - DNA, 75 bp, synthetic construct
  source 1..75: mol_type = other DNA
tttttcaaagccataacggcgtctggatatttcaaatctttgtcccaaaatacatgcgccatctgtttggcaata

SEQ ID NO: 391986 - DNA, 75 bp, synthetic construct
  source 1..75: mol_type = other DNA
accgcaaggttatgaaaacggtcattcagggagaggcaaggcttgctcgtttaggggatgccaatcccaatgcgc

SEQ ID NO: 391987 - DNA, 75 bp, synthetic construct
  source 1..75: mol_type = other DNA
gggatataagtacgttggggagctggacaggtacagagaacgtgagattctggccgcggcatctttagagaacac

SEQ ID NO: 391988 - DNA, 75 bp, synthetic construct
  source 1..75: mol_type = other DNA
tgaaaacggtcattcagggagaggcaaggcttgctcgtttaggggatgccaatcccaatgcgctcaaagaacata

SEQ ID NO: 391989 - DNA, 75 bp, synthetic construct
  source 1..75: mol_type = other DNA
tgataaaaatgcgtgcagattcactggcggaacgattgacggggagcgacaaacacggtcatgaagcggcggaag

SEQ ID NO: 391990 - DNA, 75 bp, synthetic construct
  source 1..75: mol_type = other DNA
tgttacgctggctacgggaacagtgtgctgtacgtgatccgagtcgcgatggcacccgaggaccggggcatgtgc

SEQ ID NO: 391991 - DNA, 75 bp, synthetic construct
  source 1..75: mol_type = other DNA
gcgctgcgttcccgctgggcagatgtgcaaaacaaacaccttgcgcgacatgggcatgagtcacgcgttgatcat

SEQ ID NO: 391992 - DNA, 75 bp, synthetic construct
  source 1..75: mol_type = other DNA
tctgatattcaggtttctaacggtaatcaacaggcgcggataacgttgagttttattggcgatcctgattatgcg

SEQ ID NO: 391993 - DNA, 75 bp, synthetic construct
  source 1..75: mol_type = other DNA
cgatgcagcaccgaaccgcagtgcgactggcgcttccgtatgggtgctctctaaccgtcgcgccaacagcgaaat

SEQ ID NO: 391994 - DNA, 75 bp, synthetic construct
  source 1..75: mol_type = other DNA
agaagcacaattattcggtggctcaattacttagaatcaaaaaatgcattagttagaatccccgttgctggtaag

SEQ ID NO: 391995 - DNA, 75 bp, synthetic construct
  source 1..75: mol_type = other DNA
ctggtggtgagctggagttcgcaactggtgcacggtgaacgtaaagtcgtaggtcagaaaggatcagaagaatga

SEQ ID NO: 391996 - DNA, 75 bp, synthetic construct
  source 1..75: mol_type = other DNA
taacggattggtttatgaatattgtaaagagatattcatgcagatgccattaaacatagcaaataaatactttat

SEQ ID NO: 391997 - DNA, 75 bp, synthetic construct
  source 1..75: mol_type = other DNA
gagatttcactaagggatttatttacatcattatatgattttttgcgtctgaattatagaaatgaatatgtttat

SEQ ID NO: 391998 - DNA, 75 bp, synthetic construct
  source 1..75: mol_type = other DNA
catgaaaacgttggtttgggggaaggctctgcgttgcccgttggtgtacctgttccgtggccctcagccacaccg

SEQ ID NO: 391999 - DNA, 75 bp, synthetic construct
  source 1..75: mol_type = other DNA
tacccgttggcgtgcctgttccgtggccctcagccactccgccaacaggctggctgaaatgcaatggtgcggctt

SEQ ID NO: 392000 - DNA, 75 bp, synthetic construct
  source 1..75: mol_type = other DNA
aaatcagcctactcgatcaaccgtcgctgtgggtggttcagaaacccggccgcgcaacgtcgcatttaactatat

SEQ ID NO: 392001 - DNA, 75 bp, synthetic construct
  source 1..75: mol_type = other DNA
ttgatgataatgatactggggatatcagttcactcagctcaacacaatacggatttggtgacactttaacctcta

SEQ ID NO: 392002 - DNA, 75 bp, synthetic construct
  source 1..75: mol_type = other DNA
gaggaagtattggtaacactggtggtagtgaaactcgcccccgcaatattgcatttaactatatcgtgagggcgg

SEQ ID NO: 392003 - DNA, 75 bp, synthetic construct
  source 1..75: mol_type = other DNA
aaaggcttatccgaccaataaattaccggatttacggggcgaatttatccgtggctgggatgacgggcgagggat

SEQ ID NO: 392004 - DNA, 75 bp, synthetic construct
  source 1..75: mol_type = other DNA
ctggtggtgagctggagttcacaactggtacacggtgaacgtaaagtcgtaggtcagaaaggatcagaagaatga

SEQ ID NO: 392005 - DNA, 75 bp, synthetic construct
  source 1..75: mol_type = other DNA
ggatcctcactcagctcaaccggggagaaggacgccatgcagtggctcgagccatttgctacggacaacgtggtg

SEQ ID NO: 392006 - DNA, 75 bp, synthetic construct
  source 1..75: mol_type = other DNA
tgatttaagtgcgctggaagacgctgcggaagatcaaccgcgtgttgtaagagctgcgcaaccttccagaagtct

SEQ ID NO: 392007 - DNA, 75 bp, synthetic construct
  source 1..75: mol_type = other DNA
taccggcaccaaaaccacaaagccgccaaatacctcgctgctgaaaagcatcacgggtaacgcggcgtcattact

SEQ ID NO: 392008 - DNA, 75 bp, synthetic construct
  source 1..75: mol_type = other DNA
gcttgctgtacttactgcattcgttaaagcacaggaaataacggcattagacgatgccgttgatgtgcttgatat

SEQ ID NO: 392009 - DNA, 75 bp, synthetic construct
  source 1..75: mol_type = other DNA
gaaaagtgaacgtccctccggactgactcaggcaatcattgaagtggggcgcatcaacaaaacgctgtatctgct

SEQ ID NO: 392010 - DNA, 75 bp, synthetic construct
  source 1..75: mol_type = other DNA
ttttctccacgcctggctgatgccggtgcttcggttttctggcgaatggaccatgatgccgactatggcgtgctg

SEQ ID NO: 392011 - DNA, 75 bp, synthetic construct
  source 1..75: mol_type = other DNA
cattattgtttttggtttattgcgtaacgcgctgggaacgccctccgcgccacctaaccaggtattgctggggct

SEQ ID NO: 392012 - DNA, 75 bp, synthetic construct
  source 1..75: mol_type = other DNA
accagcgagttgaaaaccgcatttcagataggcttcacgattttcatcccttttttgattatcgacctggtgata

SEQ ID NO: 392013 - DNA, 75 bp, synthetic construct
  source 1..75: mol_type = other DNA
ggcgctgtttttgaccttttttattatgtcgccggtgatcgacaaaatttatgtcgatgcgtaccagccattcag

SEQ ID NO: 392014 - DNA, 75 bp, synthetic construct
  source 1..75: mol_type = other DNA
gcgcatggctttggcaaagtcaccgataaatttggcgtaccgtggatgattaatgtcgtcaaacaacaaccaacg

SEQ ID NO: 392015 - DNA, 75 bp, synthetic construct
  source 1..75: mol_type = other DNA
tcggcgaaatgccgaaatcagcgcaggacagcgccgagaactgcccttccggaatgcaatttcccgataccgcca

SEQ ID NO: 392016 - DNA, 75 bp, synthetic construct
  source 1..75: mol_type = other DNA
tcggagaaatgccgaaacccgcacaggaaagcgccgaaggctgcccatcaggaatgcaattccccgatactgcca

SEQ ID NO: 392017 - DNA, 75 bp, synthetic construct
  source 1..75: mol_type = other DNA
atgccagttagccgttatctctgcattttcataaacgttggtttgggagaaggctctgcattacctgttggtgtc

SEQ ID NO: 392018 - DNA, 75 bp, synthetic construct
  source 1..75: mol_type = other DNA
acgccacaggtgacgggaattgttactgaagtcactgacaagaataatcagcttattcaaaagggcgaggtgctt

SEQ ID NO: 392019 - DNA, 75 bp, synthetic construct
  source 1..75: mol_type = other DNA
ggcagccaggcggcggtgaatccgttctcggaacgtgacatcgacgatgcgcggcaaaatttcctcgcgcaggat
